United States Patent Application Publication US 2018/0305689 A1 - sequence listing, part 72

SEQ ID NO: 1006616 - RNA, 19 nt, Artificial Sequence
  Description of Artificial Sequence: Synthetic oligonucleotide
  Sense strand starting at position 2693 of SEQ ID NO: 914472
aggugaggaugggauauaa

SEQ ID NO: 1006617 - RNA, 19 nt, Artificial Sequence
  Description of Artificial Sequence: Synthetic oligonucleotide
  Antisense strand to SEQ ID NO: 1006616
uuauaucccauccucaccu

SEQ ID NO: 1006618 - RNA, 19 nt, Artificial Sequence
  Description of Artificial Sequence: Synthetic oligonucleotide
  Sense strand starting at position 3069 of SEQ ID NO: 914472
ucagauuccggaugaacuc

SEQ ID NO: 1006619 - RNA, 19 nt, Artificial Sequence
  Description of Artificial Sequence: Synthetic oligonucleotide
  Antisense strand to SEQ ID NO: 1006618
gaguucauccggaaucuga

SEQ ID NO: 1006620 - RNA, 19 nt, Artificial Sequence
  Description of Artificial Sequence: Synthetic oligonucleotide
  Sense strand starting at position 3084 of SEQ ID NO: 914472
acuccaauacgaugugaaa

SEQ ID NO: 1006621 - RNA, 19 nt, Artificial Sequence
  Description of Artificial Sequence: Synthetic oligonucleotide
  Antisense strand to SEQ ID NO: 1006620
uuucacaucguauuggagu

SEQ ID NO: 1006622 - RNA, 19 nt, Artificial Sequence
  Description of Artificial Sequence: Synthetic oligonucleotide
  Sense strand starting at position 3095 of SEQ ID NO: 914472
augugaaauucuucugacc

SEQ ID NO: 1006623 - RNA, 19 nt, Artificial Sequence
  Description of Artificial Sequence: Synthetic oligonucleotide
  Antisense strand to SEQ ID NO: 1006622
ggucagaagaauuucacau

SEQ ID NO: 1006624 - RNA, 19 nt, Artificial Sequence
  Description of Artificial Sequence: Synthetic oligonucleotide
  Sense strand starting at position 3167 of SEQ ID NO: 914472
gagaauggagucuggcuuu

SEQ ID NO: 1006625 - RNA, 19 nt, Artificial Sequence
  Description of Artificial Sequence: Synthetic oligonucleotide
  Antisense strand to SEQ ID NO: 1006624
aaagccagacuccauucuc

SEQ ID NO: 1006626 - RNA, 19 nt, Artificial Sequence
  Description of Artificial Sequence: Synthetic oligonucleotide
  Sense strand starting at position 3170 of SEQ ID NO: 914472
aauggagucuggcuuuaug

SEQ ID NO: 1006627 - RNA, 19 nt, Artificial Sequence
  Description of Artificial Sequence: Synthetic oligonucleotide
  Antisense strand to SEQ ID NO: 1006626
cauaaagccagacuccauu

SEQ ID NO: 1006628 - RNA, 19 nt, Artificial Sequence
  Description of Artificial Sequence: Synthetic oligonucleotide
  Sense strand starting at position 3288 of SEQ ID NO: 914472
gacaguuuaugccugagau

SEQ ID NO: 1006629 - RNA, 19 nt, Artificial Sequence
  Description of Artificial Sequence: Synthetic oligonucleotide
  Antisense strand to SEQ ID NO: 1006628
aucucaggcauaaacuguc

SEQ ID NO: 1006630 - RNA, 19 nt, Artificial Sequence
  Description of Artificial Sequence: Synthetic oligonucleotide
  Sense strand starting at position 3289 of SEQ ID NO: 914472
acaguuuaugccugagaug

SEQ ID NO: 1006631 - RNA, 19 nt, Artificial Sequence
  Description of Artificial Sequence: Synthetic oligonucleotide
  Antisense strand to SEQ ID NO: 1006630
caucucaggcauaaacugu

SEQ ID NO: 1006632 - RNA, 19 nt, Artificial Sequence
  Description of Artificial Sequence: Synthetic oligonucleotide
  Sense strand starting at position 3290 of SEQ ID NO: 914472
caguuuaugccugagaugu

SEQ ID NO: 1006633 - RNA, 19 nt, Artificial Sequence
  Description of Artificial Sequence: Synthetic oligonucleotide
  Antisense strand to SEQ ID NO: 1006632
acaucucaggcauaaacug

SEQ ID NO: 1006634 - RNA, 19 nt, Artificial Sequence
  Description of Artificial Sequence: Synthetic oligonucleotide
  Sense strand starting at position 3423 of SEQ ID NO: 914472
agauaaccugcucaaguuu

SEQ ID NO: 1006635 - RNA, 19 nt, Artificial Sequence
  Description of Artificial Sequence: Synthetic oligonucleotide
  Antisense strand to SEQ ID NO: 1006634
aaacuugagcagguuaucu

SEQ ID NO: 1006636 - RNA, 19 nt, Artificial Sequence
  Description of Artificial Sequence: Synthetic oligonucleotide
  Sense strand starting at position 3563 of SEQ ID NO: 914472
augcacuaguuguccaaua

SEQ ID NO: 1006637 - RNA, 19 nt, Artificial Sequence
  Description of Artificial Sequence: Synthetic oligonucleotide
  Antisense strand to SEQ ID NO: 1006636
uauuggacaacuagugcau

SEQ ID NO: 1006638 - RNA, 19 nt, Artificial Sequence
  Description of Artificial Sequence: Synthetic oligonucleotide
  Sense strand starting at position 3565 of SEQ ID NO: 914472
gcacuaguuguccaauaua

SEQ ID NO: 1006639 - RNA, 19 nt, Artificial Sequence
  Description of Artificial Sequence: Synthetic oligonucleotide
  Antisense strand to SEQ ID NO: 1006638
uauauuggacaacuagugc

SEQ ID NO: 1006640 - RNA, 19 nt, Artificial Sequence
  Description of Artificial Sequence: Synthetic oligonucleotide
  Sense strand starting at position 3568 of SEQ ID NO: 914472
cuaguuguccaauauaguu

SEQ ID NO: 1006641 - RNA, 19 nt, Artificial Sequence
  Description of Artificial Sequence: Synthetic oligonucleotide
  Antisense strand to SEQ ID NO: 1006640
aacuauauuggacaacuag

SEQ ID NO: 1006642 - RNA, 19 nt, Artificial Sequence
  Description of Artificial Sequence: Synthetic oligonucleotide
  Sense strand starting at position 3626 of SEQ ID NO: 914472
gcaagccaaugauuguaau

SEQ ID NO: 1006643 - RNA, 19 nt, Artificial Sequence
  Description of Artificial Sequence: Synthetic oligonucleotide
  Antisense strand to SEQ ID NO: 1006642
auuacaaucauuggcuugc

SEQ ID NO: 1006644 - RNA, 19 nt, Artificial Sequence
  Description of Artificial Sequence: Synthetic oligonucleotide
  Sense strand starting at position 3639 of SEQ ID NO: 914472
uguaauauauggucguuaa

SEQ ID NO: 1006645 - RNA, 19 nt, Artificial Sequence
  Description of Artificial Sequence: Synthetic oligonucleotide
  Antisense strand to SEQ ID NO: 1006644
uuaacgaccauauauuaca

SEQ ID NO: 1006646 - RNA, 19 nt, Artificial Sequence
  Description of Artificial Sequence: Synthetic oligonucleotide
  Sense strand starting at position 3640 of SEQ ID NO: 914472
guaauauauggucguuaag

SEQ ID NO: 1006647 - RNA, 19 nt, Artificial Sequence
  Description of Artificial Sequence: Synthetic oligonucleotide
  Antisense strand to SEQ ID NO: 1006646
cuuaacgaccauauauuac

SEQ ID NO: 1006648 - RNA, 19 nt, Artificial Sequence
  Description of Artificial Sequence: Synthetic oligonucleotide
  Sense strand starting at position 3642 of SEQ ID NO: 914472
aauauauggucguuaagug

SEQ ID NO: 1006649 - RNA, 19 nt, Artificial Sequence
  Description of Artificial Sequence: Synthetic oligonucleotide
  Antisense strand to SEQ ID NO: 1006648
cacuuaacgaccauauauu

SEQ ID NO: 1006650 - RNA, 19 nt, Artificial Sequence
  Description of Artificial Sequence: Synthetic oligonucleotide
  Sense strand starting at position 3799 of SEQ ID NO: 914472
uguggagagugcuccuaaa

SEQ ID NO: 1006651 - RNA, 19 nt, Artificial Sequence
  Description of Artificial Sequence: Synthetic oligonucleotide
  Antisense strand to SEQ ID NO: 1006650
uuuaggagcacucuccaca

SEQ ID NO: 1006652 - RNA, 19 nt, Artificial Sequence
  Description of Artificial Sequence: Synthetic oligonucleotide
  Sense strand starting at position 3844 of SEQ ID NO: 914472
ucaggaguugccuaagcag

SEQ ID NO: 1006653 - RNA, 19 nt, Artificial Sequence
  Description of Artificial Sequence: Synthetic oligonucleotide
  Antisense strand to SEQ ID NO: 1006652
cugcuuaggcaacuccuga

SEQ ID NO: 1006654 - RNA, 19 nt, Artificial Sequence
  Description of Artificial Sequence: Synthetic oligonucleotide
  Sense strand starting at position 3899 of SEQ ID NO: 914472
uugggcauucuauauccaa

SEQ ID NO: 1006655 - RNA, 19 nt, Artificial Sequence
  Description of Artificial Sequence: Synthetic oligonucleotide
  Antisense strand to SEQ ID NO: 1006654
uuggauauagaaugcccaa

SEQ ID NO: 1006656 - RNA, 19 nt, Artificial Sequence
  Description of Artificial Sequence: Synthetic oligonucleotide
  Sense strand starting at position 3906 of SEQ ID NO: 914472
uucuauauccaaugaccga

SEQ ID NO: 1006657 - RNA, 19 nt, Artificial Sequence
  Description of Artificial Sequence: Synthetic oligonucleotide
  Antisense strand to SEQ ID NO: 1006656
ucggucauuggauauagaa

SEQ ID NO: 1006658 - RNA, 19 nt, Artificial Sequence
  Description of Artificial Sequence: Synthetic oligonucleotide
  Sense strand starting at position 611 of SEQ ID NO: 914473
ggguugggaguucguuaca

SEQ ID NO: 1006659 - RNA, 19 nt, Artificial Sequence
  Description of Artificial Sequence: Synthetic oligonucleotide
  Antisense strand to SEQ ID NO: 1006658
uguaacgaacucccaaccc

SEQ ID NO: 1006660 - RNA, 19 nt, Artificial Sequence
  Description of Artificial Sequence: Synthetic oligonucleotide
  Sense strand starting at position 691 of SEQ ID NO: 914473
cggcguuucccucucgcaa

SEQ ID NO: 1006661 - RNA, 19 nt, Artificial Sequence
  Description of Artificial Sequence: Synthetic oligonucleotide
  Antisense strand to SEQ ID NO: 1006660
uugcgagagggaaacgccg

SEQ ID NO: 1006662 - RNA, 19 nt, Artificial Sequence
  Description of Artificial Sequence: Synthetic oligonucleotide
  Sense strand starting at position 932 of SEQ ID NO: 914473
gggacucgcugcuugaaca

SEQ ID NO: 1006663 - RNA, 19 nt, Artificial Sequence
  Description of Artificial Sequence: Synthetic oligonucleotide
  Antisense strand to SEQ ID NO: 1006662
uguucaagcagcgaguccc

SEQ ID NO: 1006664 - RNA, 19 nt, Artificial Sequence
  Description of Artificial Sequence: Synthetic oligonucleotide
  Sense strand starting at position 933 of SEQ ID NO: 914473
ggacucgcugcuugaacaa

SEQ ID NO: 1006665 - RNA, 19 nt, Artificial Sequence
  Description of Artificial Sequence: Synthetic oligonucleotide
  Antisense strand to SEQ ID NO: 1006664
uuguucaagcagcgagucc

SEQ ID NO: 1006666 - RNA, 19 nt, Artificial Sequence
  Description of Artificial Sequence: Synthetic oligonucleotide
  Sense strand starting at position 1128 of SEQ ID NO: 914473
gagcaaagauggcgcauaa

SEQ ID NO: 1006667 - RNA, 19 nt, Artificial Sequence
  Description of Artificial Sequence: Synthetic oligonucleotide
  Antisense strand to SEQ ID NO: 1006666
uuaugcgccaucuuugcuc

SEQ ID NO: 1006668 - RNA, 19 nt, Artificial Sequence
  Description of Artificial Sequence: Synthetic oligonucleotide
  Sense strand starting at position 1132 of SEQ ID NO: 914473
aaagauggcgcauaauacu

SEQ ID NO: 1006669 - RNA, 19 nt, Artificial Sequence
  Description of Artificial Sequence: Synthetic oligonucleotide
  Antisense strand to SEQ ID NO: 1006668
aguauuaugcgccaucuuu

SEQ ID NO: 1006670 - RNA, 19 nt, Artificial Sequence
  Description of Artificial Sequence: Synthetic oligonucleotide
  Sense strand starting at position 1166 of SEQ ID NO: 914473
ugcauacguguccauggau

SEQ ID NO: 1006671 - RNA, 19 nt, Artificial Sequence
  Description of Artificial Sequence: Synthetic oligonucleotide
  Antisense strand to SEQ ID NO: 1006670
auccauggacacguaugca

SEQ ID NO: 1006672 - RNA, 19 nt, Artificial Sequence
  Description of Artificial Sequence: Synthetic oligonucleotide
  Sense strand starting at position 1169 of SEQ ID NO: 914473
auacguguccauggauauu

SEQ ID NO: 1006673 - RNA, 19 nt, Artificial Sequence
  Description of Artificial Sequence: Synthetic oligonucleotide
  Antisense strand to SEQ ID NO: 1006672
aauauccauggacacguau

SEQ ID NO: 1006674 - RNA, 19 nt, Artificial Sequence
  Description of Artificial Sequence: Synthetic oligonucleotide
  Sense strand starting at position 1172 of SEQ ID NO: 914473
cguguccauggauauuaau

SEQ ID NO: 1006675 - RNA, 19 nt, Artificial Sequence
  Description of Artificial Sequence: Synthetic oligonucleotide
  Antisense strand to SEQ ID NO: 1006674
auuaauauccauggacacg

SEQ ID NO: 1006676 - RNA, 19 nt, Artificial Sequence
  Description of Artificial Sequence: Synthetic oligonucleotide
  Sense strand starting at position 1175 of SEQ ID NO: 914473
guccauggauauuaauuua

SEQ ID NO: 1006677 - RNA, 19 nt, Artificial Sequence
  Description of Artificial Sequence: Synthetic oligonucleotide
  Antisense strand to SEQ ID NO: 1006676
uaaauuaauauccauggac

SEQ ID NO: 1006678 - RNA, 19 nt, Artificial Sequence
  Description of Artificial Sequence: Synthetic oligonucleotide
  Sense strand starting at position 1491 of SEQ ID NO: 914473
aaaguucuagcgggagaga

SEQ ID NO: 1006679 - RNA, 19 nt, Artificial Sequence
  Description of Artificial Sequence: Synthetic oligonucleotide
  Antisense strand to SEQ ID NO: 1006678
ucucucccgcuagaacuuu

SEQ ID NO: 1006680 - RNA, 19 nt, Artificial Sequence
  Description of Artificial Sequence: Synthetic oligonucleotide
  Sense strand starting at position 1492 of SEQ ID NO: 914473
aaguucuagcgggagagaa

SEQ ID NO: 1006681 - RNA, 19 nt, Artificial Sequence
  Description of Artificial Sequence: Synthetic oligonucleotide
  Antisense strand to SEQ ID NO: 1006680
uucucucccgcuagaacuu

SEQ ID NO: 1006682 - RNA, 19 nt, Artificial Sequence
  Description of Artificial Sequence: Synthetic oligonucleotide
  Sense strand starting at position 1988 of SEQ ID NO: 914473
cuguaguccgugugacguu

SEQ ID NO: 1006683 - RNA, 19 nt, Artificial Sequence
  Description of Artificial Sequence: Synthetic oligonucleotide
  Antisense strand to SEQ ID NO: 1006682
aacgucacacggacuacag

SEQ ID NO: 1006684 - RNA, 19 nt, Artificial Sequence
  Description of Artificial Sequence: Synthetic oligonucleotide
  Sense strand starting at position 1989 of SEQ ID NO: 914473
uguaguccgugugacguua

SEQ ID NO: 1006685 - RNA, 19 nt, Artificial Sequence
  Description of Artificial Sequence: Synthetic oligonucleotide
  Antisense strand to SEQ ID NO: 1006684
uaacgucacacggacuaca

SEQ ID NO: 1006686 - RNA, 19 nt, Artificial Sequence
  Description of Artificial Sequence: Synthetic oligonucleotide
  Sense strand starting at position 1997 of SEQ ID NO: 914473
gugugacguuacuguuguu

SEQ ID NO: 1006687 - RNA, 19 nt, Artificial Sequence
  Description of Artificial Sequence: Synthetic oligonucleotide
  Antisense strand to SEQ ID NO: 1006686
aacaacaguaacgucacac

SEQ ID NO: 1006688 - RNA, 19 nt, Artificial Sequence
  Description of Artificial Sequence: Synthetic oligonucleotide
  Sense strand starting at position 2000 of SEQ ID NO: 914473
ugacguuacuguuguuaag

SEQ ID NO: 1006689 - RNA, 19 nt, Artificial Sequence
  Description of Artificial Sequence: Synthetic oligonucleotide
  Antisense strand to SEQ ID NO: 1006688
cuuaacaacaguaacguca

SEQ ID NO: 1006690 - RNA, 19 nt, Artificial Sequence
  Description of Artificial Sequence: Synthetic oligonucleotide
  Sense strand starting at position 2002 of SEQ ID NO: 914473
acguuacuguuguuaagca

SEQ ID NO: 1006691 - RNA, 19 nt, Artificial Sequence
  Description of Artificial Sequence: Synthetic oligonucleotide
  Antisense strand to SEQ ID NO: 1006690
ugcuuaacaacaguaacgu

SEQ ID NO: 1006692 - RNA, 19 nt, Artificial Sequence
  Description of Artificial Sequence: Synthetic oligonucleotide
  Sense strand starting at position 2003 of SEQ ID NO: 914473
cguuacuguuguuaagcaa

SEQ ID NO: 1006693 - RNA, 19 nt, Artificial Sequence
  Description of Artificial Sequence: Synthetic oligonucleotide
  Antisense strand to SEQ ID NO: 1006692
uugcuuaacaacaguaacg

SEQ ID NO: 1006694 - RNA, 19 nt, Artificial Sequence
  Description of Artificial Sequence: Synthetic oligonucleotide
  Sense strand starting at position 2006 of SEQ ID NO: 914473
uacuguuguuaagcaaaga

SEQ ID NO: 1006695 - RNA, 19 nt, Artificial Sequence
  Description of Artificial Sequence: Synthetic oligonucleotide
  Antisense strand to SEQ ID NO: 1006694
ucuuugcuuaacaacagua

SEQ ID NO: 1006696 - RNA, 19 nt, Artificial Sequence
  Description of Artificial Sequence: Synthetic oligonucleotide
  Sense strand starting at position 2498 of SEQ ID NO: 914473
cauuaacacguguaaauug

SEQ ID NO: 1006697 - RNA, 19 nt, Artificial Sequence
  Description of Artificial Sequence: Synthetic oligonucleotide
  Antisense strand to SEQ ID NO: 1006696
caauuuacacguguuaaug

SEQ ID NO: 1006698 - RNA, 19 nt, Artificial Sequence
  Description of Artificial Sequence: Synthetic oligonucleotide
  Sense strand starting at position 2503 of SEQ ID NO: 914473
acacguguaaauugcaaga

SEQ ID NO: 1006699 - RNA, 19 nt, Artificial Sequence
  Description of Artificial Sequence: Synthetic oligonucleotide
  Antisense strand to SEQ ID NO: 1006698
ucuugcaauuuacacgugu

SEQ ID NO: 1006700 - RNA, 19 nt, Artificial Sequence
  Description of Artificial Sequence: Synthetic oligonucleotide
  Sense strand starting at position 2649 of SEQ ID NO: 914473
uagcaugcgcucgcucaaa

SEQ ID NO: 1006701 - RNA, 19 nt, Artificial Sequence
  Description of Artificial Sequence: Synthetic oligonucleotide
  Antisense strand to SEQ ID NO: 1006700
uuugagcgagcgcaugcua

SEQ ID NO: 1006702 - RNA, 19 nt, Artificial Sequence
  Description of Artificial Sequence: Synthetic oligonucleotide
  Sense strand starting at position 2875 of SEQ ID NO: 914473
gagaaacagugaucuccau

SEQ ID NO: 1006703 - RNA, 19 nt, Artificial Sequence
  Description of Artificial Sequence: Synthetic oligonucleotide
  Antisense strand to SEQ ID NO: 1006702
auggagaucacuguuucuc

SEQ ID NO: 1006704 - RNA, 19 nt, Artificial Sequence
  Description of Artificial Sequence: Synthetic oligonucleotide
  Sense strand starting at position 2972 of SEQ ID NO: 914473
gaagguuccuaauugguuu

SEQ ID NO: 1006705 - RNA, 19 nt, Artificial Sequence
  Description of Artificial Sequence: Synthetic oligonucleotide
  Antisense strand to SEQ ID NO: 1006704
aaaccaauuaggaaccuuc

SEQ ID NO: 1006706 - RNA, 19 nt, Artificial Sequence
  Description of Artificial Sequence: Synthetic oligonucleotide
  Sense strand starting at position 3034 of SEQ ID NO: 914473
ggacugaauucgugagcgu

SEQ ID NO: 1006707 - RNA, 19 nt, Artificial Sequence
  Description of Artificial Sequence: Synthetic oligonucleotide
  Antisense strand to SEQ ID NO: 1006706
acgcucacgaauucagucc

SEQ ID NO: 1006708 - RNA, 19 nt, Artificial Sequence
  Description of Artificial Sequence: Synthetic oligonucleotide
  Sense strand starting at position 3035 of SEQ ID NO: 914473
gacugaauucgugagcgug

SEQ ID NO: 1006709 - RNA, 19 nt, Artificial Sequence
  Description of Artificial Sequence: Synthetic oligonucleotide
  Antisense strand to SEQ ID NO: 1006708
cacgcucacgaauucaguc

SEQ ID NO: 1006710 - RNA, 19 nt, Artificial Sequence
  Description of Artificial Sequence: Synthetic oligonucleotide
  Sense strand starting at position 3036 of SEQ ID NO: 914473
acugaauucgugagcguga

SEQ ID NO: 1006711 - RNA, 19 nt, Artificial Sequence
  Description of Artificial Sequence: Synthetic oligonucleotide
  Antisense strand to SEQ ID NO: 1006710
ucacgcucacgaauucagu

SEQ ID NO: 1006712 - RNA, 19 nt, Artificial Sequence
  Description of Artificial Sequence: Synthetic oligonucleotide
  Sense strand starting at position 3134 of SEQ ID NO: 914473
ucgauagguguucgugguu

SEQ ID NO: 1006713 - RNA, 19 nt, Artificial Sequence
  Description of Artificial Sequence: Synthetic oligonucleotide
  Antisense strand to SEQ ID NO: 1006712
aaccacgaacaccuaucga

SEQ ID NO: 1006714 - RNA, 19 nt, Artificial Sequence
  Description of Artificial Sequence: Synthetic oligonucleotide
  Sense strand starting at position 3135 of SEQ ID NO: 914473
cgauagguguucgugguua

SEQ ID NO: 1006715 - RNA, 19 nt, Artificial Sequence
  Description of Artificial Sequence: Synthetic oligonucleotide
  Antisense strand to SEQ ID NO: 1006714
uaaccacgaacaccuaucg

SEQ ID NO: 1006716 - RNA, 19 nt, Artificial Sequence
  Description of Artificial Sequence: Synthetic oligonucleotide
  Sense strand starting at position 3137 of SEQ ID NO: 914473
auagguguucgugguuaca

SEQ ID NO: 1006717 - RNA, 19 nt, Artificial Sequence
  Description of Artificial Sequence: Synthetic oligonucleotide
  Antisense strand to SEQ ID NO: 1006716
uguaaccacgaacaccuau

SEQ ID NO: 1006718 - RNA, 19 nt, Artificial Sequence
  Description of Artificial Sequence: Synthetic oligonucleotide
  Sense strand starting at position 3139 of SEQ ID NO: 914473
agguguucgugguuacaug

SEQ ID NO: 1006719 - RNA, 19 nt, Artificial Sequence
  Description of Artificial Sequence: Synthetic oligonucleotide
  Antisense strand to SEQ ID NO: 1006718
cauguaaccacgaacaccu

SEQ ID NO: 1006720 - RNA, 19 nt, Artificial Sequence
  Description of Artificial Sequence: Synthetic oligonucleotide
  Sense strand starting at position 3140 of SEQ ID NO: 914473
gguguucgugguuacauga

SEQ ID NO: 1006721 - RNA, 19 nt, Artificial Sequence
  Description of Artificial Sequence: Synthetic oligonucleotide
  Antisense strand to SEQ ID NO: 1006720
ucauguaaccacgaacacc

SEQ ID NO: 1006722 - RNA, 19 nt, Artificial Sequence
  Description of Artificial Sequence: Synthetic oligonucleotide
  Sense strand starting at position 3230 of SEQ ID NO: 914473
cugucucuuuggugcauua

SEQ ID NO: 1006723 - RNA, 19 nt, Artificial Sequence
  Description of Artificial Sequence: Synthetic oligonucleotide
  Antisense strand to SEQ ID NO: 1006722
uaaugcaccaaagagacag

SEQ ID NO: 1006724 - RNA, 19 nt, Artificial Sequence
  Description of Artificial Sequence: Synthetic oligonucleotide
  Sense strand starting at position 3232 of SEQ ID NO: 914473
gucucuuuggugcauuaaa

SEQ ID NO: 1006725 - RNA, 19 nt, Artificial Sequence
  Description of Artificial Sequence: Synthetic oligonucleotide
  Antisense strand to SEQ ID NO: 1006724
uuuaaugcaccaaagagac

SEQ ID NO: 1006726 - RNA, 19 nt, Artificial Sequence
  Description of Artificial Sequence: Synthetic oligonucleotide
  Sense strand starting at position 3366 of SEQ ID NO: 914473
accguacccucuuaacagu

SEQ ID NO: 1006727 - RNA, 19 nt, Artificial Sequence
  Description of Artificial Sequence: Synthetic oligonucleotide
  Antisense strand to SEQ ID NO: 1006726
acuguuaagaggguacggu

SEQ ID NO: 1006728 - RNA, 19 nt, Artificial Sequence
  Description of Artificial Sequence: Synthetic oligonucleotide
  Sense strand starting at position 3369 of SEQ ID NO: 914473
guacccucuuaacaguaaa

SEQ ID NO: 1006729 - RNA, 19 nt, Artificial Sequence
  Description of Artificial Sequence: Synthetic oligonucleotide
  Antisense strand to SEQ ID NO: 1006728
uuuacuguuaagaggguac

SEQ ID NO: 1006730 - RNA, 19 nt, Artificial Sequence
  Description of Artificial Sequence: Synthetic oligonucleotide
  Sense strand starting at position 3958 of SEQ ID NO: 914473
cuggaauuagcaugagcca

SEQ ID NO: 1006731 - RNA, 19 nt, Artificial Sequence
  Description of Artificial Sequence: Synthetic oligonucleotide
  Antisense strand to SEQ ID NO: 1006730
uggcucaugcuaauuccag

SEQ ID NO: 1006732 - RNA, 19 nt, Artificial Sequence
  Description of Artificial Sequence: Synthetic oligonucleotide
  Sense strand starting at position 3959 of SEQ ID NO: 914473
uggaauuagcaugagccaa

SEQ ID NO: 1006733 - RNA, 19 nt, Artificial Sequence
  Description of Artificial Sequence: Synthetic oligonucleotide
  Antisense strand to SEQ ID NO: 1006732
uuggcucaugcuaauucca

SEQ ID NO: 1006734 - RNA, 19 nt, Artificial Sequence
  Description of Artificial Sequence: Synthetic oligonucleotide
  Sense strand starting at position 33 of SEQ ID NO: 914474
uuguauuaacucgguuacu

SEQ ID NO: 1006735 - RNA, 19 nt, Artificial Sequence
  Description of Artificial Sequence: Synthetic oligonucleotide
  Antisense strand to SEQ ID NO: 1006734
aguaaccgaguuaauacaa

SEQ ID NO: 1006736 - RNA, 19 nt, Artificial Sequence
  Description of Artificial Sequence: Synthetic oligonucleotide
  Sense strand starting at position 34 of SEQ ID NO: 914474
uguauuaacucgguuacuc

SEQ ID NO: 1006737 - RNA, 19 nt, Artificial Sequence
  Description of Artificial Sequence: Synthetic oligonucleotide
  Antisense strand to SEQ ID NO: 1006736
gaguaaccgaguuaauaca

SEQ ID NO: 1006738 - RNA, 19 nt, Artificial Sequence
  Description of Artificial Sequence: Synthetic oligonucleotide
  Sense strand starting at position 133 of SEQ ID NO: 914474
caugaagucuuagugccau

SEQ ID NO: 1006739 - RNA, 19 nt, Artificial Sequence
  Description of Artificial Sequence: Synthetic oligonucleotide
  Antisense strand to SEQ ID NO: 1006738
auggcacuaagacuucaug

SEQ ID NO: 1006740 - RNA, 19 nt, Artificial Sequence
  Description of Artificial Sequence: Synthetic oligonucleotide
  Sense strand starting at position 144 of SEQ ID NO: 914474
agugccauuaaguggcaaa

SEQ ID NO: 1006741 - RNA, 19 nt, Artificial Sequence
  Description of Artificial Sequence: Synthetic oligonucleotide
  Antisense strand to SEQ ID NO: 1006740
uuugccacuuaauggcacu

SEQ ID NO: 1006742 - RNA, 19 nt, Artificial Sequence
  Description of Artificial Sequence: Synthetic oligonucleotide
  Sense strand starting at position 167 of SEQ ID NO: 914474
ggguuugaacucuagagcu

SEQ ID NO: 1006743 - RNA, 19 nt, Artificial Sequence
  Description of Artificial Sequence: Synthetic oligonucleotide
  Antisense strand to SEQ ID NO: 1006742
agcucuagaguucaaaccc

SEQ ID NO: 1006744 - RNA, 19 nt, Artificial Sequence
  Description of Artificial Sequence: Synthetic oligonucleotide
  Sense strand starting at position 169 of SEQ ID NO: 914474
guuugaacucuagagcuca

SEQ ID NO: 1006745 - RNA, 19 nt, Artificial Sequence
  Description of Artificial Sequence: Synthetic oligonucleotide
  Antisense strand to SEQ ID NO: 1006744
ugagcucuagaguucaaac

SEQ ID NO: 1006746 - RNA, 19 nt, Artificial Sequence
  Description of Artificial Sequence: Synthetic oligonucleotide
  Sense strand starting at position 268 of SEQ ID NO: 914474
ugcucuuuccacgaagcau

SEQ ID NO: 1006747 - RNA, 19 nt, Artificial Sequence
  Description of Artificial Sequence: Synthetic oligonucleotide
  Antisense strand to SEQ ID NO: 1006746
augcuucguggaaagagca

SEQ ID NO: 1006748 - RNA, 19 nt, Artificial Sequence
  Description of Artificial Sequence: Synthetic oligonucleotide
  Sense strand starting at position 345 of SEQ ID NO: 914474
gugccugauacccauguga

SEQ ID NO: 1006749 - RNA, 19 nt, Artificial Sequence
  Description of Artificial Sequence: Synthetic oligonucleotide
  Antisense strand to SEQ ID NO: 1006748
ucacauggguaucaggcac

SEQ ID NO: 1006750 - RNA, 19 nt, Artificial Sequence
  Description of Artificial Sequence: Synthetic oligonucleotide
  Sense strand starting at position 347 of SEQ ID NO: 914474
gccugauacccaugugaac

SEQ ID NO: 1006751 - RNA, 19 nt, Artificial Sequence
  Description of Artificial Sequence: Synthetic oligonucleotide
  Antisense strand to SEQ ID NO: 1006750
guucacauggguaucaggc

SEQ ID NO: 1006752 - RNA, 19 nt, Artificial Sequence
  Description of Artificial Sequence: Synthetic oligonucleotide
  Sense strand starting at position 403 of SEQ ID NO: 914474
ugccgaaugacugggugaa

SEQ ID NO: 1006753 - RNA, 19 nt, Artificial Sequence
  Description of Artificial Sequence: Synthetic oligonucleotide
  Antisense strand to SEQ ID NO: 1006752
uucacccagucauucggca

SEQ ID NO: 1006754 - RNA, 19 nt, Artificial Sequence
  Description of Artificial Sequence: Synthetic oligonucleotide
  Sense strand starting at position 716 of SEQ ID NO: 914474
ugagccuggccuggauaaa

SEQ ID NO: 1006755 - RNA, 19 nt, Artificial Sequence
  Description of Artificial Sequence: Synthetic oligonucleotide
  Antisense strand to SEQ ID NO: 1006754
uuuauccaggccaggcuca

SEQ ID NO: 1006756 - RNA, 19 nt, Artificial Sequence
  Description of Artificial Sequence: Synthetic oligonucleotide
  Sense strand starting at position 780 of SEQ ID NO: 914474
ggcucuaccuuuccagauc

SEQ ID NO: 1006757 - RNA, 19 nt, Artificial Sequence
  Description of Artificial Sequence: Synthetic oligonucleotide
  Antisense strand to SEQ ID NO: 1006756
gaucuggaaagguagagcc

SEQ ID NO: 1006758 - RNA, 19 nt, Artificial Sequence
  Description of Artificial Sequence: Synthetic oligonucleotide
  Sense strand starting at position 1183 of SEQ ID NO: 914474
cuguuugcuuugucaagau

SEQ ID NO: 1006759 - RNA, 19 nt, Artificial Sequence
  Description of Artificial Sequence: Synthetic oligonucleotide
  Antisense strand to SEQ ID NO: 1006758
aucuugacaaagcaaacag

SEQ ID NO: 1006760 - RNA, 19 nt, Artificial Sequence
  Description of Artificial Sequence: Synthetic oligonucleotide
  Sense strand starting at position 1187 of SEQ ID NO: 914474
uugcuuugucaagauuaug

SEQ ID NO: 1006761 - RNA, 19 nt, Artificial Sequence
  Description of Artificial Sequence: Synthetic oligonucleotide
  Antisense strand to SEQ ID NO: 1006760
cauaaucuugacaaagcaa

SEQ ID NO: 1006762 - RNA, 19 nt, Artificial Sequence
  Description of Artificial Sequence: Synthetic oligonucleotide
  Sense strand starting at position 1198 of SEQ ID NO: 914474
agauuauguuguuucccaa

SEQ ID NO: 1006763 - RNA, 19 nt, Artificial Sequence
  Description of Artificial Sequence: Synthetic oligonucleotide
  Antisense strand to SEQ ID NO: 1006762
uugggaaacaacauaaucu

SEQ ID NO: 1006764 - RNA, 19 nt, Artificial Sequence
  Description of Artificial Sequence: Synthetic oligonucleotide
  Sense strand starting at position 1201 of SEQ ID NO: 914474
uuauguuguuucccaagca

SEQ ID NO: 1006765 - RNA, 19 nt, Artificial Sequence
  Description of Artificial Sequence: Synthetic oligonucleotide
  Antisense strand to SEQ ID NO: 1006764
ugcuugggaaacaacauaa

SEQ ID NO: 1006766 - RNA, 19 nt, Artificial Sequence
  Description of Artificial Sequence: Synthetic oligonucleotide
  Sense strand starting at position 1422 of SEQ ID NO: 914474
gggaguaggguucgccuaa

SEQ ID NO: 1006767 - RNA, 19 nt, Artificial Sequence
  Description of Artificial Sequence: Synthetic oligonucleotide
  Antisense strand to SEQ ID NO: 1006766
uuaggcgaacccuacuccc

SEQ ID NO: 1006768 - RNA, 19 nt, Artificial Sequence
  Description of Artificial Sequence: Synthetic oligonucleotide
  Sense strand starting at position 1423 of SEQ ID NO: 914474
ggaguaggguucgccuaau

SEQ ID NO: 1006769 - RNA, 19 nt, Artificial Sequence
  Description of Artificial Sequence: Synthetic oligonucleotide
  Antisense strand to SEQ ID NO: 1006768
auuaggcgaacccuacucc

SEQ ID NO: 1006770 - RNA, 19 nt, Artificial Sequence
  Description of Artificial Sequence: Synthetic oligonucleotide
  Sense strand starting at position 1469 of SEQ ID NO: 914474
ucuggacugucugcagaaa

SEQ ID NO: 1006771 - RNA, 19 nt, Artificial Sequence
  Description of Artificial Sequence: Synthetic oligonucleotide
  Antisense strand to SEQ ID NO: 1006770
uuucugcagacaguccaga

SEQ ID NO: 1006772 - RNA, 19 nt, Artificial Sequence
  Description of Artificial Sequence: Synthetic oligonucleotide
  Sense strand starting at position 2443 of SEQ ID NO: 914474
gacuacgucucaucaaggu

SEQ ID NO: 1006773 - RNA, 19 nt, Artificial Sequence
  Description of Artificial Sequence: Synthetic oligonucleotide
  Antisense strand to SEQ ID NO: 1006772
accuugaugagacguaguc

SEQ ID NO: 1006774 - RNA, 19 nt, Artificial Sequence
  Description of Artificial Sequence: Synthetic oligonucleotide
  Sense strand starting at position 2910 of SEQ ID NO: 914474
ccaccagaguuucucaaug

SEQ ID NO: 1006775 - RNA, 19 nt, Artificial Sequence
  Description of Artificial Sequence: Synthetic oligonucleotide
  Antisense strand to SEQ ID NO: 1006774
cauugagaaacucuggugg

SEQ ID NO: 1006776 - RNA, 19 nt, Artificial Sequence
  Description of Artificial Sequence: Synthetic oligonucleotide
  Sense strand starting at position 2915 of SEQ ID NO: 914474
agaguuucucaaugagcca

SEQ ID NO: 1006777 - RNA, 19 nt, Artificial Sequence
  Description of Artificial Sequence: Synthetic oligonucleotide
  Antisense strand to SEQ ID NO: 1006776
uggcucauugagaaacucu

SEQ ID NO: 1006778 - RNA, 19 nt, Artificial Sequence
  Description of Artificial Sequence: Synthetic oligonucleotide
  Sense strand starting at position 2962 of SEQ ID NO: 914474
aguccaucccucgguugaa

SEQ ID NO: 1006779 - RNA, 19 nt, Artificial Sequence
  Description of Artificial Sequence: Synthetic oligonucleotide
  Antisense strand to SEQ ID NO: 1006778
uucaaccgagggauggacu

SEQ ID NO: 1006780 - RNA, 19 nt, Artificial Sequence
  Description of Artificial Sequence: Synthetic oligonucleotide
  Sense strand starting at position 3001 of SEQ ID NO: 914474
ggcugcccuccauaggaaa

SEQ ID NO: 1006781 - RNA, 19 nt, Artificial Sequence
  Description of Artificial Sequence: Synthetic oligonucleotide
  Antisense strand to SEQ ID NO: 1006780
uuuccuauggagggcagcc

SEQ ID NO: 1006782 - RNA, 19 nt, Artificial Sequence
  Description of Artificial Sequence: Synthetic oligonucleotide
  Sense strand starting at position 3274 of SEQ ID NO: 914474
ugaagcaguugauaaagaa

SEQ ID NO: 1006783 - RNA, 19 nt, Artificial Sequence
  Description of Artificial Sequence: Synthetic oligonucleotide
  Antisense strand to SEQ ID NO: 1006782
uucuuuaucaacugcuuca

SEQ ID NO: 1006784 - RNA, 19 nt, Artificial Sequence
  Description of Artificial Sequence: Synthetic oligonucleotide
  Sense strand starting at position 3397 of SEQ ID NO: 914474
uggagaagauguugaggaa

SEQ ID NO: 1006785 - RNA, 19 nt, Artificial Sequence
  Description of Artificial Sequence: Synthetic oligonucleotide
  Antisense strand to SEQ ID NO: 1006784
uuccucaacaucuucucca

SEQ ID NO: 1006786 - RNA, 19 nt, Artificial Sequence
  Description of Artificial Sequence: Synthetic oligonucleotide
  Sense strand starting at position 3490 of SEQ ID NO: 914474
ugaccauuacuuugaagcu

SEQ ID NO: 1006787 - RNA, 19 nt, Artificial Sequence
  Description of Artificial Sequence: Synthetic oligonucleotide
  Antisense strand to SEQ ID NO: 1006786
agcuucaaaguaaugguca

SEQ ID NO: 1006788 - RNA, 19 nt, Artificial Sequence
  Description of Artificial Sequence: Synthetic oligonucleotide
  Sense strand starting at position 3602 of SEQ ID NO: 914474
uaaccaucuggcuggugaa

SEQ ID NO: 1006789 - RNA, 19 nt, Artificial Sequence
  Description of Artificial Sequence: Synthetic oligonucleotide
  Antisense strand to SEQ ID NO: 1006788
uucaccagccagaugguua

SEQ ID NO: 1006790 - RNA, 19 nt, Artificial Sequence
  Description of Artificial Sequence: Synthetic oligonucleotide
  Sense strand starting at position 3647 of SEQ ID NO: 914474
ggauauugauaacuuuguu

SEQ ID NO: 1006791 - RNA, 19 nt, Artificial Sequence
  Description of Artificial Sequence: Synthetic oligonucleotide
  Antisense strand to SEQ ID NO: 1006790
aacaaaguuaucaauaucc

SEQ ID NO: 1006792 - RNA, 19 nt, Artificial Sequence
  Description of Artificial Sequence: Synthetic oligonucleotide
  Sense strand starting at position 3654 of SEQ ID NO: 914474
gauaacuuuguuggcagua

SEQ ID NO: 1006793 - RNA, 19 nt, Artificial Sequence
  Description of Artificial Sequence: Synthetic oligonucleotide
  Antisense strand to SEQ ID NO: 1006792
uacugccaacaaaguuauc

SEQ ID NO: 1006794 - RNA, 19 nt, Artificial Sequence
  Description of Artificial Sequence: Synthetic oligonucleotide
  Sense strand starting at position 3695 of SEQ ID NO: 914474
guugaugagccaugucucu

SEQ ID NO: 1006795 - RNA, 19 nt, Artificial Sequence
  Description of Artificial Sequence: Synthetic oligonucleotide
  Antisense strand to SEQ ID NO: 1006794
agagacauggcucaucaac

SEQ ID NO: 1006796 - RNA, 19 nt, Artificial Sequence
  Description of Artificial Sequence: Synthetic oligonucleotide
  Sense strand starting at position 3700 of SEQ ID NO: 914474
ugagccaugucucuucuga

SEQ ID NO: 1006797 - RNA, 19 nt, Artificial Sequence
  Description of Artificial Sequence: Synthetic oligonucleotide
  Antisense strand to SEQ ID NO: 1006796
ucagaagagacauggcuca

SEQ ID NO: 1006798 - RNA, 19 nt, Artificial Sequence
  Description of Artificial Sequence: Synthetic oligonucleotide
  Sense strand starting at position 3707 of SEQ ID NO: 914474
ugucucuucugaccacuua

SEQ ID NO: 1006799 - RNA, 19 nt, Artificial Sequence
  Description of Artificial Sequence: Synthetic oligonucleotide
  Antisense strand to SEQ ID NO: 1006798
uaaguggucagaagagaca

SEQ ID NO: 1006800 - RNA, 19 nt, Artificial Sequence
  Description of Artificial Sequence: Synthetic oligonucleotide
  Sense strand starting at position 3762 of SEQ ID NO: 914474
gauaaagacuggucgaccu

SEQ ID NO: 1006801 - RNA, 19 nt, Artificial Sequence
  Description of Artificial Sequence: Synthetic oligonucleotide
  Antisense strand to SEQ ID NO: 1006800
aggucgaccagucuuuauc

SEQ ID NO: 1006802 - RNA, 19 nt, Artificial Sequence
  Description of Artificial Sequence: Synthetic oligonucleotide
  Sense strand starting at position 3790 of SEQ ID NO: 914474
cagccuuucuacgucaaga

SEQ ID NO: 1006803 - RNA, 19 nt, Artificial Sequence
  Description of Artificial Sequence: Synthetic oligonucleotide
  Antisense strand to SEQ ID NO: 1006802
ucuugacguagaaaggcug

SEQ ID NO: 1006804 - RNA, 19 nt, Artificial Sequence
  Description of Artificial Sequence: Synthetic oligonucleotide
  Sense strand starting at position 3792 of SEQ ID NO: 914474
gccuuucuacgucaagaaa

SEQ ID NO: 1006805 - RNA, 19 nt, Artificial Sequence
  Description of Artificial Sequence: Synthetic oligonucleotide
  Antisense strand to SEQ ID NO: 1006804
uuucuugacguagaaaggc

SEQ ID NO: 1006806 - RNA, 19 nt, Artificial Sequence
  Description of Artificial Sequence: Synthetic oligonucleotide
  Sense strand starting at position 3840 of SEQ ID NO: 914474
guuggacuuuacucccaga

SEQ ID NO: 1006807 - RNA, 19 nt, Artificial Sequence
  Description of Artificial Sequence: Synthetic oligonucleotide
  Antisense strand to SEQ ID NO: 1006806
ucugggaguaaaguccaac

SEQ ID NO: 1006808 - RNA, 19 nt, Artificial Sequence
  Description of Artificial Sequence: Synthetic oligonucleotide
  Sense strand starting at position 3843 of SEQ ID NO: 914474
ggacuuuacucccagagag

SEQ ID NO: 1006809 - RNA, 19 nt, Artificial Sequence
  Description of Artificial Sequence: Synthetic oligonucleotide
  Antisense strand to SEQ ID NO: 1006808
cucucugggaguaaagucc

SEQ ID NO: 1006810 - RNA, 19 nt, Artificial Sequence
  Description of Artificial Sequence: Synthetic oligonucleotide
  Sense strand starting at position 3875 of SEQ ID NO: 914474
guccaauacuaagaagaug

SEQ ID NO: 1006811 - RNA, 19 nt, Artificial Sequence
  Description of Artificial Sequence: Synthetic oligonucleotide
  Antisense strand to SEQ ID NO: 1006810
caucuucuuaguauuggac

SEQ ID NO: 1006812 - RNA, 19 nt, Artificial Sequence
  Description of Artificial Sequence: Synthetic oligonucleotide
  Sense strand starting at position 3973 of SEQ ID NO: 914474
ccaccuugucuguggauga

SEQ ID NO: 1006813 - RNA, 19 nt, Artificial Sequence
  Description of Artificial Sequence: Synthetic oligonucleotide
  Antisense strand to SEQ ID NO: 1006812
ucauccacagacaaggugg

SEQ ID NO: 1006814 - RNA, 19 nt, Artificial Sequence
  Description of Artificial Sequence: Synthetic oligonucleotide
  Sense strand starting at position 22 of SEQ ID NO: 914475
gccuguuuacggucuguua

SEQ ID NO: 1006815 - RNA, 19 nt, Artificial Sequence
  Description of Artificial Sequence: Synthetic oligonucleotide
  Antisense strand to SEQ ID NO: 1006814
uaacagaccguaaacaggc

SEQ ID NO: 1006816 - RNA, 19 nt, Artificial Sequence
  Description of Artificial Sequence: Synthetic oligonucleotide
  Sense strand starting at position 24 of SEQ ID NO: 914475
cuguuuacggucuguuaaa

SEQ ID NO: 1006817 - RNA, 19 nt, Artificial Sequence
  Description of Artificial Sequence: Synthetic oligonucleotide
  Antisense strand to SEQ ID NO: 1006816
uuuaacagaccguaaacag

SEQ ID NO: 1006818 - RNA, 19 nt, Artificial Sequence
  Description of Artificial Sequence: Synthetic oligonucleotide
  Sense strand starting at position 25 of SEQ ID NO: 914475
uguuuacggucuguuaaag

SEQ ID NO: 1006819 - RNA, 19 nt, Artificial Sequence
  Description of Artificial Sequence: Synthetic oligonucleotide
  Antisense strand to SEQ ID NO: 1006818
cuuuaacagaccguaaaca

SEQ ID NO: 1006820 - RNA, 19 nt, Artificial Sequence
  Description of Artificial Sequence: Synthetic oligonucleotide
  Sense strand starting at position 843 of SEQ ID NO: 914475
gacgacauuucgggacagu

SEQ ID NO: 1006821 - RNA, 19 nt, Artificial Sequence
  Description of Artificial Sequence: Synthetic oligonucleotide
  Antisense strand to SEQ ID NO: 1006820
acugucccgaaaugucguc

SEQ ID NO: 1006822 - RNA, 19 nt, Artificial Sequence
  Description of Artificial Sequence: Synthetic oligonucleotide
  Sense strand starting at position 1207 of SEQ ID NO: 914475
ccaggcuuucuggagaagu

SEQ ID NO: 1006823 - RNA, 19 nt, Artificial Sequence
  Description of Artificial Sequence: Synthetic oligonucleotide
  Antisense strand to SEQ ID NO: 1006822
acuucuccagaaagccugg

SEQ ID NO: 1006824 - RNA, 19 nt, Artificial Sequence
  Description of Artificial Sequence: Synthetic oligonucleotide
  Sense strand starting at position 1224 of SEQ ID NO: 914475
guugguucugggcacagau

SEQ ID NO: 1006825 - RNA, 19 nt, Artificial Sequence
  Description of Artificial Sequence: Synthetic oligonucleotide
  Antisense strand to SEQ ID NO: 1006824
aucugugcccagaaccaac

SEQ ID NO: 1006826 - RNA, 19 nt, Artificial Sequence
  Description of Artificial Sequence: Synthetic oligonucleotide
  Sense strand starting at position 1337 of SEQ ID NO: 914475
uccagaaauaguugucugu

SEQ ID NO: 1006827 - RNA, 19 nt, Artificial Sequence
  Description of Artificial Sequence: Synthetic oligonucleotide
  Antisense strand to SEQ ID NO: 1006826
acagacaacuauuucugga

SEQ ID NO: 1006828 - RNA, 19 nt, Artificial Sequence
  Description of Artificial Sequence: Synthetic oligonucleotide
  Sense strand starting at position 1339 of SEQ ID NO: 914475
cagaaauaguugucuguuc

SEQ ID NO: 1006829 - RNA, 19 nt, Artificial Sequence
  Description of Artificial Sequence: Synthetic oligonucleotide
  Antisense strand to SEQ ID NO: 1006828
gaacagacaacuauuucug

SEQ ID NO: 1006830 - RNA, 19 nt, Artificial Sequence
  Description of Artificial Sequence: Synthetic oligonucleotide
  Sense strand starting at position 1341 of SEQ ID NO: 914475
gaaauaguugucuguuccu

SEQ ID NO: 1006831 - RNA, 19 nt, Artificial Sequence
  Description of Artificial Sequence: Synthetic oligonucleotide
  Antisense strand to SEQ ID NO: 1006830
aggaacagacaacuauuuc

SEQ ID NO: 1006832 - RNA, 19 nt, Artificial Sequence
  Description of Artificial Sequence: Synthetic oligonucleotide
  Sense strand starting at position 1567 of SEQ ID NO: 914475
ugccguguccagggacaau

SEQ ID NO: 1006833 - RNA, 19 nt, Artificial Sequence
  Description of Artificial Sequence: Synthetic oligonucleotide
  Antisense strand to SEQ ID NO: 1006832
auugucccuggacacggca

SEQ ID NO: 1006834 - RNA, 19 nt, Artificial Sequence
  Description of Artificial Sequence: Synthetic oligonucleotide
  Sense strand starting at position 3501 of SEQ ID NO: 914475
aagagaggugucuggcuga

SEQ ID NO: 1006835 - RNA, 19 nt, Artificial Sequence
  Description of Artificial Sequence: Synthetic oligonucleotide
  Antisense strand to SEQ ID NO: 1006834
ucagccagacaccucucuu

SEQ ID NO: 1006836 - RNA, 19 nt, Artificial Sequence
  Description of Artificial Sequence: Synthetic oligonucleotide
  Sense strand starting at position 32 of SEQ ID NO: 914476
gggccaucuucccuuggga

SEQ ID NO: 1006837 - RNA, 19 nt, Artificial Sequence
  Description of Artificial Sequence: Synthetic oligonucleotide
  Antisense strand to SEQ ID NO: 1006836
ucccaagggaagauggccc

SEQ ID NO: 1006838 - RNA, 19 nt, Artificial Sequence
  Description of Artificial Sequence: Synthetic oligonucleotide
  Sense strand starting at position 34 of SEQ ID NO: 914476
gccaucuucccuugggauu

SEQ ID NO: 1006839 - RNA, 19 nt, Artificial Sequence
  Description of Artificial Sequence: Synthetic oligonucleotide
  Antisense strand to SEQ ID NO: 1006838
aaucccaagggaagauggc

SEQ ID NO: 1006840 - RNA, 19 nt, Artificial Sequence
  Description of Artificial Sequence: Synthetic oligonucleotide
  Sense strand starting at position 373 of SEQ ID NO: 914476
ccgggugucuggaaacaug

SEQ ID NO: 1006841 - RNA, 19 nt, Artificial Sequence
  Description of Artificial Sequence: Synthetic oligonucleotide
  Antisense strand to SEQ ID NO: 1006840
cauguuuccagacacccgg

SEQ ID NO: 1006842 - RNA, 19 nt, Artificial Sequence
  Description of Artificial Sequence: Synthetic oligonucleotide
  Sense strand starting at position 406 of SEQ ID NO: 914476
agggaagagcuccggauau

SEQ ID NO: 1006843 - RNA, 19 nt, Artificial Sequence
  Description of Artificial Sequence: Synthetic oligonucleotide
  Antisense strand to SEQ ID NO: 1006842
auauccggagcucuucccu

SEQ ID NO: 1006844 - RNA, 19 nt, Artificial Sequence
  Description of Artificial Sequence: Synthetic oligonucleotide
  Sense strand starting at position 421 of SEQ ID NO: 914476
auauuugguugagaucaua

SEQ ID NO: 1006845 - RNA, 19 nt, Artificial Sequence
  Description of Artificial Sequence: Synthetic oligonucleotide
  Antisense strand to SEQ ID NO: 1006844
uaugaucucaaccaaauau

SEQ ID NO: 1006846 - RNA, 19 nt, Artificial Sequence
  Description of Artificial Sequence: Synthetic oligonucleotide
  Sense strand starting at position 452 of SEQ ID NO: 914476
gcaggaggcugugcugaau

SEQ ID NO: 1006847 - RNA, 19 nt, Artificial Sequence
  Description of Artificial Sequence: Synthetic oligonucleotide
  Antisense strand to SEQ ID NO: 1006846
auucagcacagccuccugc

SEQ ID NO: 1006848 - RNA, 19 nt, Artificial Sequence
  Description of Artificial Sequence: Synthetic oligonucleotide
  Sense strand starting at position 458 of SEQ ID NO: 914476
ggcugugcugaaugagaga

SEQ ID NO: 1006849 - RNA, 19 nt, Artificial Sequence
  Description of Artificial Sequence: Synthetic oligonucleotide
  Antisense strand to SEQ ID NO: 1006848
ucucucauucagcacagcc

SEQ ID NO: 1006850 - RNA, 19 nt, Artificial Sequence
  Description of Artificial Sequence: Synthetic oligonucleotide
  Sense strand starting at position 479 of SEQ ID NO: 914476
gagagaauaccggguuggu

SEQ ID NO: 1006851 - RNA, 19 nt, Artificial Sequence
  Description of Artificial Sequence: Synthetic oligonucleotide
  Antisense strand to SEQ ID NO: 1006850
accaacccgguauucucuc

SEQ ID NO: 1006852 - RNA, 19 nt, Artificial Sequence
  Description of Artificial Sequence: Synthetic oligonucleotide
  Sense strand starting at position 503 of SEQ ID NO: 914476
gaaggcagaucuggauagu

SEQ ID NO: 1006853 - RNA, 19 nt, Artificial Sequence
  Description of Artificial Sequence: Synthetic oligonucleotide
  Antisense strand to SEQ ID NO: 1006852
acuauccagaucugccuuc

SEQ ID NO: 1006854 - RNA, 19 nt, Artificial Sequence
  Description of Artificial Sequence: Synthetic oligonucleotide
  Sense strand starting at position 514 of SEQ ID NO: 914476
uggauaguuggcugcgauc

SEQ ID NO: 1006855 - RNA, 19 nt, Artificial Sequence
  Description of Artificial Sequence: Synthetic oligonucleotide
  Antisense strand to SEQ ID NO: 1006854
gaucgcagccaacuaucca

SEQ ID NO: 1006856 - RNA, 19 nt, Artificial Sequence
  Description of Artificial Sequence: Synthetic oligonucleotide
  Sense strand starting at position 738 of SEQ ID NO: 914476
cugggaagcucggucuaua

SEQ ID NO: 1006857 - RNA, 19 nt, Artificial Sequence
  Description of Artificial Sequence: Synthetic oligonucleotide
  Antisense strand to SEQ ID NO: 1006856
uauagaccgagcuucccag

SEQ ID NO: 1006858 - RNA, 19 nt, Artificial Sequence
  Description of Artificial Sequence: Synthetic oligonucleotide
  Sense strand starting at position 959 of SEQ ID NO: 914476
ucaugucccucgcuacaau

SEQ ID NO: 1006859 - RNA, 19 nt, Artificial Sequence
  Description of Artificial Sequence: Synthetic oligonucleotide
  Antisense strand to SEQ ID NO: 1006858
auuguagcgagggacauga

SEQ ID NO: 1006860 - RNA, 19 nt, Artificial Sequence
  Description of Artificial Sequence: Synthetic oligonucleotide
  Sense strand starting at position 1036 of SEQ ID NO: 914476
gcacucaucuguguccaca

SEQ ID NO: 1006861 - RNA, 19 nt, Artificial Sequence
  Description of Artificial Sequence: Synthetic oligonucleotide
  Antisense strand to SEQ ID NO: 1006860
uguggacacagaugagugc

SEQ ID NO: 1006862 - RNA, 19 nt, Artificial Sequence
  Description of Artificial Sequence: Synthetic oligonucleotide
  Sense strand starting at position 1409 of SEQ ID NO: 914476
cacucaaacucuguggaga

SEQ ID NO: 1006863 - RNA, 19 nt, Artificial Sequence
  Description of Artificial Sequence: Synthetic oligonucleotide
  Antisense strand to SEQ ID NO: 1006862
ucuccacagaguuugagug

SEQ ID NO: 1006864 - RNA, 19 nt, Artificial Sequence
  Description of Artificial Sequence: Synthetic oligonucleotide
  Sense strand starting at position 1431 of SEQ ID NO: 914476
gguggaagggcgugguaua

SEQ ID NO: 1006865 - RNA, 19 nt, Artificial Sequence
  Description of Artificial Sequence: Synthetic oligonucleotide
  Antisense strand to SEQ ID NO: 1006864
uauaccacgcccuuccacc

SEQ ID NO: 1006866 - RNA, 19 nt, Artificial Sequence
  Description of Artificial Sequence: Synthetic oligonucleotide
  Sense strand starting at position 2320 of SEQ ID NO: 914476
ugaggucgcuucccagaga

SEQ ID NO: 1006867 - RNA, 19 nt, Artificial Sequence
  Description of Artificial Sequence: Synthetic oligonucleotide
  Antisense strand to SEQ ID NO: 1006866
ucucugggaagcgaccuca

SEQ ID NO: 1006868 - RNA, 19 nt, Artificial Sequence
  Description of Artificial Sequence: Synthetic oligonucleotide
  Sense strand starting at position 2552 of SEQ ID NO: 914476
agaugacucccuugccaca

SEQ ID NO: 1006869 - RNA, 19 nt, Artificial Sequence
  Description of Artificial Sequence: Synthetic oligonucleotide
  Antisense strand to SEQ ID NO: 1006868
uguggcaagggagucaucu

SEQ ID NO: 1006870 - RNA, 19 nt, Artificial Sequence
  Description of Artificial Sequence: Synthetic oligonucleotide
  Sense strand starting at position 2628 of SEQ ID NO: 914476
uucuacauggccugacaua

SEQ ID NO: 1006871 - RNA, 19 nt, Artificial Sequence
  Description of Artificial Sequence: Synthetic oligonucleotide
  Antisense strand to SEQ ID NO: 1006870
uaugucaggccauguagaa

SEQ ID NO: 1006872 - RNA, 19 nt, Artificial Sequence
  Description of Artificial Sequence: Synthetic oligonucleotide
  Sense strand starting at position 2629 of SEQ ID NO: 914476
ucuacauggccugacauau

SEQ ID NO: 1006873 - RNA, 19 nt, Artificial Sequence
  Description of Artificial Sequence: Synthetic oligonucleotide
  Antisense strand to SEQ ID NO: 1006872
auaugucaggccauguaga

SEQ ID NO: 1006874 - RNA, 19 nt, Artificial Sequence
  Description of Artificial Sequence: Synthetic oligonucleotide
  Sense strand starting at position 3027 of SEQ ID NO: 914476
ggcacacagugacauauau

SEQ ID NO: 1006875 - RNA, 19 nt, Artificial Sequence
  Description of Artificial Sequence: Synthetic oligonucleotide
  Antisense strand to SEQ ID NO: 1006874
auauaugucacugugugcc

SEQ ID NO: 1006876 - RNA, 19 nt, Artificial Sequence
  Description of Artificial Sequence: Synthetic oligonucleotide
  Sense strand starting at position 3048 of SEQ ID NO: 914476
guauaugugacacaggcau

SEQ ID NO: 1006877 - RNA, 19 nt, Artificial Sequence
  Description of Artificial Sequence: Synthetic oligonucleotide
  Antisense strand to SEQ ID NO: 1006876
augccugugucacauauac

SEQ ID NO: 1006878 - RNA, 19 nt, Artificial Sequence
  Description of Artificial Sequence: Synthetic oligonucleotide
  Sense strand starting at position 3226 of SEQ ID NO: 914476
gcugcacucuuagcagaag

SEQ ID NO: 1006879 - RNA, 19 nt, Artificial Sequence
  Description of Artificial Sequence: Synthetic oligonucleotide
  Antisense strand to SEQ ID NO: 1006878
cuucugcuaagagugcagc

SEQ ID NO: 1006880 - RNA, 19 nt, Artificial Sequence
  Description of Artificial Sequence: Synthetic oligonucleotide
  Sense strand starting at position 3229 of SEQ ID NO: 914476
gcacucuuagcagaaguua

SEQ ID NO: 1006881 - RNA, 19 nt, Artificial Sequence
  Description of Artificial Sequence: Synthetic oligonucleotide
  Antisense strand to SEQ ID NO: 1006880
uaacuucugcuaagagugc

SEQ ID NO: 1006882 - RNA, 19 nt, Artificial Sequence
  Description of Artificial Sequence: Synthetic oligonucleotide
  Sense strand starting at position 3287 of SEQ ID NO: 914476
aguaaacugcccugaugca

SEQ ID NO: 1006883 - RNA, 19 nt, Artificial Sequence
  Description of Artificial Sequence: Synthetic oligonucleotide
  Antisense strand to SEQ ID NO: 1006882
ugcaucagggcaguuuacu

SEQ ID NO: 1006884 - RNA, 19 nt, Artificial Sequence
  Description of Artificial Sequence: Synthetic oligonucleotide
  Sense strand starting at position 3325 of SEQ ID NO: 914476
auggaucgacuuugugacu

SEQ ID NO: 1006885 - RNA, 19 nt, Artificial Sequence
  Description of Artificial Sequence: Synthetic oligonucleotide
  Antisense strand to SEQ ID NO: 1006884
agucacaaagucgauccau

SEQ ID NO: 1006886 - RNA, 19 nt, Artificial Sequence
  Description of Artificial Sequence: Synthetic oligonucleotide
  Sense strand starting at position 3398 of SEQ ID NO: 914476
gggcaaugaguccaggauu

SEQ ID NO: 1006887 - RNA, 19 nt, Artificial Sequence
  Description of Artificial Sequence: Synthetic oligonucleotide
  Antisense strand to SEQ ID NO: 1006886
aauccuggacucauugccc

SEQ ID NO: 1006888 - RNA, 19 nt, Artificial Sequence
  Description of Artificial Sequence: Synthetic oligonucleotide
  Sense strand starting at position 3432 of SEQ ID NO: 914476
cugagauauugcgucacag

SEQ ID NO: 1006889 - RNA, 19 nt, Artificial Sequence
  Description of Artificial Sequence: Synthetic oligonucleotide
  Antisense strand to SEQ ID NO: 1006888
cugugacgcaauaucucag

SEQ ID NO: 1006890 - RNA, 19 nt, Artificial Sequence
  Description of Artificial Sequence: Synthetic oligonucleotide
  Sense strand starting at position 3449 of SEQ ID NO: 914476
agcgcucaguguuugcaaa

SEQ ID NO: 1006891 - RNA, 19 nt, Artificial Sequence
  Description of Artificial Sequence: Synthetic oligonucleotide
  Antisense strand to SEQ ID NO: 1006890
uuugcaaacacugagcgcu

SEQ ID NO: 1006892 - RNA, 19 nt, Artificial Sequence
  Description of Artificial Sequence: Synthetic oligonucleotide
  Sense strand starting at position 3450 of SEQ ID NO: 914476
gcgcucaguguuugcaaau

SEQ ID NO: 1006893 - RNA, 19 nt, Artificial Sequence
  Description of Artificial Sequence: Synthetic oligonucleotide
  Antisense strand to SEQ ID NO: 1006892
auuugcaaacacugagcgc

SEQ ID NO: 1006894 - RNA, 19 nt, Artificial Sequence
  Description of Artificial Sequence: Synthetic oligonucleotide
  Sense strand starting at position 3451 of SEQ ID NO: 914476
cgcucaguguuugcaaaug

SEQ ID NO: 1006895 - RNA, 19 nt, Artificial Sequence
  Description of Artificial Sequence: Synthetic oligonucleotide
  Antisense strand to SEQ ID NO: 1006894
cauuugcaaacacugagcg

SEQ ID NO: 1006896 - RNA, 19 nt, Artificial Sequence
  Description of Artificial Sequence: Synthetic oligonucleotide
  Sense strand starting at position 3456 of SEQ ID NO: 914476
aguguuugcaaaugugcuu

SEQ ID NO: 1006897 - RNA, 19 nt, Artificial Sequence
  Description of Artificial Sequence: Synthetic oligonucleotide
  Antisense strand to SEQ ID NO: 1006896
aagcacauuugcaaacacu

SEQ ID NO: 1006898 - RNA, 19 nt, Artificial Sequence
  Description of Artificial Sequence: Synthetic oligonucleotide
  Sense strand starting at position 3461 of SEQ ID NO: 914476
uugcaaaugugcuuuguca

SEQ ID NO: 1006899 - RNA, 19 nt, Artificial Sequence
  Description of Artificial Sequence: Synthetic oligonucleotide
  Antisense strand to SEQ ID NO: 1006898
ugacaaagcacauuugcaa

SEQ ID NO: 1006900 - RNA, 19 nt, Artificial Sequence
  Description of Artificial Sequence: Synthetic oligonucleotide
  Sense strand starting at position 3469 of SEQ ID NO: 914476
gugcuuugucagcugugga

SEQ ID NO: 1006901 - RNA, 19 nt, Artificial Sequence
  Description of Artificial Sequence: Synthetic oligonucleotide
  Antisense strand to SEQ ID NO: 1006900
uccacagcugacaaagcac

SEQ ID NO: 1006902 - RNA, 19 nt, Artificial Sequence
  Description of Artificial Sequence: Synthetic oligonucleotide
  Sense strand starting at position 3505 of SEQ ID NO: 914476
cugucuucugagcauaugu

SEQ ID NO: 1006903 - RNA, 19 nt, Artificial Sequence
  Description of Artificial Sequence: Synthetic oligonucleotide
  Antisense strand to SEQ ID NO: 1006902
acauaugcucagaagacag

SEQ ID NO: 1006904 - RNA, 19 nt, Artificial Sequence
  Description of Artificial Sequence: Synthetic oligonucleotide
  Sense strand starting at position 3626 of SEQ ID NO: 914476
uugccauaugccuggaagu

SEQ ID NO: 1006905 - RNA, 19 nt, Artificial Sequence
  Description of Artificial Sequence: Synthetic oligonucleotide
  Antisense strand to SEQ ID NO: 1006904
acuuccaggcauauggcaa

SEQ ID NO: 1006906 - RNA, 19 nt, Artificial Sequence
  Description of Artificial Sequence: Synthetic oligonucleotide
  Sense strand starting at position 3627 of SEQ ID NO: 914476
ugccauaugccuggaaguu

SEQ ID NO: 1006907 - RNA, 19 nt, Artificial Sequence
  Description of Artificial Sequence: Synthetic oligonucleotide
  Antisense strand to SEQ ID NO: 1006906
aacuuccaggcauauggca

SEQ ID NO: 1006908 - RNA, 19 nt, Artificial Sequence
  Description of Artificial Sequence: Synthetic oligonucleotide
  Sense strand starting at position 3628 of SEQ ID NO: 914476
gccauaugccuggaaguuc

SEQ ID NO: 1006909 - RNA, 19 nt, Artificial Sequence
  Description of Artificial Sequence: Synthetic oligonucleotide
  Antisense strand to SEQ ID NO: 1006908
gaacuuccaggcauauggc

SEQ ID NO: 1006910 - RNA, 19 nt, Artificial Sequence
  Description of Artificial Sequence: Synthetic oligonucleotide
  Sense strand starting at position 3639 of SEQ ID NO: 914476
ggaaguuccuucuuacaag

SEQ ID NO: 1006911 - RNA, 19 nt, Artificial Sequence
  Description of Artificial Sequence: Synthetic oligonucleotide
  Antisense strand to SEQ ID NO: 1006910
cuuguaagaaggaacuucc

SEQ ID NO: 1006912 - RNA, 19 nt, Artificial Sequence
  Description of Artificial Sequence: Synthetic oligonucleotide
  Sense strand starting at position 3651 of SEQ ID NO: 914476
uuacaaggucuauacaugu

SEQ ID NO: 1006913 - RNA, 19 nt, Artificial Sequence
  Description of Artificial Sequence: Synthetic oligonucleotide
  Antisense strand to SEQ ID NO: 1006912
acauguauagaccuuguaa

SEQ ID NO: 1006914 - RNA, 19 nt, Artificial Sequence
  Description of Artificial Sequence: Synthetic oligonucleotide
  Sense strand starting at position 3657 of SEQ ID NO: 914476
ggucuauacaugugaagca

SEQ ID NO: 1006915 - RNA, 19 nt, Artificial Sequence
  Description of Artificial Sequence: Synthetic oligonucleotide
  Antisense strand to SEQ ID NO: 1006914
ugcuucacauguauagacc

SEQ ID NO: 1006916 - RNA, 19 nt, Artificial Sequence
  Description of Artificial Sequence: Synthetic oligonucleotide
  Sense strand starting at position 38 of SEQ ID NO: 914477
gggacaugaggaugccauu

SEQ ID NO: 1006917 - RNA, 19 nt, Artificial Sequence
  Description of Artificial Sequence: Synthetic oligonucleotide
  Antisense strand to SEQ ID NO: 1006916
aauggcauccucauguccc

SEQ ID NO: 1006918 - RNA, 19 nt, Artificial Sequence
  Description of Artificial Sequence: Synthetic oligonucleotide
  Sense strand starting at position 207 of SEQ ID NO: 914477
agaagaacauuccucgauu

SEQ ID NO: 1006919 - RNA, 19 nt, Artificial Sequence
  Description of Artificial Sequence: Synthetic oligonucleotide
  Antisense strand to SEQ ID NO: 1006918
aaucgaggaauguucuucu

SEQ ID NO: 1006920 - RNA, 19 nt, Artificial Sequence
  Description of Artificial Sequence: Synthetic oligonucleotide
  Sense strand starting at position 208 of SEQ ID NO: 914477
gaagaacauuccucgauug

SEQ ID NO: 1006921 - RNA, 19 nt, Artificial Sequence
  Description of Artificial Sequence: Synthetic oligonucleotide
  Antisense strand to SEQ ID NO: 1006920
caaucgaggaauguucuuc

SEQ ID NO: 1006922 - RNA, 19 nt, Artificial Sequence
  Description of Artificial Sequence: Synthetic oligonucleotide
  Sense strand starting at position 213 of SEQ ID NO: 914477
acauuccucgauuggaaau

SEQ ID NO: 1006923 - RNA, 19 nt, Artificial Sequence
  Description of Artificial Sequence: Synthetic oligonucleotide
  Antisense strand to SEQ ID NO: 1006922
auuuccaaucgaggaaugu

SEQ ID NO: 1006924 - RNA, 19 nt, Artificial Sequence
  Description of Artificial Sequence: Synthetic oligonucleotide
  Sense strand starting at position 426 of SEQ ID NO: 914477
ccugaauuaucagccaagu

SEQ ID NO: 1006925 - RNA, 19 nt, Artificial Sequence
  Description of Artificial Sequence: Synthetic oligonucleotide
  Antisense strand to SEQ ID NO: 1006924
acuuggcugauaauucagg

SEQ ID NO: 1006926 - RNA, 19 nt, Artificial Sequence
  Description of Artificial Sequence: Synthetic oligonucleotide
  Sense strand starting at position 462 of SEQ ID NO: 914477
gggcaaaucccauguacag

SEQ ID NO: 1006927 - RNA, 19 nt, Artificial Sequence
  Description of Artificial Sequence: Synthetic oligonucleotide
  Antisense strand to SEQ ID NO: 1006926
cuguacaugggauuugccc

SEQ ID NO: 1006928 - RNA, 19 nt, Artificial Sequence
  Description of Artificial Sequence: Synthetic oligonucleotide
  Sense strand starting at position 537 of SEQ ID NO: 914477
ccuagagcuccucacaagu

SEQ ID NO: 1006929 - RNA, 19 nt, Artificial Sequence
  Description of Artificial Sequence: Synthetic oligonucleotide
  Antisense strand to SEQ ID NO: 1006928
acuugugaggagcucuagg

SEQ ID NO: 1006930 - RNA, 19 nt, Artificial Sequence
  Description of Artificial Sequence: Synthetic oligonucleotide
  Sense strand starting at position 555 of SEQ ID NO: 914477
ucaagucuugugggagacu

SEQ ID NO: 1006931 - RNA, 19 nt, Artificial Sequence
  Description of Artificial Sequence: Synthetic oligonucleotide
  Antisense strand to SEQ ID NO: 1006930
agucucccacaagacuuga

SEQ ID NO: 1006932 - RNA, 19 nt, Artificial Sequence
  Description of Artificial Sequence: Synthetic oligonucleotide
  Sense strand starting at position 585 of SEQ ID NO: 914477
aggugagugcagcaacauu

SEQ ID NO: 1006933 - RNA, 19 nt, Artificial Sequence
  Description of Artificial Sequence: Synthetic oligonucleotide
  Antisense strand to SEQ ID NO: 1006932
aauguugcugcacucaccu

SEQ ID NO: 1006934 - RNA, 19 nt, Artificial Sequence
  Description of Artificial Sequence: Synthetic oligonucleotide
  Sense strand starting at position 730 of SEQ ID NO: 914477
gucccaaauuuggauacaa

SEQ ID NO: 1006935 - RNA, 19 nt, Artificial Sequence
  Description of Artificial Sequence: Synthetic oligonucleotide
  Antisense strand to SEQ ID NO: 1006934
uuguauccaaauuugggac

SEQ ID NO: 1006936 - RNA, 19 nt, Artificial Sequence
  Description of Artificial Sequence: Synthetic oligonucleotide
  Sense strand starting at position 745 of SEQ ID NO: 914477
acaagagcaucuucuagaa

SEQ ID NO: 1006937 - RNA, 19 nt, Artificial Sequence
  Description of Artificial Sequence: Synthetic oligonucleotide
  Antisense strand to SEQ ID NO: 1006936
uucuagaagaugcucuugu

SEQ ID NO: 1006938 - RNA, 19 nt, Artificial Sequence
  Description of Artificial Sequence: Synthetic oligonucleotide
  Sense strand starting at position 802 of SEQ ID NO: 914477
uuggaaguauaugcaugua

SEQ ID NO: 1006939 - RNA, 19 nt, Artificial Sequence
  Description of Artificial Sequence: Synthetic oligonucleotide
  Antisense strand to SEQ ID NO: 1006938
uacaugcauauacuuccaa

SEQ ID NO: 1006940 - RNA, 19 nt, Artificial Sequence
  Description of Artificial Sequence: Synthetic oligonucleotide
  Sense strand starting at position 812 of SEQ ID NO: 914477
augcauguauccucaggga

SEQ ID NO: 1006941 - RNA, 19 nt, Artificial Sequence
  Description of Artificial Sequence: Synthetic oligonucleotide
  Antisense strand to SEQ ID NO: 1006940
ucccugaggauacaugcau

SEQ ID NO: 1006942 - RNA, 19 nt, Artificial Sequence
  Description of Artificial Sequence: Synthetic oligonucleotide
  Sense strand starting at position 816 of SEQ ID NO: 914477
auguauccucagggagaca

SEQ ID NO: 1006943 - RNA, 19 nt, Artificial Sequence
  Description of Artificial Sequence: Synthetic oligonucleotide
  Antisense strand to SEQ ID NO: 1006942
ugucucccugaggauacau

SEQ ID NO: 1006944 - RNA, 19 nt, Artificial Sequence
  Description of Artificial Sequence: Synthetic oligonucleotide
  Sense strand starting at position 879 of SEQ ID NO: 914477
gggaucugucuccagugga

SEQ ID NO: 1006945 - RNA, 19 nt, Artificial Sequence
  Description of Artificial Sequence: Synthetic oligonucleotide
  Antisense strand to SEQ ID NO: 1006944
uccacuggagacagauccc

SEQ ID NO: 1006946 - RNA, 19 nt, Artificial Sequence
  Description of Artificial Sequence: Synthetic oligonucleotide
  Sense strand starting at position 882 of SEQ ID NO: 914477
aucugucuccaguggaaau

SEQ ID NO: 1006947 - RNA, 19 nt, Artificial Sequence
  Description of Artificial Sequence: Synthetic oligonucleotide
  Antisense strand to SEQ ID NO: 1006946
auuuccacuggagacagau

SEQ ID NO: 1006948 - RNA, 19 nt, Artificial Sequence
  Description of Artificial Sequence: Synthetic oligonucleotide
  Sense strand starting at position 895 of SEQ ID NO: 914477
ggaaauccugagugcccua

SEQ ID NO: 1006949 - RNA, 19 nt, Artificial Sequence
  Description of Artificial Sequence: Synthetic oligonucleotide
  Antisense strand to SEQ ID NO: 1006948
uagggcacucaggauuucc

SEQ ID NO: 1006950 - RNA, 19 nt, Artificial Sequence
  Description of Artificial Sequence: Synthetic oligonucleotide
  Sense strand starting at position 1007 of SEQ ID NO: 914477
ggcaaacugagaugaguua

SEQ ID NO: 1006951 - RNA, 19 nt, Artificial Sequence
  Description of Artificial Sequence: Synthetic oligonucleotide
  Antisense strand to SEQ ID NO: 1006950
uaacucaucucaguuugcc

SEQ ID NO: 1006952 - RNA, 19 nt, Artificial Sequence
  Description of Artificial Sequence: Synthetic oligonucleotide
  Sense strand starting at position 1103 of SEQ ID NO: 914477
acauaagugcuaggacaug

SEQ ID NO: 1006953 - RNA, 19 nt, Artificial Sequence
  Description of Artificial Sequence: Synthetic oligonucleotide
  Antisense strand to SEQ ID NO: 1006952
cauguccuagcacuuaugu

SEQ ID NO: 1006954 - RNA, 19 nt, Artificial Sequence
  Description of Artificial Sequence: Synthetic oligonucleotide
  Sense strand starting at position 1132 of SEQ ID NO: 914477
ugacauaaucauggccaaa

SEQ ID NO: 1006955 - RNA, 19 nt, Artificial Sequence
  Description of Artificial Sequence: Synthetic oligonucleotide
  Antisense strand to SEQ ID NO: 1006954
uuuggccaugauuauguca

SEQ ID NO: 1006956 - RNA, 19 nt, Artificial Sequence
  Description of Artificial Sequence: Synthetic oligonucleotide
  Sense strand starting at position 1279 of SEQ ID NO: 914477
ggccuucugagagacauuc

SEQ ID NO: 1006957 - RNA, 19 nt, Artificial Sequence
  Description of Artificial Sequence: Synthetic oligonucleotide
  Antisense strand to SEQ ID NO: 1006956
gaaugucucucagaaggcc

SEQ ID NO: 1006958 - RNA, 19 nt, Artificial Sequence
  Description of Artificial Sequence: Synthetic oligonucleotide
  Sense strand starting at position 1289 of SEQ ID NO: 914477
gagacauucuaggcccaca

SEQ ID NO: 1006959 - RNA, 19 nt, Artificial Sequence
  Description of Artificial Sequence: Synthetic oligonucleotide
  Antisense strand to SEQ ID NO: 1006958
ugugggccuagaaugucuc

SEQ ID NO: 1006960 - RNA, 19 nt, Artificial Sequence
  Description of Artificial Sequence: Synthetic oligonucleotide
  Sense strand starting at position 1870 of SEQ ID NO: 914477
gcggaacucauccaguaga

SEQ ID NO: 1006961 - RNA, 19 nt, Artificial Sequence
  Description of Artificial Sequence: Synthetic oligonucleotide
  Antisense strand to SEQ ID NO: 1006960
ucuacuggaugaguuccgc

SEQ ID NO: 1006962 - RNA, 19 nt, Artificial Sequence
  Description of Artificial Sequence: Synthetic oligonucleotide
  Sense strand starting at position 1904 of SEQ ID NO: 914477
gaacuaucagccuggguga

SEQ ID NO: 1006963 - RNA, 19 nt, Artificial Sequence
  Description of Artificial Sequence: Synthetic oligonucleotide
  Antisense strand to SEQ ID NO: 1006962
ucacccaggcugauaguuc

SEQ ID NO: 1006964 - RNA, 19 nt, Artificial Sequence
  Description of Artificial Sequence: Synthetic oligonucleotide
  Sense strand starting at position 2230 of SEQ ID NO: 914477
agccguagcagcuagauuu

SEQ ID NO: 1006965 - RNA, 19 nt, Artificial Sequence
  Description of Artificial Sequence: Synthetic oligonucleotide
  Antisense strand to SEQ ID NO: 1006964
aaaucuagcugcuacggcu

SEQ ID NO: 1006966 - RNA, 19 nt, Artificial Sequence
  Description of Artificial Sequence: Synthetic oligonucleotide
  Sense strand starting at position 2257 of SEQ ID NO: 914477
ggcugaucuuucucaggac

SEQ ID NO: 1006967 - RNA, 19 nt, Artificial Sequence
  Description of Artificial Sequence: Synthetic oligonucleotide
  Antisense strand to SEQ ID NO: 1006966
guccugagaaagaucagcc

SEQ ID NO: 1006968 - RNA, 19 nt, Artificial Sequence
  Description of Artificial Sequence: Synthetic oligonucleotide
  Sense strand starting at position 2357 of SEQ ID NO: 914477
uuugaauccuggguccaau

SEQ ID NO: 1006969 - RNA, 19 nt, Artificial Sequence
  Description of Artificial Sequence: Synthetic oligonucleotide
  Antisense strand to SEQ ID NO: 1006968
auuggacccaggauucaaa

SEQ ID NO: 1006970 - RNA, 19 nt, Artificial Sequence
  Description of Artificial Sequence: Synthetic oligonucleotide
  Sense strand starting at position 2420 of SEQ ID NO: 914477
gucuuauuccauuaguacc

SEQ ID NO: 1006971 - RNA, 19 nt, Artificial Sequence
  Description of Artificial Sequence: Synthetic oligonucleotide
  Antisense strand to SEQ ID NO: 1006970
gguacuaauggaauaagac

SEQ ID NO: 1006972 - RNA, 19 nt, Artificial Sequence
  Description of Artificial Sequence: Synthetic oligonucleotide
  Sense strand starting at position 2431 of SEQ ID NO: 914477
uuaguaccauuauuaggau

SEQ ID NO: 1006973 - RNA, 19 nt, Artificial Sequence
  Description of Artificial Sequence: Synthetic oligonucleotide
  Antisense strand to SEQ ID NO: 1006972
auccuaauaaugguacuaa

SEQ ID NO: 1006974 - RNA, 19 nt, Artificial Sequence
  Description of Artificial Sequence: Synthetic oligonucleotide
  Sense strand starting at position 2481 of SEQ ID NO: 914477
aucauaugugcucauuaag

SEQ ID NO: 1006975 - RNA, 19 nt, Artificial Sequence
  Description of Artificial Sequence: Synthetic oligonucleotide
  Antisense strand to SEQ ID NO: 1006974
cuuaaugagcacauaugau

SEQ ID NO: 1006976 - RNA, 19 nt, Artificial Sequence
  Description of Artificial Sequence: Synthetic oligonucleotide
  Sense strand starting at position 2643 of SEQ ID NO: 914477
gagucaugccugucuugcu

SEQ ID NO: 1006977 - RNA, 19 nt, Artificial Sequence
  Description of Artificial Sequence: Synthetic oligonucleotide
  Antisense strand to SEQ ID NO: 1006976
agcaagacaggcaugacuc

SEQ ID NO: 1006978 - RNA, 19 nt, Artificial Sequence
  Description of Artificial Sequence: Synthetic oligonucleotide
  Sense strand starting at position 2747 of SEQ ID NO: 914477
gccugagauccuggacauu

SEQ ID NO: 1006979 - RNA, 19 nt, Artificial Sequence
  Description of Artificial Sequence: Synthetic oligonucleotide
  Antisense strand to SEQ ID NO: 1006978
aauguccaggaucucaggc

SEQ ID NO: 1006980 - RNA, 19 nt, Artificial Sequence
  Description of Artificial Sequence: Synthetic oligonucleotide
  Sense strand starting at position 3236 of SEQ ID NO: 914477
aucugagagucccuccuaa

SEQ ID NO: 1006981 - RNA, 19 nt, Artificial Sequence
  Description of Artificial Sequence: Synthetic oligonucleotide
  Antisense strand to SEQ ID NO: 1006980
uuaggagggacucucagau

SEQ ID NO: 1006982 - RNA, 19 nt, Artificial Sequence
  Description of Artificial Sequence: Synthetic oligonucleotide
  Sense strand starting at position 3402 of SEQ ID NO: 914477
augagucucugagugggaa

SEQ ID NO: 1006983 - RNA, 19 nt, Artificial Sequence
  Description of Artificial Sequence: Synthetic oligonucleotide
  Antisense strand to SEQ ID NO: 1006982
uucccacucagagacucau

SEQ ID NO: 1006984 - RNA, 19 nt, Artificial Sequence
  Description of Artificial Sequence: Synthetic oligonucleotide
  Sense strand starting at position 3403 of SEQ ID NO: 914477
ugagucucugagugggaau

SEQ ID NO: 1006985 - RNA, 19 nt, Artificial Sequence
  Description of Artificial Sequence: Synthetic oligonucleotide
  Antisense strand to SEQ ID NO: 1006984
auucccacucagagacuca

SEQ ID NO: 1006986 - RNA, 19 nt, Artificial Sequence
  Description of Artificial Sequence: Synthetic oligonucleotide
  Sense strand starting at position 3779 of SEQ ID NO: 914477
ggaagagcccaucacuagu

SEQ ID NO: 1006987 - RNA, 19 nt, Artificial Sequence
  Description of Artificial Sequence: Synthetic oligonucleotide
  Antisense strand to SEQ ID NO: 1006986
acuagugaugggcucuucc

SEQ ID NO: 1006988 - RNA, 19 nt, Artificial Sequence
  Description of Artificial Sequence: Synthetic oligonucleotide
  Sense strand starting at position 3885 of SEQ ID NO: 914477
uguucucugcuagagagaa

SEQ ID NO: 1006989 - RNA, 19 nt, Artificial Sequence
  Description of Artificial Sequence: Synthetic oligonucleotide
  Antisense strand to SEQ ID NO: 1006988
uucucucuagcagagaaca

SEQ ID NO: 1006990 - RNA, 19 nt, Artificial Sequence
  Description of Artificial Sequence: Synthetic oligonucleotide
  Sense strand starting at position 3903 of SEQ ID NO: 914477
aacagugucccauggagga

SEQ ID NO: 1006991 - RNA, 19 nt, Artificial Sequence
  Description of Artificial Sequence: Synthetic oligonucleotide
  Antisense strand to SEQ ID NO: 1006990
uccuccaugggacacuguu

SEQ ID NO: 1006992 - RNA, 19 nt, Artificial Sequence
  Description of Artificial Sequence: Synthetic oligonucleotide
  Sense strand starting at position 3923 of SEQ ID NO: 914477
aaggaauccuugucucuga

SEQ ID NO: 1006993 - RNA, 19 nt, Artificial Sequence
  Description of Artificial Sequence: Synthetic oligonucleotide
  Antisense strand to SEQ ID NO: 1006992
ucagagacaaggauuccuu

SEQ ID NO: 1006994 - RNA, 19 nt, Artificial Sequence
  Description of Artificial Sequence: Synthetic oligonucleotide
  Sense strand starting at position 3956 of SEQ ID NO: 914477
guacuuaaauggcugaaga

SEQ ID NO: 1006995 - RNA, 19 nt, Artificial Sequence
  Description of Artificial Sequence: Synthetic oligonucleotide
  Antisense strand to SEQ ID NO: 1006994
ucuucagccauuuaaguac

SEQ ID NO: 1006996 - RNA, 19 nt, Artificial Sequence
  Description of Artificial Sequence: Synthetic oligonucleotide
  Sense strand starting at position 13 of SEQ ID NO: 914478
gccagaugucuagagguga

SEQ ID NO: 1006997 - RNA, 19 nt, Artificial Sequence
  Description of Artificial Sequence: Synthetic oligonucleotide
  Antisense strand to SEQ ID NO: 1006996
ucaccucuagacaucuggc

SEQ ID NO: 1006998 - RNA, 19 nt, Artificial Sequence
  Description of Artificial Sequence: Synthetic oligonucleotide
  Sense strand starting at position 28 of SEQ ID NO: 914478
gugauugggucuuugauac

SEQ ID NO: 1006999 - RNA, 19 nt, Artificial Sequence
  Description of Artificial Sequence: Synthetic oligonucleotide
  Antisense strand to SEQ ID NO: 1006998
guaucaaagacccaaucac

SEQ ID NO: 1007000 - RNA, 19 nt, Artificial Sequence
  Description of Artificial Sequence: Synthetic oligonucleotide
  Sense strand starting at position 495 of SEQ ID NO: 914478
ggaccagcagcagauuaau

SEQ ID NO: 1007001 - RNA, 19 nt, Artificial Sequence
  Description of Artificial Sequence: Synthetic oligonucleotide
  Antisense strand to SEQ ID NO: 1007000
auuaaucugcugcuggucc

SEQ ID NO: 1007002 - RNA, 19 nt, Artificial Sequence
  Description of Artificial Sequence: Synthetic oligonucleotide
  Sense strand starting at position 513 of SEQ ID NO: 914478
uaaacuugagagcguacua

SEQ ID NO: 1007003 - RNA, 19 nt, Artificial Sequence
  Description of Artificial Sequence: Synthetic oligonucleotide
  Antisense strand to SEQ ID NO: 1007002
uaguacgcucucaaguuua

SEQ ID NO: 1007004 - RNA, 19 nt, Artificial Sequence
  Description of Artificial Sequence: Synthetic oligonucleotide
  Sense strand starting at position 526 of SEQ ID NO: 914478
guacuagacaugcggaauc

SEQ ID NO: 1007005 - RNA, 19 nt, Artificial Sequence
  Description of Artificial Sequence: Synthetic oligonucleotide
  Antisense strand to SEQ ID NO: 1007004
gauuccgcaugucuaguac

SEQ ID NO: 1007006 - RNA, 19 nt, Artificial Sequence
  Description of Artificial Sequence: Synthetic oligonucleotide
  Sense strand starting at position 682 of SEQ ID NO: 914478
gggagcaccagcugugaua

SEQ ID NO: 1007007 - RNA, 19 nt, Artificial Sequence
  Description of Artificial Sequence: Synthetic oligonucleotide
  Antisense strand to SEQ ID NO: 1007006
uaucacagcuggugcuccc

SEQ ID NO: 1007008 - RNA, 19 nt, Artificial Sequence
  Description of Artificial Sequence: Synthetic oligonucleotide
  Sense strand starting at position 705 of SEQ ID NO: 914478
uuucuaggucuuugaaaua

SEQ ID NO: 1007009 - RNA, 19 nt, Artificial Sequence
  Description of Artificial Sequence: Synthetic oligonucleotide
  Antisense strand to SEQ ID NO: 1007008
uauuucaaagaccuagaaa

SEQ ID NO: 1007010 - RNA, 19 nt, Artificial Sequence
  Description of Artificial Sequence: Synthetic oligonucleotide
  Sense strand starting at position 874 of SEQ ID NO: 914478
gaggacuuaucaguuuaua

SEQ ID NO: 1007011 - RNA, 19 nt, Artificial Sequence
  Description of Artificial Sequence: Synthetic oligonucleotide
  Antisense strand to SEQ ID NO: 1007010
uauaaacugauaaguccuc

SEQ ID NO: 1007012 - RNA, 19 nt, Artificial Sequence
  Description of Artificial Sequence: Synthetic oligonucleotide
  Sense strand starting at position 965 of SEQ ID NO: 914478
aguuaacacgucuaaauaa

SEQ ID NO: 1007013 - RNA, 19 nt, Artificial Sequence
  Description of Artificial Sequence: Synthetic oligonucleotide
  Antisense strand to SEQ ID NO: 1007012
uuauuuagacguguuaacu

SEQ ID NO: 1007014 - RNA, 19 nt, Artificial Sequence
  Description of Artificial Sequence: Synthetic oligonucleotide
  Sense strand starting at position 1054 of SEQ ID NO: 914478
agaaaugcucuugguuauu

SEQ ID NO: 1007015 - RNA, 19 nt, Artificial Sequence
  Description of Artificial Sequence: Synthetic oligonucleotide
  Antisense strand to SEQ ID NO: 1007014
aauaaccaagagcauuucu

SEQ ID NO: 1007016 - RNA, 19 nt, Artificial Sequence
  Description of Artificial Sequence: Synthetic oligonucleotide
  Sense strand starting at position 1059 of SEQ ID NO: 914478
ugcucuugguuauuuauca

SEQ ID NO: 1007017 - RNA, 19 nt, Artificial Sequence
  Description of Artificial Sequence: Synthetic oligonucleotide
  Antisense strand to SEQ ID NO: 1007016
ugauaaauaaccaagagca

SEQ ID NO: 1007018 - RNA, 19 nt, Artificial Sequence
  Description of Artificial Sequence: Synthetic oligonucleotide
  Sense strand starting at position 1060 of SEQ ID NO: 914478
gcucuugguuauuuaucaa

SEQ ID NO: 1007019 - RNA, 19 nt, Artificial Sequence
  Description of Artificial Sequence: Synthetic oligonucleotide
  Antisense strand to SEQ ID NO: 1007018
uugauaaauaaccaagagc

SEQ ID NO: 1007020 - RNA, 19 nt, Artificial Sequence
  Description of Artificial Sequence: Synthetic oligonucleotide
  Sense strand starting at position 1113 of SEQ ID NO: 914478
aacugaaaguuguugguca

SEQ ID NO: 1007021 - RNA, 19 nt, Artificial Sequence
  Description of Artificial Sequence: Synthetic oligonucleotide
  Antisense strand to SEQ ID NO: 1007020
ugaccaacaacuuucaguu

SEQ ID NO: 1007022 - RNA, 19 nt, Artificial Sequence
  Description of Artificial Sequence: Synthetic oligonucleotide
  Sense strand starting at position 1117 of SEQ ID NO: 914478
gaaaguuguuggucacuug

SEQ ID NO: 1007023 - RNA, 19 nt, Artificial Sequence
  Description of Artificial Sequence: Synthetic oligonucleotide
  Antisense strand to SEQ ID NO: 1007022
caagugaccaacaacuuuc

SEQ ID NO: 1007024 - RNA, 19 nt, Artificial Sequence
  Description of Artificial Sequence: Synthetic oligonucleotide
  Sense strand starting at position 1118 of SEQ ID NO: 914478
aaaguuguuggucacuuga

SEQ ID NO: 1007025 - RNA, 19 nt, Artificial Sequence
  Description of Artificial Sequence: Synthetic oligonucleotide
  Antisense strand to SEQ ID NO: 1007024
ucaagugaccaacaacuuu

SEQ ID NO: 1007026 - RNA, 19 nt, Artificial Sequence
  Description of Artificial Sequence: Synthetic oligonucleotide
  Sense strand starting at position 1120 of SEQ ID NO: 914478
aguuguuggucacuugaaa

SEQ ID NO: 1007027 - RNA, 19 nt, Artificial Sequence
  Description of Artificial Sequence: Synthetic oligonucleotide
  Antisense strand to SEQ ID NO: 1007026
uuucaagugaccaacaacu

SEQ ID NO: 1007028 - RNA, 19 nt, Artificial Sequence
  Description of Artificial Sequence: Synthetic oligonucleotide
  Sense strand starting at position 1175 of SEQ ID NO: 914478
gauagugaauugcuauaua

SEQ ID NO: 1007029 - RNA, 19 nt, Artificial Sequence
  Description of Artificial Sequence: Synthetic oligonucleotide
  Antisense strand to SEQ ID NO: 1007028
uauauagcaauucacuauc

SEQ ID NO: 1007030 - RNA, 19 nt, Artificial Sequence
  Description of Artificial Sequence: Synthetic oligonucleotide
  Sense strand starting at position 1178 of SEQ ID NO: 914478
agugaauugcuauauaugc

SEQ ID NO: 1007031 - RNA, 19 nt, Artificial Sequence
  Description of Artificial Sequence: Synthetic oligonucleotide
  Antisense strand to SEQ ID NO: 1007030
gcauauauagcaauucacu

SEQ ID NO: 1007032 - RNA, 19 nt, Artificial Sequence
  Description of Artificial Sequence: Synthetic oligonucleotide
  Sense strand starting at position 1204 of SEQ ID NO: 914478
agaguuuggacgcaaguau

SEQ ID NO: 1007033 - RNA, 19 nt, Artificial Sequence
  Description of Artificial Sequence: Synthetic oligonucleotide
  Antisense strand to SEQ ID NO: 1007032
auacuugcguccaaacucu

SEQ ID NO: 1007034 - RNA, 19 nt, Artificial Sequence
  Description of Artificial Sequence: Synthetic oligonucleotide
  Sense strand starting at position 1272 of SEQ ID NO: 914478
ggguuaguucuggagggcu

SEQ ID NO: 1007035 - RNA, 19 nt, Artificial Sequence
  Description of Artificial Sequence: Synthetic oligonucleotide
  Antisense strand to SEQ ID NO: 1007034
agcccuccagaacuaaccc

SEQ ID NO: 1007036 - RNA, 19 nt, Artificial Sequence
  Description of Artificial Sequence: Synthetic oligonucleotide
  Sense strand starting at position 1756 of SEQ ID NO: 914478
uucccaaugcuaggaugaa

SEQ ID NO: 1007037 - RNA, 19 nt, Artificial Sequence
  Description of Artificial Sequence: Synthetic oligonucleotide
  Antisense strand to SEQ ID NO: 1007036
uucauccuagcauugggaa

SEQ ID NO: 1007038 - RNA, 19 nt, Artificial Sequence
  Description of Artificial Sequence: Synthetic oligonucleotide
  Sense strand starting at position 2125 of SEQ ID NO: 914478
gggucuuccuuccucuaua

SEQ ID NO: 1007039 - RNA, 19 nt, Artificial Sequence
  Description of Artificial Sequence: Synthetic oligonucleotide
  Antisense strand to SEQ ID NO: 1007038
uauagaggaaggaagaccc

SEQ ID NO: 1007040 - RNA, 19 nt, Artificial Sequence
  Description of Artificial Sequence: Synthetic oligonucleotide
  Sense strand starting at position 2359 of SEQ ID NO: 914478
caggguaaagagugauagu

SEQ ID NO: 1007041 - RNA, 19 nt, Artificial Sequence
  Description of Artificial Sequence: Synthetic oligonucleotide
  Antisense strand to SEQ ID NO: 1007040
acuaucacucuuuacccug

SEQ ID NO: 1007042 - RNA, 19 nt, Artificial Sequence
  Description of Artificial Sequence: Synthetic oligonucleotide
  Sense strand starting at position 2389 of SEQ ID NO: 914478
cugguaugagugugaauug

SEQ ID NO: 1007043 - RNA, 19 nt, Artificial Sequence
  Description of Artificial Sequence: Synthetic oligonucleotide
  Antisense strand to SEQ ID NO: 1007042
caauucacacucauaccag

SEQ ID NO: 1007044 - RNA, 19 nt, Artificial Sequence
  Description of Artificial Sequence: Synthetic oligonucleotide
  Sense strand starting at position 2394 of SEQ ID NO: 914478
augagugugaauugaugua

SEQ ID NO: 1007045 - RNA, 19 nt, Artificial Sequence
  Description of Artificial Sequence: Synthetic oligonucleotide
  Antisense strand to SEQ ID NO: 1007044
uacaucaauucacacucau

SEQ ID NO: 1007046 - RNA, 19 nt, Artificial Sequence
  Description of Artificial Sequence: Synthetic oligonucleotide
  Sense strand starting at position 2410 of SEQ ID NO: 914478
guaaccuuucuuuauguuu

SEQ ID NO: 1007047 - RNA, 19 nt, Artificial Sequence
  Description of Artificial Sequence: Synthetic oligonucleotide
  Antisense strand to SEQ ID NO: 1007046
aaacauaaagaaagguuac

SEQ ID NO: 1007048 - RNA, 19 nt, Artificial Sequence
  Description of Artificial Sequence: Synthetic oligonucleotide
  Sense strand starting at position 2514 of SEQ ID NO: 914478
ccucuaagguaaguauuau

SEQ ID NO: 1007049 - RNA, 19 nt, Artificial Sequence
  Description of Artificial Sequence: Synthetic oligonucleotide
  Antisense strand to SEQ ID NO: 1007048
auaauacuuaccuuagagg

SEQ ID NO: 1007050 - RNA, 19 nt, Artificial Sequence
  Description of Artificial Sequence: Synthetic oligonucleotide
  Sense strand starting at position 2575 of SEQ ID NO: 914478
caggcagguuaucuaaguu

SEQ ID NO: 1007051 - RNA, 19 nt, Artificial Sequence
  Description of Artificial Sequence: Synthetic oligonucleotide
  Antisense strand to SEQ ID NO: 1007050
aacuuagauaaccugccug

SEQ ID NO: 1007052 - RNA, 19 nt, Artificial Sequence
  Description of Artificial Sequence: Synthetic oligonucleotide
  Sense strand starting at position 2581 of SEQ ID NO: 914478
gguuaucuaaguugcagau

SEQ ID NO: 1007053 - RNA, 19 nt, Artificial Sequence
  Description of Artificial Sequence: Synthetic oligonucleotide
  Antisense strand to SEQ ID NO: 1007052
aucugcaacuuagauaacc

SEQ ID NO: 1007054 - RNA, 19 nt, Artificial Sequence
  Description of Artificial Sequence: Synthetic oligonucleotide
  Sense strand starting at position 2585 of SEQ ID NO: 914478
aucuaaguugcagauuaca

SEQ ID NO: 1007055 - RNA, 19 nt, Artificial Sequence
  Description of Artificial Sequence: Synthetic oligonucleotide
  Antisense strand to SEQ ID NO: 1007054
uguaaucugcaacuuagau

SEQ ID NO: 1007056 - RNA, 19 nt, Artificial Sequence
  Description of Artificial Sequence: Synthetic oligonucleotide
  Sense strand starting at position 2662 of SEQ ID NO: 914478
ucuacuguacuguaguuau

SEQ ID NO: 1007057 - RNA, 19 nt, Artificial Sequence
  Description of Artificial Sequence: Synthetic oligonucleotide
  Antisense strand to SEQ ID NO: 1007056
auaacuacaguacaguaga

SEQ ID NO: 1007058 - RNA, 19 nt, Artificial Sequence
  Description of Artificial Sequence: Synthetic oligonucleotide
  Sense strand starting at position 2665 of SEQ ID NO: 914478
acuguacuguaguuauaug

SEQ ID NO: 1007059 - RNA, 19 nt, Artificial Sequence
  Description of Artificial Sequence: Synthetic oligonucleotide
  Antisense strand to SEQ ID NO: 1007058
cauauaacuacaguacagu

SEQ ID NO: 1007060 - RNA, 19 nt, Artificial Sequence
  Description of Artificial Sequence: Synthetic oligonucleotide
  Sense strand starting at position 2688 of SEQ ID NO: 914478
gugcuaguaauacaggaga

SEQ ID NO: 1007061 - RNA, 19 nt, Artificial Sequence
  Description of Artificial Sequence: Synthetic oligonucleotide
  Antisense strand to SEQ ID NO: 1007060
ucuccuguauuacuagcac

SEQ ID NO: 1007062 - RNA, 19 nt, Artificial Sequence
  Description of Artificial Sequence: Synthetic oligonucleotide
  Sense strand starting at position 2690 of SEQ ID NO: 914478
gcuaguaauacaggagaaa

SEQ ID NO: 1007063 - RNA, 19 nt, Artificial Sequence
  Description of Artificial Sequence: Synthetic oligonucleotide
  Antisense strand to SEQ ID NO: 1007062
uuucuccuguauuacuagc

SEQ ID NO: 1007064 - RNA, 19 nt, Artificial Sequence
  Description of Artificial Sequence: Synthetic oligonucleotide
  Sense strand starting at position 2712 of SEQ ID NO: 914478
gauaaauaguccucuugga

SEQ ID NO: 1007065 - RNA, 19 nt, Artificial Sequence
  Description of Artificial Sequence: Synthetic oligonucleotide
  Antisense strand to SEQ ID NO: 1007064
uccaagaggacuauuuauc

SEQ ID NO: 1007066 - RNA, 19 nt, Artificial Sequence
  Description of Artificial Sequence: Synthetic oligonucleotide
  Sense strand starting at position 2994 of SEQ ID NO: 914478
ugcugugggagugauagaa

SEQ ID NO: 1007067 - RNA, 19 nt, Artificial Sequence
  Description of Artificial Sequence: Synthetic oligonucleotide
  Antisense strand to SEQ ID NO: 1007066
uucuaucacucccacagca

SEQ ID NO: 1007068 - RNA, 19 nt, Artificial Sequence
  Description of Artificial Sequence: Synthetic oligonucleotide
  Sense strand starting at position 3077 of SEQ ID NO: 914478
gcugaaauuugauggagga

SEQ ID NO: 1007069 - RNA, 19 nt, Artificial Sequence
  Description of Artificial Sequence: Synthetic oligonucleotide
  Antisense strand to SEQ ID NO: 1007068
uccuccaucaaauuucagc

SEQ ID NO: 1007070 - RNA, 19 nt, Artificial Sequence
  Description of Artificial Sequence: Synthetic oligonucleotide
  Sense strand starting at position 3230 of SEQ ID NO: 914478
auaagaaauucgccagaua

SEQ ID NO: 1007071 - RNA, 19 nt, Artificial Sequence
  Description of Artificial Sequence: Synthetic oligonucleotide
  Antisense strand to SEQ ID NO: 1007070
uaucuggcgaauuucuuau

SEQ ID NO: 1007072 - RNA, 19 nt, Artificial Sequence
  Description of Artificial Sequence: Synthetic oligonucleotide
  Sense strand starting at position 3243 of SEQ ID NO: 914478
cagauaugguacuuuggga

SEQ ID NO: 1007073 - RNA, 19 nt, Artificial Sequence
  Description of Artificial Sequence: Synthetic oligonucleotide
  Antisense strand to SEQ ID NO: 1007072
ucccaaaguaccauaucug

SEQ ID NO: 1007074 - RNA, 19 nt, Artificial Sequence
  Description of Artificial Sequence: Synthetic oligonucleotide
  Sense strand starting at position 3569 of SEQ ID NO: 914478
agcuauguuagggauucuu

SEQ ID NO: 1007075 - RNA, 19 nt, Artificial Sequence
  Description of Artificial Sequence: Synthetic oligonucleotide
  Antisense strand to SEQ ID NO: 1007074
aagaaucccuaacauagcu

SEQ ID NO: 1007076 - RNA, 19 nt, Artificial Sequence
  Description of Artificial Sequence: Synthetic oligonucleotide
  Sense strand starting at position 317 of SEQ ID NO: 914479
augcucuuuccaugauaug

SEQ ID NO: 1007077 - RNA, 19 nt, Artificial Sequence
  Description of Artificial Sequence: Synthetic oligonucleotide
  Antisense strand to SEQ ID NO: 1007076
cauaucauggaaagagcau

SEQ ID NO: 1007078 - RNA, 19 nt, Artificial Sequence
  Description of Artificial Sequence: Synthetic oligonucleotide
  Sense strand starting at position 356 of SEQ ID NO: 914479
gagaguugcuccucaaccu

SEQ ID NO: 1007079 - RNA, 19 nt, Artificial Sequence
  Description of Artificial Sequence: Synthetic oligonucleotide
  Antisense strand to SEQ ID NO: 1007078
agguugaggagcaacucuc

SEQ ID NO: 1007080 - RNA, 19 nt, Artificial Sequence
  Description of Artificial Sequence: Synthetic oligonucleotide
  Sense strand starting at position 373 of SEQ ID NO: 914479
cuguguugucuuuaccuga

SEQ ID NO: 1007081 - RNA, 19 nt, Artificial Sequence
  Description of Artificial Sequence: Synthetic oligonucleotide
  Antisense strand to SEQ ID NO: 1007080
ucagguaaagacaacacag

SEQ ID NO: 1007082 - RNA, 19 nt, Artificial Sequence
  Description of Artificial Sequence: Synthetic oligonucleotide
  Sense strand starting at position 601 of SEQ ID NO: 914479
ccuuucuccuggucuuaga

SEQ ID NO: 1007083 - RNA, 19 nt, Artificial Sequence
  Description of Artificial Sequence: Synthetic oligonucleotide
  Antisense strand to SEQ ID NO: 1007082
ucuaagaccaggagaaagg

SEQ ID NO: 1007084 - RNA, 19 nt, Artificial Sequence
  Description of Artificial Sequence: Synthetic oligonucleotide
  Sense strand starting at position 611 of SEQ ID NO: 914479
ggucuuagaggguaacguu

SEQ ID NO: 1007085 - RNA, 19 nt, Artificial Sequence
  Description of Artificial Sequence: Synthetic oligonucleotide
  Antisense strand to SEQ ID NO: 1007084
aacguuacccucuaagacc

SEQ ID NO: 1007086 - RNA, 19 nt, Artificial Sequence
  Description of Artificial Sequence: Synthetic oligonucleotide
  Sense strand starting at position 714 of SEQ ID NO: 914479
uccuuuagccuagaaaugu

SEQ ID NO: 1007087 - RNA, 19 nt, Artificial Sequence
  Description of Artificial Sequence: Synthetic oligonucleotide
  Antisense strand to SEQ ID NO: 1007086
acauuucuaggcuaaagga

SEQ ID NO: 1007088 - RNA, 19 nt, Artificial Sequence
  Description of Artificial Sequence: Synthetic oligonucleotide
  Sense strand starting at position 723 of SEQ ID NO: 914479
cuagaaaugugcucaaguu

SEQ ID NO: 1007089 - RNA, 19 nt, Artificial Sequence
  Description of Artificial Sequence: Synthetic oligonucleotide
  Antisense strand to SEQ ID NO: 1007088
aacuugagcacauuucuag

SEQ ID NO: 1007090 - RNA, 19 nt, Artificial Sequence
  Description of Artificial Sequence: Synthetic oligonucleotide
  Sense strand starting at position 724 of SEQ ID NO: 914479
uagaaaugugcucaaguuu

SEQ ID NO: 1007091 - RNA, 19 nt, Artificial Sequence
  Description of Artificial Sequence: Synthetic oligonucleotide
  Antisense strand to SEQ ID NO: 1007090
aaacuugagcacauuucua

SEQ ID NO: 1007092 - RNA, 19 nt, Artificial Sequence
  Description of Artificial Sequence: Synthetic oligonucleotide
  Sense strand starting at position 826 of SEQ ID NO: 914479
gucuuuaaagaauagucua

SEQ ID NO: 1007093 - RNA, 19 nt, Artificial Sequence
  Description of Artificial Sequence: Synthetic oligonucleotide
  Antisense strand to SEQ ID NO: 1007092
uagacuauucuuuaaagac

SEQ ID NO: 1007094 - RNA, 19 nt, Artificial Sequence
  Description of Artificial Sequence: Synthetic oligonucleotide
  Sense strand starting at position 914 of SEQ ID NO: 914479
ugcugaaacugugcuaaau

SEQ ID NO: 1007095 - RNA, 19 nt, Artificial Sequence
  Description of Artificial Sequence: Synthetic oligonucleotide
  Antisense strand to SEQ ID NO: 1007094
auuuagcacaguuucagca

SEQ ID NO: 1007096 - RNA, 19 nt, Artificial Sequence
  Description of Artificial Sequence: Synthetic oligonucleotide
  Sense strand starting at position 996 of SEQ ID NO: 914479
gugggcucucuuuaacauu

SEQ ID NO: 1007097 - RNA, 19 nt, Artificial Sequence
  Description of Artificial Sequence: Synthetic oligonucleotide
  Antisense strand to SEQ ID NO: 1007096
aauguuaaagagagcccac

SEQ ID NO: 1007098 - RNA, 19 nt, Artificial Sequence
  Description of Artificial Sequence: Synthetic oligonucleotide
  Sense strand starting at position 1115 of SEQ ID NO: 914479
aucucuuuccuggaauguu

SEQ ID NO: 1007099 - RNA, 19 nt, Artificial Sequence
  Description of Artificial Sequence: Synthetic oligonucleotide
  Antisense strand to SEQ ID NO: 1007098
aacauuccaggaaagagau

SEQ ID NO: 1007100 - RNA, 19 nt, Artificial Sequence
  Description of Artificial Sequence: Synthetic oligonucleotide
  Sense strand starting at position 1198 of SEQ ID NO: 914479
ucacauaguacuuguguga

SEQ ID NO: 1007101 - RNA, 19 nt, Artificial Sequence
  Description of Artificial Sequence: Synthetic oligonucleotide
  Antisense strand to SEQ ID NO: 1007100
ucacacaaguacuauguga

SEQ ID NO: 1007102 - RNA, 19 nt, Artificial Sequence
  Description of Artificial Sequence: Synthetic oligonucleotide
  Sense strand starting at position 1201 of SEQ ID NO: 914479
cauaguacuugugugacuu

SEQ ID NO: 1007103 - RNA, 19 nt, Artificial Sequence
  Description of Artificial Sequence: Synthetic oligonucleotide
  Antisense strand to SEQ ID NO: 1007102
aagucacacaaguacuaug

SEQ ID NO: 1007104 - RNA, 19 nt, Artificial Sequence
  Description of Artificial Sequence: Synthetic oligonucleotide
  Sense strand starting at position 1202 of SEQ ID NO: 914479
auaguacuugugugacuuc

SEQ ID NO: 1007105 - RNA, 19 nt, Artificial Sequence
  Description of Artificial Sequence: Synthetic oligonucleotide
  Antisense strand to SEQ ID NO: 1007104
gaagucacacaaguacuau

SEQ ID NO: 1007106 - RNA, 19 nt, Artificial Sequence
  Description of Artificial Sequence: Synthetic oligonucleotide
  Sense strand starting at position 1294 of SEQ ID NO: 914479
uggauaguccaauggagua

SEQ ID NO: 1007107 - RNA, 19 nt, Artificial Sequence
  Description of Artificial Sequence: Synthetic oligonucleotide
  Antisense strand to SEQ ID NO: 1007106
uacuccauuggacuaucca

SEQ ID NO: 1007108 - RNA, 19 nt, Artificial Sequence
  Description of Artificial Sequence: Synthetic oligonucleotide
  Sense strand starting at position 1344 of SEQ ID NO: 914479
ucagucuggcaccaugaaa

SEQ ID NO: 1007109 - RNA, 19 nt, Artificial Sequence
  Description of Artificial Sequence: Synthetic oligonucleotide
  Antisense strand to SEQ ID NO: 1007108
uuucauggugccagacuga

SEQ ID NO: 1007110 - RNA, 19 nt, Artificial Sequence
  Description of Artificial Sequence: Synthetic oligonucleotide
  Sense strand starting at position 1382 of SEQ ID NO: 914479
cuaugaguucuguagagca

SEQ ID NO: 1007111 - RNA, 19 nt, Artificial Sequence
  Description of Artificial Sequence: Synthetic oligonucleotide
  Antisense strand to SEQ ID NO: 1007110
ugcucuacagaacucauag

SEQ ID NO: 1007112 - RNA, 19 nt, Artificial Sequence
  Description of Artificial Sequence: Synthetic oligonucleotide
  Sense strand starting at position 1384 of SEQ ID NO: 914479
augaguucuguagagcaua

SEQ ID NO: 1007113 - RNA, 19 nt, Artificial Sequence
  Description of Artificial Sequence: Synthetic oligonucleotide
  Antisense strand to SEQ ID NO: 1007112
uaugcucuacagaacucau

SEQ ID NO: 1007114 - RNA, 19 nt, Artificial Sequence
  Description of Artificial Sequence: Synthetic oligonucleotide
  Sense strand starting at position 1387 of SEQ ID NO: 914479
aguucuguagagcauaagu

SEQ ID NO: 1007115 - RNA, 19 nt, Artificial Sequence
  Description of Artificial Sequence: Synthetic oligonucleotide
  Antisense strand to SEQ ID NO: 1007114
acuuaugcucuacagaacu

SEQ ID NO: 1007116 - RNA, 19 nt, Artificial Sequence
  Description of Artificial Sequence: Synthetic oligonucleotide
  Sense strand starting at position 1688 of SEQ ID NO: 914479
gggacacuguuucucucua

SEQ ID NO: 1007117 - RNA, 19 nt, Artificial Sequence
  Description of Artificial Sequence: Synthetic oligonucleotide
  Antisense strand to SEQ ID NO: 1007116
uagagagaaacaguguccc

SEQ ID NO: 1007118 - RNA, 19 nt, Artificial Sequence
  Description of Artificial Sequence: Synthetic oligonucleotide
  Sense strand starting at position 1693 of SEQ ID NO: 914479
acuguuucucucuagcaga

SEQ ID NO: 1007119 - RNA, 19 nt, Artificial Sequence
  Description of Artificial Sequence: Synthetic oligonucleotide
  Antisense strand to SEQ ID NO: 1007118
ucugcuagagagaaacagu

SEQ ID NO: 1007120 - RNA, 19 nt, Artificial Sequence
  Description of Artificial Sequence: Synthetic oligonucleotide
  Sense strand starting at position 1793 of SEQ ID NO: 914479
auuccugucucacuaguga

SEQ ID NO: 1007121 - RNA, 19 nt, Artificial Sequence
  Description of Artificial Sequence: Synthetic oligonucleotide
  Antisense strand to SEQ ID NO: 1007120
ucacuagugagacaggaau

SEQ ID NO: 1007122 - RNA, 19 nt, Artificial Sequence
  Description of Artificial Sequence: Synthetic oligonucleotide
  Sense strand starting at position 1857 of SEQ ID NO: 914479
aggcccuuaccuugaagaa

SEQ ID NO: 1007123 - RNA, 19 nt, Artificial Sequence
  Description of Artificial Sequence: Synthetic oligonucleotide
  Antisense strand to SEQ ID NO: 1007122
uucuucaagguaagggccu

SEQ ID NO: 1007124 - RNA, 19 nt, Artificial Sequence
  Description of Artificial Sequence: Synthetic oligonucleotide
  Sense strand starting at position 2265 of SEQ ID NO: 914479
agauaaaugucccugucau

SEQ ID NO: 1007125 - RNA, 19 nt, Artificial Sequence
  Description of Artificial Sequence: Synthetic oligonucleotide
  Antisense strand to SEQ ID NO: 1007124
augacagggacauuuaucu

SEQ ID NO: 1007126 - RNA, 19 nt, Artificial Sequence
  Description of Artificial Sequence: Synthetic oligonucleotide
  Sense strand starting at position 2278 of SEQ ID NO: 914479
ugucauuaguuguuaggau

SEQ ID NO: 1007127 - RNA, 19 nt, Artificial Sequence
  Description of Artificial Sequence: Synthetic oligonucleotide
  Antisense strand to SEQ ID NO: 1007126
auccuaacaacuaaugaca

SEQ ID NO: 1007128 - RNA, 19 nt, Artificial Sequence
  Description of Artificial Sequence: Synthetic oligonucleotide
  Sense strand starting at position 2327 of SEQ ID NO: 914479
uguugcuguagguaaugaa

SEQ ID NO: 1007129 - RNA, 19 nt, Artificial Sequence
  Description of Artificial Sequence: Synthetic oligonucleotide
  Antisense strand to SEQ ID NO: 1007128
uucauuaccuacagcaaca

SEQ ID NO: 1007130 - RNA, 19 nt, Artificial Sequence
  Description of Artificial Sequence: Synthetic oligonucleotide
  Sense strand starting at position 2896 of SEQ ID NO: 914479
ugugcagagcucccguuau

SEQ ID NO: 1007131 - RNA, 19 nt, Artificial Sequence
  Description of Artificial Sequence: Synthetic oligonucleotide
  Antisense strand to SEQ ID NO: 1007130
auaacgggagcucugcaca

SEQ ID NO: 1007132 - RNA, 19 nt, Artificial Sequence
  Description of Artificial Sequence: Synthetic oligonucleotide
  Sense strand starting at position 2898 of SEQ ID NO: 914479
ugcagagcucccguuaugu

SEQ ID NO: 1007133 - RNA, 19 nt, Artificial Sequence
  Description of Artificial Sequence: Synthetic oligonucleotide
  Antisense strand to SEQ ID NO: 1007132
acauaacgggagcucugca

SEQ ID NO: 1007134 - RNA, 19 nt, Artificial Sequence
  Description of Artificial Sequence: Synthetic oligonucleotide
  Sense strand starting at position 3112 of SEQ ID NO: 914479
acauaugaugcgugaggca

SEQ ID NO: 1007135 - RNA, 19 nt, Artificial Sequence
  Description of Artificial Sequence: Synthetic oligonucleotide
  Antisense strand to SEQ ID NO: 1007134
ugccucacgcaucauaugu

SEQ ID NO: 1007136 - RNA, 19 nt, Artificial Sequence
  Description of Artificial Sequence: Synthetic oligonucleotide
  Sense strand starting at position 3135 of SEQ ID NO: 914479
gcaaauaucuuguuugaau

SEQ ID NO: 1007137 - RNA, 19 nt, Artificial Sequence
  Description of Artificial Sequence: Synthetic oligonucleotide
  Antisense strand to SEQ ID NO: 1007136
auucaaacaagauauuugc

SEQ ID NO: 1007138 - RNA, 19 nt, Artificial Sequence
  Description of Artificial Sequence: Synthetic oligonucleotide
  Sense strand starting at position 3349 of SEQ ID NO: 914479
ugagaaaucuagcugcuac

SEQ ID NO: 1007139 - RNA, 19 nt, Artificial Sequence
  Description of Artificial Sequence: Synthetic oligonucleotide
  Antisense strand to SEQ ID NO: 1007138
guagcagcuagauuucuca

SEQ ID NO: 1007140 - RNA, 19 nt, Artificial Sequence
  Description of Artificial Sequence: Synthetic oligonucleotide
  Sense strand starting at position 3407 of SEQ ID NO: 914479
ucgagauguggcaguguuu

SEQ ID NO: 1007141 - RNA, 19 nt, Artificial Sequence
  Description of Artificial Sequence: Synthetic oligonucleotide
  Antisense strand to SEQ ID NO: 1007140
aaacacugccacaucucga

SEQ ID NO: 1007142 - RNA, 19 nt, Artificial Sequence
  Description of Artificial Sequence: Synthetic oligonucleotide
  Sense strand starting at position 3419 of SEQ ID NO: 914479
aguguuuagguugugugua

SEQ ID NO: 1007143 - RNA, 19 nt, Artificial Sequence
  Description of Artificial Sequence: Synthetic oligonucleotide
  Antisense strand to SEQ ID NO: 1007142
uacacacaaccuaaacacu

SEQ ID NO: 1007144 - RNA, 19 nt, Artificial Sequence
  Description of Artificial Sequence: Synthetic oligonucleotide
  Sense strand starting at position 3424 of SEQ ID NO: 914479
uuagguuguguguaaaugu

SEQ ID NO: 1007145 - RNA, 19 nt, Artificial Sequence
  Description of Artificial Sequence: Synthetic oligonucleotide
  Antisense strand to SEQ ID NO: 1007144
acauuuacacacaaccuaa

SEQ ID NO: 1007146 - RNA, 19 nt, Artificial Sequence
  Description of Artificial Sequence: Synthetic oligonucleotide
  Sense strand starting at position 3507 of SEQ ID NO: 914479
ugcucagagauagagcaau

SEQ ID NO: 1007147 - RNA, 19 nt, Artificial Sequence
  Description of Artificial Sequence: Synthetic oligonucleotide
  Antisense strand to SEQ ID NO: 1007146
auugcucuaucucugagca

SEQ ID NO: 1007148 - RNA, 19 nt, Artificial Sequence
  Description of Artificial Sequence: Synthetic oligonucleotide
  Sense strand starting at position 3688 of SEQ ID NO: 914479
cugauaguucggugaccug

SEQ ID NO: 1007149 - RNA, 19 nt, Artificial Sequence
  Description of Artificial Sequence: Synthetic oligonucleotide
  Antisense strand to SEQ ID NO: 1007148
caggucaccgaacuaucag

SEQ ID NO: 1007150 - RNA, 19 nt, Artificial Sequence
  Description of Artificial Sequence: Synthetic oligonucleotide
  Sense strand starting at position 3707 of SEQ ID NO: 914479
gcuuuaucuacuggaugag

SEQ ID NO: 1007151 - RNA, 19 nt, Artificial Sequence
  Description of Artificial Sequence: Synthetic oligonucleotide
  Antisense strand to SEQ ID NO: 1007150
cucauccaguagauaaagc

SEQ ID NO: 1007152 - RNA, 19 nt, Artificial Sequence
  Description of Artificial Sequence: Synthetic oligonucleotide
  Sense strand starting at position 3708 of SEQ ID NO: 914479
cuuuaucuacuggaugagu

SEQ ID NO: 1007153 - RNA, 19 nt, Artificial Sequence
  Description of Artificial Sequence: Synthetic oligonucleotide
  Antisense strand to SEQ ID NO: 1007152
acucauccaguagauaaag

SEQ ID NO: 1007154 - RNA, 19 nt, Artificial Sequence
  Description of Artificial Sequence: Synthetic oligonucleotide
  Sense strand starting at position 3721 of SEQ ID NO: 914479
augaguuccgcugggagau

SEQ ID NO: 1007155 - RNA, 19 nt, Artificial Sequence
  Description of Artificial Sequence: Synthetic oligonucleotide
  Antisense strand to SEQ ID NO: 1007154
aucucccagcggaacucau

SEQ ID NO: 1007156 - RNA, 19 nt, Artificial Sequence
  Description of Artificial Sequence: Synthetic oligonucleotide
  Sense strand starting at position 129 of SEQ ID NO: 914480
ggcuguguuguugcuauca

SEQ ID NO: 1007157 - RNA, 19 nt, Artificial Sequence
  Description of Artificial Sequence: Synthetic oligonucleotide
  Antisense strand to SEQ ID NO: 1007156
ugauagcaacaacacagcc

SEQ ID NO: 1007158 - RNA, 19 nt, Artificial Sequence
  Description of Artificial Sequence: Synthetic oligonucleotide
  Sense strand starting at position 289 of SEQ ID NO: 914480
cuuccuacugcagaaagua

SEQ ID NO: 1007159 - RNA, 19 nt, Artificial Sequence
  Description of Artificial Sequence: Synthetic oligonucleotide
  Antisense strand to SEQ ID NO: 1007158
uacuuucugcaguaggaag

SEQ ID NO: 1007160 - RNA, 19 nt, Artificial Sequence
  Description of Artificial Sequence: Synthetic oligonucleotide
  Sense strand starting at position 341 of SEQ ID NO: 914480
acuuuauacuggguacuca

SEQ ID NO: 1007161 - RNA, 19 nt, Artificial Sequence
  Description of Artificial Sequence: Synthetic oligonucleotide
  Antisense strand to SEQ ID NO: 1007160
ugaguacccaguauaaagu

SEQ ID NO: 1007162 - RNA, 19 nt, Artificial Sequence
  Description of Artificial Sequence: Synthetic oligonucleotide
  Sense strand starting at position 342 of SEQ ID NO: 914480
cuuuauacuggguacucaa

SEQ ID NO: 1007163 - RNA, 19 nt, Artificial Sequence
  Description of Artificial Sequence: Synthetic oligonucleotide
  Antisense strand to SEQ ID NO: 1007162
uugaguacccaguauaaag

SEQ ID NO: 1007164 - RNA, 19 nt, Artificial Sequence
  Description of Artificial Sequence: Synthetic oligonucleotide
  Sense strand starting at position 362 of SEQ ID NO: 914480
cuaaacuaccugggugaga

SEQ ID NO: 1007165 - RNA, 19 nt, Artificial Sequence
  Description of Artificial Sequence: Synthetic oligonucleotide
  Antisense strand to SEQ ID NO: 1007164
ucucacccagguaguuuag

SEQ ID NO: 1007166 - RNA, 19 nt, Artificial Sequence
  Description of Artificial Sequence: Synthetic oligonucleotide
  Sense strand starting at position 521 of SEQ ID NO: 914480
aagcaaaucggccauguaa

SEQ ID NO: 1007167 - RNA, 19 nt, Artificial Sequence
  Description of Artificial Sequence: Synthetic oligonucleotide
  Antisense strand to SEQ ID NO: 1007166
uuacauggccgauuugcuu

SEQ ID NO: 1007168 - RNA, 19 nt, Artificial Sequence
  Description of Artificial Sequence: Synthetic oligonucleotide
  Sense strand starting at position 532 of SEQ ID NO: 914480
ccauguaauuaucuguaca

SEQ ID NO: 1007169 - RNA, 19 nt, Artificial Sequence
  Description of Artificial Sequence: Synthetic oligonucleotide
  Antisense strand to SEQ ID NO: 1007168
uguacagauaauuacaugg

SEQ ID NO: 1007170 - RNA, 19 nt, Artificial Sequence
  Description of Artificial Sequence: Synthetic oligonucleotide
  Sense strand starting at position 535 of SEQ ID NO: 914480
uguaauuaucuguacauac

SEQ ID NO: 1007171 - RNA, 19 nt, Artificial Sequence
  Description of Artificial Sequence: Synthetic oligonucleotide
  Antisense strand to SEQ ID NO: 1007170
guauguacagauaauuaca

SEQ ID NO: 1007172 - RNA, 19 nt, Artificial Sequence
  Description of Artificial Sequence: Synthetic oligonucleotide
  Sense strand starting at position 563 of SEQ ID NO: 914480
gaaagagaaugcuuggagu

SEQ ID NO: 1007173 - RNA, 19 nt, Artificial Sequence
  Description of Artificial Sequence: Synthetic oligonucleotide
  Antisense strand to SEQ ID NO: 1007172
acuccaagcauucucuuuc

SEQ ID NO: 1007174 - RNA, 19 nt, Artificial Sequence
  Description of Artificial Sequence: Synthetic oligonucleotide
  Sense strand starting at position 565 of SEQ ID NO: 914480
aagagaaugcuuggaguug

SEQ ID NO: 1007175 - RNA, 19 nt, Artificial Sequence
  Description of Artificial Sequence: Synthetic oligonucleotide
  Antisense strand to SEQ ID NO: 1007174
caacuccaagcauucucuu

SEQ ID NO: 1007176 - RNA, 19 nt, Artificial Sequence
  Description of Artificial Sequence: Synthetic oligonucleotide
  Sense strand starting at position 582 of SEQ ID NO: 914480
ugagccgugcuagaauaua

SEQ ID NO: 1007177 - RNA, 19 nt, Artificial Sequence
  Description of Artificial Sequence: Synthetic oligonucleotide
  Antisense strand to SEQ ID NO: 1007176
uauauucuagcacggcuca

SEQ ID NO: 1007178 - RNA, 19 nt, Artificial Sequence
  Description of Artificial Sequence: Synthetic oligonucleotide
  Sense strand starting at position 940 of SEQ ID NO: 914480
gacuguaagcuuuggaaca

SEQ ID NO: 1007179 - RNA, 19 nt, Artificial Sequence
  Description of Artificial Sequence: Synthetic oligonucleotide
  Antisense strand to SEQ ID NO: 1007178
uguuccaaagcuuacaguc

SEQ ID NO: 1007180 - RNA, 19 nt, Artificial Sequence
  Description of Artificial Sequence: Synthetic oligonucleotide
  Sense strand starting at position 1028 of SEQ ID NO: 914480
uuggaauugugaucccuuc

SEQ ID NO: 1007181 - RNA, 19 nt, Artificial Sequence
  Description of Artificial Sequence: Synthetic oligonucleotide
  Antisense strand to SEQ ID NO: 1007180
gaagggaucacaauuccaa

SEQ ID NO: 1007182 - RNA, 19 nt, Artificial Sequence
  Description of Artificial Sequence: Synthetic oligonucleotide
  Sense strand starting at position 1046 of SEQ ID NO: 914480
cugugaccaccuugauaac

SEQ ID NO: 1007183 - RNA, 19 nt, Artificial Sequence
  Description of Artificial Sequence: Synthetic oligonucleotide
  Antisense strand to SEQ ID NO: 1007182
guuaucaagguggucacag

SEQ ID NO: 1007184 - RNA, 19 nt, Artificial Sequence
  Description of Artificial Sequence: Synthetic oligonucleotide
  Sense strand starting at position 1303 of SEQ ID NO: 914480
accaaauggugcuuccaca

SEQ ID NO: 1007185 - RNA, 19 nt, Artificial Sequence
  Description of Artificial Sequence: Synthetic oligonucleotide
  Antisense strand to SEQ ID NO: 1007184
uguggaagcaccauuuggu

SEQ ID NO: 1007186 - RNA, 19 nt, Artificial Sequence
  Description of Artificial Sequence: Synthetic oligonucleotide
  Sense strand starting at position 1384 of SEQ ID NO: 914480
gcagacagcucacuugacu

SEQ ID NO: 1007187 - RNA, 19 nt, Artificial Sequence
  Description of Artificial Sequence: Synthetic oligonucleotide
  Antisense strand to SEQ ID NO: 1007186
agucaagugagcugucugc

SEQ ID NO: 1007188 - RNA, 19 nt, Artificial Sequence
  Description of Artificial Sequence: Synthetic oligonucleotide
  Sense strand starting at position 2111 of SEQ ID NO: 914480
ggagcaagaucucuggguu

SEQ ID NO: 1007189 - RNA, 19 nt, Artificial Sequence
  Description of Artificial Sequence: Synthetic oligonucleotide
  Antisense strand to SEQ ID NO: 1007188
aacccagagaucuugcucc

SEQ ID NO: 1007190 - RNA, 19 nt, Artificial Sequence
  Description of Artificial Sequence: Synthetic oligonucleotide
  Sense strand starting at position 2112 of SEQ ID NO: 914480
gagcaagaucucuggguuu

SEQ ID NO: 1007191 - RNA, 19 nt, Artificial Sequence
  Description of Artificial Sequence: Synthetic oligonucleotide
  Antisense strand to SEQ ID NO: 1007190
aaacccagagaucuugcuc

SEQ ID NO: 1007192 - RNA, 19 nt, Artificial Sequence
  Description of Artificial Sequence: Synthetic oligonucleotide
  Sense strand starting at position 2139 of SEQ ID NO: 914480
guuggauauccugggagag

SEQ ID NO: 1007193 - RNA, 19 nt, Artificial Sequence
  Description of Artificial Sequence: Synthetic oligonucleotide
  Antisense strand to SEQ ID NO: 1007192
cucucccaggauauccaac

SEQ ID NO: 1007194 - RNA, 19 nt, Artificial Sequence
  Description of Artificial Sequence: Synthetic oligonucleotide
  Sense strand starting at position 2141 of SEQ ID NO: 914480
uggauauccugggagagga

SEQ ID NO: 1007195 - RNA, 19 nt, Artificial Sequence
  Description of Artificial Sequence: Synthetic oligonucleotide
  Antisense strand to SEQ ID NO: 1007194
uccucucccaggauaucca

SEQ ID NO: 1007196 - RNA, 19 nt, Artificial Sequence
  Description of Artificial Sequence: Synthetic oligonucleotide
  Sense strand starting at position 2235 of SEQ ID NO: 914480
guuggugaaucuuccaagu

SEQ ID NO: 1007197 - RNA, 19 nt, Artificial Sequence
  Description of Artificial Sequence: Synthetic oligonucleotide
  Antisense strand to SEQ ID NO: 1007196
acuuggaagauucaccaac

SEQ ID NO: 1007198 - RNA, 19 nt, Artificial Sequence
  Description of Artificial Sequence: Synthetic oligonucleotide
  Sense strand starting at position 2294 of SEQ ID NO: 914480
guccacauggcuugaauga

SEQ ID NO: 1007199 - RNA, 19 nt, Artificial Sequence
  Description of Artificial Sequence: Synthetic oligonucleotide
  Antisense strand to SEQ ID NO: 1007198
ucauucaagccauguggac

SEQ ID NO: 1007200 - RNA, 19 nt, Artificial Sequence
  Description of Artificial Sequence: Synthetic oligonucleotide
  Sense strand starting at position 2731 of SEQ ID NO: 914480
ccacauaucuguuuauuga

SEQ ID NO: 1007201 - RNA, 19 nt, Artificial Sequence
  Description of Artificial Sequence: Synthetic oligonucleotide
  Antisense strand to SEQ ID NO: 1007200
ucaauaaacagauaugugg

SEQ ID NO: 1007202 - RNA, 19 nt, Artificial Sequence
  Description of Artificial Sequence: Synthetic oligonucleotide
  Sense strand starting at position 2856 of SEQ ID NO: 914480
cuccuuucuguguaaacau

SEQ ID NO: 1007203 - RNA, 19 nt, Artificial Sequence
  Description of Artificial Sequence: Synthetic oligonucleotide
  Antisense strand to SEQ ID NO: 1007202
auguuuacacagaaaggag

SEQ ID NO: 1007204 - RNA, 19 nt, Artificial Sequence
  Description of Artificial Sequence: Synthetic oligonucleotide
  Sense strand starting at position 2919 of SEQ ID NO: 914480
gaggaagaguuuguaauau

SEQ ID NO: 1007205 - RNA, 19 nt, Artificial Sequence
  Description of Artificial Sequence: Synthetic oligonucleotide
  Antisense strand to SEQ ID NO: 1007204
auauuacaaacucuuccuc

SEQ ID NO: 1007206 - RNA, 19 nt, Artificial Sequence
  Description of Artificial Sequence: Synthetic oligonucleotide
  Sense strand starting at position 3011 of SEQ ID NO: 914480
augguuuaauguuuggaaa

SEQ ID NO: 1007207 - RNA, 19 nt, Artificial Sequence
  Description of Artificial Sequence: Synthetic oligonucleotide
  Antisense strand to SEQ ID NO: 1007206
uuuccaaacauuaaaccau

SEQ ID NO: 1007208 - RNA, 19 nt, Artificial Sequence
  Description of Artificial Sequence: Synthetic oligonucleotide
  Sense strand starting at position 3012 of SEQ ID NO: 914480
ugguuuaauguuuggaaau

SEQ ID NO: 1007209 - RNA, 19 nt, Artificial Sequence
  Description of Artificial Sequence: Synthetic oligonucleotide
  Antisense strand to SEQ ID NO: 1007208
auuuccaaacauuaaacca

SEQ ID NO: 1007210 - RNA, 19 nt, Artificial Sequence
  Description of Artificial Sequence: Synthetic oligonucleotide
  Sense strand starting at position 3023 of SEQ ID NO: 914480
uuggaaaucaaacgcagua

SEQ ID NO: 1007211 - RNA, 19 nt, Artificial Sequence
  Description of Artificial Sequence: Synthetic oligonucleotide
  Antisense strand to SEQ ID NO: 1007210
uacugcguuugauuuccaa

SEQ ID NO: 1007212 - RNA, 19 nt, Artificial Sequence
  Description of Artificial Sequence: Synthetic oligonucleotide
  Sense strand starting at position 3025 of SEQ ID NO: 914480
ggaaaucaaacgcaguauu

SEQ ID NO: 1007213 - RNA, 19 nt, Artificial Sequence
  Description of Artificial Sequence: Synthetic oligonucleotide
  Antisense strand to SEQ ID NO: 1007212
aauacugcguuugauuucc

SEQ ID NO: 1007214 - RNA, 19 nt, Artificial Sequence
  Description of Artificial Sequence: Synthetic oligonucleotide
  Sense strand starting at position 3039 of SEQ ID NO: 914480
guauuuauuugucauguga

SEQ ID NO: 1007215 - RNA, 19 nt, Artificial Sequence
  Description of Artificial Sequence: Synthetic oligonucleotide
  Antisense strand to SEQ ID NO: 1007214
ucacaugacaaauaaauac

SEQ ID NO: 1007216 - RNA, 19 nt, Artificial Sequence
  Description of Artificial Sequence: Synthetic oligonucleotide
  Sense strand starting at position 3041 of SEQ ID NO: 914480
auuuauuugucaugugaac

SEQ ID NO: 1007217 - RNA, 19 nt, Artificial Sequence
  Description of Artificial Sequence: Synthetic oligonucleotide
  Antisense strand to SEQ ID NO: 1007216
guucacaugacaaauaaau

SEQ ID NO: 1007218 - RNA, 19 nt, Artificial Sequence
  Description of Artificial Sequence: Synthetic oligonucleotide
  Sense strand starting at position 3067 of SEQ ID NO: 914480
aguaaaucugcauggacuu

SEQ ID NO: 1007219 - RNA, 19 nt, Artificial Sequence
  Description of Artificial Sequence: Synthetic oligonucleotide
  Antisense strand to SEQ ID NO: 1007218
aaguccaugcagauuuacu

SEQ ID NO: 1007220 - RNA, 19 nt, Artificial Sequence
  Description of Artificial Sequence: Synthetic oligonucleotide
  Sense strand starting at position 3080 of SEQ ID NO: 914480
ggacuucuugccuggugag

SEQ ID NO: 1007221 - RNA, 19 nt, Artificial Sequence
  Description of Artificial Sequence: Synthetic oligonucleotide
  Antisense strand to SEQ ID NO: 1007220
cucaccaggcaagaagucc

SEQ ID NO: 1007222 - RNA, 19 nt, Artificial Sequence
  Description of Artificial Sequence: Synthetic oligonucleotide
  Sense strand starting at position 3286 of SEQ ID NO: 914480
uaaauaagaccuggcgcua

SEQ ID NO: 1007223 - RNA, 19 nt, Artificial Sequence
  Description of Artificial Sequence: Synthetic oligonucleotide
  Antisense strand to SEQ ID NO: 1007222
uagcgccaggucuuauuua

SEQ ID NO: 1007224 - RNA, 19 nt, Artificial Sequence
  Description of Artificial Sequence: Synthetic oligonucleotide
  Sense strand starting at position 3320 of SEQ ID NO: 914480
cccucugguacggaauaaa

SEQ ID NO: 1007225 - RNA, 19 nt, Artificial Sequence
  Description of Artificial Sequence: Synthetic oligonucleotide
  Antisense strand to SEQ ID NO: 1007224
uuuauuccguaccagaggg

SEQ ID NO: 1007226 - RNA, 19 nt, Artificial Sequence
  Description of Artificial Sequence: Synthetic oligonucleotide
  Sense strand starting at position 3399 of SEQ ID NO: 914480
gugcuaccauuccuagaga

SEQ ID NO: 1007227 - RNA, 19 nt, Artificial Sequence
  Description of Artificial Sequence: Synthetic oligonucleotide
  Antisense strand to SEQ ID NO: 1007226
ucucuaggaaugguagcac

SEQ ID NO: 1007228 - RNA, 19 nt, Artificial Sequence
  Description of Artificial Sequence: Synthetic oligonucleotide
  Sense strand starting at position 3654 of SEQ ID NO: 914480
agcucaauuugcucaagua

SEQ ID NO: 1007229 - RNA, 19 nt, Artificial Sequence
  Description of Artificial Sequence: Synthetic oligonucleotide
  Antisense strand to SEQ ID NO: 1007228
uacuugagcaaauugagcu

SEQ ID NO: 1007230 - RNA, 19 nt, Artificial Sequence
  Description of Artificial Sequence: Synthetic oligonucleotide
  Sense strand starting at position 3846 of SEQ ID NO: 914480
aauuguguuugagcauaga

SEQ ID NO: 1007231 - RNA, 19 nt, Artificial Sequence
  Description of Artificial Sequence: Synthetic oligonucleotide
  Antisense strand to SEQ ID NO: 1007230
ucuaugcucaaacacaauu

SEQ ID NO: 1007232 - RNA, 19 nt, Artificial Sequence
  Description of Artificial Sequence: Synthetic oligonucleotide
  Sense strand starting at position 3878 of SEQ ID NO: 914480
auggcuuguccagagaaua

SEQ ID NO: 1007233 - RNA, 19 nt, Artificial Sequence
  Description of Artificial Sequence: Synthetic oligonucleotide
  Antisense strand to SEQ ID NO: 1007232
uauucucuggacaagccau

SEQ ID NO: 1007234 - RNA, 19 nt, Artificial Sequence
  Description of Artificial Sequence: Synthetic oligonucleotide
  Sense strand starting at position 3918 of SEQ ID NO: 914480
gaacauagaucagaugaag

SEQ ID NO: 1007235 - RNA, 19 nt, Artificial Sequence
  Description of Artificial Sequence: Synthetic oligonucleotide
  Antisense strand to SEQ ID NO: 1007234
cuucaucugaucuauguuc

SEQ ID NO: 1007236 - RNA, 19 nt, Artificial Sequence
  Description of Artificial Sequence: Synthetic oligonucleotide
  Sense strand starting at position 7 of SEQ ID NO: 914481
gcccuaucucaaugaaguc

SEQ ID NO: 1007237 - RNA, 19 nt, Artificial Sequence
  Description of Artificial Sequence: Synthetic oligonucleotide
  Antisense strand to SEQ ID NO: 1007236
gacuucauugagauagggc

SEQ ID NO: 1007238 - RNA, 19 nt, Artificial Sequence
  Description of Artificial Sequence: Synthetic oligonucleotide
  Sense strand starting at position 114 of SEQ ID NO: 914481
ggccucuuacuuugggaca

SEQ ID NO: 1007239 - RNA, 19 nt, Artificial Sequence
  Description of Artificial Sequence: Synthetic oligonucleotide
  Antisense strand to SEQ ID NO: 1007238
ugucccaaaguaagaggcc

SEQ ID NO: 1007240 - RNA, 19 nt, Artificial Sequence
  Description of Artificial Sequence: Synthetic oligonucleotide
  Sense strand starting at position 152 of SEQ ID NO: 914481
uguuguuacaugugagaag

SEQ ID NO: 1007241 - RNA, 19 nt, Artificial Sequence
  Description of Artificial Sequence: Synthetic oligonucleotide
  Antisense strand to SEQ ID NO: 1007240
cuucucacauguaacaaca

SEQ ID NO: 1007242 - RNA, 19 nt, Artificial Sequence
  Description of Artificial Sequence: Synthetic oligonucleotide
  Sense strand starting at position 219 of SEQ ID NO: 914481
agauaauccugccuuugga

SEQ ID NO: 1007243 - RNA, 19 nt, Artificial Sequence
  Description of Artificial Sequence: Synthetic oligonucleotide
  Antisense strand to SEQ ID NO: 1007242
uccaaaggcaggauuaucu

SEQ ID NO: 1007244 - RNA, 19 nt, Artificial Sequence
  Description of Artificial Sequence: Synthetic oligonucleotide
  Sense strand starting at position 240 of SEQ ID NO: 914481
ccgcauugugcucaugaaa

SEQ ID NO: 1007245 - RNA, 19 nt, Artificial Sequence
  Description of Artificial Sequence: Synthetic oligonucleotide
  Antisense strand to SEQ ID NO: 1007244
uuucaugagcacaaugcgg

SEQ ID NO: 1007246 - RNA, 19 nt, Artificial Sequence
  Description of Artificial Sequence: Synthetic oligonucleotide
  Sense strand starting at position 243 of SEQ ID NO: 914481
cauugugcucaugaaagca

SEQ ID NO: 1007247 - RNA, 19 nt, Artificial Sequence
  Description of Artificial Sequence: Synthetic oligonucleotide
  Antisense strand to SEQ ID NO: 1007246
ugcuuucaugagcacaaug

SEQ ID NO: 1007248 - RNA, 19 nt, Artificial Sequence
  Description of Artificial Sequence: Synthetic oligonucleotide
  Sense strand starting at position 1180 of SEQ ID NO: 914481
ggaccuauccgaggucaca

SEQ ID NO: 1007249 - RNA, 19 nt, Artificial Sequence
  Description of Artificial Sequence: Synthetic oligonucleotide
  Antisense strand to SEQ ID NO: 1007248
ugugaccucggauaggucc

SEQ ID NO: 1007250 - RNA, 19 nt, Artificial Sequence
  Description of Artificial Sequence: Synthetic oligonucleotide
  Sense strand starting at position 1313 of SEQ ID NO: 914481
uaggacuuccgcuaugagu

SEQ ID NO: 1007251 - RNA, 19 nt, Artificial Sequence
  Description of Artificial Sequence: Synthetic oligonucleotide
  Antisense strand to SEQ ID NO: 1007250
acucauagcggaaguccua

SEQ ID NO: 1007252 - RNA, 19 nt, Artificial Sequence
  Description of Artificial Sequence: Synthetic oligonucleotide
  Sense strand starting at position 1322 of SEQ ID NO: 914481
cgcuaugaguccuugacau

SEQ ID NO: 1007253 - RNA, 19 nt, Artificial Sequence
  Description of Artificial Sequence: Synthetic oligonucleotide
  Antisense strand to SEQ ID NO: 1007252
augucaaggacucauagcg

SEQ ID NO: 1007254 - RNA, 19 nt, Artificial Sequence
  Description of Artificial Sequence: Synthetic oligonucleotide
  Sense strand starting at position 1495 of SEQ ID NO: 914481
aggccugaaugcucugcua

SEQ ID NO: 1007255 - RNA, 19 nt, Artificial Sequence
  Description of Artificial Sequence: Synthetic oligonucleotide
  Antisense strand to SEQ ID NO: 1007254
uagcagagcauucaggccu

SEQ ID NO: 1007256 - RNA, 19 nt, Artificial Sequence
  Description of Artificial Sequence: Synthetic oligonucleotide
  Sense strand starting at position 1497 of SEQ ID NO: 914481
gccugaaugcucugcuaaa

SEQ ID NO: 1007257 - RNA, 19 nt, Artificial Sequence
  Description of Artificial Sequence: Synthetic oligonucleotide
  Antisense strand to SEQ ID NO: 1007256
uuuagcagagcauucaggc

SEQ ID NO: 1007258 - RNA, 19 nt, Artificial Sequence
  Description of Artificial Sequence: Synthetic oligonucleotide
  Sense strand starting at position 1517 of SEQ ID NO: 914481
uccaacucagccuaggaau

SEQ ID NO: 1007259 - RNA, 19 nt, Artificial Sequence
  Description of Artificial Sequence: Synthetic oligonucleotide
  Antisense strand to SEQ ID NO: 1007258
auuccuaggcugaguugga

SEQ ID NO: 1007260 - RNA, 19 nt, Artificial Sequence
  Description of Artificial Sequence: Synthetic oligonucleotide
  Sense strand starting at position 1756 of SEQ ID NO: 914481
cagagucagccuuggguaa

SEQ ID NO: 1007261 - RNA, 19 nt, Artificial Sequence
  Description of Artificial Sequence: Synthetic oligonucleotide
  Antisense strand to SEQ ID NO: 1007260
uuacccaaggcugacucug

SEQ ID NO: 1007262 - RNA, 19 nt, Artificial Sequence
  Description of Artificial Sequence: Synthetic oligonucleotide
  Sense strand starting at position 1757 of SEQ ID NO: 914481
agagucagccuuggguaaa

SEQ ID NO: 1007263 - RNA, 19 nt, Artificial Sequence
  Description of Artificial Sequence: Synthetic oligonucleotide
  Antisense strand to SEQ ID NO: 1007262
uuuacccaaggcugacucu

SEQ ID NO: 1007264 - RNA, 19 nt, Artificial Sequence
  Description of Artificial Sequence: Synthetic oligonucleotide
  Sense strand starting at position 2403 of SEQ ID NO: 914481
cuuugugagggaugagguu

SEQ ID NO: 1007265 - RNA, 19 nt, Artificial Sequence
  Description of Artificial Sequence: Synthetic oligonucleotide
  Antisense strand to SEQ ID NO: 1007264
aaccucaucccucacaaag

SEQ ID NO: 1007266 - RNA, 19 nt, Artificial Sequence
  Description of Artificial Sequence: Synthetic oligonucleotide
  Sense strand starting at position 2409 of SEQ ID NO: 914481
gagggaugagguuggaagu

SEQ ID NO: 1007267 - RNA, 19 nt, Artificial Sequence
  Description of Artificial Sequence: Synthetic oligonucleotide
  Antisense strand to SEQ ID NO: 1007266
acuuccaaccucaucccuc

SEQ ID NO: 1007268 - RNA, 19 nt, Artificial Sequence
  Description of Artificial Sequence: Synthetic oligonucleotide
  Sense strand starting at position 2422 of SEQ ID NO: 914481
ggaaguuugagcugacuuu

SEQ ID NO: 1007269 - RNA, 19 nt, Artificial Sequence
  Description of Artificial Sequence: Synthetic oligonucleotide
  Antisense strand to SEQ ID NO: 1007268
aaagucagcucaaacuucc

SEQ ID NO: 1007270 - RNA, 19 nt, Artificial Sequence
  Description of Artificial Sequence: Synthetic oligonucleotide
  Sense strand starting at position 2483 of SEQ ID NO: 914481
ccaugaaugcugggcuugu

SEQ ID NO: 1007271 - RNA, 19 nt, Artificial Sequence
  Description of Artificial Sequence: Synthetic oligonucleotide
  Antisense strand to SEQ ID NO: 1007270
acaagcccagcauucaugg

SEQ ID NO: 1007272 - RNA, 19 nt, Artificial Sequence
  Description of Artificial Sequence: Synthetic oligonucleotide
  Sense strand starting at position 2555 of SEQ ID NO: 914481
gagagaucuccauguugac

SEQ ID NO: 1007273 - RNA, 19 nt, Artificial Sequence
  Description of Artificial Sequence: Synthetic oligonucleotide
  Antisense strand to SEQ ID NO: 1007272
gucaacauggagaucucuc

SEQ ID NO: 1007274 - RNA, 19 nt, Artificial Sequence
  Description of Artificial Sequence: Synthetic oligonucleotide
  Sense strand starting at position 2610 of SEQ ID NO: 914481
uugugugaucuccauguug

SEQ ID NO: 1007275 - RNA, 19 nt, Artificial Sequence
  Description of Artificial Sequence: Synthetic oligonucleotide
  Antisense strand to SEQ ID NO: 1007274
caacauggagaucacacaa

SEQ ID NO: 1007276 - RNA, 19 nt, Artificial Sequence
  Description of Artificial Sequence: Synthetic oligonucleotide
  Sense strand starting at position 2612 of SEQ ID NO: 914481
gugugaucuccauguugag

SEQ ID NO: 1007277 - RNA, 19 nt, Artificial Sequence
  Description of Artificial Sequence: Synthetic oligonucleotide
  Antisense strand to SEQ ID NO: 1007276
cucaacauggagaucacac

SEQ ID NO: 1007278 - RNA, 19 nt, Artificial Sequence
  Description of Artificial Sequence: Synthetic oligonucleotide
  Sense strand starting at position 2630 of SEQ ID NO: 914481
gguguaugugugagcucca

SEQ ID NO: 1007279 - RNA, 19 nt, Artificial Sequence
  Description of Artificial Sequence: Synthetic oligonucleotide
  Antisense strand to SEQ ID NO: 1007278
uggagcucacacauacacc

SEQ ID NO: 1007280 - RNA, 19 nt, Artificial Sequence
  Description of Artificial Sequence: Synthetic oligonucleotide
  Sense strand starting at position 2637 of SEQ ID NO: 914481
gugugagcuccauguugag

SEQ ID NO: 1007281 - RNA, 19 nt, Artificial Sequence
  Description of Artificial Sequence: Synthetic oligonucleotide
  Antisense strand to SEQ ID NO: 1007280
cucaacauggagcucacac

SEQ ID NO: 1007282 - RNA, 19 nt, Artificial Sequence
  Description of Artificial Sequence: Synthetic oligonucleotide
  Sense strand starting at position 2682 of SEQ ID NO: 914481
gugugaacuccauguugau

SEQ ID NO: 1007283 - RNA, 19 nt, Artificial Sequence
  Description of Artificial Sequence: Synthetic oligonucleotide
  Antisense strand to SEQ ID NO: 1007282
aucaacauggaguucacac

SEQ ID NO: 1007284 - RNA, 19 nt, Artificial Sequence
  Description of Artificial Sequence: Synthetic oligonucleotide
  Sense strand starting at position 2705 of SEQ ID NO: 914481
guguaaucuccauguugac

SEQ ID NO: 1007285 - RNA, 19 nt, Artificial Sequence
  Description of Artificial Sequence: Synthetic oligonucleotide
  Antisense strand to SEQ ID NO: 1007284
gucaacauggagauuacac

SEQ ID NO: 1007286 - RNA, 19 nt, Artificial Sequence
  Description of Artificial Sequence: Synthetic oligonucleotide
  Sense strand starting at position 2717 of SEQ ID NO: 914481
uguugacgugugugauuuc

SEQ ID NO: 1007287 - RNA, 19 nt, Artificial Sequence
  Description of Artificial Sequence: Synthetic oligonucleotide
  Antisense strand to SEQ ID NO: 1007286
gaaaucacacacgucaaca

SEQ ID NO: 1007288 - RNA, 19 nt, Artificial Sequence
  Description of Artificial Sequence: Synthetic oligonucleotide
  Sense strand starting at position 2720 of SEQ ID NO: 914481
ugacgugugugauuucugu

SEQ ID NO: 1007289 - RNA, 19 nt, Artificial Sequence
  Description of Artificial Sequence: Synthetic oligonucleotide
  Antisense strand to SEQ ID NO: 1007288
acagaaaucacacacguca

SEQ ID NO: 1007290 - RNA, 19 nt, Artificial Sequence
  Description of Artificial Sequence: Synthetic oligonucleotide
  Sense strand starting at position 2726 of SEQ ID NO: 914481
gugugauuucuguguugug

SEQ ID NO: 1007291 - RNA, 19 nt, Artificial Sequence
  Description of Artificial Sequence: Synthetic oligonucleotide
  Antisense strand to SEQ ID NO: 1007290
cacaacacagaaaucacac

SEQ ID NO: 1007292 - RNA, 19 nt, Artificial Sequence
  Description of Artificial Sequence: Synthetic oligonucleotide
  Sense strand starting at position 2727 of SEQ ID NO: 914481
ugugauuucuguguugugu

SEQ ID NO: 1007293 - RNA, 19 nt, Artificial Sequence
  Description of Artificial Sequence: Synthetic oligonucleotide
  Antisense strand to SEQ ID NO: 1007292
acacaacacagaaaucaca

SEQ ID NO: 1007294 - RNA, 19 nt, Artificial Sequence
  Description of Artificial Sequence: Synthetic oligonucleotide
  Sense strand starting at position 2769 of SEQ ID NO: 914481
gauugugaucgccauguug

SEQ ID NO: 1007295 - RNA, 19 nt, Artificial Sequence
  Description of Artificial Sequence: Synthetic oligonucleotide
  Antisense strand to SEQ ID NO: 1007294
caacauggcgaucacaauc

SEQ ID NO: 1007296 - RNA, 19 nt, Artificial Sequence
  Description of Artificial Sequence: Synthetic oligonucleotide
  Sense strand starting at position 2844 of SEQ ID NO: 914481
gugugauuuccauguugug

SEQ ID NO: 1007297 - RNA, 19 nt, Artificial Sequence
  Description of Artificial Sequence: Synthetic oligonucleotide
  Antisense strand to SEQ ID NO: 1007296
cacaacauggaaaucacac

SEQ ID NO: 1007298 - RNA, 19 nt, Artificial Sequence
  Description of Artificial Sequence: Synthetic oligonucleotide
  Sense strand starting at position 2853 of SEQ ID NO: 914481
ccauguuguguguuuguga

SEQ ID NO: 1007299 - RNA, 19 nt, Artificial Sequence
  Description of Artificial Sequence: Synthetic oligonucleotide
  Antisense strand to SEQ ID NO: 1007298
ucacaaacacacaacaugg

SEQ ID NO: 1007300 - RNA, 19 nt, Artificial Sequence
  Description of Artificial Sequence: Synthetic oligonucleotide
  Sense strand starting at position 2856 of SEQ ID NO: 914481
uguuguguguuugugauuu

SEQ ID NO: 1007301 - RNA, 19 nt, Artificial Sequence
  Description of Artificial Sequence: Synthetic oligonucleotide
  Antisense strand to SEQ ID NO: 1007300
aaaucacaaacacacaaca

SEQ ID NO: 1007302 - RNA, 19 nt, Artificial Sequence
  Description of Artificial Sequence: Synthetic oligonucleotide
  Sense strand starting at position 2860 of SEQ ID NO: 914481
guguguuugugauuuccau

SEQ ID NO: 1007303 - RNA, 19 nt, Artificial Sequence
  Description of Artificial Sequence: Synthetic oligonucleotide
  Antisense strand to SEQ ID NO: 1007302
auggaaaucacaaacacac

SEQ ID NO: 1007304 - RNA, 19 nt, Artificial Sequence
  Description of Artificial Sequence: Synthetic oligonucleotide
  Sense strand starting at position 3266 of SEQ ID NO: 914481
gugugaucuccauguggau

SEQ ID NO: 1007305 - RNA, 19 nt, Artificial Sequence
  Description of Artificial Sequence: Synthetic oligonucleotide
  Antisense strand to SEQ ID NO: 1007304
auccacauggagaucacac

SEQ ID NO: 1007306 - RNA, 19 nt, Artificial Sequence
  Description of Artificial Sequence: Synthetic oligonucleotide
  Sense strand starting at position 3268 of SEQ ID NO: 914481
gugaucuccauguggauga

SEQ ID NO: 1007307 - RNA, 19 nt, Artificial Sequence
  Description of Artificial Sequence: Synthetic oligonucleotide
  Antisense strand to SEQ ID NO: 1007306
ucauccacauggagaucac

SEQ ID NO: 1007308 - RNA, 19 nt, Artificial Sequence
  Description of Artificial Sequence: Synthetic oligonucleotide
  Sense strand starting at position 3278 of SEQ ID NO: 914481
uguggaugagugugugauc

SEQ ID NO: 1007309 - RNA, 19 nt, Artificial Sequence
  Description of Artificial Sequence: Synthetic oligonucleotide
  Antisense strand to SEQ ID NO: 1007308
gaucacacacucauccaca

SEQ ID NO: 1007310 - RNA, 19 nt, Artificial Sequence
  Description of Artificial Sequence: Synthetic oligonucleotide
  Sense strand starting at position 3900 of SEQ ID NO: 914481
gugugaucuccauguuuau

SEQ ID NO: 1007311 - RNA, 19 nt, Artificial Sequence
  Description of Artificial Sequence: Synthetic oligonucleotide
  Antisense strand to SEQ ID NO: 1007310
auaaacauggagaucacac

SEQ ID NO: 1007312 - RNA, 19 nt, Artificial Sequence
  Description of Artificial Sequence: Synthetic oligonucleotide
  Sense strand starting at position 3939 of SEQ ID NO: 914481
uguugauaugugugaaugu

SEQ ID NO: 1007313 - RNA, 19 nt, Artificial Sequence
  Description of Artificial Sequence: Synthetic oligonucleotide
  Antisense strand to SEQ ID NO: 1007312
acauucacacauaucaaca

SEQ ID NO: 1007314 - RNA, 19 nt, Artificial Sequence
  Description of Artificial Sequence: Synthetic oligonucleotide
  Sense strand starting at position 3954 of SEQ ID NO: 914481
augugaucuccauguugug

SEQ ID NO: 1007315 - RNA, 19 nt, Artificial Sequence
  Description of Artificial Sequence: Synthetic oligonucleotide
  Antisense strand to SEQ ID NO: 1007314
cacaacauggagaucacau

SEQ ID NO: 1007316 - RNA, 19 nt, Artificial Sequence
  Description of Artificial Sequence: Synthetic oligonucleotide
  Sense strand starting at position 65 of SEQ ID NO: 914482
cccacuuauuaggccagaa

SEQ ID NO: 1007317 - RNA, 19 nt, Artificial Sequence
  Description of Artificial Sequence: Synthetic oligonucleotide
  Antisense strand to SEQ ID NO: 1007316
uucuggccuaauaaguggg

SEQ ID NO: 1007318 - RNA, 19 nt, Artificial Sequence
  Description of Artificial Sequence: Synthetic oligonucleotide
  Sense strand starting at position 69 of SEQ ID NO: 914482
cuuauuaggccagaacucu

SEQ ID NO: 1007319 - RNA, 19 nt, Artificial Sequence
  Description of Artificial Sequence: Synthetic oligonucleotide
  Antisense strand to SEQ ID NO: 1007318
agaguucuggccuaauaag

SEQ ID NO: 1007320 - RNA, 19 nt, Artificial Sequence
  Description of Artificial Sequence: Synthetic oligonucleotide
  Sense strand starting at position 77 of SEQ ID NO: 914482
gccagaacucuuuggacca

SEQ ID NO: 1007321 - RNA, 19 nt, Artificial Sequence
  Description of Artificial Sequence: Synthetic oligonucleotide
  Antisense strand to SEQ ID NO: 1007320
ugguccaaagaguucuggc

SEQ ID NO: 1007322 - RNA, 19 nt, Artificial Sequence
  Description of Artificial Sequence: Synthetic oligonucleotide
  Sense strand starting at position 220 of SEQ ID NO: 914482
aaccaagguuuagugaaua

SEQ ID NO: 1007323 - RNA, 19 nt, Artificial Sequence
  Description of Artificial Sequence: Synthetic oligonucleotide
  Antisense strand to SEQ ID NO: 1007322
uauucacuaaaccuugguu

SEQ ID NO: 1007324 - RNA, 19 nt, Artificial Sequence
  Description of Artificial Sequence: Synthetic oligonucleotide
  Sense strand starting at position 225 of SEQ ID NO: 914482
agguuuagugaauauguuu

SEQ ID NO: 1007325 - RNA, 19 nt, Artificial Sequence
  Description of Artificial Sequence: Synthetic oligonucleotide
  Antisense strand to SEQ ID NO: 1007324
aaacauauucacuaaaccu

SEQ ID NO: 1007326 - RNA, 19 nt, Artificial Sequence
  Description of Artificial Sequence: Synthetic oligonucleotide
  Sense strand starting at position 232 of SEQ ID NO: 914482
gugaauauguuuccuaaga

SEQ ID NO: 1007327 - RNA, 19 nt, Artificial Sequence
  Description of Artificial Sequence: Synthetic oligonucleotide
  Antisense strand to SEQ ID NO: 1007326
ucuuaggaaacauauucac

SEQ ID NO: 1007328 - RNA, 19 nt, Artificial Sequence
  Description of Artificial Sequence: Synthetic oligonucleotide
  Sense strand starting at position 233 of SEQ ID NO: 914482
ugaauauguuuccuaagau

SEQ ID NO: 1007329 - RNA, 19 nt, Artificial Sequence
  Description of Artificial Sequence: Synthetic oligonucleotide
  Antisense strand to SEQ ID NO: 1007328
aucuuaggaaacauauuca

SEQ ID NO: 1007330 - RNA, 19 nt, Artificial Sequence
  Description of Artificial Sequence: Synthetic oligonucleotide
  Sense strand starting at position 269 of SEQ ID NO: 914482
agaagucuuugccuuuaga

SEQ ID NO: 1007331 - RNA, 19 nt, Artificial Sequence
  Description of Artificial Sequence: Synthetic oligonucleotide
  Antisense strand to SEQ ID NO: 1007330
ucuaaaggcaaagacuucu

SEQ ID NO: 1007332 - RNA, 19 nt, Artificial Sequence
  Description of Artificial Sequence: Synthetic oligonucleotide
  Sense strand starting at position 272 of SEQ ID NO: 914482
agucuuugccuuuagaaag

SEQ ID NO: 1007333 - RNA, 19 nt, Artificial Sequence
  Description of Artificial Sequence: Synthetic oligonucleotide
  Antisense strand to SEQ ID NO: 1007332
cuuucuaaaggcaaagacu

SEQ ID NO: 1007334 - RNA, 19 nt, Artificial Sequence
  Description of Artificial Sequence: Synthetic oligonucleotide
  Sense strand starting at position 395 of SEQ ID NO: 914482
gcagcugucaaagaugaau

SEQ ID NO: 1007335 - RNA, 19 nt, Artificial Sequence
  Description of Artificial Sequence: Synthetic oligonucleotide
  Antisense strand to SEQ ID NO: 1007334
auucaucuuugacagcugc

SEQ ID NO: 1007336 - RNA, 19 nt, Artificial Sequence
  Description of Artificial Sequence: Synthetic oligonucleotide
  Sense strand starting at position 401 of SEQ ID NO: 914482
gucaaagaugaaugccauu

SEQ ID NO: 1007337 - RNA, 19 nt, Artificial Sequence
  Description of Artificial Sequence: Synthetic oligonucleotide
  Antisense strand to SEQ ID NO: 1007336
aauggcauucaucuuugac

SEQ ID NO: 1007338 - RNA, 19 nt, Artificial Sequence
  Description of Artificial Sequence: Synthetic oligonucleotide
  Sense strand starting at position 526 of SEQ ID NO: 914482
ucuaguuuccacugugaaa

SEQ ID NO: 1007339 - RNA, 19 nt, Artificial Sequence
  Description of Artificial Sequence: Synthetic oligonucleotide
  Antisense strand to SEQ ID NO: 1007338
uuucacaguggaaacuaga

SEQ ID NO: 1007340 - RNA, 19 nt, Artificial Sequence
  Description of Artificial Sequence: Synthetic oligonucleotide
  Sense strand starting at position 701 of SEQ ID NO: 914482
ggaguaaaccgccaggagu

SEQ ID NO: 1007341 - RNA, 19 nt, Artificial Sequence
  Description of Artificial Sequence: Synthetic oligonucleotide
  Antisense strand to SEQ ID NO: 1007340
acuccuggcgguuuacucc

SEQ ID NO: 1007342 - RNA, 19 nt, Artificial Sequence
  Description of Artificial Sequence: Synthetic oligonucleotide
  Sense strand starting at position 789 of SEQ ID NO: 914482
gagcgcuuuccgucaauca

SEQ ID NO: 1007343 - RNA, 19 nt, Artificial Sequence
  Description of Artificial Sequence: Synthetic oligonucleotide
  Antisense strand to SEQ ID NO: 1007342
ugauugacggaaagcgcuc

SEQ ID NO: 1007344 - RNA, 19 nt, Artificial Sequence
  Description of Artificial Sequence: Synthetic oligonucleotide
  Sense strand starting at position 822 of SEQ ID NO: 914482
ugaagugaagccuauuguu

SEQ ID NO: 1007345 - RNA, 19 nt, Artificial Sequence
  Description of Artificial Sequence: Synthetic oligonucleotide
  Antisense strand to SEQ ID NO: 1007344
aacaauaggcuucacuuca

SEQ ID NO: 1007346 - RNA, 19 nt, Artificial Sequence
  Description of Artificial Sequence: Synthetic oligonucleotide
  Sense strand starting at position 854 of SEQ ID NO: 914482
gcuguuaaauacuuccaga

SEQ ID NO: 1007347 - RNA, 19 nt, Artificial Sequence
  Description of Artificial Sequence: Synthetic oligonucleotide
  Antisense strand to SEQ ID NO: 1007346
ucuggaaguauuuaacagc

SEQ ID NO: 1007348 - RNA, 19 nt, Artificial Sequence
  Description of Artificial Sequence: Synthetic oligonucleotide
  Sense strand starting at position 879 of SEQ ID NO: 914482
cagugaagagccuggguau

SEQ ID NO: 1007349 - RNA, 19 nt, Artificial Sequence
  Description of Artificial Sequence: Synthetic oligonucleotide
  Antisense strand to SEQ ID NO: 1007348
auacccaggcucuucacug

SEQ ID NO: 1007350 - RNA, 19 nt, Artificial Sequence
  Description of Artificial Sequence: Synthetic oligonucleotide
  Sense strand starting at position 1567 of SEQ ID NO: 914482
agagcuucccuugagacga

SEQ ID NO: 1007351 - RNA, 19 nt, Artificial Sequence
  Description of Artificial Sequence: Synthetic oligonucleotide
  Antisense strand to SEQ ID NO: 1007350
ucgucucaagggaagcucu

SEQ ID NO: 1007352 - RNA, 19 nt, Artificial Sequence
  Description of Artificial Sequence: Synthetic oligonucleotide
  Sense strand starting at position 2520 of SEQ ID NO: 914482
gaaugaaccucuucgagug

SEQ ID NO: 1007353 - RNA, 19 nt, Artificial Sequence
  Description of Artificial Sequence: Synthetic oligonucleotide
  Antisense strand to SEQ ID NO: 1007352
cacucgaagagguucauuc

SEQ ID NO: 1007354 - RNA, 19 nt, Artificial Sequence
  Description of Artificial Sequence: Synthetic oligonucleotide
  Sense strand starting at position 2862 of SEQ ID NO: 914482
uuagguuuccucuggagag

SEQ ID NO: 1007355 - RNA, 19 nt, Artificial Sequence
  Description of Artificial Sequence: Synthetic oligonucleotide
  Antisense strand to SEQ ID NO: 1007354
cucuccagaggaaaccuaa

SEQ ID NO: 1007356 - RNA, 19 nt, Artificial Sequence
  Description of Artificial Sequence: Synthetic oligonucleotide
  Sense strand starting at position 2876 of SEQ ID NO: 914482
gagagcucuaacuggugga

SEQ ID NO: 1007357 - RNA, 19 nt, Artificial Sequence
  Description of Artificial Sequence: Synthetic oligonucleotide
  Antisense strand to SEQ ID NO: 1007356
uccaccaguuagagcucuc

SEQ ID NO: 1007358 - RNA, 19 nt, Artificial Sequence
  Description of Artificial Sequence: Synthetic oligonucleotide
  Sense strand starting at position 2877 of SEQ ID NO: 914482
agagcucuaacugguggau

SEQ ID NO: 1007359 - RNA, 19 nt, Artificial Sequence
  Description of Artificial Sequence: Synthetic oligonucleotide
  Antisense strand to SEQ ID NO: 1007358
auccaccaguuagagcucu

SEQ ID NO: 1007360 - RNA, 19 nt, Artificial Sequence
  Description of Artificial Sequence: Synthetic oligonucleotide
  Sense strand starting at position 2954 of SEQ ID NO: 914482
ugcaguagugcccuguuau

SEQ ID NO: 1007361 - RNA, 19 nt, Artificial Sequence
  Description of Artificial Sequence: Synthetic oligonucleotide
  Antisense strand to SEQ ID NO: 1007360
auaacagggcacuacugca

SEQ ID NO: 1007362 - RNA, 19 nt, Artificial Sequence
  Description of Artificial Sequence: Synthetic oligonucleotide
  Sense strand starting at position 3022 of SEQ ID NO: 914482
ggguauaguacuggaaacu

SEQ ID NO: 1007363 - RNA, 19 nt, Artificial Sequence
  Description of Artificial Sequence: Synthetic oligonucleotide
  Antisense strand to SEQ ID NO: 1007362
aguuuccaguacuauaccc

SEQ ID NO: 1007364 - RNA, 19 nt, Artificial Sequence
  Description of Artificial Sequence: Synthetic oligonucleotide
  Sense strand starting at position 3041 of SEQ ID NO: 914482
gucaauggugacugagacu

SEQ ID NO: 1007365 - RNA, 19 nt, Artificial Sequence
  Description of Artificial Sequence: Synthetic oligonucleotide
  Antisense strand to SEQ ID NO: 1007364
agucucagucaccauugac

SEQ ID NO: 1007366 - RNA, 19 nt, Artificial Sequence
  Description of Artificial Sequence: Synthetic oligonucleotide
  Sense strand starting at position 3168 of SEQ ID NO: 914482
ugcagauguaauuagaagu

SEQ ID NO: 1007367 - RNA, 19 nt, Artificial Sequence
  Description of Artificial Sequence: Synthetic oligonucleotide
  Antisense strand to SEQ ID NO: 1007366
acuucuaauuacaucugca

SEQ ID NO: 1007368 - RNA, 19 nt, Artificial Sequence
  Description of Artificial Sequence: Synthetic oligonucleotide
  Sense strand starting at position 3196 of SEQ ID NO: 914482
cuauuauauuuggaaagug

SEQ ID NO: 1007369 - RNA, 19 nt, Artificial Sequence
  Description of Artificial Sequence: Synthetic oligonucleotide
  Antisense strand to SEQ ID NO: 1007368
cacuuuccaaauauaauag

SEQ ID NO: 1007370 - RNA, 19 nt, Artificial Sequence
  Description of Artificial Sequence: Synthetic oligonucleotide
  Sense strand starting at position 3225 of SEQ ID NO: 914482
ugcagaacugacuguaaga

SEQ ID NO: 1007371 - RNA, 19 nt, Artificial Sequence
  Description of Artificial Sequence: Synthetic oligonucleotide
  Antisense strand to SEQ ID NO: 1007370
ucuuacagucaguucugca

SEQ ID NO: 1007372 - RNA, 19 nt, Artificial Sequence
  Description of Artificial Sequence: Synthetic oligonucleotide
  Sense strand starting at position 3280 of SEQ ID NO: 914482
guacaagucuuccuccaag

SEQ ID NO: 1007373 - RNA, 19 nt, Artificial Sequence
  Description of Artificial Sequence: Synthetic oligonucleotide
  Antisense strand to SEQ ID NO: 1007372
cuuggaggaagacuuguac

SEQ ID NO: 1007374 - RNA, 19 nt, Artificial Sequence
  Description of Artificial Sequence: Synthetic oligonucleotide
  Sense strand starting at position 3298 of SEQ ID NO: 914482
gaggauggccucuguuaga

SEQ ID NO: 1007375 - RNA, 19 nt, Artificial Sequence
  Description of Artificial Sequence: Synthetic oligonucleotide
  Antisense strand to SEQ ID NO: 1007374
ucuaacagaggccauccuc

SEQ ID NO: 1007376 - RNA, 19 nt, Artificial Sequence
  Description of Artificial Sequence: Synthetic oligonucleotide
  Sense strand starting at position 3492 of SEQ ID NO: 914482
uucugauggcuuugggaug

SEQ ID NO: 1007377 - RNA, 19 nt, Artificial Sequence
  Description of Artificial Sequence: Synthetic oligonucleotide
  Antisense strand to SEQ ID NO: 1007376
caucccaaagccaucagaa

SEQ ID NO: 1007378 - RNA, 19 nt, Artificial Sequence
  Description of Artificial Sequence: Synthetic oligonucleotide
  Sense strand starting at position 3548 of SEQ ID NO: 914482
gguauuccucuauacaagu

SEQ ID NO: 1007379 - RNA, 19 nt, Artificial Sequence
  Description of Artificial Sequence: Synthetic oligonucleotide
  Antisense strand to SEQ ID NO: 1007378
acuuguauagaggaauacc

SEQ ID NO: 1007380 - RNA, 19 nt, Artificial Sequence
  Description of Artificial Sequence: Synthetic oligonucleotide
  Sense strand starting at position 3554 of SEQ ID NO: 914482
ccucuauacaagugggagu

SEQ ID NO: 1007381 - RNA, 19 nt, Artificial Sequence
  Description of Artificial Sequence: Synthetic oligonucleotide
  Antisense strand to SEQ ID NO: 1007380
acucccacuuguauagagg

SEQ ID NO: 1007382 - RNA, 19 nt, Artificial Sequence
  Description of Artificial Sequence: Synthetic oligonucleotide
  Sense strand starting at position 3582 of SEQ ID NO: 914482
caggaugacuugcuuugau

SEQ ID NO: 1007383 - RNA, 19 nt, Artificial Sequence
  Description of Artificial Sequence: Synthetic oligonucleotide
  Antisense strand to SEQ ID NO: 1007382
aucaaagcaagucauccug

SEQ ID NO: 1007384 - RNA, 19 nt, Artificial Sequence
  Description of Artificial Sequence: Synthetic oligonucleotide
  Sense strand starting at position 3585 of SEQ ID NO: 914482
gaugacuugcuuugauauu

SEQ ID NO: 1007385 - RNA, 19 nt, Artificial Sequence
  Description of Artificial Sequence: Synthetic oligonucleotide
  Antisense strand to SEQ ID NO: 1007384
aauaucaaagcaagucauc

SEQ ID NO: 1007386 - RNA, 19 nt, Artificial Sequence
  Description of Artificial Sequence: Synthetic oligonucleotide
  Sense strand starting at position 3747 of SEQ ID NO: 914482
uuugguucccuagaauggu

SEQ ID NO: 1007387 - RNA, 19 nt, Artificial Sequence
  Description of Artificial Sequence: Synthetic oligonucleotide
  Antisense strand to SEQ ID NO: 1007386
accauucuagggaaccaaa

SEQ ID NO: 1007388 - RNA, 19 nt, Artificial Sequence
  Description of Artificial Sequence: Synthetic oligonucleotide
  Sense strand starting at position 3757 of SEQ ID NO: 914482
uagaaugguuucuugacca

SEQ ID NO: 1007389 - RNA, 19 nt, Artificial Sequence
  Description of Artificial Sequence: Synthetic oligonucleotide
  Antisense strand to SEQ ID NO: 1007388
uggucaagaaaccauucua

SEQ ID NO: 1007390 - RNA, 19 nt, Artificial Sequence
  Description of Artificial Sequence: Synthetic oligonucleotide
  Sense strand starting at position 3813 of SEQ ID NO: 914482
uuuggugucccaggauuag

SEQ ID NO: 1007391 - RNA, 19 nt, Artificial Sequence
  Description of Artificial Sequence: Synthetic oligonucleotide
  Antisense strand to SEQ ID NO: 1007390
cuaauccugggacaccaaa

SEQ ID NO: 1007392 - RNA, 19 nt, Artificial Sequence
  Description of Artificial Sequence: Synthetic oligonucleotide
  Sense strand starting at position 3831 of SEQ ID NO: 914482
gacugagaaccauggcugu

SEQ ID NO: 1007393 - RNA, 19 nt, Artificial Sequence
  Description of Artificial Sequence: Synthetic oligonucleotide
  Antisense strand to SEQ ID NO: 1007392
acagccaugguucucaguc

SEQ ID NO: 1007394 - RNA, 19 nt, Artificial Sequence
  Description of Artificial Sequence: Synthetic oligonucleotide
  Sense strand starting at position 3976 of SEQ ID NO: 914482
gcuggacaucuccacuuau

SEQ ID NO: 1007395 - RNA, 19 nt, Artificial Sequence
  Description of Artificial Sequence: Synthetic oligonucleotide
  Antisense strand to SEQ ID NO: 1007394
auaaguggagauguccagc

SEQ ID NO: 1007396 - RNA, 19 nt, Artificial Sequence
  Description of Artificial Sequence: Synthetic oligonucleotide
  Sense strand starting at position 29 of SEQ ID NO: 914483
agcaauaggucaguggaca

SEQ ID NO: 1007397 - RNA, 19 nt, Artificial Sequence
  Description of Artificial Sequence: Synthetic oligonucleotide
  Antisense strand to SEQ ID NO: 1007396
uguccacugaccuauugcu

SEQ ID NO: 1007398 - RNA, 19 nt, Artificial Sequence
  Description of Artificial Sequence: Synthetic oligonucleotide
  Sense strand starting at position 30 of SEQ ID NO: 914483
gcaauaggucaguggacaa

SEQ ID NO: 1007399 - RNA, 19 nt, Artificial Sequence
  Description of Artificial Sequence: Synthetic oligonucleotide
  Antisense strand to SEQ ID NO: 1007398
uuguccacugaccuauugc

SEQ ID NO: 1007400 - RNA, 19 nt, Artificial Sequence
  Description of Artificial Sequence: Synthetic oligonucleotide
  Sense strand starting at position 40 of SEQ ID NO: 914483
aguggacaaugguuugaua

SEQ ID NO: 1007401 - RNA, 19 nt, Artificial Sequence
  Description of Artificial Sequence: Synthetic oligonucleotide
  Antisense strand to SEQ ID NO: 1007400
uaucaaaccauuguccacu

SEQ ID NO: 1007402 - RNA, 19 nt, Artificial Sequence
  Description of Artificial Sequence: Synthetic oligonucleotide
  Sense strand starting at position 42 of SEQ ID NO: 914483
uggacaaugguuugauauu

SEQ ID NO: 1007403 - RNA, 19 nt, Artificial Sequence
  Description of Artificial Sequence: Synthetic oligonucleotide
  Antisense strand to SEQ ID NO: 1007402
aauaucaaaccauugucca

SEQ ID NO: 1007404 - RNA, 19 nt, Artificial Sequence
  Description of Artificial Sequence: Synthetic oligonucleotide
  Sense strand starting at position 307 of SEQ ID NO: 914483
augucacugggcuauuaaa

SEQ ID NO: 1007405 - RNA, 19 nt, Artificial Sequence
  Description of Artificial Sequence: Synthetic oligonucleotide
  Antisense strand to SEQ ID NO: 1007404
uuuaauagcccagugacau

SEQ ID NO: 1007406 - RNA, 19 nt, Artificial Sequence
  Description of Artificial Sequence: Synthetic oligonucleotide
  Sense strand starting at position 460 of SEQ ID NO: 914483
gcuagaaucacggaaggug

SEQ ID NO: 1007407 - RNA, 19 nt, Artificial Sequence
  Description of Artificial Sequence: Synthetic oligonucleotide
  Antisense strand to SEQ ID NO: 1007406
caccuuccgugauucuagc

SEQ ID NO: 1007408 - RNA, 19 nt, Artificial Sequence
  Description of Artificial Sequence: Synthetic oligonucleotide
  Sense strand starting at position 501 of SEQ ID NO: 914483
ucucuuucugcucagaaag

SEQ ID NO: 1007409 - RNA, 19 nt, Artificial Sequence
  Description of Artificial Sequence: Synthetic oligonucleotide
  Antisense strand to SEQ ID NO: 1007408
cuuucugagcagaaagaga

SEQ ID NO: 1007410 - RNA, 19 nt, Artificial Sequence
  Description of Artificial Sequence: Synthetic oligonucleotide
  Sense strand starting at position 807 of SEQ ID NO: 914483
agcaguggccaagauauua

SEQ ID NO: 1007411 - RNA, 19 nt, Artificial Sequence
  Description of Artificial Sequence: Synthetic oligonucleotide
  Antisense strand to SEQ ID NO: 1007410
uaauaucuuggccacugcu

SEQ ID NO: 1007412 - RNA, 19 nt, Artificial Sequence
  Description of Artificial Sequence: Synthetic oligonucleotide
  Sense strand starting at position 857 of SEQ ID NO: 914483
ugaucuuuacaaugaagca

SEQ ID NO: 1007413 - RNA, 19 nt, Artificial Sequence
  Description of Artificial Sequence: Synthetic oligonucleotide
  Antisense strand to SEQ ID NO: 1007412
ugcuucauuguaaagauca

SEQ ID NO: 1007414 - RNA, 19 nt, Artificial Sequence
  Description of Artificial Sequence: Synthetic oligonucleotide
  Sense strand starting at position 1041 of SEQ ID NO: 914483
ccacuucuguguguuauuu

SEQ ID NO: 1007415 - RNA, 19 nt, Artificial Sequence
  Description of Artificial Sequence: Synthetic oligonucleotide
  Antisense strand to SEQ ID NO: 1007414
aaauaacacacagaagugg

SEQ ID NO: 1007416 - RNA, 19 nt, Artificial Sequence
  Description of Artificial Sequence: Synthetic oligonucleotide
  Sense strand starting at position 1045 of SEQ ID NO: 914483
uucuguguguuauuugaca

SEQ ID NO: 1007417 - RNA, 19 nt, Artificial Sequence
  Description of Artificial Sequence: Synthetic oligonucleotide
  Antisense strand to SEQ ID NO: 1007416
ugucaaauaacacacagaa

SEQ ID NO: 1007418 - RNA, 19 nt, Artificial Sequence
  Description of Artificial Sequence: Synthetic oligonucleotide
  Sense strand starting at position 1047 of SEQ ID NO: 914483
cuguguguuauuugacaag

SEQ ID NO: 1007419 - RNA, 19 nt, Artificial Sequence
  Description of Artificial Sequence: Synthetic oligonucleotide
  Antisense strand to SEQ ID NO: 1007418
cuugucaaauaacacacag

SEQ ID NO: 1007420 - RNA, 19 nt, Artificial Sequence
  Description of Artificial Sequence: Synthetic oligonucleotide
  Sense strand starting at position 1183 of SEQ ID NO: 914483
uagugacuggcacauaaau

SEQ ID NO: 1007421 - RNA, 19 nt, Artificial Sequence
  Description of Artificial Sequence: Synthetic oligonucleotide
  Antisense strand to SEQ ID NO: 1007420
auuuaugugccagucacua

SEQ ID NO: 1007422 - RNA, 19 nt, Artificial Sequence
  Description of Artificial Sequence: Synthetic oligonucleotide
  Sense strand starting at position 1328 of SEQ ID NO: 914483
ugcacagcacucuaagaau

SEQ ID NO: 1007423 - RNA, 19 nt, Artificial Sequence
  Description of Artificial Sequence: Synthetic oligonucleotide
  Antisense strand to SEQ ID NO: 1007422
auucuuagagugcugugca

SEQ ID NO: 1007424 - RNA, 19 nt, Artificial Sequence
  Description of Artificial Sequence: Synthetic oligonucleotide
  Sense strand starting at position 1494 of SEQ ID NO: 914483
auaggaaggagcugucaua

SEQ ID NO: 1007425 - RNA, 19 nt, Artificial Sequence
  Description of Artificial Sequence: Synthetic oligonucleotide
  Antisense strand to SEQ ID NO: 1007424
uaugacagcuccuuccuau

SEQ ID NO: 1007426 - RNA, 19 nt, Artificial Sequence
  Description of Artificial Sequence: Synthetic oligonucleotide
  Sense strand starting at position 1620 of SEQ ID NO: 914483
cuagauccauguccugaga

SEQ ID NO: 1007427 - RNA, 19 nt, Artificial Sequence
  Description of Artificial Sequence: Synthetic oligonucleotide
  Antisense strand to SEQ ID NO: 1007426
ucucaggacauggaucuag

SEQ ID NO: 1007428 - RNA, 19 nt, Artificial Sequence
  Description of Artificial Sequence: Synthetic oligonucleotide
  Sense strand starting at position 1719 of SEQ ID NO: 914483
ugugauuguccacagaacc

SEQ ID NO: 1007429 - RNA, 19 nt, Artificial Sequence
  Description of Artificial Sequence: Synthetic oligonucleotide
  Antisense strand to SEQ ID NO: 1007428
gguucuguggacaaucaca

SEQ ID NO: 1007430 - RNA, 19 nt, Artificial Sequence
  Description of Artificial Sequence: Synthetic oligonucleotide
  Sense strand starting at position 1821 of SEQ ID NO: 914483
aggcuucugagaggaacau

SEQ ID NO: 1007431 - RNA, 19 nt, Artificial Sequence
  Description of Artificial Sequence: Synthetic oligonucleotide
  Antisense strand to SEQ ID NO: 1007430
auguuccucucagaagccu

SEQ ID NO: 1007432 - RNA, 19 nt, Artificial Sequence
  Description of Artificial Sequence: Synthetic oligonucleotide
  Sense strand starting at position 1900 of SEQ ID NO: 914483
accauauacccuugaguag

SEQ ID NO: 1007433 - RNA, 19 nt, Artificial Sequence
  Description of Artificial Sequence: Synthetic oligonucleotide
  Antisense strand to SEQ ID NO: 1007432
cuacucaaggguauauggu

SEQ ID NO: 1007434 - RNA, 19 nt, Artificial Sequence
  Description of Artificial Sequence: Synthetic oligonucleotide
  Sense strand starting at position 1982 of SEQ ID NO: 914483
cagggucagugagucaaau

SEQ ID NO: 1007435 - RNA, 19 nt, Artificial Sequence
  Description of Artificial Sequence: Synthetic oligonucleotide
  Antisense strand to SEQ ID NO: 1007434
auuugacucacugacccug

SEQ ID NO: 1007436 - RNA, 19 nt, Artificial Sequence
  Description of Artificial Sequence: Synthetic oligonucleotide
  Sense strand starting at position 1984 of SEQ ID NO: 914483
gggucagugagucaaauga

SEQ ID NO: 1007437 - RNA, 19 nt, Artificial Sequence
  Description of Artificial Sequence: Synthetic oligonucleotide
  Antisense strand to SEQ ID NO: 1007436
ucauuugacucacugaccc

SEQ ID NO: 1007438 - RNA, 19 nt, Artificial Sequence
  Description of Artificial Sequence: Synthetic oligonucleotide
  Sense strand starting at position 2008 of SEQ ID NO: 914483
ugagcaaauugacucauau

SEQ ID NO: 1007439 - RNA, 19 nt, Artificial Sequence
  Description of Artificial Sequence: Synthetic oligonucleotide
  Antisense strand to SEQ ID NO: 1007438
auaugagucaauuugcuca

SEQ ID NO: 1007440 - RNA, 19 nt, Artificial Sequence
  Description of Artificial Sequence: Synthetic oligonucleotide
  Sense strand starting at position 2170 of SEQ ID NO: 914483
ggagcaauggcuuagcaua

SEQ ID NO: 1007441 - RNA, 19 nt, Artificial Sequence
  Description of Artificial Sequence: Synthetic oligonucleotide
  Antisense strand to SEQ ID NO: 1007440
uaugcuaagccauugcucc

SEQ ID NO: 1007442 - RNA, 19 nt, Artificial Sequence
  Description of Artificial Sequence: Synthetic oligonucleotide
  Sense strand starting at position 2261 of SEQ ID NO: 914483
agagguauugagcaacuuu

SEQ ID NO: 1007443 - RNA, 19 nt, Artificial Sequence
  Description of Artificial Sequence: Synthetic oligonucleotide
  Antisense strand to SEQ ID NO: 1007442
aaaguugcucaauaccucu

SEQ ID NO: 1007444 - RNA, 19 nt, Artificial Sequence
  Description of Artificial Sequence: Synthetic oligonucleotide
  Sense strand starting at position 2312 of SEQ ID NO: 914483
uagugauagcaucagguga

SEQ ID NO: 1007445 - RNA, 19 nt, Artificial Sequence
  Description of Artificial Sequence: Synthetic oligonucleotide
  Antisense strand to SEQ ID NO: 1007444
ucaccugaugcuaucacua

SEQ ID NO: 1007446 - RNA, 19 nt, Artificial Sequence
  Description of Artificial Sequence: Synthetic oligonucleotide
  Sense strand starting at position 2421 of SEQ ID NO: 914483
gcauccauagcagaacuaa

SEQ ID NO: 1007447 - RNA, 19 nt, Artificial Sequence
  Description of Artificial Sequence: Synthetic oligonucleotide
  Antisense strand to SEQ ID NO: 1007446
uuaguucugcuauggaugc

SEQ ID NO: 1007448 - RNA, 19 nt, Artificial Sequence
  Description of Artificial Sequence: Synthetic oligonucleotide
  Sense strand starting at position 2575 of SEQ ID NO: 914483
gggugagucaucuacccuc

SEQ ID NO: 1007449 - RNA, 19 nt, Artificial Sequence
  Description of Artificial Sequence: Synthetic oligonucleotide
  Antisense strand to SEQ ID NO: 1007448
gaggguagaugacucaccc

SEQ ID NO: 1007450 - RNA, 19 nt, Artificial Sequence
  Description of Artificial Sequence: Synthetic oligonucleotide
  Sense strand starting at position 2744 of SEQ ID NO: 914483
agggucugacauuguccaa

SEQ ID NO: 1007451 - RNA, 19 nt, Artificial Sequence
  Description of Artificial Sequence: Synthetic oligonucleotide
  Antisense strand to SEQ ID NO: 1007450
uuggacaaugucagacccu

SEQ ID NO: 1007452 - RNA, 19 nt, Artificial Sequence
  Description of Artificial Sequence: Synthetic oligonucleotide
  Sense strand starting at position 2851 of SEQ ID NO: 914483
gaaagacaauugucaucug

SEQ ID NO: 1007453 - RNA, 19 nt, Artificial Sequence
  Description of Artificial Sequence: Synthetic oligonucleotide
  Antisense strand to SEQ ID NO: 1007452
cagaugacaauugucuuuc

SEQ ID NO: 1007454 - RNA, 19 nt, Artificial Sequence
  Description of Artificial Sequence: Synthetic oligonucleotide
  Sense strand starting at position 3023 of SEQ ID NO: 914483
cugaguaggaagggugauu

SEQ ID NO: 1007455 - RNA, 19 nt, Artificial Sequence
  Description of Artificial Sequence: Synthetic oligonucleotide
  Antisense strand to SEQ ID NO: 1007454
aaucacccuuccuacucag

SEQ ID NO: 1007456 - RNA, 19 nt, Artificial Sequence
  Description of Artificial Sequence: Synthetic oligonucleotide
  Sense strand starting at position 3055 of SEQ ID NO: 914483
uagacagggcuccaguaua

SEQ ID NO: 1007457 - RNA, 19 nt, Artificial Sequence
  Description of Artificial Sequence: Synthetic oligonucleotide
  Antisense strand to SEQ ID NO: 1007456
uauacuggagcccugucua

SEQ ID NO: 1007458 - RNA, 19 nt, Artificial Sequence
  Description of Artificial Sequence: Synthetic oligonucleotide
  Sense strand starting at position 3101 of SEQ ID NO: 914483
gaggaagguauuggucuga

SEQ ID NO: 1007459 - RNA, 19 nt, Artificial Sequence
  Description of Artificial Sequence: Synthetic oligonucleotide
  Antisense strand to SEQ ID NO: 1007458
ucagaccaauaccuuccuc

SEQ ID NO: 1007460 - RNA, 19 nt, Artificial Sequence
  Description of Artificial Sequence: Synthetic oligonucleotide
  Sense strand starting at position 3509 of SEQ ID NO: 914483
ggacacuucccuuggaaug

SEQ ID NO: 1007461 - RNA, 19 nt, Artificial Sequence
  Description of Artificial Sequence: Synthetic oligonucleotide
  Antisense strand to SEQ ID NO: 1007460
cauuccaagggaagugucc

SEQ ID NO: 1007462 - RNA, 19 nt, Artificial Sequence
  Description of Artificial Sequence: Synthetic oligonucleotide
  Sense strand starting at position 3520 of SEQ ID NO: 914483
uuggaaugguccuugacau

SEQ ID NO: 1007463 - RNA, 19 nt, Artificial Sequence
  Description of Artificial Sequence: Synthetic oligonucleotide
  Antisense strand to SEQ ID NO: 1007462
augucaaggaccauuccaa

SEQ ID NO: 1007464 - RNA, 19 nt, Artificial Sequence
  Description of Artificial Sequence: Synthetic oligonucleotide
  Sense strand starting at position 3521 of SEQ ID NO: 914483
uggaaugguccuugacaua

SEQ ID NO: 1007465 - RNA, 19 nt, Artificial Sequence
  Description of Artificial Sequence: Synthetic oligonucleotide
  Antisense strand to SEQ ID NO: 1007464
uaugucaaggaccauucca

SEQ ID NO: 1007466 - RNA, 19 nt, Artificial Sequence
  Description of Artificial Sequence: Synthetic oligonucleotide
  Sense strand starting at position 3671 of SEQ ID NO: 914483
ucuggaggccucugaacaa

SEQ ID NO: 1007467 - RNA, 19 nt, Artificial Sequence
  Description of Artificial Sequence: Synthetic oligonucleotide
  Antisense strand to SEQ ID NO: 1007466
uuguucagaggccuccaga

SEQ ID NO: 1007468 - RNA, 19 nt, Artificial Sequence
  Description of Artificial Sequence: Synthetic oligonucleotide
  Sense strand starting at position 3742 of SEQ ID NO: 914483
acgcuuuggcuaguaagca

SEQ ID NO: 1007469 - RNA, 19 nt, Artificial Sequence
  Description of Artificial Sequence: Synthetic oligonucleotide
  Antisense strand to SEQ ID NO: 1007468
ugcuuacuagccaaagcgu

SEQ ID NO: 1007470 - RNA, 19 nt, Artificial Sequence
  Description of Artificial Sequence: Synthetic oligonucleotide
  Sense strand starting at position 3834 of SEQ ID NO: 914483
agugcuacucaggaguaau

SEQ ID NO: 1007471 - RNA, 19 nt, Artificial Sequence
  Description of Artificial Sequence: Synthetic oligonucleotide
  Antisense strand to SEQ ID NO: 1007470
auuacuccugaguagcacu

SEQ ID NO: 1007472 - RNA, 19 nt, Artificial Sequence
  Description of Artificial Sequence: Synthetic oligonucleotide
  Sense strand starting at position 3923 of SEQ ID NO: 914483
ggugaugugaggugaggaa

SEQ ID NO: 1007473 - RNA, 19 nt, Artificial Sequence
  Description of Artificial Sequence: Synthetic oligonucleotide
  Antisense strand to SEQ ID NO: 1007472
uuccucaccucacaucacc

SEQ ID NO: 1007474 - RNA, 19 nt, Artificial Sequence
  Description of Artificial Sequence: Synthetic oligonucleotide
  Sense strand starting at position 3948 of SEQ ID NO: 914483
gaaacacccuggguugaau

SEQ ID NO: 1007475 - RNA, 19 nt, Artificial Sequence
  Description of Artificial Sequence: Synthetic oligonucleotide
  Antisense strand to SEQ ID NO: 1007474
auucaacccaggguguuuc

SEQ ID NO: 1007476 - RNA, 19 nt, Artificial Sequence
  Description of Artificial Sequence: Synthetic oligonucleotide
  Sense strand starting at position 82 of SEQ ID NO: 914484
augucacugggcuauuaaa

SEQ ID NO: 1007477 - RNA, 19 nt, Artificial Sequence
  Description of Artificial Sequence: Synthetic oligonucleotide
  Antisense strand to SEQ ID NO: 1007476
uuuaauagcccagugacau

SEQ ID NO: 1007478 - RNA, 19 nt, Artificial Sequence
  Description of Artificial Sequence: Synthetic oligonucleotide
  Sense strand starting at position 235 of SEQ ID NO: 914484
gcuagaaucacggaaggug

SEQ ID NO: 1007479 - RNA, 19 nt, Artificial Sequence
  Description of Artificial Sequence: Synthetic oligonucleotide
  Antisense strand to SEQ ID NO: 1007478
caccuuccgugauucuagc

SEQ ID NO: 1007480 - RNA, 19 nt, Artificial Sequence
  Description of Artificial Sequence: Synthetic oligonucleotide
  Sense strand starting at position 276 of SEQ ID NO: 914484
ucucuuucugcucagaaag

SEQ ID NO: 1007481 - RNA, 19 nt, Artificial Sequence
  Description of Artificial Sequence: Synthetic oligonucleotide
  Antisense strand to SEQ ID NO: 1007480
cuuucugagcagaaagaga

SEQ ID NO: 1007482 - RNA, 19 nt, Artificial Sequence
  Description of Artificial Sequence: Synthetic oligonucleotide
  Sense strand starting at position 352 of SEQ ID NO: 914484
agcuguaauaugggaggua

SEQ ID NO: 1007483 - RNA, 19 nt, Artificial Sequence
  Description of Artificial Sequence: Synthetic oligonucleotide
  Antisense strand to SEQ ID NO: 1007482
uaccucccauauuacagcu

SEQ ID NO: 1007484 - RNA, 19 nt, Artificial Sequence
  Description of Artificial Sequence: Synthetic oligonucleotide
  Sense strand starting at position 582 of SEQ ID NO: 914484
agcaguggccaagauauua

SEQ ID NO: 1007485 - RNA, 19 nt, Artificial Sequence
  Description of Artificial Sequence: Synthetic oligonucleotide
  Antisense strand to SEQ ID NO: 1007484
uaauaucuuggccacugcu

SEQ ID NO: 1007486 - RNA, 19 nt, Artificial Sequence
  Description of Artificial Sequence: Synthetic oligonucleotide
  Sense strand starting at position 632 of SEQ ID NO: 914484
ugaucuuuacaaugaagca

SEQ ID NO: 1007487 - RNA, 19 nt, Artificial Sequence
  Description of Artificial Sequence: Synthetic oligonucleotide
  Antisense strand to SEQ ID NO: 1007486
ugcuucauuguaaagauca

SEQ ID NO: 1007488 - RNA, 19 nt, Artificial Sequence
  Description of Artificial Sequence: Synthetic oligonucleotide
  Sense strand starting at position 816 of SEQ ID NO: 914484
ccacuucuguguguuauuu

SEQ ID NO: 1007489 - RNA, 19 nt, Artificial Sequence
  Description of Artificial Sequence: Synthetic oligonucleotide
  Antisense strand to SEQ ID NO: 1007488
aaauaacacacagaagugg

SEQ ID NO: 1007490 - RNA, 19 nt, Artificial Sequence
  Description of Artificial Sequence: Synthetic oligonucleotide
  Sense strand starting at position 820 of SEQ ID NO: 914484
uucuguguguuauuugaca

SEQ ID NO: 1007491 - RNA, 19 nt, Artificial Sequence
  Description of Artificial Sequence: Synthetic oligonucleotide
  Antisense strand to SEQ ID NO: 1007490
ugucaaauaacacacagaa

SEQ ID NO: 1007492 - RNA, 19 nt, Artificial Sequence
  Description of Artificial Sequence: Synthetic oligonucleotide
  Sense strand starting at position 822 of SEQ ID NO: 914484
cuguguguuauuugacaag

SEQ ID NO: 1007493 - RNA, 19 nt, Artificial Sequence
  Description of Artificial Sequence: Synthetic oligonucleotide
  Antisense strand to SEQ ID NO: 1007492
cuugucaaauaacacacag

SEQ ID NO: 1007494 - RNA, 19 nt, Artificial Sequence
  Description of Artificial Sequence: Synthetic oligonucleotide
  Sense strand starting at position 958 of SEQ ID NO: 914484
uagugacuggcacauaaau

SEQ ID NO: 1007495 - RNA, 19 nt, Artificial Sequence
  Description of Artificial Sequence: Synthetic oligonucleotide
  Antisense strand to SEQ ID NO: 1007494
auuuaugugccagucacua

SEQ ID NO: 1007496 - RNA, 19 nt, Artificial Sequence
  Description of Artificial Sequence: Synthetic oligonucleotide
  Sense strand starting at position 1103 of SEQ ID NO: 914484
ugcacagcacucuaagaau

SEQ ID NO: 1007497 - RNA, 19 nt, Artificial Sequence
  Description of Artificial Sequence: Synthetic oligonucleotide
  Antisense strand to SEQ ID NO: 1007496
auucuuagagugcugugca

SEQ ID NO: 1007498 - RNA, 19 nt, Artificial Sequence
  Description of Artificial Sequence: Synthetic oligonucleotide
  Sense strand starting at position 1269 of SEQ ID NO: 914484
auaggaaggagcugucaua

SEQ ID NO: 1007499 - RNA, 19 nt, Artificial Sequence
  Description of Artificial Sequence: Synthetic oligonucleotide
  Antisense strand to SEQ ID NO: 1007498
uaugacagcuccuuccuau

SEQ ID NO: 1007500 - RNA, 19 nt, Artificial Sequence
  Description of Artificial Sequence: Synthetic oligonucleotide
  Sense strand starting at position 1395 of SEQ ID NO: 914484
cuagauccauguccugaga

SEQ ID NO: 1007501 - RNA, 19 nt, Artificial Sequence
  Description of Artificial Sequence: Synthetic oligonucleotide
  Antisense strand to SEQ ID NO: 1007500
ucucaggacauggaucuag

SEQ ID NO: 1007502 - RNA, 19 nt, Artificial Sequence
  Description of Artificial Sequence: Synthetic oligonucleotide
  Sense strand starting at position 1482 of SEQ ID NO: 914484
uuggauucccauugugauu

SEQ ID NO: 1007503 - RNA, 19 nt, Artificial Sequence
  Description of Artificial Sequence: Synthetic oligonucleotide
  Antisense strand to SEQ ID NO: 1007502
aaucacaaugggaauccaa

SEQ ID NO: 1007504 - RNA, 19 nt, Artificial Sequence
  Description of Artificial Sequence: Synthetic oligonucleotide
  Sense strand starting at position 1491 of SEQ ID NO: 914484
cauugugauuguccacaga

SEQ ID NO: 1007505 - RNA, 19 nt, Artificial Sequence
  Description of Artificial Sequence: Synthetic oligonucleotide
  Antisense strand to SEQ ID NO: 1007504
ucuguggacaaucacaaug

SEQ ID NO: 1007506 - RNA, 19 nt, Artificial Sequence
  Description of Artificial Sequence: Synthetic oligonucleotide
  Sense strand starting at position 1494 of SEQ ID NO: 914484
ugugauuguccacagaacc

SEQ ID NO: 1007507 - RNA, 19 nt, Artificial Sequence
  Description of Artificial Sequence: Synthetic oligonucleotide
  Antisense strand to SEQ ID NO: 1007506
gguucuguggacaaucaca

SEQ ID NO: 1007508 - RNA, 19 nt, Artificial Sequence
  Description of Artificial Sequence: Synthetic oligonucleotide
  Sense strand starting at position 1596 of SEQ ID NO: 914484
aggcuucugagaggaacau

SEQ ID NO: 1007509 - RNA, 19 nt, Artificial Sequence
  Description of Artificial Sequence: Synthetic oligonucleotide
  Antisense strand to SEQ ID NO: 1007508
auguuccucucagaagccu

SEQ ID NO: 1007510 - RNA, 19 nt, Artificial Sequence
  Description of Artificial Sequence: Synthetic oligonucleotide
  Sense strand starting at position 1675 of SEQ ID NO: 914484
accauauacccuugaguag

SEQ ID NO: 1007511 - RNA, 19 nt, Artificial Sequence
  Description of Artificial Sequence: Synthetic oligonucleotide
  Antisense strand to SEQ ID NO: 1007510
cuacucaaggguauauggu

SEQ ID NO: 1007512 - RNA, 19 nt, Artificial Sequence
  Description of Artificial Sequence: Synthetic oligonucleotide
  Sense strand starting at position 1757 of SEQ ID NO: 914484
cagggucagugagucaaau

SEQ ID NO: 1007513 - RNA, 19 nt, Artificial Sequence
  Description of Artificial Sequence: Synthetic oligonucleotide
  Antisense strand to SEQ ID NO: 1007512
auuugacucacugacccug

SEQ ID NO: 1007514 - RNA, 19 nt, Artificial Sequence
  Description of Artificial Sequence: Synthetic oligonucleotide
  Sense strand starting at position 1759 of SEQ ID NO: 914484
gggucagugagucaaauga

SEQ ID NO: 1007515 - RNA, 19 nt, Artificial Sequence
  Description of Artificial Sequence: Synthetic oligonucleotide
  Antisense strand to SEQ ID NO: 1007514
ucauuugacucacugaccc

SEQ ID NO: 1007516 - RNA, 19 nt, Artificial Sequence
  Description of Artificial Sequence: Synthetic oligonucleotide
  Sense strand starting at position 1783 of SEQ ID NO: 914484
ugagcaaauugacucauau

SEQ ID NO: 1007517 - RNA, 19 nt, Artificial Sequence
  Description of Artificial Sequence: Synthetic oligonucleotide
  Antisense strand to SEQ ID NO: 1007516
auaugagucaauuugcuca

SEQ ID NO: 1007518 - RNA, 19 nt, Artificial Sequence
  Description of Artificial Sequence: Synthetic oligonucleotide
  Sense strand starting at position 1945 of SEQ ID NO: 914484
ggagcaauggcuuagcaua

SEQ ID NO: 1007519 - RNA, 19 nt, Artificial Sequence
  Description of Artificial Sequence: Synthetic oligonucleotide
  Antisense strand to SEQ ID NO: 1007518
uaugcuaagccauugcucc

SEQ ID NO: 1007520 - RNA, 19 nt, Artificial Sequence
  Description of Artificial Sequence: Synthetic oligonucleotide
  Sense strand starting at position 2036 of SEQ ID NO: 914484
agagguauugagcaacuuu

SEQ ID NO: 1007521 - RNA, 19 nt, Artificial Sequence
  Description of Artificial Sequence: Synthetic oligonucleotide
  Antisense strand to SEQ ID NO: 1007520
aaaguugcucaauaccucu

SEQ ID NO: 1007522 - RNA, 19 nt, Artificial Sequence
  Description of Artificial Sequence: Synthetic oligonucleotide
  Sense strand starting at position 2087 of SEQ ID NO: 914484
uagugauagcaucagguga

SEQ ID NO: 1007523 - RNA, 19 nt, Artificial Sequence
  Description of Artificial Sequence: Synthetic oligonucleotide
  Antisense strand to SEQ ID NO: 1007522
ucaccugaugcuaucacua

SEQ ID NO: 1007524 - RNA, 19 nt, Artificial Sequence
  Description of Artificial Sequence: Synthetic oligonucleotide
  Sense strand starting at position 2196 of SEQ ID NO: 914484
gcauccauagcagaacuaa

SEQ ID NO: 1007525 - RNA, 19 nt, Artificial Sequence
  Description of Artificial Sequence: Synthetic oligonucleotide
  Antisense strand to SEQ ID NO: 1007524
uuaguucugcuauggaugc

SEQ ID NO: 1007526 - RNA, 19 nt, Artificial Sequence
  Description of Artificial Sequence: Synthetic oligonucleotide
  Sense strand starting at position 2350 of SEQ ID NO: 914484
gggugagucaucuacccuc

SEQ ID NO: 1007527 - RNA, 19 nt, Artificial Sequence
  Description of Artificial Sequence: Synthetic oligonucleotide
  Antisense strand to SEQ ID NO: 1007526
gaggguagaugacucaccc

SEQ ID NO: 1007528 - RNA, 19 nt, Artificial Sequence
  Description of Artificial Sequence: Synthetic oligonucleotide
  Sense strand starting at position 2519 of SEQ ID NO: 914484
agggucugacauuguccaa

SEQ ID NO: 1007529 - RNA, 19 nt, Artificial Sequence
  Description of Artificial Sequence: Synthetic oligonucleotide
  Antisense strand to SEQ ID NO: 1007528
uuggacaaugucagacccu

SEQ ID NO: 1007530 - RNA, 19 nt, Artificial Sequence
  Description of Artificial Sequence: Synthetic oligonucleotide
  Sense strand starting at position 2626 of SEQ ID NO: 914484
gaaagacaauugucaucug

SEQ ID NO: 1007531 - RNA, 19 nt, Artificial Sequence
  Description of Artificial Sequence: Synthetic oligonucleotide
  Antisense strand to SEQ ID NO: 1007530
cagaugacaauugucuuuc

SEQ ID NO: 1007532 - RNA, 19 nt, Artificial Sequence
  Description of Artificial Sequence: Synthetic oligonucleotide
  Sense strand starting at position 2798 of SEQ ID NO: 914484
cugaguaggaagggugauu

SEQ ID NO: 1007533 - RNA, 19 nt, Artificial Sequence
  Description of Artificial Sequence: Synthetic oligonucleotide
  Antisense strand to SEQ ID NO: 1007532
aaucacccuuccuacucag

SEQ ID NO: 1007534 - RNA, 19 nt, Artificial Sequence
  Description of Artificial Sequence: Synthetic oligonucleotide
  Sense strand starting at position 2830 of SEQ ID NO: 914484
uagacagggcuccaguaua

SEQ ID NO: 1007535 - RNA, 19 nt, Artificial Sequence
  Description of Artificial Sequence: Synthetic oligonucleotide
  Antisense strand to SEQ ID NO: 1007534
uauacuggagcccugucua

SEQ ID NO: 1007536 - RNA, 19 nt, Artificial Sequence
  Description of Artificial Sequence: Synthetic oligonucleotide
  Sense strand starting at position 2876 of SEQ ID NO: 914484
gaggaagguauuggucuga

SEQ ID NO: 1007537 - RNA, 19 nt, Artificial Sequence
  Description of Artificial Sequence: Synthetic oligonucleotide
  Antisense strand to SEQ ID NO: 1007536
ucagaccaauaccuuccuc

SEQ ID NO: 1007538 - RNA, 19 nt, Artificial Sequence
  Description of Artificial Sequence: Synthetic oligonucleotide
  Sense strand starting at position 3284 of SEQ ID NO: 914484
ggacacuucccuuggaaug

SEQ ID NO: 1007539 - RNA, 19 nt, Artificial Sequence
  Description of Artificial Sequence: Synthetic oligonucleotide
  Antisense strand to SEQ ID NO: 1007538
cauuccaagggaagugucc

SEQ ID NO: 1007540 - RNA, 19 nt, Artificial Sequence
  Description of Artificial Sequence: Synthetic oligonucleotide
  Sense strand starting at position 3295 of SEQ ID NO: 914484
uuggaaugguccuugacau

SEQ ID NO: 1007541 - RNA, 19 nt, Artificial Sequence
  Description of Artificial Sequence: Synthetic oligonucleotide
  Antisense strand to SEQ ID NO: 1007540
augucaaggaccauuccaa

SEQ ID NO: 1007542 - RNA, 19 nt, Artificial Sequence
  Description of Artificial Sequence: Synthetic oligonucleotide
  Sense strand starting at position 3296 of SEQ ID NO: 914484
uggaaugguccuugacaua

SEQ ID NO: 1007543 - RNA, 19 nt, Artificial Sequence
  Description of Artificial Sequence: Synthetic oligonucleotide
  Antisense strand to SEQ ID NO: 1007542
uaugucaaggaccauucca

SEQ ID NO: 1007544 - RNA, 19 nt, Artificial Sequence
  Description of Artificial Sequence: Synthetic oligonucleotide
  Sense strand starting at position 3446 of SEQ ID NO: 914484
ucuggaggccucugaacaa

SEQ ID NO: 1007545 - RNA, 19 nt, Artificial Sequence
  Description of Artificial Sequence: Synthetic oligonucleotide
  Antisense strand to SEQ ID NO: 1007544
uuguucagaggccuccaga

SEQ ID NO: 1007546 - RNA, 19 nt, Artificial Sequence
  Description of Artificial Sequence: Synthetic oligonucleotide
  Sense strand starting at position 3517 of SEQ ID NO: 914484
acgcuuuggcuaguaagca

SEQ ID NO: 1007547 - RNA, 19 nt, Artificial Sequence
  Description of Artificial Sequence: Synthetic oligonucleotide
  Antisense strand to SEQ ID NO: 1007546
ugcuuacuagccaaagcgu

SEQ ID NO: 1007548 - RNA, 19 nt, Artificial Sequence
  Description of Artificial Sequence: Synthetic oligonucleotide
  Sense strand starting at position 3609 of SEQ ID NO: 914484
agugcuacucaggaguaau

SEQ ID NO: 1007549 - RNA, 19 nt, Artificial Sequence
  Description of Artificial Sequence: Synthetic oligonucleotide
  Antisense strand to SEQ ID NO: 1007548
auuacuccugaguagcacu

SEQ ID NO: 1007550 - RNA, 19 nt, Artificial Sequence
  Description of Artificial Sequence: Synthetic oligonucleotide
  Sense strand starting at position 3698 of SEQ ID NO: 914484
ggugaugugaggugaggaa

SEQ ID NO: 1007551 - RNA, 19 nt, Artificial Sequence
  Description of Artificial Sequence: Synthetic oligonucleotide
  Antisense strand to SEQ ID NO: 1007550
uuccucaccucacaucacc

SEQ ID NO: 1007552 - RNA, 19 nt, Artificial Sequence
  Description of Artificial Sequence: Synthetic oligonucleotide
  Sense strand starting at position 3723 of SEQ ID NO: 914484
gaaacacccuggguugaau

SEQ ID NO: 1007553 - RNA, 19 nt, Artificial Sequence
  Description of Artificial Sequence: Synthetic oligonucleotide
  Antisense strand to SEQ ID NO: 1007552
auucaacccaggguguuuc

SEQ ID NO: 1007554 - RNA, 19 nt, Artificial Sequence
  Description of Artificial Sequence: Synthetic oligonucleotide
  Sense strand starting at position 3818 of SEQ ID NO: 914484
gccucaguuccacaugacu

SEQ ID NO: 1007555 - RNA, 19 nt, Artificial Sequence
  Description of Artificial Sequence: Synthetic oligonucleotide
  Antisense strand to SEQ ID NO: 1007554
agucauguggaacugaggc

SEQ ID NO: 1007556 - RNA, 19 nt, Artificial Sequence
  Description of Artificial Sequence: Synthetic oligonucleotide
  Sense strand starting at position 22 of SEQ ID NO: 914485
uuugcuaaagcguaauaga

SEQ ID NO: 1007557 - RNA, 19 nt, Artificial Sequence
  Description of Artificial Sequence: Synthetic oligonucleotide
  Antisense strand to SEQ ID NO: 1007556
ucuauuacgcuuuagcaaa

SEQ ID NO: 1007558 - RNA, 19 nt, Artificial Sequence
  Description of Artificial Sequence: Synthetic oligonucleotide
  Sense strand starting at position 32 of SEQ ID NO: 914485
cguaauagaaauuggguuu

SEQ ID NO: 1007559 - RNA, 19 nt, Artificial Sequence
  Description of Artificial Sequence: Synthetic oligonucleotide
  Antisense strand to SEQ ID NO: 1007558
aaacccaauuucuauuacg

SEQ ID NO: 1007560 - RNA, 19 nt, Artificial Sequence
  Description of Artificial Sequence: Synthetic oligonucleotide
  Sense strand starting at position 148 of SEQ ID NO: 914485
cugagcuugcauugauaac

SEQ ID NO: 1007561 - RNA, 19 nt, Artificial Sequence
  Description of Artificial Sequence: Synthetic oligonucleotide
  Antisense strand to SEQ ID NO: 1007560
guuaucaaugcaagcucag

SEQ ID NO: 1007562 - RNA, 19 nt, Artificial Sequence
  Description of Artificial Sequence: Synthetic oligonucleotide
  Sense strand starting at position 205 of SEQ ID NO: 914485
ccauaaaguggaugacagu

SEQ ID NO: 1007563 - RNA, 19 nt, Artificial Sequence
  Description of Artificial Sequence: Synthetic oligonucleotide
  Antisense strand to SEQ ID NO: 1007562
acugucauccacuuuaugg

SEQ ID NO: 1007564 - RNA, 19 nt, Artificial Sequence
  Description of Artificial Sequence: Synthetic oligonucleotide
  Sense strand starting at position 293 of SEQ ID NO: 914485
ccaggacuacuuuguuuga

SEQ ID NO: 1007565 - RNA, 19 nt, Artificial Sequence
  Description of Artificial Sequence: Synthetic oligonucleotide
  Antisense strand to SEQ ID NO: 1007564
ucaaacaaaguaguccugg

SEQ ID NO: 1007566 - RNA, 19 nt, Artificial Sequence
  Description of Artificial Sequence: Synthetic oligonucleotide
  Sense strand starting at position 603 of SEQ ID NO: 914485
gcagaaggcagcugaaauu

SEQ ID NO: 1007567 - RNA, 19 nt, Artificial Sequence
  Description of Artificial Sequence: Synthetic oligonucleotide
  Antisense strand to SEQ ID NO: 1007566
aauuucagcugccuucugc

SEQ ID NO: 1007568 - RNA, 19 nt, Artificial Sequence
  Description of Artificial Sequence: Synthetic oligonucleotide
  Sense strand starting at position 636 of SEQ ID NO: 914485
ccagaaacuccugguagag

SEQ ID NO: 1007569 - RNA, 19 nt, Artificial Sequence
  Description of Artificial Sequence: Synthetic oligonucleotide
  Antisense strand to SEQ ID NO: 1007568
cucuaccaggaguuucugg

SEQ ID NO: 1007570 - RNA, 19 nt, Artificial Sequence
  Description of Artificial Sequence: Synthetic oligonucleotide
  Sense strand starting at position 713 of SEQ ID NO: 914485
ccgaauggcuuucccugaa

SEQ ID NO: 1007571 - RNA, 19 nt, Artificial Sequence
  Description of Artificial Sequence: Synthetic oligonucleotide
  Antisense strand to SEQ ID NO: 1007570
uucagggaaagccauucgg

SEQ ID NO: 1007572 - RNA, 19 nt, Artificial Sequence
  Description of Artificial Sequence: Synthetic oligonucleotide
  Sense strand starting at position 753 of SEQ ID NO: 914485
ggaacacaugccuggagau

SEQ ID NO: 1007573 - RNA, 19 nt, Artificial Sequence
  Description of Artificial Sequence: Synthetic oligonucleotide
  Antisense strand to SEQ ID NO: 1007572
aucuccaggcauguguucc

SEQ ID NO: 1007574 - RNA, 19 nt, Artificial Sequence
  Description of Artificial Sequence: Synthetic oligonucleotide
  Sense strand starting at position 865 of SEQ ID NO: 914485
cugggucuccuccaucaca

SEQ ID NO: 1007575 - RNA, 19 nt, Artificial Sequence
  Description of Artificial Sequence: Synthetic oligonucleotide
  Antisense strand to SEQ ID NO: 1007574
ugugauggaggagacccag

SEQ ID NO: 1007576 - RNA, 19 nt, Artificial Sequence
  Description of Artificial Sequence: Synthetic oligonucleotide
  Sense strand starting at position 935 of SEQ ID NO: 914485
cccgaauucuguuuccaua

SEQ ID NO: 1007577 - RNA, 19 nt, Artificial Sequence
  Description of Artificial Sequence: Synthetic oligonucleotide
  Antisense strand to SEQ ID NO: 1007576
uauggaaacagaauucggg

SEQ ID NO: 1007578 - RNA, 19 nt, Artificial Sequence
  Description of Artificial Sequence: Synthetic oligonucleotide
  Sense strand starting at position 991 of SEQ ID NO: 914485
gggucaggaucucuugcau

SEQ ID NO: 1007579 - RNA, 19 nt, Artificial Sequence
  Description of Artificial Sequence: Synthetic oligonucleotide
  Antisense strand to SEQ ID NO: 1007578
augcaagagauccugaccc

SEQ ID NO: 1007580 - RNA, 19 nt, Artificial Sequence
  Description of Artificial Sequence: Synthetic oligonucleotide
  Sense strand starting at position 1186 of SEQ ID NO: 914485
ucgcuuaugcccuagacua

SEQ ID NO: 1007581 - RNA, 19 nt, Artificial Sequence
  Description of Artificial Sequence: Synthetic oligonucleotide
  Antisense strand to SEQ ID NO: 1007580
uagucuagggcauaagcga

SEQ ID NO: 1007582 - RNA, 19 nt, Artificial Sequence
  Description of Artificial Sequence: Synthetic oligonucleotide
  Sense strand starting at position 1235 of SEQ ID NO: 914485
ccugguuguccagaacucu

SEQ ID NO: 1007583 - RNA, 19 nt, Artificial Sequence
  Description of Artificial Sequence: Synthetic oligonucleotide
  Antisense strand to SEQ ID NO: 1007582
agaguucuggacaaccagg

SEQ ID NO: 1007584 - RNA, 19 nt, Artificial Sequence
  Description of Artificial Sequence: Synthetic oligonucleotide
  Sense strand starting at position 1244 of SEQ ID NO: 914485
ccagaacucucccuggcuu

SEQ ID NO: 1007585 - RNA, 19 nt, Artificial Sequence
  Description of Artificial Sequence: Synthetic oligonucleotide
  Antisense strand to SEQ ID NO: 1007584
aagccagggagaguucugg

SEQ ID NO: 1007586 - RNA, 19 nt, Artificial Sequence
  Description of Artificial Sequence: Synthetic oligonucleotide
  Sense strand starting at position 1377 of SEQ ID NO: 914485
gugaacgguuccuucuuaa

SEQ ID NO: 1007587 - RNA, 19 nt, Artificial Sequence
  Description of Artificial Sequence: Synthetic oligonucleotide
  Antisense strand to SEQ ID NO: 1007586
uuaagaaggaaccguucac

SEQ ID NO: 1007588 - RNA, 19 nt, Artificial Sequence
  Description of Artificial Sequence: Synthetic oligonucleotide
  Sense strand starting at position 1380 of SEQ ID NO: 914485
aacgguuccuucuuaagag

SEQ ID NO: 1007589 - RNA, 19 nt, Artificial Sequence
  Description of Artificial Sequence: Synthetic oligonucleotide
  Antisense strand to SEQ ID NO: 1007588
cucuuaagaaggaaccguu

SEQ ID NO: 1007590 - RNA, 19 nt, Artificial Sequence
  Description of Artificial Sequence: Synthetic oligonucleotide
  Sense strand starting at position 1388 of SEQ ID NO: 914485
cuucuuaagaguuggcaag

SEQ ID NO: 1007591 - RNA, 19 nt, Artificial Sequence
  Description of Artificial Sequence: Synthetic oligonucleotide
  Antisense strand to SEQ ID NO: 1007590
cuugccaacucuuaagaag

SEQ ID NO: 1007592 - RNA, 19 nt, Artificial Sequence
  Description of Artificial Sequence: Synthetic oligonucleotide
  Sense strand starting at position 1389 of SEQ ID NO: 914485
uucuuaagaguuggcaaga

SEQ ID NO: 1007593 - RNA, 19 nt, Artificial Sequence
  Description of Artificial Sequence: Synthetic oligonucleotide
  Antisense strand to SEQ ID NO: 1007592
ucuugccaacucuuaagaa

SEQ ID NO: 1007594 - RNA, 19 nt, Artificial Sequence
  Description of Artificial Sequence: Synthetic oligonucleotide
  Sense strand starting at position 1390 of SEQ ID NO: 914485
ucuuaagaguuggcaagaa

SEQ ID NO: 1007595 - RNA, 19 nt, Artificial Sequence
  Description of Artificial Sequence: Synthetic oligonucleotide
  Antisense strand to SEQ ID NO: 1007594
uucuugccaacucuuaaga

SEQ ID NO: 1007596 - RNA, 19 nt, Artificial Sequence
  Description of Artificial Sequence: Synthetic oligonucleotide
  Sense strand starting at position 1420 of SEQ ID NO: 914485
gggaguuccugagcuuaag

SEQ ID NO: 1007597 - RNA, 19 nt, Artificial Sequence
  Description of Artificial Sequence: Synthetic oligonucleotide
  Antisense strand to SEQ ID NO: 1007596
cuuaagcucaggaacuccc

SEQ ID NO: 1007598 - RNA, 19 nt, Artificial Sequence
  Description of Artificial Sequence: Synthetic oligonucleotide
  Sense strand starting at position 1423 of SEQ ID NO: 914485
aguuccugagcuuaaggau

SEQ ID NO: 1007599 - RNA, 19 nt, Artificial Sequence
  Description of Artificial Sequence: Synthetic oligonucleotide
  Antisense strand to SEQ ID NO: 1007598
auccuuaagcucaggaacu

SEQ ID NO: 1007600 - RNA, 19 nt, Artificial Sequence
  Description of Artificial Sequence: Synthetic oligonucleotide
  Sense strand starting at position 2281 of SEQ ID NO: 914485
ccguguaauuuggcucucu

SEQ ID NO: 1007601 - RNA, 19 nt, Artificial Sequence
  Description of Artificial Sequence: Synthetic oligonucleotide
  Antisense strand to SEQ ID NO: 1007600
agagagccaaauuacacgg

SEQ ID NO: 1007602 - RNA, 19 nt, Artificial Sequence
  Description of Artificial Sequence: Synthetic oligonucleotide
  Sense strand starting at position 2282 of SEQ ID NO: 914485
cguguaauuuggcucucuu

SEQ ID NO: 1007603 - RNA, 19 nt, Artificial Sequence
  Description of Artificial Sequence: Synthetic oligonucleotide
  Antisense strand to SEQ ID NO: 1007602
aagagagccaaauuacacg

SEQ ID NO: 1007604 - RNA, 19 nt, Artificial Sequence
  Description of Artificial Sequence: Synthetic oligonucleotide
  Sense strand starting at position 2289 of SEQ ID NO: 914485
uuuggcucucuuggauuaa

SEQ ID NO: 1007605 - RNA, 19 nt, Artificial Sequence
  Description of Artificial Sequence: Synthetic oligonucleotide
  Antisense strand to SEQ ID NO: 1007604
uuaauccaagagagccaaa

SEQ ID NO: 1007606 - RNA, 19 nt, Artificial Sequence
  Description of Artificial Sequence: Synthetic oligonucleotide
  Sense strand starting at position 2333 of SEQ ID NO: 914485
gugcaauggugguugggaa

SEQ ID NO: 1007607 - RNA, 19 nt, Artificial Sequence
  Description of Artificial Sequence: Synthetic oligonucleotide
  Antisense strand to SEQ ID NO: 1007606
uucccaaccaccauugcac

SEQ ID NO: 1007608 - RNA, 19 nt, Artificial Sequence
  Description of Artificial Sequence: Synthetic oligonucleotide
  Sense strand starting at position 2351 of SEQ ID NO: 914485
aggaggguguggucuugau

SEQ ID NO: 1007609 - RNA, 19 nt, Artificial Sequence
  Description of Artificial Sequence: Synthetic oligonucleotide
  Antisense strand to SEQ ID NO: 1007608
aucaagaccacacccuccu

SEQ ID NO: 1007610 - RNA, 19 nt, Artificial Sequence
  Description of Artificial Sequence: Synthetic oligonucleotide
  Sense strand starting at position 2756 of SEQ ID NO: 914485
guuuaauucccaugguacu

SEQ ID NO: 1007611 - RNA, 19 nt, Artificial Sequence
  Description of Artificial Sequence: Synthetic oligonucleotide
  Antisense strand to SEQ ID NO: 1007610
aguaccaugggaauuaaac

SEQ ID NO: 1007612 - RNA, 19 nt, Artificial Sequence
  Description of Artificial Sequence: Synthetic oligonucleotide
  Sense strand starting at position 2787 of SEQ ID NO: 914485
uaugguaggaggugaauaa

SEQ ID NO: 1007613 - RNA, 19 nt, Artificial Sequence
  Description of Artificial Sequence: Synthetic oligonucleotide
  Antisense strand to SEQ ID NO: 1007612
uuauucaccuccuaccaua

SEQ ID NO: 1007614 - RNA, 19 nt, Artificial Sequence
  Description of Artificial Sequence: Synthetic oligonucleotide
  Sense strand starting at position 2834 of SEQ ID NO: 914485
uaauuugguuguccaagca

SEQ ID NO: 1007615 - RNA, 19 nt, Artificial Sequence
  Description of Artificial Sequence: Synthetic oligonucleotide
  Antisense strand to SEQ ID NO: 1007614
ugcuuggacaaccaaauua

SEQ ID NO: 1007616 - RNA, 19 nt, Artificial Sequence
  Description of Artificial Sequence: Synthetic oligonucleotide
  Sense strand starting at position 3046 of SEQ ID NO: 914485
ugaugcggcaaguauuaga

SEQ ID NO: 1007617 - RNA, 19 nt, Artificial Sequence
  Description of Artificial Sequence: Synthetic oligonucleotide
  Antisense strand to SEQ ID NO: 1007616
ucuaauacuugccgcauca

SEQ ID NO: 1007618 - RNA, 19 nt, Artificial Sequence
  Description of Artificial Sequence: Synthetic oligonucleotide
  Sense strand starting at position 3089 of SEQ ID NO: 914485
gagugagacuccucccagu

SEQ ID NO: 1007619 - RNA, 19 nt, Artificial Sequence
  Description of Artificial Sequence: Synthetic oligonucleotide
  Antisense strand to SEQ ID NO: 1007618
acugggaggagucucacuc

SEQ ID NO: 1007620 - RNA, 19 nt, Artificial Sequence
  Description of Artificial Sequence: Synthetic oligonucleotide
  Sense strand starting at position 3217 of SEQ ID NO: 914485
agucuuggugugcagaacu

SEQ ID NO: 1007621 - RNA, 19 nt, Artificial Sequence
  Description of Artificial Sequence: Synthetic oligonucleotide
  Antisense strand to SEQ ID NO: 1007620
aguucugcacaccaagacu

SEQ ID NO: 1007622 - RNA, 19 nt, Artificial Sequence
  Description of Artificial Sequence: Synthetic oligonucleotide
  Sense strand starting at position 3372 of SEQ ID NO: 914485
gaggaacccguuugaaaug

SEQ ID NO: 1007623 - RNA, 19 nt, Artificial Sequence
  Description of Artificial Sequence: Synthetic oligonucleotide
  Antisense strand to SEQ ID NO: 1007622
cauuucaaacggguuccuc

SEQ ID NO: 1007624 - RNA, 19 nt, Artificial Sequence
  Description of Artificial Sequence: Synthetic oligonucleotide
  Sense strand starting at position 3443 of SEQ ID NO: 914485
gcugaagaauucuccuaau

SEQ ID NO: 1007625 - RNA, 19 nt, Artificial Sequence
  Description of Artificial Sequence: Synthetic oligonucleotide
  Antisense strand to SEQ ID NO: 1007624
auuaggagaauucuucagc

SEQ ID NO: 1007626 - RNA, 19 nt, Artificial Sequence
  Description of Artificial Sequence: Synthetic oligonucleotide
  Sense strand starting at position 3506 of SEQ ID NO: 914485
agcugagguggugagaaau

SEQ ID NO: 1007627 - RNA, 19 nt, Artificial Sequence
  Description of Artificial Sequence: Synthetic oligonucleotide
  Antisense strand to SEQ ID NO: 1007626
auuucucaccaccucagcu

SEQ ID NO: 1007628 - RNA, 19 nt, Artificial Sequence
  Description of Artificial Sequence: Synthetic oligonucleotide
  Sense strand starting at position 3741 of SEQ ID NO: 914485
ugagaccuuguauauguua

SEQ ID NO: 1007629 - RNA, 19 nt, Artificial Sequence
  Description of Artificial Sequence: Synthetic oligonucleotide
  Antisense strand to SEQ ID NO: 1007628
uaacauauacaaggucuca

SEQ ID NO: 1007630 - RNA, 19 nt, Artificial Sequence
  Description of Artificial Sequence: Synthetic oligonucleotide
  Sense strand starting at position 3801 of SEQ ID NO: 914485
agagaaguaucuguugauc

SEQ ID NO: 1007631 - RNA, 19 nt, Artificial Sequence
  Description of Artificial Sequence: Synthetic oligonucleotide
  Antisense strand to SEQ ID NO: 1007630
gaucaacagauacuucucu

SEQ ID NO: 1007632 - RNA, 19 nt, Artificial Sequence
  Description of Artificial Sequence: Synthetic oligonucleotide
  Sense strand starting at position 3804 of SEQ ID NO: 914485
gaaguaucuguugauccag

SEQ ID NO: 1007633 - RNA, 19 nt, Artificial Sequence
  Description of Artificial Sequence: Synthetic oligonucleotide
  Antisense strand to SEQ ID NO: 1007632
cuggaucaacagauacuuc

SEQ ID NO: 1007634 - RNA, 19 nt, Artificial Sequence
  Description of Artificial Sequence: Synthetic oligonucleotide
  Sense strand starting at position 3806 of SEQ ID NO: 914485
aguaucuguugauccaguu

SEQ ID NO: 1007635 - RNA, 19 nt, Artificial Sequence
  Description of Artificial Sequence: Synthetic oligonucleotide
  Antisense strand to SEQ ID NO: 1007634
aacuggaucaacagauacu

SEQ ID NO: 1007636 - RNA, 19 nt, Artificial Sequence
  Description of Artificial Sequence: Synthetic oligonucleotide
  Sense strand starting at position 1300 of SEQ ID NO: 914486
agugguuggcuuugcaaag

SEQ ID NO: 1007637 - RNA, 19 nt, Artificial Sequence
  Description of Artificial Sequence: Synthetic oligonucleotide
  Antisense strand to SEQ ID NO: 1007636
cuuugcaaagccaaccacu

SEQ ID NO: 1007638 - RNA, 19 nt, Artificial Sequence
  Description of Artificial Sequence: Synthetic oligonucleotide
  Sense strand starting at position 1301 of SEQ ID NO: 914486
gugguuggcuuugcaaaga

SEQ ID NO: 1007639 - RNA, 19 nt, Artificial Sequence
  Description of Artificial Sequence: Synthetic oligonucleotide
  Antisense strand to SEQ ID NO: 1007638
ucuuugcaaagccaaccac

SEQ ID NO: 1007640 - RNA, 19 nt, Artificial Sequence
  Description of Artificial Sequence: Synthetic oligonucleotide
  Sense strand starting at position 1379 of SEQ ID NO: 914486
uagucaguguuggccucaa

SEQ ID NO: 1007641 - RNA, 19 nt, Artificial Sequence
  Description of Artificial Sequence: Synthetic oligonucleotide
  Antisense strand to SEQ ID NO: 1007640
uugaggccaacacugacua

SEQ ID NO: 1007642 - RNA, 19 nt, Artificial Sequence
  Description of Artificial Sequence: Synthetic oligonucleotide
  Sense strand starting at position 1411 of SEQ ID NO: 914486
guaaccaaucccugucuca

SEQ ID NO: 1007643 - RNA, 19 nt, Artificial Sequence
  Description of Artificial Sequence: Synthetic oligonucleotide
  Antisense strand to SEQ ID NO: 1007642
ugagacagggauugguuac

SEQ ID NO: 1007644 - RNA, 19 nt, Artificial Sequence
  Description of Artificial Sequence: Synthetic oligonucleotide
  Sense strand starting at position 1566 of SEQ ID NO: 914486
gcaucuauuucgucuacau

SEQ ID NO: 1007645 - RNA, 19 nt, Artificial Sequence
  Description of Artificial Sequence: Synthetic oligonucleotide
  Antisense strand to SEQ ID NO: 1007644
auguagacgaaauagaugc

SEQ ID NO: 1007646 - RNA, 19 nt, Artificial Sequence
  Description of Artificial Sequence: Synthetic oligonucleotide
  Sense strand starting at position 1665 of SEQ ID NO: 914486
acugcuuugggcuaaugau

SEQ ID NO: 1007647 - RNA, 19 nt, Artificial Sequence
  Description of Artificial Sequence: Synthetic oligonucleotide
  Antisense strand to SEQ ID NO: 1007646
aucauuagcccaaagcagu

SEQ ID NO: 1007648 - RNA, 19 nt, Artificial Sequence
  Description of Artificial Sequence: Synthetic oligonucleotide
  Sense strand starting at position 1675 of SEQ ID NO: 914486
gcuaaugauucagagagug

SEQ ID NO: 1007649 - RNA, 19 nt, Artificial Sequence
  Description of Artificial Sequence: Synthetic oligonucleotide
  Antisense strand to SEQ ID NO: 1007648
cacucucugaaucauuagc

SEQ ID NO: 1007650 - RNA, 19 nt, Artificial Sequence
  Description of Artificial Sequence: Synthetic oligonucleotide
  Sense strand starting at position 2074 of SEQ ID NO: 914486
acagcucuaucgucaucau

SEQ ID NO: 1007651 - RNA, 19 nt, Artificial Sequence
  Description of Artificial Sequence: Synthetic oligonucleotide
  Antisense strand to SEQ ID NO: 1007650
augaugacgauagagcugu

SEQ ID NO: 1007652 - RNA, 19 nt, Artificial Sequence
  Description of Artificial Sequence: Synthetic oligonucleotide
  Sense strand starting at position 2077 of SEQ ID NO: 914486
gcucuaucgucaucaucug

SEQ ID NO: 1007653 - RNA, 19 nt, Artificial Sequence
  Description of Artificial Sequence: Synthetic oligonucleotide
  Antisense strand to SEQ ID NO: 1007652
cagaugaugacgauagagc

SEQ ID NO: 1007654 - RNA, 19 nt, Artificial Sequence
  Description of Artificial Sequence: Synthetic oligonucleotide
  Sense strand starting at position 2084 of SEQ ID NO: 914486
cgucaucaucugugcucua

SEQ ID NO: 1007655 - RNA, 19 nt, Artificial Sequence
  Description of Artificial Sequence: Synthetic oligonucleotide
  Antisense strand to SEQ ID NO: 1007654
uagagcacagaugaugacg

SEQ ID NO: 1007656 - RNA, 19 nt, Artificial Sequence
  Description of Artificial Sequence: Synthetic oligonucleotide
  Sense strand starting at position 2115 of SEQ ID NO: 914486
gugguuaauuuguaaacug

SEQ ID NO: 1007657 - RNA, 19 nt, Artificial Sequence
  Description of Artificial Sequence: Synthetic oligonucleotide
  Antisense strand to SEQ ID NO: 1007656
caguuuacaaauuaaccac

SEQ ID NO: 1007658 - RNA, 19 nt, Artificial Sequence
  Description of Artificial Sequence: Synthetic oligonucleotide
  Sense strand starting at position 2138 of SEQ ID NO: 914486
uggcuucaugccugcguaa

SEQ ID NO: 1007659 - RNA, 19 nt, Artificial Sequence
  Description of Artificial Sequence: Synthetic oligonucleotide
  Antisense strand to SEQ ID NO: 1007658
uuacgcaggcaugaagcca

SEQ ID NO: 1007660 - RNA, 19 nt, Artificial Sequence
  Description of Artificial Sequence: Synthetic oligonucleotide
  Sense strand starting at position 2140 of SEQ ID NO: 914486
gcuucaugccugcguaaga

SEQ ID NO: 1007661 - RNA, 19 nt, Artificial Sequence
  Description of Artificial Sequence: Synthetic oligonucleotide
  Antisense strand to SEQ ID NO: 1007660
ucuuacgcaggcaugaagc

SEQ ID NO: 1007662 - RNA, 19 nt, Artificial Sequence
  Description of Artificial Sequence: Synthetic oligonucleotide
  Sense strand starting at position 2200 of SEQ ID NO: 914486
gccugucgaagugacauua

SEQ ID NO: 1007663 - RNA, 19 nt, Artificial Sequence
  Description of Artificial Sequence: Synthetic oligonucleotide
  Antisense strand to SEQ ID NO: 1007662
uaaugucacuucgacaggc

SEQ ID NO: 1007664 - RNA, 19 nt, Artificial Sequence
  Description of Artificial Sequence: Synthetic oligonucleotide
  Sense strand starting at position 2230 of SEQ ID NO: 914486
acuauauggucacuugaga

SEQ ID NO: 1007665 - RNA, 19 nt, Artificial Sequence
  Description of Artificial Sequence: Synthetic oligonucleotide
  Antisense strand to SEQ ID NO: 1007664
ucucaagugaccauauagu

SEQ ID NO: 1007666 - RNA, 19 nt, Artificial Sequence
  Description of Artificial Sequence: Synthetic oligonucleotide
  Sense strand starting at position 2241 of SEQ ID NO: 914486
acuugagagucuucgagga

SEQ ID NO: 1007667 - RNA, 19 nt, Artificial Sequence
  Description of Artificial Sequence: Synthetic oligonucleotide
  Antisense strand to SEQ ID NO: 1007666
uccucgaagacucucaagu

SEQ ID NO: 1007668 - RNA, 19 nt, Artificial Sequence
  Description of Artificial Sequence: Synthetic oligonucleotide
  Sense strand starting at position 2243 of SEQ ID NO: 914486
uugagagucuucgaggauu

SEQ ID NO: 1007669 - RNA, 19 nt, Artificial Sequence
  Description of Artificial Sequence: Synthetic oligonucleotide
  Antisense strand to SEQ ID NO: 1007668
aauccucgaagacucucaa

SEQ ID NO: 1007670 - RNA, 19 nt, Artificial Sequence
  Description of Artificial Sequence: Synthetic oligonucleotide
  Sense strand starting at position 2245 of SEQ ID NO: 914486
gagagucuucgaggauucu

SEQ ID NO: 1007671 - RNA, 19 nt, Artificial Sequence
  Description of Artificial Sequence: Synthetic oligonucleotide
  Antisense strand to SEQ ID NO: 1007670
agaauccucgaagacucuc

SEQ ID NO: 1007672 - RNA, 19 nt, Artificial Sequence
  Description of Artificial Sequence: Synthetic oligonucleotide
  Sense strand starting at position 2246 of SEQ ID NO: 914486
agagucuucgaggauucuu

SEQ ID NO: 1007673 - RNA, 19 nt, Artificial Sequence
  Description of Artificial Sequence: Synthetic oligonucleotide
  Antisense strand to SEQ ID NO: 1007672
aagaauccucgaagacucu

SEQ ID NO: 1007674 - RNA, 19 nt, Artificial Sequence
  Description of Artificial Sequence: Synthetic oligonucleotide
  Sense strand starting at position 2287 of SEQ ID NO: 914486
aggguuccagugugaggaa

SEQ ID NO: 1007675 - RNA, 19 nt, Artificial Sequence
  Description of Artificial Sequence: Synthetic oligonucleotide
  Antisense strand to SEQ ID NO: 1007674
uuccucacacuggaacccu

SEQ ID NO: 1007676 - RNA, 19 nt, Artificial Sequence
  Description of Artificial Sequence: Synthetic oligonucleotide
  Sense strand starting at position 2288 of SEQ ID NO: 914486
ggguuccagugugaggaaa

SEQ ID NO: 1007677 - RNA, 19 nt, Artificial Sequence
  Description of Artificial Sequence: Synthetic oligonucleotide
  Antisense strand to SEQ ID NO: 1007676
uuuccucacacuggaaccc

SEQ ID NO: 1007678 - RNA, 19 nt, Artificial Sequence
  Description of Artificial Sequence: Synthetic oligonucleotide
  Sense strand starting at position 2660 of SEQ ID NO: 914486
ggagaugacacgugucaca

SEQ ID NO: 1007679 - RNA, 19 nt, Artificial Sequence
  Description of Artificial Sequence: Synthetic oligonucleotide
  Antisense strand to SEQ ID NO: 1007678
ugugacacgugucaucucc

SEQ ID NO: 1007680 - RNA, 19 nt, Artificial Sequence
  Description of Artificial Sequence: Synthetic oligonucleotide
  Sense strand starting at position 2709 of SEQ ID NO: 914486
acggaauuccuaggaugcu

SEQ ID NO: 1007681 - RNA, 19 nt, Artificial Sequence
  Description of Artificial Sequence: Synthetic oligonucleotide
  Antisense strand to SEQ ID NO: 1007680
agcauccuaggaauuccgu

SEQ ID NO: 1007682 - RNA, 19 nt, Artificial Sequence
  Description of Artificial Sequence: Synthetic oligonucleotide
  Sense strand starting at position 2817 of SEQ ID NO: 914486
ggcccugaugccugagaag

SEQ ID NO: 1007683 - RNA, 19 nt, Artificial Sequence
  Description of Artificial Sequence: Synthetic oligonucleotide
  Antisense strand to SEQ ID NO: 1007682
cuucucaggcaucagggcc

SEQ ID NO: 1007684 - RNA, 19 nt, Artificial Sequence
  Description of Artificial Sequence: Synthetic oligonucleotide
  Sense strand starting at position 3084 of SEQ ID NO: 914486
gucuuagcuccagagugga

SEQ ID NO: 1007685 - RNA, 19 nt, Artificial Sequence
  Description of Artificial Sequence: Synthetic oligonucleotide
  Antisense strand to SEQ ID NO: 1007684
uccacucuggagcuaagac

SEQ ID NO: 1007686 - RNA, 19 nt, Artificial Sequence
  Description of Artificial Sequence: Synthetic oligonucleotide
  Sense strand starting at position 3273 of SEQ ID NO: 914486
auggcuugugucuguguga

SEQ ID NO: 1007687 - RNA, 19 nt, Artificial Sequence
  Description of Artificial Sequence: Synthetic oligonucleotide
  Antisense strand to SEQ ID NO: 1007686
ucacacagacacaagccau

SEQ ID NO: 1007688 - RNA, 19 nt, Artificial Sequence
  Description of Artificial Sequence: Synthetic oligonucleotide
  Sense strand starting at position 3274 of SEQ ID NO: 914486
uggcuugugucugugugau

SEQ ID NO: 1007689 - RNA, 19 nt, Artificial Sequence
  Description of Artificial Sequence: Synthetic oligonucleotide
  Antisense strand to SEQ ID NO: 1007688
aucacacagacacaagcca

SEQ ID NO: 1007690 - RNA, 19 nt, Artificial Sequence
  Description of Artificial Sequence: Synthetic oligonucleotide
  Sense strand starting at position 3276 of SEQ ID NO: 914486
gcuugugucugugugauac

SEQ ID NO: 1007691 - RNA, 19 nt, Artificial Sequence
  Description of Artificial Sequence: Synthetic oligonucleotide
  Antisense strand to SEQ ID NO: 1007690
guaucacacagacacaagc

SEQ ID NO: 1007692 - RNA, 19 nt, Artificial Sequence
  Description of Artificial Sequence: Synthetic oligonucleotide
  Sense strand starting at position 3386 of SEQ ID NO: 914486
ucagguggacucugucaga

SEQ ID NO: 1007693 - RNA, 19 nt, Artificial Sequence
  Description of Artificial Sequence: Synthetic oligonucleotide
  Antisense strand to SEQ ID NO: 1007692
ucugacagaguccaccuga

SEQ ID NO: 1007694 - RNA, 19 nt, Artificial Sequence
  Description of Artificial Sequence: Synthetic oligonucleotide
  Sense strand starting at position 3389 of SEQ ID NO: 914486
gguggacucugucagagga

SEQ ID NO: 1007695 - RNA, 19 nt, Artificial Sequence
  Description of Artificial Sequence: Synthetic oligonucleotide
  Antisense strand to SEQ ID NO: 1007694
uccucugacagaguccacc

SEQ ID NO: 1007696 - RNA, 19 nt, Artificial Sequence
  Description of Artificial Sequence: Synthetic oligonucleotide
  Sense strand starting at position 3488 of SEQ ID NO: 914486
gaaggcuuaugccugagga

SEQ ID NO: 1007697 - RNA, 19 nt, Artificial Sequence
  Description of Artificial Sequence: Synthetic oligonucleotide
  Antisense strand to SEQ ID NO: 1007696
uccucaggcauaagccuuc

SEQ ID NO: 1007698 - RNA, 19 nt, Artificial Sequence
  Description of Artificial Sequence: Synthetic oligonucleotide
  Sense strand starting at position 3489 of SEQ ID NO: 914486
aaggcuuaugccugaggaa

SEQ ID NO: 1007699 - RNA, 19 nt, Artificial Sequence
  Description of Artificial Sequence: Synthetic oligonucleotide
  Antisense strand to SEQ ID NO: 1007698
uuccucaggcauaagccuu

SEQ ID NO: 1007700 - RNA, 19 nt, Artificial Sequence
  Description of Artificial Sequence: Synthetic oligonucleotide
  Sense strand starting at position 3490 of SEQ ID NO: 914486
aggcuuaugccugaggaag

SEQ ID NO: 1007701 - RNA, 19 nt, Artificial Sequence
  Description of Artificial Sequence: Synthetic oligonucleotide
  Antisense strand to SEQ ID NO: 1007700
cuuccucaggcauaagccu

SEQ ID NO: 1007702 - RNA, 19 nt, Artificial Sequence
  Description of Artificial Sequence: Synthetic oligonucleotide
  Sense strand starting at position 3684 of SEQ ID NO: 914486
acaggugacaugugcauau

SEQ ID NO: 1007703 - RNA, 19 nt, Artificial Sequence
  Description of Artificial Sequence: Synthetic oligonucleotide
  Antisense strand to SEQ ID NO: 1007702
auaugcacaugucaccugu

SEQ ID NO: 1007704 - RNA, 19 nt, Artificial Sequence
  Description of Artificial Sequence: Synthetic oligonucleotide
  Sense strand starting at position 3686 of SEQ ID NO: 914486
aggugacaugugcauauau

SEQ ID NO: 1007705 - RNA, 19 nt, Artificial Sequence
  Description of Artificial Sequence: Synthetic oligonucleotide
  Antisense strand to SEQ ID NO: 1007704
auauaugcacaugucaccu

SEQ ID NO: 1007706 - RNA, 19 nt, Artificial Sequence
  Description of Artificial Sequence: Synthetic oligonucleotide
  Sense strand starting at position 3688 of SEQ ID NO: 914486
gugacaugugcauauauuc

SEQ ID NO: 1007707 - RNA, 19 nt, Artificial Sequence
  Description of Artificial Sequence: Synthetic oligonucleotide
  Antisense strand to SEQ ID NO: 1007706
gaauauaugcacaugucac

SEQ ID NO: 1007708 - RNA, 19 nt, Artificial Sequence
  Description of Artificial Sequence: Synthetic oligonucleotide
  Sense strand starting at position 3763 of SEQ ID NO: 914486
ugaagccauguuugacaga

SEQ ID NO: 1007709 - RNA, 19 nt, Artificial Sequence
  Description of Artificial Sequence: Synthetic oligonucleotide
  Antisense strand to SEQ ID NO: 1007708
ucugucaaacauggcuuca

SEQ ID NO: 1007710 - RNA, 19 nt, Artificial Sequence
  Description of Artificial Sequence: Synthetic oligonucleotide
  Sense strand starting at position 3873 of SEQ ID NO: 914486
ugccuugauuucucgugga

SEQ ID NO: 1007711 - RNA, 19 nt, Artificial Sequence
  Description of Artificial Sequence: Synthetic oligonucleotide
  Antisense strand to SEQ ID NO: 1007710
uccacgagaaaucaaggca

SEQ ID NO: 1007712 - RNA, 19 nt, Artificial Sequence
  Description of Artificial Sequence: Synthetic oligonucleotide
  Sense strand starting at position 3876 of SEQ ID NO: 914486
cuugauuucucguggaaua

SEQ ID NO: 1007713 - RNA, 19 nt, Artificial Sequence
  Description of Artificial Sequence: Synthetic oligonucleotide
  Antisense strand to SEQ ID NO: 1007712
uauuccacgagaaaucaag

SEQ ID NO: 1007714 - RNA, 19 nt, Artificial Sequence
  Description of Artificial Sequence: Synthetic oligonucleotide
  Sense strand starting at position 3927 of SEQ ID NO: 914486
gcuguuuaugcagugcuca

SEQ ID NO: 1007715 - RNA, 19 nt, Artificial Sequence
  Description of Artificial Sequence: Synthetic oligonucleotide
  Antisense strand to SEQ ID NO: 1007714
ugagcacugcauaaacagc

SEQ ID NO: 1007716 - RNA, 19 nt, Artificial Sequence
  Description of Artificial Sequence: Synthetic oligonucleotide
  Sense strand starting at position 554 of SEQ ID NO: 914487
gggacaucagccgagucuu

SEQ ID NO: 1007717 - RNA, 19 nt, Artificial Sequence
  Description of Artificial Sequence: Synthetic oligonucleotide
  Antisense strand to SEQ ID NO: 1007716
aagacucggcugauguccc

SEQ ID NO: 1007718 - RNA, 19 nt, Artificial Sequence
  Description of Artificial Sequence: Synthetic oligonucleotide
  Sense strand starting at position 562 of SEQ ID NO: 914487
agccgagucuuccacgaga

SEQ ID NO: 1007719 - RNA, 19 nt, Artificial Sequence
  Description of Artificial Sequence: Synthetic oligonucleotide
  Antisense strand to SEQ ID NO: 1007718
ucucguggaagacucggcu

SEQ ID NO: 1007720 - RNA, 19 nt, Artificial Sequence
  Description of Artificial Sequence: Synthetic oligonucleotide
  Sense strand starting at position 564 of SEQ ID NO: 914487
ccgagucuuccacgagaag

SEQ ID NO: 1007721 - RNA, 19 nt, Artificial Sequence
  Description of Artificial Sequence: Synthetic oligonucleotide
  Antisense strand to SEQ ID NO: 1007720
cuucucguggaagacucgg

SEQ ID NO: 1007722 - RNA, 19 nt, Artificial Sequence
  Description of Artificial Sequence: Synthetic oligonucleotide
  Sense strand starting at position 760 of SEQ ID NO: 914487
gucacuucccagcagcaaa

SEQ ID NO: 1007723 - RNA, 19 nt, Artificial Sequence
  Description of Artificial Sequence: Synthetic oligonucleotide
  Antisense strand to SEQ ID NO: 1007722
uuugcugcugggaagugac

SEQ ID NO: 1007724 - RNA, 19 nt, Artificial Sequence
  Description of Artificial Sequence: Synthetic oligonucleotide
  Sense strand starting at position 1008 of SEQ ID NO: 914487
gaacgugucugggugagga

SEQ ID NO: 1007725 - RNA, 19 nt, Artificial Sequence
  Description of Artificial Sequence: Synthetic oligonucleotide
  Antisense strand to SEQ ID NO: 1007724
uccucacccagacacguuc

SEQ ID NO: 1007726 - RNA, 19 nt, Artificial Sequence
  Description of Artificial Sequence: Synthetic oligonucleotide
  Sense strand starting at position 2440 of SEQ ID NO: 914487
agugguuggcuuugcaaag

SEQ ID NO: 1007727 - RNA, 19 nt, Artificial Sequence
  Description of Artificial Sequence: Synthetic oligonucleotide
  Antisense strand to SEQ ID NO: 1007726
cuuugcaaagccaaccacu

SEQ ID NO: 1007728 - RNA, 19 nt, Artificial Sequence
  Description of Artificial Sequence: Synthetic oligonucleotide
  Sense strand starting at position 2441 of SEQ ID NO: 914487
gugguuggcuuugcaaaga

SEQ ID NO: 1007729 - RNA, 19 nt, Artificial Sequence
  Description of Artificial Sequence: Synthetic oligonucleotide
  Antisense strand to SEQ ID NO: 1007728
ucuuugcaaagccaaccac

SEQ ID NO: 1007730 - RNA, 19 nt, Artificial Sequence
  Description of Artificial Sequence: Synthetic oligonucleotide
  Sense strand starting at position 2519 of SEQ ID NO: 914487
uagucaguguuggccucaa

SEQ ID NO: 1007731 - RNA, 19 nt, Artificial Sequence
  Description of Artificial Sequence: Synthetic oligonucleotide
  Antisense strand to SEQ ID NO: 1007730
uugaggccaacacugacua

SEQ ID NO: 1007732 - RNA, 19 nt, Artificial Sequence
  Description of Artificial Sequence: Synthetic oligonucleotide
  Sense strand starting at position 2531 of SEQ ID NO: 914487
gccucaagguccuaguaca

SEQ ID NO: 1007733 - RNA, 19 nt, Artificial Sequence
  Description of Artificial Sequence: Synthetic oligonucleotide
  Antisense strand to SEQ ID NO: 1007732
uguacuaggaccuugaggc

SEQ ID NO: 1007734 - RNA, 19 nt, Artificial Sequence
  Description of Artificial Sequence: Synthetic oligonucleotide
  Sense strand starting at position 2551 of SEQ ID NO: 914487
guaaccaaucccugucuca

SEQ ID NO: 1007735 - RNA, 19 nt, Artificial Sequence
  Description of Artificial Sequence: Synthetic oligonucleotide
  Antisense strand to SEQ ID NO: 1007734
ugagacagggauugguuac

SEQ ID NO: 1007736 - RNA, 19 nt, Artificial Sequence
  Description of Artificial Sequence: Synthetic oligonucleotide
  Sense strand starting at position 2706 of SEQ ID NO: 914487
gcaucuauuucgucuacau

SEQ ID NO: 1007737 - RNA, 19 nt, Artificial Sequence
  Description of Artificial Sequence: Synthetic oligonucleotide
  Antisense strand to SEQ ID NO: 1007736
auguagacgaaauagaugc

SEQ ID NO: 1007738 - RNA, 19 nt, Artificial Sequence
  Description of Artificial Sequence: Synthetic oligonucleotide
  Sense strand starting at position 2805 of SEQ ID NO: 914487
acugcuuugggcuaaugau

SEQ ID NO: 1007739 - RNA, 19 nt, Artificial Sequence
  Description of Artificial Sequence: Synthetic oligonucleotide
  Antisense strand to SEQ ID NO: 1007738
aucauuagcccaaagcagu

SEQ ID NO: 1007740 - RNA, 19 nt, Artificial Sequence
  Description of Artificial Sequence: Synthetic oligonucleotide
  Sense strand starting at position 2815 of SEQ ID NO: 914487
gcuaaugauucagagagug

SEQ ID NO: 1007741 - RNA, 19 nt, Artificial Sequence
  Description of Artificial Sequence: Synthetic oligonucleotide
  Antisense strand to SEQ ID NO: 1007740
cacucucugaaucauuagc

SEQ ID NO: 1007742 - RNA, 19 nt, Artificial Sequence
  Description of Artificial Sequence: Synthetic oligonucleotide
  Sense strand starting at position 3214 of SEQ ID NO: 914487
acagcucuaucgucaucau

SEQ ID NO: 1007743 - RNA, 19 nt, Artificial Sequence
  Description of Artificial Sequence: Synthetic oligonucleotide
  Antisense strand to SEQ ID NO: 1007742
augaugacgauagagcugu

SEQ ID NO: 1007744 - RNA, 19 nt, Artificial Sequence
  Description of Artificial Sequence: Synthetic oligonucleotide
  Sense strand starting at position 3217 of SEQ ID NO: 914487
gcucuaucgucaucaucug

SEQ ID NO: 1007745 - RNA, 19 nt, Artificial Sequence
  Description of Artificial Sequence: Synthetic oligonucleotide
  Antisense strand to SEQ ID NO: 1007744
cagaugaugacgauagagc

SEQ ID NO: 1007746 - RNA, 19 nt, Artificial Sequence
  Description of Artificial Sequence: Synthetic oligonucleotide
  Sense strand starting at position 3224 of SEQ ID NO: 914487
cgucaucaucugugcucua

SEQ ID NO: 1007747 - RNA, 19 nt, Artificial Sequence
  Description of Artificial Sequence: Synthetic oligonucleotide
  Antisense strand to SEQ ID NO: 1007746
uagagcacagaugaugacg

SEQ ID NO: 1007748 - RNA, 19 nt, Artificial Sequence
  Description of Artificial Sequence: Synthetic oligonucleotide
  Sense strand starting at position 3255 of SEQ ID NO: 914487
gugguuaauuuguaaacug

SEQ ID NO: 1007749 - RNA, 19 nt, Artificial Sequence
  Description of Artificial Sequence: Synthetic oligonucleotide
  Antisense strand to SEQ ID NO: 1007748
caguuuacaaauuaaccac

SEQ ID NO: 1007750 - RNA, 19 nt, Artificial Sequence
  Description of Artificial Sequence: Synthetic oligonucleotide
  Sense strand starting at position 3278 of SEQ ID NO: 914487
uggcuucaugccugcguaa

SEQ ID NO: 1007751 - RNA, 19 nt, Artificial Sequence
  Description of Artificial Sequence: Synthetic oligonucleotide
  Antisense strand to SEQ ID NO: 1007750
uuacgcaggcaugaagcca

SEQ ID NO: 1007752 - RNA, 19 nt, Artificial Sequence
  Description of Artificial Sequence: Synthetic oligonucleotide
  Sense strand starting at position 3280 of SEQ ID NO: 914487
gcuucaugccugcguaaga

SEQ ID NO: 1007753 - RNA, 19 nt, Artificial Sequence
  Description of Artificial Sequence: Synthetic oligonucleotide
  Antisense strand to SEQ ID NO: 1007752
ucuuacgcaggcaugaagc

SEQ ID NO: 1007754 - RNA, 19 nt, Artificial Sequence
  Description of Artificial Sequence: Synthetic oligonucleotide
  Sense strand starting at position 3340 of SEQ ID NO: 914487
gccugucgaagugacauua

SEQ ID NO: 1007755 - RNA, 19 nt, Artificial Sequence
  Description of Artificial Sequence: Synthetic oligonucleotide
  Antisense strand to SEQ ID NO: 1007754
uaaugucacuucgacaggc

SEQ ID NO: 1007756 - RNA, 19 nt, Artificial Sequence
  Description of Artificial Sequence: Synthetic oligonucleotide
  Sense strand starting at position 3370 of SEQ ID NO: 914487
acuauauggucacuugaga

SEQ ID NO: 1007757 - RNA, 19 nt, Artificial Sequence
  Description of Artificial Sequence: Synthetic oligonucleotide
  Antisense strand to SEQ ID NO: 1007756
ucucaagugaccauauagu

SEQ ID NO: 1007758 - RNA, 19 nt, Artificial Sequence
  Description of Artificial Sequence: Synthetic oligonucleotide
  Sense strand starting at position 3381 of SEQ ID NO: 914487
acuugagagucuucgagga

SEQ ID NO: 1007759 - RNA, 19 nt, Artificial Sequence
  Description of Artificial Sequence: Synthetic oligonucleotide
  Antisense strand to SEQ ID NO: 1007758
uccucgaagacucucaagu

SEQ ID NO: 1007760 - RNA, 19 nt, Artificial Sequence
  Description of Artificial Sequence: Synthetic oligonucleotide
  Sense strand starting at position 3383 of SEQ ID NO: 914487
uugagagucuucgaggauu

SEQ ID NO: 1007761 - RNA, 19 nt, Artificial Sequence
  Description of Artificial Sequence: Synthetic oligonucleotide
  Antisense strand to SEQ ID NO: 1007760
aauccucgaagacucucaa

SEQ ID NO: 1007762 - RNA, 19 nt, Artificial Sequence
  Description of Artificial Sequence: Synthetic oligonucleotide
  Sense strand starting at position 3385 of SEQ ID NO: 914487
gagagucuucgaggauucu

SEQ ID NO: 1007763 - RNA, 19 nt, Artificial Sequence
  Description of Artificial Sequence: Synthetic oligonucleotide
  Antisense strand to SEQ ID NO: 1007762
agaauccucgaagacucuc

SEQ ID NO: 1007764 - RNA, 19 nt, Artificial Sequence
  Description of Artificial Sequence: Synthetic oligonucleotide
  Sense strand starting at position 3386 of SEQ ID NO: 914487
agagucuucgaggauucuu

SEQ ID NO: 1007765 - RNA, 19 nt, Artificial Sequence
  Description of Artificial Sequence: Synthetic oligonucleotide
  Antisense strand to SEQ ID NO: 1007764
aagaauccucgaagacucu

SEQ ID NO: 1007766 - RNA, 19 nt, Artificial Sequence
  Description of Artificial Sequence: Synthetic oligonucleotide
  Sense strand starting at position 3427 of SEQ ID NO: 914487
aggguuccagugugaggaa

SEQ ID NO: 1007767 - RNA, 19 nt, Artificial Sequence
  Description of Artificial Sequence: Synthetic oligonucleotide
  Antisense strand to SEQ ID NO: 1007766
uuccucacacuggaacccu

SEQ ID NO: 1007768 - RNA, 19 nt, Artificial Sequence
  Description of Artificial Sequence: Synthetic oligonucleotide
  Sense strand starting at position 3428 of SEQ ID NO: 914487
ggguuccagugugaggaaa

SEQ ID NO: 1007769 - RNA, 19 nt, Artificial Sequence
  Description of Artificial Sequence: Synthetic oligonucleotide
  Antisense strand to SEQ ID NO: 1007768
uuuccucacacuggaaccc

SEQ ID NO: 1007770 - RNA, 19 nt, Artificial Sequence
  Description of Artificial Sequence: Synthetic oligonucleotide
  Sense strand starting at position 3800 of SEQ ID NO: 914487
ggagaugacacgugucaca

SEQ ID NO: 1007771 - RNA, 19 nt, Artificial Sequence
  Description of Artificial Sequence: Synthetic oligonucleotide
  Antisense strand to SEQ ID NO: 1007770
ugugacacgugucaucucc

SEQ ID NO: 1007772 - RNA, 19 nt, Artificial Sequence
  Description of Artificial Sequence: Synthetic oligonucleotide
  Sense strand starting at position 3819 of SEQ ID NO: 914487
gcacgauggucauaucagu

SEQ ID NO: 1007773 - RNA, 19 nt, Artificial Sequence
  Description of Artificial Sequence: Synthetic oligonucleotide
  Antisense strand to SEQ ID NO: 1007772
acugauaugaccaucgugc

SEQ ID NO: 1007774 - RNA, 19 nt, Artificial Sequence
  Description of Artificial Sequence: Synthetic oligonucleotide
  Sense strand starting at position 3849 of SEQ ID NO: 914487
acggaauuccuaggaugcu

SEQ ID NO: 1007775 - RNA, 19 nt, Artificial Sequence
  Description of Artificial Sequence: Synthetic oligonucleotide
  Antisense strand to SEQ ID NO: 1007774
agcauccuaggaauuccgu

SEQ ID NO: 1007776 - RNA, 19 nt, Artificial Sequence
  Description of Artificial Sequence: Synthetic oligonucleotide
  Sense strand starting at position 3850 of SEQ ID NO: 914487
cggaauuccuaggaugcuu

SEQ ID NO: 1007777 - RNA, 19 nt, Artificial Sequence
  Description of Artificial Sequence: Synthetic oligonucleotide
  Antisense strand to SEQ ID NO: 1007776
aagcauccuaggaauuccg

SEQ ID NO: 1007778 - RNA, 19 nt, Artificial Sequence
  Description of Artificial Sequence: Synthetic oligonucleotide
  Sense strand starting at position 3957 of SEQ ID NO: 914487
ggcccugaugccugagaag

SEQ ID NO: 1007779 - RNA, 19 nt, Artificial Sequence
  Description of Artificial Sequence: Synthetic oligonucleotide
  Antisense strand to SEQ ID NO: 1007778
cuucucaggcaucagggcc

SEQ ID NO: 1007780 - RNA, 19 nt, Artificial Sequence
  Description of Artificial Sequence: Synthetic oligonucleotide
  Sense strand starting at position 164 of SEQ ID NO: 914488
gugucucacucuucugaac

SEQ ID NO: 1007781 - RNA, 19 nt, Artificial Sequence
  Description of Artificial Sequence: Synthetic oligonucleotide
  Antisense strand to SEQ ID NO: 1007780
guucagaagagugagacac

SEQ ID NO: 1007782 - RNA, 19 nt, Artificial Sequence
  Description of Artificial Sequence: Synthetic oligonucleotide
  Sense strand starting at position 263 of SEQ ID NO: 914488
caguuuguuccauacugua

SEQ ID NO: 1007783 - RNA, 19 nt, Artificial Sequence
  Description of Artificial Sequence: Synthetic oligonucleotide
  Antisense strand to SEQ ID NO: 1007782
uacaguauggaacaaacug

SEQ ID NO: 1007784 - RNA, 19 nt, Artificial Sequence
  Description of Artificial Sequence: Synthetic oligonucleotide
  Sense strand starting at position 284 of SEQ ID NO: 914488
gcuuaucucccagaagaug

SEQ ID NO: 1007785 - RNA, 19 nt, Artificial Sequence
  Description of Artificial Sequence: Synthetic oligonucleotide
  Antisense strand to SEQ ID NO: 1007784
caucuucugggagauaagc

SEQ ID NO: 1007786 - RNA, 19 nt, Artificial Sequence
  Description of Artificial Sequence: Synthetic oligonucleotide
  Sense strand starting at position 344 of SEQ ID NO: 914488
guccaacccugcuuagaua

SEQ ID NO: 1007787 - RNA, 19 nt, Artificial Sequence
  Description of Artificial Sequence: Synthetic oligonucleotide
  Antisense strand to SEQ ID NO: 1007786
uaucuaagcaggguuggac

SEQ ID NO: 1007788 - RNA, 19 nt, Artificial Sequence
  Description of Artificial Sequence: Synthetic oligonucleotide
  Sense strand starting at position 671 of SEQ ID NO: 914488
cucuuuguuccagaugaca

SEQ ID NO: 1007789 - RNA, 19 nt, Artificial Sequence
  Description of Artificial Sequence: Synthetic oligonucleotide
  Antisense strand to SEQ ID NO: 1007788
ugucaucuggaacaaagag

SEQ ID NO: 1007790 - RNA, 19 nt, Artificial Sequence
  Description of Artificial Sequence: Synthetic oligonucleotide
  Sense strand starting at position 701 of SEQ ID NO: 914488
ccucaaauagagugauguu

SEQ ID NO: 1007791 - RNA, 19 nt, Artificial Sequence
  Description of Artificial Sequence: Synthetic oligonucleotide
  Antisense strand to SEQ ID NO: 1007790
aacaucacucuauuugagg

SEQ ID NO: 1007792 - RNA, 19 nt, Artificial Sequence
  Description of Artificial Sequence: Synthetic oligonucleotide
  Sense strand starting at position 892 of SEQ ID NO: 914488
cuaaguaguguauacacau

SEQ ID NO: 1007793 - RNA, 19 nt, Artificial Sequence
  Description of Artificial Sequence: Synthetic oligonucleotide
  Antisense strand to SEQ ID NO: 1007792
auguguauacacuacuuag

SEQ ID NO: 1007794 - RNA, 19 nt, Artificial Sequence
  Description of Artificial Sequence: Synthetic oligonucleotide
  Sense strand starting at position 899 of SEQ ID NO: 914488
guguauacacauuauucua

SEQ ID NO: 1007795 - RNA, 19 nt, Artificial Sequence
  Description of Artificial Sequence: Synthetic oligonucleotide
  Antisense strand to SEQ ID NO: 1007794
uagaauaauguguauacac

SEQ ID NO: 1007796 - RNA, 19 nt, Artificial Sequence
  Description of Artificial Sequence: Synthetic oligonucleotide
  Sense strand starting at position 1102 of SEQ ID NO: 914488
cccgucagccaagaaauua

SEQ ID NO: 1007797 - RNA, 19 nt, Artificial Sequence
  Description of Artificial Sequence: Synthetic oligonucleotide
  Antisense strand to SEQ ID NO: 1007796
uaauuucuuggcugacggg

SEQ ID NO: 1007798 - RNA, 19 nt, Artificial Sequence
  Description of Artificial Sequence: Synthetic oligonucleotide
  Sense strand starting at position 1202 of SEQ ID NO: 914488
cccacucaccaguguaaga

SEQ ID NO: 1007799 - RNA, 19 nt, Artificial Sequence
  Description of Artificial Sequence: Synthetic oligonucleotide
  Antisense strand to SEQ ID NO: 1007798
ucuuacacuggugaguggg

SEQ ID NO: 1007800 - RNA, 19 nt, Artificial Sequence
  Description of Artificial Sequence: Synthetic oligonucleotide
  Sense strand starting at position 1320 of SEQ ID NO: 914488
cuguuagaauuggugggaa

SEQ ID NO: 1007801 - RNA, 19 nt, Artificial Sequence
  Description of Artificial Sequence: Synthetic oligonucleotide
  Antisense strand to SEQ ID NO: 1007800
uucccaccaauucuaacag

SEQ ID NO: 1007802 - RNA, 19 nt, Artificial Sequence
  Description of Artificial Sequence: Synthetic oligonucleotide
  Sense strand starting at position 1323 of SEQ ID NO: 914488
uuagaauuggugggaagca

SEQ ID NO: 1007803 - RNA, 19 nt, Artificial Sequence
  Description of Artificial Sequence: Synthetic oligonucleotide
  Antisense strand to SEQ ID NO: 1007802
ugcuucccaccaauucuaa

SEQ ID NO: 1007804 - RNA, 19 nt, Artificial Sequence
  Description of Artificial Sequence: Synthetic oligonucleotide
  Sense strand starting at position 1747 of SEQ ID NO: 914488
acuaguuccgaggaaaguu

SEQ ID NO: 1007805 - RNA, 19 nt, Artificial Sequence
  Description of Artificial Sequence: Synthetic oligonucleotide
  Antisense strand to SEQ ID NO: 1007804
aacuuuccucggaacuagu

SEQ ID NO: 1007806 - RNA, 19 nt, Artificial Sequence
  Description of Artificial Sequence: Synthetic oligonucleotide
  Sense strand starting at position 2152 of SEQ ID NO: 914488
uacggagucucuccucuau

SEQ ID NO: 1007807 - RNA, 19 nt, Artificial Sequence
  Description of Artificial Sequence: Synthetic oligonucleotide
  Antisense strand to SEQ ID NO: 1007806
auagaggagagacuccgua

SEQ ID NO: 1007808 - RNA, 19 nt, Artificial Sequence
  Description of Artificial Sequence: Synthetic oligonucleotide
  Sense strand starting at position 2397 of SEQ ID NO: 914488
ggcucagcgccuuccuaau

SEQ ID NO: 1007809 - RNA, 19 nt, Artificial Sequence
  Description of Artificial Sequence: Synthetic oligonucleotide
  Antisense strand to SEQ ID NO: 1007808
auuaggaaggcgcugagcc

SEQ ID NO: 1007810 - RNA, 19 nt, Artificial Sequence
  Description of Artificial Sequence: Synthetic oligonucleotide
  Sense strand starting at position 2520 of SEQ ID NO: 914488
gcgguuuguguccuaaguc

SEQ ID NO: 1007811 - RNA, 19 nt, Artificial Sequence
  Description of Artificial Sequence: Synthetic oligonucleotide
  Antisense strand to SEQ ID NO: 1007810
gacuuaggacacaaaccgc

SEQ ID NO: 1007812 - RNA, 19 nt, Artificial Sequence
  Description of Artificial Sequence: Synthetic oligonucleotide
  Sense strand starting at position 2586 of SEQ ID NO: 914488
acugacuaccauugauuga

SEQ ID NO: 1007813 - RNA, 19 nt, Artificial Sequence
  Description of Artificial Sequence: Synthetic oligonucleotide
  Antisense strand to SEQ ID NO: 1007812
ucaaucaaugguagucagu

SEQ ID NO: 1007814 - RNA, 19 nt, Artificial Sequence
  Description of Artificial Sequence: Synthetic oligonucleotide
  Sense strand starting at position 2646 of SEQ ID NO: 914488
aguucuagcccuugaauuc

SEQ ID NO: 1007815 - RNA, 19 nt, Artificial Sequence
  Description of Artificial Sequence: Synthetic oligonucleotide
  Antisense strand to SEQ ID NO: 1007814
gaauucaagggcuagaacu

SEQ ID NO: 1007816 - RNA, 19 nt, Artificial Sequence
  Description of Artificial Sequence: Synthetic oligonucleotide
  Sense strand starting at position 2732 of SEQ ID NO: 914488
agucgagggcucugaaucu

SEQ ID NO: 1007817 - RNA, 19 nt, Artificial Sequence
  Description of Artificial Sequence: Synthetic oligonucleotide
  Antisense strand to SEQ ID NO: 1007816
agauucagagcccucgacu

SEQ ID NO: 1007818 - RNA, 19 nt, Artificial Sequence
  Description of Artificial Sequence: Synthetic oligonucleotide
  Sense strand starting at position 2893 of SEQ ID NO: 914488
ggaggagguguggguugau

SEQ ID NO: 1007819 - RNA, 19 nt, Artificial Sequence
  Description of Artificial Sequence: Synthetic oligonucleotide
  Antisense strand to SEQ ID NO: 1007818
aucaacccacaccuccucc

SEQ ID NO: 1007820 - RNA, 19 nt, Artificial Sequence
  Description of Artificial Sequence: Synthetic oligonucleotide
  Sense strand starting at position 2954 of SEQ ID NO: 914488
cuggcuuucucccugaaga

SEQ ID NO: 1007821 - RNA, 19 nt, Artificial Sequence
  Description of Artificial Sequence: Synthetic oligonucleotide
  Antisense strand to SEQ ID NO: 1007820
ucuucagggagaaagccag

SEQ ID NO: 1007822 - RNA, 19 nt, Artificial Sequence
  Description of Artificial Sequence: Synthetic oligonucleotide
  Sense strand starting at position 2955 of SEQ ID NO: 914488
uggcuuucucccugaagaa

SEQ ID NO: 1007823 - RNA, 19 nt, Artificial Sequence
  Description of Artificial Sequence: Synthetic oligonucleotide
  Antisense strand to SEQ ID NO: 1007822
uucuucagggagaaagcca

SEQ ID NO: 1007824 - RNA, 19 nt, Artificial Sequence
  Description of Artificial Sequence: Synthetic oligonucleotide
  Sense strand starting at position 2956 of SEQ ID NO: 914488
ggcuuucucccugaagaaa

SEQ ID NO: 1007825 - RNA, 19 nt, Artificial Sequence
  Description of Artificial Sequence: Synthetic oligonucleotide
  Antisense strand to SEQ ID NO: 1007824
uuucuucagggagaaagcc

SEQ ID NO: 1007826 - RNA, 19 nt, Artificial Sequence
  Description of Artificial Sequence: Synthetic oligonucleotide
  Sense strand starting at position 3078 of SEQ ID NO: 914488
caggcagauuaccugguua

SEQ ID NO: 1007827 - RNA, 19 nt, Artificial Sequence
  Description of Artificial Sequence: Synthetic oligonucleotide
  Antisense strand to SEQ ID NO: 1007826
uaaccagguaaucugccug

SEQ ID NO: 1007828 - RNA, 19 nt, Artificial Sequence
  Description of Artificial Sequence: Synthetic oligonucleotide
  Sense strand starting at position 3080 of SEQ ID NO: 914488
ggcagauuaccugguuaau

SEQ ID NO: 1007829 - RNA, 19 nt, Artificial Sequence
  Description of Artificial Sequence: Synthetic oligonucleotide
  Antisense strand to SEQ ID NO: 1007828
auuaaccagguaaucugcc

SEQ ID NO: 1007830 - RNA, 19 nt, Artificial Sequence
  Description of Artificial Sequence: Synthetic oligonucleotide
  Sense strand starting at position 3082 of SEQ ID NO: 914488
cagauuaccugguuaauga

SEQ ID NO: 1007831 - RNA, 19 nt, Artificial Sequence
  Description of Artificial Sequence: Synthetic oligonucleotide
  Antisense strand to SEQ ID NO: 1007830
ucauuaaccagguaaucug

SEQ ID NO: 1007832 - RNA, 19 nt, Artificial Sequence
  Description of Artificial Sequence: Synthetic oligonucleotide
  Sense strand starting at position 3174 of SEQ ID NO: 914488
guugugggaggguaugauu

SEQ ID NO: 1007833 - RNA, 19 nt, Artificial Sequence
  Description of Artificial Sequence: Synthetic oligonucleotide
  Antisense strand to SEQ ID NO: 1007832
aaucauacccucccacaac

SEQ ID NO: 1007834 - RNA, 19 nt, Artificial Sequence
  Description of Artificial Sequence: Synthetic oligonucleotide
  Sense strand starting at position 3197 of SEQ ID NO: 914488
gcgcuuuguacgaguggag

SEQ ID NO: 1007835 - RNA, 19 nt, Artificial Sequence
  Description of Artificial Sequence: Synthetic oligonucleotide
  Antisense strand to SEQ ID NO: 1007834
cuccacucguacaaagcgc

SEQ ID NO: 1007836 - RNA, 19 nt, Artificial Sequence
  Description of Artificial Sequence: Synthetic oligonucleotide
  Sense strand starting at position 3198 of SEQ ID NO: 914488
cgcuuuguacgaguggagu

SEQ ID NO: 1007837 - RNA, 19 nt, Artificial Sequence
  Description of Artificial Sequence: Synthetic oligonucleotide
  Antisense strand to SEQ ID NO: 1007836
acuccacucguacaaagcg

SEQ ID NO: 1007838 - RNA, 19 nt, Artificial Sequence
  Description of Artificial Sequence: Synthetic oligonucleotide
  Sense strand starting at position 3298 of SEQ ID NO: 914488
uuguuaggagugcguauuu

SEQ ID NO: 1007839 - RNA, 19 nt, Artificial Sequence
  Description of Artificial Sequence: Synthetic oligonucleotide
  Antisense strand to SEQ ID NO: 1007838
aaauacgcacuccuaacaa

SEQ ID NO: 1007840 - RNA, 19 nt, Artificial Sequence
  Description of Artificial Sequence: Synthetic oligonucleotide
  Sense strand starting at position 3433 of SEQ ID NO: 914488
aagucaggguggucugaga

SEQ ID NO: 1007841 - RNA, 19 nt, Artificial Sequence
  Description of Artificial Sequence: Synthetic oligonucleotide
  Antisense strand to SEQ ID NO: 1007840
ucucagaccacccugacuu

SEQ ID NO: 1007842 - RNA, 19 nt, Artificial Sequence
  Description of Artificial Sequence: Synthetic oligonucleotide
  Sense strand starting at position 3507 of SEQ ID NO: 914488
auacuuaaccucugggaug

SEQ ID NO: 1007843 - RNA, 19 nt, Artificial Sequence
  Description of Artificial Sequence: Synthetic oligonucleotide
  Antisense strand to SEQ ID NO: 1007842
caucccagagguuaaguau

SEQ ID NO: 1007844 - RNA, 19 nt, Artificial Sequence
  Description of Artificial Sequence: Synthetic oligonucleotide
  Sense strand starting at position 3527 of SEQ ID NO: 914488
gcccuuaaacagggaauaa

SEQ ID NO: 1007845 - RNA, 19 nt, Artificial Sequence
  Description of Artificial Sequence: Synthetic oligonucleotide
  Antisense strand to SEQ ID NO: 1007844
uuauucccuguuuaagggc

SEQ ID NO: 1007846 - RNA, 19 nt, Artificial Sequence
  Description of Artificial Sequence: Synthetic oligonucleotide
  Sense strand starting at position 3577 of SEQ ID NO: 914488
cuugaugguagcuguugaa

SEQ ID NO: 1007847 - RNA, 19 nt, Artificial Sequence
  Description of Artificial Sequence: Synthetic oligonucleotide
  Antisense strand to SEQ ID NO: 1007846
uucaacagcuaccaucaag

SEQ ID NO: 1007848 - RNA, 19 nt, Artificial Sequence
  Description of Artificial Sequence: Synthetic oligonucleotide
  Sense strand starting at position 3581 of SEQ ID NO: 914488
augguagcuguugaagauu

SEQ ID NO: 1007849 - RNA, 19 nt, Artificial Sequence
  Description of Artificial Sequence: Synthetic oligonucleotide
  Antisense strand to SEQ ID NO: 1007848
aaucuucaacagcuaccau

SEQ ID NO: 1007850 - RNA, 19 nt, Artificial Sequence
  Description of Artificial Sequence: Synthetic oligonucleotide
  Sense strand starting at position 3584 of SEQ ID NO: 914488
guagcuguugaagauuaca

SEQ ID NO: 1007851 - RNA, 19 nt, Artificial Sequence
  Description of Artificial Sequence: Synthetic oligonucleotide
  Antisense strand to SEQ ID NO: 1007850
uguaaucuucaacagcuac

SEQ ID NO: 1007852 - RNA, 19 nt, Artificial Sequence
  Description of Artificial Sequence: Synthetic oligonucleotide
  Sense strand starting at position 3723 of SEQ ID NO: 914488
gcuggagaauccuuuaaac

SEQ ID NO: 1007853 - RNA, 19 nt, Artificial Sequence
  Description of Artificial Sequence: Synthetic oligonucleotide
  Antisense strand to SEQ ID NO: 1007852
guuuaaaggauucuccagc

SEQ ID NO: 1007854 - RNA, 19 nt, Artificial Sequence
  Description of Artificial Sequence: Synthetic oligonucleotide
  Sense strand starting at position 3779 of SEQ ID NO: 914488
uccugcaagugguuaagau

SEQ ID NO: 1007855 - RNA, 19 nt, Artificial Sequence
  Description of Artificial Sequence: Synthetic oligonucleotide
  Antisense strand to SEQ ID NO: 1007854
aucuuaaccacuugcagga

SEQ ID NO: 1007856 - RNA, 19 nt, Artificial Sequence
  Description of Artificial Sequence: Synthetic oligonucleotide
  Sense strand starting at position 3780 of SEQ ID NO: 914488
ccugcaagugguuaagauc

SEQ ID NO: 1007857 - RNA, 19 nt, Artificial Sequence
  Description of Artificial Sequence: Synthetic oligonucleotide
  Antisense strand to SEQ ID NO: 1007856
gaucuuaaccacuugcagg

SEQ ID NO: 1007858 - RNA, 19 nt, Artificial Sequence
  Description of Artificial Sequence: Synthetic oligonucleotide
  Sense strand starting at position 3846 of SEQ ID NO: 914488
ugagaaccacugugccauu

SEQ ID NO: 1007859 - RNA, 19 nt, Artificial Sequence
  Description of Artificial Sequence: Synthetic oligonucleotide
  Antisense strand to SEQ ID NO: 1007858
aauggcacagugguucuca

SEQ ID NO: 1007860 - RNA, 19 nt, Artificial Sequence
  Description of Artificial Sequence: Synthetic oligonucleotide
  Sense strand starting at position 201 of SEQ ID NO: 914489
ggaauugggucuuagggag

SEQ ID NO: 1007861 - RNA, 19 nt, Artificial Sequence
  Description of Artificial Sequence: Synthetic oligonucleotide
  Antisense strand to SEQ ID NO: 1007860
cucccuaagacccaauucc

SEQ ID NO: 1007862 - RNA, 19 nt, Artificial Sequence
  Description of Artificial Sequence: Synthetic oligonucleotide
  Sense strand starting at position 332 of SEQ ID NO: 914489
agagcuguuccacagguuu

SEQ ID NO: 1007863 - RNA, 19 nt, Artificial Sequence
  Description of Artificial Sequence: Synthetic oligonucleotide
  Antisense strand to SEQ ID NO: 1007862
aaaccuguggaacagcucu

SEQ ID NO: 1007864 - RNA, 19 nt, Artificial Sequence
  Description of Artificial Sequence: Synthetic oligonucleotide
  Sense strand starting at position 343 of SEQ ID NO: 914489
acagguuuaucaggcagaa

SEQ ID NO: 1007865 - RNA, 19 nt, Artificial Sequence
  Description of Artificial Sequence: Synthetic oligonucleotide
  Antisense strand to SEQ ID NO: 1007864
uucugccugauaaaccugu

SEQ ID NO: 1007866 - RNA, 19 nt, Artificial Sequence
  Description of Artificial Sequence: Synthetic oligonucleotide
  Sense strand starting at position 380 of SEQ ID NO: 914489
guggaaaccucauuacaga

SEQ ID NO: 1007867 - RNA, 19 nt, Artificial Sequence
  Description of Artificial Sequence: Synthetic oligonucleotide
  Antisense strand to SEQ ID NO: 1007866
ucuguaaugagguuuccac

SEQ ID NO: 1007868 - RNA, 19 nt, Artificial Sequence
  Description of Artificial Sequence: Synthetic oligonucleotide
  Sense strand starting at position 638 of SEQ ID NO: 914489
gucacagcccuuugaguua

SEQ ID NO: 1007869 - RNA, 19 nt, Artificial Sequence
  Description of Artificial Sequence: Synthetic oligonucleotide
  Antisense strand to SEQ ID NO: 1007868
uaacucaaagggcugugac

SEQ ID NO: 1007870 - RNA, 19 nt, Artificial Sequence
  Description of Artificial Sequence: Synthetic oligonucleotide
  Sense strand starting at position 659 of SEQ ID NO: 914489
uugggagauugucaacaga

SEQ ID NO: 1007871 - RNA, 19 nt, Artificial Sequence
  Description of Artificial Sequence: Synthetic oligonucleotide
  Antisense strand to SEQ ID NO: 1007870
ucuguugacaaucucccaa

SEQ ID NO: 1007872 - RNA, 19 nt, Artificial Sequence
  Description of Artificial Sequence: Synthetic oligonucleotide
  Sense strand starting at position 888 of SEQ ID NO: 914489
gggacaacucccuggcaca

SEQ ID NO: 1007873 - RNA, 19 nt, Artificial Sequence
  Description of Artificial Sequence: Synthetic oligonucleotide
  Antisense strand to SEQ ID NO: 1007872
ugugccagggaguuguccc

SEQ ID NO: 1007874 - RNA, 19 nt, Artificial Sequence
  Description of Artificial Sequence: Synthetic oligonucleotide
  Sense strand starting at position 889 of SEQ ID NO: 914489
ggacaacucccuggcacau

SEQ ID NO: 1007875 - RNA, 19 nt, Artificial Sequence
  Description of Artificial Sequence: Synthetic oligonucleotide
  Antisense strand to SEQ ID NO: 1007874
augugccagggaguugucc

SEQ ID NO: 1007876 - RNA, 19 nt, Artificial Sequence
  Description of Artificial Sequence: Synthetic oligonucleotide
  Sense strand starting at position 1124 of SEQ ID NO: 914489
cccaaugacucagaugagu

SEQ ID NO: 1007877 - RNA, 19 nt, Artificial Sequence
  Description of Artificial Sequence: Synthetic oligonucleotide
  Antisense strand to SEQ ID NO: 1007876
acucaucugagucauuggg

SEQ ID NO: 1007878 - RNA, 19 nt, Artificial Sequence
  Description of Artificial Sequence: Synthetic oligonucleotide
  Sense strand starting at position 1135 of SEQ ID NO: 914489
agaugagucuaccaggaaa

SEQ ID NO: 1007879 - RNA, 19 nt, Artificial Sequence
  Description of Artificial Sequence: Synthetic oligonucleotide
  Antisense strand to SEQ ID NO: 1007878
uuuccugguagacucaucu

SEQ ID NO: 1007880 - RNA, 19 nt, Artificial Sequence
  Description of Artificial Sequence: Synthetic oligonucleotide
  Sense strand starting at position 1328 of SEQ ID NO: 914489
gcaagugugcgauaccuac

SEQ ID NO: 1007881 - RNA, 19 nt, Artificial Sequence
  Description of Artificial Sequence: Synthetic oligonucleotide
  Antisense strand to SEQ ID NO: 1007880
guagguaucgcacacuugc

SEQ ID NO: 1007882 - RNA, 19 nt, Artificial Sequence
  Description of Artificial Sequence: Synthetic oligonucleotide
  Sense strand starting at position 1332 of SEQ ID NO: 914489
gugugcgauaccuacagau

SEQ ID NO: 1007883 - RNA, 19 nt, Artificial Sequence
  Description of Artificial Sequence: Synthetic oligonucleotide
  Antisense strand to SEQ ID NO: 1007882
aucuguagguaucgcacac

SEQ ID NO: 1007884 - RNA, 19 nt, Artificial Sequence
  Description of Artificial Sequence: Synthetic oligonucleotide
  Sense strand starting at position 1334 of SEQ ID NO: 914489
gugcgauaccuacagaucu

SEQ ID NO: 1007885 - RNA, 19 nt, Artificial Sequence
  Description of Artificial Sequence: Synthetic oligonucleotide
  Antisense strand to SEQ ID NO: 1007884
agaucuguagguaucgcac

SEQ ID NO: 1007886 - RNA, 19 nt, Artificial Sequence
  Description of Artificial Sequence: Synthetic oligonucleotide
  Sense strand starting at position 1336 of SEQ ID NO: 914489
gcgauaccuacagaucugu

SEQ ID NO: 1007887 - RNA, 19 nt, Artificial Sequence
  Description of Artificial Sequence: Synthetic oligonucleotide
  Antisense strand to SEQ ID NO: 1007886
acagaucuguagguaucgc

SEQ ID NO: 1007888 - RNA, 19 nt, Artificial Sequence
  Description of Artificial Sequence: Synthetic oligonucleotide
  Sense strand starting at position 1342 of SEQ ID NO: 914489
ccuacagaucuguguguuu

SEQ ID NO: 1007889 - RNA, 19 nt, Artificial Sequence
  Description of Artificial Sequence: Synthetic oligonucleotide
  Antisense strand to SEQ ID NO: 1007888
aaacacacagaucuguagg

SEQ ID NO: 1007890 - RNA, 19 nt, Artificial Sequence
  Description of Artificial Sequence: Synthetic oligonucleotide
  Sense strand starting at position 1400 of SEQ ID NO: 914489
ugggucucuccaugaguug

SEQ ID NO: 1007891 - RNA, 19 nt, Artificial Sequence
  Description of Artificial Sequence: Synthetic oligonucleotide
  Antisense strand to SEQ ID NO: 1007890
caacucauggagagaccca

SEQ ID NO: 1007892 - RNA, 19 nt, Artificial Sequence
  Description of Artificial Sequence: Synthetic oligonucleotide
  Sense strand starting at position 1401 of SEQ ID NO: 914489
gggucucuccaugaguugu

SEQ ID NO: 1007893 - RNA, 19 nt, Artificial Sequence
  Description of Artificial Sequence: Synthetic oligonucleotide
  Antisense strand to SEQ ID NO: 1007892
acaacucauggagagaccc

SEQ ID NO: 1007894 - RNA, 19 nt, Artificial Sequence
  Description of Artificial Sequence: Synthetic oligonucleotide
  Sense strand starting at position 1409 of SEQ ID NO: 914489
ccaugaguugugugucuca

SEQ ID NO: 1007895 - RNA, 19 nt, Artificial Sequence
  Description of Artificial Sequence: Synthetic oligonucleotide
  Antisense strand to SEQ ID NO: 1007894
ugagacacacaacucaugg

SEQ ID NO: 1007896 - RNA, 19 nt, Artificial Sequence
  Description of Artificial Sequence: Synthetic oligonucleotide
  Sense strand starting at position 1412 of SEQ ID NO: 914489
ugaguugugugucucaaug

SEQ ID NO: 1007897 - RNA, 19 nt, Artificial Sequence
  Description of Artificial Sequence: Synthetic oligonucleotide
  Antisense strand to SEQ ID NO: 1007896
cauugagacacacaacuca

SEQ ID NO: 1007898 - RNA, 19 nt, Artificial Sequence
  Description of Artificial Sequence: Synthetic oligonucleotide
  Sense strand starting at position 1458 of SEQ ID NO: 914489
cguguaucagugggugaca

SEQ ID NO: 1007899 - RNA, 19 nt, Artificial Sequence
  Description of Artificial Sequence: Synthetic oligonucleotide
  Antisense strand to SEQ ID NO: 1007898
ugucacccacugauacacg

SEQ ID NO: 1007900 - RNA, 19 nt, Artificial Sequence
  Description of Artificial Sequence: Synthetic oligonucleotide
  Sense strand starting at position 1459 of SEQ ID NO: 914489
guguaucagugggugacau

SEQ ID NO: 1007901 - RNA, 19 nt, Artificial Sequence
  Description of Artificial Sequence: Synthetic oligonucleotide
  Antisense strand to SEQ ID NO: 1007900
augucacccacugauacac

SEQ ID NO: 1007902 - RNA, 19 nt, Artificial Sequence
  Description of Artificial Sequence: Synthetic oligonucleotide
  Sense strand starting at position 1506 of SEQ ID NO: 914489
agguguggccuguaagcaa

SEQ ID NO: 1007903 - RNA, 19 nt, Artificial Sequence
  Description of Artificial Sequence: Synthetic oligonucleotide
  Antisense strand to SEQ ID NO: 1007902
uugcuuacaggccacaccu

SEQ ID NO: 1007904 - RNA, 19 nt, Artificial Sequence
  Description of Artificial Sequence: Synthetic oligonucleotide
  Sense strand starting at position 1631 of SEQ ID NO: 914489
agagagcgugugugagaau

SEQ ID NO: 1007905 - RNA, 19 nt, Artificial Sequence
  Description of Artificial Sequence: Synthetic oligonucleotide
  Antisense strand to SEQ ID NO: 1007904
auucucacacacgcucucu

SEQ ID NO: 1007906 - RNA, 19 nt, Artificial Sequence
  Description of Artificial Sequence: Synthetic oligonucleotide
  Sense strand starting at position 1632 of SEQ ID NO: 914489
gagagcgugugugagaauu

SEQ ID NO: 1007907 - RNA, 19 nt, Artificial Sequence
  Description of Artificial Sequence: Synthetic oligonucleotide
  Antisense strand to SEQ ID NO: 1007906
aauucucacacacgcucuc

SEQ ID NO: 1007908 - RNA, 19 nt, Artificial Sequence
  Description of Artificial Sequence: Synthetic oligonucleotide
  Sense strand starting at position 1643 of SEQ ID NO: 914489
ugagaauuggagugagggu

SEQ ID NO: 1007909 - RNA, 19 nt, Artificial Sequence
  Description of Artificial Sequence: Synthetic oligonucleotide
  Antisense strand to SEQ ID NO: 1007908
acccucacuccaauucuca

SEQ ID NO: 1007910 - RNA, 19 nt, Artificial Sequence
  Description of Artificial Sequence: Synthetic oligonucleotide
  Sense strand starting at position 2523 of SEQ ID NO: 914489
ccggaugggaauuguaguu

SEQ ID NO: 1007911 - RNA, 19 nt, Artificial Sequence
  Description of Artificial Sequence: Synthetic oligonucleotide
  Antisense strand to SEQ ID NO: 1007910
aacuacaauucccauccgg

SEQ ID NO: 1007912 - RNA, 19 nt, Artificial Sequence
  Description of Artificial Sequence: Synthetic oligonucleotide
  Sense strand starting at position 2610 of SEQ ID NO: 914489
ugaaucuuacuuugauugu

SEQ ID NO: 1007913 - RNA, 19 nt, Artificial Sequence
  Description of Artificial Sequence: Synthetic oligonucleotide
  Antisense strand to SEQ ID NO: 1007912
acaaucaaaguaagauuca

SEQ ID NO: 1007914 - RNA, 19 nt, Artificial Sequence
  Description of Artificial Sequence: Synthetic oligonucleotide
  Sense strand starting at position 2614 of SEQ ID NO: 914489
ucuuacuuugauuguauca

SEQ ID NO: 1007915 - RNA, 19 nt, Artificial Sequence
  Description of Artificial Sequence: Synthetic oligonucleotide
  Antisense strand to SEQ ID NO: 1007914
ugauacaaucaaaguaaga

SEQ ID NO: 1007916 - RNA, 19 nt, Artificial Sequence
  Description of Artificial Sequence: Synthetic oligonucleotide
  Sense strand starting at position 2619 of SEQ ID NO: 914489
cuuugauuguaucauuaga

SEQ ID NO: 1007917 - RNA, 19 nt, Artificial Sequence
  Description of Artificial Sequence: Synthetic oligonucleotide
  Antisense strand to SEQ ID NO: 1007916
ucuaaugauacaaucaaag

SEQ ID NO: 1007918 - RNA, 19 nt, Artificial Sequence
  Description of Artificial Sequence: Synthetic oligonucleotide
  Sense strand starting at position 2621 of SEQ ID NO: 914489
uugauuguaucauuagagu

SEQ ID NO: 1007919 - RNA, 19 nt, Artificial Sequence
  Description of Artificial Sequence: Synthetic oligonucleotide
  Antisense strand to SEQ ID NO: 1007918
acucuaaugauacaaucaa

SEQ ID NO: 1007920 - RNA, 19 nt, Artificial Sequence
  Description of Artificial Sequence: Synthetic oligonucleotide
  Sense strand starting at position 2624 of SEQ ID NO: 914489
auuguaucauuagaguuga

SEQ ID NO: 1007921 - RNA, 19 nt, Artificial Sequence
  Description of Artificial Sequence: Synthetic oligonucleotide
  Antisense strand to SEQ ID NO: 1007920
ucaacucuaaugauacaau

SEQ ID NO: 1007922 - RNA, 19 nt, Artificial Sequence
  Description of Artificial Sequence: Synthetic oligonucleotide
  Sense strand starting at position 2635 of SEQ ID NO: 914489
agaguugaugugggagaca

SEQ ID NO: 1007923 - RNA, 19 nt, Artificial Sequence
  Description of Artificial Sequence: Synthetic oligonucleotide
  Antisense strand to SEQ ID NO: 1007922
ugucucccacaucaacucu

SEQ ID NO: 1007924 - RNA, 19 nt, Artificial Sequence
  Description of Artificial Sequence: Synthetic oligonucleotide
  Sense strand starting at position 2742 of SEQ ID NO: 914489
caagguggcucuuaaguua

SEQ ID NO: 1007925 - RNA, 19 nt, Artificial Sequence
  Description of Artificial Sequence: Synthetic oligonucleotide
  Antisense strand to SEQ ID NO: 1007924
uaacuuaagagccaccuug

SEQ ID NO: 1007926 - RNA, 19 nt, Artificial Sequence
  Description of Artificial Sequence: Synthetic oligonucleotide
  Sense strand starting at position 2909 of SEQ ID NO: 914489
ggcucuguccagugguauu

SEQ ID NO: 1007927 - RNA, 19 nt, Artificial Sequence
  Description of Artificial Sequence: Synthetic oligonucleotide
  Antisense strand to SEQ ID NO: 1007926
aauaccacuggacagagcc

SEQ ID NO: 1007928 - RNA, 19 nt, Artificial Sequence
  Description of Artificial Sequence: Synthetic oligonucleotide
  Sense strand starting at position 2919 of SEQ ID NO: 914489
agugguauuucugauuucu

SEQ ID NO: 1007929 - RNA, 19 nt, Artificial Sequence
  Description of Artificial Sequence: Synthetic oligonucleotide
  Antisense strand to SEQ ID NO: 1007928
agaaaucagaaauaccacu

SEQ ID NO: 1007930 - RNA, 19 nt, Artificial Sequence
  Description of Artificial Sequence: Synthetic oligonucleotide
  Sense strand starting at position 2984 of SEQ ID NO: 914489
ggacauauugguggcuuca

SEQ ID NO: 1007931 - RNA, 19 nt, Artificial Sequence
  Description of Artificial Sequence: Synthetic oligonucleotide
  Antisense strand to SEQ ID NO: 1007930
ugaagccaccaauaugucc

SEQ ID NO: 1007932 - RNA, 19 nt, Artificial Sequence
  Description of Artificial Sequence: Synthetic oligonucleotide
  Sense strand starting at position 3180 of SEQ ID NO: 914489
uuuggagucaaggguuauu

SEQ ID NO: 1007933 - RNA, 19 nt, Artificial Sequence
  Description of Artificial Sequence: Synthetic oligonucleotide
  Antisense strand to SEQ ID NO: 1007932
aauaacccuugacuccaaa

SEQ ID NO: 1007934 - RNA, 19 nt, Artificial Sequence
  Description of Artificial Sequence: Synthetic oligonucleotide
  Sense strand starting at position 3183 of SEQ ID NO: 914489
ggagucaaggguuauuguu

SEQ ID NO: 1007935 - RNA, 19 nt, Artificial Sequence
  Description of Artificial Sequence: Synthetic oligonucleotide
  Antisense strand to SEQ ID NO: 1007934
aacaauaacccuugacucc

SEQ ID NO: 1007936 - RNA, 19 nt, Artificial Sequence
  Description of Artificial Sequence: Synthetic oligonucleotide
  Sense strand starting at position 3185 of SEQ ID NO: 914489
agucaaggguuauuguuau

SEQ ID NO: 1007937 - RNA, 19 nt, Artificial Sequence
  Description of Artificial Sequence: Synthetic oligonucleotide
  Antisense strand to SEQ ID NO: 1007936
auaacaauaacccuugacu

SEQ ID NO: 1007938 - RNA, 19 nt, Artificial Sequence
  Description of Artificial Sequence: Synthetic oligonucleotide
  Sense strand starting at position 3191 of SEQ ID NO: 914489
ggguuauuguuauguugac

SEQ ID NO: 1007939 - RNA, 19 nt, Artificial Sequence
  Description of Artificial Sequence: Synthetic oligonucleotide
  Antisense strand to SEQ ID NO: 1007938
gucaacauaacaauaaccc

SEQ ID NO: 1007940 - RNA, 19 nt, Artificial Sequence
  Description of Artificial Sequence: Synthetic oligonucleotide
  Sense strand starting at position 112 of SEQ ID NO: 914490
cgcacaguuucucaucuua

SEQ ID NO: 1007941 - RNA, 19 nt, Artificial Sequence
  Description of Artificial Sequence: Synthetic oligonucleotide
  Antisense strand to SEQ ID NO: 1007940
uaagaugagaaacugugcg

SEQ ID NO: 1007942 - RNA, 19 nt, Artificial Sequence
  Description of Artificial Sequence: Synthetic oligonucleotide
  Sense strand starting at position 183 of SEQ ID NO: 914490
agcugaaccucagagaugu

SEQ ID NO: 1007943 - RNA, 19 nt, Artificial Sequence
  Description of Artificial Sequence: Synthetic oligonucleotide
  Antisense strand to SEQ ID NO: 1007942
acaucucugagguucagcu

SEQ ID NO: 1007944 - RNA, 19 nt, Artificial Sequence
  Description of Artificial Sequence: Synthetic oligonucleotide
  Sense strand starting at position 217 of SEQ ID NO: 914490
acgucauccaguuaggaag

SEQ ID NO: 1007945 - RNA, 19 nt, Artificial Sequence
  Description of Artificial Sequence: Synthetic oligonucleotide
  Antisense strand to SEQ ID NO: 1007944
cuuccuaacuggaugacgu

SEQ ID NO: 1007946 - RNA, 19 nt, Artificial Sequence
  Description of Artificial Sequence: Synthetic oligonucleotide
  Sense strand starting at position 287 of SEQ ID NO: 914490
cgccuacuuccauaauaug

SEQ ID NO: 1007947 - RNA, 19 nt, Artificial Sequence
  Description of Artificial Sequence: Synthetic oligonucleotide
  Antisense strand to SEQ ID NO: 1007946
cauauuauggaaguaggcg

SEQ ID NO: 1007948 - RNA, 19 nt, Artificial Sequence
  Description of Artificial Sequence: Synthetic oligonucleotide
  Sense strand starting at position 512 of SEQ ID NO: 914490
auccuagcucucugugauu

SEQ ID NO: 1007949 - RNA, 19 nt, Artificial Sequence
  Description of Artificial Sequence: Synthetic oligonucleotide
  Antisense strand to SEQ ID NO: 1007948
aaucacagagagcuaggau

SEQ ID NO: 1007950 - RNA, 19 nt, Artificial Sequence
  Description of Artificial Sequence: Synthetic oligonucleotide
  Sense strand starting at position 523 of SEQ ID NO: 914490
cugugauugcccuggacag

SEQ ID NO: 1007951 - RNA, 19 nt, Artificial Sequence
  Description of Artificial Sequence: Synthetic oligonucleotide
  Antisense strand to SEQ ID NO: 1007950
cuguccagggcaaucacag

SEQ ID NO: 1007952 - RNA, 19 nt, Artificial Sequence
  Description of Artificial Sequence: Synthetic oligonucleotide
  Sense strand starting at position 582 of SEQ ID NO: 914490
cagggauccuccuaucaug

SEQ ID NO: 1007953 - RNA, 19 nt, Artificial Sequence
  Description of Artificial Sequence: Synthetic oligonucleotide
  Antisense strand to SEQ ID NO: 1007952
caugauaggaggaucccug

SEQ ID NO: 1007954 - RNA, 19 nt, Artificial Sequence
  Description of Artificial Sequence: Synthetic oligonucleotide
  Sense strand starting at position 640 of SEQ ID NO: 914490
ucaggagacuguccuuaaa

SEQ ID NO: 1007955 - RNA, 19 nt, Artificial Sequence
  Description of Artificial Sequence: Synthetic oligonucleotide
  Antisense strand to SEQ ID NO: 1007954
uuuaaggacagucuccuga

SEQ ID NO: 1007956 - RNA, 19 nt, Artificial Sequence
  Description of Artificial Sequence: Synthetic oligonucleotide
  Sense strand starting at position 642 of SEQ ID NO: 914490
aggagacuguccuuaaauc

SEQ ID NO: 1007957 - RNA, 19 nt, Artificial Sequence
  Description of Artificial Sequence: Synthetic oligonucleotide
  Antisense strand to SEQ ID NO: 1007956
gauuuaaggacagucuccu

SEQ ID NO: 1007958 - RNA, 19 nt, Artificial Sequence
  Description of Artificial Sequence: Synthetic oligonucleotide
  Sense strand starting at position 672 of SEQ ID NO: 914490
gggacuuccucaguaaccu

SEQ ID NO: 1007959 - RNA, 19 nt, Artificial Sequence
  Description of Artificial Sequence: Synthetic oligonucleotide
  Antisense strand to SEQ ID NO: 1007958
agguuacugaggaaguccc

SEQ ID NO: 1007960 - RNA, 19 nt, Artificial Sequence
  Description of Artificial Sequence: Synthetic oligonucleotide
  Sense strand starting at position 673 of SEQ ID NO: 914490
ggacuuccucaguaaccuu

SEQ ID NO: 1007961 - RNA, 19 nt, Artificial Sequence
  Description of Artificial Sequence: Synthetic oligonucleotide
  Antisense strand to SEQ ID NO: 1007960
aagguuacugaggaagucc

SEQ ID NO: 1007962 - RNA, 19 nt, Artificial Sequence
  Description of Artificial Sequence: Synthetic oligonucleotide
  Sense strand starting at position 774 of SEQ ID NO: 914490
uggagaucccacugcaaua

SEQ ID NO: 1007963 - RNA, 19 nt, Artificial Sequence
  Description of Artificial Sequence: Synthetic oligonucleotide
  Antisense strand to SEQ ID NO: 1007962
uauugcagugggaucucca

SEQ ID NO: 1007964 - RNA, 19 nt, Artificial Sequence
  Description of Artificial Sequence: Synthetic oligonucleotide
  Sense strand starting at position 797 of SEQ ID NO: 914490
aggugagagcgccaaugua

SEQ ID NO: 1007965 - RNA, 19 nt, Artificial Sequence
  Description of Artificial Sequence: Synthetic oligonucleotide
  Antisense strand to SEQ ID NO: 1007964
uacauuggcgcucucaccu

SEQ ID NO: 1007966 - RNA, 19 nt, Artificial Sequence
  Description of Artificial Sequence: Synthetic oligonucleotide
  Sense strand starting at position 908 of SEQ ID NO: 914490
gggccagugcuuugaacaa

SEQ ID NO: 1007967 - RNA, 19 nt, Artificial Sequence
  Description of Artificial Sequence: Synthetic oligonucleotide
  Antisense strand to SEQ ID NO: 1007966
uuguucaaagcacuggccc

SEQ ID NO: 1007968 - RNA, 19 nt, Artificial Sequence
  Description of Artificial Sequence: Synthetic oligonucleotide
  Sense strand starting at position 915 of SEQ ID NO: 914490
ugcuuugaacaauagcaaa

SEQ ID NO: 1007969 - RNA, 19 nt, Artificial Sequence
  Description of Artificial Sequence: Synthetic oligonucleotide
  Antisense strand to SEQ ID NO: 1007968
uuugcuauuguucaaagca

SEQ ID NO: 1007970 - RNA, 19 nt, Artificial Sequence
  Description of Artificial Sequence: Synthetic oligonucleotide
  Sense strand starting at position 974 of SEQ ID NO: 914490
ccuccuagaccucgaggau

SEQ ID NO: 1007971 - RNA, 19 nt, Artificial Sequence
  Description of Artificial Sequence: Synthetic oligonucleotide
  Antisense strand to SEQ ID NO: 1007970
auccucgaggucuaggagg

SEQ ID NO: 1007972 - RNA, 19 nt, Artificial Sequence
  Description of Artificial Sequence: Synthetic oligonucleotide
  Sense strand starting at position 1174 of SEQ ID NO: 914490
ggagcugcgcguucaagua

SEQ ID NO: 1007973 - RNA, 19 nt, Artificial Sequence
  Description of Artificial Sequence: Synthetic oligonucleotide
  Antisense strand to SEQ ID NO: 1007972
uacuugaacgcgcagcucc

SEQ ID NO: 1007974 - RNA, 19 nt, Artificial Sequence
  Description of Artificial Sequence: Synthetic oligonucleotide
  Sense strand starting at position 1200 of SEQ ID NO: 914490
gggauuaccugcgagaucu

SEQ ID NO: 1007975 - RNA, 19 nt, Artificial Sequence
  Description of Artificial Sequence: Synthetic oligonucleotide
  Antisense strand to SEQ ID NO: 1007974
agaucucgcagguaauccc

SEQ ID NO: 1007976 - RNA, 19 nt, Artificial Sequence
  Description of Artificial Sequence: Synthetic oligonucleotide
  Sense strand starting at position 1202 of SEQ ID NO: 914490
gauuaccugcgagaucuuu

SEQ ID NO: 1007977 - RNA, 19 nt, Artificial Sequence
  Description of Artificial Sequence: Synthetic oligonucleotide
  Antisense strand to SEQ ID NO: 1007976
aaagaucucgcagguaauc

SEQ ID NO: 1007978 - RNA, 19 nt, Artificial Sequence
  Description of Artificial Sequence: Synthetic oligonucleotide
  Sense strand starting at position 1476 of SEQ ID NO: 914490
ggauccguuucaggacauu

SEQ ID NO: 1007979 - RNA, 19 nt, Artificial Sequence
  Description of Artificial Sequence: Synthetic oligonucleotide
  Antisense strand to SEQ ID NO: 1007978
aauguccugaaacggaucc

SEQ ID NO: 1007980 - RNA, 19 nt, Artificial Sequence
  Description of Artificial Sequence: Synthetic oligonucleotide
  Sense strand starting at position 2198 of SEQ ID NO: 914490
aaccuucgguucuagaaga

SEQ ID NO: 1007981 - RNA, 19 nt, Artificial Sequence
  Description of Artificial Sequence: Synthetic oligonucleotide
  Antisense strand to SEQ ID NO: 1007980
ucuucuagaaccgaagguu

SEQ ID NO: 1007982 - RNA, 19 nt, Artificial Sequence
  Description of Artificial Sequence: Synthetic oligonucleotide
  Sense strand starting at position 2342 of SEQ ID NO: 914490
aagcgccuacguuagaaua

SEQ ID NO: 1007983 - RNA, 19 nt, Artificial Sequence
  Description of Artificial Sequence: Synthetic oligonucleotide
  Antisense strand to SEQ ID NO: 1007982
uauucuaacguaggcgcuu

SEQ ID NO: 1007984 - RNA, 19 nt, Artificial Sequence
  Description of Artificial Sequence: Synthetic oligonucleotide
  Sense strand starting at position 2344 of SEQ ID NO: 914490
gcgccuacguuagaauacu

SEQ ID NO: 1007985 - RNA, 19 nt, Artificial Sequence
  Description of Artificial Sequence: Synthetic oligonucleotide
  Antisense strand to SEQ ID NO: 1007984
aguauucuaacguaggcgc

SEQ ID NO: 1007986 - RNA, 19 nt, Artificial Sequence
  Description of Artificial Sequence: Synthetic oligonucleotide
  Sense strand starting at position 2350 of SEQ ID NO: 914490
acguuagaauacuacaaac

SEQ ID NO: 1007987 - RNA, 19 nt, Artificial Sequence
  Description of Artificial Sequence: Synthetic oligonucleotide
  Antisense strand to SEQ ID NO: 1007986
guuuguaguauucuaacgu

SEQ ID NO: 1007988 - RNA, 19 nt, Artificial Sequence
  Description of Artificial Sequence: Synthetic oligonucleotide
  Sense strand starting at position 2372 of SEQ ID NO: 914490
caagcuaguugaucaguuu

SEQ ID NO: 1007989 - RNA, 19 nt, Artificial Sequence
  Description of Artificial Sequence: Synthetic oligonucleotide
  Antisense strand to SEQ ID NO: 1007988
aaacugaucaacuagcuug

SEQ ID NO: 1007990 - RNA, 19 nt, Artificial Sequence
  Description of Artificial Sequence: Synthetic oligonucleotide
  Sense strand starting at position 2373 of SEQ ID NO: 914490
aagcuaguugaucaguuua

SEQ ID NO: 1007991 - RNA, 19 nt, Artificial Sequence
  Description of Artificial Sequence: Synthetic oligonucleotide
  Antisense strand to SEQ ID NO: 1007990
uaaacugaucaacuagcuu

SEQ ID NO: 1007992 - RNA, 19 nt, Artificial Sequence
  Description of Artificial Sequence: Synthetic oligonucleotide
  Sense strand starting at position 2490 of SEQ ID NO: 914490
cagacuaguuccuggucca

SEQ ID NO: 1007993 - RNA, 19 nt, Artificial Sequence
  Description of Artificial Sequence: Synthetic oligonucleotide
  Antisense strand to SEQ ID NO: 1007992
uggaccaggaacuagucug

SEQ ID NO: 1007994 - RNA, 19 nt, Artificial Sequence
  Description of Artificial Sequence: Synthetic oligonucleotide
  Sense strand starting at position 2491 of SEQ ID NO: 914490
agacuaguuccugguccau

SEQ ID NO: 1007995 - RNA, 19 nt, Artificial Sequence
  Description of Artificial Sequence: Synthetic oligonucleotide
  Antisense strand to SEQ ID NO: 1007994
auggaccaggaacuagucu

SEQ ID NO: 1007996 - RNA, 19 nt, Artificial Sequence
  Description of Artificial Sequence: Synthetic oligonucleotide
  Sense strand starting at position 2916 of SEQ ID NO: 914490
uuuguugaguaucuaccaa

SEQ ID NO: 1007997 - RNA, 19 nt, Artificial Sequence
  Description of Artificial Sequence: Synthetic oligonucleotide
  Antisense strand to SEQ ID NO: 1007996
uugguagauacucaacaaa

SEQ ID NO: 1007998 - RNA, 19 nt, Artificial Sequence
  Description of Artificial Sequence: Synthetic oligonucleotide
  Sense strand starting at position 3049 of SEQ ID NO: 914490
guggguaagugcuaagaag

SEQ ID NO: 1007999 - RNA, 19 nt, Artificial Sequence
  Description of Artificial Sequence: Synthetic oligonucleotide
  Antisense strand to SEQ ID NO: 1007998
cuucuuagcacuuacccac

SEQ ID NO: 1008000 - RNA, 19 nt, Artificial Sequence
  Description of Artificial Sequence: Synthetic oligonucleotide
  Sense strand starting at position 3108 of SEQ ID NO: 914490
gaccucacuuucuagagga

SEQ ID NO: 1008001 - RNA, 19 nt, Artificial Sequence
  Description of Artificial Sequence: Synthetic oligonucleotide
  Antisense strand to SEQ ID NO: 1008000
uccucuagaaagugagguc

SEQ ID NO: 1008002 - RNA, 19 nt, Artificial Sequence
  Description of Artificial Sequence: Synthetic oligonucleotide
  Sense strand starting at position 3144 of SEQ ID NO: 914490
cagugugaccaggaugguu

SEQ ID NO: 1008003 - RNA, 19 nt, Artificial Sequence
  Description of Artificial Sequence: Synthetic oligonucleotide
  Antisense strand to SEQ ID NO: 1008002
aaccauccuggucacacug

SEQ ID NO: 1008004 - RNA, 19 nt, Artificial Sequence
  Description of Artificial Sequence: Synthetic oligonucleotide
  Sense strand starting at position 3152 of SEQ ID NO: 914490
ccaggaugguuggcuucaa

SEQ ID NO: 1008005 - RNA, 19 nt, Artificial Sequence
  Description of Artificial Sequence: Synthetic oligonucleotide
  Antisense strand to SEQ ID NO: 1008004
uugaagccaaccauccugg

SEQ ID NO: 1008006 - RNA, 19 nt, Artificial Sequence
  Description of Artificial Sequence: Synthetic oligonucleotide
  Sense strand starting at position 3168 of SEQ ID NO: 914490
caaugcugucaguguggga

SEQ ID NO: 1008007 - RNA, 19 nt, Artificial Sequence
  Description of Artificial Sequence: Synthetic oligonucleotide
  Antisense strand to SEQ ID NO: 1008006
ucccacacugacagcauug

SEQ ID NO: 1008008 - RNA, 19 nt, Artificial Sequence
  Description of Artificial Sequence: Synthetic oligonucleotide
  Sense strand starting at position 3406 of SEQ ID NO: 914490
gguccaggaguuugacacu

SEQ ID NO: 1008009 - RNA, 19 nt, Artificial Sequence
  Description of Artificial Sequence: Synthetic oligonucleotide
  Antisense strand to SEQ ID NO: 1008008
agugucaaacuccuggacc

SEQ ID NO: 1008010 - RNA, 19 nt, Artificial Sequence
  Description of Artificial Sequence: Synthetic oligonucleotide
  Sense strand starting at position 3654 of SEQ ID NO: 914490
auccgaaccuguguaaucu

SEQ ID NO: 1008011 - RNA, 19 nt, Artificial Sequence
  Description of Artificial Sequence: Synthetic oligonucleotide
  Antisense strand to SEQ ID NO: 1008010
agauuacacagguucggau

SEQ ID NO: 1008012 - RNA, 19 nt, Artificial Sequence
  Description of Artificial Sequence: Synthetic oligonucleotide
  Sense strand starting at position 3655 of SEQ ID NO: 914490
uccgaaccuguguaaucua

SEQ ID NO: 1008013 - RNA, 19 nt, Artificial Sequence
  Description of Artificial Sequence: Synthetic oligonucleotide
  Antisense strand to SEQ ID NO: 1008012
uagauuacacagguucgga

SEQ ID NO: 1008014 - RNA, 19 nt, Artificial Sequence
  Description of Artificial Sequence: Synthetic oligonucleotide
  Sense strand starting at position 3658 of SEQ ID NO: 914490
gaaccuguguaaucuauga

SEQ ID NO: 1008015 - RNA, 19 nt, Artificial Sequence
  Description of Artificial Sequence: Synthetic oligonucleotide
  Antisense strand to SEQ ID NO: 1008014
ucauagauuacacagguuc

SEQ ID NO: 1008016 - RNA, 19 nt, Artificial Sequence
  Description of Artificial Sequence: Synthetic oligonucleotide
  Sense strand starting at position 3662 of SEQ ID NO: 914490
cuguguaaucuaugaauau

SEQ ID NO: 1008017 - RNA, 19 nt, Artificial Sequence
  Description of Artificial Sequence: Synthetic oligonucleotide
  Antisense strand to SEQ ID NO: 1008016
auauucauagauuacacag

SEQ ID NO: 1008018 - RNA, 19 nt, Artificial Sequence
  Description of Artificial Sequence: Synthetic oligonucleotide
  Sense strand starting at position 3663 of SEQ ID NO: 914490
uguguaaucuaugaauaug

SEQ ID NO: 1008019 - RNA, 19 nt, Artificial Sequence
  Description of Artificial Sequence: Synthetic oligonucleotide
  Antisense strand to SEQ ID NO: 1008018
cauauucauagauuacaca

SEQ ID NO: 1008020 - RNA, 19 nt, Artificial Sequence
  Description of Artificial Sequence: Synthetic oligonucleotide
  Sense strand starting at position 70 of SEQ ID NO: 914491
aaacuugacucggucacua

SEQ ID NO: 1008021 - RNA, 19 nt, Artificial Sequence
  Description of Artificial Sequence: Synthetic oligonucleotide
  Antisense strand to SEQ ID NO: 1008020
uagugaccgagucaaguuu

SEQ ID NO: 1008022 - RNA, 19 nt, Artificial Sequence
  Description of Artificial Sequence: Synthetic oligonucleotide
  Sense strand starting at position 287 of SEQ ID NO: 914491
cuucuuugaccuggaacaa

SEQ ID NO: 1008023 - RNA, 19 nt, Artificial Sequence
  Description of Artificial Sequence: Synthetic oligonucleotide
  Antisense strand to SEQ ID NO: 1008022
uuguuccaggucaaagaag

SEQ ID NO: 1008024 - RNA, 19 nt, Artificial Sequence
  Description of Artificial Sequence: Synthetic oligonucleotide
  Sense strand starting at position 662 of SEQ ID NO: 914491
cgaaacauucccugagcca

SEQ ID NO: 1008025 - RNA, 19 nt, Artificial Sequence
  Description of Artificial Sequence: Synthetic oligonucleotide
  Antisense strand to SEQ ID NO: 1008024
uggcucagggaauguuucg

SEQ ID NO: 1008026 - RNA, 19 nt, Artificial Sequence
  Description of Artificial Sequence: Synthetic oligonucleotide
  Sense strand starting at position 710 of SEQ ID NO: 914491
ucuaguauuccuuauugca

SEQ ID NO: 1008027 - RNA, 19 nt, Artificial Sequence
  Description of Artificial Sequence: Synthetic oligonucleotide
  Antisense strand to SEQ ID NO: 1008026
ugcaauaaggaauacuaga

SEQ ID NO: 1008028 - RNA, 19 nt, Artificial Sequence
  Description of Artificial Sequence: Synthetic oligonucleotide
  Sense strand starting at position 1046 of SEQ ID NO: 914491
guauuaagucuucagggag

SEQ ID NO: 1008029 - RNA, 19 nt, Artificial Sequence
  Description of Artificial Sequence: Synthetic oligonucleotide
  Antisense strand to SEQ ID NO: 1008028
cucccugaagacuuaauac

SEQ ID NO: 1008030 - RNA, 19 nt, Artificial Sequence
  Description of Artificial Sequence: Synthetic oligonucleotide
  Sense strand starting at position 1063 of SEQ ID NO: 914491
aguaaucaagacuggcaau

SEQ ID NO: 1008031 - RNA, 19 nt, Artificial Sequence
  Description of Artificial Sequence: Synthetic oligonucleotide
  Antisense strand to SEQ ID NO: 1008030
auugccagucuugauuacu

SEQ ID NO: 1008032 - RNA, 19 nt, Artificial Sequence
  Description of Artificial Sequence: Synthetic oligonucleotide
  Sense strand starting at position 1169 of SEQ ID NO: 914491
gcucuagagugacccagau

SEQ ID NO: 1008033 - RNA, 19 nt, Artificial Sequence
  Description of Artificial Sequence: Synthetic oligonucleotide
  Antisense strand to SEQ ID NO: 1008032
aucugggucacucuagagc

SEQ ID NO: 1008034 - RNA, 19 nt, Artificial Sequence
  Description of Artificial Sequence: Synthetic oligonucleotide
  Sense strand starting at position 1353 of SEQ ID NO: 914491
gggccacgauccucuuuaa

SEQ ID NO: 1008035 - RNA, 19 nt, Artificial Sequence
  Description of Artificial Sequence: Synthetic oligonucleotide
  Antisense strand to SEQ ID NO: 1008034
uuaaagaggaucguggccc

SEQ ID NO: 1008036 - RNA, 19 nt, Artificial Sequence
  Description of Artificial Sequence: Synthetic oligonucleotide
  Sense strand starting at position 1571 of SEQ ID NO: 914491
gcccuuggcccuggaaaga

SEQ ID NO: 1008037 - RNA, 19 nt, Artificial Sequence
  Description of Artificial Sequence: Synthetic oligonucleotide
  Antisense strand to SEQ ID NO: 1008036
ucuuuccagggccaagggc

SEQ ID NO: 1008038 - RNA, 19 nt, Artificial Sequence
  Description of Artificial Sequence: Synthetic oligonucleotide
  Sense strand starting at position 1655 of SEQ ID NO: 914491
gcgagaagauucccaaaca

SEQ ID NO: 1008039 - RNA, 19 nt, Artificial Sequence
  Description of Artificial Sequence: Synthetic oligonucleotide
  Antisense strand to SEQ ID NO: 1008038
uguuugggaaucuucucgc

SEQ ID NO: 1008040 - RNA, 19 nt, Artificial Sequence
  Description of Artificial Sequence: Synthetic oligonucleotide
  Sense strand starting at position 1819 of SEQ ID NO: 914491
guucgccucccagacauaa

SEQ ID NO: 1008041 - RNA, 19 nt, Artificial Sequence
  Description of Artificial Sequence: Synthetic oligonucleotide
  Antisense strand to SEQ ID NO: 1008040
uuaugucugggaggcgaac

SEQ ID NO: 1008042 - RNA, 19 nt, Artificial Sequence
  Description of Artificial Sequence: Synthetic oligonucleotide
  Sense strand starting at position 2391 of SEQ ID NO: 914491
gguguuucuccgcauaagg

SEQ ID NO: 1008043 - RNA, 19 nt, Artificial Sequence
  Description of Artificial Sequence: Synthetic oligonucleotide
  Antisense strand to SEQ ID NO: 1008042
ccuuaugcggagaaacacc

SEQ ID NO: 1008044 - RNA, 19 nt, Artificial Sequence
  Description of Artificial Sequence: Synthetic oligonucleotide
  Sense strand starting at position 2462 of SEQ ID NO: 914491
ggaguuaagaguggaaacu

SEQ ID NO: 1008045 - RNA, 19 nt, Artificial Sequence
  Description of Artificial Sequence: Synthetic oligonucleotide
  Antisense strand to SEQ ID NO: 1008044
aguuuccacucuuaacucc

SEQ ID NO: 1008046 - RNA, 19 nt, Artificial Sequence
  Description of Artificial Sequence: Synthetic oligonucleotide
  Sense strand starting at position 2706 of SEQ ID NO: 914491
gguauuggcuuccuccaaa

SEQ ID NO: 1008047 - RNA, 19 nt, Artificial Sequence
  Description of Artificial Sequence: Synthetic oligonucleotide
  Antisense strand to SEQ ID NO: 1008046
uuuggaggaagccaauacc

SEQ ID NO: 1008048 - RNA, 19 nt, Artificial Sequence
  Description of Artificial Sequence: Synthetic oligonucleotide
  Sense strand starting at position 2814 of SEQ ID NO: 914491
gagagucuggugcacagua

SEQ ID NO: 1008049 - RNA, 19 nt, Artificial Sequence
  Description of Artificial Sequence: Synthetic oligonucleotide
  Antisense strand to SEQ ID NO: 1008048
uacugugcaccagacucuc

SEQ ID NO: 1008050 - RNA, 19 nt, Artificial Sequence
  Description of Artificial Sequence: Synthetic oligonucleotide
  Sense strand starting at position 3194 of SEQ ID NO: 914491
cccagauucuaguccuguu

SEQ ID NO: 1008051 - RNA, 19 nt, Artificial Sequence
  Description of Artificial Sequence: Synthetic oligonucleotide
  Antisense strand to SEQ ID NO: 1008050
aacaggacuagaaucuggg

SEQ ID NO: 1008052 - RNA, 19 nt, Artificial Sequence
  Description of Artificial Sequence: Synthetic oligonucleotide
  Sense strand starting at position 3208 of SEQ ID NO: 914491
cuguuaaaguuccuuaccu

SEQ ID NO: 1008053 - RNA, 19 nt, Artificial Sequence
  Description of Artificial Sequence: Synthetic oligonucleotide
  Antisense strand to SEQ ID NO: 1008052
agguaaggaacuuuaacag

SEQ ID NO: 1008054 - RNA, 19 nt, Artificial Sequence
  Description of Artificial Sequence: Synthetic oligonucleotide
  Sense strand starting at position 3209 of SEQ ID NO: 914491
uguuaaaguuccuuaccug

SEQ ID NO: 1008055 - RNA, 19 nt, Artificial Sequence
  Description of Artificial Sequence: Synthetic oligonucleotide
  Antisense strand to SEQ ID NO: 1008054
cagguaaggaacuuuaaca

SEQ ID NO: 1008056 - RNA, 19 nt, Artificial Sequence
  Description of Artificial Sequence: Synthetic oligonucleotide
  Sense strand starting at position 3245 of SEQ ID NO: 914491
aguuauucuuccuuucuag

SEQ ID NO: 1008057 - RNA, 19 nt, Artificial Sequence
  Description of Artificial Sequence: Synthetic oligonucleotide
  Antisense strand to SEQ ID NO: 1008056
cuagaaaggaagaauaacu

SEQ ID NO: 1008058 - RNA, 19 nt, Artificial Sequence
  Description of Artificial Sequence: Synthetic oligonucleotide
  Sense strand starting at position 3343 of SEQ ID NO: 914491
gcgagaaccagucaagcuu

SEQ ID NO: 1008059 - RNA, 19 nt, Artificial Sequence
  Description of Artificial Sequence: Synthetic oligonucleotide
  Antisense strand to SEQ ID NO: 1008058
aagcuugacugguucucgc

SEQ ID NO: 1008060 - RNA, 19 nt, Artificial Sequence
  Description of Artificial Sequence: Synthetic oligonucleotide
  Sense strand starting at position 3458 of SEQ ID NO: 914491
ggaagugaguuucccacau

SEQ ID NO: 1008061 - RNA, 19 nt, Artificial Sequence
  Description of Artificial Sequence: Synthetic oligonucleotide
  Antisense strand to SEQ ID NO: 1008060
augugggaaacucacuucc

SEQ ID NO: 1008062 - RNA, 19 nt, Artificial Sequence
  Description of Artificial Sequence: Synthetic oligonucleotide
  Sense strand starting at position 3462 of SEQ ID NO: 914491
gugaguuucccacauuaaa

SEQ ID NO: 1008063 - RNA, 19 nt, Artificial Sequence
  Description of Artificial Sequence: Synthetic oligonucleotide
  Antisense strand to SEQ ID NO: 1008062
uuuaaugugggaaacucac

SEQ ID NO: 1008064 - RNA, 19 nt, Artificial Sequence
  Description of Artificial Sequence: Synthetic oligonucleotide
  Sense strand starting at position 3465 of SEQ ID NO: 914491
aguuucccacauuaaaguu

SEQ ID NO: 1008065 - RNA, 19 nt, Artificial Sequence
  Description of Artificial Sequence: Synthetic oligonucleotide
  Antisense strand to SEQ ID NO: 1008064
aacuuuaaugugggaaacu

SEQ ID NO: 1008066 - RNA, 19 nt, Artificial Sequence
  Description of Artificial Sequence: Synthetic oligonucleotide
  Sense strand starting at position 3498 of SEQ ID NO: 914491
agcagacauaugugucaug

SEQ ID NO: 1008067 - RNA, 19 nt, Artificial Sequence
  Description of Artificial Sequence: Synthetic oligonucleotide
  Antisense strand to SEQ ID NO: 1008066
caugacacauaugucugcu

SEQ ID NO: 1008068 - RNA, 19 nt, Artificial Sequence
  Description of Artificial Sequence: Synthetic oligonucleotide
  Sense strand starting at position 3499 of SEQ ID NO: 914491
gcagacauaugugucauga

SEQ ID NO: 1008069 - RNA, 19 nt, Artificial Sequence
  Description of Artificial Sequence: Synthetic oligonucleotide
  Antisense strand to SEQ ID NO: 1008068
ucaugacacauaugucugc

SEQ ID NO: 1008070 - RNA, 19 nt, Artificial Sequence
  Description of Artificial Sequence: Synthetic oligonucleotide
  Sense strand starting at position 3512 of SEQ ID NO: 914491
ucaugacuuugaccugaau

SEQ ID NO: 1008071 - RNA, 19 nt, Artificial Sequence
  Description of Artificial Sequence: Synthetic oligonucleotide
  Antisense strand to SEQ ID NO: 1008070
auucaggucaaagucauga

SEQ ID NO: 1008072 - RNA, 19 nt, Artificial Sequence
  Description of Artificial Sequence: Synthetic oligonucleotide
  Sense strand starting at position 3570 of SEQ ID NO: 914491
augcaagagucagcuccau

SEQ ID NO: 1008073 - RNA, 19 nt, Artificial Sequence
  Description of Artificial Sequence: Synthetic oligonucleotide
  Antisense strand to SEQ ID NO: 1008072
auggagcugacucuugcau

SEQ ID NO: 1008074 - RNA, 19 nt, Artificial Sequence
  Description of Artificial Sequence: Synthetic oligonucleotide
  Sense strand starting at position 3574 of SEQ ID NO: 914491
aagagucagcuccauaugu

SEQ ID NO: 1008075 - RNA, 19 nt, Artificial Sequence
  Description of Artificial Sequence: Synthetic oligonucleotide
  Antisense strand to SEQ ID NO: 1008074
acauauggagcugacucuu

SEQ ID NO: 1008076 - RNA, 19 nt, Artificial Sequence
  Description of Artificial Sequence: Synthetic oligonucleotide
  Sense strand starting at position 3576 of SEQ ID NO: 914491
gagucagcuccauaugugu

SEQ ID NO: 1008077 - RNA, 19 nt, Artificial Sequence
  Description of Artificial Sequence: Synthetic oligonucleotide
  Antisense strand to SEQ ID NO: 1008076
acacauauggagcugacuc

SEQ ID NO: 1008078 - RNA, 19 nt, Artificial Sequence
  Description of Artificial Sequence: Synthetic oligonucleotide
  Sense strand starting at position 3601 of SEQ ID NO: 914491
uugugagugcaugugugua

SEQ ID NO: 1008079 - RNA, 19 nt, Artificial Sequence
  Description of Artificial Sequence: Synthetic oligonucleotide
  Antisense strand to SEQ ID NO: 1008078
uacacacaugcacucacaa

SEQ ID NO: 1008080 - RNA, 19 nt, Artificial Sequence
  Description of Artificial Sequence: Synthetic oligonucleotide
  Sense strand starting at position 3637 of SEQ ID NO: 914491
uacauuguguguuuaaaug

SEQ ID NO: 1008081 - RNA, 19 nt, Artificial Sequence
  Description of Artificial Sequence: Synthetic oligonucleotide
  Antisense strand to SEQ ID NO: 1008080
cauuuaaacacacaaugua

SEQ ID NO: 1008082 - RNA, 19 nt, Artificial Sequence
  Description of Artificial Sequence: Synthetic oligonucleotide
  Sense strand starting at position 3645 of SEQ ID NO: 914491
guguuuaaaugaguguuag

SEQ ID NO: 1008083 - RNA, 19 nt, Artificial Sequence
  Description of Artificial Sequence: Synthetic oligonucleotide
  Antisense strand to SEQ ID NO: 1008082
cuaacacucauuuaaacac

SEQ ID NO: 1008084 - RNA, 19 nt, Artificial Sequence
  Description of Artificial Sequence: Synthetic oligonucleotide
  Sense strand starting at position 3693 of SEQ ID NO: 914491
uggguaaauguauguaugu

SEQ ID NO: 1008085 - RNA, 19 nt, Artificial Sequence
  Description of Artificial Sequence: Synthetic oligonucleotide
  Antisense strand to SEQ ID NO: 1008084
acauacauacauuuaccca

SEQ ID NO: 1008086 - RNA, 19 nt, Artificial Sequence
  Description of Artificial Sequence: Synthetic oligonucleotide
  Sense strand starting at position 3695 of SEQ ID NO: 914491
gguaaauguauguauguga

SEQ ID NO: 1008087 - RNA, 19 nt, Artificial Sequence
  Description of Artificial Sequence: Synthetic oligonucleotide
  Antisense strand to SEQ ID NO: 1008086
ucacauacauacauuuacc

SEQ ID NO: 1008088 - RNA, 19 nt, Artificial Sequence
  Description of Artificial Sequence: Synthetic oligonucleotide
  Sense strand starting at position 3698 of SEQ ID NO: 914491
aaauguauguaugugaaca

SEQ ID NO: 1008089 - RNA, 19 nt, Artificial Sequence
  Description of Artificial Sequence: Synthetic oligonucleotide
  Antisense strand to SEQ ID NO: 1008088
uguucacauacauacauuu

SEQ ID NO: 1008090 - RNA, 19 nt, Artificial Sequence
  Description of Artificial Sequence: Synthetic oligonucleotide
  Sense strand starting at position 3790 of SEQ ID NO: 914491
uauagauguguauguguga

SEQ ID NO: 1008091 - RNA, 19 nt, Artificial Sequence
  Description of Artificial Sequence: Synthetic oligonucleotide
  Antisense strand to SEQ ID NO: 1008090
ucacacauacacaucuaua

SEQ ID NO: 1008092 - RNA, 19 nt, Artificial Sequence
  Description of Artificial Sequence: Synthetic oligonucleotide
  Sense strand starting at position 3817 of SEQ ID NO: 914491
guacccauaguguagauau

SEQ ID NO: 1008093 - RNA, 19 nt, Artificial Sequence
  Description of Artificial Sequence: Synthetic oligonucleotide
  Antisense strand to SEQ ID NO: 1008092
auaucuacacuauggguac

SEQ ID NO: 1008094 - RNA, 19 nt, Artificial Sequence
  Description of Artificial Sequence: Synthetic oligonucleotide
  Sense strand starting at position 3854 of SEQ ID NO: 914491
uugauuaugugcuuauaag

SEQ ID NO: 1008095 - RNA, 19 nt, Artificial Sequence
  Description of Artificial Sequence: Synthetic oligonucleotide
  Antisense strand to SEQ ID NO: 1008094
cuuauaagcacauaaucaa

SEQ ID NO: 1008096 - RNA, 19 nt, Artificial Sequence
  Description of Artificial Sequence: Synthetic oligonucleotide
  Sense strand starting at position 3891 of SEQ ID NO: 914491
cagggauguguacauguau

SEQ ID NO: 1008097 - RNA, 19 nt, Artificial Sequence
  Description of Artificial Sequence: Synthetic oligonucleotide
  Antisense strand to SEQ ID NO: 1008096
auacauguacacaucccug

SEQ ID NO: 1008098 - RNA, 19 nt, Artificial Sequence
  Description of Artificial Sequence: Synthetic oligonucleotide
  Sense strand starting at position 3922 of SEQ ID NO: 914491
guguguaucgaggaaccuu

SEQ ID NO: 1008099 - RNA, 19 nt, Artificial Sequence
  Description of Artificial Sequence: Synthetic oligonucleotide
  Antisense strand to SEQ ID NO: 1008098
aagguuccucgauacacac

SEQ ID NO: 1008100 - RNA, 19 nt, Artificial Sequence
  Description of Artificial Sequence: Synthetic oligonucleotide
  Sense strand starting at position 263 of SEQ ID NO: 914492
agagacauaucccaagaua

SEQ ID NO: 1008101 - RNA, 19 nt, Artificial Sequence
  Description of Artificial Sequence: Synthetic oligonucleotide
  Antisense strand to SEQ ID NO: 1008100
uaucuugggauaugucucu

SEQ ID NO: 1008102 - RNA, 19 nt, Artificial Sequence
  Description of Artificial Sequence: Synthetic oligonucleotide
  Sense strand starting at position 274 of SEQ ID NO: 914492
ccaagauaugugcagguga

SEQ ID NO: 1008103 - RNA, 19 nt, Artificial Sequence
  Description of Artificial Sequence: Synthetic oligonucleotide
  Antisense strand to SEQ ID NO: 1008102
ucaccugcacauaucuugg

SEQ ID NO: 1008104 - RNA, 19 nt, Artificial Sequence
  Description of Artificial Sequence: Synthetic oligonucleotide
  Sense strand starting at position 357 of SEQ ID NO: 914492
gccucaggauucugcaauu

SEQ ID NO: 1008105 - RNA, 19 nt, Artificial Sequence
  Description of Artificial Sequence: Synthetic oligonucleotide
  Antisense strand to SEQ ID NO: 1008104
aauugcagaauccugaggc

SEQ ID NO: 1008106 - RNA, 19 nt, Artificial Sequence
  Description of Artificial Sequence: Synthetic oligonucleotide
  Sense strand starting at position 464 of SEQ ID NO: 914492
ugggauuucucugaagacu

SEQ ID NO: 1008107 - RNA, 19 nt, Artificial Sequence
  Description of Artificial Sequence: Synthetic oligonucleotide
  Antisense strand to SEQ ID NO: 1008106
agucuucagagaaauccca

SEQ ID NO: 1008108 - RNA, 19 nt, Artificial Sequence
  Description of Artificial Sequence: Synthetic oligonucleotide
  Sense strand starting at position 550 of SEQ ID NO: 914492
acaguaugucuggguuuga

SEQ ID NO: 1008109 - RNA, 19 nt, Artificial Sequence
  Description of Artificial Sequence: Synthetic oligonucleotide
  Antisense strand to SEQ ID NO: 1008108
ucaaacccagacauacugu

SEQ ID NO: 1008110 - RNA, 19 nt, Artificial Sequence
  Description of Artificial Sequence: Synthetic oligonucleotide
  Sense strand starting at position 560 of SEQ ID NO: 914492
uggguuugacucggugaga

SEQ ID NO: 1008111 - RNA, 19 nt, Artificial Sequence
  Description of Artificial Sequence: Synthetic oligonucleotide
  Antisense strand to SEQ ID NO: 1008110
ucucaccgagucaaaccca

SEQ ID NO: 1008112 - RNA, 19 nt, Artificial Sequence
  Description of Artificial Sequence: Synthetic oligonucleotide
  Sense strand starting at position 561 of SEQ ID NO: 914492
ggguuugacucggugagaa

SEQ ID NO: 1008113 - RNA, 19 nt, Artificial Sequence
  Description of Artificial Sequence: Synthetic oligonucleotide
  Antisense strand to SEQ ID NO: 1008112
uucucaccgagucaaaccc

SEQ ID NO: 1008114 - RNA, 19 nt, Artificial Sequence
  Description of Artificial Sequence: Synthetic oligonucleotide
  Sense strand starting at position 563 of SEQ ID NO: 914492
guuugacucggugagaaag

SEQ ID NO: 1008115 - RNA, 19 nt, Artificial Sequence
  Description of Artificial Sequence: Synthetic oligonucleotide
  Antisense strand to SEQ ID NO: 1008114
cuuucucaccgagucaaac

SEQ ID NO: 1008116 - RNA, 19 nt, Artificial Sequence
  Description of Artificial Sequence: Synthetic oligonucleotide
  Sense strand starting at position 864 of SEQ ID NO: 914492
ccgugacuggcaggauaaa

SEQ ID NO: 1008117 - RNA, 19 nt, Artificial Sequence
  Description of Artificial Sequence: Synthetic oligonucleotide
  Antisense strand to SEQ ID NO: 1008116
uuuauccugccagucacgg

SEQ ID NO: 1008118 - RNA, 19 nt, Artificial Sequence
  Description of Artificial Sequence: Synthetic oligonucleotide
  Sense strand starting at position 1002 of SEQ ID NO: 914492
ggaggaaaugugggcauca

SEQ ID NO: 1008119 - RNA, 19 nt, Artificial Sequence
  Description of Artificial Sequence: Synthetic oligonucleotide
  Antisense strand to SEQ ID NO: 1008118
ugaugcccacauuuccucc

SEQ ID NO: 1008120 - RNA, 19 nt, Artificial Sequence
  Description of Artificial Sequence: Synthetic oligonucleotide
  Sense strand starting at position 1051 of SEQ ID NO: 914492
ccuagcugacgucaucaaa

SEQ ID NO: 1008121 - RNA, 19 nt, Artificial Sequence
  Description of Artificial Sequence: Synthetic oligonucleotide
  Antisense strand to SEQ ID NO: 1008120
uuugaugacgucagcuagg

SEQ ID NO: 1008122 - RNA, 19 nt, Artificial Sequence
  Description of Artificial Sequence: Synthetic oligonucleotide
  Sense strand starting at position 1186 of SEQ ID NO: 914492
agugacuucuccuguggau

SEQ ID NO: 1008123 - RNA, 19 nt, Artificial Sequence
  Description of Artificial Sequence: Synthetic oligonucleotide
  Antisense strand to SEQ ID NO: 1008122
auccacaggagaagucacu

SEQ ID NO: 1008124 - RNA, 19 nt, Artificial Sequence
  Description of Artificial Sequence: Synthetic oligonucleotide
  Sense strand starting at position 1188 of SEQ ID NO: 914492
ugacuucuccuguggaugu

SEQ ID NO: 1008125 - RNA, 19 nt, Artificial Sequence
  Description of Artificial Sequence: Synthetic oligonucleotide
  Antisense strand to SEQ ID NO: 1008124
acauccacaggagaaguca

SEQ ID NO: 1008126 - RNA, 19 nt, Artificial Sequence
  Description of Artificial Sequence: Synthetic oligonucleotide
  Sense strand starting at position 1189 of SEQ ID NO: 914492
gacuucuccuguggaugua

SEQ ID NO: 1008127 - RNA, 19 nt, Artificial Sequence
  Description of Artificial Sequence: Synthetic oligonucleotide
  Antisense strand to SEQ ID NO: 1008126
uacauccacaggagaaguc

SEQ ID NO: 1008128 - RNA, 19 nt, Artificial Sequence
  Description of Artificial Sequence: Synthetic oligonucleotide
  Sense strand starting at position 1419 of SEQ ID NO: 914492
ggagguguggccugaggau

SEQ ID NO: 1008129 - RNA, 19 nt, Artificial Sequence
  Description of Artificial Sequence: Synthetic oligonucleotide
  Antisense strand to SEQ ID NO: 1008128
auccucaggccacaccucc

SEQ ID NO: 1008130 - RNA, 19 nt, Artificial Sequence
  Description of Artificial Sequence: Synthetic oligonucleotide
  Sense strand starting at position 1499 of SEQ ID NO: 914492
aggagucacguugagaaac

SEQ ID NO: 1008131 - RNA, 19 nt, Artificial Sequence
  Description of Artificial Sequence: Synthetic oligonucleotide
  Antisense strand to SEQ ID NO: 1008130
guuucucaacgugacuccu

SEQ ID NO: 1008132 - RNA, 19 nt, Artificial Sequence
  Description of Artificial Sequence: Synthetic oligonucleotide
  Sense strand starting at position 1617 of SEQ ID NO: 914492
acauuuguguucuccucua

SEQ ID NO: 1008133 - RNA, 19 nt, Artificial Sequence
  Description of Artificial Sequence: Synthetic oligonucleotide
  Antisense strand to SEQ ID NO: 1008132
uagaggagaacacaaaugu

SEQ ID NO: 1008134 - RNA, 19 nt, Artificial Sequence
  Description of Artificial Sequence: Synthetic oligonucleotide
  Sense strand starting at position 1657 of SEQ ID NO: 914492
cagagcagucuguaagguu

SEQ ID NO: 1008135 - RNA, 19 nt, Artificial Sequence
  Description of Artificial Sequence: Synthetic oligonucleotide
  Antisense strand to SEQ ID NO: 1008134
aaccuuacagacugcucug

SEQ ID NO: 1008136 - RNA, 19 nt, Artificial Sequence
  Description of Artificial Sequence: Synthetic oligonucleotide
  Sense strand starting at position 1933 of SEQ ID NO: 914492
cccaguuuaugauccuuua

SEQ ID NO: 1008137 - RNA, 19 nt, Artificial Sequence
  Description of Artificial Sequence: Synthetic oligonucleotide
  Antisense strand to SEQ ID NO: 1008136
uaaaggaucauaaacuggg

SEQ ID NO: 1008138 - RNA, 19 nt, Artificial Sequence
  Description of Artificial Sequence: Synthetic oligonucleotide
  Sense strand starting at position 1936 of SEQ ID NO: 914492
aguuuaugauccuuuacga

SEQ ID NO: 1008139 - RNA, 19 nt, Artificial Sequence
  Description of Artificial Sequence: Synthetic oligonucleotide
  Antisense strand to SEQ ID NO: 1008138
ucguaaaggaucauaaacu

SEQ ID NO: 1008140 - RNA, 19 nt, Artificial Sequence
  Description of Artificial Sequence: Synthetic oligonucleotide
  Sense strand starting at position 2450 of SEQ ID NO: 914492
gccuuagugacugaggcua

SEQ ID NO: 1008141 - RNA, 19 nt, Artificial Sequence
  Description of Artificial Sequence: Synthetic oligonucleotide
  Antisense strand to SEQ ID NO: 1008140
uagccucagucacuaaggc

SEQ ID NO: 1008142 - RNA, 19 nt, Artificial Sequence
  Description of Artificial Sequence: Synthetic oligonucleotide
  Sense strand starting at position 3004 of SEQ ID NO: 914492
cccagaauguuuccuaaug

SEQ ID NO: 1008143 - RNA, 19 nt, Artificial Sequence
  Description of Artificial Sequence: Synthetic oligonucleotide
  Antisense strand to SEQ ID NO: 1008142
cauuaggaaacauucuggg

SEQ ID NO: 1008144 - RNA, 19 nt, Artificial Sequence
  Description of Artificial Sequence: Synthetic oligonucleotide
  Sense strand starting at position 3006 of SEQ ID NO: 914492
cagaauguuuccuaaugga

SEQ ID NO: 1008145 - RNA, 19 nt, Artificial Sequence
  Description of Artificial Sequence: Synthetic oligonucleotide
  Antisense strand to SEQ ID NO: 1008144
uccauuaggaaacauucug

SEQ ID NO: 1008146 - RNA, 19 nt, Artificial Sequence
  Description of Artificial Sequence: Synthetic oligonucleotide
  Sense strand starting at position 3049 of SEQ ID NO: 914492
gcaguacuuagucgaggua

SEQ ID NO: 1008147 - RNA, 19 nt, Artificial Sequence
  Description of Artificial Sequence: Synthetic oligonucleotide
  Antisense strand to SEQ ID NO: 1008146
uaccucgacuaaguacugc

SEQ ID NO: 1008148 - RNA, 19 nt, Artificial Sequence
  Description of Artificial Sequence: Synthetic oligonucleotide
  Sense strand starting at position 3052 of SEQ ID NO: 914492
guacuuagucgagguacag

SEQ ID NO: 1008149 - RNA, 19 nt, Artificial Sequence
  Description of Artificial Sequence: Synthetic oligonucleotide
  Antisense strand to SEQ ID NO: 1008148
cuguaccucgacuaaguac

SEQ ID NO: 1008150 - RNA, 19 nt, Artificial Sequence
  Description of Artificial Sequence: Synthetic oligonucleotide
  Sense strand starting at position 3245 of SEQ ID NO: 914492
gggucugauuccuccuuua

SEQ ID NO: 1008151 - RNA, 19 nt, Artificial Sequence
  Description of Artificial Sequence: Synthetic oligonucleotide
  Antisense strand to SEQ ID NO: 1008150
uaaaggaggaaucagaccc

SEQ ID NO: 1008152 - RNA, 19 nt, Artificial Sequence
  Description of Artificial Sequence: Synthetic oligonucleotide
  Sense strand starting at position 3395 of SEQ ID NO: 914492
gcgccagcugguucugaaa

SEQ ID NO: 1008153 - RNA, 19 nt, Artificial Sequence
  Description of Artificial Sequence: Synthetic oligonucleotide
  Antisense strand to SEQ ID NO: 1008152
uuucagaaccagcuggcgc

SEQ ID NO: 1008154 - RNA, 19 nt, Artificial Sequence
  Description of Artificial Sequence: Synthetic oligonucleotide
  Sense strand starting at position 3741 of SEQ ID NO: 914492
cagaguuaguccuggagcu

SEQ ID NO: 1008155 - RNA, 19 nt, Artificial Sequence
  Description of Artificial Sequence: Synthetic oligonucleotide
  Antisense strand to SEQ ID NO: 1008154
agcuccaggacuaacucug

SEQ ID NO: 1008156 - RNA, 19 nt, Artificial Sequence
  Description of Artificial Sequence: Synthetic oligonucleotide
  Sense strand starting at position 3879 of SEQ ID NO: 914492
ggcugagcucgcuggugaa

SEQ ID NO: 1008157 - RNA, 19 nt, Artificial Sequence
  Description of Artificial Sequence: Synthetic oligonucleotide
  Antisense strand to SEQ ID NO: 1008156
uucaccagcgagcucagcc

SEQ ID NO: 1008158 - RNA, 19 nt, Artificial Sequence
  Description of Artificial Sequence: Synthetic oligonucleotide
  Sense strand starting at position 3893 of SEQ ID NO: 914492
gugaacgucccgucugagu

SEQ ID NO: 1008159 - RNA, 19 nt, Artificial Sequence
  Description of Artificial Sequence: Synthetic oligonucleotide
  Antisense strand to SEQ ID NO: 1008158
acucagacgggacguucac

SEQ ID NO: 1008160 - RNA, 19 nt, Artificial Sequence
  Description of Artificial Sequence: Synthetic oligonucleotide
  Sense strand starting at position 933 of SEQ ID NO: 914493
aaaucuaaugacggcuaga

SEQ ID NO: 1008161 - RNA, 19 nt, Artificial Sequence
  Description of Artificial Sequence: Synthetic oligonucleotide
  Antisense strand to SEQ ID NO: 1008160
ucuagccgucauuagauuu

SEQ ID NO: 1008162 - RNA, 19 nt, Artificial Sequence
  Description of Artificial Sequence: Synthetic oligonucleotide
  Sense strand starting at position 936 of SEQ ID NO: 914493
ucuaaugacggcuagauga

SEQ ID NO: 1008163 - RNA, 19 nt, Artificial Sequence
  Description of Artificial Sequence: Synthetic oligonucleotide
  Antisense strand to SEQ ID NO: 1008162
ucaucuagccgucauuaga

SEQ ID NO: 1008164 - RNA, 19 nt, Artificial Sequence
  Description of Artificial Sequence: Synthetic oligonucleotide
  Sense strand starting at position 954 of SEQ ID NO: 914493
aaauuagagguuugguuaa

SEQ ID NO: 1008165 - RNA, 19 nt, Artificial Sequence
  Description of Artificial Sequence: Synthetic oligonucleotide
  Antisense strand to SEQ ID NO: 1008164
uuaaccaaaccucuaauuu

SEQ ID NO: 1008166 - RNA, 19 nt, Artificial Sequence
  Description of Artificial Sequence: Synthetic oligonucleotide
  Sense strand starting at position 956 of SEQ ID NO: 914493
auuagagguuugguuaauc

SEQ ID NO: 1008167 - RNA, 19 nt, Artificial Sequence
  Description of Artificial Sequence: Synthetic oligonucleotide
  Antisense strand to SEQ ID NO: 1008166
gauuaaccaaaccucuaau

SEQ ID NO: 1008168 - RNA, 19 nt, Artificial Sequence
  Description of Artificial Sequence: Synthetic oligonucleotide
  Sense strand starting at position 961 of SEQ ID NO: 914493
agguuugguuaauccucaa

SEQ ID NO: 1008169 - RNA, 19 nt, Artificial Sequence
  Description of Artificial Sequence: Synthetic oligonucleotide
  Antisense strand to SEQ ID NO: 1008168
uugaggauuaaccaaaccu

SEQ ID NO: 1008170 - RNA, 19 nt, Artificial Sequence
  Description of Artificial Sequence: Synthetic oligonucleotide
  Sense strand starting at position 964 of SEQ ID NO: 914493
uuugguuaauccucaaggu

SEQ ID NO: 1008171 - RNA, 19 nt, Artificial Sequence
  Description of Artificial Sequence: Synthetic oligonucleotide
  Antisense strand to SEQ ID NO: 1008170
accuugaggauuaaccaaa

SEQ ID NO: 1008172 - RNA, 19 nt, Artificial Sequence
  Description of Artificial Sequence: Synthetic oligonucleotide
  Sense strand starting at position 1005 of SEQ ID NO: 914493
ccaugcucuucccuggaaa

SEQ ID NO: 1008173 - RNA, 19 nt, Artificial Sequence
  Description of Artificial Sequence: Synthetic oligonucleotide
  Antisense strand to SEQ ID NO: 1008172
uuuccagggaagagcaugg

SEQ ID NO: 1008174 - RNA, 19 nt, Artificial Sequence
  Description of Artificial Sequence: Synthetic oligonucleotide
  Sense strand starting at position 1060 of SEQ ID NO: 914493
gguaguaauacuggacauc

SEQ ID NO: 1008175 - RNA, 19 nt, Artificial Sequence
  Description of Artificial Sequence: Synthetic oligonucleotide
  Antisense strand to SEQ ID NO: 1008174
gauguccaguauuacuacc

SEQ ID NO: 1008176 - RNA, 19 nt, Artificial Sequence
  Description of Artificial Sequence: Synthetic oligonucleotide
  Sense strand starting at position 1427 of SEQ ID NO: 914493
gguccaaagucguuaaaca

SEQ ID NO: 1008177 - RNA, 19 nt, Artificial Sequence
  Description of Artificial Sequence: Synthetic oligonucleotide
  Antisense strand to SEQ ID NO: 1008176
uguuuaacgacuuuggacc

SEQ ID NO: 1008178 - RNA, 19 nt, Artificial Sequence
  Description of Artificial Sequence: Synthetic oligonucleotide
  Sense strand starting at position 1428 of SEQ ID NO: 914493
guccaaagucguuaaacag

SEQ ID NO: 1008179 - RNA, 19 nt, Artificial Sequence
  Description of Artificial Sequence: Synthetic oligonucleotide
  Antisense strand to SEQ ID NO: 1008178
cuguuuaacgacuuuggac

SEQ ID NO: 1008180 - RNA, 19 nt, Artificial Sequence
  Description of Artificial Sequence: Synthetic oligonucleotide
  Sense strand starting at position 1436 of SEQ ID NO: 914493
ucguuaaacagcggucuga

SEQ ID NO: 1008181 - RNA, 19 nt, Artificial Sequence
  Description of Artificial Sequence: Synthetic oligonucleotide
  Antisense strand to SEQ ID NO: 1008180
ucagaccgcuguuuaacga

SEQ ID NO: 1008182 - RNA, 19 nt, Artificial Sequence
  Description of Artificial Sequence: Synthetic oligonucleotide
  Sense strand starting at position 1585 of SEQ ID NO: 914493
cccgauucccuccaaagga

SEQ ID NO: 1008183 - RNA, 19 nt, Artificial Sequence
  Description of Artificial Sequence: Synthetic oligonucleotide
  Antisense strand to SEQ ID NO: 1008182
uccuuuggagggaaucggg

SEQ ID NO: 1008184 - RNA, 19 nt, Artificial Sequence
  Description of Artificial Sequence: Synthetic oligonucleotide
  Sense strand starting at position 1731 of SEQ ID NO: 914493
cccaguauugcagaacuca

SEQ ID NO: 1008185 - RNA, 19 nt, Artificial Sequence
  Description of Artificial Sequence: Synthetic oligonucleotide
  Antisense strand to SEQ ID NO: 1008184
ugaguucugcaauacuggg

SEQ ID NO: 1008186 - RNA, 19 nt, Artificial Sequence
  Description of Artificial Sequence: Synthetic oligonucleotide
  Sense strand starting at position 1874 of SEQ ID NO: 914493
gggcgauggguuuguagga

SEQ ID NO: 1008187 - RNA, 19 nt, Artificial Sequence
  Description of Artificial Sequence: Synthetic oligonucleotide
  Antisense strand to SEQ ID NO: 1008186
uccuacaaacccaucgccc

SEQ ID NO: 1008188 - RNA, 19 nt, Artificial Sequence
  Description of Artificial Sequence: Synthetic oligonucleotide
  Sense strand starting at position 2082 of SEQ ID NO: 914493
uccuuauuggccgagaccu

SEQ ID NO: 1008189 - RNA, 19 nt, Artificial Sequence
  Description of Artificial Sequence: Synthetic oligonucleotide
  Antisense strand to SEQ ID NO: 1008188
aggucucggccaauaagga

SEQ ID NO: 1008190 - RNA, 19 nt, Artificial Sequence
  Description of Artificial Sequence: Synthetic oligonucleotide
  Sense strand starting at position 2220 of SEQ ID NO: 914493
gcgcgcucucaauccgauu

SEQ ID NO: 1008191 - RNA, 19 nt, Artificial Sequence
  Description of Artificial Sequence: Synthetic oligonucleotide
  Antisense strand to SEQ ID NO: 1008190
aaucggauugagagcgcgc

SEQ ID NO: 1008192 - RNA, 19 nt, Artificial Sequence
  Description of Artificial Sequence: Synthetic oligonucleotide
  Sense strand starting at position 2221 of SEQ ID NO: 914493
cgcgcucucaauccgauua

SEQ ID NO: 1008193 - RNA, 19 nt, Artificial Sequence
  Description of Artificial Sequence: Synthetic oligonucleotide
  Antisense strand to SEQ ID NO: 1008192
uaaucggauugagagcgcg

SEQ ID NO: 1008194 - RNA, 19 nt, Artificial Sequence
  Description of Artificial Sequence: Synthetic oligonucleotide
  Sense strand starting at position 2581 of SEQ ID NO: 914493
guuuguucccauggcaaca

SEQ ID NO: 1008195 - RNA, 19 nt, Artificial Sequence
  Description of Artificial Sequence: Synthetic oligonucleotide
  Antisense strand to SEQ ID NO: 1008194
uguugccaugggaacaaac

SEQ ID NO: 1008196 - RNA, 19 nt, Artificial Sequence
  Description of Artificial Sequence: Synthetic oligonucleotide
  Sense strand starting at position 2710 of SEQ ID NO: 914493
cugccuaaguuagugacaa

SEQ ID NO: 1008197 - RNA, 19 nt, Artificial Sequence
  Description of Artificial Sequence: Synthetic oligonucleotide
  Antisense strand to SEQ ID NO: 1008196
uugucacuaacuuaggcag

SEQ ID NO: 1008198 - RNA, 19 nt, Artificial Sequence
  Description of Artificial Sequence: Synthetic oligonucleotide
  Sense strand starting at position 2712 of SEQ ID NO: 914493
gccuaaguuagugacaaug

SEQ ID NO: 1008199 - RNA, 19 nt, Artificial Sequence
  Description of Artificial Sequence: Synthetic oligonucleotide
  Antisense strand to SEQ ID NO: 1008198
cauugucacuaacuuaggc

SEQ ID NO: 1008200 - RNA, 19 nt, Artificial Sequence
  Description of Artificial Sequence: Synthetic oligonucleotide
  Sense strand starting at position 2736 of SEQ ID NO: 914493
agggcaaaccuucgggauu

SEQ ID NO: 1008201 - RNA, 19 nt, Artificial Sequence
  Description of Artificial Sequence: Synthetic oligonucleotide
  Antisense strand to SEQ ID NO: 1008200
aaucccgaagguuugcccu

SEQ ID NO: 1008202 - RNA, 19 nt, Artificial Sequence
  Description of Artificial Sequence: Synthetic oligonucleotide
  Sense strand starting at position 2739 of SEQ ID NO: 914493
gcaaaccuucgggauuacu

SEQ ID NO: 1008203 - RNA, 19 nt, Artificial Sequence
  Description of Artificial Sequence: Synthetic oligonucleotide
  Antisense strand to SEQ ID NO: 1008202
aguaaucccgaagguuugc

SEQ ID NO: 1008204 - RNA, 19 nt, Artificial Sequence
  Description of Artificial Sequence: Synthetic oligonucleotide
  Sense strand starting at position 2857 of SEQ ID NO: 914493
gcaaguuucucaccucagu

SEQ ID NO: 1008205 - RNA, 19 nt, Artificial Sequence
  Description of Artificial Sequence: Synthetic oligonucleotide
  Antisense strand to SEQ ID NO: 1008204
acugaggugagaaacuugc

SEQ ID NO: 1008206 - RNA, 19 nt, Artificial Sequence
  Description of Artificial Sequence: Synthetic oligonucleotide
  Sense strand starting at position 2922 of SEQ ID NO: 914493
uuggguuguguggauuaaa

SEQ ID NO: 1008207 - RNA, 19 nt, Artificial Sequence
  Description of Artificial Sequence: Synthetic oligonucleotide
  Antisense strand to SEQ ID NO: 1008206
uuuaauccacacaacccaa

SEQ ID NO: 1008208 - RNA, 19 nt, Artificial Sequence
  Description of Artificial Sequence: Synthetic oligonucleotide
  Sense strand starting at position 2939 of SEQ ID NO: 914493
aaugaauagucauaaagug

SEQ ID NO: 1008209 - RNA, 19 nt, Artificial Sequence
  Description of Artificial Sequence: Synthetic oligonucleotide
  Antisense strand to SEQ ID NO: 1008208
cacuuuaugacuauucauu

SEQ ID NO: 1008210 - RNA, 19 nt, Artificial Sequence
  Description of Artificial Sequence: Synthetic oligonucleotide
  Sense strand starting at position 2948 of SEQ ID NO: 914493
ucauaaagugcuuguuguu

SEQ ID NO: 1008211 - RNA, 19 nt, Artificial Sequence
  Description of Artificial Sequence: Synthetic oligonucleotide
  Antisense strand to SEQ ID NO: 1008210
aacaacaagcacuuuauga

SEQ ID NO: 1008212 - RNA, 19 nt, Artificial Sequence
  Description of Artificial Sequence: Synthetic oligonucleotide
  Sense strand starting at position 3409 of SEQ ID NO: 914493
ggagaaucguuugaacaga

SEQ ID NO: 1008213 - RNA, 19 nt, Artificial Sequence
  Description of Artificial Sequence: Synthetic oligonucleotide
  Antisense strand to SEQ ID NO: 1008212
ucuguucaaacgauucucc

SEQ ID NO: 1008214 - RNA, 19 nt, Artificial Sequence
  Description of Artificial Sequence: Synthetic oligonucleotide
  Sense strand starting at position 3611 of SEQ ID NO: 914493
gaggccuuauacucugaga

SEQ ID NO: 1008215 - RNA, 19 nt, Artificial Sequence
  Description of Artificial Sequence: Synthetic oligonucleotide
  Antisense strand to SEQ ID NO: 1008214
ucucagaguauaaggccuc

SEQ ID NO: 1008216 - RNA, 19 nt, Artificial Sequence
  Description of Artificial Sequence: Synthetic oligonucleotide
  Sense strand starting at position 3613 of SEQ ID NO: 914493
ggccuuauacucugagaca

SEQ ID NO: 1008217 - RNA, 19 nt, Artificial Sequence
  Description of Artificial Sequence: Synthetic oligonucleotide
  Antisense strand to SEQ ID NO: 1008216
ugucucagaguauaaggcc

SEQ ID NO: 1008218 - RNA, 19 nt, Artificial Sequence
  Description of Artificial Sequence: Synthetic oligonucleotide
  Sense strand starting at position 3634 of SEQ ID NO: 914493
gaagcaacgucuucuuuac

SEQ ID NO: 1008219 - RNA, 19 nt, Artificial Sequence
  Description of Artificial Sequence: Synthetic oligonucleotide
  Antisense strand to SEQ ID NO: 1008218
guaaagaagacguugcuuc

SEQ ID NO: 1008220 - RNA, 19 nt, Artificial Sequence
  Description of Artificial Sequence: Synthetic oligonucleotide
  Sense strand starting at position 3636 of SEQ ID NO: 914493
agcaacgucuucuuuacau

SEQ ID NO: 1008221 - RNA, 19 nt, Artificial Sequence
  Description of Artificial Sequence: Synthetic oligonucleotide
  Antisense strand to SEQ ID NO: 1008220
auguaaagaagacguugcu

SEQ ID NO: 1008222 - RNA, 19 nt, Artificial Sequence
  Description of Artificial Sequence: Synthetic oligonucleotide
  Sense strand starting at position 3648 of SEQ ID NO: 914493
uuuacauugcaguaaguca

SEQ ID NO: 1008223 - RNA, 19 nt, Artificial Sequence
  Description of Artificial Sequence: Synthetic oligonucleotide
  Antisense strand to SEQ ID NO: 1008222
ugacuuacugcaauguaaa

SEQ ID NO: 1008224 - RNA, 19 nt, Artificial Sequence
  Description of Artificial Sequence: Synthetic oligonucleotide
  Sense strand starting at position 3688 of SEQ ID NO: 914493
acaggaugcauuggaacuu

SEQ ID NO: 1008225 - RNA, 19 nt, Artificial Sequence
  Description of Artificial Sequence: Synthetic oligonucleotide
  Antisense strand to SEQ ID NO: 1008224
aaguuccaaugcauccugu

SEQ ID NO: 1008226 - RNA, 19 nt, Artificial Sequence
  Description of Artificial Sequence: Synthetic oligonucleotide
  Sense strand starting at position 3724 of SEQ ID NO: 914493
gguggcaucacagaaaucu

SEQ ID NO: 1008227 - RNA, 19 nt, Artificial Sequence
  Description of Artificial Sequence: Synthetic oligonucleotide
  Antisense strand to SEQ ID NO: 1008226
agauuucugugaugccacc

SEQ ID NO: 1008228 - RNA, 19 nt, Artificial Sequence
  Description of Artificial Sequence: Synthetic oligonucleotide
  Sense strand starting at position 3847 of SEQ ID NO: 914493
cacaacauguguuugagaa

SEQ ID NO: 1008229 - RNA, 19 nt, Artificial Sequence
  Description of Artificial Sequence: Synthetic oligonucleotide
  Antisense strand to SEQ ID NO: 1008228
uucucaaacacauguugug

SEQ ID NO: 1008230 - RNA, 19 nt, Artificial Sequence
  Description of Artificial Sequence: Synthetic oligonucleotide
  Sense strand starting at position 3848 of SEQ ID NO: 914493
acaacauguguuugagaac

SEQ ID NO: 1008231 - RNA, 19 nt, Artificial Sequence
  Description of Artificial Sequence: Synthetic oligonucleotide
  Antisense strand to SEQ ID NO: 1008230
guucucaaacacauguugu

SEQ ID NO: 1008232 - RNA, 19 nt, Artificial Sequence
  Description of Artificial Sequence: Synthetic oligonucleotide
  Sense strand starting at position 3902 of SEQ ID NO: 914493
gagaguucacugggaagug

SEQ ID NO: 1008233 - RNA, 19 nt, Artificial Sequence
  Description of Artificial Sequence: Synthetic oligonucleotide
  Antisense strand to SEQ ID NO: 1008232
cacuucccagugaacucuc

SEQ ID NO: 1008234 - RNA, 19 nt, Artificial Sequence
  Description of Artificial Sequence: Synthetic oligonucleotide
  Sense strand starting at position 3922 of SEQ ID NO: 914493
agguggagccguggaaaua

SEQ ID NO: 1008235 - RNA, 19 nt, Artificial Sequence
  Description of Artificial Sequence: Synthetic oligonucleotide
  Antisense strand to SEQ ID NO: 1008234
uauuuccacggcuccaccu

SEQ ID NO: 1008236 - RNA, 19 nt, Artificial Sequence
  Description of Artificial Sequence: Synthetic oligonucleotide
  Sense strand starting at position 3923 of SEQ ID NO: 914493
gguggagccguggaaauaa

SEQ ID NO: 1008237 - RNA, 19 nt, Artificial Sequence
  Description of Artificial Sequence: Synthetic oligonucleotide
  Antisense strand to SEQ ID NO: 1008236
uuauuuccacggcuccacc

SEQ ID NO: 1008238 - RNA, 19 nt, Artificial Sequence
  Description of Artificial Sequence: Synthetic oligonucleotide
  Sense strand starting at position 3964 of SEQ ID NO: 914493
uuaggugacguggauguaa

SEQ ID NO: 1008239 - RNA, 19 nt, Artificial Sequence
  Description of Artificial Sequence: Synthetic oligonucleotide
  Antisense strand to SEQ ID NO: 1008238
uuacauccacgucaccuaa

SEQ ID NO: 1008240 - RNA, 19 nt, Artificial Sequence
  Description of Artificial Sequence: Synthetic oligonucleotide
  Sense strand starting at position 392 of SEQ ID NO: 914494
aaaucuaaugacggcuaga

SEQ ID NO: 1008241 - RNA, 19 nt, Artificial Sequence
  Description of Artificial Sequence: Synthetic oligonucleotide
  Antisense strand to SEQ ID NO: 1008240
ucuagccgucauuagauuu

SEQ ID NO: 1008242 - RNA, 19 nt, Artificial Sequence
  Description of Artificial Sequence: Synthetic oligonucleotide
  Sense strand starting at position 395 of SEQ ID NO: 914494
ucuaaugacggcuagauga

SEQ ID NO: 1008243 - RNA, 19 nt, Artificial Sequence
  Description of Artificial Sequence: Synthetic oligonucleotide
  Antisense strand to SEQ ID NO: 1008242
ucaucuagccgucauuaga

SEQ ID NO: 1008244 - RNA, 19 nt, Artificial Sequence
  Description of Artificial Sequence: Synthetic oligonucleotide
  Sense strand starting at position 413 of SEQ ID NO: 914494
aaauuagagguuugguuaa

SEQ ID NO: 1008245 - RNA, 19 nt, Artificial Sequence
  Description of Artificial Sequence: Synthetic oligonucleotide
  Antisense strand to SEQ ID NO: 1008244
uuaaccaaaccucuaauuu

SEQ ID NO: 1008246 - RNA, 19 nt, Artificial Sequence
  Description of Artificial Sequence: Synthetic oligonucleotide
  Sense strand starting at position 415 of SEQ ID NO: 914494
auuagagguuugguuaauc

SEQ ID NO: 1008247 - RNA, 19 nt, Artificial Sequence
  Description of Artificial Sequence: Synthetic oligonucleotide
  Antisense strand to SEQ ID NO: 1008246
gauuaaccaaaccucuaau

SEQ ID NO: 1008248 - RNA, 19 nt, Artificial Sequence
  Description of Artificial Sequence: Synthetic oligonucleotide
  Sense strand starting at position 420 of SEQ ID NO: 914494
agguuugguuaauccucaa

SEQ ID NO: 1008249 - RNA, 19 nt, Artificial Sequence
  Description of Artificial Sequence: Synthetic oligonucleotide
  Antisense strand to SEQ ID NO: 1008248
uugaggauuaaccaaaccu

SEQ ID NO: 1008250 - RNA, 19 nt, Artificial Sequence
  Description of Artificial Sequence: Synthetic oligonucleotide
  Sense strand starting at position 423 of SEQ ID NO: 914494
uuugguuaauccucaaggu

SEQ ID NO: 1008251 - RNA, 19 nt, Artificial Sequence
  Description of Artificial Sequence: Synthetic oligonucleotide
  Antisense strand to SEQ ID NO: 1008250
accuugaggauuaaccaaa

SEQ ID NO: 1008252 - RNA, 19 nt, Artificial Sequence
  Description of Artificial Sequence: Synthetic oligonucleotide
  Sense strand starting at position 464 of SEQ ID NO: 914494
ccaugcucuucccuggaaa

SEQ ID NO: 1008253 - RNA, 19 nt, Artificial Sequence
  Description of Artificial Sequence: Synthetic oligonucleotide
  Antisense strand to SEQ ID NO: 1008252
uuuccagggaagagcaugg

SEQ ID NO: 1008254 - RNA, 19 nt, Artificial Sequence
  Description of Artificial Sequence: Synthetic oligonucleotide
  Sense strand starting at position 519 of SEQ ID NO: 914494
gguaguaauacuggacauc

SEQ ID NO: 1008255 - RNA, 19 nt, Artificial Sequence
  Description of Artificial Sequence: Synthetic oligonucleotide
  Antisense strand to SEQ ID NO: 1008254
gauguccaguauuacuacc

SEQ ID NO: 1008256 - RNA, 19 nt, Artificial Sequence
  Description of Artificial Sequence: Synthetic oligonucleotide
  Sense strand starting at position 886 of SEQ ID NO: 914494
gguccaaagucguuaaaca

SEQ ID NO: 1008257 - RNA, 19 nt, Artificial Sequence
  Description of Artificial Sequence: Synthetic oligonucleotide
  Antisense strand to SEQ ID NO: 1008256
uguuuaacgacuuuggacc

SEQ ID NO: 1008258 - RNA, 19 nt, Artificial Sequence
  Description of Artificial Sequence: Synthetic oligonucleotide
  Sense strand starting at position 887 of SEQ ID NO: 914494
guccaaagucguuaaacag

SEQ ID NO: 1008259 - RNA, 19 nt, Artificial Sequence
  Description of Artificial Sequence: Synthetic oligonucleotide
  Antisense strand to SEQ ID NO: 1008258
cuguuuaacgacuuuggac

SEQ ID NO: 1008260 - RNA, 19 nt, Artificial Sequence
  Description of Artificial Sequence: Synthetic oligonucleotide
  Sense strand starting at position 1044 of SEQ ID NO: 914494
cccgauucccuccaaagga

SEQ ID NO: 1008261 - RNA, 19 nt, Artificial Sequence
  Description of Artificial Sequence: Synthetic oligonucleotide
  Antisense strand to SEQ ID NO: 1008260
uccuuuggagggaaucggg

SEQ ID NO: 1008262 - RNA, 19 nt, Artificial Sequence
  Description of Artificial Sequence: Synthetic oligonucleotide
  Sense strand starting at position 1190 of SEQ ID NO: 914494
cccaguauugcagaacuca

SEQ ID NO: 1008263 - RNA, 19 nt, Artificial Sequence
  Description of Artificial Sequence: Synthetic oligonucleotide
  Antisense strand to SEQ ID NO: 1008262
ugaguucugcaauacuggg

SEQ ID NO: 1008264 - RNA, 19 nt, Artificial Sequence
  Description of Artificial Sequence: Synthetic oligonucleotide
  Sense strand starting at position 1333 of SEQ ID NO: 914494
gggcgauggguuuguagga

SEQ ID NO: 1008265 - RNA, 19 nt, Artificial Sequence
  Description of Artificial Sequence: Synthetic oligonucleotide
  Antisense strand to SEQ ID NO: 1008264
uccuacaaacccaucgccc

SEQ ID NO: 1008266 - RNA, 19 nt, Artificial Sequence
  Description of Artificial Sequence: Synthetic oligonucleotide
  Sense strand starting at position 1541 of SEQ ID NO: 914494
uccuuauuggccgagaccu

SEQ ID NO: 1008267 - RNA, 19 nt, Artificial Sequence
  Description of Artificial Sequence: Synthetic oligonucleotide
  Antisense strand to SEQ ID NO: 1008266
aggucucggccaauaagga

SEQ ID NO: 1008268 - RNA, 19 nt, Artificial Sequence
  Description of Artificial Sequence: Synthetic oligonucleotide
  Sense strand starting at position 1679 of SEQ ID NO: 914494
gcgcgcucucaauccgauu

SEQ ID NO: 1008269 - RNA, 19 nt, Artificial Sequence
  Description of Artificial Sequence: Synthetic oligonucleotide
  Antisense strand to SEQ ID NO: 1008268
aaucggauugagagcgcgc

SEQ ID NO: 1008270 - RNA, 19 nt, Artificial Sequence
  Description of Artificial Sequence: Synthetic oligonucleotide
  Sense strand starting at position 1680 of SEQ ID NO: 914494
cgcgcucucaauccgauua

SEQ ID NO: 1008271 - RNA, 19 nt, Artificial Sequence
  Description of Artificial Sequence: Synthetic oligonucleotide
  Antisense strand to SEQ ID NO: 1008270
uaaucggauugagagcgcg

SEQ ID NO: 1008272 - RNA, 19 nt, Artificial Sequence
  Description of Artificial Sequence: Synthetic oligonucleotide
  Sense strand starting at position 2169 of SEQ ID NO: 914494
cugccuaaguuagugacaa

SEQ ID NO: 1008273 - RNA, 19 nt, Artificial Sequence
  Description of Artificial Sequence: Synthetic oligonucleotide
  Antisense strand to SEQ ID NO: 1008272
uugucacuaacuuaggcag

SEQ ID NO: 1008274 - RNA, 19 nt, Artificial Sequence
  Description of Artificial Sequence: Synthetic oligonucleotide
  Sense strand starting at position 2171 of SEQ ID NO: 914494
gccuaaguuagugacaaug

SEQ ID NO: 1008275 - RNA, 19 nt, Artificial Sequence
  Description of Artificial Sequence: Synthetic oligonucleotide
  Antisense strand to SEQ ID NO: 1008274
cauugucacuaacuuaggc

SEQ ID NO: 1008276 - RNA, 19 nt, Artificial Sequence
  Description of Artificial Sequence: Synthetic oligonucleotide
  Sense strand starting at position 2195 of SEQ ID NO: 914494
agggcaaaccuucgggauu

SEQ ID NO: 1008277 - RNA, 19 nt, Artificial Sequence
  Description of Artificial Sequence: Synthetic oligonucleotide
  Antisense strand to SEQ ID NO: 1008276
aaucccgaagguuugcccu

SEQ ID NO: 1008278 - RNA, 19 nt, Artificial Sequence
  Description of Artificial Sequence: Synthetic oligonucleotide
  Sense strand starting at position 2198 of SEQ ID NO: 914494
gcaaaccuucgggauuacu

SEQ ID NO: 1008279 - RNA, 19 nt, Artificial Sequence
  Description of Artificial Sequence: Synthetic oligonucleotide
  Antisense strand to SEQ ID NO: 1008278
aguaaucccgaagguuugc

SEQ ID NO: 1008280 - RNA, 19 nt, Artificial Sequence
  Description of Artificial Sequence: Synthetic oligonucleotide
  Sense strand starting at position 2381 of SEQ ID NO: 914494
uuggguuguguggauuaaa

SEQ ID NO: 1008281 - RNA, 19 nt, Artificial Sequence
  Description of Artificial Sequence: Synthetic oligonucleotide
  Antisense strand to SEQ ID NO: 1008280
uuuaauccacacaacccaa

SEQ ID NO: 1008282 - RNA, 19 nt, Artificial Sequence
  Description of Artificial Sequence: Synthetic oligonucleotide
  Sense strand starting at position 3070 of SEQ ID NO: 914494
gaggccuuauacucugaga

SEQ ID NO: 1008283 - RNA, 19 nt, Artificial Sequence
  Description of Artificial Sequence: Synthetic oligonucleotide
  Antisense strand to SEQ ID NO: 1008282
ucucagaguauaaggccuc

SEQ ID NO: 1008284 - RNA, 19 nt, Artificial Sequence
  Description of Artificial Sequence: Synthetic oligonucleotide
  Sense strand starting at position 3072 of SEQ ID NO: 914494
ggccuuauacucugagaca

SEQ ID NO: 1008285 - RNA, 19 nt, Artificial Sequence
  Description of Artificial Sequence: Synthetic oligonucleotide
  Antisense strand to SEQ ID NO: 1008284
ugucucagaguauaaggcc

SEQ ID NO: 1008286 - RNA, 19 nt, Artificial Sequence
  Description of Artificial Sequence: Synthetic oligonucleotide
  Sense strand starting at position 3107 of SEQ ID NO: 914494
uuuacauugcaguaaguca

SEQ ID NO: 1008287 - RNA, 19 nt, Artificial Sequence
  Description of Artificial Sequence: Synthetic oligonucleotide
  Antisense strand to SEQ ID NO: 1008286
ugacuuacugcaauguaaa

SEQ ID NO: 1008288 - RNA, 19 nt, Artificial Sequence
  Description of Artificial Sequence: Synthetic oligonucleotide
  Sense strand starting at position 3147 of SEQ ID NO: 914494
acaggaugcauuggaacuu

SEQ ID NO: 1008289 - RNA, 19 nt, Artificial Sequence
  Description of Artificial Sequence: Synthetic oligonucleotide
  Antisense strand to SEQ ID NO: 1008288
aaguuccaaugcauccugu

SEQ ID NO: 1008290 - RNA, 19 nt, Artificial Sequence
  Description of Artificial Sequence: Synthetic oligonucleotide
  Sense strand starting at position 3183 of SEQ ID NO: 914494
gguggcaucacagaaaucu

SEQ ID NO: 1008291 - RNA, 19 nt, Artificial Sequence
  Description of Artificial Sequence: Synthetic oligonucleotide
  Antisense strand to SEQ ID NO: 1008290
agauuucugugaugccacc

SEQ ID NO: 1008292 - RNA, 19 nt, Artificial Sequence
  Description of Artificial Sequence: Synthetic oligonucleotide
  Sense strand starting at position 3306 of SEQ ID NO: 914494
cacaacauguguuugagaa

SEQ ID NO: 1008293 - RNA, 19 nt, Artificial Sequence
  Description of Artificial Sequence: Synthetic oligonucleotide
  Antisense strand to SEQ ID NO: 1008292
uucucaaacacauguugug

SEQ ID NO: 1008294 - RNA, 19 nt, Artificial Sequence
  Description of Artificial Sequence: Synthetic oligonucleotide
  Sense strand starting at position 3307 of SEQ ID NO: 914494
acaacauguguuugagaac

SEQ ID NO: 1008295 - RNA, 19 nt, Artificial Sequence
  Description of Artificial Sequence: Synthetic oligonucleotide
  Antisense strand to SEQ ID NO: 1008294
guucucaaacacauguugu

SEQ ID NO: 1008296 - RNA, 19 nt, Artificial Sequence
  Description of Artificial Sequence: Synthetic oligonucleotide
  Sense strand starting at position 3361 of SEQ ID NO: 914494
gagaguucacugggaagug

SEQ ID NO: 1008297 - RNA, 19 nt, Artificial Sequence
  Description of Artificial Sequence: Synthetic oligonucleotide
  Antisense strand to SEQ ID NO: 1008296
cacuucccagugaacucuc

SEQ ID NO: 1008298 - RNA, 19 nt, Artificial Sequence
  Description of Artificial Sequence: Synthetic oligonucleotide
  Sense strand starting at position 3381 of SEQ ID NO: 914494
agguggagccguggaaaua

SEQ ID NO: 1008299 - RNA, 19 nt, Artificial Sequence
  Description of Artificial Sequence: Synthetic oligonucleotide
  Antisense strand to SEQ ID NO: 1008298
uauuuccacggcuccaccu

SEQ ID NO: 1008300 - RNA, 19 nt, Artificial Sequence
  Description of Artificial Sequence: Synthetic oligonucleotide
  Sense strand starting at position 3382 of SEQ ID NO: 914494
gguggagccguggaaauaa

SEQ ID NO: 1008301 - RNA, 19 nt, Artificial Sequence
  Description of Artificial Sequence: Synthetic oligonucleotide
  Antisense strand to SEQ ID NO: 1008300
uuauuuccacggcuccacc

SEQ ID NO: 1008302 - RNA, 19 nt, Artificial Sequence
  Description of Artificial Sequence: Synthetic oligonucleotide
  Sense strand starting at position 3423 of SEQ ID NO: 914494
uuaggugacguggauguaa

SEQ ID NO: 1008303 - RNA, 19 nt, Artificial Sequence
  Description of Artificial Sequence: Synthetic oligonucleotide
  Antisense strand to SEQ ID NO: 1008302
uuacauccacgucaccuaa

SEQ ID NO: 1008304 - RNA, 19 nt, Artificial Sequence
  Description of Artificial Sequence: Synthetic oligonucleotide
  Sense strand starting at position 3587 of SEQ ID NO: 914494
auuuaaucaugugcucagu

SEQ ID NO: 1008305 - RNA, 19 nt, Artificial Sequence
  Description of Artificial Sequence: Synthetic oligonucleotide
  Antisense strand to SEQ ID NO: 1008304
acugagcacaugauuaaau

SEQ ID NO: 1008306 - RNA, 19 nt, Artificial Sequence
  Description of Artificial Sequence: Synthetic oligonucleotide
  Sense strand starting at position 3589 of SEQ ID NO: 914494
uuaaucaugugcucaguau

SEQ ID NO: 1008307 - RNA, 19 nt, Artificial Sequence
  Description of Artificial Sequence: Synthetic oligonucleotide
  Antisense strand to SEQ ID NO: 1008306
auacugagcacaugauuaa

SEQ ID NO: 1008308 - RNA, 19 nt, Artificial Sequence
  Description of Artificial Sequence: Synthetic oligonucleotide
  Sense strand starting at position 3596 of SEQ ID NO: 914494
ugugcucaguauuuauagu

SEQ ID NO: 1008309 - RNA, 19 nt, Artificial Sequence
  Description of Artificial Sequence: Synthetic oligonucleotide
  Antisense strand to SEQ ID NO: 1008308
acuauaaauacugagcaca

SEQ ID NO: 1008310 - RNA, 19 nt, Artificial Sequence
  Description of Artificial Sequence: Synthetic oligonucleotide
  Sense strand starting at position 3597 of SEQ ID NO: 914494
gugcucaguauuuauaguu

SEQ ID NO: 1008311 - RNA, 19 nt, Artificial Sequence
  Description of Artificial Sequence: Synthetic oligonucleotide
  Antisense strand to SEQ ID NO: 1008310
aacuauaaauacugagcac

SEQ ID NO: 1008312 - RNA, 19 nt, Artificial Sequence
  Description of Artificial Sequence: Synthetic oligonucleotide
  Sense strand starting at position 3704 of SEQ ID NO: 914494
gagggugcgcuucagagaa

SEQ ID NO: 1008313 - RNA, 19 nt, Artificial Sequence
  Description of Artificial Sequence: Synthetic oligonucleotide
  Antisense strand to SEQ ID NO: 1008312
uucucugaagcgcacccuc

SEQ ID NO: 1008314 - RNA, 19 nt, Artificial Sequence
  Description of Artificial Sequence: Synthetic oligonucleotide
  Sense strand starting at position 3748 of SEQ ID NO: 914494
ggagccacugaggguuaua

SEQ ID NO: 1008315 - RNA, 19 nt, Artificial Sequence
  Description of Artificial Sequence: Synthetic oligonucleotide
  Antisense strand to SEQ ID NO: 1008314
uauaacccucaguggcucc

SEQ ID NO: 1008316 - RNA, 19 nt, Artificial Sequence
  Description of Artificial Sequence: Synthetic oligonucleotide
  Sense strand starting at position 3760 of SEQ ID NO: 914494
gguuauaccuccuuuggaa

SEQ ID NO: 1008317 - RNA, 19 nt, Artificial Sequence
  Description of Artificial Sequence: Synthetic oligonucleotide
  Antisense strand to SEQ ID NO: 1008316
uuccaaaggagguauaacc

SEQ ID NO: 1008318 - RNA, 19 nt, Artificial Sequence
  Description of Artificial Sequence: Synthetic oligonucleotide
  Sense strand starting at position 3860 of SEQ ID NO: 914494
gaaauaauuuagggugagu

SEQ ID NO: 1008319 - RNA, 19 nt, Artificial Sequence
  Description of Artificial Sequence: Synthetic oligonucleotide
  Antisense strand to SEQ ID NO: 1008318
acucacccuaaauuauuuc

SEQ ID NO: 1008320 - RNA, 19 nt, Artificial Sequence
  Description of Artificial Sequence: Synthetic oligonucleotide
  Sense strand starting at position 143 of SEQ ID NO: 914495
gcucuaaacugcgaggaga

SEQ ID NO: 1008321 - RNA, 19 nt, Artificial Sequence
  Description of Artificial Sequence: Synthetic oligonucleotide
  Antisense strand to SEQ ID NO: 1008320
ucuccucgcaguuuagagc

SEQ ID NO: 1008322 - RNA, 19 nt, Artificial Sequence
  Description of Artificial Sequence: Synthetic oligonucleotide
  Sense strand starting at position 315 of SEQ ID NO: 914495
gggacaucgcccgacgacu

SEQ ID NO: 1008323 - RNA, 19 nt, Artificial Sequence
  Description of Artificial Sequence: Synthetic oligonucleotide
  Antisense strand to SEQ ID NO: 1008322
agucgucgggcgauguccc

SEQ ID NO: 1008324 - RNA, 19 nt, Artificial Sequence
  Description of Artificial Sequence: Synthetic oligonucleotide
  Sense strand starting at position 329 of SEQ ID NO: 914495
cgacuucucaggcgcugau

SEQ ID NO: 1008325 - RNA, 19 nt, Artificial Sequence
  Description of Artificial Sequence: Synthetic oligonucleotide
  Antisense strand to SEQ ID NO: 1008324
aucagcgccugagaagucg

SEQ ID NO: 1008326 - RNA, 19 nt, Artificial Sequence
  Description of Artificial Sequence: Synthetic oligonucleotide
  Sense strand starting at position 353 of SEQ ID NO: 914495
gcgcuuggcgaagaaaucu

SEQ ID NO: 1008327 - RNA, 19 nt, Artificial Sequence
  Description of Artificial Sequence: Synthetic oligonucleotide
  Antisense strand to SEQ ID NO: 1008326
agauuucuucgccaagcgc

SEQ ID NO: 1008328 - RNA, 19 nt, Artificial Sequence
  Description of Artificial Sequence: Synthetic oligonucleotide
  Sense strand starting at position 361 of SEQ ID NO: 914495
cgaagaaaucugcgggcga

SEQ ID NO: 1008329 - RNA, 19 nt, Artificial Sequence
  Description of Artificial Sequence: Synthetic oligonucleotide
  Antisense strand to SEQ ID NO: 1008328
ucgcccgcagauuucuucg

SEQ ID NO: 1008330 - RNA, 19 nt, Artificial Sequence
  Description of Artificial Sequence: Synthetic oligonucleotide
  Sense strand starting at position 363 of SEQ ID NO: 914495
aagaaaucugcgggcgaca

SEQ ID NO: 1008331 - RNA, 19 nt, Artificial Sequence
  Description of Artificial Sequence: Synthetic oligonucleotide
  Antisense strand to SEQ ID NO: 1008330
ugucgcccgcagauuucuu

SEQ ID NO: 1008332 - RNA, 19 nt, Artificial Sequence
  Description of Artificial Sequence: Synthetic oligonucleotide
  Sense strand starting at position 502 of SEQ ID NO: 914495
gggucagcuuuguuuacgu

SEQ ID NO: 1008333 - RNA, 19 nt, Artificial Sequence
  Description of Artificial Sequence: Synthetic oligonucleotide
  Antisense strand to SEQ ID NO: 1008332
acguaaacaaagcugaccc

SEQ ID NO: 1008334 - RNA, 19 nt, Artificial Sequence
  Description of Artificial Sequence: Synthetic oligonucleotide
  Sense strand starting at position 524 of SEQ ID NO: 914495
cgcgcaaugugcuguguaa

SEQ ID NO: 1008335 - RNA, 19 nt, Artificial Sequence
  Description of Artificial Sequence: Synthetic oligonucleotide
  Antisense strand to SEQ ID NO: 1008334
uuacacagcacauugcgcg

SEQ ID NO: 1008336 - RNA, 19 nt, Artificial Sequence
  Description of Artificial Sequence: Synthetic oligonucleotide
  Sense strand starting at position 525 of SEQ ID NO: 914495
gcgcaaugugcuguguaag

SEQ ID NO: 1008337 - RNA, 19 nt, Artificial Sequence
  Description of Artificial Sequence: Synthetic oligonucleotide
  Antisense strand to SEQ ID NO: 1008336
cuuacacagcacauugcgc

SEQ ID NO: 1008338 - RNA, 19 nt, Artificial Sequence
  Description of Artificial Sequence: Synthetic oligonucleotide
  Sense strand starting at position 528 of SEQ ID NO: 914495
caaugugcuguguaagcau

SEQ ID NO: 1008339 - RNA, 19 nt, Artificial Sequence
  Description of Artificial Sequence: Synthetic oligonucleotide
  Antisense strand to SEQ ID NO: 1008338
augcuuacacagcacauug

SEQ ID NO: 1008340 - RNA, 19 nt, Artificial Sequence
  Description of Artificial Sequence: Synthetic oligonucleotide
  Sense strand starting at position 1439 of SEQ ID NO: 914495
gcaccgucucgcgguagaa

SEQ ID NO: 1008341 - RNA, 19 nt, Artificial Sequence
  Description of Artificial Sequence: Synthetic oligonucleotide
  Antisense strand to SEQ ID NO: 1008340
uucuaccgcgagacggugc

SEQ ID NO: 1008342 - RNA, 19 nt, Artificial Sequence
  Description of Artificial Sequence: Synthetic oligonucleotide
  Sense strand starting at position 1514 of SEQ ID NO: 914495
gcggcauguccugcuggaa

SEQ ID NO: 1008343 - RNA, 19 nt, Artificial Sequence
  Description of Artificial Sequence: Synthetic oligonucleotide
  Antisense strand to SEQ ID NO: 1008342
uuccagcaggacaugccgc

SEQ ID NO: 1008344 - RNA, 19 nt, Artificial Sequence
  Description of Artificial Sequence: Synthetic oligonucleotide
  Sense strand starting at position 1649 of SEQ ID NO: 914495
gcacuaguacugggaaggu

SEQ ID NO: 1008345 - RNA, 19 nt, Artificial Sequence
  Description of Artificial Sequence: Synthetic oligonucleotide
  Antisense strand to SEQ ID NO: 1008344
accuucccaguacuagugc

SEQ ID NO: 1008346 - RNA, 19 nt, Artificial Sequence
  Description of Artificial Sequence: Synthetic oligonucleotide
  Sense strand starting at position 2075 of SEQ ID NO: 914495
ccgcgauuagcauaaugua

SEQ ID NO: 1008347 - RNA, 19 nt, Artificial Sequence
  Description of Artificial Sequence: Synthetic oligonucleotide
  Antisense strand to SEQ ID NO: 1008346
uacauuaugcuaaucgcgg

SEQ ID NO: 1008348 - RNA, 19 nt, Artificial Sequence
  Description of Artificial Sequence: Synthetic oligonucleotide
  Sense strand starting at position 2078 of SEQ ID NO: 914495
cgauuagcauaauguagua

SEQ ID NO: 1008349 - RNA, 19 nt, Artificial Sequence
  Description of Artificial Sequence: Synthetic oligonucleotide
  Antisense strand to SEQ ID NO: 1008348
uacuacauuaugcuaaucg

SEQ ID NO: 1008350 - RNA, 19 nt, Artificial Sequence
  Description of Artificial Sequence: Synthetic oligonucleotide
  Sense strand starting at position 2963 of SEQ ID NO: 914495
agcuguuguacuggguaaa

SEQ ID NO: 1008351 - RNA, 19 nt, Artificial Sequence
  Description of Artificial Sequence: Synthetic oligonucleotide
  Antisense strand to SEQ ID NO: 1008350
uuuacccaguacaacagcu

SEQ ID NO: 1008352 - RNA, 19 nt, Artificial Sequence
  Description of Artificial Sequence: Synthetic oligonucleotide
  Sense strand starting at position 2985 of SEQ ID NO: 914495
gaaagaucugcccgagguc

SEQ ID NO: 1008353 - RNA, 19 nt, Artificial Sequence
  Description of Artificial Sequence: Synthetic oligonucleotide
  Antisense strand to SEQ ID NO: 1008352
gaccucgggcagaucuuuc

SEQ ID NO: 1008354 - RNA, 19 nt, Artificial Sequence
  Description of Artificial Sequence: Synthetic oligonucleotide
  Sense strand starting at position 2988 of SEQ ID NO: 914495
agaucugcccgaggucaua

SEQ ID NO: 1008355 - RNA, 19 nt, Artificial Sequence
  Description of Artificial Sequence: Synthetic oligonucleotide
  Antisense strand to SEQ ID NO: 1008354
uaugaccucgggcagaucu

SEQ ID NO: 1008356 - RNA, 19 nt, Artificial Sequence
  Description of Artificial Sequence: Synthetic oligonucleotide
  Sense strand starting at position 3249 of SEQ ID NO: 914495
cugucagacaccuguugga

SEQ ID NO: 1008357 - RNA, 19 nt, Artificial Sequence
  Description of Artificial Sequence: Synthetic oligonucleotide
  Antisense strand to SEQ ID NO: 1008356
uccaacaggugucugacag

SEQ ID NO: 1008358 - RNA, 19 nt, Artificial Sequence
  Description of Artificial Sequence: Synthetic oligonucleotide
  Sense strand starting at position 3378 of SEQ ID NO: 914495
gccuuugagucccaagaca

SEQ ID NO: 1008359 - RNA, 19 nt, Artificial Sequence
  Description of Artificial Sequence: Synthetic oligonucleotide
  Antisense strand to SEQ ID NO: 1008358
ugucuugggacucaaaggc

SEQ ID NO: 1008360 - RNA, 19 nt, Artificial Sequence
  Description of Artificial Sequence: Synthetic oligonucleotide
  Sense strand starting at position 3407 of SEQ ID NO: 914495
cauggaaugcuguggcagu

SEQ ID NO: 1008361 - RNA, 19 nt, Artificial Sequence
  Description of Artificial Sequence: Synthetic oligonucleotide
  Antisense strand to SEQ ID NO: 1008360
acugccacagcauuccaug

SEQ ID NO: 1008362 - RNA, 19 nt, Artificial Sequence
  Description of Artificial Sequence: Synthetic oligonucleotide
  Sense strand starting at position 3571 of SEQ ID NO: 914495
agccaugauuuaugugcaa

SEQ ID NO: 1008363 - RNA, 19 nt, Artificial Sequence
  Description of Artificial Sequence: Synthetic oligonucleotide
  Antisense strand to SEQ ID NO: 1008362
uugcacauaaaucauggcu

SEQ ID NO: 1008364 - RNA, 19 nt, Artificial Sequence
  Description of Artificial Sequence: Synthetic oligonucleotide
  Sense strand starting at position 3592 of SEQ ID NO: 914495
ucauauucuucucugugca

SEQ ID NO: 1008365 - RNA, 19 nt, Artificial Sequence
  Description of Artificial Sequence: Synthetic oligonucleotide
  Antisense strand to SEQ ID NO: 1008364
ugcacagagaagaauauga

SEQ ID NO: 1008366 - RNA, 19 nt, Artificial Sequence
  Description of Artificial Sequence: Synthetic oligonucleotide
  Sense strand starting at position 3594 of SEQ ID NO: 914495
auauucuucucugugcaca

SEQ ID NO: 1008367 - RNA, 19 nt, Artificial Sequence
  Description of Artificial Sequence: Synthetic oligonucleotide
  Antisense strand to SEQ ID NO: 1008366
ugugcacagagaagaauau

SEQ ID NO: 1008368 - RNA, 19 nt, Artificial Sequence
  Description of Artificial Sequence: Synthetic oligonucleotide
  Sense strand starting at position 3903 of SEQ ID NO: 914495
cugccaucauccuguguua

SEQ ID NO: 1008369 - RNA, 19 nt, Artificial Sequence
  Description of Artificial Sequence: Synthetic oligonucleotide
  Antisense strand to SEQ ID NO: 1008368
uaacacaggaugauggcag

SEQ ID NO: 1008370 - RNA, 19 nt, Artificial Sequence
  Description of Artificial Sequence: Synthetic oligonucleotide
  Sense strand starting at position 3905 of SEQ ID NO: 914495
gccaucauccuguguuaua

SEQ ID NO: 1008371 - RNA, 19 nt, Artificial Sequence
  Description of Artificial Sequence: Synthetic oligonucleotide
  Antisense strand to SEQ ID NO: 1008370
uauaacacaggaugauggc

SEQ ID NO: 1008372 - RNA, 19 nt, Artificial Sequence
  Description of Artificial Sequence: Synthetic oligonucleotide
  Sense strand starting at position 3906 of SEQ ID NO: 914495
ccaucauccuguguuauag

SEQ ID NO: 1008373 - RNA, 19 nt, Artificial Sequence
  Description of Artificial Sequence: Synthetic oligonucleotide
  Antisense strand to SEQ ID NO: 1008372
cuauaacacaggaugaugg

SEQ ID NO: 1008374 - RNA, 19 nt, Artificial Sequence
  Description of Artificial Sequence: Synthetic oligonucleotide
  Sense strand starting at position 3908 of SEQ ID NO: 914495
aucauccuguguuauagaa

SEQ ID NO: 1008375 - RNA, 19 nt, Artificial Sequence
  Description of Artificial Sequence: Synthetic oligonucleotide
  Antisense strand to SEQ ID NO: 1008374
uucuauaacacaggaugau

SEQ ID NO: 1008376 - RNA, 19 nt, Artificial Sequence
  Description of Artificial Sequence: Synthetic oligonucleotide
  Sense strand starting at position 3910 of SEQ ID NO: 914495
cauccuguguuauagaaga

SEQ ID NO: 1008377 - RNA, 19 nt, Artificial Sequence
  Description of Artificial Sequence: Synthetic oligonucleotide
  Antisense strand to SEQ ID NO: 1008376
ucuucuauaacacaggaug

SEQ ID NO: 1008378 - RNA, 19 nt, Artificial Sequence
  Description of Artificial Sequence: Synthetic oligonucleotide
  Sense strand starting at position 178 of SEQ ID NO: 914496
gucauagaauguuuagaau

SEQ ID NO: 1008379 - RNA, 19 nt, Artificial Sequence
  Description of Artificial Sequence: Synthetic oligonucleotide
  Antisense strand to SEQ ID NO: 1008378
auucuaaacauucuaugac

SEQ ID NO: 1008380 - RNA, 19 nt, Artificial Sequence
  Description of Artificial Sequence: Synthetic oligonucleotide
  Sense strand starting at position 241 of SEQ ID NO: 914496
cuuccucuccuuggagaca

SEQ ID NO: 1008381 - RNA, 19 nt, Artificial Sequence
  Description of Artificial Sequence: Synthetic oligonucleotide
  Antisense strand to SEQ ID NO: 1008380
ugucuccaaggagaggaag

SEQ ID NO: 1008382 - RNA, 19 nt, Artificial Sequence
  Description of Artificial Sequence: Synthetic oligonucleotide
  Sense strand starting at position 256 of SEQ ID NO: 914496
gacacuguccacuagguau

SEQ ID NO: 1008383 - RNA, 19 nt, Artificial Sequence
  Description of Artificial Sequence: Synthetic oligonucleotide
  Antisense strand to SEQ ID NO: 1008382
auaccuaguggacaguguc

SEQ ID NO: 1008384 - RNA, 19 nt, Artificial Sequence
  Description of Artificial Sequence: Synthetic oligonucleotide
  Sense strand starting at position 276 of SEQ ID NO: 914496
ccaagugucaguugggaau

SEQ ID NO: 1008385 - RNA, 19 nt, Artificial Sequence
  Description of Artificial Sequence: Synthetic oligonucleotide
  Antisense strand to SEQ ID NO: 1008384
auucccaacugacacuugg

SEQ ID NO: 1008386 - RNA, 19 nt, Artificial Sequence
  Description of Artificial Sequence: Synthetic oligonucleotide
  Sense strand starting at position 287 of SEQ ID NO: 914496
uugggaauuugaggguuau

SEQ ID NO: 1008387 - RNA, 19 nt, Artificial Sequence
  Description of Artificial Sequence: Synthetic oligonucleotide
  Antisense strand to SEQ ID NO: 1008386
auaacccucaaauucccaa

SEQ ID NO: 1008388 - RNA, 19 nt, Artificial Sequence
  Description of Artificial Sequence: Synthetic oligonucleotide
  Sense strand starting at position 417 of SEQ ID NO: 914496
caaggugucugguuuggga

SEQ ID NO: 1008389 - RNA, 19 nt, Artificial Sequence
  Description of Artificial Sequence: Synthetic oligonucleotide
  Antisense strand to SEQ ID NO: 1008388
ucccaaaccagacaccuug

SEQ ID NO: 1008390 - RNA, 19 nt, Artificial Sequence
  Description of Artificial Sequence: Synthetic oligonucleotide
  Sense strand starting at position 442 of SEQ ID NO: 914496
ggcugacuuucuguugaug

SEQ ID NO: 1008391 - RNA, 19 nt, Artificial Sequence
  Description of Artificial Sequence: Synthetic oligonucleotide
  Antisense strand to SEQ ID NO: 1008390
caucaacagaaagucagcc

SEQ ID NO: 1008392 - RNA, 19 nt, Artificial Sequence
  Description of Artificial Sequence: Synthetic oligonucleotide
  Sense strand starting at position 700 of SEQ ID NO: 914496
gaagcugccgacugaaaua

SEQ ID NO: 1008393 - RNA, 19 nt, Artificial Sequence
  Description of Artificial Sequence: Synthetic oligonucleotide
  Antisense strand to SEQ ID NO: 1008392
uauuucagucggcagcuuc

SEQ ID NO: 1008394 - RNA, 19 nt, Artificial Sequence
  Description of Artificial Sequence: Synthetic oligonucleotide
  Sense strand starting at position 719 of SEQ ID NO: 914496
aauagcgagcuguaaugua

SEQ ID NO: 1008395 - RNA, 19 nt, Artificial Sequence
  Description of Artificial Sequence: Synthetic oligonucleotide
  Antisense strand to SEQ ID NO: 1008394
uacauuacagcucgcuauu

SEQ ID NO: 1008396 - RNA, 19 nt, Artificial Sequence
  Description of Artificial Sequence: Synthetic oligonucleotide
  Sense strand starting at position 727 of SEQ ID NO: 914496
gcuguaauguauuuagcaa

SEQ ID NO: 1008397 - RNA, 19 nt, Artificial Sequence
  Description of Artificial Sequence: Synthetic oligonucleotide
  Antisense strand to SEQ ID NO: 1008396
uugcuaaauacauuacagc

SEQ ID NO: 1008398 - RNA, 19 nt, Artificial Sequence
  Description of Artificial Sequence: Synthetic oligonucleotide
  Sense strand starting at position 805 of SEQ ID NO: 914496
cugggaagucagugagucu

SEQ ID NO: 1008399 - RNA, 19 nt, Artificial Sequence
  Description of Artificial Sequence: Synthetic oligonucleotide
  Antisense strand to SEQ ID NO: 1008398
agacucacugacuucccag

SEQ ID NO: 1008400 - RNA, 19 nt, Artificial Sequence
  Description of Artificial Sequence: Synthetic oligonucleotide
  Sense strand starting at position 806 of SEQ ID NO: 914496
ugggaagucagugagucuu

SEQ ID NO: 1008401 - RNA, 19 nt, Artificial Sequence
  Description of Artificial Sequence: Synthetic oligonucleotide
  Antisense strand to SEQ ID NO: 1008400
aagacucacugacuuccca

SEQ ID NO: 1008402 - RNA, 19 nt, Artificial Sequence
  Description of Artificial Sequence: Synthetic oligonucleotide
  Sense strand starting at position 838 of SEQ ID NO: 914496
aagauacauugugcaggaa

SEQ ID NO: 1008403 - RNA, 19 nt, Artificial Sequence
  Description of Artificial Sequence: Synthetic oligonucleotide
  Antisense strand to SEQ ID NO: 1008402
uuccugcacaauguaucuu

SEQ ID NO: 1008404 - RNA, 19 nt, Artificial Sequence
  Description of Artificial Sequence: Synthetic oligonucleotide
  Sense strand starting at position 841 of SEQ ID NO: 914496
auacauugugcaggaaauu

SEQ ID NO: 1008405 - RNA, 19 nt, Artificial Sequence
  Description of Artificial Sequence: Synthetic oligonucleotide
  Antisense strand to SEQ ID NO: 1008404
aauuuccugcacaauguau

SEQ ID NO: 1008406 - RNA, 19 nt, Artificial Sequence
  Description of Artificial Sequence: Synthetic oligonucleotide
  Sense strand starting at position 850 of SEQ ID NO: 914496
gcaggaaauuucucuugcu

SEQ ID NO: 1008407 - RNA, 19 nt, Artificial Sequence
  Description of Artificial Sequence: Synthetic oligonucleotide
  Antisense strand to SEQ ID NO: 1008406
agcaagagaaauuuccugc

SEQ ID NO: 1008408 - RNA, 19 nt, Artificial Sequence
  Description of Artificial Sequence: Synthetic oligonucleotide
  Sense strand starting at position 1003 of SEQ ID NO: 914496
cgaggaccaucgucaagaa

SEQ ID NO: 1008409 - RNA, 19 nt, Artificial Sequence
  Description of Artificial Sequence: Synthetic oligonucleotide
  Antisense strand to SEQ ID NO: 1008408
uucuugacgaugguccucg

SEQ ID NO: 1008410 - RNA, 19 nt, Artificial Sequence
  Description of Artificial Sequence: Synthetic oligonucleotide
  Sense strand starting at position 1024 of SEQ ID NO: 914496
gguuucgucgugucacuga

SEQ ID NO: 1008411 - RNA, 19 nt, Artificial Sequence
  Description of Artificial Sequence: Synthetic oligonucleotide
  Antisense strand to SEQ ID NO: 1008410
ucagugacacgacgaaacc

SEQ ID NO: 1008412 - RNA, 19 nt, Artificial Sequence
  Description of Artificial Sequence: Synthetic oligonucleotide
  Sense strand starting at position 1848 of SEQ ID NO: 914496
cugccuacucugcaagaga

SEQ ID NO: 1008413 - RNA, 19 nt, Artificial Sequence
  Description of Artificial Sequence: Synthetic oligonucleotide
  Antisense strand to SEQ ID NO: 1008412
ucucuugcagaguaggcag

SEQ ID NO: 1008414 - RNA, 19 nt, Artificial Sequence
  Description of Artificial Sequence: Synthetic oligonucleotide
  Sense strand starting at position 1930 of SEQ ID NO: 914496
uuaccaagucacggagauu

SEQ ID NO: 1008415 - RNA, 19 nt, Artificial Sequence
  Description of Artificial Sequence: Synthetic oligonucleotide
  Antisense strand to SEQ ID NO: 1008414
aaucuccgugacuugguaa

SEQ ID NO: 1008416 - RNA, 19 nt, Artificial Sequence
  Description of Artificial Sequence: Synthetic oligonucleotide
  Sense strand starting at position 1942 of SEQ ID NO: 914496
ggagauucccaucaugccu

SEQ ID NO: 1008417 - RNA, 19 nt, Artificial Sequence
  Description of Artificial Sequence: Synthetic oligonucleotide
  Antisense strand to SEQ ID NO: 1008416
aggcaugaugggaaucucc

SEQ ID NO: 1008418 - RNA, 19 nt, Artificial Sequence
  Description of Artificial Sequence: Synthetic oligonucleotide
  Sense strand starting at position 2261 of SEQ ID NO: 914496
auguuuaauuccuuaggca

SEQ ID NO: 1008419 - RNA, 19 nt, Artificial Sequence
  Description of Artificial Sequence: Synthetic oligonucleotide
  Antisense strand to SEQ ID NO: 1008418
ugccuaaggaauuaaacau

SEQ ID NO: 1008420 - RNA, 19 nt, Artificial Sequence
  Description of Artificial Sequence: Synthetic oligonucleotide
  Sense strand starting at position 2262 of SEQ ID NO: 914496
uguuuaauuccuuaggcag

SEQ ID NO: 1008421 - RNA, 19 nt, Artificial Sequence
  Description of Artificial Sequence: Synthetic oligonucleotide
  Antisense strand to SEQ ID NO: 1008420
cugccuaaggaauuaaaca

SEQ ID NO: 1008422 - RNA, 19 nt, Artificial Sequence
  Description of Artificial Sequence: Synthetic oligonucleotide
  Sense strand starting at position 2490 of SEQ ID NO: 914496
uguugcugugaagcguaaa

SEQ ID NO: 1008423 - RNA, 19 nt, Artificial Sequence
  Description of Artificial Sequence: Synthetic oligonucleotide
  Antisense strand to SEQ ID NO: 1008422
uuuacgcuucacagcaaca

SEQ ID NO: 1008424 - RNA, 19 nt, Artificial Sequence
  Description of Artificial Sequence: Synthetic oligonucleotide
  Sense strand starting at position 2502 of SEQ ID NO: 914496
gcguaaauacgauacuuug

SEQ ID NO: 1008425 - RNA, 19 nt, Artificial Sequence
  Description of Artificial Sequence: Synthetic oligonucleotide
  Antisense strand to SEQ ID NO: 1008424
caaaguaucguauuuacgc

SEQ ID NO: 1008426 - RNA, 19 nt, Artificial Sequence
  Description of Artificial Sequence: Synthetic oligonucleotide
  Sense strand starting at position 2663 of SEQ ID NO: 914496
guuuauaaauacucaguac

SEQ ID NO: 1008427 - RNA, 19 nt, Artificial Sequence
  Description of Artificial Sequence: Synthetic oligonucleotide
  Antisense strand to SEQ ID NO: 1008426
guacugaguauuuauaaac

SEQ ID NO: 1008428 - RNA, 19 nt, Artificial Sequence
  Description of Artificial Sequence: Synthetic oligonucleotide
  Sense strand starting at position 2713 of SEQ ID NO: 914496
uuaccuucuuacgugaauu

SEQ ID NO: 1008429 - RNA, 19 nt, Artificial Sequence
  Description of Artificial Sequence: Synthetic oligonucleotide
  Antisense strand to SEQ ID NO: 1008428
aauucacguaagaagguaa

SEQ ID NO: 1008430 - RNA, 19 nt, Artificial Sequence
  Description of Artificial Sequence: Synthetic oligonucleotide
  Sense strand starting at position 2769 of SEQ ID NO: 914496
gcagguuagcuuucugcau

SEQ ID NO: 1008431 - RNA, 19 nt, Artificial Sequence
  Description of Artificial Sequence: Synthetic oligonucleotide
  Antisense strand to SEQ ID NO: 1008430
augcagaaagcuaaccugc

SEQ ID NO: 1008432 - RNA, 19 nt, Artificial Sequence
  Description of Artificial Sequence: Synthetic oligonucleotide
  Sense strand starting at position 3248 of SEQ ID NO: 914496
auuaacaagcuaugguaaa

SEQ ID NO: 1008433 - RNA, 19 nt, Artificial Sequence
  Description of Artificial Sequence: Synthetic oligonucleotide
  Antisense strand to SEQ ID NO: 1008432
uuuaccauagcuuguuaau

SEQ ID NO: 1008434 - RNA, 19 nt, Artificial Sequence
  Description of Artificial Sequence: Synthetic oligonucleotide
  Sense strand starting at position 3281 of SEQ ID NO: 914496
gcaaguaagucuuucuaua

SEQ ID NO: 1008435 - RNA, 19 nt, Artificial Sequence
  Description of Artificial Sequence: Synthetic oligonucleotide
  Antisense strand to SEQ ID NO: 1008434
uauagaaagacuuacuugc

SEQ ID NO: 1008436 - RNA, 19 nt, Artificial Sequence
  Description of Artificial Sequence: Synthetic oligonucleotide
  Sense strand starting at position 3367 of SEQ ID NO: 914496
cagagaauuccagguucuu

SEQ ID NO: 1008437 - RNA, 19 nt, Artificial Sequence
  Description of Artificial Sequence: Synthetic oligonucleotide
  Antisense strand to SEQ ID NO: 1008436
aagaaccuggaauucucug

SEQ ID NO: 1008438 - RNA, 19 nt, Artificial Sequence
  Description of Artificial Sequence: Synthetic oligonucleotide
  Sense strand starting at position 3379 of SEQ ID NO: 914496
gguucuucuccugggacau

SEQ ID NO: 1008439 - RNA, 19 nt, Artificial Sequence
  Description of Artificial Sequence: Synthetic oligonucleotide
  Antisense strand to SEQ ID NO: 1008438
augucccaggagaagaacc

SEQ ID NO: 1008440 - RNA, 19 nt, Artificial Sequence
  Description of Artificial Sequence: Synthetic oligonucleotide
  Sense strand starting at position 3454 of SEQ ID NO: 914496
uguuacucauagucagacu

SEQ ID NO: 1008441 - RNA, 19 nt, Artificial Sequence
  Description of Artificial Sequence: Synthetic oligonucleotide
  Antisense strand to SEQ ID NO: 1008440
agucugacuaugaguaaca

SEQ ID NO: 1008442 - RNA, 19 nt, Artificial Sequence
  Description of Artificial Sequence: Synthetic oligonucleotide
  Sense strand starting at position 3482 of SEQ ID NO: 914496
aucacaauguuuguugaua

SEQ ID NO: 1008443 - RNA, 19 nt, Artificial Sequence
  Description of Artificial Sequence: Synthetic oligonucleotide
  Antisense strand to SEQ ID NO: 1008442
uaucaacaaacauugugau

SEQ ID NO: 1008444 - RNA, 19 nt, Artificial Sequence
  Description of Artificial Sequence: Synthetic oligonucleotide
  Sense strand starting at position 3483 of SEQ ID NO: 914496
ucacaauguuuguugauau

SEQ ID NO: 1008445 - RNA, 19 nt, Artificial Sequence
  Description of Artificial Sequence: Synthetic oligonucleotide
  Antisense strand to SEQ ID NO: 1008444
auaucaacaaacauuguga

SEQ ID NO: 1008446 - RNA, 19 nt, Artificial Sequence
  Description of Artificial Sequence: Synthetic oligonucleotide
  Sense strand starting at position 3634 of SEQ ID NO: 914496
cucacagucuaacugugau

SEQ ID NO: 1008447 - RNA, 19 nt, Artificial Sequence
  Description of Artificial Sequence: Synthetic oligonucleotide
  Antisense strand to SEQ ID NO: 1008446
aucacaguuagacugugag

SEQ ID NO: 1008448 - RNA, 19 nt, Artificial Sequence
  Description of Artificial Sequence: Synthetic oligonucleotide
  Sense strand starting at position 3637 of SEQ ID NO: 914496
acagucuaacugugauaca

SEQ ID NO: 1008449 - RNA, 19 nt, Artificial Sequence
  Description of Artificial Sequence: Synthetic oligonucleotide
  Antisense strand to SEQ ID NO: 1008448
uguaucacaguuagacugu

SEQ ID NO: 1008450 - RNA, 19 nt, Artificial Sequence
  Description of Artificial Sequence: Synthetic oligonucleotide
  Sense strand starting at position 3717 of SEQ ID NO: 914496
acacaaggucaguauagua

SEQ ID NO: 1008451 - RNA, 19 nt, Artificial Sequence
  Description of Artificial Sequence: Synthetic oligonucleotide
  Antisense strand to SEQ ID NO: 1008450
uacuauacugaccuugugu

SEQ ID NO: 1008452 - RNA, 19 nt, Artificial Sequence
  Description of Artificial Sequence: Synthetic oligonucleotide
  Sense strand starting at position 3742 of SEQ ID NO: 914496
auaguauuaagaggugaua

SEQ ID NO: 1008453 - RNA, 19 nt, Artificial Sequence
  Description of Artificial Sequence: Synthetic oligonucleotide
  Antisense strand to SEQ ID NO: 1008452
uaucaccucuuaauacuau

SEQ ID NO: 1008454 - RNA, 19 nt, Artificial Sequence
  Description of Artificial Sequence: Synthetic oligonucleotide
  Sense strand starting at position 3744 of SEQ ID NO: 914496
aguauuaagaggugauagu

SEQ ID NO: 1008455 - RNA, 19 nt, Artificial Sequence
  Description of Artificial Sequence: Synthetic oligonucleotide
  Antisense strand to SEQ ID NO: 1008454
acuaucaccucuuaauacu

SEQ ID NO: 1008456 - RNA, 19 nt, Artificial Sequence
  Description of Artificial Sequence: Synthetic oligonucleotide
  Sense strand starting at position 3745 of SEQ ID NO: 914496
guauuaagaggugauagua

SEQ ID NO: 1008457 - RNA, 19 nt, Artificial Sequence
  Description of Artificial Sequence: Synthetic oligonucleotide
  Antisense strand to SEQ ID NO: 1008456
uacuaucaccucuuaauac

SEQ ID NO: 1008458 - RNA, 19 nt, Artificial Sequence
  Description of Artificial Sequence: Synthetic oligonucleotide
  Sense strand starting at position 63 of SEQ ID NO: 914497
gucugauauguguaaguau

SEQ ID NO: 1008459 - RNA, 19 nt, Artificial Sequence
  Description of Artificial Sequence: Synthetic oligonucleotide
  Antisense strand to SEQ ID NO: 1008458
auacuuacacauaucagac

SEQ ID NO: 1008460 - RNA, 19 nt, Artificial Sequence
  Description of Artificial Sequence: Synthetic oligonucleotide
  Sense strand starting at position 66 of SEQ ID NO: 914497
ugauauguguaaguauauc

SEQ ID NO: 1008461 - RNA, 19 nt, Artificial Sequence
  Description of Artificial Sequence: Synthetic oligonucleotide
  Antisense strand to SEQ ID NO: 1008460
gauauacuuacacauauca

SEQ ID NO: 1008462 - RNA, 19 nt, Artificial Sequence
  Description of Artificial Sequence: Synthetic oligonucleotide
  Sense strand starting at position 149 of SEQ ID NO: 914497
ucauguugugaagagcauu

SEQ ID NO: 1008463 - RNA, 19 nt, Artificial Sequence
  Description of Artificial Sequence: Synthetic oligonucleotide
  Antisense strand to SEQ ID NO: 1008462
aaugcucuucacaacauga

SEQ ID NO: 1008464 - RNA, 19 nt, Artificial Sequence
  Description of Artificial Sequence: Synthetic oligonucleotide
  Sense strand starting at position 309 of SEQ ID NO: 914497
gagggcuggguuuauuaaa

SEQ ID NO: 1008465 - RNA, 19 nt, Artificial Sequence
  Description of Artificial Sequence: Synthetic oligonucleotide
  Antisense strand to SEQ ID NO: 1008464
uuuaauaaacccagcccuc

SEQ ID NO: 1008466 - RNA, 19 nt, Artificial Sequence
  Description of Artificial Sequence: Synthetic oligonucleotide
  Sense strand starting at position 433 of SEQ ID NO: 914497
guuacacuauaagucuuau

SEQ ID NO: 1008467 - RNA, 19 nt, Artificial Sequence
  Description of Artificial Sequence: Synthetic oligonucleotide
  Antisense strand to SEQ ID NO: 1008466
auaagacuuauaguguaac

SEQ ID NO: 1008468 - RNA, 19 nt, Artificial Sequence
  Description of Artificial Sequence: Synthetic oligonucleotide
  Sense strand starting at position 444 of SEQ ID NO: 914497
agucuuauuuagcugcuca

SEQ ID NO: 1008469 - RNA, 19 nt, Artificial Sequence
  Description of Artificial Sequence: Synthetic oligonucleotide
  Antisense strand to SEQ ID NO: 1008468
ugagcagcuaaauaagacu

SEQ ID NO: 1008470 - RNA, 19 nt, Artificial Sequence
  Description of Artificial Sequence: Synthetic oligonucleotide
  Sense strand starting at position 448 of SEQ ID NO: 914497
uuauuuagcugcucaugua

SEQ ID NO: 1008471 - RNA, 19 nt, Artificial Sequence
  Description of Artificial Sequence: Synthetic oligonucleotide
  Antisense strand to SEQ ID NO: 1008470
uacaugagcagcuaaauaa

SEQ ID NO: 1008472 - RNA, 19 nt, Artificial Sequence
  Description of Artificial Sequence: Synthetic oligonucleotide
  Sense strand starting at position 460 of SEQ ID NO: 914497
ucauguaacuucucuggaa

SEQ ID NO: 1008473 - RNA, 19 nt, Artificial Sequence
  Description of Artificial Sequence: Synthetic oligonucleotide
  Antisense strand to SEQ ID NO: 1008472
uuccagagaaguuacauga

SEQ ID NO: 1008474 - RNA, 19 nt, Artificial Sequence
  Description of Artificial Sequence: Synthetic oligonucleotide
  Sense strand starting at position 541 of SEQ ID NO: 914497
ccaggugguauaugagaca

SEQ ID NO: 1008475 - RNA, 19 nt, Artificial Sequence
  Description of Artificial Sequence: Synthetic oligonucleotide
  Antisense strand to SEQ ID NO: 1008474
ugucucauauaccaccugg

SEQ ID NO: 1008476 - RNA, 19 nt, Artificial Sequence
  Description of Artificial Sequence: Synthetic oligonucleotide
  Sense strand starting at position 848 of SEQ ID NO: 914497
gaggaaguauaucuuguaa

SEQ ID NO: 1008477 - RNA, 19 nt, Artificial Sequence
  Description of Artificial Sequence: Synthetic oligonucleotide
  Antisense strand to SEQ ID NO: 1008476
uuacaagauauacuuccuc

SEQ ID NO: 1008478 - RNA, 19 nt, Artificial Sequence
  Description of Artificial Sequence: Synthetic oligonucleotide
  Sense strand starting at position 862 of SEQ ID NO: 914497
uguaaaucuugggcuuaaa

SEQ ID NO: 1008479 - RNA, 19 nt, Artificial Sequence
  Description of Artificial Sequence: Synthetic oligonucleotide
  Antisense strand to SEQ ID NO: 1008478
uuuaagcccaagauuuaca

SEQ ID NO: 1008480 - RNA, 19 nt, Artificial Sequence
  Description of Artificial Sequence: Synthetic oligonucleotide
  Sense strand starting at position 865 of SEQ ID NO: 914497
aaaucuugggcuuaaaugu

SEQ ID NO: 1008481 - RNA, 19 nt, Artificial Sequence
  Description of Artificial Sequence: Synthetic oligonucleotide
  Antisense strand to SEQ ID NO: 1008480
acauuuaagcccaagauuu

SEQ ID NO: 1008482 - RNA, 19 nt, Artificial Sequence
  Description of Artificial Sequence: Synthetic oligonucleotide
  Sense strand starting at position 872 of SEQ ID NO: 914497
gggcuuaaauguucugaca

SEQ ID NO: 1008483 - RNA, 19 nt, Artificial Sequence
  Description of Artificial Sequence: Synthetic oligonucleotide
  Antisense strand to SEQ ID NO: 1008482
ugucagaacauuuaagccc

SEQ ID NO: 1008484 - RNA, 19 nt, Artificial Sequence
  Description of Artificial Sequence: Synthetic oligonucleotide
  Sense strand starting at position 1328 of SEQ ID NO: 914497
uugauaaacuaucccgcaa

SEQ ID NO: 1008485 - RNA, 19 nt, Artificial Sequence
  Description of Artificial Sequence: Synthetic oligonucleotide
  Antisense strand to SEQ ID NO: 1008484
uugcgggauaguuuaucaa

SEQ ID NO: 1008486 - RNA, 19 nt, Artificial Sequence
  Description of Artificial Sequence: Synthetic oligonucleotide
  Sense strand starting at position 1466 of SEQ ID NO: 914497
aucuguucccaaggucaaa

SEQ ID NO: 1008487 - RNA, 19 nt, Artificial Sequence
  Description of Artificial Sequence: Synthetic oligonucleotide
  Antisense strand to SEQ ID NO: 1008486
uuugaccuugggaacagau

SEQ ID NO: 1008488 - RNA, 19 nt, Artificial Sequence
  Description of Artificial Sequence: Synthetic oligonucleotide
  Sense strand starting at position 1590 of SEQ ID NO: 914497
gccauuaaauauguuugga

SEQ ID NO: 1008489 - RNA, 19 nt, Artificial Sequence
  Description of Artificial Sequence: Synthetic oligonucleotide
  Antisense strand to SEQ ID NO: 1008488
uccaaacauauuuaauggc

SEQ ID NO: 1008490 - RNA, 19 nt, Artificial Sequence
  Description of Artificial Sequence: Synthetic oligonucleotide
  Sense strand starting at position 1667 of SEQ ID NO: 914497
guauucuggcaaugacaga

SEQ ID NO: 1008491 - RNA, 19 nt, Artificial Sequence
  Description of Artificial Sequence: Synthetic oligonucleotide
  Antisense strand to SEQ ID NO: 1008490
ucugucauugccagaauac

SEQ ID NO: 1008492 - RNA, 19 nt, Artificial Sequence
  Description of Artificial Sequence: Synthetic oligonucleotide
  Sense strand starting at position 1762 of SEQ ID NO: 914497
cucugagagucaguggaaa

SEQ ID NO: 1008493 - RNA, 19 nt, Artificial Sequence
  Description of Artificial Sequence: Synthetic oligonucleotide
  Antisense strand to SEQ ID NO: 1008492
uuuccacugacucucagag

SEQ ID NO: 1008494 - RNA, 19 nt, Artificial Sequence
  Description of Artificial Sequence: Synthetic oligonucleotide
  Sense strand starting at position 1939 of SEQ ID NO: 914497
ucuugauagcaucaagauc

SEQ ID NO: 1008495 - RNA, 19 nt, Artificial Sequence
  Description of Artificial Sequence: Synthetic oligonucleotide
  Antisense strand to SEQ ID NO: 1008494
gaucuugaugcuaucaaga

SEQ ID NO: 1008496 - RNA, 19 nt, Artificial Sequence
  Description of Artificial Sequence: Synthetic oligonucleotide
  Sense strand starting at position 2038 of SEQ ID NO: 914497
uguugcuuuccagaggaaa

SEQ ID NO: 1008497 - RNA, 19 nt, Artificial Sequence
  Description of Artificial Sequence: Synthetic oligonucleotide
  Antisense strand to SEQ ID NO: 1008496
uuuccucuggaaagcaaca

SEQ ID NO: 1008498 - RNA, 19 nt, Artificial Sequence
  Description of Artificial Sequence: Synthetic oligonucleotide
  Sense strand starting at position 2073 of SEQ ID NO: 914497
gaucuuaacuaguucugag

SEQ ID NO: 1008499 - RNA, 19 nt, Artificial Sequence
  Description of Artificial Sequence: Synthetic oligonucleotide
  Antisense strand to SEQ ID NO: 1008498
cucagaacuaguuaagauc

SEQ ID NO: 1008500 - RNA, 19 nt, Artificial Sequence
  Description of Artificial Sequence: Synthetic oligonucleotide
  Sense strand starting at position 2202 of SEQ ID NO: 914497
caccauucugauugggaca

SEQ ID NO: 1008501 - RNA, 19 nt, Artificial Sequence
  Description of Artificial Sequence: Synthetic oligonucleotide
  Antisense strand to SEQ ID NO: 1008500
ugucccaaucagaauggug

SEQ ID NO: 1008502 - RNA, 19 nt, Artificial Sequence
  Description of Artificial Sequence: Synthetic oligonucleotide
  Sense strand starting at position 2226 of SEQ ID NO: 914497
gcuguuaccagggaacuga

SEQ ID NO: 1008503 - RNA, 19 nt, Artificial Sequence
  Description of Artificial Sequence: Synthetic oligonucleotide
  Antisense strand to SEQ ID NO: 1008502
ucaguucccugguaacagc

SEQ ID NO: 1008504 - RNA, 19 nt, Artificial Sequence
  Description of Artificial Sequence: Synthetic oligonucleotide
  Sense strand starting at position 2236 of SEQ ID NO: 914497
gggaacugacaguguacau

SEQ ID NO: 1008505 - RNA, 19 nt, Artificial Sequence
  Description of Artificial Sequence: Synthetic oligonucleotide
  Antisense strand to SEQ ID NO: 1008504
auguacacugucaguuccc

SEQ ID NO: 1008506 - RNA, 19 nt, Artificial Sequence
  Description of Artificial Sequence: Synthetic oligonucleotide
  Sense strand starting at position 2256 of SEQ ID NO: 914497
ucuuaucuagcaugagaau

SEQ ID NO: 1008507 - RNA, 19 nt, Artificial Sequence
  Description of Artificial Sequence: Synthetic oligonucleotide
  Antisense strand to SEQ ID NO: 1008506
auucucaugcuagauaaga

SEQ ID NO: 1008508 - RNA, 19 nt, Artificial Sequence
  Description of Artificial Sequence: Synthetic oligonucleotide
  Sense strand starting at position 2257 of SEQ ID NO: 914497
cuuaucuagcaugagaauu

SEQ ID NO: 1008509 - RNA, 19 nt, Artificial Sequence
  Description of Artificial Sequence: Synthetic oligonucleotide
  Antisense strand to SEQ ID NO: 1008508
aauucucaugcuagauaag

SEQ ID NO: 1008510 - RNA, 19 nt, Artificial Sequence
  Description of Artificial Sequence: Synthetic oligonucleotide
  Sense strand starting at position 2265 of SEQ ID NO: 914497
gcaugagaauuaccaugcu

SEQ ID NO: 1008511 - RNA, 19 nt, Artificial Sequence
  Description of Artificial Sequence: Synthetic oligonucleotide
  Antisense strand to SEQ ID NO: 1008510
agcaugguaauucucaugc

SEQ ID NO: 1008512 - RNA, 19 nt, Artificial Sequence
  Description of Artificial Sequence: Synthetic oligonucleotide
  Sense strand starting at position 2268 of SEQ ID NO: 914497
ugagaauuaccaugcuaga

SEQ ID NO: 1008513 - RNA, 19 nt, Artificial Sequence
  Description of Artificial Sequence: Synthetic oligonucleotide
  Antisense strand to SEQ ID NO: 1008512
ucuagcaugguaauucuca

SEQ ID NO: 1008514 - RNA, 19 nt, Artificial Sequence
  Description of Artificial Sequence: Synthetic oligonucleotide
  Sense strand starting at position 2547 of SEQ ID NO: 914497
aucauaaugcucgaguuag

SEQ ID NO: 1008515 - RNA, 19 nt, Artificial Sequence
  Description of Artificial Sequence: Synthetic oligonucleotide
  Antisense strand to SEQ ID NO: 1008514
cuaacucgagcauuaugau

SEQ ID NO: 1008516 - RNA, 19 nt, Artificial Sequence
  Description of Artificial Sequence: Synthetic oligonucleotide
  Sense strand starting at position 2559 of SEQ ID NO: 914497
gaguuaggucuccagacca

SEQ ID NO: 1008517 - RNA, 19 nt, Artificial Sequence
  Description of Artificial Sequence: Synthetic oligonucleotide
  Antisense strand to SEQ ID NO: 1008516
uggucuggagaccuaacuc

SEQ ID NO: 1008518 - RNA, 19 nt, Artificial Sequence
  Description of Artificial Sequence: Synthetic oligonucleotide
  Sense strand starting at position 2613 of SEQ ID NO: 914497
gugcgaugaacauaaacaa

SEQ ID NO: 1008519 - RNA, 19 nt, Artificial Sequence
  Description of Artificial Sequence: Synthetic oligonucleotide
  Antisense strand to SEQ ID NO: 1008518
uuguuuauguucaucgcac

SEQ ID NO: 1008520 - RNA, 19 nt, Artificial Sequence
  Description of Artificial Sequence: Synthetic oligonucleotide
  Sense strand starting at position 2696 of SEQ ID NO: 914497
aguuaagauucccuuacug

SEQ ID NO: 1008521 - RNA, 19 nt, Artificial Sequence
  Description of Artificial Sequence: Synthetic oligonucleotide
  Antisense strand to SEQ ID NO: 1008520
caguaagggaaucuuaacu

SEQ ID NO: 1008522 - RNA, 19 nt, Artificial Sequence
  Description of Artificial Sequence: Synthetic oligonucleotide
  Sense strand starting at position 2754 of SEQ ID NO: 914497
aucacauuguacuuguaau

SEQ ID NO: 1008523 - RNA, 19 nt, Artificial Sequence
  Description of Artificial Sequence: Synthetic oligonucleotide
  Antisense strand to SEQ ID NO: 1008522
auuacaaguacaaugugau

SEQ ID NO: 1008524 - RNA, 19 nt, Artificial Sequence
  Description of Artificial Sequence: Synthetic oligonucleotide
  Sense strand starting at position 2852 of SEQ ID NO: 914497
guaaacaaccuaggugaau

SEQ ID NO: 1008525 - RNA, 19 nt, Artificial Sequence
  Description of Artificial Sequence: Synthetic oligonucleotide
  Antisense strand to SEQ ID NO: 1008524
auucaccuagguuguuuac

SEQ ID NO: 1008526 - RNA, 19 nt, Artificial Sequence
  Description of Artificial Sequence: Synthetic oligonucleotide
  Sense strand starting at position 2861 of SEQ ID NO: 914497
cuaggugaauucuuacacu

SEQ ID NO: 1008527 - RNA, 19 nt, Artificial Sequence
  Description of Artificial Sequence: Synthetic oligonucleotide
  Antisense strand to SEQ ID NO: 1008526
aguguaagaauucaccuag

SEQ ID NO: 1008528 - RNA, 19 nt, Artificial Sequence
  Description of Artificial Sequence: Synthetic oligonucleotide
  Sense strand starting at position 3236 of SEQ ID NO: 914497
ucguccuauuuguuucuaa

SEQ ID NO: 1008529 - RNA, 19 nt, Artificial Sequence
  Description of Artificial Sequence: Synthetic oligonucleotide
  Antisense strand to SEQ ID NO: 1008528
uuagaaacaaauaggacga

SEQ ID NO: 1008530 - RNA, 19 nt, Artificial Sequence
  Description of Artificial Sequence: Synthetic oligonucleotide
  Sense strand starting at position 3237 of SEQ ID NO: 914497
cguccuauuuguuucuaaa

SEQ ID NO: 1008531 - RNA, 19 nt, Artificial Sequence
  Description of Artificial Sequence: Synthetic oligonucleotide
  Antisense strand to SEQ ID NO: 1008530
uuuagaaacaaauaggacg

SEQ ID NO: 1008532 - RNA, 19 nt, Artificial Sequence
  Description of Artificial Sequence: Synthetic oligonucleotide
  Sense strand starting at position 3668 of SEQ ID NO: 914497
cuggauuacaggcgugaag

SEQ ID NO: 1008533 - RNA, 19 nt, Artificial Sequence
  Description of Artificial Sequence: Synthetic oligonucleotide
  Antisense strand to SEQ ID NO: 1008532
cuucacgccuguaauccag

SEQ ID NO: 1008534 - RNA, 19 nt, Artificial Sequence
  Description of Artificial Sequence: Synthetic oligonucleotide
  Sense strand starting at position 3760 of SEQ ID NO: 914497
cugaauagugucugaagau

SEQ ID NO: 1008535 - RNA, 19 nt, Artificial Sequence
  Description of Artificial Sequence: Synthetic oligonucleotide
  Antisense strand to SEQ ID NO: 1008534
aucuucagacacuauucag

SEQ ID NO: 1008536 - RNA, 19 nt, Artificial Sequence
  Description of Artificial Sequence: Synthetic oligonucleotide
  Sense strand starting at position 3769 of SEQ ID NO: 914497
gucugaagauccuuaagaa

SEQ ID NO: 1008537 - RNA, 19 nt, Artificial Sequence
  Description of Artificial Sequence: Synthetic oligonucleotide
  Antisense strand to SEQ ID NO: 1008536
uucuuaaggaucuucagac

SEQ ID NO: 1008538 - RNA, 19 nt, Artificial Sequence
  Description of Artificial Sequence: Synthetic oligonucleotide
  Sense strand starting at position 970 of SEQ ID NO: 914498
gcagcaauaggcugacaga

SEQ ID NO: 1008539 - RNA, 19 nt, Artificial Sequence
  Description of Artificial Sequence: Synthetic oligonucleotide
  Antisense strand to SEQ ID NO: 1008538
ucugucagccuauugcugc

SEQ ID NO: 1008540 - RNA, 19 nt, Artificial Sequence
  Description of Artificial Sequence: Synthetic oligonucleotide
  Sense strand starting at position 971 of SEQ ID NO: 914498
cagcaauaggcugacagau

SEQ ID NO: 1008541 - RNA, 19 nt, Artificial Sequence
  Description of Artificial Sequence: Synthetic oligonucleotide
  Antisense strand to SEQ ID NO: 1008540
aucugucagccuauugcug

SEQ ID NO: 1008542 - RNA, 19 nt, Artificial Sequence
  Description of Artificial Sequence: Synthetic oligonucleotide
  Sense strand starting at position 998 of SEQ ID NO: 914498
uccaacugggccuguuaga

SEQ ID NO: 1008543 - RNA, 19 nt, Artificial Sequence
  Description of Artificial Sequence: Synthetic oligonucleotide
  Antisense strand to SEQ ID NO: 1008542
ucuaacaggcccaguugga

SEQ ID NO: 1008544 - RNA, 19 nt, Artificial Sequence
  Description of Artificial Sequence: Synthetic oligonucleotide
  Sense strand starting at position 1008 of SEQ ID NO: 914498
ccuguuagaguccaguaua

SEQ ID NO: 1008545 - RNA, 19 nt, Artificial Sequence
  Description of Artificial Sequence: Synthetic oligonucleotide
  Antisense strand to SEQ ID NO: 1008544
uauacuggacucuaacagg

SEQ ID NO: 1008546 - RNA, 19 nt, Artificial Sequence
  Description of Artificial Sequence: Synthetic oligonucleotide
  Sense strand starting at position 1011 of SEQ ID NO: 914498
guuagaguccaguauaucu

SEQ ID NO: 1008547 - RNA, 19 nt, Artificial Sequence
  Description of Artificial Sequence: Synthetic oligonucleotide
  Antisense strand to SEQ ID NO: 1008546
agauauacuggacucuaac

SEQ ID NO: 1008548 - RNA, 19 nt, Artificial Sequence
  Description of Artificial Sequence: Synthetic oligonucleotide
  Sense strand starting at position 1224 of SEQ ID NO: 914498
cuagaauauaggugugcua

SEQ ID NO: 1008549 - RNA, 19 nt, Artificial Sequence
  Description of Artificial Sequence: Synthetic oligonucleotide
  Antisense strand to SEQ ID NO: 1008548
uagcacaccuauauucuag

SEQ ID NO: 1008550 - RNA, 19 nt, Artificial Sequence
  Description of Artificial Sequence: Synthetic oligonucleotide
  Sense strand starting at position 1226 of SEQ ID NO: 914498
agaauauaggugugcuaau

SEQ ID NO: 1008551 - RNA, 19 nt, Artificial Sequence
  Description of Artificial Sequence: Synthetic oligonucleotide
  Antisense strand to SEQ ID NO: 1008550
auuagcacaccuauauucu

SEQ ID NO: 1008552 - RNA, 19 nt, Artificial Sequence
  Description of Artificial Sequence: Synthetic oligonucleotide
  Sense strand starting at position 1227 of SEQ ID NO: 914498
gaauauaggugugcuaauc

SEQ ID NO: 1008553 - RNA, 19 nt, Artificial Sequence
  Description of Artificial Sequence: Synthetic oligonucleotide
  Antisense strand to SEQ ID NO: 1008552
gauuagcacaccuauauuc

SEQ ID NO: 1008554 - RNA, 19 nt, Artificial Sequence
  Description of Artificial Sequence: Synthetic oligonucleotide
  Sense strand starting at position 1238 of SEQ ID NO: 914498
ugcuaaucagagugucacu

SEQ ID NO: 1008555 - RNA, 19 nt, Artificial Sequence
  Description of Artificial Sequence: Synthetic oligonucleotide
  Antisense strand to SEQ ID NO: 1008554
agugacacucugauuagca

SEQ ID NO: 1008556 - RNA, 19 nt, Artificial Sequence
  Description of Artificial Sequence: Synthetic oligonucleotide
  Sense strand starting at position 1442 of SEQ ID NO: 914498
uuuggaaagucaguaaaua

SEQ ID NO: 1008557 - RNA, 19 nt, Artificial Sequence
  Description of Artificial Sequence: Synthetic oligonucleotide
  Antisense strand to SEQ ID NO: 1008556
uauuuacugacuuuccaaa

SEQ ID NO: 1008558 - RNA, 19 nt, Artificial Sequence
  Description of Artificial Sequence: Synthetic oligonucleotide
  Sense strand starting at position 1544 of SEQ ID NO: 914498
agagaucccuaagugauuc

SEQ ID NO: 1008559 - RNA, 19 nt, Artificial Sequence
  Description of Artificial Sequence: Synthetic oligonucleotide
  Antisense strand to SEQ ID NO: 1008558
gaaucacuuagggaucucu

SEQ ID NO: 1008560 - RNA, 19 nt, Artificial Sequence
  Description of Artificial Sequence: Synthetic oligonucleotide
  Sense strand starting at position 1566 of SEQ ID NO: 914498
gccagaauacaucagugua

SEQ ID NO: 1008561 - RNA, 19 nt, Artificial Sequence
  Description of Artificial Sequence: Synthetic oligonucleotide
  Antisense strand to SEQ ID NO: 1008560
uacacugauguauucuggc

SEQ ID NO: 1008562 - RNA, 19 nt, Artificial Sequence
  Description of Artificial Sequence: Synthetic oligonucleotide
  Sense strand starting at position 1569 of SEQ ID NO: 914498
agaauacaucaguguauag

SEQ ID NO: 1008563 - RNA, 19 nt, Artificial Sequence
  Description of Artificial Sequence: Synthetic oligonucleotide
  Antisense strand to SEQ ID NO: 1008562
cuauacacugauguauucu

SEQ ID NO: 1008564 - RNA, 19 nt, Artificial Sequence
  Description of Artificial Sequence: Synthetic oligonucleotide
  Sense strand starting at position 1761 of SEQ ID NO: 914498
gcaugcuuaugacucauga

SEQ ID NO: 1008565 - RNA, 19 nt, Artificial Sequence
  Description of Artificial Sequence: Synthetic oligonucleotide
  Antisense strand to SEQ ID NO: 1008564
ucaugagucauaagcaugc

SEQ ID NO: 1008566 - RNA, 19 nt, Artificial Sequence
  Description of Artificial Sequence: Synthetic oligonucleotide
  Sense strand starting at position 1841 of SEQ ID NO: 914498
uuacacugaccaggaguaa

SEQ ID NO: 1008567 - RNA, 19 nt, Artificial Sequence
  Description of Artificial Sequence: Synthetic oligonucleotide
  Antisense strand to SEQ ID NO: 1008566
uuacuccuggucaguguaa

SEQ ID NO: 1008568 - RNA, 19 nt, Artificial Sequence
  Description of Artificial Sequence: Synthetic oligonucleotide
  Sense strand starting at position 2242 of SEQ ID NO: 914498
aaauuugagugccaggaaa

SEQ ID NO: 1008569 - RNA, 19 nt, Artificial Sequence
  Description of Artificial Sequence: Synthetic oligonucleotide
  Antisense strand to SEQ ID NO: 1008568
uuuccuggcacucaaauuu

SEQ ID NO: 1008570 - RNA, 19 nt, Artificial Sequence
  Description of Artificial Sequence: Synthetic oligonucleotide
  Sense strand starting at position 2285 of SEQ ID NO: 914498
ugaucuuugugaccuguaa

SEQ ID NO: 1008571 - RNA, 19 nt, Artificial Sequence
  Description of Artificial Sequence: Synthetic oligonucleotide
  Antisense strand to SEQ ID NO: 1008570
uuacaggucacaaagauca

SEQ ID NO: 1008572 - RNA, 19 nt, Artificial Sequence
  Description of Artificial Sequence: Synthetic oligonucleotide
  Sense strand starting at position 2289 of SEQ ID NO: 914498
cuuugugaccuguaacaaa

SEQ ID NO: 1008573 - RNA, 19 nt, Artificial Sequence
  Description of Artificial Sequence: Synthetic oligonucleotide
  Antisense strand to SEQ ID NO: 1008572
uuuguuacaggucacaaag

SEQ ID NO: 1008574 - RNA, 19 nt, Artificial Sequence
  Description of Artificial Sequence: Synthetic oligonucleotide
  Sense strand starting at position 2583 of SEQ ID NO: 914498
gacagauggaugcacguaa

SEQ ID NO: 1008575 - RNA, 19 nt, Artificial Sequence
  Description of Artificial Sequence: Synthetic oligonucleotide
  Antisense strand to SEQ ID NO: 1008574
uuacgugcauccaucuguc

SEQ ID NO: 1008576 - RNA, 19 nt, Artificial Sequence
  Description of Artificial Sequence: Synthetic oligonucleotide
  Sense strand starting at position 2587 of SEQ ID NO: 914498
gauggaugcacguaagaac

SEQ ID NO: 1008577 - RNA, 19 nt, Artificial Sequence
  Description of Artificial Sequence: Synthetic oligonucleotide
  Antisense strand to SEQ ID NO: 1008576
guucuuacgugcauccauc

SEQ ID NO: 1008578 - RNA, 19 nt, Artificial Sequence
  Description of Artificial Sequence: Synthetic oligonucleotide
  Sense strand starting at position 2698 of SEQ ID NO: 914498
gcuguugcuguacaaauau

SEQ ID NO: 1008579 - RNA, 19 nt, Artificial Sequence
  Description of Artificial Sequence: Synthetic oligonucleotide
  Antisense strand to SEQ ID NO: 1008578
auauuuguacagcaacagc

SEQ ID NO: 1008580 - RNA, 19 nt, Artificial Sequence
  Description of Artificial Sequence: Synthetic oligonucleotide
  Sense strand starting at position 2805 of SEQ ID NO: 914498
cccauacaugguugcugaa

SEQ ID NO: 1008581 - RNA, 19 nt, Artificial Sequence
  Description of Artificial Sequence: Synthetic oligonucleotide
  Antisense strand to SEQ ID NO: 1008580
uucagcaaccauguauggg

SEQ ID NO: 1008582 - RNA, 19 nt, Artificial Sequence
  Description of Artificial Sequence: Synthetic oligonucleotide
  Sense strand starting at position 2902 of SEQ ID NO: 914498
acaggcugguacuugaaau

SEQ ID NO: 1008583 - RNA, 19 nt, Artificial Sequence
  Description of Artificial Sequence: Synthetic oligonucleotide
  Antisense strand to SEQ ID NO: 1008582
auuucaaguaccagccugu

SEQ ID NO: 1008584 - RNA, 19 nt, Artificial Sequence
  Description of Artificial Sequence: Synthetic oligonucleotide
  Sense strand starting at position 3031 of SEQ ID NO: 914498
aggucagauucuucccaga

SEQ ID NO: 1008585 - RNA, 19 nt, Artificial Sequence
  Description of Artificial Sequence: Synthetic oligonucleotide
  Antisense strand to SEQ ID NO: 1008584
ucugggaagaaucugaccu

SEQ ID NO: 1008586 - RNA, 19 nt, Artificial Sequence
  Description of Artificial Sequence: Synthetic oligonucleotide
  Sense strand starting at position 3033 of SEQ ID NO: 914498
gucagauucuucccagauc

SEQ ID NO: 1008587 - RNA, 19 nt, Artificial Sequence
  Description of Artificial Sequence: Synthetic oligonucleotide
  Antisense strand to SEQ ID NO: 1008586
gaucugggaagaaucugac

SEQ ID NO: 1008588 - RNA, 19 nt, Artificial Sequence
  Description of Artificial Sequence: Synthetic oligonucleotide
  Sense strand starting at position 3109 of SEQ ID NO: 914498
aagguuauucuccauucga

SEQ ID NO: 1008589 - RNA, 19 nt, Artificial Sequence
  Description of Artificial Sequence: Synthetic oligonucleotide
  Antisense strand to SEQ ID NO: 1008588
ucgaauggagaauaaccuu

SEQ ID NO: 1008590 - RNA, 19 nt, Artificial Sequence
  Description of Artificial Sequence: Synthetic oligonucleotide
  Sense strand starting at position 3117 of SEQ ID NO: 914498
ucuccauucgagugaacaa

SEQ ID NO: 1008591 - RNA, 19 nt, Artificial Sequence
  Description of Artificial Sequence: Synthetic oligonucleotide
  Antisense strand to SEQ ID NO: 1008590
uuguucacucgaauggaga

SEQ ID NO: 1008592 - RNA, 19 nt, Artificial Sequence
  Description of Artificial Sequence: Synthetic oligonucleotide
  Sense strand starting at position 3124 of SEQ ID NO: 914498
ucgagugaacaauguuaac

SEQ ID NO: 1008593 - RNA, 19 nt, Artificial Sequence
  Description of Artificial Sequence: Synthetic oligonucleotide
  Antisense strand to SEQ ID NO: 1008592
guuaacauuguucacucga

SEQ ID NO: 1008594 - RNA, 19 nt, Artificial Sequence
  Description of Artificial Sequence: Synthetic oligonucleotide
  Sense strand starting at position 3270 of SEQ ID NO: 914498
ugaggaugauggcuuauau

SEQ ID NO: 1008595 - RNA, 19 nt, Artificial Sequence
  Description of Artificial Sequence: Synthetic oligonucleotide
  Antisense strand to SEQ ID NO: 1008594
auauaagccaucauccuca

SEQ ID NO: 1008596 - RNA, 19 nt, Artificial Sequence
  Description of Artificial Sequence: Synthetic oligonucleotide
  Sense strand starting at position 3355 of SEQ ID NO: 914498
caaugugaaguaugugaaa

SEQ ID NO: 1008597 - RNA, 19 nt, Artificial Sequence
  Description of Artificial Sequence: Synthetic oligonucleotide
  Antisense strand to SEQ ID NO: 1008596
uuucacauacuucacauug

SEQ ID NO: 1008598 - RNA, 19 nt, Artificial Sequence
  Description of Artificial Sequence: Synthetic oligonucleotide
  Sense strand starting at position 3374 of SEQ ID NO: 914498
agcuuaauugcugaccaga

SEQ ID NO: 1008599 - RNA, 19 nt, Artificial Sequence
  Description of Artificial Sequence: Synthetic oligonucleotide
  Antisense strand to SEQ ID NO: 1008598
ucuggucagcaauuaagcu

SEQ ID NO: 1008600 - RNA, 19 nt, Artificial Sequence
  Description of Artificial Sequence: Synthetic oligonucleotide
  Sense strand starting at position 3376 of SEQ ID NO: 914498
cuuaauugcugaccagagu

SEQ ID NO: 1008601 - RNA, 19 nt, Artificial Sequence
  Description of Artificial Sequence: Synthetic oligonucleotide
  Antisense strand to SEQ ID NO: 1008600
acucuggucagcaauuaag

SEQ ID NO: 1008602 - RNA, 19 nt, Artificial Sequence
  Description of Artificial Sequence: Synthetic oligonucleotide
  Sense strand starting at position 3408 of SEQ ID NO: 914498
auaagaaaugcauggcuga

SEQ ID NO: 1008603 - RNA, 19 nt, Artificial Sequence
  Description of Artificial Sequence: Synthetic oligonucleotide
  Antisense strand to SEQ ID NO: 1008602
ucagccaugcauuucuuau

SEQ ID NO: 1008604 - RNA, 19 nt, Artificial Sequence
  Description of Artificial Sequence: Synthetic oligonucleotide
  Sense strand starting at position 3409 of SEQ ID NO: 914498
uaagaaaugcauggcugau

SEQ ID NO: 1008605 - RNA, 19 nt, Artificial Sequence
  Description of Artificial Sequence: Synthetic oligonucleotide
  Antisense strand to SEQ ID NO: 1008604
aucagccaugcauuucuua

SEQ ID NO: 1008606 - RNA, 19 nt, Artificial Sequence
  Description of Artificial Sequence: Synthetic oligonucleotide
  Sense strand starting at position 3419 of SEQ ID NO: 914498
auggcugauuggcucaaau

SEQ ID NO: 1008607 - RNA, 19 nt, Artificial Sequence
  Description of Artificial Sequence: Synthetic oligonucleotide
  Antisense strand to SEQ ID NO: 1008606
auuugagccaaucagccau

SEQ ID NO: 1008608 - RNA, 19 nt, Artificial Sequence
  Description of Artificial Sequence: Synthetic oligonucleotide
  Sense strand starting at position 3421 of SEQ ID NO: 914498
ggcugauuggcucaaauga

SEQ ID NO: 1008609 - RNA, 19 nt, Artificial Sequence
  Description of Artificial Sequence: Synthetic oligonucleotide
  Antisense strand to SEQ ID NO: 1008608
ucauuugagccaaucagcc

SEQ ID NO: 1008610 - RNA, 19 nt, Artificial Sequence
  Description of Artificial Sequence: Synthetic oligonucleotide
  Sense strand starting at position 3428 of SEQ ID NO: 914498
uggcucaaaugauucuauu

SEQ ID NO: 1008611 - RNA, 19 nt, Artificial Sequence
  Description of Artificial Sequence: Synthetic oligonucleotide
  Antisense strand to SEQ ID NO: 1008610
aauagaaucauuugagcca

SEQ ID NO: 1008612 - RNA, 19 nt, Artificial Sequence
  Description of Artificial Sequence: Synthetic oligonucleotide
  Sense strand starting at position 3619 of SEQ ID NO: 914498
cagccugguuauguauuua

SEQ ID NO: 1008613 - RNA, 19 nt, Artificial Sequence
  Description of Artificial Sequence: Synthetic oligonucleotide
  Antisense strand to SEQ ID NO: 1008612
uaaauacauaaccaggcug

SEQ ID NO: 1008614 - RNA, 19 nt, Artificial Sequence
  Description of Artificial Sequence: Synthetic oligonucleotide
  Sense strand starting at position 3630 of SEQ ID NO: 914498
uguauuuauucgguaucau

SEQ ID NO: 1008615 - RNA, 19 nt, Artificial Sequence
  Description of Artificial Sequence: Synthetic oligonucleotide
  Antisense strand to SEQ ID NO: 1008614
augauaccgaauaaauaca

SEQ ID NO: 1008616 - RNA, 19 nt, Artificial Sequence
  Description of Artificial Sequence: Synthetic oligonucleotide
  Sense strand starting at position 3704 of SEQ ID NO: 914498
agaugagauuaacaugaga

SEQ ID NO: 1008617 - RNA, 19 nt, Artificial Sequence
  Description of Artificial Sequence: Synthetic oligonucleotide
  Antisense strand to SEQ ID NO: 1008616
ucucauguuaaucucaucu

SEQ ID NO: 1008618 - RNA, 19 nt, Artificial Sequence
  Description of Artificial Sequence: Synthetic oligonucleotide
  Sense strand starting at position 5 of SEQ ID NO: 914499
gaaguugaggccugugauc

SEQ ID NO: 1008619 - RNA, 19 nt, Artificial Sequence
  Description of Artificial Sequence: Synthetic oligonucleotide
  Antisense strand to SEQ ID NO: 1008618
gaucacaggccucaacuuc

SEQ ID NO: 1008620 - RNA, 19 nt, Artificial Sequence
  Description of Artificial Sequence: Synthetic oligonucleotide
  Sense strand starting at position 164 of SEQ ID NO: 914499
gcuaacucaugaucagaaa

SEQ ID NO: 1008621 - RNA, 19 nt, Artificial Sequence
  Description of Artificial Sequence: Synthetic oligonucleotide
  Antisense strand to SEQ ID NO: 1008620
uuucugaucaugaguuagc

SEQ ID NO: 1008622 - RNA, 19 nt, Artificial Sequence
  Description of Artificial Sequence: Synthetic oligonucleotide
  Sense strand starting at position 182 of SEQ ID NO: 914499
accacauacuagguaagua

SEQ ID NO: 1008623 - RNA, 19 nt, Artificial Sequence
  Description of Artificial Sequence: Synthetic oligonucleotide
  Antisense strand to SEQ ID NO: 1008622
uacuuaccuaguauguggu

SEQ ID NO: 1008624 - RNA, 19 nt, Artificial Sequence
  Description of Artificial Sequence: Synthetic oligonucleotide
  Sense strand starting at position 989 of SEQ ID NO: 914499
uggguaugagccuaaacca

SEQ ID NO: 1008625 - RNA, 19 nt, Artificial Sequence
  Description of Artificial Sequence: Synthetic oligonucleotide
  Antisense strand to SEQ ID NO: 1008624
ugguuuaggcucauaccca

SEQ ID NO: 1008626 - RNA, 19 nt, Artificial Sequence
  Description of Artificial Sequence: Synthetic oligonucleotide
  Sense strand starting at position 1029 of SEQ ID NO: 914499
guguaauggucuccaagaa

SEQ ID NO: 1008627 - RNA, 19 nt, Artificial Sequence
  Description of Artificial Sequence: Synthetic oligonucleotide
  Antisense strand to SEQ ID NO: 1008626
uucuuggagaccauuacac

SEQ ID NO: 1008628 - RNA, 19 nt, Artificial Sequence
  Description of Artificial Sequence: Synthetic oligonucleotide
  Sense strand starting at position 1030 of SEQ ID NO: 914499
uguaauggucuccaagaau

SEQ ID NO: 1008629 - RNA, 19 nt, Artificial Sequence
  Description of Artificial Sequence: Synthetic oligonucleotide
  Antisense strand to SEQ ID NO: 1008628
auucuuggagaccauuaca

SEQ ID NO: 1008630 - RNA, 19 nt, Artificial Sequence
  Description of Artificial Sequence: Synthetic oligonucleotide
  Sense strand starting at position 1082 of SEQ ID NO: 914499
cgacaccacuggcuuuaaa

SEQ ID NO: 1008631 - RNA, 19 nt, Artificial Sequence
  Description of Artificial Sequence: Synthetic oligonucleotide
  Antisense strand to SEQ ID NO: 1008630
uuuaaagccaguggugucg

SEQ ID NO: 1008632 - RNA, 19 nt, Artificial Sequence
  Description of Artificial Sequence: Synthetic oligonucleotide
  Sense strand starting at position 1105 of SEQ ID NO: 914499
aagccuggucccuagcgaa

SEQ ID NO: 1008633 - RNA, 19 nt, Artificial Sequence
  Description of Artificial Sequence: Synthetic oligonucleotide
  Antisense strand to SEQ ID NO: 1008632
uucgcuagggaccaggcuu

SEQ ID NO: 1008634 - RNA, 19 nt, Artificial Sequence
  Description of Artificial Sequence: Synthetic oligonucleotide
  Sense strand starting at position 1122 of SEQ ID NO: 914499
aagaaagcgcuuuaaugug

SEQ ID NO: 1008635 - RNA, 19 nt, Artificial Sequence
  Description of Artificial Sequence: Synthetic oligonucleotide
  Antisense strand to SEQ ID NO: 1008634
cacauuaaagcgcuuucuu

SEQ ID NO: 1008636 - RNA, 19 nt, Artificial Sequence
  Description of Artificial Sequence: Synthetic oligonucleotide
  Sense strand starting at position 1159 of SEQ ID NO: 914499
gcgagauuccugcccagcu

SEQ ID NO: 1008637 - RNA, 19 nt, Artificial Sequence
  Description of Artificial Sequence: Synthetic oligonucleotide
  Antisense strand to SEQ ID NO: 1008636
agcugggcaggaaucucgc

SEQ ID NO: 1008638 - RNA, 19 nt, Artificial Sequence
  Description of Artificial Sequence: Synthetic oligonucleotide
  Sense strand starting at position 2275 of SEQ ID NO: 914499
ggagcauaauaagauauuu

SEQ ID NO: 1008639 - RNA, 19 nt, Artificial Sequence
  Description of Artificial Sequence: Synthetic oligonucleotide
  Antisense strand to SEQ ID NO: 1008638
aaauaucuuauuaugcucc

SEQ ID NO: 1008640 - RNA, 19 nt, Artificial Sequence
  Description of Artificial Sequence: Synthetic oligonucleotide
  Sense strand starting at position 2399 of SEQ ID NO: 914499
uuugcugggaugugaauau

SEQ ID NO: 1008641 - RNA, 19 nt, Artificial Sequence
  Description of Artificial Sequence: Synthetic oligonucleotide
  Antisense strand to SEQ ID NO: 1008640
auauucacaucccagcaaa

SEQ ID NO: 1008642 - RNA, 19 nt, Artificial Sequence
  Description of Artificial Sequence: Synthetic oligonucleotide
  Sense strand starting at position 2403 of SEQ ID NO: 914499
cugggaugugaauaugugu

SEQ ID NO: 1008643 - RNA, 19 nt, Artificial Sequence
  Description of Artificial Sequence: Synthetic oligonucleotide
  Antisense strand to SEQ ID NO: 1008642
acacauauucacaucccag

SEQ ID NO: 1008644 - RNA, 19 nt, Artificial Sequence
  Description of Artificial Sequence: Synthetic oligonucleotide
  Sense strand starting at position 2448 of SEQ ID NO: 914499
gcaagauaaucagugugaa

SEQ ID NO: 1008645 - RNA, 19 nt, Artificial Sequence
  Description of Artificial Sequence: Synthetic oligonucleotide
  Antisense strand to SEQ ID NO: 1008644
uucacacugauuaucuugc

SEQ ID NO: 1008646 - RNA, 19 nt, Artificial Sequence
  Description of Artificial Sequence: Synthetic oligonucleotide
  Sense strand starting at position 2449 of SEQ ID NO: 914499
caagauaaucagugugaac

SEQ ID NO: 1008647 - RNA, 19 nt, Artificial Sequence
  Description of Artificial Sequence: Synthetic oligonucleotide
  Antisense strand to SEQ ID NO: 1008646
guucacacugauuaucuug

SEQ ID NO: 1008648 - RNA, 19 nt, Artificial Sequence
  Description of Artificial Sequence: Synthetic oligonucleotide
  Sense strand starting at position 2595 of SEQ ID NO: 914499
cagguuaggucucuaaaga

SEQ ID NO: 1008649 - RNA, 19 nt, Artificial Sequence
  Description of Artificial Sequence: Synthetic oligonucleotide
  Antisense strand to SEQ ID NO: 1008648
ucuuuagagaccuaaccug

SEQ ID NO: 1008650 - RNA, 19 nt, Artificial Sequence
  Description of Artificial Sequence: Synthetic oligonucleotide
  Sense strand starting at position 2611 of SEQ ID NO: 914499
agacuuccuccugaguuac

SEQ ID NO: 1008651 - RNA, 19 nt, Artificial Sequence
  Description of Artificial Sequence: Synthetic oligonucleotide
  Antisense strand to SEQ ID NO: 1008650
guaacucaggaggaagucu

SEQ ID NO: 1008652 - RNA, 19 nt, Artificial Sequence
  Description of Artificial Sequence: Synthetic oligonucleotide
  Sense strand starting at position 2630 of SEQ ID NO: 914499
ucuggaaucccugggucua

SEQ ID NO: 1008653 - RNA, 19 nt, Artificial Sequence
  Description of Artificial Sequence: Synthetic oligonucleotide
  Antisense strand to SEQ ID NO: 1008652
uagacccagggauuccaga

SEQ ID NO: 1008654 - RNA, 19 nt, Artificial Sequence
  Description of Artificial Sequence: Synthetic oligonucleotide
  Sense strand starting at position 2632 of SEQ ID NO: 914499
uggaaucccugggucuaga

SEQ ID NO: 1008655 - RNA, 19 nt, Artificial Sequence
  Description of Artificial Sequence: Synthetic oligonucleotide
  Antisense strand to SEQ ID NO: 1008654
ucuagacccagggauucca

SEQ ID NO: 1008656 - RNA, 19 nt, Artificial Sequence
  Description of Artificial Sequence: Synthetic oligonucleotide
  Sense strand starting at position 2721 of SEQ ID NO: 914499
gaccuugugaggcaguuaa

SEQ ID NO: 1008657 - RNA, 19 nt, Artificial Sequence
  Description of Artificial Sequence: Synthetic oligonucleotide
  Antisense strand to SEQ ID NO: 1008656
uuaacugccucacaagguc

SEQ ID NO: 1008658 - RNA, 19 nt, Artificial Sequence
  Description of Artificial Sequence: Synthetic oligonucleotide
  Sense strand starting at position 2731 of SEQ ID NO: 914499
ggcaguuaaaugcagauua

SEQ ID NO: 1008659 - RNA, 19 nt, Artificial Sequence
  Description of Artificial Sequence: Synthetic oligonucleotide
  Antisense strand to SEQ ID NO: 1008658
uaaucugcauuuaacugcc

SEQ ID NO: 1008660 - RNA, 19 nt, Artificial Sequence
  Description of Artificial Sequence: Synthetic oligonucleotide
  Sense strand starting at position 2758 of SEQ ID NO: 914499
aacuuuguucuggaagcuu

SEQ ID NO: 1008661 - RNA, 19 nt, Artificial Sequence
  Description of Artificial Sequence: Synthetic oligonucleotide
  Antisense strand to SEQ ID NO: 1008660
aagcuuccagaacaaaguu

SEQ ID NO: 1008662 - RNA, 19 nt, Artificial Sequence
  Description of Artificial Sequence: Synthetic oligonucleotide
  Sense strand starting at position 2804 of SEQ ID NO: 914499
augggaugguuucucucua

SEQ ID NO: 1008663 - RNA, 19 nt, Artificial Sequence
  Description of Artificial Sequence: Synthetic oligonucleotide
  Antisense strand to SEQ ID NO: 1008662
uagagagaaaccaucccau

SEQ ID NO: 1008664 - RNA, 19 nt, Artificial Sequence
  Description of Artificial Sequence: Synthetic oligonucleotide
  Sense strand starting at position 2805 of SEQ ID NO: 914499
ugggaugguuucucucuaa

SEQ ID NO: 1008665 - RNA, 19 nt, Artificial Sequence
  Description of Artificial Sequence: Synthetic oligonucleotide
  Antisense strand to SEQ ID NO: 1008664
uuagagagaaaccauccca

SEQ ID NO: 1008666 - RNA, 19 nt, Artificial Sequence
  Description of Artificial Sequence: Synthetic oligonucleotide
  Sense strand starting at position 2826 of SEQ ID NO: 914499
ucaucuggcuucccagaga

SEQ ID NO: 1008667 - RNA, 19 nt, Artificial Sequence
  Description of Artificial Sequence: Synthetic oligonucleotide
  Antisense strand to SEQ ID NO: 1008666
ucucugggaagccagauga

SEQ ID NO: 1008668 - RNA, 19 nt, Artificial Sequence
  Description of Artificial Sequence: Synthetic oligonucleotide
  Sense strand starting at position 2829 of SEQ ID NO: 914499
ucuggcuucccagagaaua

SEQ ID NO: 1008669 - RNA, 19 nt, Artificial Sequence
  Description of Artificial Sequence: Synthetic oligonucleotide
  Antisense strand to SEQ ID NO: 1008668
uauucucugggaagccaga

SEQ ID NO: 1008670 - RNA, 19 nt, Artificial Sequence
  Description of Artificial Sequence: Synthetic oligonucleotide
  Sense strand starting at position 2978 of SEQ ID NO: 914499
gguaccauauaguccuuaa

SEQ ID NO: 1008671 - RNA, 19 nt, Artificial Sequence
  Description of Artificial Sequence: Synthetic oligonucleotide
  Antisense strand to SEQ ID NO: 1008670
uuaaggacuauaugguacc

SEQ ID NO: 1008672 - RNA, 19 nt, Artificial Sequence
  Description of Artificial Sequence: Synthetic oligonucleotide
  Sense strand starting at position 3016 of SEQ ID NO: 914499
ccuaauuguacuggguagu

SEQ ID NO: 1008673 - RNA, 19 nt, Artificial Sequence
  Description of Artificial Sequence: Synthetic oligonucleotide
  Antisense strand to SEQ ID NO: 1008672
acuacccaguacaauuagg

SEQ ID NO: 1008674 - RNA, 19 nt, Artificial Sequence
  Description of Artificial Sequence: Synthetic oligonucleotide
  Sense strand starting at position 3017 of SEQ ID NO: 914499
cuaauuguacuggguaguu

SEQ ID NO: 1008675 - RNA, 19 nt, Artificial Sequence
  Description of Artificial Sequence: Synthetic oligonucleotide
  Antisense strand to SEQ ID NO: 1008674
aacuacccaguacaauuag

SEQ ID NO: 1008676 - RNA, 19 nt, Artificial Sequence
  Description of Artificial Sequence: Synthetic oligonucleotide
  Sense strand starting at position 3053 of SEQ ID NO: 914499
gcugauauaugaucuuguu

SEQ ID NO: 1008677 - RNA, 19 nt, Artificial Sequence
  Description of Artificial Sequence: Synthetic oligonucleotide
  Antisense strand to SEQ ID NO: 1008676
aacaagaucauauaucagc

SEQ ID NO: 1008678 - RNA, 19 nt, Artificial Sequence
  Description of Artificial Sequence: Synthetic oligonucleotide
  Sense strand starting at position 3059 of SEQ ID NO: 914499
auaugaucuuguucuuguu

SEQ ID NO: 1008679 - RNA, 19 nt, Artificial Sequence
  Description of Artificial Sequence: Synthetic oligonucleotide
  Antisense strand to SEQ ID NO: 1008678
aacaagaacaagaucauau

SEQ ID NO: 1008680 - RNA, 19 nt, Artificial Sequence
  Description of Artificial Sequence: Synthetic oligonucleotide
  Sense strand starting at position 3061 of SEQ ID NO: 914499
augaucuuguucuuguuaa

SEQ ID NO: 1008681 - RNA, 19 nt, Artificial Sequence
  Description of Artificial Sequence: Synthetic oligonucleotide
  Antisense strand to SEQ ID NO: 1008680
uuaacaagaacaagaucau

SEQ ID NO: 1008682 - RNA, 19 nt, Artificial Sequence
  Description of Artificial Sequence: Synthetic oligonucleotide
  Sense strand starting at position 3085 of SEQ ID NO: 914499
uuauguguaguugacugaa

SEQ ID NO: 1008683 - RNA, 19 nt, Artificial Sequence
  Description of Artificial Sequence: Synthetic oligonucleotide
  Antisense strand to SEQ ID NO: 1008682
uucagucaacuacacauaa

SEQ ID NO: 1008684 - RNA, 19 nt, Artificial Sequence
  Description of Artificial Sequence: Synthetic oligonucleotide
  Sense strand starting at position 3197 of SEQ ID NO: 914499
cagagagucugucuccuuu

SEQ ID NO: 1008685 - RNA, 19 nt, Artificial Sequence
  Description of Artificial Sequence: Synthetic oligonucleotide
  Antisense strand to SEQ ID NO: 1008684
aaaggagacagacucucug

SEQ ID NO: 1008686 - RNA, 19 nt, Artificial Sequence
  Description of Artificial Sequence: Synthetic oligonucleotide
  Sense strand starting at position 3295 of SEQ ID NO: 914499
ucaguccagucuucccuaa

SEQ ID NO: 1008687 - RNA, 19 nt, Artificial Sequence
  Description of Artificial Sequence: Synthetic oligonucleotide
  Antisense strand to SEQ ID NO: 1008686
uuagggaagacuggacuga

SEQ ID NO: 1008688 - RNA, 19 nt, Artificial Sequence
  Description of Artificial Sequence: Synthetic oligonucleotide
  Sense strand starting at position 3765 of SEQ ID NO: 914499
gacaguagcccagaaggua

SEQ ID NO: 1008689 - RNA, 19 nt, Artificial Sequence
  Description of Artificial Sequence: Synthetic oligonucleotide
  Antisense strand to SEQ ID NO: 1008688
uaccuucugggcuacuguc

SEQ ID NO: 1008690 - RNA, 19 nt, Artificial Sequence
  Description of Artificial Sequence: Synthetic oligonucleotide
  Sense strand starting at position 3841 of SEQ ID NO: 914499
uccucagggccuugauaau

SEQ ID NO: 1008691 - RNA, 19 nt, Artificial Sequence
  Description of Artificial Sequence: Synthetic oligonucleotide
  Antisense strand to SEQ ID NO: 1008690
auuaucaaggcccugagga

SEQ ID NO: 1008692 - RNA, 19 nt, Artificial Sequence
  Description of Artificial Sequence: Synthetic oligonucleotide
  Sense strand starting at position 3889 of SEQ ID NO: 914499
auuguugacuuacugaaua

SEQ ID NO: 1008693 - RNA, 19 nt, Artificial Sequence
  Description of Artificial Sequence: Synthetic oligonucleotide
  Antisense strand to SEQ ID NO: 1008692
uauucaguaagucaacaau

SEQ ID NO: 1008694 - RNA, 19 nt, Artificial Sequence
  Description of Artificial Sequence: Synthetic oligonucleotide
  Sense strand starting at position 3906 of SEQ ID NO: 914499
uagguauaucuaggugcca

SEQ ID NO: 1008695 - RNA, 19 nt, Artificial Sequence
  Description of Artificial Sequence: Synthetic oligonucleotide
  Antisense strand to SEQ ID NO: 1008694
uggcaccuagauauaccua

SEQ ID NO: 1008696 - RNA, 19 nt, Artificial Sequence
  Description of Artificial Sequence: Synthetic oligonucleotide
  Sense strand starting at position 3950 of SEQ ID NO: 914499
uuuagaagcuucuuggaac

SEQ ID NO: 1008697 - RNA, 19 nt, Artificial Sequence
  Description of Artificial Sequence: Synthetic oligonucleotide
  Antisense strand to SEQ ID NO: 1008696
guuccaagaagcuucuaaa

SEQ ID NO: 1008698 - RNA, 19 nt, Artificial Sequence
  Description of Artificial Sequence: Synthetic oligonucleotide
  Sense strand starting at position 301 of SEQ ID NO: 914500
acuagaauguugcuaaucu

SEQ ID NO: 1008699 - RNA, 19 nt, Artificial Sequence
  Description of Artificial Sequence: Synthetic oligonucleotide
  Antisense strand to SEQ ID NO: 1008698
agauuagcaacauucuagu

SEQ ID NO: 1008700 - RNA, 19 nt, Artificial Sequence
  Description of Artificial Sequence: Synthetic oligonucleotide
  Sense strand starting at position 331 of SEQ ID NO: 914500
ucuauucuagaguggguua

SEQ ID NO: 1008701 - RNA, 19 nt, Artificial Sequence
  Description of Artificial Sequence: Synthetic oligonucleotide
  Antisense strand to SEQ ID NO: 1008700
uaacccacucuagaauaga

SEQ ID NO: 1008702 - RNA, 19 nt, Artificial Sequence
  Description of Artificial Sequence: Synthetic oligonucleotide
  Sense strand starting at position 332 of SEQ ID NO: 914500
cuauucuagaguggguuaa

SEQ ID NO: 1008703 - RNA, 19 nt, Artificial Sequence
  Description of Artificial Sequence: Synthetic oligonucleotide
  Antisense strand to SEQ ID NO: 1008702
uuaacccacucuagaauag

SEQ ID NO: 1008704 - RNA, 19 nt, Artificial Sequence
  Description of Artificial Sequence: Synthetic oligonucleotide
  Sense strand starting at position 334 of SEQ ID NO: 914500
auucuagaguggguuaaca

SEQ ID NO: 1008705 - RNA, 19 nt, Artificial Sequence
  Description of Artificial Sequence: Synthetic oligonucleotide
  Antisense strand to SEQ ID NO: 1008704
uguuaacccacucuagaau

SEQ ID NO: 1008706 - RNA, 19 nt, Artificial Sequence
  Description of Artificial Sequence: Synthetic oligonucleotide
  Sense strand starting at position 359 of SEQ ID NO: 914500
cccaauggugcccagaaua

SEQ ID NO: 1008707 - RNA, 19 nt, Artificial Sequence
  Description of Artificial Sequence: Synthetic oligonucleotide
  Antisense strand to SEQ ID NO: 1008706
uauucugggcaccauuggg

SEQ ID NO: 1008708 - RNA, 19 nt, Artificial Sequence
  Description of Artificial Sequence: Synthetic oligonucleotide
  Sense strand starting at position 426 of SEQ ID NO: 914500
aucuguauuacggaggcaa

SEQ ID NO: 1008709 - RNA, 19 nt, Artificial Sequence
  Description of Artificial Sequence: Synthetic oligonucleotide
  Antisense strand to SEQ ID NO: 1008708
uugccuccguaauacagau

SEQ ID NO: 1008710 - RNA, 19 nt, Artificial Sequence
  Description of Artificial Sequence: Synthetic oligonucleotide
  Sense strand starting at position 586 of SEQ ID NO: 914500
agagaaaugucauccuuug

SEQ ID NO: 1008711 - RNA, 19 nt, Artificial Sequence
  Description of Artificial Sequence: Synthetic oligonucleotide
  Antisense strand to SEQ ID NO: 1008710
caaaggaugacauuucucu

SEQ ID NO: 1008712 - RNA, 19 nt, Artificial Sequence
  Description of Artificial Sequence: Synthetic oligonucleotide
  Sense strand starting at position 1215 of SEQ ID NO: 914500
gagauauggucccuuaaca

SEQ ID NO: 1008713 - RNA, 19 nt, Artificial Sequence
  Description of Artificial Sequence: Synthetic oligonucleotide
  Antisense strand to SEQ ID NO: 1008712
uguuaagggaccauaucuc

SEQ ID NO: 1008714 - RNA, 19 nt, Artificial Sequence
  Description of Artificial Sequence: Synthetic oligonucleotide
  Sense strand starting at position 1271 of SEQ ID NO: 914500
gcauguauacccgugugua

SEQ ID NO: 1008715 - RNA, 19 nt, Artificial Sequence
  Description of Artificial Sequence: Synthetic oligonucleotide
  Antisense strand to SEQ ID NO: 1008714
uacacacggguauacaugc

SEQ ID NO: 1008716 - RNA, 19 nt, Artificial Sequence
  Description of Artificial Sequence: Synthetic oligonucleotide
  Sense strand starting at position 1315 of SEQ ID NO: 914500
cugauauugugucugaaga

SEQ ID NO: 1008717 - RNA, 19 nt, Artificial Sequence
  Description of Artificial Sequence: Synthetic oligonucleotide
  Antisense strand to SEQ ID NO: 1008716
ucuucagacacaauaucag

SEQ ID NO: 1008718 - RNA, 19 nt, Artificial Sequence
  Description of Artificial Sequence: Synthetic oligonucleotide
  Sense strand starting at position 1316 of SEQ ID NO: 914500
ugauauugugucugaagag

SEQ ID NO: 1008719 - RNA, 19 nt, Artificial Sequence
  Description of Artificial Sequence: Synthetic oligonucleotide
  Antisense strand to SEQ ID NO: 1008718
cucuucagacacaauauca

SEQ ID NO: 1008720 - RNA, 19 nt, Artificial Sequence
  Description of Artificial Sequence: Synthetic oligonucleotide
  Sense strand starting at position 1414 of SEQ ID NO: 914500
aagccaucuggguacacau

SEQ ID NO: 1008721 - RNA, 19 nt, Artificial Sequence
  Description of Artificial Sequence: Synthetic oligonucleotide
  Antisense strand to SEQ ID NO: 1008720
auguguacccagauggcuu

SEQ ID NO: 1008722 - RNA, 19 nt, Artificial Sequence
  Description of Artificial Sequence: Synthetic oligonucleotide
  Sense strand starting at position 1554 of SEQ ID NO: 914500
ucagcaguucccuggagaa

SEQ ID NO: 1008723 - RNA, 19 nt, Artificial Sequence
  Description of Artificial Sequence: Synthetic oligonucleotide
  Antisense strand to SEQ ID NO: 1008722
uucuccagggaacugcuga

SEQ ID NO: 1008724 - RNA, 19 nt, Artificial Sequence
  Description of Artificial Sequence: Synthetic oligonucleotide
  Sense strand starting at position 1556 of SEQ ID NO: 914500
agcaguucccuggagaagu

SEQ ID NO: 1008725 - RNA, 19 nt, Artificial Sequence
  Description of Artificial Sequence: Synthetic oligonucleotide
  Antisense strand to SEQ ID NO: 1008724
acuucuccagggaacugcu

SEQ ID NO: 1008726 - RNA, 19 nt, Artificial Sequence
  Description of Artificial Sequence: Synthetic oligonucleotide
  Sense strand starting at position 1558 of SEQ ID NO: 914500
caguucccuggagaaguau

SEQ ID NO: 1008727 - RNA, 19 nt, Artificial Sequence
  Description of Artificial Sequence: Synthetic oligonucleotide
  Antisense strand to SEQ ID NO: 1008726
auacuucuccagggaacug

SEQ ID NO: 1008728 - RNA, 19 nt, Artificial Sequence
  Description of Artificial Sequence: Synthetic oligonucleotide
  Sense strand starting at position 1601 of SEQ ID NO: 914500
gaggcaagucuauggaaau

SEQ ID NO: 1008729 - RNA, 19 nt, Artificial Sequence
  Description of Artificial Sequence: Synthetic oligonucleotide
  Antisense strand to SEQ ID NO: 1008728
auuuccauagacuugccuc

SEQ ID NO: 1008730 - RNA, 19 nt, Artificial Sequence
  Description of Artificial Sequence: Synthetic oligonucleotide
  Sense strand starting at position 1814 of SEQ ID NO: 914500
ggagguaguuacucucauu

SEQ ID NO: 1008731 - RNA, 19 nt, Artificial Sequence
  Description of Artificial Sequence: Synthetic oligonucleotide
  Antisense strand to SEQ ID NO: 1008730
aaugagaguaacuaccucc

SEQ ID NO: 1008732 - RNA, 19 nt, Artificial Sequence
  Description of Artificial Sequence: Synthetic oligonucleotide
  Sense strand starting at position 2179 of SEQ ID NO: 914500
uccauuggcuggccagaaa

SEQ ID NO: 1008733 - RNA, 19 nt, Artificial Sequence
  Description of Artificial Sequence: Synthetic oligonucleotide
  Antisense strand to SEQ ID NO: 1008732
uuucuggccagccaaugga

SEQ ID NO: 1008734 - RNA, 19 nt, Artificial Sequence
  Description of Artificial Sequence: Synthetic oligonucleotide
  Sense strand starting at position 2524 of SEQ ID NO: 914500
ccagcugcgauacagaaua

SEQ ID NO: 1008735 - RNA, 19 nt, Artificial Sequence
  Description of Artificial Sequence: Synthetic oligonucleotide
  Antisense strand to SEQ ID NO: 1008734
uauucuguaucgcagcugg

SEQ ID NO: 1008736 - RNA, 19 nt, Artificial Sequence
  Description of Artificial Sequence: Synthetic oligonucleotide
  Sense strand starting at position 2526 of SEQ ID NO: 914500
agcugcgauacagaauauu

SEQ ID NO: 1008737 - RNA, 19 nt, Artificial Sequence
  Description of Artificial Sequence: Synthetic oligonucleotide
  Antisense strand to SEQ ID NO: 1008736
aauauucuguaucgcagcu

SEQ ID NO: 1008738 - RNA, 19 nt, Artificial Sequence
  Description of Artificial Sequence: Synthetic oligonucleotide
  Sense strand starting at position 2652 of SEQ ID NO: 914500
uagagauagcauggguuaa

SEQ ID NO: 1008739 - RNA, 19 nt, Artificial Sequence
  Description of Artificial Sequence: Synthetic oligonucleotide
  Antisense strand to SEQ ID NO: 1008738
uuaacccaugcuaucucua

SEQ ID NO: 1008740 - RNA, 19 nt, Artificial Sequence
  Description of Artificial Sequence: Synthetic oligonucleotide
  Sense strand starting at position 2653 of SEQ ID NO: 914500
agagauagcauggguuaaa

SEQ ID NO: 1008741 - RNA, 19 nt, Artificial Sequence
  Description of Artificial Sequence: Synthetic oligonucleotide
  Antisense strand to SEQ ID NO: 1008740
uuuaacccaugcuaucucu

SEQ ID NO: 1008742 - RNA, 19 nt, Artificial Sequence
  Description of Artificial Sequence: Synthetic oligonucleotide
  Sense strand starting at position 2654 of SEQ ID NO: 914500
gagauagcauggguuaaau

SEQ ID NO: 1008743 - RNA, 19 nt, Artificial Sequence
  Description of Artificial Sequence: Synthetic oligonucleotide
  Antisense strand to SEQ ID NO: 1008742
auuuaacccaugcuaucuc

SEQ ID NO: 1008744 - RNA, 19 nt, Artificial Sequence
  Description of Artificial Sequence: Synthetic oligonucleotide
  Sense strand starting at position 2706 of SEQ ID NO: 914500
ugggucaugcuacaacaaa

SEQ ID NO: 1008745 - RNA, 19 nt, Artificial Sequence
  Description of Artificial Sequence: Synthetic oligonucleotide
  Antisense strand to SEQ ID NO: 1008744
uuuguuguagcaugaccca

SEQ ID NO: 1008746 - RNA, 19 nt, Artificial Sequence
  Description of Artificial Sequence: Synthetic oligonucleotide
  Sense strand starting at position 2933 of SEQ ID NO: 914500
ugaaauguucugcaauuaa

SEQ ID NO: 1008747 - RNA, 19 nt, Artificial Sequence
  Description of Artificial Sequence: Synthetic oligonucleotide
  Antisense strand to SEQ ID NO: 1008746
uuaauugcagaacauuuca

SEQ ID NO: 1008748 - RNA, 19 nt, Artificial Sequence
  Description of Artificial Sequence: Synthetic oligonucleotide
  Sense strand starting at position 2964 of SEQ ID NO: 914500
guuacacaacucuggaaua

SEQ ID NO: 1008749 - RNA, 19 nt, Artificial Sequence
  Description of Artificial Sequence: Synthetic oligonucleotide
  Antisense strand to SEQ ID NO: 1008748
uauuccagaguuguguaac

SEQ ID NO: 1008750 - RNA, 19 nt, Artificial Sequence
  Description of Artificial Sequence: Synthetic oligonucleotide
  Sense strand starting at position 3098 of SEQ ID NO: 914500
guuauaagguaguuaagag

SEQ ID NO: 1008751 - RNA, 19 nt, Artificial Sequence
  Description of Artificial Sequence: Synthetic oligonucleotide
  Antisense strand to SEQ ID NO: 1008750
cucuuaacuaccuuauaac

SEQ ID NO: 1008752 - RNA, 19 nt, Artificial Sequence
  Description of Artificial Sequence: Synthetic oligonucleotide
  Sense strand starting at position 3099 of SEQ ID NO: 914500
uuauaagguaguuaagagu

SEQ ID NO: 1008753 - RNA, 19 nt, Artificial Sequence
  Description of Artificial Sequence: Synthetic oligonucleotide
  Antisense strand to SEQ ID NO: 1008752
acucuuaacuaccuuauaa

SEQ ID NO: 1008754 - RNA, 19 nt, Artificial Sequence
  Description of Artificial Sequence: Synthetic oligonucleotide
  Sense strand starting at position 3145 of SEQ ID NO: 914500
guuauauauccuggaguca

SEQ ID NO: 1008755 - RNA, 19 nt, Artificial Sequence
  Description of Artificial Sequence: Synthetic oligonucleotide
  Antisense strand to SEQ ID NO: 1008754
ugacuccaggauauauaac

SEQ ID NO: 1008756 - RNA, 19 nt, Artificial Sequence
  Description of Artificial Sequence: Synthetic oligonucleotide
  Sense strand starting at position 3192 of SEQ ID NO: 914500
ugcagagcuccugauuaga

SEQ ID NO: 1008757 - RNA, 19 nt, Artificial Sequence
  Description of Artificial Sequence: Synthetic oligonucleotide
  Antisense strand to SEQ ID NO: 1008756
ucuaaucaggagcucugca

SEQ ID NO: 1008758 - RNA, 19 nt, Artificial Sequence
  Description of Artificial Sequence: Synthetic oligonucleotide
  Sense strand starting at position 3194 of SEQ ID NO: 914500
cagagcuccugauuagauu

SEQ ID NO: 1008759 - RNA, 19 nt, Artificial Sequence
  Description of Artificial Sequence: Synthetic oligonucleotide
  Antisense strand to SEQ ID NO: 1008758
aaucuaaucaggagcucug

SEQ ID NO: 1008760 - RNA, 19 nt, Artificial Sequence
  Description of Artificial Sequence: Synthetic oligonucleotide
  Sense strand starting at position 3200 of SEQ ID NO: 914500
uccugauuagauuacaguu

SEQ ID NO: 1008761 - RNA, 19 nt, Artificial Sequence
  Description of Artificial Sequence: Synthetic oligonucleotide
  Antisense strand to SEQ ID NO: 1008760
aacuguaaucuaaucagga

SEQ ID NO: 1008762 - RNA, 19 nt, Artificial Sequence
  Description of Artificial Sequence: Synthetic oligonucleotide
  Sense strand starting at position 3303 of SEQ ID NO: 914500
ucaaacgggaccuguuuaa

SEQ ID NO: 1008763 - RNA, 19 nt, Artificial Sequence
  Description of Artificial Sequence: Synthetic oligonucleotide
  Antisense strand to SEQ ID NO: 1008762
uuaaacaggucccguuuga

SEQ ID NO: 1008764 - RNA, 19 nt, Artificial Sequence
  Description of Artificial Sequence: Synthetic oligonucleotide
  Sense strand starting at position 3536 of SEQ ID NO: 914500
aacagaagugcgugagaau

SEQ ID NO: 1008765 - RNA, 19 nt, Artificial Sequence
  Description of Artificial Sequence: Synthetic oligonucleotide
  Antisense strand to SEQ ID NO: 1008764
auucucacgcacuucuguu

SEQ ID NO: 1008766 - RNA, 19 nt, Artificial Sequence
  Description of Artificial Sequence: Synthetic oligonucleotide
  Sense strand starting at position 3537 of SEQ ID NO: 914500
acagaagugcgugagaaua

SEQ ID NO: 1008767 - RNA, 19 nt, Artificial Sequence
  Description of Artificial Sequence: Synthetic oligonucleotide
  Antisense strand to SEQ ID NO: 1008766
uauucucacgcacuucugu

SEQ ID NO: 1008768 - RNA, 19 nt, Artificial Sequence
  Description of Artificial Sequence: Synthetic oligonucleotide
  Sense strand starting at position 3567 of SEQ ID NO: 914500
gaaacacuggccugaguua

SEQ ID NO: 1008769 - RNA, 19 nt, Artificial Sequence
  Description of Artificial Sequence: Synthetic oligonucleotide
  Antisense strand to SEQ ID NO: 1008768
uaacucaggccaguguuuc

SEQ ID NO: 1008770 - RNA, 19 nt, Artificial Sequence
  Description of Artificial Sequence: Synthetic oligonucleotide
  Sense strand starting at position 3801 of SEQ ID NO: 914500
uucccugagguauggagau

SEQ ID NO: 1008771 - RNA, 19 nt, Artificial Sequence
  Description of Artificial Sequence: Synthetic oligonucleotide
  Antisense strand to SEQ ID NO: 1008770
aucuccauaccucagggaa

SEQ ID NO: 1008772 - RNA, 19 nt, Artificial Sequence
  Description of Artificial Sequence: Synthetic oligonucleotide
  Sense strand starting at position 3911 of SEQ ID NO: 914500
acuauagggcucuguaaga

SEQ ID NO: 1008773 - RNA, 19 nt, Artificial Sequence
  Description of Artificial Sequence: Synthetic oligonucleotide
  Antisense strand to SEQ ID NO: 1008772
ucuuacagagcccuauagu

SEQ ID NO: 1008774 - RNA, 19 nt, Artificial Sequence
  Description of Artificial Sequence: Synthetic oligonucleotide
  Sense strand starting at position 3922 of SEQ ID NO: 914500
cuguaagacugagcaauau

SEQ ID NO: 1008775 - RNA, 19 nt, Artificial Sequence
  Description of Artificial Sequence: Synthetic oligonucleotide
  Antisense strand to SEQ ID NO: 1008774
auauugcucagucuuacag

SEQ ID NO: 1008776 - RNA, 19 nt, Artificial Sequence
  Description of Artificial Sequence: Synthetic oligonucleotide
  Sense strand starting at position 3937 of SEQ ID NO: 914500
auaugugcccuugaggcaa

SEQ ID NO: 1008777 - RNA, 19 nt, Artificial Sequence
  Description of Artificial Sequence: Synthetic oligonucleotide
  Antisense strand to SEQ ID NO: 1008776
uugccucaagggcacauau

SEQ ID NO: 1008778 - RNA, 19 nt, Artificial Sequence
  Description of Artificial Sequence: Synthetic oligonucleotide
  Sense strand starting at position 27 of SEQ ID NO: 914501
caccgagaaucagggcuau

SEQ ID NO: 1008779 - RNA, 19 nt, Artificial Sequence
  Description of Artificial Sequence: Synthetic oligonucleotide
  Antisense strand to SEQ ID NO: 1008778
auagcccugauucucggug

SEQ ID NO: 1008780 - RNA, 19 nt, Artificial Sequence
  Description of Artificial Sequence: Synthetic oligonucleotide
  Sense strand starting at position 81 of SEQ ID NO: 914501
gguugaaguucucacagga

SEQ ID NO: 1008781 - RNA, 19 nt, Artificial Sequence
  Description of Artificial Sequence: Synthetic oligonucleotide
  Antisense strand to SEQ ID NO: 1008780
uccugugagaacuucaacc

SEQ ID NO: 1008782 - RNA, 19 nt, Artificial Sequence
  Description of Artificial Sequence: Synthetic oligonucleotide
  Sense strand starting at position 222 of SEQ ID NO: 914501
ugcugugguuguugagaag

SEQ ID NO: 1008783 - RNA, 19 nt, Artificial Sequence
  Description of Artificial Sequence: Synthetic oligonucleotide
  Antisense strand to SEQ ID NO: 1008782
cuucucaacaaccacagca

SEQ ID NO: 1008784 - RNA, 19 nt, Artificial Sequence
  Description of Artificial Sequence: Synthetic oligonucleotide
  Sense strand starting at position 953 of SEQ ID NO: 914501
aggagagcauuccugcuuu

SEQ ID NO: 1008785 - RNA, 19 nt, Artificial Sequence
  Description of Artificial Sequence: Synthetic oligonucleotide
  Antisense strand to SEQ ID NO: 1008784
aaagcaggaaugcucuccu

SEQ ID NO: 1008786 - RNA, 19 nt, Artificial Sequence
  Description of Artificial Sequence: Synthetic oligonucleotide
  Sense strand starting at position 960 of SEQ ID NO: 914501
cauuccugcuuugcagaga

SEQ ID NO: 1008787 - RNA, 19 nt, Artificial Sequence
  Description of Artificial Sequence: Synthetic oligonucleotide
  Antisense strand to SEQ ID NO: 1008786
ucucugcaaagcaggaaug

SEQ ID NO: 1008788 - RNA, 19 nt, Artificial Sequence
  Description of Artificial Sequence: Synthetic oligonucleotide
  Sense strand starting at position 961 of SEQ ID NO: 914501
auuccugcuuugcagagau

SEQ ID NO: 1008789 - RNA, 19 nt, Artificial Sequence
  Description of Artificial Sequence: Synthetic oligonucleotide
  Antisense strand to SEQ ID NO: 1008788
aucucugcaaagcaggaau

SEQ ID NO: 1008790 - RNA, 19 nt, Artificial Sequence
  Description of Artificial Sequence: Synthetic oligonucleotide
  Sense strand starting at position 1113 of SEQ ID NO: 914501
gugucucuccaggaaguca

SEQ ID NO: 1008791 - RNA, 19 nt, Artificial Sequence
  Description of Artificial Sequence: Synthetic oligonucleotide
  Antisense strand to SEQ ID NO: 1008790
ugacuuccuggagagacac

SEQ ID NO: 1008792 - RNA, 19 nt, Artificial Sequence
  Description of Artificial Sequence: Synthetic oligonucleotide
  Sense strand starting at position 1269 of SEQ ID NO: 914501
gaggguuccuggcguuaaa

SEQ ID NO: 1008793 - RNA, 19 nt, Artificial Sequence
  Description of Artificial Sequence: Synthetic oligonucleotide
  Antisense strand to SEQ ID NO: 1008792
uuuaacgccaggaacccuc

SEQ ID NO: 1008794 - RNA, 19 nt, Artificial Sequence
  Description of Artificial Sequence: Synthetic oligonucleotide
  Sense strand starting at position 1360 of SEQ ID NO: 914501
gugcccagauucucaauga

SEQ ID NO: 1008795 - RNA, 19 nt, Artificial Sequence
  Description of Artificial Sequence: Synthetic oligonucleotide
  Antisense strand to SEQ ID NO: 1008794
ucauugagaaucugggcac

SEQ ID NO: 1008796 - RNA, 19 nt, Artificial Sequence
  Description of Artificial Sequence: Synthetic oligonucleotide
  Sense strand starting at position 1364 of SEQ ID NO: 914501
ccagauucucaaugaccga

SEQ ID NO: 1008797 - RNA, 19 nt, Artificial Sequence
  Description of Artificial Sequence: Synthetic oligonucleotide
  Antisense strand to SEQ ID NO: 1008796
ucggucauugagaaucugg

SEQ ID NO: 1008798 - RNA, 19 nt, Artificial Sequence
  Description of Artificial Sequence: Synthetic oligonucleotide
  Sense strand starting at position 1542 of SEQ ID NO: 914501
gugcauugaccacacugaa

SEQ ID NO: 1008799 - RNA, 19 nt, Artificial Sequence
  Description of Artificial Sequence: Synthetic oligonucleotide
  Antisense strand to SEQ ID NO: 1008798
uucaguguggucaaugcac

SEQ ID NO: 1008800 - RNA, 19 nt, Artificial Sequence
  Description of Artificial Sequence: Synthetic oligonucleotide
  Sense strand starting at position 1680 of SEQ ID NO: 914501
ggcaucaaguuugcaaaga

SEQ ID NO: 1008801 - RNA, 19 nt, Artificial Sequence
  Description of Artificial Sequence: Synthetic oligonucleotide
  Antisense strand to SEQ ID NO: 1008800
ucuuugcaaacuugaugcc

SEQ ID NO: 1008802 - RNA, 19 nt, Artificial Sequence
  Description of Artificial Sequence: Synthetic oligonucleotide
  Sense strand starting at position 1771 of SEQ ID NO: 914501
ucaacugagcccuggagaa

SEQ ID NO: 1008803 - RNA, 19 nt, Artificial Sequence
  Description of Artificial Sequence: Synthetic oligonucleotide
  Antisense strand to SEQ ID NO: 1008802
uucuccagggcucaguuga

SEQ ID NO: 1008804 - RNA, 19 nt, Artificial Sequence
  Description of Artificial Sequence: Synthetic oligonucleotide
  Sense strand starting at position 1965 of SEQ ID NO: 914501
ggaggagagcucgggaguu

SEQ ID NO: 1008805 - RNA, 19 nt, Artificial Sequence
  Description of Artificial Sequence: Synthetic oligonucleotide
  Antisense strand to SEQ ID NO: 1008804
aacucccgagcucuccucc

SEQ ID NO: 1008806 - RNA, 19 nt, Artificial Sequence
  Description of Artificial Sequence: Synthetic oligonucleotide
  Sense strand starting at position 1975 of SEQ ID NO: 914501
ucgggaguuucccacaaug

SEQ ID NO: 1008807 - RNA, 19 nt, Artificial Sequence
  Description of Artificial Sequence: Synthetic oligonucleotide
  Antisense strand to SEQ ID NO: 1008806
cauugugggaaacucccga

SEQ ID NO: 1008808 - RNA, 19 nt, Artificial Sequence
  Description of Artificial Sequence: Synthetic oligonucleotide
  Sense strand starting at position 2101 of SEQ ID NO: 914501
aaacuuaggguccgagaga

SEQ ID NO: 1008809 - RNA, 19 nt, Artificial Sequence
  Description of Artificial Sequence: Synthetic oligonucleotide
  Antisense strand to SEQ ID NO: 1008808
ucucucggacccuaaguuu

SEQ ID NO: 1008810 - RNA, 19 nt, Artificial Sequence
  Description of Artificial Sequence: Synthetic oligonucleotide
  Sense strand starting at position 2342 of SEQ ID NO: 914501
agcagcaucuacuuagaau

SEQ ID NO: 1008811 - RNA, 19 nt, Artificial Sequence
  Description of Artificial Sequence: Synthetic oligonucleotide
  Antisense strand to SEQ ID NO: 1008810
auucuaaguagaugcugcu

SEQ ID NO: 1008812 - RNA, 19 nt, Artificial Sequence
  Description of Artificial Sequence: Synthetic oligonucleotide
  Sense strand starting at position 2458 of SEQ ID NO: 914501
uuccaagguucugauguga

SEQ ID NO: 1008813 - RNA, 19 nt, Artificial Sequence
  Description of Artificial Sequence: Synthetic oligonucleotide
  Antisense strand to SEQ ID NO: 1008812
ucacaucagaaccuuggaa

SEQ ID NO: 1008814 - RNA, 19 nt, Artificial Sequence
  Description of Artificial Sequence: Synthetic oligonucleotide
  Sense strand starting at position 2533 of SEQ ID NO: 914501
cagguagugucgcugggaa

SEQ ID NO: 1008815 - RNA, 19 nt, Artificial Sequence
  Description of Artificial Sequence: Synthetic oligonucleotide
  Antisense strand to SEQ ID NO: 1008814
uucccagcgacacuaccug

SEQ ID NO: 1008816 - RNA, 19 nt, Artificial Sequence
  Description of Artificial Sequence: Synthetic oligonucleotide
  Sense strand starting at position 2642 of SEQ ID NO: 914501
gggagagcuucggcucaca

SEQ ID NO: 1008817 - RNA, 19 nt, Artificial Sequence
  Description of Artificial Sequence: Synthetic oligonucleotide
  Antisense strand to SEQ ID NO: 1008816
ugugagccgaagcucuccc

SEQ ID NO: 1008818 - RNA, 19 nt, Artificial Sequence
  Description of Artificial Sequence: Synthetic oligonucleotide
  Sense strand starting at position 2763 of SEQ ID NO: 914501
gccuuaugcagaggcugaa

SEQ ID NO: 1008819 - RNA, 19 nt, Artificial Sequence
  Description of Artificial Sequence: Synthetic oligonucleotide
  Antisense strand to SEQ ID NO: 1008818
uucagccucugcauaaggc

SEQ ID NO: 1008820 - RNA, 19 nt, Artificial Sequence
  Description of Artificial Sequence: Synthetic oligonucleotide
  Sense strand starting at position 2931 of SEQ ID NO: 914501
gaccaagcuggguaaguua

SEQ ID NO: 1008821 - RNA, 19 nt, Artificial Sequence
  Description of Artificial Sequence: Synthetic oligonucleotide
  Antisense strand to SEQ ID NO: 1008820
uaacuuacccagcuugguc

SEQ ID NO: 1008822 - RNA, 19 nt, Artificial Sequence
  Description of Artificial Sequence: Synthetic oligonucleotide
  Sense strand starting at position 3226 of SEQ ID NO: 914501
ugggauuccuggcucaaca

SEQ ID NO: 1008823 - RNA, 19 nt, Artificial Sequence
  Description of Artificial Sequence: Synthetic oligonucleotide
  Antisense strand to SEQ ID NO: 1008822
uguugagccaggaauccca

SEQ ID NO: 1008824 - RNA, 19 nt, Artificial Sequence
  Description of Artificial Sequence: Synthetic oligonucleotide
  Sense strand starting at position 3539 of SEQ ID NO: 914501
gggcuagcuugaggaaugu

SEQ ID NO: 1008825 - RNA, 19 nt, Artificial Sequence
  Description of Artificial Sequence: Synthetic oligonucleotide
  Antisense strand to SEQ ID NO: 1008824
acauuccucaagcuagccc

SEQ ID NO: 1008826 - RNA, 19 nt, Artificial Sequence
  Description of Artificial Sequence: Synthetic oligonucleotide
  Sense strand starting at position 3543 of SEQ ID NO: 914501
uagcuugaggaauguaaag

SEQ ID NO: 1008827 - RNA, 19 nt, Artificial Sequence
  Description of Artificial Sequence: Synthetic oligonucleotide
  Antisense strand to SEQ ID NO: 1008826
cuuuacauuccucaagcua

SEQ ID NO: 1008828 - RNA, 19 nt, Artificial Sequence
  Description of Artificial Sequence: Synthetic oligonucleotide
  Sense strand starting at position 3555 of SEQ ID NO: 914501
uguaaagauuucugcauuu

SEQ ID NO: 1008829 - RNA, 19 nt, Artificial Sequence
  Description of Artificial Sequence: Synthetic oligonucleotide
  Antisense strand to SEQ ID NO: 1008828
aaaugcagaaaucuuuaca

SEQ ID NO: 1008830 - RNA, 19 nt, Artificial Sequence
  Description of Artificial Sequence: Synthetic oligonucleotide
  Sense strand starting at position 3586 of SEQ ID NO: 914501
agacauugaucccaacggu

SEQ ID NO: 1008831 - RNA, 19 nt, Artificial Sequence
  Description of Artificial Sequence: Synthetic oligonucleotide
  Antisense strand to SEQ ID NO: 1008830
accguugggaucaaugucu

SEQ ID NO: 1008832 - RNA, 19 nt, Artificial Sequence
  Description of Artificial Sequence: Synthetic oligonucleotide
  Sense strand starting at position 3827 of SEQ ID NO: 914501
ccgcgaugcccaggaagua

SEQ ID NO: 1008833 - RNA, 19 nt, Artificial Sequence
  Description of Artificial Sequence: Synthetic oligonucleotide
  Antisense strand to SEQ ID NO: 1008832
uacuuccugggcaucgcgg

SEQ ID NO: 1008834 - RNA, 19 nt, Artificial Sequence
  Description of Artificial Sequence: Synthetic oligonucleotide
  Sense strand starting at position 3932 of SEQ ID NO: 914501
gcaggaucuuccuguggag

SEQ ID NO: 1008835 - RNA, 19 nt, Artificial Sequence
  Description of Artificial Sequence: Synthetic oligonucleotide
  Antisense strand to SEQ ID NO: 1008834
cuccacaggaagauccugc

SEQ ID NO: 1008836 - RNA, 19 nt, Artificial Sequence
  Description of Artificial Sequence: Synthetic oligonucleotide
  Sense strand starting at position 3934 of SEQ ID NO: 914501
aggaucuuccuguggagga

SEQ ID NO: 1008837 - RNA, 19 nt, Artificial Sequence
  Description of Artificial Sequence: Synthetic oligonucleotide
  Antisense strand to SEQ ID NO: 1008836
uccuccacaggaagauccu

SEQ ID NO: 1008838 - RNA, 19 nt, Artificial Sequence
  Description of Artificial Sequence: Synthetic oligonucleotide
  Sense strand starting at position 3935 of SEQ ID NO: 914501
ggaucuuccuguggaggaa

SEQ ID NO: 1008839 - RNA, 19 nt, Artificial Sequence
  Description of Artificial Sequence: Synthetic oligonucleotide
  Antisense strand to SEQ ID NO: 1008838
uuccuccacaggaagaucc

SEQ ID NO: 1008840 - RNA, 19 nt, Artificial Sequence
  Description of Artificial Sequence: Synthetic oligonucleotide
  Sense strand starting at position 62 of SEQ ID NO: 914502
aaauguuggugggacugua

SEQ ID NO: 1008841 - RNA, 19 nt, Artificial Sequence
  Description of Artificial Sequence: Synthetic oligonucleotide
  Antisense strand to SEQ ID NO: 1008840
uacagucccaccaacauuu

SEQ ID NO: 1008842 - RNA, 19 nt, Artificial Sequence
  Description of Artificial Sequence: Synthetic oligonucleotide
  Sense strand starting at position 434 of SEQ ID NO: 914502
accgcaugaucucagucau

SEQ ID NO: 1008843 - RNA, 19 nt, Artificial Sequence
  Description of Artificial Sequence: Synthetic oligonucleotide
  Antisense strand to SEQ ID NO: 1008842
augacugagaucaugcggu

SEQ ID NO: 1008844 - RNA, 19 nt, Artificial Sequence
  Description of Artificial Sequence: Synthetic oligonucleotide
  Sense strand starting at position 538 of SEQ ID NO: 914502
aagguuggucaaugaguau

SEQ ID NO: 1008845 - RNA, 19 nt, Artificial Sequence
  Description of Artificial Sequence: Synthetic oligonucleotide
  Antisense strand to SEQ ID NO: 1008844
auacucauugaccaaccuu

SEQ ID NO: 1008846 - RNA, 19 nt, Artificial Sequence
  Description of Artificial Sequence: Synthetic oligonucleotide
  Sense strand starting at position 1229 of SEQ ID NO: 914502
aggaauaaauucugguauc

SEQ ID NO: 1008847 - RNA, 19 nt, Artificial Sequence
  Description of Artificial Sequence: Synthetic oligonucleotide
  Antisense strand to SEQ ID NO: 1008846
gauaccagaauuuauuccu

SEQ ID NO: 1008848 - RNA, 19 nt, Artificial Sequence
  Description of Artificial Sequence: Synthetic oligonucleotide
  Sense strand starting at position 1230 of SEQ ID NO: 914502
ggaauaaauucugguaucc

SEQ ID NO: 1008849 - RNA, 19 nt, Artificial Sequence
  Description of Artificial Sequence: Synthetic oligonucleotide
  Antisense strand to SEQ ID NO: 1008848
ggauaccagaauuuauucc

SEQ ID NO: 1008850 - RNA, 19 nt, Artificial Sequence
  Description of Artificial Sequence: Synthetic oligonucleotide
  Sense strand starting at position 1277 of SEQ ID NO: 914502
caguaacacugauacggua

SEQ ID NO: 1008851 - RNA, 19 nt, Artificial Sequence
  Description of Artificial Sequence: Synthetic oligonucleotide
  Antisense strand to SEQ ID NO: 1008850
uaccguaucaguguuacug

SEQ ID NO: 1008852 - RNA, 19 nt, Artificial Sequence
  Description of Artificial Sequence: Synthetic oligonucleotide
  Sense strand starting at position 1279 of SEQ ID NO: 914502
guaacacugauacgguaua

SEQ ID NO: 1008853 - RNA, 19 nt, Artificial Sequence
  Description of Artificial Sequence: Synthetic oligonucleotide
  Antisense strand to SEQ ID NO: 1008852
uauaccguaucaguguuac

SEQ ID NO: 1008854 - RNA, 19 nt, Artificial Sequence
  Description of Artificial Sequence: Synthetic oligonucleotide
  Sense strand starting at position 1659 of SEQ ID NO: 914502
uaaauaaagugguggucau

SEQ ID NO: 1008855 - RNA, 19 nt, Artificial Sequence
  Description of Artificial Sequence: Synthetic oligonucleotide
  Antisense strand to SEQ ID NO: 1008854
augaccaccacuuuauuua

SEQ ID NO: 1008856 - RNA, 19 nt, Artificial Sequence
  Description of Artificial Sequence: Synthetic oligonucleotide
  Sense strand starting at position 1663 of SEQ ID NO: 914502
uaaagugguggucaugcua

SEQ ID NO: 1008857 - RNA, 19 nt, Artificial Sequence
  Description of Artificial Sequence: Synthetic oligonucleotide
  Antisense strand to SEQ ID NO: 1008856
uagcaugaccaccacuuua

SEQ ID NO: 1008858 - RNA, 19 nt, Artificial Sequence
  Description of Artificial Sequence: Synthetic oligonucleotide
  Sense strand starting at position 1677 of SEQ ID NO: 914502
ugcuaaauauccugaugug

SEQ ID NO: 1008859 - RNA, 19 nt, Artificial Sequence
  Description of Artificial Sequence: Synthetic oligonucleotide
  Antisense strand to SEQ ID NO: 1008858
cacaucaggauauuuagca

SEQ ID NO: 1008860 - RNA, 19 nt, Artificial Sequence
  Description of Artificial Sequence: Synthetic oligonucleotide
  Sense strand starting at position 1678 of SEQ ID NO: 914502
gcuaaauauccugauguga

SEQ ID NO: 1008861 - RNA, 19 nt, Artificial Sequence
  Description of Artificial Sequence: Synthetic oligonucleotide
  Antisense strand to SEQ ID NO: 1008860
ucacaucaggauauuuagc

SEQ ID NO: 1008862 - RNA, 19 nt, Artificial Sequence
  Description of Artificial Sequence: Synthetic oligonucleotide
  Sense strand starting at position 1683 of SEQ ID NO: 914502
auauccugaugugaucauu

SEQ ID NO: 1008863 - RNA, 19 nt, Artificial Sequence
  Description of Artificial Sequence: Synthetic oligonucleotide
  Antisense strand to SEQ ID NO: 1008862
aaugaucacaucaggauau

SEQ ID NO: 1008864 - RNA, 19 nt, Artificial Sequence
  Description of Artificial Sequence: Synthetic oligonucleotide
  Sense strand starting at position 1691 of SEQ ID NO: 914502
augugaucauuaugcaaca

SEQ ID NO: 1008865 - RNA, 19 nt, Artificial Sequence
  Description of Artificial Sequence: Synthetic oligonucleotide
  Antisense strand to SEQ ID NO: 1008864
uguugcauaaugaucacau

SEQ ID NO: 1008866 - RNA, 19 nt, Artificial Sequence
  Description of Artificial Sequence: Synthetic oligonucleotide
  Sense strand starting at position 1692 of SEQ ID NO: 914502
ugugaucauuaugcaacau

SEQ ID NO: 1008867 - RNA, 19 nt, Artificial Sequence
  Description of Artificial Sequence: Synthetic oligonucleotide
  Antisense strand to SEQ ID NO: 1008866
auguugcauaaugaucaca

SEQ ID NO: 1008868 - RNA, 19 nt, Artificial Sequence
  Description of Artificial Sequence: Synthetic oligonucleotide
  Sense strand starting at position 1836 of SEQ ID NO: 914502
ggaagauccuuugaggccu

SEQ ID NO: 1008869 - RNA, 19 nt, Artificial Sequence
  Description of Artificial Sequence: Synthetic oligonucleotide
  Antisense strand to SEQ ID NO: 1008868
aggccucaaaggaucuucc

SEQ ID NO: 1008870 - RNA, 19 nt, Artificial Sequence
  Description of Artificial Sequence: Synthetic oligonucleotide
  Sense strand starting at position 2130 of SEQ ID NO: 914502
uacuguuuauuugggcuau

SEQ ID NO: 1008871 - RNA, 19 nt, Artificial Sequence
  Description of Artificial Sequence: Synthetic oligonucleotide
  Antisense strand to SEQ ID NO: 1008870
auagcccaaauaaacagua

SEQ ID NO: 1008872 - RNA, 19 nt, Artificial Sequence
  Description of Artificial Sequence: Synthetic oligonucleotide
  Sense strand starting at position 2355 of SEQ ID NO: 914502
ucugucuuccugcauuaga

SEQ ID NO: 1008873 - RNA, 19 nt, Artificial Sequence
  Description of Artificial Sequence: Synthetic oligonucleotide
  Antisense strand to SEQ ID NO: 1008872
ucuaaugcaggaagacaga

SEQ ID NO: 1008874 - RNA, 19 nt, Artificial Sequence
  Description of Artificial Sequence: Synthetic oligonucleotide
  Sense strand starting at position 2404 of SEQ ID NO: 914502
auaucauuguauccucagu

SEQ ID NO: 1008875 - RNA, 19 nt, Artificial Sequence
  Description of Artificial Sequence: Synthetic oligonucleotide
  Antisense strand to SEQ ID NO: 1008874
acugaggauacaaugauau

SEQ ID NO: 1008876 - RNA, 19 nt, Artificial Sequence
  Description of Artificial Sequence: Synthetic oligonucleotide
  Sense strand starting at position 2431 of SEQ ID NO: 914502
uagugcuuagcguguagua

SEQ ID NO: 1008877 - RNA, 19 nt, Artificial Sequence
  Description of Artificial Sequence: Synthetic oligonucleotide
  Antisense strand to SEQ ID NO: 1008876
uacuacacgcuaagcacua

SEQ ID NO: 1008878 - RNA, 19 nt, Artificial Sequence
  Description of Artificial Sequence: Synthetic oligonucleotide
  Sense strand starting at position 2444 of SEQ ID NO: 914502
guaguaggcacucagugua

SEQ ID NO: 1008879 - RNA, 19 nt, Artificial Sequence
  Description of Artificial Sequence: Synthetic oligonucleotide
  Antisense strand to SEQ ID NO: 1008878
uacacugagugccuacuac

SEQ ID NO: 1008880 - RNA, 19 nt, Artificial Sequence
  Description of Artificial Sequence: Synthetic oligonucleotide
  Sense strand starting at position 2447 of SEQ ID NO: 914502
guaggcacucaguguacau

SEQ ID NO: 1008881 - RNA, 19 nt, Artificial Sequence
  Description of Artificial Sequence: Synthetic oligonucleotide
  Antisense strand to SEQ ID NO: 1008880
auguacacugagugccuac

SEQ ID NO: 1008882 - RNA, 19 nt, Artificial Sequence
  Description of Artificial Sequence: Synthetic oligonucleotide
  Sense strand starting at position 2458 of SEQ ID NO: 914502
guguacauuuacugaauga

SEQ ID NO: 1008883 - RNA, 19 nt, Artificial Sequence
  Description of Artificial Sequence: Synthetic oligonucleotide
  Antisense strand to SEQ ID NO: 1008882
ucauucaguaaauguacac

SEQ ID NO: 1008884 - RNA, 19 nt, Artificial Sequence
  Description of Artificial Sequence: Synthetic oligonucleotide
  Sense strand starting at position 2543 of SEQ ID NO: 914502
ggugcuaucuuccauauuu

SEQ ID NO: 1008885 - RNA, 19 nt, Artificial Sequence
  Description of Artificial Sequence: Synthetic oligonucleotide
  Antisense strand to SEQ ID NO: 1008884
aaauauggaagauagcacc

SEQ ID NO: 1008886 - RNA, 19 nt, Artificial Sequence
  Description of Artificial Sequence: Synthetic oligonucleotide
  Sense strand starting at position 2565 of SEQ ID NO: 914502
uaugcuuaugcagauguaa

SEQ ID NO: 1008887 - RNA, 19 nt, Artificial Sequence
  Description of Artificial Sequence: Synthetic oligonucleotide
  Antisense strand to SEQ ID NO: 1008886
uuacaucugcauaagcaua

SEQ ID NO: 1008888 - RNA, 19 nt, Artificial Sequence
  Description of Artificial Sequence: Synthetic oligonucleotide
  Sense strand starting at position 2656 of SEQ ID NO: 914502
auguuauuguucuaacaug

SEQ ID NO: 1008889 - RNA, 19 nt, Artificial Sequence
  Description of Artificial Sequence: Synthetic oligonucleotide
  Antisense strand to SEQ ID NO: 1008888
cauguuagaacaauaacau

SEQ ID NO: 1008890 - RNA, 19 nt, Artificial Sequence
  Description of Artificial Sequence: Synthetic oligonucleotide
  Sense strand starting at position 2690 of SEQ ID NO: 914502
uuugauacguagucucacu

SEQ ID NO: 1008891 - RNA, 19 nt, Artificial Sequence
  Description of Artificial Sequence: Synthetic oligonucleotide
  Antisense strand to SEQ ID NO: 1008890
agugagacuacguaucaaa

SEQ ID NO: 1008892 - RNA, 19 nt, Artificial Sequence
  Description of Artificial Sequence: Synthetic oligonucleotide
  Sense strand starting at position 3234 of SEQ ID NO: 914502
cagagaauugcccaacgug

SEQ ID NO: 1008893 - RNA, 19 nt, Artificial Sequence
  Description of Artificial Sequence: Synthetic oligonucleotide
  Antisense strand to SEQ ID NO: 1008892
cacguugggcaauucucug

SEQ ID NO: 1008894 - RNA, 19 nt, Artificial Sequence
  Description of Artificial Sequence: Synthetic oligonucleotide
  Sense strand starting at position 3466 of SEQ ID NO: 914502
gccaguuuauaagaagcua

SEQ ID NO: 1008895 - RNA, 19 nt, Artificial Sequence
  Description of Artificial Sequence: Synthetic oligonucleotide
  Antisense strand to SEQ ID NO: 1008894
uagcuucuuauaaacuggc

SEQ ID NO: 1008896 - RNA, 19 nt, Artificial Sequence
  Description of Artificial Sequence: Synthetic oligonucleotide
  Sense strand starting at position 3495 of SEQ ID NO: 914502
uuuaaugguuacuuaggau

SEQ ID NO: 1008897 - RNA, 19 nt, Artificial Sequence
  Description of Artificial Sequence: Synthetic oligonucleotide
  Antisense strand to SEQ ID NO: 1008896
auccuaaguaaccauuaaa

SEQ ID NO: 1008898 - RNA, 19 nt, Artificial Sequence
  Description of Artificial Sequence: Synthetic oligonucleotide
  Sense strand starting at position 3522 of SEQ ID NO: 914502
acaaaugucuuguucccua

SEQ ID NO: 1008899 - RNA, 19 nt, Artificial Sequence
  Description of Artificial Sequence: Synthetic oligonucleotide
  Antisense strand to SEQ ID NO: 1008898
uagggaacaagacauuugu

SEQ ID NO: 1008900 - RNA, 19 nt, Artificial Sequence
  Description of Artificial Sequence: Synthetic oligonucleotide
  Sense strand starting at position 3526 of SEQ ID NO: 914502
augucuuguucccuauuua

SEQ ID NO: 1008901 - RNA, 19 nt, Artificial Sequence
  Description of Artificial Sequence: Synthetic oligonucleotide
  Antisense strand to SEQ ID NO: 1008900
uaaauagggaacaagacau

SEQ ID NO: 1008902 - RNA, 19 nt, Artificial Sequence
  Description of Artificial Sequence: Synthetic oligonucleotide
  Sense strand starting at position 3564 of SEQ ID NO: 914502
gaccgauucucacugucac

SEQ ID NO: 1008903 - RNA, 19 nt, Artificial Sequence
  Description of Artificial Sequence: Synthetic oligonucleotide
  Antisense strand to SEQ ID NO: 1008902
gugacagugagaaucgguc

SEQ ID NO: 1008904 - RNA, 19 nt, Artificial Sequence
  Description of Artificial Sequence: Synthetic oligonucleotide
  Sense strand starting at position 3971 of SEQ ID NO: 914502
ggauuacaggcuugaugau

SEQ ID NO: 1008905 - RNA, 19 nt, Artificial Sequence
  Description of Artificial Sequence: Synthetic oligonucleotide
  Antisense strand to SEQ ID NO: 1008904
aucaucaagccuguaaucc

SEQ ID NO: 1008906 - RNA, 19 nt, Artificial Sequence
  Description of Artificial Sequence: Synthetic oligonucleotide
  Sense strand starting at position 339 of SEQ ID NO: 914503
gcuaauaaacgguagagca

SEQ ID NO: 1008907 - RNA, 19 nt, Artificial Sequence
  Description of Artificial Sequence: Synthetic oligonucleotide
  Antisense strand to SEQ ID NO: 1008906
ugcucuaccguuuauuagc

SEQ ID NO: 1008908 - RNA, 19 nt, Artificial Sequence
  Description of Artificial Sequence: Synthetic oligonucleotide
  Sense strand starting at position 352 of SEQ ID NO: 914503
agagcagaauauguaagua

SEQ ID NO: 1008909 - RNA, 19 nt, Artificial Sequence
  Description of Artificial Sequence: Synthetic oligonucleotide
  Antisense strand to SEQ ID NO: 1008908
uacuuacauauucugcucu

SEQ ID NO: 1008910 - RNA, 19 nt, Artificial Sequence
  Description of Artificial Sequence: Synthetic oligonucleotide
  Sense strand starting at position 506 of SEQ ID NO: 914503
ggcucuauccuguaaauga

SEQ ID NO: 1008911 - RNA, 19 nt, Artificial Sequence
  Description of Artificial Sequence: Synthetic oligonucleotide
  Antisense strand to SEQ ID NO: 1008910
ucauuuacaggauagagcc

SEQ ID NO: 1008912 - RNA, 19 nt, Artificial Sequence
  Description of Artificial Sequence: Synthetic oligonucleotide
  Sense strand starting at position 563 of SEQ ID NO: 914503
ugaccagaucuguagguca

SEQ ID NO: 1008913 - RNA, 19 nt, Artificial Sequence
  Description of Artificial Sequence: Synthetic oligonucleotide
  Antisense strand to SEQ ID NO: 1008912
ugaccuacagaucugguca

SEQ ID NO: 1008914 - RNA, 19 nt, Artificial Sequence
  Description of Artificial Sequence: Synthetic oligonucleotide
  Sense strand starting at position 565 of SEQ ID NO: 914503
accagaucuguaggucaga

SEQ ID NO: 1008915 - RNA, 19 nt, Artificial Sequence
  Description of Artificial Sequence: Synthetic oligonucleotide
  Antisense strand to SEQ ID NO: 1008914
ucugaccuacagaucuggu

SEQ ID NO: 1008916 - RNA, 19 nt, Artificial Sequence
  Description of Artificial Sequence: Synthetic oligonucleotide
  Sense strand starting at position 566 of SEQ ID NO: 914503
ccagaucuguaggucagau

SEQ ID NO: 1008917 - RNA, 19 nt, Artificial Sequence
  Description of Artificial Sequence: Synthetic oligonucleotide
  Antisense strand to SEQ ID NO: 1008916
aucugaccuacagaucugg

SEQ ID NO: 1008918 - RNA, 19 nt, Artificial Sequence
  Description of Artificial Sequence: Synthetic oligonucleotide
  Sense strand starting at position 574 of SEQ ID NO: 914503
guaggucagauagacgauu

SEQ ID NO: 1008919 - RNA, 19 nt, Artificial Sequence
  Description of Artificial Sequence: Synthetic oligonucleotide
  Antisense strand to SEQ ID NO: 1008918
aaucgucuaucugaccuac

SEQ ID NO: 1008920 - RNA, 19 nt, Artificial Sequence
  Description of Artificial Sequence: Synthetic oligonucleotide
  Sense strand starting at position 585 of SEQ ID NO: 914503
agacgauucuagccaagaa

SEQ ID NO: 1008921 - RNA, 19 nt, Artificial Sequence
  Description of Artificial Sequence: Synthetic oligonucleotide
  Antisense strand to SEQ ID NO: 1008920
uucuuggcuagaaucgucu

SEQ ID NO: 1008922 - RNA, 19 nt, Artificial Sequence
  Description of Artificial Sequence: Synthetic oligonucleotide
  Sense strand starting at position 589 of SEQ ID NO: 914503
gauucuagccaagaauagu

SEQ ID NO: 1008923 - RNA, 19 nt, Artificial Sequence
  Description of Artificial Sequence: Synthetic oligonucleotide
  Antisense strand to SEQ ID NO: 1008922
acuauucuuggcuagaauc

SEQ ID NO: 1008924 - RNA, 19 nt, Artificial Sequence
  Description of Artificial Sequence: Synthetic oligonucleotide
  Sense strand starting at position 769 of SEQ ID NO: 914503
uucugacagcugcauaaga

SEQ ID NO: 1008925 - RNA, 19 nt, Artificial Sequence
  Description of Artificial Sequence: Synthetic oligonucleotide
  Antisense strand to SEQ ID NO: 1008924
ucuuaugcagcugucagaa

SEQ ID NO: 1008926 - RNA, 19 nt, Artificial Sequence
  Description of Artificial Sequence: Synthetic oligonucleotide
  Sense strand starting at position 828 of SEQ ID NO: 914503
uuaggaaguuauccugaaa

SEQ ID NO: 1008927 - RNA, 19 nt, Artificial Sequence
  Description of Artificial Sequence: Synthetic oligonucleotide
  Antisense strand to SEQ ID NO: 1008926
uuucaggauaacuuccuaa

SEQ ID NO: 1008928 - RNA, 19 nt, Artificial Sequence
  Description of Artificial Sequence: Synthetic oligonucleotide
  Sense strand starting at position 893 of SEQ ID NO: 914503
aaggaagcgccagauucua

SEQ ID NO: 1008929 - RNA, 19 nt, Artificial Sequence
  Description of Artificial Sequence: Synthetic oligonucleotide
  Antisense strand to SEQ ID NO: 1008928
uagaaucuggcgcuuccuu

SEQ ID NO: 1008930 - RNA, 19 nt, Artificial Sequence
  Description of Artificial Sequence: Synthetic oligonucleotide
  Sense strand starting at position 935 of SEQ ID NO: 914503
ggacuugaacuucgggaga

SEQ ID NO: 1008931 - RNA, 19 nt, Artificial Sequence
  Description of Artificial Sequence: Synthetic oligonucleotide
  Antisense strand to SEQ ID NO: 1008930
ucucccgaaguucaagucc

SEQ ID NO: 1008932 - RNA, 19 nt, Artificial Sequence
  Description of Artificial Sequence: Synthetic oligonucleotide
  Sense strand starting at position 970 of SEQ ID NO: 914503
gcacuaaagccagaacacu

SEQ ID NO: 1008933 - RNA, 19 nt, Artificial Sequence
  Description of Artificial Sequence: Synthetic oligonucleotide
  Antisense strand to SEQ ID NO: 1008932
aguguucuggcuuuagugc

SEQ ID NO: 1008934 - RNA, 19 nt, Artificial Sequence
  Description of Artificial Sequence: Synthetic oligonucleotide
  Sense strand starting at position 978 of SEQ ID NO: 914503
gccagaacacugugacuau

SEQ ID NO: 1008935 - RNA, 19 nt, Artificial Sequence
  Description of Artificial Sequence: Synthetic oligonucleotide
  Antisense strand to SEQ ID NO: 1008934
auagucacaguguucuggc

SEQ ID NO: 1008936 - RNA, 19 nt, Artificial Sequence
  Description of Artificial Sequence: Synthetic oligonucleotide
  Sense strand starting at position 981 of SEQ ID NO: 914503
agaacacugugacuaucau

SEQ ID NO: 1008937 - RNA, 19 nt, Artificial Sequence
  Description of Artificial Sequence: Synthetic oligonucleotide
  Antisense strand to SEQ ID NO: 1008936
augauagucacaguguucu

SEQ ID NO: 1008938 - RNA, 19 nt, Artificial Sequence
  Description of Artificial Sequence: Synthetic oligonucleotide
  Sense strand starting at position 1014 of SEQ ID NO: 914503
auuucuaugccucguccaa

SEQ ID NO: 1008939 - RNA, 19 nt, Artificial Sequence
  Description of Artificial Sequence: Synthetic oligonucleotide
  Antisense strand to SEQ ID NO: 1008938
uuggacgaggcauagaaau

SEQ ID NO: 1008940 - RNA, 19 nt, Artificial Sequence
  Description of Artificial Sequence: Synthetic oligonucleotide
  Sense strand starting at position 1122 of SEQ ID NO: 914503
agacuuggcugagugaaug

SEQ ID NO: 1008941 - RNA, 19 nt, Artificial Sequence
  Description of Artificial Sequence: Synthetic oligonucleotide
  Antisense strand to SEQ ID NO: 1008940
cauucacucagccaagucu

SEQ ID NO: 1008942 - RNA, 19 nt, Artificial Sequence
  Description of Artificial Sequence: Synthetic oligonucleotide
  Sense strand starting at position 1140 of SEQ ID NO: 914503
ggugaagcccuucauugag

SEQ ID NO: 1008943 - RNA, 19 nt, Artificial Sequence
  Description of Artificial Sequence: Synthetic oligonucleotide
  Antisense strand to SEQ ID NO: 1008942
cucaaugaagggcuucacc

SEQ ID NO: 1008944 - RNA, 19 nt, Artificial Sequence
  Description of Artificial Sequence: Synthetic oligonucleotide
  Sense strand starting at position 1298 of SEQ ID NO: 914503
uggagugcgccgaguagaa

SEQ ID NO: 1008945 - RNA, 19 nt, Artificial Sequence
  Description of Artificial Sequence: Synthetic oligonucleotide
  Antisense strand to SEQ ID NO: 1008944
uucuacucggcgcacucca

SEQ ID NO: 1008946 - RNA, 19 nt, Artificial Sequence
  Description of Artificial Sequence: Synthetic oligonucleotide
  Sense strand starting at position 1850 of SEQ ID NO: 914503
cgaugagguccucaacuau

SEQ ID NO: 1008947 - RNA, 19 nt, Artificial Sequence
  Description of Artificial Sequence: Synthetic oligonucleotide
  Antisense strand to SEQ ID NO: 1008946
auaguugaggaccucaucg

SEQ ID NO: 1008948 - RNA, 19 nt, Artificial Sequence
  Description of Artificial Sequence: Synthetic oligonucleotide
  Sense strand starting at position 2119 of SEQ ID NO: 914503
gcaggagcucuguccguuu

SEQ ID NO: 1008949 - RNA, 19 nt, Artificial Sequence
  Description of Artificial Sequence: Synthetic oligonucleotide
  Antisense strand to SEQ ID NO: 1008948
aaacggacagagcuccugc

SEQ ID NO: 1008950 - RNA, 19 nt, Artificial Sequence
  Description of Artificial Sequence: Synthetic oligonucleotide
  Sense strand starting at position 2149 of SEQ ID NO: 914503
augggaguguaguuuaaga

SEQ ID NO: 1008951 - RNA, 19 nt, Artificial Sequence
  Description of Artificial Sequence: Synthetic oligonucleotide
  Antisense strand to SEQ ID NO: 1008950
ucuuaaacuacacucccau

SEQ ID NO: 1008952 - RNA, 19 nt, Artificial Sequence
  Description of Artificial Sequence: Synthetic oligonucleotide
  Sense strand starting at position 2151 of SEQ ID NO: 914503
gggaguguaguuuaagaua

SEQ ID NO: 1008953 - RNA, 19 nt, Artificial Sequence
  Description of Artificial Sequence: Synthetic oligonucleotide
  Antisense strand to SEQ ID NO: 1008952
uaucuuaaacuacacuccc

SEQ ID NO: 1008954 - RNA, 19 nt, Artificial Sequence
  Description of Artificial Sequence: Synthetic oligonucleotide
  Sense strand starting at position 2191 of SEQ ID NO: 914503
guugaaagaguguaguuua

SEQ ID NO: 1008955 - RNA, 19 nt, Artificial Sequence
  Description of Artificial Sequence: Synthetic oligonucleotide
  Antisense strand to SEQ ID NO: 1008954
uaaacuacacucuuucaac

SEQ ID NO: 1008956 - RNA, 19 nt, Artificial Sequence
  Description of Artificial Sequence: Synthetic oligonucleotide
  Sense strand starting at position 2194 of SEQ ID NO: 914503
gaaagaguguaguuuaaga

SEQ ID NO: 1008957 - RNA, 19 nt, Artificial Sequence
  Description of Artificial Sequence: Synthetic oligonucleotide
  Antisense strand to SEQ ID NO: 1008956
ucuuaaacuacacucuuuc

SEQ ID NO: 1008958 - RNA, 19 nt, Artificial Sequence
  Description of Artificial Sequence: Synthetic oligonucleotide
  Sense strand starting at position 2406 of SEQ ID NO: 914503
gaguuuagacgugaggauu

SEQ ID NO: 1008959 - RNA, 19 nt, Artificial Sequence
  Description of Artificial Sequence: Synthetic oligonucleotide
  Antisense strand to SEQ ID NO: 1008958
aauccucacgucuaaacuc

SEQ ID NO: 1008960 - RNA, 19 nt, Artificial Sequence
  Description of Artificial Sequence: Synthetic oligonucleotide
  Sense strand starting at position 2418 of SEQ ID NO: 914503
gaggauuucugccaggaca

SEQ ID NO: 1008961 - RNA, 19 nt, Artificial Sequence
  Description of Artificial Sequence: Synthetic oligonucleotide
  Antisense strand to SEQ ID NO: 1008960
uguccuggcagaaauccuc

SEQ ID NO: 1008962 - RNA, 19 nt, Artificial Sequence
  Description of Artificial Sequence: Synthetic oligonucleotide
  Sense strand starting at position 2440 of SEQ ID NO: 914503
aaggacuauuuagaguauu

SEQ ID NO: 1008963 - RNA, 19 nt, Artificial Sequence
  Description of Artificial Sequence: Synthetic oligonucleotide
  Antisense strand to SEQ ID NO: 1008962
aauacucuaaauaguccuu

SEQ ID NO: 1008964 - RNA, 19 nt, Artificial Sequence
  Description of Artificial Sequence: Synthetic oligonucleotide
  Sense strand starting at position 2497 of SEQ ID NO: 914503
uuguuaggaguaugauuaa

SEQ ID NO: 1008965 - RNA, 19 nt, Artificial Sequence
  Description of Artificial Sequence: Synthetic oligonucleotide
  Antisense strand to SEQ ID NO: 1008964
uuaaucauacuccuaacaa

SEQ ID NO: 1008966 - RNA, 19 nt, Artificial Sequence
  Description of Artificial Sequence: Synthetic oligonucleotide
  Sense strand starting at position 2500 of SEQ ID NO: 914503
uuaggaguaugauuaacau

SEQ ID NO: 1008967 - RNA, 19 nt, Artificial Sequence
  Description of Artificial Sequence: Synthetic oligonucleotide
  Antisense strand to SEQ ID NO: 1008966
auguuaaucauacuccuaa

SEQ ID NO: 1008968 - RNA, 19 nt, Artificial Sequence
  Description of Artificial Sequence: Synthetic oligonucleotide
  Sense strand starting at position 2526 of SEQ ID NO: 914503
auaauacaguggucaucaa

SEQ ID NO: 1008969 - RNA, 19 nt, Artificial Sequence
  Description of Artificial Sequence: Synthetic oligonucleotide
  Antisense strand to SEQ ID NO: 1008968
uugaugaccacuguauuau

SEQ ID NO: 1008970 - RNA, 19 nt, Artificial Sequence
  Description of Artificial Sequence: Synthetic oligonucleotide
  Sense strand starting at position 2653 of SEQ ID NO: 914503
cuauuaaaccagugagcac

SEQ ID NO: 1008971 - RNA, 19 nt, Artificial Sequence
  Description of Artificial Sequence: Synthetic oligonucleotide
  Antisense strand to SEQ ID NO: 1008970
gugcucacugguuuaauag

SEQ ID NO: 1008972 - RNA, 19 nt, Artificial Sequence
  Description of Artificial Sequence: Synthetic oligonucleotide
  Sense strand starting at position 2668 of SEQ ID NO: 914503
gcaccugaccaggaguuaa

SEQ ID NO: 1008973 - RNA, 19 nt, Artificial Sequence
  Description of Artificial Sequence: Synthetic oligonucleotide
  Antisense strand to SEQ ID NO: 1008972
uuaacuccuggucaggugc

SEQ ID NO: 1008974 - RNA, 19 nt, Artificial Sequence
  Description of Artificial Sequence: Synthetic oligonucleotide
  Sense strand starting at position 2958 of SEQ ID NO: 914503
gaaaguucuggccauuaca

SEQ ID NO: 1008975 - RNA, 19 nt, Artificial Sequence
  Description of Artificial Sequence: Synthetic oligonucleotide
  Antisense strand to SEQ ID NO: 1008974
uguaauggccagaacuuuc

SEQ ID NO: 1008976 - RNA, 19 nt, Artificial Sequence
  Description of Artificial Sequence: Synthetic oligonucleotide
  Sense strand starting at position 3068 of SEQ ID NO: 914503
guucuagagauguagcuga

SEQ ID NO: 1008977 - RNA, 19 nt, Artificial Sequence
  Description of Artificial Sequence: Synthetic oligonucleotide
  Antisense strand to SEQ ID NO: 1008976
ucagcuacaucucuagaac

SEQ ID NO: 1008978 - RNA, 19 nt, Artificial Sequence
  Description of Artificial Sequence: Synthetic oligonucleotide
  Sense strand starting at position 3132 of SEQ ID NO: 914503
aaacucagauuguuggaau

SEQ ID NO: 1008979 - RNA, 19 nt, Artificial Sequence
  Description of Artificial Sequence: Synthetic oligonucleotide
  Antisense strand to SEQ ID NO: 1008978
auuccaacaaucugaguuu

SEQ ID NO: 1008980 - RNA, 19 nt, Artificial Sequence
  Description of Artificial Sequence: Synthetic oligonucleotide
  Sense strand starting at position 3155 of SEQ ID NO: 914503
agagcauauuccuugugaa

SEQ ID NO: 1008981 - RNA, 19 nt, Artificial Sequence
  Description of Artificial Sequence: Synthetic oligonucleotide
  Antisense strand to SEQ ID NO: 1008980
uucacaaggaauaugcucu

SEQ ID NO: 1008982 - RNA, 19 nt, Artificial Sequence
  Description of Artificial Sequence: Synthetic oligonucleotide
  Sense strand starting at position 3156 of SEQ ID NO: 914503
gagcauauuccuugugaaa

SEQ ID NO: 1008983 - RNA, 19 nt, Artificial Sequence
  Description of Artificial Sequence: Synthetic oligonucleotide
  Antisense strand to SEQ ID NO: 1008982
uuucacaaggaauaugcuc

SEQ ID NO: 1008984 - RNA, 19 nt, Artificial Sequence
  Description of Artificial Sequence: Synthetic oligonucleotide
  Sense strand starting at position 3255 of SEQ ID NO: 914503
acgcaugaauaccugauaa

SEQ ID NO: 1008985 - RNA, 19 nt, Artificial Sequence
  Description of Artificial Sequence: Synthetic oligonucleotide
  Antisense strand to SEQ ID NO: 1008984
uuaucagguauucaugcgu

SEQ ID NO: 1008986 - RNA, 19 nt, Artificial Sequence
  Description of Artificial Sequence: Synthetic oligonucleotide
  Sense strand starting at position 38 of SEQ ID NO: 914504
uguacauaaccaugguaca

SEQ ID NO: 1008987 - RNA, 19 nt, Artificial Sequence
  Description of Artificial Sequence: Synthetic oligonucleotide
  Antisense strand to SEQ ID NO: 1008986
uguaccaugguuauguaca

SEQ ID NO: 1008988 - RNA, 19 nt, Artificial Sequence
  Description of Artificial Sequence: Synthetic oligonucleotide
  Sense strand starting at position 39 of SEQ ID NO: 914504
guacauaaccaugguacaa

SEQ ID NO: 1008989 - RNA, 19 nt, Artificial Sequence
  Description of Artificial Sequence: Synthetic oligonucleotide
  Antisense strand to SEQ ID NO: 1008988
uuguaccaugguuauguac

SEQ ID NO: 1008990 - RNA, 19 nt, Artificial Sequence
  Description of Artificial Sequence: Synthetic oligonucleotide
  Sense strand starting at position 384 of SEQ ID NO: 914504
acagccaugcaguauaaga

SEQ ID NO: 1008991 - RNA, 19 nt, Artificial Sequence
  Description of Artificial Sequence: Synthetic oligonucleotide
  Antisense strand to SEQ ID NO: 1008990
ucuuauacugcauggcugu

SEQ ID NO: 1008992 - RNA, 19 nt, Artificial Sequence
  Description of Artificial Sequence: Synthetic oligonucleotide
  Sense strand starting at position 386 of SEQ ID NO: 914504
agccaugcaguauaagaaa

SEQ ID NO: 1008993 - RNA, 19 nt, Artificial Sequence
  Description of Artificial Sequence: Synthetic oligonucleotide
  Antisense strand to SEQ ID NO: 1008992
uuucuuauacugcauggcu

SEQ ID NO: 1008994 - RNA, 19 nt, Artificial Sequence
  Description of Artificial Sequence: Synthetic oligonucleotide
  Sense strand starting at position 518 of SEQ ID NO: 914504
gagauuaagauaugugagu

SEQ ID NO: 1008995 - RNA, 19 nt, Artificial Sequence
  Description of Artificial Sequence: Synthetic oligonucleotide
  Antisense strand to SEQ ID NO: 1008994
acucacauaucuuaaucuc

SEQ ID NO: 1008996 - RNA, 19 nt, Artificial Sequence
  Description of Artificial Sequence: Synthetic oligonucleotide
  Sense strand starting at position 519 of SEQ ID NO: 914504
agauuaagauaugugaguu

SEQ ID NO: 1008997 - RNA, 19 nt, Artificial Sequence
  Description of Artificial Sequence: Synthetic oligonucleotide
  Antisense strand to SEQ ID NO: 1008996
aacucacauaucuuaaucu

SEQ ID NO: 1008998 - RNA, 19 nt, Artificial Sequence
  Description of Artificial Sequence: Synthetic oligonucleotide
  Sense strand starting at position 523 of SEQ ID NO: 914504
uaagauaugugaguuacau

SEQ ID NO: 1008999 - RNA, 19 nt, Artificial Sequence
  Description of Artificial Sequence: Synthetic oligonucleotide
  Antisense strand to SEQ ID NO: 1008998
auguaacucacauaucuua

SEQ ID NO: 1009000 - RNA, 19 nt, Artificial Sequence
  Description of Artificial Sequence: Synthetic oligonucleotide
  Sense strand starting at position 676 of SEQ ID NO: 914504
augugauuaaacugagguu

SEQ ID NO: 1009001 - RNA, 19 nt, Artificial Sequence
  Description of Artificial Sequence: Synthetic oligonucleotide
  Antisense strand to SEQ ID NO: 1009000
aaccucaguuuaaucacau

SEQ ID NO: 1009002 - RNA, 19 nt, Artificial Sequence
  Description of Artificial Sequence: Synthetic oligonucleotide
  Sense strand starting at position 682 of SEQ ID NO: 914504
uuaaacugagguuauguau

SEQ ID NO: 1009003 - RNA, 19 nt, Artificial Sequence
  Description of Artificial Sequence: Synthetic oligonucleotide
  Antisense strand to SEQ ID NO: 1009002
auacauaaccucaguuuaa

SEQ ID NO: 1009004 - RNA, 19 nt, Artificial Sequence
  Description of Artificial Sequence: Synthetic oligonucleotide
  Sense strand starting at position 793 of SEQ ID NO: 914504
gaugauguccaccagguuu

SEQ ID NO: 1009005 - RNA, 19 nt, Artificial Sequence
  Description of Artificial Sequence: Synthetic oligonucleotide
  Antisense strand to SEQ ID NO: 1009004
aaaccugguggacaucauc

SEQ ID NO: 1009006 - RNA, 19 nt, Artificial Sequence
  Description of Artificial Sequence: Synthetic oligonucleotide
  Sense strand starting at position 922 of SEQ ID NO: 914504
augacuguugucugaaaca

SEQ ID NO: 1009007 - RNA, 19 nt, Artificial Sequence
  Description of Artificial Sequence: Synthetic oligonucleotide
  Antisense strand to SEQ ID NO: 1009006
uguuucagacaacagucau

SEQ ID NO: 1009008 - RNA, 19 nt, Artificial Sequence
  Description of Artificial Sequence: Synthetic oligonucleotide
  Sense strand starting at position 1134 of SEQ ID NO: 914504
uugcaagauuucguccuga

SEQ ID NO: 1009009 - RNA, 19 nt, Artificial Sequence
  Description of Artificial Sequence: Synthetic oligonucleotide
  Antisense strand to SEQ ID NO: 1009008
ucaggacgaaaucuugcaa

SEQ ID NO: 1009010 - RNA, 19 nt, Artificial Sequence
  Description of Artificial Sequence: Synthetic oligonucleotide
  Sense strand starting at position 1142 of SEQ ID NO: 914504
uuucguccugaggauuaaa

SEQ ID NO: 1009011 - RNA, 19 nt, Artificial Sequence
  Description of Artificial Sequence: Synthetic oligonucleotide
  Antisense strand to SEQ ID NO: 1009010
uuuaauccucaggacgaaa

SEQ ID NO: 1009012 - RNA, 19 nt, Artificial Sequence
  Description of Artificial Sequence: Synthetic oligonucleotide
  Sense strand starting at position 1169 of SEQ ID NO: 914504
gguacauaguaaucacaaa

SEQ ID NO: 1009013 - RNA, 19 nt, Artificial Sequence
  Description of Artificial Sequence: Synthetic oligonucleotide
  Antisense strand to SEQ ID NO: 1009012
uuugugauuacuauguacc

SEQ ID NO: 1009014 - RNA, 19 nt, Artificial Sequence
  Description of Artificial Sequence: Synthetic oligonucleotide
  Sense strand starting at position 1341 of SEQ ID NO: 914504
cgucuaugugacuuagcgu

SEQ ID NO: 1009015 - RNA, 19 nt, Artificial Sequence
  Description of Artificial Sequence: Synthetic oligonucleotide
  Antisense strand to SEQ ID NO: 1009014
acgcuaagucacauagacg

SEQ ID NO: 1009016 - RNA, 19 nt, Artificial Sequence
  Description of Artificial Sequence: Synthetic oligonucleotide
  Sense strand starting at position 1421 of SEQ ID NO: 914504
gaguuugugacaggauuga

SEQ ID NO: 1009017 - RNA, 19 nt, Artificial Sequence
  Description of Artificial Sequence: Synthetic oligonucleotide
  Antisense strand to SEQ ID NO: 1009016
ucaauccugucacaaacuc

SEQ ID NO: 1009018 - RNA, 19 nt, Artificial Sequence
  Description of Artificial Sequence: Synthetic oligonucleotide
  Sense strand starting at position 1435 of SEQ ID NO: 914504
auugaauaacugugagauu

SEQ ID NO: 1009019 - RNA, 19 nt, Artificial Sequence
  Description of Artificial Sequence: Synthetic oligonucleotide
  Antisense strand to SEQ ID NO: 1009018
aaucucacaguuauucaau

SEQ ID NO: 1009020 - RNA, 19 nt, Artificial Sequence
  Description of Artificial Sequence: Synthetic oligonucleotide
  Sense strand starting at position 1446 of SEQ ID NO: 914504
gugagauuaagguggcaga

SEQ ID NO: 1009021 - RNA, 19 nt, Artificial Sequence
  Description of Artificial Sequence: Synthetic oligonucleotide
  Antisense strand to SEQ ID NO: 1009020
ucugccaccuuaaucucac

SEQ ID NO: 1009022 - RNA, 19 nt, Artificial Sequence
  Description of Artificial Sequence: Synthetic oligonucleotide
  Sense strand starting at position 1473 of SEQ ID NO: 914504
gagagcgugcucuuugcau

SEQ ID NO: 1009023 - RNA, 19 nt, Artificial Sequence
  Description of Artificial Sequence: Synthetic oligonucleotide
  Antisense strand to SEQ ID NO: 1009022
augcaaagagcacgcucuc

SEQ ID NO: 1009024 - RNA, 19 nt, Artificial Sequence
  Description of Artificial Sequence: Synthetic oligonucleotide
  Sense strand starting at position 1786 of SEQ ID NO: 914504
cccauuccuccggaauaca

SEQ ID NO: 1009025 - RNA, 19 nt, Artificial Sequence
  Description of Artificial Sequence: Synthetic oligonucleotide
  Antisense strand to SEQ ID NO: 1009024
uguauuccggaggaauggg

SEQ ID NO: 1009026 - RNA, 19 nt, Artificial Sequence
  Description of Artificial Sequence: Synthetic oligonucleotide
  Sense strand starting at position 2655 of SEQ ID NO: 914504
gcaguuaacgucuuauagc

SEQ ID NO: 1009027 - RNA, 19 nt, Artificial Sequence
  Description of Artificial Sequence: Synthetic oligonucleotide
  Antisense strand to SEQ ID NO: 1009026
gcuauaagacguuaacugc

SEQ ID NO: 1009028 - RNA, 19 nt, Artificial Sequence
  Description of Artificial Sequence: Synthetic oligonucleotide
  Sense strand starting at position 2759 of SEQ ID NO: 914504
acggauuuaucugcuguaa

SEQ ID NO: 1009029 - RNA, 19 nt, Artificial Sequence
  Description of Artificial Sequence: Synthetic oligonucleotide
  Antisense strand to SEQ ID NO: 1009028
uuacagcagauaaauccgu

SEQ ID NO: 1009030 - RNA, 19 nt, Artificial Sequence
  Description of Artificial Sequence: Synthetic oligonucleotide
  Sense strand starting at position 2802 of SEQ ID NO: 914504
acagguuaauaccuauuga

SEQ ID NO: 1009031 - RNA, 19 nt, Artificial Sequence
  Description of Artificial Sequence: Synthetic oligonucleotide
  Antisense strand to SEQ ID NO: 1009030
ucaauagguauuaaccugu

SEQ ID NO: 1009032 - RNA, 19 nt, Artificial Sequence
  Description of Artificial Sequence: Synthetic oligonucleotide
  Sense strand starting at position 2841 of SEQ ID NO: 914504
acauuauguuacucuggau

SEQ ID NO: 1009033 - RNA, 19 nt, Artificial Sequence
  Description of Artificial Sequence: Synthetic oligonucleotide
  Antisense strand to SEQ ID NO: 1009032
auccagaguaacauaaugu

SEQ ID NO: 1009034 - RNA, 19 nt, Artificial Sequence
  Description of Artificial Sequence: Synthetic oligonucleotide
  Sense strand starting at position 2847 of SEQ ID NO: 914504
uguuacucuggauggauua

SEQ ID NO: 1009035 - RNA, 19 nt, Artificial Sequence
  Description of Artificial Sequence: Synthetic oligonucleotide
  Antisense strand to SEQ ID NO: 1009034
uaauccauccagaguaaca

SEQ ID NO: 1009036 - RNA, 19 nt, Artificial Sequence
  Description of Artificial Sequence: Synthetic oligonucleotide
  Sense strand starting at position 2848 of SEQ ID NO: 914504
guuacucuggauggauuau

SEQ ID NO: 1009037 - RNA, 19 nt, Artificial Sequence
  Description of Artificial Sequence: Synthetic oligonucleotide
  Antisense strand to SEQ ID NO: 1009036
auaauccauccagaguaac

SEQ ID NO: 1009038 - RNA, 19 nt, Artificial Sequence
  Description of Artificial Sequence: Synthetic oligonucleotide
  Sense strand starting at position 2860 of SEQ ID NO: 914504
ggauuaugaugccuauacu

SEQ ID NO: 1009039 - RNA, 19 nt, Artificial Sequence
  Description of Artificial Sequence: Synthetic oligonucleotide
  Antisense strand to SEQ ID NO: 1009038
aguauaggcaucauaaucc

SEQ ID NO: 1009040 - RNA, 19 nt, Artificial Sequence
  Description of Artificial Sequence: Synthetic oligonucleotide
  Sense strand starting at position 2863 of SEQ ID NO: 914504
uuaugaugccuauacuaga

SEQ ID NO: 1009041 - RNA, 19 nt, Artificial Sequence
  Description of Artificial Sequence: Synthetic oligonucleotide
  Antisense strand to SEQ ID NO: 1009040
ucuaguauaggcaucauaa

SEQ ID NO: 1009042 - RNA, 19 nt, Artificial Sequence
  Description of Artificial Sequence: Synthetic oligonucleotide
  Sense strand starting at position 3009 of SEQ ID NO: 914504
gacagaaggccguauacua

SEQ ID NO: 1009043 - RNA, 19 nt, Artificial Sequence
  Description of Artificial Sequence: Synthetic oligonucleotide
  Antisense strand to SEQ ID NO: 1009042
uaguauacggccuucuguc

SEQ ID NO: 1009044 - RNA, 19 nt, Artificial Sequence
  Description of Artificial Sequence: Synthetic oligonucleotide
  Sense strand starting at position 3067 of SEQ ID NO: 914504
aggugaguagauugaauag

SEQ ID NO: 1009045 - RNA, 19 nt, Artificial Sequence
  Description of Artificial Sequence: Synthetic oligonucleotide
  Antisense strand to SEQ ID NO: 1009044
cuauucaaucuacucaccu

SEQ ID NO: 1009046 - RNA, 19 nt, Artificial Sequence
  Description of Artificial Sequence: Synthetic oligonucleotide
  Sense strand starting at position 3189 of SEQ ID NO: 914504
gugauaacauccuccugga

SEQ ID NO: 1009047 - RNA, 19 nt, Artificial Sequence
  Description of Artificial Sequence: Synthetic oligonucleotide
  Antisense strand to SEQ ID NO: 1009046
uccaggaggauguuaucac

SEQ ID NO: 1009048 - RNA, 19 nt, Artificial Sequence
  Description of Artificial Sequence: Synthetic oligonucleotide
  Sense strand starting at position 3341 of SEQ ID NO: 914504
caaacaauugcaugugaga

SEQ ID NO: 1009049 - RNA, 19 nt, Artificial Sequence
  Description of Artificial Sequence: Synthetic oligonucleotide
  Antisense strand to SEQ ID NO: 1009048
ucucacaugcaauuguuug

SEQ ID NO: 1009050 - RNA, 19 nt, Artificial Sequence
  Description of Artificial Sequence: Synthetic oligonucleotide
  Sense strand starting at position 3417 of SEQ ID NO: 914504
uugauucuugauuguaaag

SEQ ID NO: 1009051 - RNA, 19 nt, Artificial Sequence
  Description of Artificial Sequence: Synthetic oligonucleotide
  Antisense strand to SEQ ID NO: 1009050
cuuuacaaucaagaaucaa

SEQ ID NO: 1009052 - RNA, 19 nt, Artificial Sequence
  Description of Artificial Sequence: Synthetic oligonucleotide
  Sense strand starting at position 3479 of SEQ ID NO: 914504
aagcucuguguauauugaa

SEQ ID NO: 1009053 - RNA, 19 nt, Artificial Sequence
  Description of Artificial Sequence: Synthetic oligonucleotide
  Antisense strand to SEQ ID NO: 1009052
uucaauauacacagagcuu

SEQ ID NO: 1009054 - RNA, 19 nt, Artificial Sequence
  Description of Artificial Sequence: Synthetic oligonucleotide
  Sense strand starting at position 3511 of SEQ ID NO: 914504
uagaacauccagugaugua

SEQ ID NO: 1009055 - RNA, 19 nt, Artificial Sequence
  Description of Artificial Sequence: Synthetic oligonucleotide
  Antisense strand to SEQ ID NO: 1009054
uacaucacuggauguucua

SEQ ID NO: 1009056 - RNA, 19 nt, Artificial Sequence
  Description of Artificial Sequence: Synthetic oligonucleotide
  Sense strand starting at position 3538 of SEQ ID NO: 914504
agaugaauacaucgguaga

SEQ ID NO: 1009057 - RNA, 19 nt, Artificial Sequence
  Description of Artificial Sequence: Synthetic oligonucleotide
  Antisense strand to SEQ ID NO: 1009056
ucuaccgauguauucaucu

SEQ ID NO: 1009058 - RNA, 19 nt, Artificial Sequence
  Description of Artificial Sequence: Synthetic oligonucleotide
  Sense strand starting at position 3540 of SEQ ID NO: 914504
augaauacaucgguagaua

SEQ ID NO: 1009059 - RNA, 19 nt, Artificial Sequence
  Description of Artificial Sequence: Synthetic oligonucleotide
  Antisense strand to SEQ ID NO: 1009058
uaucuaccgauguauucau

SEQ ID NO: 1009060 - RNA, 19 nt, Artificial Sequence
  Description of Artificial Sequence: Synthetic oligonucleotide
  Sense strand starting at position 3597 of SEQ ID NO: 914504
cuuguuacaugaguaauaa

SEQ ID NO: 1009061 - RNA, 19 nt, Artificial Sequence
  Description of Artificial Sequence: Synthetic oligonucleotide
  Antisense strand to SEQ ID NO: 1009060
uuauuacucauguaacaag

SEQ ID NO: 1009062 - RNA, 19 nt, Artificial Sequence
  Description of Artificial Sequence: Synthetic oligonucleotide
  Sense strand starting at position 3598 of SEQ ID NO: 914504
uuguuacaugaguaauaac

SEQ ID NO: 1009063 - RNA, 19 nt, Artificial Sequence
  Description of Artificial Sequence: Synthetic oligonucleotide
  Antisense strand to SEQ ID NO: 1009062
guuauuacucauguaacaa

SEQ ID NO: 1009064 - RNA, 19 nt, Artificial Sequence
  Description of Artificial Sequence: Synthetic oligonucleotide
  Sense strand starting at position 3978 of SEQ ID NO: 914504
cggagauacucuuccauac

SEQ ID NO: 1009065 - RNA, 19 nt, Artificial Sequence
  Description of Artificial Sequence: Synthetic oligonucleotide
  Antisense strand to SEQ ID NO: 1009064
guauggaagaguaucuccg

SEQ ID NO: 1009066 - RNA, 19 nt, Artificial Sequence
  Description of Artificial Sequence: Synthetic oligonucleotide
  Sense strand starting at position 126 of SEQ ID NO: 914505
uuguaagaguauuccuugu

SEQ ID NO: 1009067 - RNA, 19 nt, Artificial Sequence
  Description of Artificial Sequence: Synthetic oligonucleotide
  Antisense strand to SEQ ID NO: 1009066
acaaggaauacucuuacaa

SEQ ID NO: 1009068 - RNA, 19 nt, Artificial Sequence
  Description of Artificial Sequence: Synthetic oligonucleotide
  Sense strand starting at position 128 of SEQ ID NO: 914505
guaagaguauuccuuguuc

SEQ ID NO: 1009069 - RNA, 19 nt, Artificial Sequence
  Description of Artificial Sequence: Synthetic oligonucleotide
  Antisense strand to SEQ ID NO: 1009068
gaacaaggaauacucuuac

SEQ ID NO: 1009070 - RNA, 19 nt, Artificial Sequence
  Description of Artificial Sequence: Synthetic oligonucleotide
  Sense strand starting at position 351 of SEQ ID NO: 914505
uucccauucggcugaaaca

SEQ ID NO: 1009071 - RNA, 19 nt, Artificial Sequence
  Description of Artificial Sequence: Synthetic oligonucleotide
  Antisense strand to SEQ ID NO: 1009070
uguuucagccgaaugggaa

SEQ ID NO: 1009072 - RNA, 19 nt, Artificial Sequence
  Description of Artificial Sequence: Synthetic oligonucleotide
  Sense strand starting at position 361 of SEQ ID NO: 914505
gcugaaacacuguaauacu

SEQ ID NO: 1009073 - RNA, 19 nt, Artificial Sequence
  Description of Artificial Sequence: Synthetic oligonucleotide
  Antisense strand to SEQ ID NO: 1009072
aguauuacaguguuucagc

SEQ ID NO: 1009074 - RNA, 19 nt, Artificial Sequence
  Description of Artificial Sequence: Synthetic oligonucleotide
  Sense strand starting at position 447 of SEQ ID NO: 914505
ggcuuucuuagcguuucca

SEQ ID NO: 1009075 - RNA, 19 nt, Artificial Sequence
  Description of Artificial Sequence: Synthetic oligonucleotide
  Antisense strand to SEQ ID NO: 1009074
uggaaacgcuaagaaagcc

SEQ ID NO: 1009076 - RNA, 19 nt, Artificial Sequence
  Description of Artificial Sequence: Synthetic oligonucleotide
  Sense strand starting at position 448 of SEQ ID NO: 914505
gcuuucuuagcguuuccaa

SEQ ID NO: 1009077 - RNA, 19 nt, Artificial Sequence
  Description of Artificial Sequence: Synthetic oligonucleotide
  Antisense strand to SEQ ID NO: 1009076
uuggaaacgcuaagaaagc

SEQ ID NO: 1009078 - RNA, 19 nt, Artificial Sequence
  Description of Artificial Sequence: Synthetic oligonucleotide
  Sense strand starting at position 580 of SEQ ID NO: 914505
gcucuaccuccguauuacu

SEQ ID NO: 1009079 - RNA, 19 nt, Artificial Sequence
  Description of Artificial Sequence: Synthetic oligonucleotide
  Antisense strand to SEQ ID NO: 1009078
aguaauacggagguagagc

SEQ ID NO: 1009080 - RNA, 19 nt, Artificial Sequence
  Description of Artificial Sequence: Synthetic oligonucleotide
  Sense strand starting at position 590 of SEQ ID NO: 914505
cguauuacuucuucucauu

SEQ ID NO: 1009081 - RNA, 19 nt, Artificial Sequence
  Description of Artificial Sequence: Synthetic oligonucleotide
  Antisense strand to SEQ ID NO: 1009080
aaugagaagaaguaauacg

SEQ ID NO: 1009082 - RNA, 19 nt, Artificial Sequence
  Description of Artificial Sequence: Synthetic oligonucleotide
  Sense strand starting at position 687 of SEQ ID NO: 914505
uucucuacucuugggacaa

SEQ ID NO: 1009083 - RNA, 19 nt, Artificial Sequence
  Description of Artificial Sequence: Synthetic oligonucleotide
  Antisense strand to SEQ ID NO: 1009082
uugucccaagaguagagaa

SEQ ID NO: 1009084 - RNA, 19 nt, Artificial Sequence
  Description of Artificial Sequence: Synthetic oligonucleotide
  Sense strand starting at position 753 of SEQ ID NO: 914505
ggaaaccuucucuagccua

SEQ ID NO: 1009085 - RNA, 19 nt, Artificial Sequence
  Description of Artificial Sequence: Synthetic oligonucleotide
  Antisense strand to SEQ ID NO: 1009084
uaggcuagagaagguuucc

SEQ ID NO: 1009086 - RNA, 19 nt, Artificial Sequence
  Description of Artificial Sequence: Synthetic oligonucleotide
  Sense strand starting at position 827 of SEQ ID NO: 914505
aaacuauacugcgcaguaa

SEQ ID NO: 1009087 - RNA, 19 nt, Artificial Sequence
  Description of Artificial Sequence: Synthetic oligonucleotide
  Antisense strand to SEQ ID NO: 1009086
uuacugcgcaguauaguuu

SEQ ID NO: 1009088 - RNA, 19 nt, Artificial Sequence
  Description of Artificial Sequence: Synthetic oligonucleotide
  Sense strand starting at position 828 of SEQ ID NO: 914505
aacuauacugcgcaguaau

SEQ ID NO: 1009089 - RNA, 19 nt, Artificial Sequence
  Description of Artificial Sequence: Synthetic oligonucleotide
  Antisense strand to SEQ ID NO: 1009088
auuacugcgcaguauaguu

SEQ ID NO: 1009090 - RNA, 19 nt, Artificial Sequence
  Description of Artificial Sequence: Synthetic oligonucleotide
  Sense strand starting at position 838 of SEQ ID NO: 914505
cgcaguaaucacuaauuac

SEQ ID NO: 1009091 - RNA, 19 nt, Artificial Sequence
  Description of Artificial Sequence: Synthetic oligonucleotide
  Antisense strand to SEQ ID NO: 1009090
guaauuagugauuacugcg

SEQ ID NO: 1009092 - RNA, 19 nt, Artificial Sequence
  Description of Artificial Sequence: Synthetic oligonucleotide
  Sense strand starting at position 1072 of SEQ ID NO: 914505
acuggauggugacauuuga

SEQ ID NO: 1009093 - RNA, 19 nt, Artificial Sequence
  Description of Artificial Sequence: Synthetic oligonucleotide
  Antisense strand to SEQ ID NO: 1009092
ucaaaugucaccauccagu

SEQ ID NO: 1009094 - RNA, 19 nt, Artificial Sequence
  Description of Artificial Sequence: Synthetic oligonucleotide
  Sense strand starting at position 1082 of SEQ ID NO: 914505
gacauuugaugaggcgaaa

SEQ ID NO: 1009095 - RNA, 19 nt, Artificial Sequence
  Description of Artificial Sequence: Synthetic oligonucleotide
  Antisense strand to SEQ ID NO: 1009094
uuucgccucaucaaauguc

SEQ ID NO: 1009096 - RNA, 19 nt, Artificial Sequence
  Description of Artificial Sequence: Synthetic oligonucleotide
  Sense strand starting at position 1162 of SEQ ID NO: 914505
ccaguaauucuaggugaca

SEQ ID NO: 1009097 - RNA, 19 nt, Artificial Sequence
  Description of Artificial Sequence: Synthetic oligonucleotide
  Antisense strand to SEQ ID NO: 1009096
ugucaccuagaauuacugg

SEQ ID NO: 1009098 - RNA, 19 nt, Artificial Sequence
  Description of Artificial Sequence: Synthetic oligonucleotide
  Sense strand starting at position 1163 of SEQ ID NO: 914505
caguaauucuaggugacag

SEQ ID NO: 1009099 - RNA, 19 nt, Artificial Sequence
  Description of Artificial Sequence: Synthetic oligonucleotide
  Antisense strand to SEQ ID NO: 1009098
cugucaccuagaauuacug

SEQ ID NO: 1009100 - RNA, 19 nt, Artificial Sequence
  Description of Artificial Sequence: Synthetic oligonucleotide
  Sense strand starting at position 1218 of SEQ ID NO: 914505
aguuaauguggaugggagu

SEQ ID NO: 1009101 - RNA, 19 nt, Artificial Sequence
  Description of Artificial Sequence: Synthetic oligonucleotide
  Antisense strand to SEQ ID NO: 1009100
acucccauccacauuaacu

SEQ ID NO: 1009102 - RNA, 19 nt, Artificial Sequence
  Description of Artificial Sequence: Synthetic oligonucleotide
  Sense strand starting at position 1297 of SEQ ID NO: 914505
gcggacuacuauucugcaa

SEQ ID NO: 1009103 - RNA, 19 nt, Artificial Sequence
  Description of Artificial Sequence: Synthetic oligonucleotide
  Antisense strand to SEQ ID NO: 1009102
uugcagaauaguaguccgc

SEQ ID NO: 1009104 - RNA, 19 nt, Artificial Sequence
  Description of Artificial Sequence: Synthetic oligonucleotide
  Sense strand starting at position 1614 of SEQ ID NO: 914505
ccagaauugcgucagaagc

SEQ ID NO: 1009105 - RNA, 19 nt, Artificial Sequence
  Description of Artificial Sequence: Synthetic oligonucleotide
  Antisense strand to SEQ ID NO: 1009104
gcuucugacgcaauucugg

SEQ ID NO: 1009106 - RNA, 19 nt, Artificial Sequence
  Description of Artificial Sequence: Synthetic oligonucleotide
  Sense strand starting at position 1644 of SEQ ID NO: 914505
cgcccugaaacgugaggaa

SEQ ID NO: 1009107 - RNA, 19 nt, Artificial Sequence
  Description of Artificial Sequence: Synthetic oligonucleotide
  Antisense strand to SEQ ID NO: 1009106
uuccucacguuucagggcg

SEQ ID NO: 1009108 - RNA, 19 nt, Artificial Sequence
  Description of Artificial Sequence: Synthetic oligonucleotide
  Sense strand starting at position 1710 of SEQ ID NO: 914505
gcuucuuaccgacaaguga

SEQ ID NO: 1009109 - RNA, 19 nt, Artificial Sequence
  Description of Artificial Sequence: Synthetic oligonucleotide
  Antisense strand to SEQ ID NO: 1009108
ucacuugucgguaagaagc

SEQ ID NO: 1009110 - RNA, 19 nt, Artificial Sequence
  Description of Artificial Sequence: Synthetic oligonucleotide
  Sense strand starting at position 2016 of SEQ ID NO: 914505
cuuucuguaguaggagaga

SEQ ID NO: 1009111 - RNA, 19 nt, Artificial Sequence
  Description of Artificial Sequence: Synthetic oligonucleotide
  Antisense strand to SEQ ID NO: 1009110
ucucuccuacuacagaaag

SEQ ID NO: 1009112 - RNA, 19 nt, Artificial Sequence
  Description of Artificial Sequence: Synthetic oligonucleotide
  Sense strand starting at position 2142 of SEQ ID NO: 914505
ggccuccuccaguaagaag

SEQ ID NO: 1009113 - RNA, 19 nt, Artificial Sequence
  Description of Artificial Sequence: Synthetic oligonucleotide
  Antisense strand to SEQ ID NO: 1009112
cuucuuacuggaggaggcc

SEQ ID NO: 1009114 - RNA, 19 nt, Artificial Sequence
  Description of Artificial Sequence: Synthetic oligonucleotide
  Sense strand starting at position 2245 of SEQ ID NO: 914505
acgaguucccucggauuaa

SEQ ID NO: 1009115 - RNA, 19 nt, Artificial Sequence
  Description of Artificial Sequence: Synthetic oligonucleotide
  Antisense strand to SEQ ID NO: 1009114
uuaauccgagggaacucgu

SEQ ID NO: 1009116 - RNA, 19 nt, Artificial Sequence
  Description of Artificial Sequence: Synthetic oligonucleotide
  Sense strand starting at position 2257 of SEQ ID NO: 914505
ggauuaaacgccggagaga

SEQ ID NO: 1009117 - RNA, 19 nt, Artificial Sequence
  Description of Artificial Sequence: Synthetic oligonucleotide
  Antisense strand to SEQ ID NO: 1009116
ucucuccggcguuuaaucc

SEQ ID NO: 1009118 - RNA, 19 nt, Artificial Sequence
  Description of Artificial Sequence: Synthetic oligonucleotide
  Sense strand starting at position 2413 of SEQ ID NO: 914505
ucgcgaacauuugcucaau

SEQ ID NO: 1009119 - RNA, 19 nt, Artificial Sequence
  Description of Artificial Sequence: Synthetic oligonucleotide
  Antisense strand to SEQ ID NO: 1009118
auugagcaaauguucgcga

SEQ ID NO: 1009120 - RNA, 19 nt, Artificial Sequence
  Description of Artificial Sequence: Synthetic oligonucleotide
  Sense strand starting at position 2414 of SEQ ID NO: 914505
cgcgaacauuugcucaauu

SEQ ID NO: 1009121 - RNA, 19 nt, Artificial Sequence
  Description of Artificial Sequence: Synthetic oligonucleotide
  Antisense strand to SEQ ID NO: 1009120
aauugagcaaauguucgcg

SEQ ID NO: 1009122 - RNA, 19 nt, Artificial Sequence
  Description of Artificial Sequence: Synthetic oligonucleotide
  Sense strand starting at position 2415 of SEQ ID NO: 914505
gcgaacauuugcucaauug

SEQ ID NO: 1009123 - RNA, 19 nt, Artificial Sequence
  Description of Artificial Sequence: Synthetic oligonucleotide
  Antisense strand to SEQ ID NO: 1009122
caauugagcaaauguucgc

SEQ ID NO: 1009124 - RNA, 19 nt, Artificial Sequence
  Description of Artificial Sequence: Synthetic oligonucleotide
  Sense strand starting at position 2533 of SEQ ID NO: 914505
agagcuccgggaugucauu

SEQ ID NO: 1009125 - RNA, 19 nt, Artificial Sequence
  Description of Artificial Sequence: Synthetic oligonucleotide
  Antisense strand to SEQ ID NO: 1009124
aaugacaucccggagcucu

SEQ ID NO: 1009126 - RNA, 19 nt, Artificial Sequence
  Description of Artificial Sequence: Synthetic oligonucleotide
  Sense strand starting at position 2545 of SEQ ID NO: 914505
ugucauuggccggcgacau

SEQ ID NO: 1009127 - RNA, 19 nt, Artificial Sequence
  Description of Artificial Sequence: Synthetic oligonucleotide
  Antisense strand to SEQ ID NO: 1009126
augucgccggccaaugaca

SEQ ID NO: 1009128 - RNA, 19 nt, Artificial Sequence
  Description of Artificial Sequence: Synthetic oligonucleotide
  Sense strand starting at position 3536 of SEQ ID NO: 914505
ggaacagaaugcucugauu

SEQ ID NO: 1009129 - RNA, 19 nt, Artificial Sequence
  Description of Artificial Sequence: Synthetic oligonucleotide
  Antisense strand to SEQ ID NO: 1009128
aaucagagcauucuguucc

SEQ ID NO: 1009130 - RNA, 19 nt, Artificial Sequence
  Description of Artificial Sequence: Synthetic oligonucleotide
  Sense strand starting at position 3712 of SEQ ID NO: 914505
cugugccuucccuaaggaa

SEQ ID NO: 1009131 - RNA, 19 nt, Artificial Sequence
  Description of Artificial Sequence: Synthetic oligonucleotide
  Antisense strand to SEQ ID NO: 1009130
uuccuuagggaaggcacag

SEQ ID NO: 1009132 - RNA, 19 nt, Artificial Sequence
  Description of Artificial Sequence: Synthetic oligonucleotide
  Sense strand starting at position 3730 of SEQ ID NO: 914505
auuauauugugauuggcca

SEQ ID NO: 1009133 - RNA, 19 nt, Artificial Sequence
  Description of Artificial Sequence: Synthetic oligonucleotide
  Antisense strand to SEQ ID NO: 1009132
uggccaaucacaauauaau

SEQ ID NO: 1009134 - RNA, 19 nt, Artificial Sequence
  Description of Artificial Sequence: Synthetic oligonucleotide
  Sense strand starting at position 3734 of SEQ ID NO: 914505
uauugugauuggccacuua

SEQ ID NO: 1009135 - RNA, 19 nt, Artificial Sequence
  Description of Artificial Sequence: Synthetic oligonucleotide
  Antisense strand to SEQ ID NO: 1009134
uaaguggccaaucacaaua

SEQ ID NO: 1009136 - RNA, 19 nt, Artificial Sequence
  Description of Artificial Sequence: Synthetic oligonucleotide
  Sense strand starting at position 3844 of SEQ ID NO: 914505
aagugagauuugggacuuu

SEQ ID NO: 1009137 - RNA, 19 nt, Artificial Sequence
  Description of Artificial Sequence: Synthetic oligonucleotide
  Antisense strand to SEQ ID NO: 1009136
aaagucccaaaucucacuu

SEQ ID NO: 1009138 - RNA, 19 nt, Artificial Sequence
  Description of Artificial Sequence: Synthetic oligonucleotide
  Sense strand starting at position 3887 of SEQ ID NO: 914505
gucuuauuacaggaauguc

SEQ ID NO: 1009139 - RNA, 19 nt, Artificial Sequence
  Description of Artificial Sequence: Synthetic oligonucleotide
  Antisense strand to SEQ ID NO: 1009138
gacauuccuguaauaagac

SEQ ID NO: 1009140 - RNA, 19 nt, Artificial Sequence
  Description of Artificial Sequence: Synthetic oligonucleotide
  Sense strand starting at position 3930 of SEQ ID NO: 914505
guacuuacugcagaucaga

SEQ ID NO: 1009141 - RNA, 19 nt, Artificial Sequence
  Description of Artificial Sequence: Synthetic oligonucleotide
  Antisense strand to SEQ ID NO: 1009140
ucugaucugcaguaaguac

SEQ ID NO: 1009142 - RNA, 19 nt, Artificial Sequence
  Description of Artificial Sequence: Synthetic oligonucleotide
  Sense strand starting at position 3933 of SEQ ID NO: 914505
cuuacugcagaucagaauu

SEQ ID NO: 1009143 - RNA, 19 nt, Artificial Sequence
  Description of Artificial Sequence: Synthetic oligonucleotide
  Antisense strand to SEQ ID NO: 1009142
aauucugaucugcaguaag

SEQ ID NO: 1009144 - RNA, 19 nt, Artificial Sequence
  Description of Artificial Sequence: Synthetic oligonucleotide
  Sense strand starting at position 3955 of SEQ ID NO: 914505
acaagagagguuuguauac

SEQ ID NO: 1009145 - RNA, 19 nt, Artificial Sequence
  Description of Artificial Sequence: Synthetic oligonucleotide
  Antisense strand to SEQ ID NO: 1009144
guauacaaaccucucuugu

SEQ ID NO: 1009146 - RNA, 19 nt, Artificial Sequence
  Description of Artificial Sequence: Synthetic oligonucleotide
  Sense strand starting at position 209 of SEQ ID NO: 914506
gcuacugacucauuugcua

SEQ ID NO: 1009147 - RNA, 19 nt, Artificial Sequence
  Description of Artificial Sequence: Synthetic oligonucleotide
  Antisense strand to SEQ ID NO: 1009146
uagcaaaugagucaguagc

SEQ ID NO: 1009148 - RNA, 19 nt, Artificial Sequence
  Description of Artificial Sequence: Synthetic oligonucleotide
  Sense strand starting at position 217 of SEQ ID NO: 914506
cucauuugcuacucacagu

SEQ ID NO: 1009149 - RNA, 19 nt, Artificial Sequence
  Description of Artificial Sequence: Synthetic oligonucleotide
  Antisense strand to SEQ ID NO: 1009148
acugugaguagcaaaugag

SEQ ID NO: 1009150 - RNA, 19 nt, Artificial Sequence
  Description of Artificial Sequence: Synthetic oligonucleotide
  Sense strand starting at position 240 of SEQ ID NO: 914506
gcucucagccuuuggauaa

SEQ ID NO: 1009151 - RNA, 19 nt, Artificial Sequence
  Description of Artificial Sequence: Synthetic oligonucleotide
  Antisense strand to SEQ ID NO: 1009150
uuauccaaaggcugagagc

SEQ ID NO: 1009152 - RNA, 19 nt, Artificial Sequence
  Description of Artificial Sequence: Synthetic oligonucleotide
  Sense strand starting at position 496 of SEQ ID NO: 914506
cccuucuuccgggaauggu

SEQ ID NO: 1009153 - RNA, 19 nt, Artificial Sequence
  Description of Artificial Sequence: Synthetic oligonucleotide
  Antisense strand to SEQ ID NO: 1009152
accauucccggaagaaggg

SEQ ID NO: 1009154 - RNA, 19 nt, Artificial Sequence
  Description of Artificial Sequence: Synthetic oligonucleotide
  Sense strand starting at position 522 of SEQ ID NO: 914506
cccagaagucgcugauaaa

SEQ ID NO: 1009155 - RNA, 19 nt, Artificial Sequence
  Description of Artificial Sequence: Synthetic oligonucleotide
  Antisense strand to SEQ ID NO: 1009154
uuuaucagcgacuucuggg

SEQ ID NO: 1009156 - RNA, 19 nt, Artificial Sequence
  Description of Artificial Sequence: Synthetic oligonucleotide
  Sense strand starting at position 572 of SEQ ID NO: 914506
ccucgaggucuuuaaacuc

SEQ ID NO: 1009157 - RNA, 19 nt, Artificial Sequence
  Description of Artificial Sequence: Synthetic oligonucleotide
  Antisense strand to SEQ ID NO: 1009156
gaguuuaaagaccucgagg

SEQ ID NO: 1009158 - RNA, 19 nt, Artificial Sequence
  Description of Artificial Sequence: Synthetic oligonucleotide
  Sense strand starting at position 950 of SEQ ID NO: 914506
ugggucacuucccuaaacu

SEQ ID NO: 1009159 - RNA, 19 nt, Artificial Sequence
  Description of Artificial Sequence: Synthetic oligonucleotide
  Antisense strand to SEQ ID NO: 1009158
aguuuagggaagugaccca

SEQ ID NO: 1009160 - RNA, 19 nt, Artificial Sequence
  Description of Artificial Sequence: Synthetic oligonucleotide
  Sense strand starting at position 951 of SEQ ID NO: 914506
gggucacuucccuaaacuc

SEQ ID NO: 1009161 - RNA, 19 nt, Artificial Sequence
  Description of Artificial Sequence: Synthetic oligonucleotide
  Antisense strand to SEQ ID NO: 1009160
gaguuuagggaagugaccc

SEQ ID NO: 1009162 - RNA, 19 nt, Artificial Sequence
  Description of Artificial Sequence: Synthetic oligonucleotide
  Sense strand starting at position 1099 of SEQ ID NO: 914506
gugagaacgcagcucguua

SEQ ID NO: 1009163 - RNA, 19 nt, Artificial Sequence
  Description of Artificial Sequence: Synthetic oligonucleotide
  Antisense strand to SEQ ID NO: 1009162
uaacgagcugcguucucac

SEQ ID NO: 1009164 - RNA, 19 nt, Artificial Sequence
  Description of Artificial Sequence: Synthetic oligonucleotide
  Sense strand starting at position 1409 of SEQ ID NO: 914506
ccgcaugcuccagucgaga

SEQ ID NO: 1009165 - RNA, 19 nt, Artificial Sequence
  Description of Artificial Sequence: Synthetic oligonucleotide
  Antisense strand to SEQ ID NO: 1009164
ucucgacuggagcaugcgg

SEQ ID NO: 1009166 - RNA, 19 nt, Artificial Sequence
  Description of Artificial Sequence: Synthetic oligonucleotide
  Sense strand starting at position 1759 of SEQ ID NO: 914506
cucaccauguuuccggaaa

SEQ ID NO: 1009167 - RNA, 19 nt, Artificial Sequence
  Description of Artificial Sequence: Synthetic oligonucleotide
  Antisense strand to SEQ ID NO: 1009166
uuuccggaaacauggugag

SEQ ID NO: 1009168 - RNA, 19 nt, Artificial Sequence
  Description of Artificial Sequence: Synthetic oligonucleotide
  Sense strand starting at position 2201 of SEQ ID NO: 914506
ugguauuaucuggaucccu

SEQ ID NO: 1009169 - RNA, 19 nt, Artificial Sequence
  Description of Artificial Sequence: Synthetic oligonucleotide
  Antisense strand to SEQ ID NO: 1009168
agggauccagauaauacca

SEQ ID NO: 1009170 - RNA, 19 nt, Artificial Sequence
  Description of Artificial Sequence: Synthetic oligonucleotide
  Sense strand starting at position 2272 of SEQ ID NO: 914506
acuauugauuagccuggaa

SEQ ID NO: 1009171 - RNA, 19 nt, Artificial Sequence
  Description of Artificial Sequence: Synthetic oligonucleotide
  Antisense strand to SEQ ID NO: 1009170
uuccaggcuaaucaauagu

SEQ ID NO: 1009172 - RNA, 19 nt, Artificial Sequence
  Description of Artificial Sequence: Synthetic oligonucleotide
  Sense strand starting at position 2325 of SEQ ID NO: 914506
aggcgucgucagucggaua

SEQ ID NO: 1009173 - RNA, 19 nt, Artificial Sequence
  Description of Artificial Sequence: Synthetic oligonucleotide
  Antisense strand to SEQ ID NO: 1009172
uauccgacugacgacgccu

SEQ ID NO: 1009174 - RNA, 19 nt, Artificial Sequence
  Description of Artificial Sequence: Synthetic oligonucleotide
  Sense strand starting at position 2347 of SEQ ID NO: 914506
acuaguacucugcaugugu

SEQ ID NO: 1009175 - RNA, 19 nt, Artificial Sequence
  Description of Artificial Sequence: Synthetic oligonucleotide
  Antisense strand to SEQ ID NO: 1009174
acacaugcagaguacuagu

SEQ ID NO: 1009176 - RNA, 19 nt, Artificial Sequence
  Description of Artificial Sequence: Synthetic oligonucleotide
  Sense strand starting at position 2370 of SEQ ID NO: 914506
ccacucucgucuccugaaa

SEQ ID NO: 1009177 - RNA, 19 nt, Artificial Sequence
  Description of Artificial Sequence: Synthetic oligonucleotide
  Antisense strand to SEQ ID NO: 1009176
uuucaggagacgagagugg

SEQ ID NO: 1009178 - RNA, 19 nt, Artificial Sequence
  Description of Artificial Sequence: Synthetic oligonucleotide
  Sense strand starting at position 2449 of SEQ ID NO: 914506
caaggaaaucucugagagc

SEQ ID NO: 1009179 - RNA, 19 nt, Artificial Sequence
  Description of Artificial Sequence: Synthetic oligonucleotide
  Antisense strand to SEQ ID NO: 1009178
gcucucagagauuuccuug

SEQ ID NO: 1009180 - RNA, 19 nt, Artificial Sequence
  Description of Artificial Sequence: Synthetic oligonucleotide
  Sense strand starting at position 2467 of SEQ ID NO: 914506
cuuuguucuuguuuaaaga

SEQ ID NO: 1009181 - RNA, 19 nt, Artificial Sequence
  Description of Artificial Sequence: Synthetic oligonucleotide
  Antisense strand to SEQ ID NO: 1009180
ucuuuaaacaagaacaaag

SEQ ID NO: 1009182 - RNA, 19 nt, Artificial Sequence
  Description of Artificial Sequence: Synthetic oligonucleotide
  Sense strand starting at position 2477 of SEQ ID NO: 914506
guuuaaagauguuuggcaa

SEQ ID NO: 1009183 - RNA, 19 nt, Artificial Sequence
  Description of Artificial Sequence: Synthetic oligonucleotide
  Antisense strand to SEQ ID NO: 1009182
uugccaaacaucuuuaaac

SEQ ID NO: 1009184 - RNA, 19 nt, Artificial Sequence
  Description of Artificial Sequence: Synthetic oligonucleotide
  Sense strand starting at position 2478 of SEQ ID NO: 914506
uuuaaagauguuuggcaaa

SEQ ID NO: 1009185 - RNA, 19 nt, Artificial Sequence
  Description of Artificial Sequence: Synthetic oligonucleotide
  Antisense strand to SEQ ID NO: 1009184
uuugccaaacaucuuuaaa

SEQ ID NO: 1009186 - RNA, 19 nt, Artificial Sequence
  Description of Artificial Sequence: Synthetic oligonucleotide
  Sense strand starting at position 2480 of SEQ ID NO: 914506
uaaagauguuuggcaaagu

SEQ ID NO: 1009187 - RNA, 19 nt, Artificial Sequence
  Description of Artificial Sequence: Synthetic oligonucleotide
  Antisense strand to SEQ ID NO: 1009186
acuuugccaaacaucuuua

SEQ ID NO: 1009188 - RNA, 19 nt, Artificial Sequence
  Description of Artificial Sequence: Synthetic oligonucleotide
  Sense strand starting at position 2519 of SEQ ID NO: 914506
agacgaggguuugugcauu

SEQ ID NO: 1009189 - RNA, 19 nt, Artificial Sequence
  Description of Artificial Sequence: Synthetic oligonucleotide
  Antisense strand to SEQ ID NO: 1009188
aaugcacaaacccucgucu

SEQ ID NO: 1009190 - RNA, 19 nt, Artificial Sequence
  Description of Artificial Sequence: Synthetic oligonucleotide
  Sense strand starting at position 2563 of SEQ ID NO: 914506
uuacgugccaaugagaaga

SEQ ID NO: 1009191 - RNA, 19 nt, Artificial Sequence
  Description of Artificial Sequence: Synthetic oligonucleotide
  Antisense strand to SEQ ID NO: 1009190
ucuucucauuggcacguaa

SEQ ID NO: 1009192 - RNA, 19 nt, Artificial Sequence
  Description of Artificial Sequence: Synthetic oligonucleotide
  Sense strand starting at position 2614 of SEQ ID NO: 914506
ucgaguugauagccaggua

SEQ ID NO: 1009193 - RNA, 19 nt, Artificial Sequence
  Description of Artificial Sequence: Synthetic oligonucleotide
  Antisense strand to SEQ ID NO: 1009192
uaccuggcuaucaacucga

SEQ ID NO: 1009194 - RNA, 19 nt, Artificial Sequence
  Description of Artificial Sequence: Synthetic oligonucleotide
  Sense strand starting at position 2617 of SEQ ID NO: 914506
aguugauagccagguacau

SEQ ID NO: 1009195 - RNA, 19 nt, Artificial Sequence
  Description of Artificial Sequence: Synthetic oligonucleotide
  Antisense strand to SEQ ID NO: 1009194
auguaccuggcuaucaacu

SEQ ID NO: 1009196 - RNA, 19 nt, Artificial Sequence
  Description of Artificial Sequence: Synthetic oligonucleotide
  Sense strand starting at position 2627 of SEQ ID NO: 914506
cagguacaugguuauucua

SEQ ID NO: 1009197 - RNA, 19 nt, Artificial Sequence
  Description of Artificial Sequence: Synthetic oligonucleotide
  Antisense strand to SEQ ID NO: 1009196
uagaauaaccauguaccug

SEQ ID NO: 1009198 - RNA, 19 nt, Artificial Sequence
  Description of Artificial Sequence: Synthetic oligonucleotide
  Sense strand starting at position 2629 of SEQ ID NO: 914506
gguacaugguuauucuaac

SEQ ID NO: 1009199 - RNA, 19 nt, Artificial Sequence
  Description of Artificial Sequence: Synthetic oligonucleotide
  Antisense strand to SEQ ID NO: 1009198
guuagaauaaccauguacc

SEQ ID NO: 1009200 - RNA, 19 nt, Artificial Sequence
  Description of Artificial Sequence: Synthetic oligonucleotide
  Sense strand starting at position 2630 of SEQ ID NO: 914506
guacaugguuauucuaaca

SEQ ID NO: 1009201 - RNA, 19 nt, Artificial Sequence
  Description of Artificial Sequence: Synthetic oligonucleotide
  Antisense strand to SEQ ID NO: 1009200
uguuagaauaaccauguac

SEQ ID NO: 1009202 - RNA, 19 nt, Artificial Sequence
  Description of Artificial Sequence: Synthetic oligonucleotide
  Sense strand starting at position 2660 of SEQ ID NO: 914506
gagacaaguucugugguag

SEQ ID NO: 1009203 - RNA, 19 nt, Artificial Sequence
  Description of Artificial Sequence: Synthetic oligonucleotide
  Antisense strand to SEQ ID NO: 1009202
cuaccacagaacuugucuc

SEQ ID NO: 1009204 - RNA, 19 nt, Artificial Sequence
  Description of Artificial Sequence: Synthetic oligonucleotide
  Sense strand starting at position 2661 of SEQ ID NO: 914506
agacaaguucugugguagu

SEQ ID NO: 1009205 - RNA, 19 nt, Artificial Sequence
  Description of Artificial Sequence: Synthetic oligonucleotide
  Antisense strand to SEQ ID NO: 1009204
acuaccacagaacuugucu

SEQ ID NO: 1009206 - RNA, 19 nt, Artificial Sequence
  Description of Artificial Sequence: Synthetic oligonucleotide
  Sense strand starting at position 2727 of SEQ ID NO: 914506
uuuguuguucuagaacagu

SEQ ID NO: 1009207 - RNA, 19 nt, Artificial Sequence
  Description of Artificial Sequence: Synthetic oligonucleotide
  Antisense strand to SEQ ID NO: 1009206
acuguucuagaacaacaaa

SEQ ID NO: 1009208 - RNA, 19 nt, Artificial Sequence
  Description of Artificial Sequence: Synthetic oligonucleotide
  Sense strand starting at position 2836 of SEQ ID NO: 914506
aacggaauuaaggguguaa

SEQ ID NO: 1009209 - RNA, 19 nt, Artificial Sequence
  Description of Artificial Sequence: Synthetic oligonucleotide
  Antisense strand to SEQ ID NO: 1009208
uuacacccuuaauuccguu

SEQ ID NO: 1009210 - RNA, 19 nt, Artificial Sequence
  Description of Artificial Sequence: Synthetic oligonucleotide
  Sense strand starting at position 2838 of SEQ ID NO: 914506
cggaauuaaggguguaaac

SEQ ID NO: 1009211 - RNA, 19 nt, Artificial Sequence
  Description of Artificial Sequence: Synthetic oligonucleotide
  Antisense strand to SEQ ID NO: 1009210
guuuacacccuuaauuccg

SEQ ID NO: 1009212 - RNA, 19 nt, Artificial Sequence
  Description of Artificial Sequence: Synthetic oligonucleotide
  Sense strand starting at position 2848 of SEQ ID NO: 914506
gguguaaacggagagcgau

SEQ ID NO: 1009213 - RNA, 19 nt, Artificial Sequence
  Description of Artificial Sequence: Synthetic oligonucleotide
  Antisense strand to SEQ ID NO: 1009212
aucgcucuccguuuacacc

SEQ ID NO: 1009214 - RNA, 19 nt, Artificial Sequence
  Description of Artificial Sequence: Synthetic oligonucleotide
  Sense strand starting at position 3033 of SEQ ID NO: 914506
gccuuagaguuuccaagag

SEQ ID NO: 1009215 - RNA, 19 nt, Artificial Sequence
  Description of Artificial Sequence: Synthetic oligonucleotide
  Antisense strand to SEQ ID NO: 1009214
cucuuggaaacucuaaggc

SEQ ID NO: 1009216 - RNA, 19 nt, Artificial Sequence
  Description of Artificial Sequence: Synthetic oligonucleotide
  Sense strand starting at position 3037 of SEQ ID NO: 914506
uagaguuuccaagagcaac

SEQ ID NO: 1009217 - RNA, 19 nt, Artificial Sequence
  Description of Artificial Sequence: Synthetic oligonucleotide
  Antisense strand to SEQ ID NO: 1009216
guugcucuuggaaacucua

SEQ ID NO: 1009218 - RNA, 19 nt, Artificial Sequence
  Description of Artificial Sequence: Synthetic oligonucleotide
  Sense strand starting at position 3116 of SEQ ID NO: 914506
gcgggaugcccuagauguc

SEQ ID NO: 1009219 - RNA, 19 nt, Artificial Sequence
  Description of Artificial Sequence: Synthetic oligonucleotide
  Antisense strand to SEQ ID NO: 1009218
gacaucuagggcaucccgc

SEQ ID NO: 1009220 - RNA, 19 nt, Artificial Sequence
  Description of Artificial Sequence: Synthetic oligonucleotide
  Sense strand starting at position 3122 of SEQ ID NO: 914506
ugcccuagauguccuuauu

SEQ ID NO: 1009221 - RNA, 19 nt, Artificial Sequence
  Description of Artificial Sequence: Synthetic oligonucleotide
  Antisense strand to SEQ ID NO: 1009220
aauaaggacaucuagggca

SEQ ID NO: 1009222 - RNA, 19 nt, Artificial Sequence
  Description of Artificial Sequence: Synthetic oligonucleotide
  Sense strand starting at position 3125 of SEQ ID NO: 914506
ccuagauguccuuauuagg

SEQ ID NO: 1009223 - RNA, 19 nt, Artificial Sequence
  Description of Artificial Sequence: Synthetic oligonucleotide
  Antisense strand to SEQ ID NO: 1009222
ccuaauaaggacaucuagg

SEQ ID NO: 1009224 - RNA, 19 nt, Artificial Sequence
  Description of Artificial Sequence: Synthetic oligonucleotide
  Sense strand starting at position 3227 of SEQ ID NO: 914506
ggagcccauugguccaauu

SEQ ID NO: 1009225 - RNA, 19 nt, Artificial Sequence
  Description of Artificial Sequence: Synthetic oligonucleotide
  Antisense strand to SEQ ID NO: 1009224
aauuggaccaaugggcucc

SEQ ID NO: 1009226 - RNA, 19 nt, Artificial Sequence
  Description of Artificial Sequence: Synthetic oligonucleotide
  Sense strand starting at position 22 of SEQ ID NO: 914507
ucuccagagucugcucauu

SEQ ID NO: 1009227 - RNA, 19 nt, Artificial Sequence
  Description of Artificial Sequence: Synthetic oligonucleotide
  Antisense strand to SEQ ID NO: 1009226
aaugagcagacucuggaga

SEQ ID NO: 1009228 - RNA, 19 nt, Artificial Sequence
  Description of Artificial Sequence: Synthetic oligonucleotide
  Sense strand starting at position 24 of SEQ ID NO: 914507
uccagagucugcucauuug

SEQ ID NO: 1009229 - RNA, 19 nt, Artificial Sequence
  Description of Artificial Sequence: Synthetic oligonucleotide
  Antisense strand to SEQ ID NO: 1009228
caaaugagcagacucugga

SEQ ID NO: 1009230 - RNA, 19 nt, Artificial Sequence
  Description of Artificial Sequence: Synthetic oligonucleotide
  Sense strand starting at position 56 of SEQ ID NO: 914507
augcuuaaacccugagaag

SEQ ID NO: 1009231 - RNA, 19 nt, Artificial Sequence
  Description of Artificial Sequence: Synthetic oligonucleotide
  Antisense strand to SEQ ID NO: 1009230
cuucucaggguuuaagcau

SEQ ID NO: 1009232 - RNA, 19 nt, Artificial Sequence
  Description of Artificial Sequence: Synthetic oligonucleotide
  Sense strand starting at position 411 of SEQ ID NO: 914507
aaagauguagaguguaaga

SEQ ID NO: 1009233 - RNA, 19 nt, Artificial Sequence
  Description of Artificial Sequence: Synthetic oligonucleotide
  Antisense strand to SEQ ID NO: 1009232
ucuuacacucuacaucuuu

SEQ ID NO: 1009234 - RNA, 19 nt, Artificial Sequence
  Description of Artificial Sequence: Synthetic oligonucleotide
  Sense strand starting at position 413 of SEQ ID NO: 914507
agauguagaguguaagauc

SEQ ID NO: 1009235 - RNA, 19 nt, Artificial Sequence
  Description of Artificial Sequence: Synthetic oligonucleotide
  Antisense strand to SEQ ID NO: 1009234
gaucuuacacucuacaucu

SEQ ID NO: 1009236 - RNA, 19 nt, Artificial Sequence
  Description of Artificial Sequence: Synthetic oligonucleotide
  Sense strand starting at position 421 of SEQ ID NO: 914507
aguguaagaucaccaguga

SEQ ID NO: 1009237 - RNA, 19 nt, Artificial Sequence
  Description of Artificial Sequence: Synthetic oligonucleotide
  Antisense strand to SEQ ID NO: 1009236
ucacuggugaucuuacacu

SEQ ID NO: 1009238 - RNA, 19 nt, Artificial Sequence
  Description of Artificial Sequence: Synthetic oligonucleotide
  Sense strand starting at position 422 of SEQ ID NO: 914507
guguaagaucaccagugaa

SEQ ID NO: 1009239 - RNA, 19 nt, Artificial Sequence
  Description of Artificial Sequence: Synthetic oligonucleotide
  Antisense strand to SEQ ID NO: 1009238
uucacuggugaucuuacac

SEQ ID NO: 1009240 - RNA, 19 nt, Artificial Sequence
  Description of Artificial Sequence: Synthetic oligonucleotide
  Sense strand starting at position 1019 of SEQ ID NO: 914507
gcgcuagucaaugcuaacu

SEQ ID NO: 1009241 - RNA, 19 nt, Artificial Sequence
  Description of Artificial Sequence: Synthetic oligonucleotide
  Antisense strand to SEQ ID NO: 1009240
aguuagcauugacuagcgc

SEQ ID NO: 1009242 - RNA, 19 nt, Artificial Sequence
  Description of Artificial Sequence: Synthetic oligonucleotide
  Sense strand starting at position 1073 of SEQ ID NO: 914507
ccgaacuccuucuuuagaa

SEQ ID NO: 1009243 - RNA, 19 nt, Artificial Sequence
  Description of Artificial Sequence: Synthetic oligonucleotide
  Antisense strand to SEQ ID NO: 1009242
uucuaaagaaggaguucgg

SEQ ID NO: 1009244 - RNA, 19 nt, Artificial Sequence
  Description of Artificial Sequence: Synthetic oligonucleotide
  Sense strand starting at position 1074 of SEQ ID NO: 914507
cgaacuccuucuuuagaaa

SEQ ID NO: 1009245 - RNA, 19 nt, Artificial Sequence
  Description of Artificial Sequence: Synthetic oligonucleotide
  Antisense strand to SEQ ID NO: 1009244
uuucuaaagaaggaguucg

SEQ ID NO: 1009246 - RNA, 19 nt, Artificial Sequence
  Description of Artificial Sequence: Synthetic oligonucleotide
  Sense strand starting at position 2000 of SEQ ID NO: 914507
agcugcguacgucauuuaa

SEQ ID NO: 1009247 - RNA, 19 nt, Artificial Sequence
  Description of Artificial Sequence: Synthetic oligonucleotide
  Antisense strand to SEQ ID NO: 1009246
uuaaaugacguacgcagcu

SEQ ID NO: 1009248 - RNA, 19 nt, Artificial Sequence
  Description of Artificial Sequence: Synthetic oligonucleotide
  Sense strand starting at position 2002 of SEQ ID NO: 914507
cugcguacgucauuuaagu

SEQ ID NO: 1009249 - RNA, 19 nt, Artificial Sequence
  Description of Artificial Sequence: Synthetic oligonucleotide
  Antisense strand to SEQ ID NO: 1009248
acuuaaaugacguacgcag

SEQ ID NO: 1009250 - RNA, 19 nt, Artificial Sequence
  Description of Artificial Sequence: Synthetic oligonucleotide
  Sense strand starting at position 2070 of SEQ ID NO: 914507
ggaaauaaguauucucuga

SEQ ID NO: 1009251 - RNA, 19 nt, Artificial Sequence
  Description of Artificial Sequence: Synthetic oligonucleotide
  Antisense strand to SEQ ID NO: 1009250
ucagagaauacuuauuucc

SEQ ID NO: 1009252 - RNA, 19 nt, Artificial Sequence
  Description of Artificial Sequence: Synthetic oligonucleotide
  Sense strand starting at position 2074 of SEQ ID NO: 914507
auaaguauucucugacagu

SEQ ID NO: 1009253 - RNA, 19 nt, Artificial Sequence
  Description of Artificial Sequence: Synthetic oligonucleotide
  Antisense strand to SEQ ID NO: 1009252
acugucagagaauacuuau

SEQ ID NO: 1009254 - RNA, 19 nt, Artificial Sequence
  Description of Artificial Sequence: Synthetic oligonucleotide
  Sense strand starting at position 2109 of SEQ ID NO: 914507
cagggauaggcaggaucau

SEQ ID NO: 1009255 - RNA, 19 nt, Artificial Sequence
  Description of Artificial Sequence: Synthetic oligonucleotide
  Antisense strand to SEQ ID NO: 1009254
augauccugccuaucccug

SEQ ID NO: 1009256 - RNA, 19 nt, Artificial Sequence
  Description of Artificial Sequence: Synthetic oligonucleotide
  Sense strand starting at position 2118 of SEQ ID NO: 914507
gcaggaucaucuccauuac

SEQ ID NO: 1009257 - RNA, 19 nt, Artificial Sequence
  Description of Artificial Sequence: Synthetic oligonucleotide
  Antisense strand to SEQ ID NO: 1009256
guaauggagaugauccugc

SEQ ID NO: 1009258 - RNA, 19 nt, Artificial Sequence
  Description of Artificial Sequence: Synthetic oligonucleotide
  Sense strand starting at position 2281 of SEQ ID NO: 914507
uuaggaauuagucgggcuu

SEQ ID NO: 1009259 - RNA, 19 nt, Artificial Sequence
  Description of Artificial Sequence: Synthetic oligonucleotide
  Antisense strand to SEQ ID NO: 1009258
aagcccgacuaauuccuaa

SEQ ID NO: 1009260 - RNA, 19 nt, Artificial Sequence
  Description of Artificial Sequence: Synthetic oligonucleotide
  Sense strand starting at position 2341 of SEQ ID NO: 914507
gcagaacaaucguuugagu

SEQ ID NO: 1009261 - RNA, 19 nt, Artificial Sequence
  Description of Artificial Sequence: Synthetic oligonucleotide
  Antisense strand to SEQ ID NO: 1009260
acucaaacgauuguucugc

SEQ ID NO: 1009262 - RNA, 19 nt, Artificial Sequence
  Description of Artificial Sequence: Synthetic oligonucleotide
  Sense strand starting at position 2360 of SEQ ID NO: 914507
ccaggaguuagagguuagu

SEQ ID NO: 1009263 - RNA, 19 nt, Artificial Sequence
  Description of Artificial Sequence: Synthetic oligonucleotide
  Antisense strand to SEQ ID NO: 1009262
acuaaccucuaacuccugg

SEQ ID NO: 1009264 - RNA, 19 nt, Artificial Sequence
  Description of Artificial Sequence: Synthetic oligonucleotide
  Sense strand starting at position 2370 of SEQ ID NO: 914507
gagguuagugagcacuacu

SEQ ID NO: 1009265 - RNA, 19 nt, Artificial Sequence
  Description of Artificial Sequence: Synthetic oligonucleotide
  Antisense strand to SEQ ID NO: 1009264
aguagugcucacuaaccuc

SEQ ID NO: 1009266 - RNA, 19 nt, Artificial Sequence
  Description of Artificial Sequence: Synthetic oligonucleotide
  Sense strand starting at position 2407 of SEQ ID NO: 914507
cagcaugauuccguaggaa

SEQ ID NO: 1009267 - RNA, 19 nt, Artificial Sequence
  Description of Artificial Sequence: Synthetic oligonucleotide
  Antisense strand to SEQ ID NO: 1009266
uuccuacggaaucaugcug

SEQ ID NO: 1009268 - RNA, 19 nt, Artificial Sequence
  Description of Artificial Sequence: Synthetic oligonucleotide
  Sense strand starting at position 2613 of SEQ ID NO: 914507
gaagcugaggcguauggau

SEQ ID NO: 1009269 - RNA, 19 nt, Artificial Sequence
  Description of Artificial Sequence: Synthetic oligonucleotide
  Antisense strand to SEQ ID NO: 1009268
auccauacgccucagcuuc

SEQ ID NO: 1009270 - RNA, 19 nt, Artificial Sequence
  Description of Artificial Sequence: Synthetic oligonucleotide
  Sense strand starting at position 2904 of SEQ ID NO: 914507
aaaugcuuauguguauagu

SEQ ID NO: 1009271 - RNA, 19 nt, Artificial Sequence
  Description of Artificial Sequence: Synthetic oligonucleotide
  Antisense strand to SEQ ID NO: 1009270
acuauacacauaagcauuu

SEQ ID NO: 1009272 - RNA, 19 nt, Artificial Sequence
  Description of Artificial Sequence: Synthetic oligonucleotide
  Sense strand starting at position 2905 of SEQ ID NO: 914507
aaugcuuauguguauaguu

SEQ ID NO: 1009273 - RNA, 19 nt, Artificial Sequence
  Description of Artificial Sequence: Synthetic oligonucleotide
  Antisense strand to SEQ ID NO: 1009272
aacuauacacauaagcauu

SEQ ID NO: 1009274 - RNA, 19 nt, Artificial Sequence
  Description of Artificial Sequence: Synthetic oligonucleotide
  Sense strand starting at position 3180 of SEQ ID NO: 914507
uccucacugugugcugaaa

SEQ ID NO: 1009275 - RNA, 19 nt, Artificial Sequence
  Description of Artificial Sequence: Synthetic oligonucleotide
  Antisense strand to SEQ ID NO: 1009274
uuucagcacacagugagga

SEQ ID NO: 1009276 - RNA, 19 nt, Artificial Sequence
  Description of Artificial Sequence: Synthetic oligonucleotide
  Sense strand starting at position 3226 of SEQ ID NO: 914507
aaauuuccugugugucuga

SEQ ID NO: 1009277 - RNA, 19 nt, Artificial Sequence
  Description of Artificial Sequence: Synthetic oligonucleotide
  Antisense strand to SEQ ID NO: 1009276
ucagacacacaggaaauuu

SEQ ID NO: 1009278 - RNA, 19 nt, Artificial Sequence
  Description of Artificial Sequence: Synthetic oligonucleotide
  Sense strand starting at position 3235 of SEQ ID NO: 914507
gugugucugauggagucuu

SEQ ID NO: 1009279 - RNA, 19 nt, Artificial Sequence
  Description of Artificial Sequence: Synthetic oligonucleotide
  Antisense strand to SEQ ID NO: 1009278
aagacuccaucagacacac

SEQ ID NO: 1009280 - RNA, 19 nt, Artificial Sequence
  Description of Artificial Sequence: Synthetic oligonucleotide
  Sense strand starting at position 3371 of SEQ ID NO: 914507
aguaaaggauaccaauauu

SEQ ID NO: 1009281 - RNA, 19 nt, Artificial Sequence
  Description of Artificial Sequence: Synthetic oligonucleotide
  Antisense strand to SEQ ID NO: 1009280
aauauugguauccuuuacu

SEQ ID NO: 1009282 - RNA, 19 nt, Artificial Sequence
  Description of Artificial Sequence: Synthetic oligonucleotide
  Sense strand starting at position 3433 of SEQ ID NO: 914507
gcagaaagccuuuagauga

SEQ ID NO: 1009283 - RNA, 19 nt, Artificial Sequence
  Description of Artificial Sequence: Synthetic oligonucleotide
  Antisense strand to SEQ ID NO: 1009282
ucaucuaaaggcuuucugc

SEQ ID NO: 1009284 - RNA, 19 nt, Artificial Sequence
  Description of Artificial Sequence: Synthetic oligonucleotide
  Sense strand starting at position 3447 of SEQ ID NO: 914507
gaugaaagguaaugaagau

SEQ ID NO: 1009285 - RNA, 19 nt, Artificial Sequence
  Description of Artificial Sequence: Synthetic oligonucleotide
  Antisense strand to SEQ ID NO: 1009284
aucuucauuaccuuucauc

SEQ ID NO: 1009286 - RNA, 19 nt, Artificial Sequence
  Description of Artificial Sequence: Synthetic oligonucleotide
  Sense strand starting at position 3522 of SEQ ID NO: 914507
ucaaguugaacuggugaca

SEQ ID NO: 1009287 - RNA, 19 nt, Artificial Sequence
  Description of Artificial Sequence: Synthetic oligonucleotide
  Antisense strand to SEQ ID NO: 1009286
ugucaccaguucaacuuga

SEQ ID NO: 1009288 - RNA, 19 nt, Artificial Sequence
  Description of Artificial Sequence: Synthetic oligonucleotide
  Sense strand starting at position 3670 of SEQ ID NO: 914507
guacgagauuuaagagggu

SEQ ID NO: 1009289 - RNA, 19 nt, Artificial Sequence
  Description of Artificial Sequence: Synthetic oligonucleotide
  Antisense strand to SEQ ID NO: 1009288
acccucuuaaaucucguac

SEQ ID NO: 1009290 - RNA, 19 nt, Artificial Sequence
  Description of Artificial Sequence: Synthetic oligonucleotide
  Sense strand starting at position 3712 of SEQ ID NO: 914507
gaccauuaggcacaguuaa

SEQ ID NO: 1009291 - RNA, 19 nt, Artificial Sequence
  Description of Artificial Sequence: Synthetic oligonucleotide
  Antisense strand to SEQ ID NO: 1009290
uuaacugugccuaaugguc

SEQ ID NO: 1009292 - RNA, 19 nt, Artificial Sequence
  Description of Artificial Sequence: Synthetic oligonucleotide
  Sense strand starting at position 3784 of SEQ ID NO: 914507
gaagguugagccuguuaca

SEQ ID NO: 1009293 - RNA, 19 nt, Artificial Sequence
  Description of Artificial Sequence: Synthetic oligonucleotide
  Antisense strand to SEQ ID NO: 1009292
uguaacaggcucaaccuuc

SEQ ID NO: 1009294 - RNA, 19 nt, Artificial Sequence
  Description of Artificial Sequence: Synthetic oligonucleotide
  Sense strand starting at position 3841 of SEQ ID NO: 914507
uggcuuacauccuugagua

SEQ ID NO: 1009295 - RNA, 19 nt, Artificial Sequence
  Description of Artificial Sequence: Synthetic oligonucleotide
  Antisense strand to SEQ ID NO: 1009294
uacucaaggauguaagcca

SEQ ID NO: 1009296 - RNA, 19 nt, Artificial Sequence
  Description of Artificial Sequence: Synthetic oligonucleotide
  Sense strand starting at position 3842 of SEQ ID NO: 914507
ggcuuacauccuugaguaa

SEQ ID NO: 1009297 - RNA, 19 nt, Artificial Sequence
  Description of Artificial Sequence: Synthetic oligonucleotide
  Antisense strand to SEQ ID NO: 1009296
uuacucaaggauguaagcc

SEQ ID NO: 1009298 - RNA, 19 nt, Artificial Sequence
  Description of Artificial Sequence: Synthetic oligonucleotide
  Sense strand starting at position 3843 of SEQ ID NO: 914507
gcuuacauccuugaguaag

SEQ ID NO: 1009299 - RNA, 19 nt, Artificial Sequence
  Description of Artificial Sequence: Synthetic oligonucleotide
  Antisense strand to SEQ ID NO: 1009298
cuuacucaaggauguaagc

SEQ ID NO: 1009300 - RNA, 19 nt, Artificial Sequence
  Description of Artificial Sequence: Synthetic oligonucleotide
  Sense strand starting at position 3845 of SEQ ID NO: 914507
uuacauccuugaguaagag

SEQ ID NO: 1009301 - RNA, 19 nt, Artificial Sequence
  Description of Artificial Sequence: Synthetic oligonucleotide
  Antisense strand to SEQ ID NO: 1009300
cucuuacucaaggauguaa

SEQ ID NO: 1009302 - RNA, 19 nt, Artificial Sequence
  Description of Artificial Sequence: Synthetic oligonucleotide
  Sense strand starting at position 3882 of SEQ ID NO: 914507
agggaaucuuaccuaugca

SEQ ID NO: 1009303 - RNA, 19 nt, Artificial Sequence
  Description of Artificial Sequence: Synthetic oligonucleotide
  Antisense strand to SEQ ID NO: 1009302
ugcauagguaagauucccu

SEQ ID NO: 1009304 - RNA, 19 nt, Artificial Sequence
  Description of Artificial Sequence: Synthetic oligonucleotide
  Sense strand starting at position 3953 of SEQ ID NO: 914507
gccagaucacaguagauug

SEQ ID NO: 1009305 - RNA, 19 nt, Artificial Sequence
  Description of Artificial Sequence: Synthetic oligonucleotide
  Antisense strand to SEQ ID NO: 1009304
caaucuacugugaucuggc

SEQ ID NO: 1009306 - RNA, 19 nt, Artificial Sequence
  Description of Artificial Sequence: Synthetic oligonucleotide
  Sense strand starting at position 18 of SEQ ID NO: 914508
uugauucuacaucgaauau

SEQ ID NO: 1009307 - RNA, 19 nt, Artificial Sequence
  Description of Artificial Sequence: Synthetic oligonucleotide
  Antisense strand to SEQ ID NO: 1009306
auauucgauguagaaucaa

SEQ ID NO: 1009308 - RNA, 19 nt, Artificial Sequence
  Description of Artificial Sequence: Synthetic oligonucleotide
  Sense strand starting at position 120 of SEQ ID NO: 914508
gaggaaacagcaugcuauu

SEQ ID NO: 1009309 - RNA, 19 nt, Artificial Sequence
  Description of Artificial Sequence: Synthetic oligonucleotide
  Antisense strand to SEQ ID NO: 1009308
aauagcaugcuguuuccuc

SEQ ID NO: 1009310 - RNA, 19 nt, Artificial Sequence
  Description of Artificial Sequence: Synthetic oligonucleotide
  Sense strand starting at position 238 of SEQ ID NO: 914508
cugcauuuaugauguacca

SEQ ID NO: 1009311 - RNA, 19 nt, Artificial Sequence
  Description of Artificial Sequence: Synthetic oligonucleotide
  Antisense strand to SEQ ID NO: 1009310
ugguacaucauaaaugcag

SEQ ID NO: 1009312 - RNA, 19 nt, Artificial Sequence
  Description of Artificial Sequence: Synthetic oligonucleotide
  Sense strand starting at position 261 of SEQ ID NO: 914508
acuuguuugucacucuuaa

SEQ ID NO: 1009313 - RNA, 19 nt, Artificial Sequence
  Description of Artificial Sequence: Synthetic oligonucleotide
  Antisense strand to SEQ ID NO: 1009312
uuaagagugacaaacaagu

SEQ ID NO: 1009314 - RNA, 19 nt, Artificial Sequence
  Description of Artificial Sequence: Synthetic oligonucleotide
  Sense strand starting at position 314 of SEQ ID NO: 914508
uuauauaacuugggaaaga

SEQ ID NO: 1009315 - RNA, 19 nt, Artificial Sequence
  Description of Artificial Sequence: Synthetic oligonucleotide
  Antisense strand to SEQ ID NO: 1009314
ucuuucccaaguuauauaa

SEQ ID NO: 1009316 - RNA, 19 nt, Artificial Sequence
  Description of Artificial Sequence: Synthetic oligonucleotide
  Sense strand starting at position 368 of SEQ ID NO: 914508
uuauuaacaccagguggaa

SEQ ID NO: 1009317 - RNA, 19 nt, Artificial Sequence
  Description of Artificial Sequence: Synthetic oligonucleotide
  Antisense strand to SEQ ID NO: 1009316
uuccaccugguguuaauaa

SEQ ID NO: 1009318 - RNA, 19 nt, Artificial Sequence
  Description of Artificial Sequence: Synthetic oligonucleotide
  Sense strand starting at position 418 of SEQ ID NO: 914508
acaguugcaugagcaauuu

SEQ ID NO: 1009319 - RNA, 19 nt, Artificial Sequence
  Description of Artificial Sequence: Synthetic oligonucleotide
  Antisense strand to SEQ ID NO: 1009318
aaauugcucaugcaacugu

SEQ ID NO: 1009320 - RNA, 19 nt, Artificial Sequence
  Description of Artificial Sequence: Synthetic oligonucleotide
  Sense strand starting at position 941 of SEQ ID NO: 914508
cuccaaagacgucauuaug

SEQ ID NO: 1009321 - RNA, 19 nt, Artificial Sequence
  Description of Artificial Sequence: Synthetic oligonucleotide
  Antisense strand to SEQ ID NO: 1009320
cauaaugacgucuuuggag

SEQ ID NO: 1009322 - RNA, 19 nt, Artificial Sequence
  Description of Artificial Sequence: Synthetic oligonucleotide
  Sense strand starting at position 1000 of SEQ ID NO: 914508
uugagauaauucuaagcca

SEQ ID NO: 1009323 - RNA, 19 nt, Artificial Sequence
  Description of Artificial Sequence: Synthetic oligonucleotide
  Antisense strand to SEQ ID NO: 1009322
uggcuuagaauuaucucaa

SEQ ID NO: 1009324 - RNA, 19 nt, Artificial Sequence
  Description of Artificial Sequence: Synthetic oligonucleotide
  Sense strand starting at position 1070 of SEQ ID NO: 914508
uacuauaugugcuugugua

SEQ ID NO: 1009325 - RNA, 19 nt, Artificial Sequence
  Description of Artificial Sequence: Synthetic oligonucleotide
  Antisense strand to SEQ ID NO: 1009324
uacacaagcacauauagua

SEQ ID NO: 1009326 - RNA, 19 nt, Artificial Sequence
  Description of Artificial Sequence: Synthetic oligonucleotide
  Sense strand starting at position 1071 of SEQ ID NO: 914508
acuauaugugcuuguguaa

SEQ ID NO: 1009327 - RNA, 19 nt, Artificial Sequence
  Description of Artificial Sequence: Synthetic oligonucleotide
  Antisense strand to SEQ ID NO: 1009326
uuacacaagcacauauagu

SEQ ID NO: 1009328 - RNA, 19 nt, Artificial Sequence
  Description of Artificial Sequence: Synthetic oligonucleotide
  Sense strand starting at position 1083 of SEQ ID NO: 914508
uguguaacugacuguccua

SEQ ID NO: 1009329 - RNA, 19 nt, Artificial Sequence
  Description of Artificial Sequence: Synthetic oligonucleotide
  Antisense strand to SEQ ID NO: 1009328
uaggacagucaguuacaca

SEQ ID NO: 1009330 - RNA, 19 nt, Artificial Sequence
  Description of Artificial Sequence: Synthetic oligonucleotide
  Sense strand starting at position 1195 of SEQ ID NO: 914508
caaugaccaguaugugaua

SEQ ID NO: 1009331 - RNA, 19 nt, Artificial Sequence
  Description of Artificial Sequence: Synthetic oligonucleotide
  Antisense strand to SEQ ID NO: 1009330
uaucacauacuggucauug

SEQ ID NO: 1009332 - RNA, 19 nt, Artificial Sequence
  Description of Artificial Sequence: Synthetic oligonucleotide
  Sense strand starting at position 1197 of SEQ ID NO: 914508
augaccaguaugugauaga

SEQ ID NO: 1009333 - RNA, 19 nt, Artificial Sequence
  Description of Artificial Sequence: Synthetic oligonucleotide
  Antisense strand to SEQ ID NO: 1009332
ucuaucacauacuggucau

SEQ ID NO: 1009334 - RNA, 19 nt, Artificial Sequence
  Description of Artificial Sequence: Synthetic oligonucleotide
  Sense strand starting at position 1242 of SEQ ID NO: 914508
ucuccagagucugcucauu

SEQ ID NO: 1009335 - RNA, 19 nt, Artificial Sequence
  Description of Artificial Sequence: Synthetic oligonucleotide
  Antisense strand to SEQ ID NO: 1009334
aaugagcagacucuggaga

SEQ ID NO: 1009336 - RNA, 19 nt, Artificial Sequence
  Description of Artificial Sequence: Synthetic oligonucleotide
  Sense strand starting at position 1244 of SEQ ID NO: 914508
uccagagucugcucauuug

SEQ ID NO: 1009337 - RNA, 19 nt, Artificial Sequence
  Description of Artificial Sequence: Synthetic oligonucleotide
  Antisense strand to SEQ ID NO: 1009336
caaaugagcagacucugga

SEQ ID NO: 1009338 - RNA, 19 nt, Artificial Sequence
  Description of Artificial Sequence: Synthetic oligonucleotide
  Sense strand starting at position 1276 of SEQ ID NO: 914508
augcuuaaacccugagaag

SEQ ID NO: 1009339 - RNA, 19 nt, Artificial Sequence
  Description of Artificial Sequence: Synthetic oligonucleotide
  Antisense strand to SEQ ID NO: 1009338
cuucucaggguuuaagcau

SEQ ID NO: 1009340 - RNA, 19 nt, Artificial Sequence
  Description of Artificial Sequence: Synthetic oligonucleotide
  Sense strand starting at position 1631 of SEQ ID NO: 914508
aaagauguagaguguaaga

SEQ ID NO: 1009341 - RNA, 19 nt, Artificial Sequence
  Description of Artificial Sequence: Synthetic oligonucleotide
  Antisense strand to SEQ ID NO: 1009340
ucuuacacucuacaucuuu

SEQ ID NO: 1009342 - RNA, 19 nt, Artificial Sequence
  Description of Artificial Sequence: Synthetic oligonucleotide
  Sense strand starting at position 1633 of SEQ ID NO: 914508
agauguagaguguaagauc

SEQ ID NO: 1009343 - RNA, 19 nt, Artificial Sequence
  Description of Artificial Sequence: Synthetic oligonucleotide
  Antisense strand to SEQ ID NO: 1009342
gaucuuacacucuacaucu

SEQ ID NO: 1009344 - RNA, 19 nt, Artificial Sequence
  Description of Artificial Sequence: Synthetic oligonucleotide
  Sense strand starting at position 1641 of SEQ ID NO: 914508
aguguaagaucaccaguga

SEQ ID NO: 1009345 - RNA, 19 nt, Artificial Sequence
  Description of Artificial Sequence: Synthetic oligonucleotide
  Antisense strand to SEQ ID NO: 1009344
ucacuggugaucuuacacu

SEQ ID NO: 1009346 - RNA, 19 nt, Artificial Sequence
  Description of Artificial Sequence: Synthetic oligonucleotide
  Sense strand starting at position 1642 of SEQ ID NO: 914508
guguaagaucaccagugaa

SEQ ID NO: 1009347 - RNA, 19 nt, Artificial Sequence
  Description of Artificial Sequence: Synthetic oligonucleotide
  Antisense strand to SEQ ID NO: 1009346
uucacuggugaucuuacac

SEQ ID NO: 1009348 - RNA, 19 nt, Artificial Sequence
  Description of Artificial Sequence: Synthetic oligonucleotide
  Sense strand starting at position 2239 of SEQ ID NO: 914508
gcgcuagucaaugcuaacu

SEQ ID NO: 1009349 - RNA, 19 nt, Artificial Sequence
  Description of Artificial Sequence: Synthetic oligonucleotide
  Antisense strand to SEQ ID NO: 1009348
aguuagcauugacuagcgc

SEQ ID NO: 1009350 - RNA, 19 nt, Artificial Sequence
  Description of Artificial Sequence: Synthetic oligonucleotide
  Sense strand starting at position 2293 of SEQ ID NO: 914508
ccgaacuccuucuuuagaa

SEQ ID NO: 1009351 - RNA, 19 nt, Artificial Sequence
  Description of Artificial Sequence: Synthetic oligonucleotide
  Antisense strand to SEQ ID NO: 1009350
uucuaaagaaggaguucgg

SEQ ID NO: 1009352 - RNA, 19 nt, Artificial Sequence
  Description of Artificial Sequence: Synthetic oligonucleotide
  Sense strand starting at position 2294 of SEQ ID NO: 914508
cgaacuccuucuuuagaaa

SEQ ID NO: 1009353 - RNA, 19 nt, Artificial Sequence
  Description of Artificial Sequence: Synthetic oligonucleotide
  Antisense strand to SEQ ID NO: 1009352
uuucuaaagaaggaguucg

SEQ ID NO: 1009354 - RNA, 19 nt, Artificial Sequence
  Description of Artificial Sequence: Synthetic oligonucleotide
  Sense strand starting at position 3220 of SEQ ID NO: 914508
agcugcguacgucauuuaa

SEQ ID NO: 1009355 - RNA, 19 nt, Artificial Sequence
  Description of Artificial Sequence: Synthetic oligonucleotide
  Antisense strand to SEQ ID NO: 1009354
uuaaaugacguacgcagcu

SEQ ID NO: 1009356 - RNA, 19 nt, Artificial Sequence
  Description of Artificial Sequence: Synthetic oligonucleotide
  Sense strand starting at position 3222 of SEQ ID NO: 914508
cugcguacgucauuuaagu

SEQ ID NO: 1009357 - RNA, 19 nt, Artificial Sequence
  Description of Artificial Sequence: Synthetic oligonucleotide
  Antisense strand to SEQ ID NO: 1009356
acuuaaaugacguacgcag

SEQ ID NO: 1009358 - RNA, 19 nt, Artificial Sequence
  Description of Artificial Sequence: Synthetic oligonucleotide
  Sense strand starting at position 3290 of SEQ ID NO: 914508
ggaaauaaguauucucuga

SEQ ID NO: 1009359 - RNA, 19 nt, Artificial Sequence
  Description of Artificial Sequence: Synthetic oligonucleotide
  Antisense strand to SEQ ID NO: 1009358
ucagagaauacuuauuucc

SEQ ID NO: 1009360 - RNA, 19 nt, Artificial Sequence
  Description of Artificial Sequence: Synthetic oligonucleotide
  Sense strand starting at position 3294 of SEQ ID NO: 914508
auaaguauucucugacagu

SEQ ID NO: 1009361 - RNA, 19 nt, Artificial Sequence
  Description of Artificial Sequence: Synthetic oligonucleotide
  Antisense strand to SEQ ID NO: 1009360
acugucagagaauacuuau

SEQ ID NO: 1009362 - RNA, 19 nt, Artificial Sequence
  Description of Artificial Sequence: Synthetic oligonucleotide
  Sense strand starting at position 3297 of SEQ ID NO: 914508
aguauucucugacaguaaa

SEQ ID NO: 1009363 - RNA, 19 nt, Artificial Sequence
  Description of Artificial Sequence: Synthetic oligonucleotide
  Antisense strand to SEQ ID NO: 1009362
uuuacugucagagaauacu

SEQ ID NO: 1009364 - RNA, 19 nt, Artificial Sequence
  Description of Artificial Sequence: Synthetic oligonucleotide
  Sense strand starting at position 3329 of SEQ ID NO: 914508
cagggauaggcaggaucau

SEQ ID NO: 1009365 - RNA, 19 nt, Artificial Sequence
  Description of Artificial Sequence: Synthetic oligonucleotide
  Antisense strand to SEQ ID NO: 1009364
augauccugccuaucccug

SEQ ID NO: 1009366 - RNA, 19 nt, Artificial Sequence
  Description of Artificial Sequence: Synthetic oligonucleotide
  Sense strand starting at position 3338 of SEQ ID NO: 914508
gcaggaucaucuccauuac

SEQ ID NO: 1009367 - RNA, 19 nt, Artificial Sequence
  Description of Artificial Sequence: Synthetic oligonucleotide
  Antisense strand to SEQ ID NO: 1009366
guaauggagaugauccugc

SEQ ID NO: 1009368 - RNA, 19 nt, Artificial Sequence
  Description of Artificial Sequence: Synthetic oligonucleotide
  Sense strand starting at position 3501 of SEQ ID NO: 914508
uuaggaauuagucgggcuu

SEQ ID NO: 1009369 - RNA, 19 nt, Artificial Sequence
  Description of Artificial Sequence: Synthetic oligonucleotide
  Antisense strand to SEQ ID NO: 1009368
aagcccgacuaauuccuaa

SEQ ID NO: 1009370 - RNA, 19 nt, Artificial Sequence
  Description of Artificial Sequence: Synthetic oligonucleotide
  Sense strand starting at position 3561 of SEQ ID NO: 914508
gcagaacaaucguuugagu

SEQ ID NO: 1009371 - RNA, 19 nt, Artificial Sequence
  Description of Artificial Sequence: Synthetic oligonucleotide
  Antisense strand to SEQ ID NO: 1009370
acucaaacgauuguucugc

SEQ ID NO: 1009372 - RNA, 19 nt, Artificial Sequence
  Description of Artificial Sequence: Synthetic oligonucleotide
  Sense strand starting at position 3580 of SEQ ID NO: 914508
ccaggaguuagagguuagu

SEQ ID NO: 1009373 - RNA, 19 nt, Artificial Sequence
  Description of Artificial Sequence: Synthetic oligonucleotide
  Antisense strand to SEQ ID NO: 1009372
acuaaccucuaacuccugg

SEQ ID NO: 1009374 - RNA, 19 nt, Artificial Sequence
  Description of Artificial Sequence: Synthetic oligonucleotide
  Sense strand starting at position 3590 of SEQ ID NO: 914508
gagguuagugagcacuacu

SEQ ID NO: 1009375 - RNA, 19 nt, Artificial Sequence
  Description of Artificial Sequence: Synthetic oligonucleotide
  Antisense strand to SEQ ID NO: 1009374
aguagugcucacuaaccuc

SEQ ID NO: 1009376 - RNA, 19 nt, Artificial Sequence
  Description of Artificial Sequence: Synthetic oligonucleotide
  Sense strand starting at position 3627 of SEQ ID NO: 914508
cagcaugauuccguaggaa

SEQ ID NO: 1009377 - RNA, 19 nt, Artificial Sequence
  Description of Artificial Sequence: Synthetic oligonucleotide
  Antisense strand to SEQ ID NO: 1009376
uuccuacggaaucaugcug

SEQ ID NO: 1009378 - RNA, 19 nt, Artificial Sequence
  Description of Artificial Sequence: Synthetic oligonucleotide
  Sense strand starting at position 3736 of SEQ ID NO: 914508
auaacuggcuauuaugaua

SEQ ID NO: 1009379 - RNA, 19 nt, Artificial Sequence
  Description of Artificial Sequence: Synthetic oligonucleotide
  Antisense strand to SEQ ID NO: 1009378
uaucauaauagccaguuau

SEQ ID NO: 1009380 - RNA, 19 nt, Artificial Sequence
  Description of Artificial Sequence: Synthetic oligonucleotide
  Sense strand starting at position 3739 of SEQ ID NO: 914508
acuggcuauuaugauaaua

SEQ ID NO: 1009381 - RNA, 19 nt, Artificial Sequence
  Description of Artificial Sequence: Synthetic oligonucleotide
  Antisense strand to SEQ ID NO: 1009380
uauuaucauaauagccagu

SEQ ID NO: 1009382 - RNA, 19 nt, Artificial Sequence
  Description of Artificial Sequence: Synthetic oligonucleotide
  Sense strand starting at position 3741 of SEQ ID NO: 914508
uggcuauuaugauaauagu

SEQ ID NO: 1009383 - RNA, 19 nt, Artificial Sequence
  Description of Artificial Sequence: Synthetic oligonucleotide
  Antisense strand to SEQ ID NO: 1009382
acuauuaucauaauagcca

SEQ ID NO: 1009384 - RNA, 19 nt, Artificial Sequence
  Description of Artificial Sequence: Synthetic oligonucleotide
  Sense strand starting at position 3833 of SEQ ID NO: 914508
gaagcugaggcguauggau

SEQ ID NO: 1009385 - RNA, 19 nt, Artificial Sequence
  Description of Artificial Sequence: Synthetic oligonucleotide
  Antisense strand to SEQ ID NO: 1009384
auccauacgccucagcuuc

SEQ ID NO: 1009386 - RNA, 19 nt, Artificial Sequence
  Description of Artificial Sequence: Synthetic oligonucleotide
  Sense strand starting at position 42 of SEQ ID NO: 914509
ccagcauguguccagcaga

SEQ ID NO: 1009387 - RNA, 19 nt, Artificial Sequence
  Description of Artificial Sequence: Synthetic oligonucleotide
  Antisense strand to SEQ ID NO: 1009386
ucugcuggacacaugcugg

SEQ ID NO: 1009388 - RNA, 19 nt, Artificial Sequence
  Description of Artificial Sequence: Synthetic oligonucleotide
  Sense strand starting at position 140 of SEQ ID NO: 914509
gauggagugcuuggauaca

SEQ ID NO: 1009389 - RNA, 19 nt, Artificial Sequence
  Description of Artificial Sequence: Synthetic oligonucleotide
  Antisense strand to SEQ ID NO: 1009388
uguauccaagcacuccauc

SEQ ID NO: 1009390 - RNA, 19 nt, Artificial Sequence
  Description of Artificial Sequence: Synthetic oligonucleotide
  Sense strand starting at position 186 of SEQ ID NO: 914509
uuugacuugccauggaacu

SEQ ID NO: 1009391 - RNA, 19 nt, Artificial Sequence
  Description of Artificial Sequence: Synthetic oligonucleotide
  Antisense strand to SEQ ID NO: 1009390
aguuccauggcaagucaaa

SEQ ID NO: 1009392 - RNA, 19 nt, Artificial Sequence
  Description of Artificial Sequence: Synthetic oligonucleotide
  Sense strand starting at position 338 of SEQ ID NO: 914509
ugaggacacucuccaucau

SEQ ID NO: 1009393 - RNA, 19 nt, Artificial Sequence
  Description of Artificial Sequence: Synthetic oligonucleotide
  Antisense strand to SEQ ID NO: 1009392
augauggagaguguccuca

SEQ ID NO: 1009394 - RNA, 19 nt, Artificial Sequence
  Description of Artificial Sequence: Synthetic oligonucleotide
  Sense strand starting at position 468 of SEQ ID NO: 914509
aagggaauguguuguguua

SEQ ID NO: 1009395 - RNA, 19 nt, Artificial Sequence
  Description of Artificial Sequence: Synthetic oligonucleotide
  Antisense strand to SEQ ID NO: 1009394
uaacacaacacauucccuu

SEQ ID NO: 1009396 - RNA, 19 nt, Artificial Sequence
  Description of Artificial Sequence: Synthetic oligonucleotide
  Sense strand starting at position 470 of SEQ ID NO: 914509
gggaauguguuguguuaug

SEQ ID NO: 1009397 - RNA, 19 nt, Artificial Sequence
  Description of Artificial Sequence: Synthetic oligonucleotide
  Antisense strand to SEQ ID NO: 1009396
cauaacacaacacauuccc

SEQ ID NO: 1009398 - RNA, 19 nt, Artificial Sequence
  Description of Artificial Sequence: Synthetic oligonucleotide
  Sense strand starting at position 475 of SEQ ID NO: 914509
uguguuguguuaugaagag

SEQ ID NO: 1009399 - RNA, 19 nt, Artificial Sequence
  Description of Artificial Sequence: Synthetic oligonucleotide
  Antisense strand to SEQ ID NO: 1009398
cucuucauaacacaacaca

SEQ ID NO: 1009400 - RNA, 19 nt, Artificial Sequence
  Description of Artificial Sequence: Synthetic oligonucleotide
  Sense strand starting at position 529 of SEQ ID NO: 914509
cagaaaccgcucuguaaca

SEQ ID NO: 1009401 - RNA, 19 nt, Artificial Sequence
  Description of Artificial Sequence: Synthetic oligonucleotide
  Antisense strand to SEQ ID NO: 1009400
uguuacagagcgguuucug

SEQ ID NO: 1009402 - RNA, 19 nt, Artificial Sequence
  Description of Artificial Sequence: Synthetic oligonucleotide
  Sense strand starting at position 534 of SEQ ID NO: 914509
accgcucuguaacaagaua

SEQ ID NO: 1009403 - RNA, 19 nt, Artificial Sequence
  Description of Artificial Sequence: Synthetic oligonucleotide
  Antisense strand to SEQ ID NO: 1009402
uaucuuguuacagagcggu

SEQ ID NO: 1009404 - RNA, 19 nt, Artificial Sequence
  Description of Artificial Sequence: Synthetic oligonucleotide
  Sense strand starting at position 613 of SEQ ID NO: 914509
cggugguguugauggaaau

SEQ ID NO: 1009405 - RNA, 19 nt, Artificial Sequence
  Description of Artificial Sequence: Synthetic oligonucleotide
  Antisense strand to SEQ ID NO: 1009404
auuuccaucaacaccaccg

SEQ ID NO: 1009406 - RNA, 19 nt, Artificial Sequence
  Description of Artificial Sequence: Synthetic oligonucleotide
  Sense strand starting at position 614 of SEQ ID NO: 914509
ggugguguugauggaaaug

SEQ ID NO: 1009407 - RNA, 19 nt, Artificial Sequence
  Description of Artificial Sequence: Synthetic oligonucleotide
  Antisense strand to SEQ ID NO: 1009406
cauuuccaucaacaccacc

SEQ ID NO: 1009408 - RNA, 19 nt, Artificial Sequence
  Description of Artificial Sequence: Synthetic oligonucleotide
  Sense strand starting at position 715 of SEQ ID NO: 914509
cguguaugucaugugugca

SEQ ID NO: 1009409 - RNA, 19 nt, Artificial Sequence
  Description of Artificial Sequence: Synthetic oligonucleotide
  Antisense strand to SEQ ID NO: 1009408
ugcacacaugacauacacg

SEQ ID NO: 1009410 - RNA, 19 nt, Artificial Sequence
  Description of Artificial Sequence: Synthetic oligonucleotide
  Sense strand starting at position 716 of SEQ ID NO: 914509
guguaugucaugugugcac

SEQ ID NO: 1009411 - RNA, 19 nt, Artificial Sequence
  Description of Artificial Sequence: Synthetic oligonucleotide
  Antisense strand to SEQ ID NO: 1009410
gugcacacaugacauacac

SEQ ID NO: 1009412 - RNA, 19 nt, Artificial Sequence
  Description of Artificial Sequence: Synthetic oligonucleotide
  Sense strand starting at position 718 of SEQ ID NO: 914509
guaugucaugugugcacau

SEQ ID NO: 1009413 - RNA, 19 nt, Artificial Sequence
  Description of Artificial Sequence: Synthetic oligonucleotide
  Antisense strand to SEQ ID NO: 1009412
augugcacacaugacauac

SEQ ID NO: 1009414 - RNA, 19 nt, Artificial Sequence
  Description of Artificial Sequence: Synthetic oligonucleotide
  Sense strand starting at position 729 of SEQ ID NO: 914509
gugcacauguguugugcau

SEQ ID NO: 1009415 - RNA, 19 nt, Artificial Sequence
  Description of Artificial Sequence: Synthetic oligonucleotide
  Antisense strand to SEQ ID NO: 1009414
augcacaacacaugugcac

SEQ ID NO: 1009416 - RNA, 19 nt, Artificial Sequence
  Description of Artificial Sequence: Synthetic oligonucleotide
  Sense strand starting at position 787 of SEQ ID NO: 914509
aacucuauucugcgaugga

SEQ ID NO: 1009417 - RNA, 19 nt, Artificial Sequence
  Description of Artificial Sequence: Synthetic oligonucleotide
  Antisense strand to SEQ ID NO: 1009416
uccaucgcagaauagaguu

SEQ ID NO: 1009418 - RNA, 19 nt, Artificial Sequence
  Description of Artificial Sequence: Synthetic oligonucleotide
  Sense strand starting at position 788 of SEQ ID NO: 914509
acucuauucugcgauggac

SEQ ID NO: 1009419 - RNA, 19 nt, Artificial Sequence
  Description of Artificial Sequence: Synthetic oligonucleotide
  Antisense strand to SEQ ID NO: 1009418
guccaucgcagaauagagu

SEQ ID NO: 1009420 - RNA, 19 nt, Artificial Sequence
  Description of Artificial Sequence: Synthetic oligonucleotide
  Sense strand starting at position 1243 of SEQ ID NO: 914509
cuaggaggcuaagagauua

SEQ ID NO: 1009421 - RNA, 19 nt, Artificial Sequence
  Description of Artificial Sequence: Synthetic oligonucleotide
  Antisense strand to SEQ ID NO: 1009420
uaaucucuuagccuccuag

SEQ ID NO: 1009422 - RNA, 19 nt, Artificial Sequence
  Description of Artificial Sequence: Synthetic oligonucleotide
  Sense strand starting at position 2571 of SEQ ID NO: 914509
ugagucaccgcgcauucua

SEQ ID NO: 1009423 - RNA, 19 nt, Artificial Sequence
  Description of Artificial Sequence: Synthetic oligonucleotide
  Antisense strand to SEQ ID NO: 1009422
uagaaugcgcggugacuca

SEQ ID NO: 1009424 - RNA, 19 nt, Artificial Sequence
  Description of Artificial Sequence: Synthetic oligonucleotide
  Sense strand starting at position 2580 of SEQ ID NO: 914509
gcgcauucuacgcggcaca

SEQ ID NO: 1009425 - RNA, 19 nt, Artificial Sequence
  Description of Artificial Sequence: Synthetic oligonucleotide
  Antisense strand to SEQ ID NO: 1009424
ugugccgcguagaaugcgc

SEQ ID NO: 1009426 - RNA, 19 nt, Artificial Sequence
  Description of Artificial Sequence: Synthetic oligonucleotide
  Sense strand starting at position 2636 of SEQ ID NO: 914509
agcgcaguuuccuacagaa

SEQ ID NO: 1009427 - RNA, 19 nt, Artificial Sequence
  Description of Artificial Sequence: Synthetic oligonucleotide
  Antisense strand to SEQ ID NO: 1009426
uucuguaggaaacugcgcu

SEQ ID NO: 1009428 - RNA, 19 nt, Artificial Sequence
  Description of Artificial Sequence: Synthetic oligonucleotide
  Sense strand starting at position 2753 of SEQ ID NO: 914509
uugggagcuuucuccuuaa

SEQ ID NO: 1009429 - RNA, 19 nt, Artificial Sequence
  Description of Artificial Sequence: Synthetic oligonucleotide
  Antisense strand to SEQ ID NO: 1009428
uuaaggagaaagcucccaa

SEQ ID NO: 1009430 - RNA, 19 nt, Artificial Sequence
  Description of Artificial Sequence: Synthetic oligonucleotide
  Sense strand starting at position 2756 of SEQ ID NO: 914509
ggagcuuucuccuuaaacu

SEQ ID NO: 1009431 - RNA, 19 nt, Artificial Sequence
  Description of Artificial Sequence: Synthetic oligonucleotide
  Antisense strand to SEQ ID NO: 1009430
aguuuaaggagaaagcucc

SEQ ID NO: 1009432 - RNA, 19 nt, Artificial Sequence
  Description of Artificial Sequence: Synthetic oligonucleotide
  Sense strand starting at position 2776 of SEQ ID NO: 914509
agcuuugucuuucuuucua

SEQ ID NO: 1009433 - RNA, 19 nt, Artificial Sequence
  Description of Artificial Sequence: Synthetic oligonucleotide
  Antisense strand to SEQ ID NO: 1009432
uagaaagaaagacaaagcu

SEQ ID NO: 1009434 - RNA, 19 nt, Artificial Sequence
  Description of Artificial Sequence: Synthetic oligonucleotide
  Sense strand starting at position 2780 of SEQ ID NO: 914509
uugucuuucuuucuaguca

SEQ ID NO: 1009435 - RNA, 19 nt, Artificial Sequence
  Description of Artificial Sequence: Synthetic oligonucleotide
  Antisense strand to SEQ ID NO: 1009434
ugacuagaaagaaagacaa

SEQ ID NO: 1009436 - RNA, 19 nt, Artificial Sequence
  Description of Artificial Sequence: Synthetic oligonucleotide
  Sense strand starting at position 3030 of SEQ ID NO: 914509
agguguccucagggacaua

SEQ ID NO: 1009437 - RNA, 19 nt, Artificial Sequence
  Description of Artificial Sequence: Synthetic oligonucleotide
  Antisense strand to SEQ ID NO: 1009436
uaugucccugaggacaccu

SEQ ID NO: 1009438 - RNA, 19 nt, Artificial Sequence
  Description of Artificial Sequence: Synthetic oligonucleotide
  Sense strand starting at position 3031 of SEQ ID NO: 914509
gguguccucagggacauau

SEQ ID NO: 1009439 - RNA, 19 nt, Artificial Sequence
  Description of Artificial Sequence: Synthetic oligonucleotide
  Antisense strand to SEQ ID NO: 1009438
auaugucccugaggacacc

SEQ ID NO: 1009440 - RNA, 19 nt, Artificial Sequence
  Description of Artificial Sequence: Synthetic oligonucleotide
  Sense strand starting at position 3120 of SEQ ID NO: 914509
uuaggaucucauugagguc

SEQ ID NO: 1009441 - RNA, 19 nt, Artificial Sequence
  Description of Artificial Sequence: Synthetic oligonucleotide
  Antisense strand to SEQ ID NO: 1009440
gaccucaaugagauccuaa

SEQ ID NO: 1009442 - RNA, 19 nt, Artificial Sequence
  Description of Artificial Sequence: Synthetic oligonucleotide
  Sense strand starting at position 3123 of SEQ ID NO: 914509
ggaucucauugaggucaga

SEQ ID NO: 1009443 - RNA, 19 nt, Artificial Sequence
  Description of Artificial Sequence: Synthetic oligonucleotide
  Antisense strand to SEQ ID NO: 1009442
ucugaccucaaugagaucc

SEQ ID NO: 1009444 - RNA, 19 nt, Artificial Sequence
  Description of Artificial Sequence: Synthetic oligonucleotide
  Sense strand starting at position 3139 of SEQ ID NO: 914509
agaggucuuuggcgcuaaa

SEQ ID NO: 1009445 - RNA, 19 nt, Artificial Sequence
  Description of Artificial Sequence: Synthetic oligonucleotide
  Antisense strand to SEQ ID NO: 1009444
uuuagcgccaaagaccucu

SEQ ID NO: 1009446 - RNA, 19 nt, Artificial Sequence
  Description of Artificial Sequence: Synthetic oligonucleotide
  Sense strand starting at position 3142 of SEQ ID NO: 914509
ggucuuuggcgcuaaagaa

SEQ ID NO: 1009447 - RNA, 19 nt, Artificial Sequence
  Description of Artificial Sequence: Synthetic oligonucleotide
  Antisense strand to SEQ ID NO: 1009446
uucuuuagcgccaaagacc

SEQ ID NO: 1009448 - RNA, 19 nt, Artificial Sequence
  Description of Artificial Sequence: Synthetic oligonucleotide
  Sense strand starting at position 3150 of SEQ ID NO: 914509
gcgcuaaagaauugcagaa

SEQ ID NO: 1009449 - RNA, 19 nt, Artificial Sequence
  Description of Artificial Sequence: Synthetic oligonucleotide
  Antisense strand to SEQ ID NO: 1009448
uucugcaauucuuuagcgc

SEQ ID NO: 1009450 - RNA, 19 nt, Artificial Sequence
  Description of Artificial Sequence: Synthetic oligonucleotide
  Sense strand starting at position 3461 of SEQ ID NO: 914509
ugcagaaucuacuuagggu

SEQ ID NO: 1009451 - RNA, 19 nt, Artificial Sequence
  Description of Artificial Sequence: Synthetic oligonucleotide
  Antisense strand to SEQ ID NO: 1009450
acccuaaguagauucugca

SEQ ID NO: 1009452 - RNA, 19 nt, Artificial Sequence
  Description of Artificial Sequence: Synthetic oligonucleotide
  Sense strand starting at position 3462 of SEQ ID NO: 914509
gcagaaucuacuuaggguu

SEQ ID NO: 1009453 - RNA, 19 nt, Artificial Sequence
  Description of Artificial Sequence: Synthetic oligonucleotide
  Antisense strand to SEQ ID NO: 1009452
aacccuaaguagauucugc

SEQ ID NO: 1009454 - RNA, 19 nt, Artificial Sequence
  Description of Artificial Sequence: Synthetic oligonucleotide
  Sense strand starting at position 3477 of SEQ ID NO: 914509
gguucacucugggccagaa

SEQ ID NO: 1009455 - RNA, 19 nt, Artificial Sequence
  Description of Artificial Sequence: Synthetic oligonucleotide
  Antisense strand to SEQ ID NO: 1009454
uucuggcccagagugaacc

SEQ ID NO: 1009456 - RNA, 19 nt, Artificial Sequence
  Description of Artificial Sequence: Synthetic oligonucleotide
  Sense strand starting at position 3592 of SEQ ID NO: 914509
ggagucuugucaguugcca

SEQ ID NO: 1009457 - RNA, 19 nt, Artificial Sequence
  Description of Artificial Sequence: Synthetic oligonucleotide
  Antisense strand to SEQ ID NO: 1009456
uggcaacugacaagacucc

SEQ ID NO: 1009458 - RNA, 19 nt, Artificial Sequence
  Description of Artificial Sequence: Synthetic oligonucleotide
  Sense strand starting at position 3635 of SEQ ID NO: 914509
cugcauaguuugugccaau

SEQ ID NO: 1009459 - RNA, 19 nt, Artificial Sequence
  Description of Artificial Sequence: Synthetic oligonucleotide
  Antisense strand to SEQ ID NO: 1009458
auuggcacaaacuaugcag

SEQ ID NO: 1009460 - RNA, 19 nt, Artificial Sequence
  Description of Artificial Sequence: Synthetic oligonucleotide
  Sense strand starting at position 252 of SEQ ID NO: 914510
caggccaaugcaugaguua

SEQ ID NO: 1009461 - RNA, 19 nt, Artificial Sequence
  Description of Artificial Sequence: Synthetic oligonucleotide
  Antisense strand to SEQ ID NO: 1009460
uaacucaugcauuggccug

SEQ ID NO: 1009462 - RNA, 19 nt, Artificial Sequence
  Description of Artificial Sequence: Synthetic oligonucleotide
  Sense strand starting at position 261 of SEQ ID NO: 914510
gcaugaguuacugaagcac

SEQ ID NO: 1009463 - RNA, 19 nt, Artificial Sequence
  Description of Artificial Sequence: Synthetic oligonucleotide
  Antisense strand to SEQ ID NO: 1009462
gugcuucaguaacucaugc

SEQ ID NO: 1009464 - RNA, 19 nt, Artificial Sequence
  Description of Artificial Sequence: Synthetic oligonucleotide
  Sense strand starting at position 278 of SEQ ID NO: 914510
acccgagauucuguuauca

SEQ ID NO: 1009465 - RNA, 19 nt, Artificial Sequence
  Description of Artificial Sequence: Synthetic oligonucleotide
  Antisense strand to SEQ ID NO: 1009464
ugauaacagaaucucgggu

SEQ ID NO: 1009466 - RNA, 19 nt, Artificial Sequence
  Description of Artificial Sequence: Synthetic oligonucleotide
  Sense strand starting at position 280 of SEQ ID NO: 914510
ccgagauucuguuaucaau

SEQ ID NO: 1009467 - RNA, 19 nt, Artificial Sequence
  Description of Artificial Sequence: Synthetic oligonucleotide
  Antisense strand to SEQ ID NO: 1009466
auugauaacagaaucucgg

SEQ ID NO: 1009468 - RNA, 19 nt, Artificial Sequence
  Description of Artificial Sequence: Synthetic oligonucleotide
  Sense strand starting at position 382 of SEQ ID NO: 914510
guuuauagaugggaccaaa

SEQ ID NO: 1009469 - RNA, 19 nt, Artificial Sequence
  Description of Artificial Sequence: Synthetic oligonucleotide
  Antisense strand to SEQ ID NO: 1009468
uuuggucccaucuauaaac

SEQ ID NO: 1009470 - RNA, 19 nt, Artificial Sequence
  Description of Artificial Sequence: Synthetic oligonucleotide
  Sense strand starting at position 1088 of SEQ ID NO: 914510
agguuaauaaauuggguuu

SEQ ID NO: 1009471 - RNA, 19 nt, Artificial Sequence
  Description of Artificial Sequence: Synthetic oligonucleotide
  Antisense strand to SEQ ID NO: 1009470
aaacccaauuuauuaaccu

SEQ ID NO: 1009472 - RNA, 19 nt, Artificial Sequence
  Description of Artificial Sequence: Synthetic oligonucleotide
  Sense strand starting at position 1394 of SEQ ID NO: 914510
ugaggaggccugcagagau

SEQ ID NO: 1009473 - RNA, 19 nt, Artificial Sequence
  Description of Artificial Sequence: Synthetic oligonucleotide
  Antisense strand to SEQ ID NO: 1009472
aucucugcaggccuccuca

SEQ ID NO: 1009474 - RNA, 19 nt, Artificial Sequence
  Description of Artificial Sequence: Synthetic oligonucleotide
  Sense strand starting at position 1404 of SEQ ID NO: 914510
ugcagagaugaguguuucu

SEQ ID NO: 1009475 - RNA, 19 nt, Artificial Sequence
  Description of Artificial Sequence: Synthetic oligonucleotide
  Antisense strand to SEQ ID NO: 1009474
agaaacacucaucucugca

SEQ ID NO: 1009476 - RNA, 19 nt, Artificial Sequence
  Description of Artificial Sequence: Synthetic oligonucleotide
  Sense strand starting at position 1433 of SEQ ID NO: 914510
ggaucccugcuuuaggaga

SEQ ID NO: 1009477 - RNA, 19 nt, Artificial Sequence
  Description of Artificial Sequence: Synthetic oligonucleotide
  Antisense strand to SEQ ID NO: 1009476
ucuccuaaagcagggaucc

SEQ ID NO: 1009478 - RNA, 19 nt, Artificial Sequence
  Description of Artificial Sequence: Synthetic oligonucleotide
  Sense strand starting at position 1455 of SEQ ID NO: 914510
caugccuuaccugggauau

SEQ ID NO: 1009479 - RNA, 19 nt, Artificial Sequence
  Description of Artificial Sequence: Synthetic oligonucleotide
  Antisense strand to SEQ ID NO: 1009478
auaucccagguaaggcaug

SEQ ID NO: 1009480 - RNA, 19 nt, Artificial Sequence
  Description of Artificial Sequence: Synthetic oligonucleotide
  Sense strand starting at position 1456 of SEQ ID NO: 914510
augccuuaccugggauauu

SEQ ID NO: 1009481 - RNA, 19 nt, Artificial Sequence
  Description of Artificial Sequence: Synthetic oligonucleotide
  Antisense strand to SEQ ID NO: 1009480
aauaucccagguaaggcau

SEQ ID NO: 1009482 - RNA, 19 nt, Artificial Sequence
  Description of Artificial Sequence: Synthetic oligonucleotide
  Sense strand starting at position 1457 of SEQ ID NO: 914510
ugccuuaccugggauauuc

SEQ ID NO: 1009483 - RNA, 19 nt, Artificial Sequence
  Description of Artificial Sequence: Synthetic oligonucleotide
  Antisense strand to SEQ ID NO: 1009482
gaauaucccagguaaggca

SEQ ID NO: 1009484 - RNA, 19 nt, Artificial Sequence
  Description of Artificial Sequence: Synthetic oligonucleotide
  Sense strand starting at position 1493 of SEQ ID NO: 914510
ggaugccucucacagacau

SEQ ID NO: 1009485 - RNA, 19 nt, Artificial Sequence
  Description of Artificial Sequence: Synthetic oligonucleotide
  Antisense strand to SEQ ID NO: 1009484
augucugugagaggcaucc

SEQ ID NO: 1009486 - RNA, 19 nt, Artificial Sequence
  Description of Artificial Sequence: Synthetic oligonucleotide
  Sense strand starting at position 1935 of SEQ ID NO: 914510
acuccuaggccuugaaaca

SEQ ID NO: 1009487 - RNA, 19 nt, Artificial Sequence
  Description of Artificial Sequence: Synthetic oligonucleotide
  Antisense strand to SEQ ID NO: 1009486
uguuucaaggccuaggagu

SEQ ID NO: 1009488 - RNA, 19 nt, Artificial Sequence
  Description of Artificial Sequence: Synthetic oligonucleotide
  Sense strand starting at position 1936 of SEQ ID NO: 914510
cuccuaggccuugaaacau

SEQ ID NO: 1009489 - RNA, 19 nt, Artificial Sequence
  Description of Artificial Sequence: Synthetic oligonucleotide
  Antisense strand to SEQ ID NO: 1009488
auguuucaaggccuaggag

SEQ ID NO: 1009490 - RNA, 19 nt, Artificial Sequence
  Description of Artificial Sequence: Synthetic oligonucleotide
  Sense strand starting at position 2147 of SEQ ID NO: 914510
gcaguucucugccuguguu

SEQ ID NO: 1009491 - RNA, 19 nt, Artificial Sequence
  Description of Artificial Sequence: Synthetic oligonucleotide
  Antisense strand to SEQ ID NO: 1009490
aacacaggcagagaacugc

SEQ ID NO: 1009492 - RNA, 19 nt, Artificial Sequence
  Description of Artificial Sequence: Synthetic oligonucleotide
  Sense strand starting at position 2205 of SEQ ID NO: 914510
gugacaguugcguguaggu

SEQ ID NO: 1009493 - RNA, 19 nt, Artificial Sequence
  Description of Artificial Sequence: Synthetic oligonucleotide
  Antisense strand to SEQ ID NO: 1009492
accuacacgcaacugucac

SEQ ID NO: 1009494 - RNA, 19 nt, Artificial Sequence
  Description of Artificial Sequence: Synthetic oligonucleotide
  Sense strand starting at position 2281 of SEQ ID NO: 914510
uggcccuagcuuuguguau

SEQ ID NO: 1009495 - RNA, 19 nt, Artificial Sequence
  Description of Artificial Sequence: Synthetic oligonucleotide
  Antisense strand to SEQ ID NO: 1009494
auacacaaagcuagggcca

SEQ ID NO: 1009496 - RNA, 19 nt, Artificial Sequence
  Description of Artificial Sequence: Synthetic oligonucleotide
  Sense strand starting at position 2282 of SEQ ID NO: 914510
ggcccuagcuuuguguauu

SEQ ID NO: 1009497 - RNA, 19 nt, Artificial Sequence
  Description of Artificial Sequence: Synthetic oligonucleotide
  Antisense strand to SEQ ID NO: 1009496
aauacacaaagcuagggcc

SEQ ID NO: 1009498 - RNA, 19 nt, Artificial Sequence
  Description of Artificial Sequence: Synthetic oligonucleotide
  Sense strand starting at position 2296 of SEQ ID NO: 914510
guauuugcccuuugcaaag

SEQ ID NO: 1009499 - RNA, 19 nt, Artificial Sequence
  Description of Artificial Sequence: Synthetic oligonucleotide
  Antisense strand to SEQ ID NO: 1009498
cuuugcaaagggcaaauac

SEQ ID NO: 1009500 - RNA, 19 nt, Artificial Sequence
  Description of Artificial Sequence: Synthetic oligonucleotide
  Sense strand starting at position 2394 of SEQ ID NO: 914510
ggguguggcggcucacauu

SEQ ID NO: 1009501 - RNA, 19 nt, Artificial Sequence
  Description of Artificial Sequence: Synthetic oligonucleotide
  Antisense strand to SEQ ID NO: 1009500
aaugugagccgccacaccc

SEQ ID NO: 1009502 - RNA, 19 nt, Artificial Sequence
  Description of Artificial Sequence: Synthetic oligonucleotide
  Sense strand starting at position 2519 of SEQ ID NO: 914510
ccuaguggcguguaucuau

SEQ ID NO: 1009503 - RNA, 19 nt, Artificial Sequence
  Description of Artificial Sequence: Synthetic oligonucleotide
  Antisense strand to SEQ ID NO: 1009502
auagauacacgccacuagg

SEQ ID NO: 1009504 - RNA, 19 nt, Artificial Sequence
  Description of Artificial Sequence: Synthetic oligonucleotide
  Sense strand starting at position 2556 of SEQ ID NO: 914510
ggcuguuugggagggucau

SEQ ID NO: 1009505 - RNA, 19 nt, Artificial Sequence
  Description of Artificial Sequence: Synthetic oligonucleotide
  Antisense strand to SEQ ID NO: 1009504
augacccucccaaacagcc

SEQ ID NO: 1009506 - RNA, 19 nt, Artificial Sequence
  Description of Artificial Sequence: Synthetic oligonucleotide
  Sense strand starting at position 3004 of SEQ ID NO: 914510
cugccuggccuugaugaga

SEQ ID NO: 1009507 - RNA, 19 nt, Artificial Sequence
  Description of Artificial Sequence: Synthetic oligonucleotide
  Antisense strand to SEQ ID NO: 1009506
ucucaucaaggccaggcag

SEQ ID NO: 1009508 - RNA, 19 nt, Artificial Sequence
  Description of Artificial Sequence: Synthetic oligonucleotide
  Sense strand starting at position 3029 of SEQ ID NO: 914510
gguaguauuucuccguggu

SEQ ID NO: 1009509 - RNA, 19 nt, Artificial Sequence
  Description of Artificial Sequence: Synthetic oligonucleotide
  Antisense strand to SEQ ID NO: 1009508
accacggagaaauacuacc

SEQ ID NO: 1009510 - RNA, 19 nt, Artificial Sequence
  Description of Artificial Sequence: Synthetic oligonucleotide
  Sense strand starting at position 3030 of SEQ ID NO: 914510
guaguauuucuccguggug

SEQ ID NO: 1009511 - RNA, 19 nt, Artificial Sequence
  Description of Artificial Sequence: Synthetic oligonucleotide
  Antisense strand to SEQ ID NO: 1009510
caccacggagaaauacuac

SEQ ID NO: 1009512 - RNA, 19 nt, Artificial Sequence
  Description of Artificial Sequence: Synthetic oligonucleotide
  Sense strand starting at position 3032 of SEQ ID NO: 914510
aguauuucuccgugguggu

SEQ ID NO: 1009513 - RNA, 19 nt, Artificial Sequence
  Description of Artificial Sequence: Synthetic oligonucleotide
  Antisense strand to SEQ ID NO: 1009512
accaccacggagaaauacu

SEQ ID NO: 1009514 - RNA, 19 nt, Artificial Sequence
  Description of Artificial Sequence: Synthetic oligonucleotide
  Sense strand starting at position 3067 of SEQ ID NO: 914510
cccgaaagcuugucuaagu

SEQ ID NO: 1009515 - RNA, 19 nt, Artificial Sequence
  Description of Artificial Sequence: Synthetic oligonucleotide
  Antisense strand to SEQ ID NO: 1009514
acuuagacaagcuuucggg

SEQ ID NO: 1009516 - RNA, 19 nt, Artificial Sequence
  Description of Artificial Sequence: Synthetic oligonucleotide
  Sense strand starting at position 3068 of SEQ ID NO: 914510
ccgaaagcuugucuaaguu

SEQ ID NO: 1009517 - RNA, 19 nt, Artificial Sequence
  Description of Artificial Sequence: Synthetic oligonucleotide
  Antisense strand to SEQ ID NO: 1009516
aacuuagacaagcuuucgg

SEQ ID NO: 1009518 - RNA, 19 nt, Artificial Sequence
  Description of Artificial Sequence: Synthetic oligonucleotide
  Sense strand starting at position 3114 of SEQ ID NO: 914510
gugcaaccauaucuagaaa

SEQ ID NO: 1009519 - RNA, 19 nt, Artificial Sequence
  Description of Artificial Sequence: Synthetic oligonucleotide
  Antisense strand to SEQ ID NO: 1009518
uuucuagauaugguugcac

SEQ ID NO: 1009520 - RNA, 19 nt, Artificial Sequence
  Description of Artificial Sequence: Synthetic oligonucleotide
  Sense strand starting at position 3455 of SEQ ID NO: 914510
agggucucugcagagguau

SEQ ID NO: 1009521 - RNA, 19 nt, Artificial Sequence
  Description of Artificial Sequence: Synthetic oligonucleotide
  Antisense strand to SEQ ID NO: 1009520
auaccucugcagagacccu

SEQ ID NO: 1009522 - RNA, 19 nt, Artificial Sequence
  Description of Artificial Sequence: Synthetic oligonucleotide
  Sense strand starting at position 3468 of SEQ ID NO: 914510
agguaucuagggugaggau

SEQ ID NO: 1009523 - RNA, 19 nt, Artificial Sequence
  Description of Artificial Sequence: Synthetic oligonucleotide
  Antisense strand to SEQ ID NO: 1009522
auccucacccuagauaccu

SEQ ID NO: 1009524 - RNA, 19 nt, Artificial Sequence
  Description of Artificial Sequence: Synthetic oligonucleotide
  Sense strand starting at position 3477 of SEQ ID NO: 914510
gggugaggaucuugggaug

SEQ ID NO: 1009525 - RNA, 19 nt, Artificial Sequence
  Description of Artificial Sequence: Synthetic oligonucleotide
  Antisense strand to SEQ ID NO: 1009524
caucccaagauccucaccc

SEQ ID NO: 1009526 - RNA, 19 nt, Artificial Sequence
  Description of Artificial Sequence: Synthetic oligonucleotide
  Sense strand starting at position 3480 of SEQ ID NO: 914510
ugaggaucuugggaugaga

SEQ ID NO: 1009527 - RNA, 19 nt, Artificial Sequence
  Description of Artificial Sequence: Synthetic oligonucleotide
  Antisense strand to SEQ ID NO: 1009526
ucucaucccaagauccuca

SEQ ID NO: 1009528 - RNA, 19 nt, Artificial Sequence
  Description of Artificial Sequence: Synthetic oligonucleotide
  Sense strand starting at position 3493 of SEQ ID NO: 914510
augagaucauucuggauau

SEQ ID NO: 1009529 - RNA, 19 nt, Artificial Sequence
  Description of Artificial Sequence: Synthetic oligonucleotide
  Antisense strand to SEQ ID NO: 1009528
auauccagaaugaucucau

SEQ ID NO: 1009530 - RNA, 19 nt, Artificial Sequence
  Description of Artificial Sequence: Synthetic oligonucleotide
  Sense strand starting at position 3494 of SEQ ID NO: 914510
ugagaucauucuggauaua

SEQ ID NO: 1009531 - RNA, 19 nt, Artificial Sequence
  Description of Artificial Sequence: Synthetic oligonucleotide
  Antisense strand to SEQ ID NO: 1009530
uauauccagaaugaucuca

SEQ ID NO: 1009532 - RNA, 19 nt, Artificial Sequence
  Description of Artificial Sequence: Synthetic oligonucleotide
  Sense strand starting at position 3538 of SEQ ID NO: 914510
ggguccuuguaagaagaga

SEQ ID NO: 1009533 - RNA, 19 nt, Artificial Sequence
  Description of Artificial Sequence: Synthetic oligonucleotide
  Antisense strand to SEQ ID NO: 1009532
ucucuucuuacaaggaccc

SEQ ID NO: 1009534 - RNA, 19 nt, Artificial Sequence
  Description of Artificial Sequence: Synthetic oligonucleotide
  Sense strand starting at position 3972 of SEQ ID NO: 914510
gccagaaugcguuucuguu

SEQ ID NO: 1009535 - RNA, 19 nt, Artificial Sequence
  Description of Artificial Sequence: Synthetic oligonucleotide
  Antisense strand to SEQ ID NO: 1009534
aacagaaacgcauucuggc

SEQ ID NO: 1009536 - RNA, 19 nt, Artificial Sequence
  Description of Artificial Sequence: Synthetic oligonucleotide
  Sense strand starting at position 3974 of SEQ ID NO: 914510
cagaaugcguuucuguuga

SEQ ID NO: 1009537 - RNA, 19 nt, Artificial Sequence
  Description of Artificial Sequence: Synthetic oligonucleotide
  Antisense strand to SEQ ID NO: 1009536
ucaacagaaacgcauucug

SEQ ID NO: 1009538 - RNA, 19 nt, Artificial Sequence
  Description of Artificial Sequence: Synthetic oligonucleotide
  Sense strand starting at position 3976 of SEQ ID NO: 914510
gaaugcguuucuguugagu

SEQ ID NO: 1009539 - RNA, 19 nt, Artificial Sequence
  Description of Artificial Sequence: Synthetic oligonucleotide
  Antisense strand to SEQ ID NO: 1009538
acucaacagaaacgcauuc

SEQ ID NO: 1009540 - RNA, 19 nt, Artificial Sequence
  Description of Artificial Sequence: Synthetic oligonucleotide
  Sense strand starting at position 388 of SEQ ID NO: 914511
cuuuaaaggucucaauaga

SEQ ID NO: 1009541 - RNA, 19 nt, Artificial Sequence
  Description of Artificial Sequence: Synthetic oligonucleotide
  Antisense strand to SEQ ID NO: 1009540
ucuauugagaccuuuaaag

SEQ ID NO: 1009542 - RNA, 19 nt, Artificial Sequence
  Description of Artificial Sequence: Synthetic oligonucleotide
  Sense strand starting at position 423 of SEQ ID NO: 914511
guugaaugguuaugucuuc

SEQ ID NO: 1009543 - RNA, 19 nt, Artificial Sequence
  Description of Artificial Sequence: Synthetic oligonucleotide
  Antisense strand to SEQ ID NO: 1009542
gaagacauaaccauucaac

SEQ ID NO: 1009544 - RNA, 19 nt, Artificial Sequence
  Description of Artificial Sequence: Synthetic oligonucleotide
  Sense strand starting at position 429 of SEQ ID NO: 914511
ugguuaugucuucggagca

SEQ ID NO: 1009545 - RNA, 19 nt, Artificial Sequence
  Description of Artificial Sequence: Synthetic oligonucleotide
  Antisense strand to SEQ ID NO: 1009544
ugcuccgaagacauaacca

SEQ ID NO: 1009546 - RNA, 19 nt, Artificial Sequence
  Description of Artificial Sequence: Synthetic oligonucleotide
  Sense strand starting at position 430 of SEQ ID NO: 914511
gguuaugucuucggagcag

SEQ ID NO: 1009547 - RNA, 19 nt, Artificial Sequence
  Description of Artificial Sequence: Synthetic oligonucleotide
  Antisense strand to SEQ ID NO: 1009546
cugcuccgaagacauaacc

SEQ ID NO: 1009548 - RNA, 19 nt, Artificial Sequence
  Description of Artificial Sequence: Synthetic oligonucleotide
  Sense strand starting at position 442 of SEQ ID NO: 914511
ggagcagaguggugaaaga

SEQ ID NO: 1009549 - RNA, 19 nt, Artificial Sequence
  Description of Artificial Sequence: Synthetic oligonucleotide
  Antisense strand to SEQ ID NO: 1009548
ucuuucaccacucugcucc

SEQ ID NO: 1009550 - RNA, 19 nt, Artificial Sequence
  Description of Artificial Sequence: Synthetic oligonucleotide
  Sense strand starting at position 455 of SEQ ID NO: 914511
gaaagaaggucagacuucu

SEQ ID NO: 1009551 - RNA, 19 nt, Artificial Sequence
  Description of Artificial Sequence: Synthetic oligonucleotide
  Antisense strand to SEQ ID NO: 1009550
agaagucugaccuucuuuc

SEQ ID NO: 1009552 - RNA, 19 nt, Artificial Sequence
  Description of Artificial Sequence: Synthetic oligonucleotide
  Sense strand starting at position 461 of SEQ ID NO: 914511
aggucagacuucuguuaag

SEQ ID NO: 1009553 - RNA, 19 nt, Artificial Sequence
  Description of Artificial Sequence: Synthetic oligonucleotide
  Antisense strand to SEQ ID NO: 1009552
cuuaacagaagucugaccu

SEQ ID NO: 1009554 - RNA, 19 nt, Artificial Sequence
  Description of Artificial Sequence: Synthetic oligonucleotide
  Sense strand starting at position 464 of SEQ ID NO: 914511
ucagacuucuguuaagucu

SEQ ID NO: 1009555 - RNA, 19 nt, Artificial Sequence
  Description of Artificial Sequence: Synthetic oligonucleotide
  Antisense strand to SEQ ID NO: 1009554
agacuuaacagaagucuga

SEQ ID NO: 1009556 - RNA, 19 nt, Artificial Sequence
  Description of Artificial Sequence: Synthetic oligonucleotide
  Sense strand starting at position 467 of SEQ ID NO: 914511
gacuucuguuaagucugaa

SEQ ID NO: 1009557 - RNA, 19 nt, Artificial Sequence
  Description of Artificial Sequence: Synthetic oligonucleotide
  Antisense strand to SEQ ID NO: 1009556
uucagacuuaacagaaguc

SEQ ID NO: 1009558 - RNA, 19 nt, Artificial Sequence
  Description of Artificial Sequence: Synthetic oligonucleotide
  Sense strand starting at position 470 of SEQ ID NO: 914511
uucuguuaagucugaauac

SEQ ID NO: 1009559 - RNA, 19 nt, Artificial Sequence
  Description of Artificial Sequence: Synthetic oligonucleotide
  Antisense strand to SEQ ID NO: 1009558
guauucagacuuaacagaa

SEQ ID NO: 1009560 - RNA, 19 nt, Artificial Sequence
  Description of Artificial Sequence: Synthetic oligonucleotide
  Sense strand starting at position 493 of SEQ ID NO: 914511
acgcguacuucuguaauuc

SEQ ID NO: 1009561 - RNA, 19 nt, Artificial Sequence
  Description of Artificial Sequence: Synthetic oligonucleotide
  Antisense strand to SEQ ID NO: 1009560
gaauuacagaaguacgcgu

SEQ ID NO: 1009562 - RNA, 19 nt, Artificial Sequence
  Description of Artificial Sequence: Synthetic oligonucleotide
  Sense strand starting at position 634 of SEQ ID NO: 914511
ucaagaucagccuaacgaa

SEQ ID NO: 1009563 - RNA, 19 nt, Artificial Sequence
  Description of Artificial Sequence: Synthetic oligonucleotide
  Antisense strand to SEQ ID NO: 1009562
uucguuaggcugaucuuga

SEQ ID NO: 1009564 - RNA, 19 nt, Artificial Sequence
  Description of Artificial Sequence: Synthetic oligonucleotide
  Sense strand starting at position 902 of SEQ ID NO: 914511
accuuugucuaguaacaca

SEQ ID NO: 1009565 - RNA, 19 nt, Artificial Sequence
  Description of Artificial Sequence: Synthetic oligonucleotide
  Antisense strand to SEQ ID NO: 1009564
uguguuacuagacaaaggu

SEQ ID NO: 1009566 - RNA, 19 nt, Artificial Sequence
  Description of Artificial Sequence: Synthetic oligonucleotide
  Sense strand starting at position 913 of SEQ ID NO: 914511
guaacacagcuauagugau

SEQ ID NO: 1009567 - RNA, 19 nt, Artificial Sequence
  Description of Artificial Sequence: Synthetic oligonucleotide
  Antisense strand to SEQ ID NO: 1009566
aucacuauagcuguguuac

SEQ ID NO: 1009568 - RNA, 19 nt, Artificial Sequence
  Description of Artificial Sequence: Synthetic oligonucleotide
  Sense strand starting at position 919 of SEQ ID NO: 914511
cagcuauagugaugucucu

SEQ ID NO: 1009569 - RNA, 19 nt, Artificial Sequence
  Description of Artificial Sequence: Synthetic oligonucleotide
  Antisense strand to SEQ ID NO: 1009568
agagacaucacuauagcug

SEQ ID NO: 1009570 - RNA, 19 nt, Artificial Sequence
  Description of Artificial Sequence: Synthetic oligonucleotide
  Sense strand starting at position 968 of SEQ ID NO: 914511
aacaaugacucuuggagag

SEQ ID NO: 1009571 - RNA, 19 nt, Artificial Sequence
  Description of Artificial Sequence: Synthetic oligonucleotide
  Antisense strand to SEQ ID NO: 1009570
cucuccaagagucauuguu

SEQ ID NO: 1009572 - RNA, 19 nt, Artificial Sequence
  Description of Artificial Sequence: Synthetic oligonucleotide
  Sense strand starting at position 1131 of SEQ ID NO: 914511
cacgcacuucgugauggaa

SEQ ID NO: 1009573 - RNA, 19 nt, Artificial Sequence
  Description of Artificial Sequence: Synthetic oligonucleotide
  Antisense strand to SEQ ID NO: 1009572
uuccaucacgaagugcgug

SEQ ID NO: 1009574 - RNA, 19 nt, Artificial Sequence
  Description of Artificial Sequence: Synthetic oligonucleotide
  Sense strand starting at position 1149 of SEQ ID NO: 914511
acgguauuguucuccuaga

SEQ ID NO: 1009575 - RNA, 19 nt, Artificial Sequence
  Description of Artificial Sequence: Synthetic oligonucleotide
  Antisense strand to SEQ ID NO: 1009574
ucuaggagaacaauaccgu

SEQ ID NO: 1009576 - RNA, 19 nt, Artificial Sequence
  Description of Artificial Sequence: Synthetic oligonucleotide
  Sense strand starting at position 1150 of SEQ ID NO: 914511
cgguauuguucuccuagaa

SEQ ID NO: 1009577 - RNA, 19 nt, Artificial Sequence
  Description of Artificial Sequence: Synthetic oligonucleotide
  Antisense strand to SEQ ID NO: 1009576
uucuaggagaacaauaccg

SEQ ID NO: 1009578 - RNA, 19 nt, Artificial Sequence
  Description of Artificial Sequence: Synthetic oligonucleotide
  Sense strand starting at position 1239 of SEQ ID NO: 914511
acccgcuucccuuggauua

SEQ ID NO: 1009579 - RNA, 19 nt, Artificial Sequence
  Description of Artificial Sequence: Synthetic oligonucleotide
  Antisense strand to SEQ ID NO: 1009578
uaauccaagggaagcgggu

SEQ ID NO: 1009580 - RNA, 19 nt, Artificial Sequence
  Description of Artificial Sequence: Synthetic oligonucleotide
  Sense strand starting at position 2337 of SEQ ID NO: 914511
ggcuuugggagcugaaagu

SEQ ID NO: 1009581 - RNA, 19 nt, Artificial Sequence
  Description of Artificial Sequence: Synthetic oligonucleotide
  Antisense strand to SEQ ID NO: 1009580
acuuucagcucccaaagcc

SEQ ID NO: 1009582 - RNA, 19 nt, Artificial Sequence
  Description of Artificial Sequence: Synthetic oligonucleotide
  Sense strand starting at position 2346 of SEQ ID NO: 914511
agcugaaaguuuccuugga

SEQ ID NO: 1009583 - RNA, 19 nt, Artificial Sequence
  Description of Artificial Sequence: Synthetic oligonucleotide
  Antisense strand to SEQ ID NO: 1009582
uccaaggaaacuuucagcu

SEQ ID NO: 1009584 - RNA, 19 nt, Artificial Sequence
  Description of Artificial Sequence: Synthetic oligonucleotide
  Sense strand starting at position 2347 of SEQ ID NO: 914511
gcugaaaguuuccuuggac

SEQ ID NO: 1009585 - RNA, 19 nt, Artificial Sequence
  Description of Artificial Sequence: Synthetic oligonucleotide
  Antisense strand to SEQ ID NO: 1009584
guccaaggaaacuuucagc

SEQ ID NO: 1009586 - RNA, 19 nt, Artificial Sequence
  Description of Artificial Sequence: Synthetic oligonucleotide
  Sense strand starting at position 2476 of SEQ ID NO: 914511
gggcucagugggugugauu

SEQ ID NO: 1009587 - RNA, 19 nt, Artificial Sequence
  Description of Artificial Sequence: Synthetic oligonucleotide
  Antisense strand to SEQ ID NO: 1009586
aaucacacccacugagccc

SEQ ID NO: 1009588 - RNA, 19 nt, Artificial Sequence
  Description of Artificial Sequence: Synthetic oligonucleotide
  Sense strand starting at position 2542 of SEQ ID NO: 914511
cgcggagcccgaagaauua

SEQ ID NO: 1009589 - RNA, 19 nt, Artificial Sequence
  Description of Artificial Sequence: Synthetic oligonucleotide
  Antisense strand to SEQ ID NO: 1009588
uaauucuucgggcuccgcg

SEQ ID NO: 1009590 - RNA, 19 nt, Artificial Sequence
  Description of Artificial Sequence: Synthetic oligonucleotide
  Sense strand starting at position 2561 of SEQ ID NO: 914511
cuaagaaaccgaggucuga

SEQ ID NO: 1009591 - RNA, 19 nt, Artificial Sequence
  Description of Artificial Sequence: Synthetic oligonucleotide
  Antisense strand to SEQ ID NO: 1009590
ucagaccucgguuucuuag

SEQ ID NO: 1009592 - RNA, 19 nt, Artificial Sequence
  Description of Artificial Sequence: Synthetic oligonucleotide
  Sense strand starting at position 2972 of SEQ ID NO: 914511
ucccguccuuccuagaagu

SEQ ID NO: 1009593 - RNA, 19 nt, Artificial Sequence
  Description of Artificial Sequence: Synthetic oligonucleotide
  Antisense strand to SEQ ID NO: 1009592
acuucuaggaaggacggga

SEQ ID NO: 1009594 - RNA, 19 nt, Artificial Sequence
  Description of Artificial Sequence: Synthetic oligonucleotide
  Sense strand starting at position 2974 of SEQ ID NO: 914511
ccguccuuccuagaaguga

SEQ ID NO: 1009595 - RNA, 19 nt, Artificial Sequence
  Description of Artificial Sequence: Synthetic oligonucleotide
  Antisense strand to SEQ ID NO: 1009594
ucacuucuaggaaggacgg

SEQ ID NO: 1009596 - RNA, 19 nt, Artificial Sequence
  Description of Artificial Sequence: Synthetic oligonucleotide
  Sense strand starting at position 2983 of SEQ ID NO: 914511
cuagaagugaggugcugau

SEQ ID NO: 1009597 - RNA, 19 nt, Artificial Sequence
  Description of Artificial Sequence: Synthetic oligonucleotide
  Antisense strand to SEQ ID NO: 1009596
aucagcaccucacuucuag

SEQ ID NO: 1009598 - RNA, 19 nt, Artificial Sequence
  Description of Artificial Sequence: Synthetic oligonucleotide
  Sense strand starting at position 2987 of SEQ ID NO: 914511
aagugaggugcugauacau

SEQ ID NO: 1009599 - RNA, 19 nt, Artificial Sequence
  Description of Artificial Sequence: Synthetic oligonucleotide
  Antisense strand to SEQ ID NO: 1009598
auguaucagcaccucacuu

SEQ ID NO: 1009600 - RNA, 19 nt, Artificial Sequence
  Description of Artificial Sequence: Synthetic oligonucleotide
  Sense strand starting at position 3075 of SEQ ID NO: 914511
uaggaaauccagugccuga

SEQ ID NO: 1009601 - RNA, 19 nt, Artificial Sequence
  Description of Artificial Sequence: Synthetic oligonucleotide
  Antisense strand to SEQ ID NO: 1009600
ucaggcacuggauuuccua

SEQ ID NO: 1009602 - RNA, 19 nt, Artificial Sequence
  Description of Artificial Sequence: Synthetic oligonucleotide
  Sense strand starting at position 3088 of SEQ ID NO: 914511
gccugauacacaggaaaug

SEQ ID NO: 1009603 - RNA, 19 nt, Artificial Sequence
  Description of Artificial Sequence: Synthetic oligonucleotide
  Antisense strand to SEQ ID NO: 1009602
cauuuccuguguaucaggc

SEQ ID NO: 1009604 - RNA, 19 nt, Artificial Sequence
  Description of Artificial Sequence: Synthetic oligonucleotide
  Sense strand starting at position 3483 of SEQ ID NO: 914511
gaguguguacuuggcugaa

SEQ ID NO: 1009605 - RNA, 19 nt, Artificial Sequence
  Description of Artificial Sequence: Synthetic oligonucleotide
  Antisense strand to SEQ ID NO: 1009604
uucagccaaguacacacuc

SEQ ID NO: 1009606 - RNA, 19 nt, Artificial Sequence
  Description of Artificial Sequence: Synthetic oligonucleotide
  Sense strand starting at position 3486 of SEQ ID NO: 914511
uguguacuuggcugaacuu

SEQ ID NO: 1009607 - RNA, 19 nt, Artificial Sequence
  Description of Artificial Sequence: Synthetic oligonucleotide
  Antisense strand to SEQ ID NO: 1009606
aaguucagccaaguacaca

SEQ ID NO: 1009608 - RNA, 19 nt, Artificial Sequence
  Description of Artificial Sequence: Synthetic oligonucleotide
  Sense strand starting at position 3519 of SEQ ID NO: 914511
ggucuuauuuaaggauaaa

SEQ ID NO: 1009609 - RNA, 19 nt, Artificial Sequence
  Description of Artificial Sequence: Synthetic oligonucleotide
  Antisense strand to SEQ ID NO: 1009608
uuuauccuuaaauaagacc

SEQ ID NO: 1009610 - RNA, 19 nt, Artificial Sequence
  Description of Artificial Sequence: Synthetic oligonucleotide
  Sense strand starting at position 3793 of SEQ ID NO: 914511
cuggcaccagucugguaau

SEQ ID NO: 1009611 - RNA, 19 nt, Artificial Sequence
  Description of Artificial Sequence: Synthetic oligonucleotide
  Antisense strand to SEQ ID NO: 1009610
auuaccagacuggugccag

SEQ ID NO: 1009612 - RNA, 19 nt, Artificial Sequence
  Description of Artificial Sequence: Synthetic oligonucleotide
  Sense strand starting at position 3796 of SEQ ID NO: 914511
gcaccagucugguaaucuc

SEQ ID NO: 1009613 - RNA, 19 nt, Artificial Sequence
  Description of Artificial Sequence: Synthetic oligonucleotide
  Antisense strand to SEQ ID NO: 1009612
gagauuaccagacuggugc

SEQ ID NO: 1009614 - RNA, 19 nt, Artificial Sequence
  Description of Artificial Sequence: Synthetic oligonucleotide
  Sense strand starting at position 3799 of SEQ ID NO: 914511
ccagucugguaaucucaaa

SEQ ID NO: 1009615 - RNA, 19 nt, Artificial Sequence
  Description of Artificial Sequence: Synthetic oligonucleotide
  Antisense strand to SEQ ID NO: 1009614
uuugagauuaccagacugg

SEQ ID NO: 1009616 - RNA, 19 nt, Artificial Sequence
  Description of Artificial Sequence: Synthetic oligonucleotide
  Sense strand starting at position 3824 of SEQ ID NO: 914511
ccagaaaucuggccaggag

SEQ ID NO: 1009617 - RNA, 19 nt, Artificial Sequence
  Description of Artificial Sequence: Synthetic oligonucleotide
  Antisense strand to SEQ ID NO: 1009616
cuccuggccagauuucugg

SEQ ID NO: 1009618 - RNA, 19 nt, Artificial Sequence
  Description of Artificial Sequence: Synthetic oligonucleotide
  Sense strand starting at position 3943 of SEQ ID NO: 914511
aucacaguucccuguggga

SEQ ID NO: 1009619 - RNA, 19 nt, Artificial Sequence
  Description of Artificial Sequence: Synthetic oligonucleotide
  Antisense strand to SEQ ID NO: 1009618
ucccacagggaacugugau

SEQ ID NO: 1009620 - RNA, 19 nt, Artificial Sequence
  Description of Artificial Sequence: Synthetic oligonucleotide
  Sense strand starting at position 18 of SEQ ID NO: 914512
auuggaauuucucugcugu

SEQ ID NO: 1009621 - RNA, 19 nt, Artificial Sequence
  Description of Artificial Sequence: Synthetic oligonucleotide
  Antisense strand to SEQ ID NO: 1009620
acagcagagaaauuccaau

SEQ ID NO: 1009622 - RNA, 19 nt, Artificial Sequence
  Description of Artificial Sequence: Synthetic oligonucleotide
  Sense strand starting at position 19 of SEQ ID NO: 914512
uuggaauuucucugcugua

SEQ ID NO: 1009623 - RNA, 19 nt, Artificial Sequence
  Description of Artificial Sequence: Synthetic oligonucleotide
  Antisense strand to SEQ ID NO: 1009622
uacagcagagaaauuccaa

SEQ ID NO: 1009624 - RNA, 19 nt, Artificial Sequence
  Description of Artificial Sequence: Synthetic oligonucleotide
  Sense strand starting at position 79 of SEQ ID NO: 914512
ggucgcuuucuguuuccua

SEQ ID NO: 1009625 - RNA, 19 nt, Artificial Sequence
  Description of Artificial Sequence: Synthetic oligonucleotide
  Antisense strand to SEQ ID NO: 1009624
uaggaaacagaaagcgacc

SEQ ID NO: 1009626 - RNA, 19 nt, Artificial Sequence
  Description of Artificial Sequence: Synthetic oligonucleotide
  Sense strand starting at position 209 of SEQ ID NO: 914512
aguagaauaucugcagaca

SEQ ID NO: 1009627 - RNA, 19 nt, Artificial Sequence
  Description of Artificial Sequence: Synthetic oligonucleotide
  Antisense strand to SEQ ID NO: 1009626
ugucugcagauauucuacu

SEQ ID NO: 1009628 - RNA, 19 nt, Artificial Sequence
  Description of Artificial Sequence: Synthetic oligonucleotide
  Sense strand starting at position 210 of SEQ ID NO: 914512
guagaauaucugcagacau

SEQ ID NO: 1009629 - RNA, 19 nt, Artificial Sequence
  Description of Artificial Sequence: Synthetic oligonucleotide
  Antisense strand to SEQ ID NO: 1009628
augucugcagauauucuac

SEQ ID NO: 1009630 - RNA, 19 nt, Artificial Sequence
  Description of Artificial Sequence: Synthetic oligonucleotide
  Sense strand starting at position 443 of SEQ ID NO: 914512
ucaauuuaccugugugcca

SEQ ID NO: 1009631 - RNA, 19 nt, Artificial Sequence
  Description of Artificial Sequence: Synthetic oligonucleotide
  Antisense strand to SEQ ID NO: 1009630
uggcacacagguaaauuga

SEQ ID NO: 1009632 - RNA, 19 nt, Artificial Sequence
  Description of Artificial Sequence: Synthetic oligonucleotide
  Sense strand starting at position 573 of SEQ ID NO: 914512
ucuaucaaaugggucuaau

SEQ ID NO: 1009633 - RNA, 19 nt, Artificial Sequence
  Description of Artificial Sequence: Synthetic oligonucleotide
  Antisense strand to SEQ ID NO: 1009632
auuagacccauuugauaga

SEQ ID NO: 1009634 - RNA, 19 nt, Artificial Sequence
  Description of Artificial Sequence: Synthetic oligonucleotide
  Sense strand starting at position 605 of SEQ ID NO: 914512
gucccagggugguuaugaa

SEQ ID NO: 1009635 - RNA, 19 nt, Artificial Sequence
  Description of Artificial Sequence: Synthetic oligonucleotide
  Antisense strand to SEQ ID NO: 1009634
uucauaaccacccugggac

SEQ ID NO: 1009636 - RNA, 19 nt, Artificial Sequence
  Description of Artificial Sequence: Synthetic oligonucleotide
  Sense strand starting at position 807 of SEQ ID NO: 914512
uccuuaacucgacaucuag

SEQ ID NO: 1009637 - RNA, 19 nt, Artificial Sequence
  Description of Artificial Sequence: Synthetic oligonucleotide
  Antisense strand to SEQ ID NO: 1009636
cuagaugucgaguuaagga

SEQ ID NO: 1009638 - RNA, 19 nt, Artificial Sequence
  Description of Artificial Sequence: Synthetic oligonucleotide
  Sense strand starting at position 978 of SEQ ID NO: 914512
agaguaaugucccuuacca

SEQ ID NO: 1009639 - RNA, 19 nt, Artificial Sequence
  Description of Artificial Sequence: Synthetic oligonucleotide
  Antisense strand to SEQ ID NO: 1009638
ugguaagggacauuacucu

SEQ ID NO: 1009640 - RNA, 19 nt, Artificial Sequence
  Description of Artificial Sequence: Synthetic oligonucleotide
  Sense strand starting at position 980 of SEQ ID NO: 914512
aguaaugucccuuaccaag

SEQ ID NO: 1009641 - RNA, 19 nt, Artificial Sequence
  Description of Artificial Sequence: Synthetic oligonucleotide
  Antisense strand to SEQ ID NO: 1009640
cuugguaagggacauuacu

SEQ ID NO: 1009642 - RNA, 19 nt, Artificial Sequence
  Description of Artificial Sequence: Synthetic oligonucleotide
  Sense strand starting at position 1004 of SEQ ID NO: 914512
uuguaagagguuuguaaca

SEQ ID NO: 1009643 - RNA, 19 nt, Artificial Sequence
  Description of Artificial Sequence: Synthetic oligonucleotide
  Antisense strand to SEQ ID NO: 1009642
uguuacaaaccucuuacaa

SEQ ID NO: 1009644 - RNA, 19 nt, Artificial Sequence
  Description of Artificial Sequence: Synthetic oligonucleotide
  Sense strand starting at position 1157 of SEQ ID NO: 914512
accaguaccucguuaauuu

SEQ ID NO: 1009645 - RNA, 19 nt, Artificial Sequence
  Description of Artificial Sequence: Synthetic oligonucleotide
  Antisense strand to SEQ ID NO: 1009644
aaauuaacgagguacuggu

SEQ ID NO: 1009646 - RNA, 19 nt, Artificial Sequence
  Description of Artificial Sequence: Synthetic oligonucleotide
  Sense strand starting at position 1705 of SEQ ID NO: 914512
ggaaacgauccguugcguu

SEQ ID NO: 1009647 - RNA, 19 nt, Artificial Sequence
  Description of Artificial Sequence: Synthetic oligonucleotide
  Antisense strand to SEQ ID NO: 1009646
aacgcaacggaucguuucc

SEQ ID NO: 1009648 - RNA, 19 nt, Artificial Sequence
  Description of Artificial Sequence: Synthetic oligonucleotide
  Sense strand starting at position 1901 of SEQ ID NO: 914512
aaugaagguguccgagaga

SEQ ID NO: 1009649 - RNA, 19 nt, Artificial Sequence
  Description of Artificial Sequence: Synthetic oligonucleotide
  Antisense strand to SEQ ID NO: 1009648
ucucucggacaccuucauu

SEQ ID NO: 1009650 - RNA, 19 nt, Artificial Sequence
  Description of Artificial Sequence: Synthetic oligonucleotide
  Sense strand starting at position 1961 of SEQ ID NO: 914512
ggguaucuccugcagcaaa

SEQ ID NO: 1009651 - RNA, 19 nt, Artificial Sequence
  Description of Artificial Sequence: Synthetic oligonucleotide
  Antisense strand to SEQ ID NO: 1009650
uuugcugcaggagauaccc

SEQ ID NO: 1009652 - RNA, 19 nt, Artificial Sequence
  Description of Artificial Sequence: Synthetic oligonucleotide
  Sense strand starting at position 2086 of SEQ ID NO: 914512
gggauaagugcacaguaag

SEQ ID NO: 1009653 - RNA, 19 nt, Artificial Sequence
  Description of Artificial Sequence: Synthetic oligonucleotide
  Antisense strand to SEQ ID NO: 1009652
cuuacugugcacuuauccc

SEQ ID NO: 1009654 - RNA, 19 nt, Artificial Sequence
  Description of Artificial Sequence: Synthetic oligonucleotide
  Sense strand starting at position 2097 of SEQ ID NO: 914512
acaguaagugcagaaucau

SEQ ID NO: 1009655 - RNA, 19 nt, Artificial Sequence
  Description of Artificial Sequence: Synthetic oligonucleotide
  Antisense strand to SEQ ID NO: 1009654
augauucugcacuuacugu

SEQ ID NO: 1009656 - RNA, 19 nt, Artificial Sequence
  Description of Artificial Sequence: Synthetic oligonucleotide
  Sense strand starting at position 2111 of SEQ ID NO: 914512
aucauacaguguuuccaaa

SEQ ID NO: 1009657 - RNA, 19 nt, Artificial Sequence
  Description of Artificial Sequence: Synthetic oligonucleotide
  Antisense strand to SEQ ID NO: 1009656
uuuggaaacacuguaugau

SEQ ID NO: 1009658 - RNA, 19 nt, Artificial Sequence
  Description of Artificial Sequence: Synthetic oligonucleotide
  Sense strand starting at position 2122 of SEQ ID NO: 914512
uuuccaaauccucagggua

SEQ ID NO: 1009659 - RNA, 19 nt, Artificial Sequence
  Description of Artificial Sequence: Synthetic oligonucleotide
  Antisense strand to SEQ ID NO: 1009658
uacccugaggauuuggaaa

SEQ ID NO: 1009660 - RNA, 19 nt, Artificial Sequence
  Description of Artificial Sequence: Synthetic oligonucleotide
  Sense strand starting at position 2207 of SEQ ID NO: 914512
cccucaucucaggagcaau

SEQ ID NO: 1009661 - RNA, 19 nt, Artificial Sequence
  Description of Artificial Sequence: Synthetic oligonucleotide
  Antisense strand to SEQ ID NO: 1009660
auugcuccugagaugaggg

SEQ ID NO: 1009662 - RNA, 19 nt, Artificial Sequence
  Description of Artificial Sequence: Synthetic oligonucleotide
  Sense strand starting at position 2245 of SEQ ID NO: 914512
cggucacauuacuuugaaa

SEQ ID NO: 1009663 - RNA, 19 nt, Artificial Sequence
  Description of Artificial Sequence: Synthetic oligonucleotide
  Antisense strand to SEQ ID NO: 1009662
uuucaaaguaaugugaccg

SEQ ID NO: 1009664 - RNA, 19 nt, Artificial Sequence
  Description of Artificial Sequence: Synthetic oligonucleotide
  Sense strand starting at position 2310 of SEQ ID NO: 914512
gaugcugugccagaauuga

SEQ ID NO: 1009665 - RNA, 19 nt, Artificial Sequence
  Description of Artificial Sequence: Synthetic oligonucleotide
  Antisense strand to SEQ ID NO: 1009664
ucaauucuggcacagcauc

SEQ ID NO: 1009666 - RNA, 19 nt, Artificial Sequence
  Description of Artificial Sequence: Synthetic oligonucleotide
  Sense strand starting at position 2318 of SEQ ID NO: 914512
gccagaauugaucacaguu

SEQ ID NO: 1009667 - RNA, 19 nt, Artificial Sequence
  Description of Artificial Sequence: Synthetic oligonucleotide
  Antisense strand to SEQ ID NO: 1009666
aacugugaucaauucuggc

SEQ ID NO: 1009668 - RNA, 19 nt, Artificial Sequence
  Description of Artificial Sequence: Synthetic oligonucleotide
  Sense strand starting at position 2326 of SEQ ID NO: 914512
ugaucacaguugcucuaaa

SEQ ID NO: 1009669 - RNA, 19 nt, Artificial Sequence
  Description of Artificial Sequence: Synthetic oligonucleotide
  Antisense strand to SEQ ID NO: 1009668
uuuagagcaacugugauca

SEQ ID NO: 1009670 - RNA, 19 nt, Artificial Sequence
  Description of Artificial Sequence: Synthetic oligonucleotide
  Sense strand starting at position 2557 of SEQ ID NO: 914512
agaucagcagcuuauaagu

SEQ ID NO: 1009671 - RNA, 19 nt, Artificial Sequence
  Description of Artificial Sequence: Synthetic oligonucleotide
  Antisense strand to SEQ ID NO: 1009670
acuuauaagcugcugaucu

SEQ ID NO: 1009672 - RNA, 19 nt, Artificial Sequence
  Description of Artificial Sequence: Synthetic oligonucleotide
  Sense strand starting at position 2611 of SEQ ID NO: 914512
caagguuauuuagagaucu

SEQ ID NO: 1009673 - RNA, 19 nt, Artificial Sequence
  Description of Artificial Sequence: Synthetic oligonucleotide
  Antisense strand to SEQ ID NO: 1009672
agaucucuaaauaaccuug

SEQ ID NO: 1009674 - RNA, 19 nt, Artificial Sequence
  Description of Artificial Sequence: Synthetic oligonucleotide
  Sense strand starting at position 2749 of SEQ ID NO: 914512
uuaaccuaacgugaguauu

SEQ ID NO: 1009675 - RNA, 19 nt, Artificial Sequence
  Description of Artificial Sequence: Synthetic oligonucleotide
  Antisense strand to SEQ ID NO: 1009674
aauacucacguuagguuaa

SEQ ID NO: 1009676 - RNA, 19 nt, Artificial Sequence
  Description of Artificial Sequence: Synthetic oligonucleotide
  Sense strand starting at position 2792 of SEQ ID NO: 914512
guuacaaaugacggaguau

SEQ ID NO: 1009677 - RNA, 19 nt, Artificial Sequence
  Description of Artificial Sequence: Synthetic oligonucleotide
  Antisense strand to SEQ ID NO: 1009676
auacuccgucauuuguaac

SEQ ID NO: 1009678 - RNA, 19 nt, Artificial Sequence
  Description of Artificial Sequence: Synthetic oligonucleotide
  Sense strand starting at position 3056 of SEQ ID NO: 914512
gugaauguaauagaccgua

SEQ ID NO: 1009679 - RNA, 19 nt, Artificial Sequence
  Description of Artificial Sequence: Synthetic oligonucleotide
  Antisense strand to SEQ ID NO: 1009678
uacggucuauuacauucac

SEQ ID NO: 1009680 - RNA, 19 nt, Artificial Sequence
  Description of Artificial Sequence: Synthetic oligonucleotide
  Sense strand starting at position 3059 of SEQ ID NO: 914512
aauguaauagaccguagaa

SEQ ID NO: 1009681 - RNA, 19 nt, Artificial Sequence
  Description of Artificial Sequence: Synthetic oligonucleotide
  Antisense strand to SEQ ID NO: 1009680
uucuacggucuauuacauu

SEQ ID NO: 1009682 - RNA, 19 nt, Artificial Sequence
  Description of Artificial Sequence: Synthetic oligonucleotide
  Sense strand starting at position 3061 of SEQ ID NO: 914512
uguaauagaccguagaaau

SEQ ID NO: 1009683 - RNA, 19 nt, Artificial Sequence
  Description of Artificial Sequence: Synthetic oligonucleotide
  Antisense strand to SEQ ID NO: 1009682
auuucuacggucuauuaca

SEQ ID NO: 1009684 - RNA, 19 nt, Artificial Sequence
  Description of Artificial Sequence: Synthetic oligonucleotide
  Sense strand starting at position 3071 of SEQ ID NO: 914512
cguagaaauugaucauaca

SEQ ID NO: 1009685 - RNA, 19 nt, Artificial Sequence
  Description of Artificial Sequence: Synthetic oligonucleotide
  Antisense strand to SEQ ID NO: 1009684
uguaugaucaauuucuacg

SEQ ID NO: 1009686 - RNA, 19 nt, Artificial Sequence
  Description of Artificial Sequence: Synthetic oligonucleotide
  Sense strand starting at position 3126 of SEQ ID NO: 914512
uuuaguugugaccaaaucu

SEQ ID NO: 1009687 - RNA, 19 nt, Artificial Sequence
  Description of Artificial Sequence: Synthetic oligonucleotide
  Antisense strand to SEQ ID NO: 1009686
agauuuggucacaacuaaa

SEQ ID NO: 1009688 - RNA, 19 nt, Artificial Sequence
  Description of Artificial Sequence: Synthetic oligonucleotide
  Sense strand starting at position 3171 of SEQ ID NO: 914512
gcaacauuaccaggauugu

SEQ ID NO: 1009689 - RNA, 19 nt, Artificial Sequence
  Description of Artificial Sequence: Synthetic oligonucleotide
  Antisense strand to SEQ ID NO: 1009688
acaauccugguaauguugc

SEQ ID NO: 1009690 - RNA, 19 nt, Artificial Sequence
  Description of Artificial Sequence: Synthetic oligonucleotide
  Sense strand starting at position 3177 of SEQ ID NO: 914512
uuaccaggauuguuaguga

SEQ ID NO: 1009691 - RNA, 19 nt, Artificial Sequence
  Description of Artificial Sequence: Synthetic oligonucleotide
  Antisense strand to SEQ ID NO: 1009690
ucacuaacaauccugguaa

SEQ ID NO: 1009692 - RNA, 19 nt, Artificial Sequence
  Description of Artificial Sequence: Synthetic oligonucleotide
  Sense strand starting at position 3180 of SEQ ID NO: 914512
ccaggauuguuagugaacu

SEQ ID NO: 1009693 - RNA, 19 nt, Artificial Sequence
  Description of Artificial Sequence: Synthetic oligonucleotide
  Antisense strand to SEQ ID NO: 1009692
aguucacuaacaauccugg

SEQ ID NO: 1009694 - RNA, 19 nt, Artificial Sequence
  Description of Artificial Sequence: Synthetic oligonucleotide
  Sense strand starting at position 3260 of SEQ ID NO: 914512
gaauauaauugcuuauggu

SEQ ID NO: 1009695 - RNA, 19 nt, Artificial Sequence
  Description of Artificial Sequence: Synthetic oligonucleotide
  Antisense strand to SEQ ID NO: 1009694
accauaagcaauuauauuc

SEQ ID NO: 1009696 - RNA, 19 nt, Artificial Sequence
  Description of Artificial Sequence: Synthetic oligonucleotide
  Sense strand starting at position 3268 of SEQ ID NO: 914512
uugcuuaugguagauaauu

SEQ ID NO: 1009697 - RNA, 19 nt, Artificial Sequence
  Description of Artificial Sequence: Synthetic oligonucleotide
  Antisense strand to SEQ ID NO: 1009696
aauuaucuaccauaagcaa

SEQ ID NO: 1009698 - RNA, 19 nt, Artificial Sequence
  Description of Artificial Sequence: Synthetic oligonucleotide
  Sense strand starting at position 3343 of SEQ ID NO: 914512
auaaguacugaauggcuaa

SEQ ID NO: 1009699 - RNA, 19 nt, Artificial Sequence
  Description of Artificial Sequence: Synthetic oligonucleotide
  Antisense strand to SEQ ID NO: 1009698
uuagccauucaguacuuau

SEQ ID NO: 1009700 - RNA, 19 nt, Artificial Sequence
  Description of Artificial Sequence: Synthetic oligonucleotide
  Sense strand starting at position 193 of SEQ ID NO: 914513
cugcaaguucuggauuagu

SEQ ID NO: 1009701 - RNA, 19 nt, Artificial Sequence
  Description of Artificial Sequence: Synthetic oligonucleotide
  Antisense strand to SEQ ID NO: 1009700
acuaauccagaacuugcag

SEQ ID NO: 1009702 - RNA, 19 nt, Artificial Sequence
  Description of Artificial Sequence: Synthetic oligonucleotide
  Sense strand starting at position 196 of SEQ ID NO: 914513
caaguucuggauuaguauc

SEQ ID NO: 1009703 - RNA, 19 nt, Artificial Sequence
  Description of Artificial Sequence: Synthetic oligonucleotide
  Antisense strand to SEQ ID NO: 1009702
gauacuaauccagaacuug

SEQ ID NO: 1009704 - RNA, 19 nt, Artificial Sequence
  Description of Artificial Sequence: Synthetic oligonucleotide
  Sense strand starting at position 204 of SEQ ID NO: 914513
ggauuaguaucucucuuag

SEQ ID NO: 1009705 - RNA, 19 nt, Artificial Sequence
  Description of Artificial Sequence: Synthetic oligonucleotide
  Antisense strand to SEQ ID NO: 1009704
cuaagagagauacuaaucc

SEQ ID NO: 1009706 - RNA, 19 nt, Artificial Sequence
  Description of Artificial Sequence: Synthetic oligonucleotide
  Sense strand starting at position 206 of SEQ ID NO: 914513
auuaguaucucucuuagac

SEQ ID NO: 1009707 - RNA, 19 nt, Artificial Sequence
  Description of Artificial Sequence: Synthetic oligonucleotide
  Antisense strand to SEQ ID NO: 1009706
gucuaagagagauacuaau

SEQ ID NO: 1009708 - RNA, 19 nt, Artificial Sequence
  Description of Artificial Sequence: Synthetic oligonucleotide
  Sense strand starting at position 325 of SEQ ID NO: 914513
uuacuuguucuauguaaug

SEQ ID NO: 1009709 - RNA, 19 nt, Artificial Sequence
  Description of Artificial Sequence: Synthetic oligonucleotide
  Antisense strand to SEQ ID NO: 1009708
cauuacauagaacaaguaa

SEQ ID NO: 1009710 - RNA, 19 nt, Artificial Sequence
  Description of Artificial Sequence: Synthetic oligonucleotide
  Sense strand starting at position 331 of SEQ ID NO: 914513
guucuauguaauggaaaga

SEQ ID NO: 1009711 - RNA, 19 nt, Artificial Sequence
  Description of Artificial Sequence: Synthetic oligonucleotide
  Antisense strand to SEQ ID NO: 1009710
ucuuuccauuacauagaac

SEQ ID NO: 1009712 - RNA, 19 nt, Artificial Sequence
  Description of Artificial Sequence: Synthetic oligonucleotide
  Sense strand starting at position 347 of SEQ ID NO: 914513
agacuuaugugagucucau

SEQ ID NO: 1009713 - RNA, 19 nt, Artificial Sequence
  Description of Artificial Sequence: Synthetic oligonucleotide
  Antisense strand to SEQ ID NO: 1009712
augagacucacauaagucu

SEQ ID NO: 1009714 - RNA, 19 nt, Artificial Sequence
  Description of Artificial Sequence: Synthetic oligonucleotide
  Sense strand starting at position 391 of SEQ ID NO: 914513
gccugcucucaugagcaga

SEQ ID NO: 1009715 - RNA, 19 nt, Artificial Sequence
  Description of Artificial Sequence: Synthetic oligonucleotide
  Antisense strand to SEQ ID NO: 1009714
ucugcucaugagagcaggc

SEQ ID NO: 1009716 - RNA, 19 nt, Artificial Sequence
  Description of Artificial Sequence: Synthetic oligonucleotide
  Sense strand starting at position 393 of SEQ ID NO: 914513
cugcucucaugagcagaaa

SEQ ID NO: 1009717 - RNA, 19 nt, Artificial Sequence
  Description of Artificial Sequence: Synthetic oligonucleotide
  Antisense strand to SEQ ID NO: 1009716
uuucugcucaugagagcag

SEQ ID NO: 1009718 - RNA, 19 nt, Artificial Sequence
  Description of Artificial Sequence: Synthetic oligonucleotide
  Sense strand starting at position 553 of SEQ ID NO: 914513
cauguauguccuggagaaa

SEQ ID NO: 1009719 - RNA, 19 nt, Artificial Sequence
  Description of Artificial Sequence: Synthetic oligonucleotide
  Antisense strand to SEQ ID NO: 1009718
uuucuccaggacauacaug

SEQ ID NO: 1009720 - RNA, 19 nt, Artificial Sequence
  Description of Artificial Sequence: Synthetic oligonucleotide
  Sense strand starting at position 565 of SEQ ID NO: 914513
ggagaaacccacugcuuga

SEQ ID NO: 1009721 - RNA, 19 nt, Artificial Sequence
  Description of Artificial Sequence: Synthetic oligonucleotide
  Antisense strand to SEQ ID NO: 1009720
ucaagcaguggguuucucc

SEQ ID NO: 1009722 - RNA, 19 nt, Artificial Sequence
  Description of Artificial Sequence: Synthetic oligonucleotide
  Sense strand starting at position 592 of SEQ ID NO: 914513
ccuuucuucugauuaagag

SEQ ID NO: 1009723 - RNA, 19 nt, Artificial Sequence
  Description of Artificial Sequence: Synthetic oligonucleotide
  Antisense strand to SEQ ID NO: 1009722
cucuuaaucagaagaaagg

SEQ ID NO: 1009724 - RNA, 19 nt, Artificial Sequence
  Description of Artificial Sequence: Synthetic oligonucleotide
  Sense strand starting at position 601 of SEQ ID NO: 914513
ugauuaagagaaugugguu

SEQ ID NO: 1009725 - RNA, 19 nt, Artificial Sequence
  Description of Artificial Sequence: Synthetic oligonucleotide
  Antisense strand to SEQ ID NO: 1009724
aaccacauucucuuaauca

SEQ ID NO: 1009726 - RNA, 19 nt, Artificial Sequence
  Description of Artificial Sequence: Synthetic oligonucleotide
  Sense strand starting at position 606 of SEQ ID NO: 914513
aagagaaugugguuugguu

SEQ ID NO: 1009727 - RNA, 19 nt, Artificial Sequence
  Description of Artificial Sequence: Synthetic oligonucleotide
  Antisense strand to SEQ ID NO: 1009726
aaccaaaccacauucucuu

SEQ ID NO: 1009728 - RNA, 19 nt, Artificial Sequence
  Description of Artificial Sequence: Synthetic oligonucleotide
  Sense strand starting at position 723 of SEQ ID NO: 914513
gauguaaccuguuugaugu

SEQ ID NO: 1009729 - RNA, 19 nt, Artificial Sequence
  Description of Artificial Sequence: Synthetic oligonucleotide
  Antisense strand to SEQ ID NO: 1009728
acaucaaacagguuacauc

SEQ ID NO: 1009730 - RNA, 19 nt, Artificial Sequence
  Description of Artificial Sequence: Synthetic oligonucleotide
  Sense strand starting at position 869 of SEQ ID NO: 914513
uuacuuccgcuuuauagau

SEQ ID NO: 1009731 - RNA, 19 nt, Artificial Sequence
  Description of Artificial Sequence: Synthetic oligonucleotide
  Antisense strand to SEQ ID NO: 1009730
aucuauaaagcggaaguaa

SEQ ID NO: 1009732 - RNA, 19 nt, Artificial Sequence
  Description of Artificial Sequence: Synthetic oligonucleotide
  Sense strand starting at position 876 of SEQ ID NO: 914513
cgcuuuauagauuaggaaa

SEQ ID NO: 1009733 - RNA, 19 nt, Artificial Sequence
  Description of Artificial Sequence: Synthetic oligonucleotide
  Antisense strand to SEQ ID NO: 1009732
uuuccuaaucuauaaagcg

SEQ ID NO: 1009734 - RNA, 19 nt, Artificial Sequence
  Description of Artificial Sequence: Synthetic oligonucleotide
  Sense strand starting at position 1002 of SEQ ID NO: 914513
agagucucacacugcaaau

SEQ ID NO: 1009735 - RNA, 19 nt, Artificial Sequence
  Description of Artificial Sequence: Synthetic oligonucleotide
  Antisense strand to SEQ ID NO: 1009734
auuugcagugugagacucu

SEQ ID NO: 1009736 - RNA, 19 nt, Artificial Sequence
  Description of Artificial Sequence: Synthetic oligonucleotide
  Sense strand starting at position 1038 of SEQ ID NO: 914513
caaugugaggcagggaaua

SEQ ID NO: 1009737 - RNA, 19 nt, Artificial Sequence
  Description of Artificial Sequence: Synthetic oligonucleotide
  Antisense strand to SEQ ID NO: 1009736
uauucccugccucacauug

SEQ ID NO: 1009738 - RNA, 19 nt, Artificial Sequence
  Description of Artificial Sequence: Synthetic oligonucleotide
  Sense strand starting at position 1093 of SEQ ID NO: 914513
uggcuuacccgcucuguaa

SEQ ID NO: 1009739 - RNA, 19 nt, Artificial Sequence
  Description of Artificial Sequence: Synthetic oligonucleotide
  Antisense strand to SEQ ID NO: 1009738
uuacagagcggguaagcca

SEQ ID NO: 1009740 - RNA, 19 nt, Artificial Sequence
  Description of Artificial Sequence: Synthetic oligonucleotide
  Sense strand starting at position 1187 of SEQ ID NO: 914513
gagaguugcgaggaucaaa

SEQ ID NO: 1009741 - RNA, 19 nt, Artificial Sequence
  Description of Artificial Sequence: Synthetic oligonucleotide
  Antisense strand to SEQ ID NO: 1009740
uuugauccucgcaacucuc

SEQ ID NO: 1009742 - RNA, 19 nt, Artificial Sequence
  Description of Artificial Sequence: Synthetic oligonucleotide
  Sense strand starting at position 1218 of SEQ ID NO: 914513
augggaagguuauccuaau

SEQ ID NO: 1009743 - RNA, 19 nt, Artificial Sequence
  Description of Artificial Sequence: Synthetic oligonucleotide
  Antisense strand to SEQ ID NO: 1009742
auuaggauaaccuucccau

SEQ ID NO: 1009744 - RNA, 19 nt, Artificial Sequence
  Description of Artificial Sequence: Synthetic oligonucleotide
  Sense strand starting at position 1219 of SEQ ID NO: 914513
ugggaagguuauccuaauu

SEQ ID NO: 1009745 - RNA, 19 nt, Artificial Sequence
  Description of Artificial Sequence: Synthetic oligonucleotide
  Antisense strand to SEQ ID NO: 1009744
aauuaggauaaccuuccca

SEQ ID NO: 1009746 - RNA, 19 nt, Artificial Sequence
  Description of Artificial Sequence: Synthetic oligonucleotide
  Sense strand starting at position 1439 of SEQ ID NO: 914513
uucugaguugugccgaguu

SEQ ID NO: 1009747 - RNA, 19 nt, Artificial Sequence
  Description of Artificial Sequence: Synthetic oligonucleotide
  Antisense strand to SEQ ID NO: 1009746
aacucggcacaacucagaa

SEQ ID NO: 1009748 - RNA, 19 nt, Artificial Sequence
  Description of Artificial Sequence: Synthetic oligonucleotide
  Sense strand starting at position 1557 of SEQ ID NO: 914513
uggcgcugucccucacauu

SEQ ID NO: 1009749 - RNA, 19 nt, Artificial Sequence
  Description of Artificial Sequence: Synthetic oligonucleotide
  Antisense strand to SEQ ID NO: 1009748
aaugugagggacagcgcca

SEQ ID NO: 1009750 - RNA, 19 nt, Artificial Sequence
  Description of Artificial Sequence: Synthetic oligonucleotide
  Sense strand starting at position 2801 of SEQ ID NO: 914513
gguaaugaacgucgaaaca

SEQ ID NO: 1009751 - RNA, 19 nt, Artificial Sequence
  Description of Artificial Sequence: Synthetic oligonucleotide
  Antisense strand to SEQ ID NO: 1009750
uguuucgacguucauuacc

SEQ ID NO: 1009752 - RNA, 19 nt, Artificial Sequence
  Description of Artificial Sequence: Synthetic oligonucleotide
  Sense strand starting at position 2847 of SEQ ID NO: 914513
auuccaggugccuacaaua

SEQ ID NO: 1009753 - RNA, 19 nt, Artificial Sequence
  Description of Artificial Sequence: Synthetic oligonucleotide
  Antisense strand to SEQ ID NO: 1009752
uauuguaggcaccuggaau

SEQ ID NO: 1009754 - RNA, 19 nt, Artificial Sequence
  Description of Artificial Sequence: Synthetic oligonucleotide
  Sense strand starting at position 2908 of SEQ ID NO: 914513
ucaggaaagucagcccaua

SEQ ID NO: 1009755 - RNA, 19 nt, Artificial Sequence
  Description of Artificial Sequence: Synthetic oligonucleotide
  Antisense strand to SEQ ID NO: 1009754
uaugggcugacuuuccuga

SEQ ID NO: 1009756 - RNA, 19 nt, Artificial Sequence
  Description of Artificial Sequence: Synthetic oligonucleotide
  Sense strand starting at position 3022 of SEQ ID NO: 914513
ugcacuucucugggaguga

SEQ ID NO: 1009757 - RNA, 19 nt, Artificial Sequence
  Description of Artificial Sequence: Synthetic oligonucleotide
  Antisense strand to SEQ ID NO: 1009756
ucacucccagagaagugca

SEQ ID NO: 1009758 - RNA, 19 nt, Artificial Sequence
  Description of Artificial Sequence: Synthetic oligonucleotide
  Sense strand starting at position 3063 of SEQ ID NO: 914513
gggagagcugauugucaaa

SEQ ID NO: 1009759 - RNA, 19 nt, Artificial Sequence
  Description of Artificial Sequence: Synthetic oligonucleotide
  Antisense strand to SEQ ID NO: 1009758
uuugacaaucagcucuccc

SEQ ID NO: 1009760 - RNA, 19 nt, Artificial Sequence
  Description of Artificial Sequence: Synthetic oligonucleotide
  Sense strand starting at position 3065 of SEQ ID NO: 914513
gagagcugauugucaaaga

SEQ ID NO: 1009761 - RNA, 19 nt, Artificial Sequence
  Description of Artificial Sequence: Synthetic oligonucleotide
  Antisense strand to SEQ ID NO: 1009760
ucuuugacaaucagcucuc

SEQ ID NO: 1009762 - RNA, 19 nt, Artificial Sequence
  Description of Artificial Sequence: Synthetic oligonucleotide
  Sense strand starting at position 3158 of SEQ ID NO: 914513
aucucuuguguugaaugaa

SEQ ID NO: 1009763 - RNA, 19 nt, Artificial Sequence
  Description of Artificial Sequence: Synthetic oligonucleotide
  Antisense strand to SEQ ID NO: 1009762
uucauucaacacaagagau

SEQ ID NO: 1009764 - RNA, 19 nt, Artificial Sequence
  Description of Artificial Sequence: Synthetic oligonucleotide
  Sense strand starting at position 3293 of SEQ ID NO: 914513
gggccacuuugaguaaaua

SEQ ID NO: 1009765 - RNA, 19 nt, Artificial Sequence
  Description of Artificial Sequence: Synthetic oligonucleotide
  Antisense strand to SEQ ID NO: 1009764
uauuuacucaaaguggccc

SEQ ID NO: 1009766 - RNA, 19 nt, Artificial Sequence
  Description of Artificial Sequence: Synthetic oligonucleotide
  Sense strand starting at position 3294 of SEQ ID NO: 914513
ggccacuuugaguaaauac

SEQ ID NO: 1009767 - RNA, 19 nt, Artificial Sequence
  Description of Artificial Sequence: Synthetic oligonucleotide
  Antisense strand to SEQ ID NO: 1009766
guauuuacucaaaguggcc

SEQ ID NO: 1009768 - RNA, 19 nt, Artificial Sequence
  Description of Artificial Sequence: Synthetic oligonucleotide
  Sense strand starting at position 3348 of SEQ ID NO: 914513
gcuucucuugaagagcuaa

SEQ ID NO: 1009769 - RNA, 19 nt, Artificial Sequence
  Description of Artificial Sequence: Synthetic oligonucleotide
  Antisense strand to SEQ ID NO: 1009768
uuagcucuucaagagaagc

SEQ ID NO: 1009770 - RNA, 19 nt, Artificial Sequence
  Description of Artificial Sequence: Synthetic oligonucleotide
  Sense strand starting at position 3376 of SEQ ID NO: 914513
caaagagugccagaggagu

SEQ ID NO: 1009771 - RNA, 19 nt, Artificial Sequence
  Description of Artificial Sequence: Synthetic oligonucleotide
  Antisense strand to SEQ ID NO: 1009770
acuccucuggcacucuuug

SEQ ID NO: 1009772 - RNA, 19 nt, Artificial Sequence
  Description of Artificial Sequence: Synthetic oligonucleotide
  Sense strand starting at position 3378 of SEQ ID NO: 914513
aagagugccagaggaguau

SEQ ID NO: 1009773 - RNA, 19 nt, Artificial Sequence
  Description of Artificial Sequence: Synthetic oligonucleotide
  Antisense strand to SEQ ID NO: 1009772
auacuccucuggcacucuu

SEQ ID NO: 1009774 - RNA, 19 nt, Artificial Sequence
  Description of Artificial Sequence: Synthetic oligonucleotide
  Sense strand starting at position 3405 of SEQ ID NO: 914513
aagggauguugagccauau

SEQ ID NO: 1009775 - RNA, 19 nt, Artificial Sequence
  Description of Artificial Sequence: Synthetic oligonucleotide
  Antisense strand to SEQ ID NO: 1009774
auauggcucaacaucccuu

SEQ ID NO: 1009776 - RNA, 19 nt, Artificial Sequence
  Description of Artificial Sequence: Synthetic oligonucleotide
  Sense strand starting at position 3409 of SEQ ID NO: 914513
gauguugagccauauccca

SEQ ID NO: 1009777 - RNA, 19 nt, Artificial Sequence
  Description of Artificial Sequence: Synthetic oligonucleotide
  Antisense strand to SEQ ID NO: 1009776
ugggauauggcucaacauc

SEQ ID NO: 1009778 - RNA, 19 nt, Artificial Sequence
  Description of Artificial Sequence: Synthetic oligonucleotide
  Sense strand starting at position 3864 of SEQ ID NO: 914513
aaaugugcugugcacauau

SEQ ID NO: 1009779 - RNA, 19 nt, Artificial Sequence
  Description of Artificial Sequence: Synthetic oligonucleotide
  Antisense strand to SEQ ID NO: 1009778
auaugugcacagcacauuu

SEQ ID NO: 1009780 - RNA, 19 nt, Artificial Sequence
  Description of Artificial Sequence: Synthetic oligonucleotide
  Sense strand starting at position 113 of SEQ ID NO: 914514
gcagaaacccagcgcaauu

SEQ ID NO: 1009781 - RNA, 19 nt, Artificial Sequence
  Description of Artificial Sequence: Synthetic oligonucleotide
  Antisense strand to SEQ ID NO: 1009780
aauugcgcuggguuucugc

SEQ ID NO: 1009782 - RNA, 19 nt, Artificial Sequence
  Description of Artificial Sequence: Synthetic oligonucleotide
  Sense strand starting at position 234 of SEQ ID NO: 914514
cgcaguguugugcugagga

SEQ ID NO: 1009783 - RNA, 19 nt, Artificial Sequence
  Description of Artificial Sequence: Synthetic oligonucleotide
  Antisense strand to SEQ ID NO: 1009782
uccucagcacaacacugcg

SEQ ID NO: 1009784 - RNA, 19 nt, Artificial Sequence
  Description of Artificial Sequence: Synthetic oligonucleotide
  Sense strand starting at position 236 of SEQ ID NO: 914514
caguguugugcugaggaug

SEQ ID NO: 1009785 - RNA, 19 nt, Artificial Sequence
  Description of Artificial Sequence: Synthetic oligonucleotide
  Antisense strand to SEQ ID NO: 1009784
cauccucagcacaacacug

SEQ ID NO: 1009786 - RNA, 19 nt, Artificial Sequence
  Description of Artificial Sequence: Synthetic oligonucleotide
  Sense strand starting at position 274 of SEQ ID NO: 914514
ccagcuggaucccuacaua

SEQ ID NO: 1009787 - RNA, 19 nt, Artificial Sequence
  Description of Artificial Sequence: Synthetic oligonucleotide
  Antisense strand to SEQ ID NO: 1009786
uauguagggauccagcugg

SEQ ID NO: 1009788 - RNA, 19 nt, Artificial Sequence
  Description of Artificial Sequence: Synthetic oligonucleotide
  Sense strand starting at position 521 of SEQ ID NO: 914514
ucauaucucagccgcgaua

SEQ ID NO: 1009789 - RNA, 19 nt, Artificial Sequence
  Description of Artificial Sequence: Synthetic oligonucleotide
  Antisense strand to SEQ ID NO: 1009788
uaucgcggcugagauauga

SEQ ID NO: 1009790 - RNA, 19 nt, Artificial Sequence
  Description of Artificial Sequence: Synthetic oligonucleotide
  Sense strand starting at position 607 of SEQ ID NO: 914514
agcugauuacccugagaaa

SEQ ID NO: 1009791 - RNA, 19 nt, Artificial Sequence
  Description of Artificial Sequence: Synthetic oligonucleotide
  Antisense strand to SEQ ID NO: 1009790
uuucucaggguaaucagcu

SEQ ID NO: 1009792 - RNA, 19 nt, Artificial Sequence
  Description of Artificial Sequence: Synthetic oligonucleotide
  Sense strand starting at position 610 of SEQ ID NO: 914514
ugauuacccugagaaagga

SEQ ID NO: 1009793 - RNA, 19 nt, Artificial Sequence
  Description of Artificial Sequence: Synthetic oligonucleotide
  Antisense strand to SEQ ID NO: 1009792
uccuuucucaggguaauca

SEQ ID NO: 1009794 - RNA, 19 nt, Artificial Sequence
  Description of Artificial Sequence: Synthetic oligonucleotide
  Sense strand starting at position 739 of SEQ ID NO: 914514
cuccauuggcucugauaac

SEQ ID NO: 1009795 - RNA, 19 nt, Artificial Sequence
  Description of Artificial Sequence: Synthetic oligonucleotide
  Antisense strand to SEQ ID NO: 1009794
guuaucagagccaauggag

SEQ ID NO: 1009796 - RNA, 19 nt, Artificial Sequence
  Description of Artificial Sequence: Synthetic oligonucleotide
  Sense strand starting at position 933 of SEQ ID NO: 914514
ccaugcauugccuggauau

SEQ ID NO: 1009797 - RNA, 19 nt, Artificial Sequence
  Description of Artificial Sequence: Synthetic oligonucleotide
  Antisense strand to SEQ ID NO: 1009796
auauccaggcaaugcaugg

SEQ ID NO: 1009798 - RNA, 19 nt, Artificial Sequence
  Description of Artificial Sequence: Synthetic oligonucleotide
  Sense strand starting at position 934 of SEQ ID NO: 914514
caugcauugccuggauaua

SEQ ID NO: 1009799 - RNA, 19 nt, Artificial Sequence
  Description of Artificial Sequence: Synthetic oligonucleotide
  Antisense strand to SEQ ID NO: 1009798
uauauccaggcaaugcaug

SEQ ID NO: 1009800 - RNA, 19 nt, Artificial Sequence
  Description of Artificial Sequence: Synthetic oligonucleotide
  Sense strand starting at position 935 of SEQ ID NO: 914514
augcauugccuggauauag

SEQ ID NO: 1009801 - RNA, 19 nt, Artificial Sequence
  Description of Artificial Sequence: Synthetic oligonucleotide
  Antisense strand to SEQ ID NO: 1009800
cuauauccaggcaaugcau

SEQ ID NO: 1009802 - RNA, 19 nt, Artificial Sequence
  Description of Artificial Sequence: Synthetic oligonucleotide
  Sense strand starting at position 1492 of SEQ ID NO: 914514
uggagcagucaguguucaa

SEQ ID NO: 1009803 - RNA, 19 nt, Artificial Sequence
  Description of Artificial Sequence: Synthetic oligonucleotide
  Antisense strand to SEQ ID NO: 1009802
uugaacacugacugcucca

SEQ ID NO: 1009804 - RNA, 19 nt, Artificial Sequence
  Description of Artificial Sequence: Synthetic oligonucleotide
  Sense strand starting at position 1551 of SEQ ID NO: 914514
uccuccuaucucugugagu

SEQ ID NO: 1009805 - RNA, 19 nt, Artificial Sequence
  Description of Artificial Sequence: Synthetic oligonucleotide
  Antisense strand to SEQ ID NO: 1009804
acucacagagauaggagga

SEQ ID NO: 1009806 - RNA, 19 nt, Artificial Sequence
  Description of Artificial Sequence: Synthetic oligonucleotide
  Sense strand starting at position 1811 of SEQ ID NO: 914514
cagugauuggcauguccca

SEQ ID NO: 1009807 - RNA, 19 nt, Artificial Sequence
  Description of Artificial Sequence: Synthetic oligonucleotide
  Antisense strand to SEQ ID NO: 1009806
ugggacaugccaaucacug

SEQ ID NO: 1009808 - RNA, 19 nt, Artificial Sequence
  Description of Artificial Sequence: Synthetic oligonucleotide
  Sense strand starting at position 2205 of SEQ ID NO: 914514
acacacaugcccugguauu

SEQ ID NO: 1009809 - RNA, 19 nt, Artificial Sequence
  Description of Artificial Sequence: Synthetic oligonucleotide
  Antisense strand to SEQ ID NO: 1009808
aauaccagggcaugugugu

SEQ ID NO: 1009810 - RNA, 19 nt, Artificial Sequence
  Description of Artificial Sequence: Synthetic oligonucleotide
  Sense strand starting at position 2323 of SEQ ID NO: 914514
gagcuagauuccuucuguu

SEQ ID NO: 1009811 - RNA, 19 nt, Artificial Sequence
  Description of Artificial Sequence: Synthetic oligonucleotide
  Antisense strand to SEQ ID NO: 1009810
aacagaaggaaucuagcuc

SEQ ID NO: 1009812 - RNA, 19 nt, Artificial Sequence
  Description of Artificial Sequence: Synthetic oligonucleotide
  Sense strand starting at position 2327 of SEQ ID NO: 914514
uagauuccuucuguuugga

SEQ ID NO: 1009813 - RNA, 19 nt, Artificial Sequence
  Description of Artificial Sequence: Synthetic oligonucleotide
  Antisense strand to SEQ ID NO: 1009812
uccaaacagaaggaaucua

SEQ ID NO: 1009814 - RNA, 19 nt, Artificial Sequence
  Description of Artificial Sequence: Synthetic oligonucleotide
  Sense strand starting at position 2329 of SEQ ID NO: 914514
gauuccuucuguuuggaaa

SEQ ID NO: 1009815 - RNA, 19 nt, Artificial Sequence
  Description of Artificial Sequence: Synthetic oligonucleotide
  Antisense strand to SEQ ID NO: 1009814
uuuccaaacagaaggaauc

SEQ ID NO: 1009816 - RNA, 19 nt, Artificial Sequence
  Description of Artificial Sequence: Synthetic oligonucleotide
  Sense strand starting at position 2330 of SEQ ID NO: 914514
auuccuucuguuuggaaau

SEQ ID NO: 1009817 - RNA, 19 nt, Artificial Sequence
  Description of Artificial Sequence: Synthetic oligonucleotide
  Antisense strand to SEQ ID NO: 1009816
auuuccaaacagaaggaau

SEQ ID NO: 1009818 - RNA, 19 nt, Artificial Sequence
  Description of Artificial Sequence: Synthetic oligonucleotide
  Sense strand starting at position 2455 of SEQ ID NO: 914514
cuagcauugggcuaugcau

SEQ ID NO: 1009819 - RNA, 19 nt, Artificial Sequence
  Description of Artificial Sequence: Synthetic oligonucleotide
  Antisense strand to SEQ ID NO: 1009818
augcauagcccaaugcuag

SEQ ID NO: 1009820 - RNA, 19 nt, Artificial Sequence
  Description of Artificial Sequence: Synthetic oligonucleotide
  Sense strand starting at position 2475 of SEQ ID NO: 914514
gccuguugugaggguauau

SEQ ID NO: 1009821 - RNA, 19 nt, Artificial Sequence
  Description of Artificial Sequence: Synthetic oligonucleotide
  Antisense strand to SEQ ID NO: 1009820
auauacccucacaacaggc

SEQ ID NO: 1009822 - RNA, 19 nt, Artificial Sequence
  Description of Artificial Sequence: Synthetic oligonucleotide
  Sense strand starting at position 2546 of SEQ ID NO: 914514
ggcugagugccuugcauau

SEQ ID NO: 1009823 - RNA, 19 nt, Artificial Sequence
  Description of Artificial Sequence: Synthetic oligonucleotide
  Antisense strand to SEQ ID NO: 1009822
auaugcaaggcacucagcc

SEQ ID NO: 1009824 - RNA, 19 nt, Artificial Sequence
  Description of Artificial Sequence: Synthetic oligonucleotide
  Sense strand starting at position 2561 of SEQ ID NO: 914514
auaugugugucccugugua

SEQ ID NO: 1009825 - RNA, 19 nt, Artificial Sequence
  Description of Artificial Sequence: Synthetic oligonucleotide
  Antisense strand to SEQ ID NO: 1009824
uacacagggacacacauau

SEQ ID NO: 1009826 - RNA, 19 nt, Artificial Sequence
  Description of Artificial Sequence: Synthetic oligonucleotide
  Sense strand starting at position 2563 of SEQ ID NO: 914514
augugugucccuguguacu

SEQ ID NO: 1009827 - RNA, 19 nt, Artificial Sequence
  Description of Artificial Sequence: Synthetic oligonucleotide
  Antisense strand to SEQ ID NO: 1009826
aguacacagggacacacau

SEQ ID NO: 1009828 - RNA, 19 nt, Artificial Sequence
  Description of Artificial Sequence: Synthetic oligonucleotide
  Sense strand starting at position 2589 of SEQ ID NO: 914514
ccaugcagccuguguaagu

SEQ ID NO: 1009829 - RNA, 19 nt, Artificial Sequence
  Description of Artificial Sequence: Synthetic oligonucleotide
  Antisense strand to SEQ ID NO: 1009828
acuuacacaggcugcaugg

SEQ ID NO: 1009830 - RNA, 19 nt, Artificial Sequence
  Description of Artificial Sequence: Synthetic oligonucleotide
  Sense strand starting at position 2661 of SEQ ID NO: 914514
guaucugauguguggcuga

SEQ ID NO: 1009831 - RNA, 19 nt, Artificial Sequence
  Description of Artificial Sequence: Synthetic oligonucleotide
  Antisense strand to SEQ ID NO: 1009830
ucagccacacaucagauac

SEQ ID NO: 1009832 - RNA, 19 nt, Artificial Sequence
  Description of Artificial Sequence: Synthetic oligonucleotide
  Sense strand starting at position 2666 of SEQ ID NO: 914514
ugauguguggcugaguguu

SEQ ID NO: 1009833 - RNA, 19 nt, Artificial Sequence
  Description of Artificial Sequence: Synthetic oligonucleotide
  Antisense strand to SEQ ID NO: 1009832
aacacucagccacacauca

SEQ ID NO: 1009834 - RNA, 19 nt, Artificial Sequence
  Description of Artificial Sequence: Synthetic oligonucleotide
  Sense strand starting at position 2674 of SEQ ID NO: 914514
ggcugaguguugcccaacu

SEQ ID NO: 1009835 - RNA, 19 nt, Artificial Sequence
  Description of Artificial Sequence: Synthetic oligonucleotide
  Antisense strand to SEQ ID NO: 1009834
aguugggcaacacucagcc

SEQ ID NO: 1009836 - RNA, 19 nt, Artificial Sequence
  Description of Artificial Sequence: Synthetic oligonucleotide
  Sense strand starting at position 2676 of SEQ ID NO: 914514
cugaguguugcccaacugu

SEQ ID NO: 1009837 - RNA, 19 nt, Artificial Sequence
  Description of Artificial Sequence: Synthetic oligonucleotide
  Antisense strand to SEQ ID NO: 1009836
acaguugggcaacacucag

SEQ ID NO: 1009838 - RNA, 19 nt, Artificial Sequence
  Description of Artificial Sequence: Synthetic oligonucleotide
  Sense strand starting at position 2938 of SEQ ID NO: 914514
uguugagcuuccucagaga

SEQ ID NO: 1009839 - RNA, 19 nt, Artificial Sequence
  Description of Artificial Sequence: Synthetic oligonucleotide
  Antisense strand to SEQ ID NO: 1009838
ucucugaggaagcucaaca

SEQ ID NO: 1009840 - RNA, 19 nt, Artificial Sequence
  Description of Artificial Sequence: Synthetic oligonucleotide
  Sense strand starting at position 2941 of SEQ ID NO: 914514
ugagcuuccucagagauag

SEQ ID NO: 1009841 - RNA, 19 nt, Artificial Sequence
  Description of Artificial Sequence: Synthetic oligonucleotide
  Antisense strand to SEQ ID NO: 1009840
cuaucucugaggaagcuca

SEQ ID NO: 1009842 - RNA, 19 nt, Artificial Sequence
  Description of Artificial Sequence: Synthetic oligonucleotide
  Sense strand starting at position 2971 of SEQ ID NO: 914514
ggccguuugcccuagagau

SEQ ID NO: 1009843 - RNA, 19 nt, Artificial Sequence
  Description of Artificial Sequence: Synthetic oligonucleotide
  Antisense strand to SEQ ID NO: 1009842
aucucuagggcaaacggcc

SEQ ID NO: 1009844 - RNA, 19 nt, Artificial Sequence
  Description of Artificial Sequence: Synthetic oligonucleotide
  Sense strand starting at position 2973 of SEQ ID NO: 914514
ccguuugcccuagagaugu

SEQ ID NO: 1009845 - RNA, 19 nt, Artificial Sequence
  Description of Artificial Sequence: Synthetic oligonucleotide
  Antisense strand to SEQ ID NO: 1009844
acaucucuagggcaaacgg

SEQ ID NO: 1009846 - RNA, 19 nt, Artificial Sequence
  Description of Artificial Sequence: Synthetic oligonucleotide
  Sense strand starting at position 3007 of SEQ ID NO: 914514
ucuguuuggcccuagagac

SEQ ID NO: 1009847 - RNA, 19 nt, Artificial Sequence
  Description of Artificial Sequence: Synthetic oligonucleotide
  Antisense strand to SEQ ID NO: 1009846
gucucuagggccaaacaga

SEQ ID NO: 1009848 - RNA, 19 nt, Artificial Sequence
  Description of Artificial Sequence: Synthetic oligonucleotide
  Sense strand starting at position 3194 of SEQ ID NO: 914514
guaugauuagcauguggug

SEQ ID NO: 1009849 - RNA, 19 nt, Artificial Sequence
  Description of Artificial Sequence: Synthetic oligonucleotide
  Antisense strand to SEQ ID NO: 1009848
caccacaugcuaaucauac

SEQ ID NO: 1009850 - RNA, 19 nt, Artificial Sequence
  Description of Artificial Sequence: Synthetic oligonucleotide
  Sense strand starting at position 3468 of SEQ ID NO: 914514
gggcaucugugcuucucaa

SEQ ID NO: 1009851 - RNA, 19 nt, Artificial Sequence
  Description of Artificial Sequence: Synthetic oligonucleotide
  Antisense strand to SEQ ID NO: 1009850
uugagaagcacagaugccc

SEQ ID NO: 1009852 - RNA, 19 nt, Artificial Sequence
  Description of Artificial Sequence: Synthetic oligonucleotide
  Sense strand starting at position 3547 of SEQ ID NO: 914514
gcagcuuggagagaaaucu

SEQ ID NO: 1009853 - RNA, 19 nt, Artificial Sequence
  Description of Artificial Sequence: Synthetic oligonucleotide
  Antisense strand to SEQ ID NO: 1009852
agauuucucuccaagcugc

SEQ ID NO: 1009854 - RNA, 19 nt, Artificial Sequence
  Description of Artificial Sequence: Synthetic oligonucleotide
  Sense strand starting at position 3556 of SEQ ID NO: 914514
agagaaaucuaagugagca

SEQ ID NO: 1009855 - RNA, 19 nt, Artificial Sequence
  Description of Artificial Sequence: Synthetic oligonucleotide
  Antisense strand to SEQ ID NO: 1009854
ugcucacuuagauuucucu

SEQ ID NO: 1009856 - RNA, 19 nt, Artificial Sequence
  Description of Artificial Sequence: Synthetic oligonucleotide
  Sense strand starting at position 3614 of SEQ ID NO: 914514
gggucagaacuugaccagu

SEQ ID NO: 1009857 - RNA, 19 nt, Artificial Sequence
  Description of Artificial Sequence: Synthetic oligonucleotide
  Antisense strand to SEQ ID NO: 1009856
acuggucaaguucugaccc

SEQ ID NO: 1009858 - RNA, 19 nt, Artificial Sequence
  Description of Artificial Sequence: Synthetic oligonucleotide
  Sense strand starting at position 3963 of SEQ ID NO: 914514
cgcggcuuucuucugaagu

SEQ ID NO: 1009859 - RNA, 19 nt, Artificial Sequence
  Description of Artificial Sequence: Synthetic oligonucleotide
  Antisense strand to SEQ ID NO: 1009858
acuucagaagaaagccgcg

SEQ ID NO: 1009860 - RNA, 19 nt, Artificial Sequence
  Description of Artificial Sequence: Synthetic oligonucleotide
  Sense strand starting at position 20 of SEQ ID NO: 914515
cccagaaccuggcuaagua

SEQ ID NO: 1009861 - RNA, 19 nt, Artificial Sequence
  Description of Artificial Sequence: Synthetic oligonucleotide
  Antisense strand to SEQ ID NO: 1009860
uacuuagccagguucuggg

SEQ ID NO: 1009862 - RNA, 19 nt, Artificial Sequence
  Description of Artificial Sequence: Synthetic oligonucleotide
  Sense strand starting at position 118 of SEQ ID NO: 914515
gcagaaagcaccgauuaca

SEQ ID NO: 1009863 - RNA, 19 nt, Artificial Sequence
  Description of Artificial Sequence: Synthetic oligonucleotide
  Antisense strand to SEQ ID NO: 1009862
uguaaucggugcuuucugc

SEQ ID NO: 1009864 - RNA, 19 nt, Artificial Sequence
  Description of Artificial Sequence: Synthetic oligonucleotide
  Sense strand starting at position 263 of SEQ ID NO: 914515
gcugaugguuggucacagu

SEQ ID NO: 1009865 - RNA, 19 nt, Artificial Sequence
  Description of Artificial Sequence: Synthetic oligonucleotide
  Antisense strand to SEQ ID NO: 1009864
acugugaccaaccaucagc

SEQ ID NO: 1009866 - RNA, 19 nt, Artificial Sequence
  Description of Artificial Sequence: Synthetic oligonucleotide
  Sense strand starting at position 397 of SEQ ID NO: 914515
gagaucuggucucugaaug

SEQ ID NO: 1009867 - RNA, 19 nt, Artificial Sequence
  Description of Artificial Sequence: Synthetic oligonucleotide
  Antisense strand to SEQ ID NO: 1009866
cauucagagaccagaucuc

SEQ ID NO: 1009868 - RNA, 19 nt, Artificial Sequence
  Description of Artificial Sequence: Synthetic oligonucleotide
  Sense strand starting at position 462 of SEQ ID NO: 914515
cagaauggugccugcaacu

SEQ ID NO: 1009869 - RNA, 19 nt, Artificial Sequence
  Description of Artificial Sequence: Synthetic oligonucleotide
  Antisense strand to SEQ ID NO: 1009868
aguugcaggcaccauucug

SEQ ID NO: 1009870 - RNA, 19 nt, Artificial Sequence
  Description of Artificial Sequence: Synthetic oligonucleotide
  Sense strand starting at position 626 of SEQ ID NO: 914515
uggcguugcacagagcaua

SEQ ID NO: 1009871 - RNA, 19 nt, Artificial Sequence
  Description of Artificial Sequence: Synthetic oligonucleotide
  Antisense strand to SEQ ID NO: 1009870
uaugcucugugcaacgcca

SEQ ID NO: 1009872 - RNA, 19 nt, Artificial Sequence
  Description of Artificial Sequence: Synthetic oligonucleotide
  Sense strand starting at position 789 of SEQ ID NO: 914515
ggcaaagaucguucguguc

SEQ ID NO: 1009873 - RNA, 19 nt, Artificial Sequence
  Description of Artificial Sequence: Synthetic oligonucleotide
  Antisense strand to SEQ ID NO: 1009872
gacacgaacgaucuuugcc

SEQ ID NO: 1009874 - RNA, 19 nt, Artificial Sequence
  Description of Artificial Sequence: Synthetic oligonucleotide
  Sense strand starting at position 1110 of SEQ ID NO: 914515
gcuggacucauuggaagug

SEQ ID NO: 1009875 - RNA, 19 nt, Artificial Sequence
  Description of Artificial Sequence: Synthetic oligonucleotide
  Antisense strand to SEQ ID NO: 1009874
cacuuccaaugaguccagc

SEQ ID NO: 1009876 - RNA, 19 nt, Artificial Sequence
  Description of Artificial Sequence: Synthetic oligonucleotide
  Sense strand starting at position 1120 of SEQ ID NO: 914515
uuggaaguguccuuaucag

SEQ ID NO: 1009877 - RNA, 19 nt, Artificial Sequence
  Description of Artificial Sequence: Synthetic oligonucleotide
  Antisense strand to SEQ ID NO: 1009876
cugauaaggacacuuccaa

SEQ ID NO: 1009878 - RNA, 19 nt, Artificial Sequence
  Description of Artificial Sequence: Synthetic oligonucleotide
  Sense strand starting at position 1343 of SEQ ID NO: 914515
gggagauguggauguacag

SEQ ID NO: 1009879 - RNA, 19 nt, Artificial Sequence
  Description of Artificial Sequence: Synthetic oligonucleotide
  Antisense strand to SEQ ID NO: 1009878
cuguacauccacaucuccc

SEQ ID NO: 1009880 - RNA, 19 nt, Artificial Sequence
  Description of Artificial Sequence: Synthetic oligonucleotide
  Sense strand starting at position 1394 of SEQ ID NO: 914515
cagcaauggcugugccaaa

SEQ ID NO: 1009881 - RNA, 19 nt, Artificial Sequence
  Description of Artificial Sequence: Synthetic oligonucleotide
  Antisense strand to SEQ ID NO: 1009880
uuuggcacagccauugcug

SEQ ID NO: 1009882 - RNA, 19 nt, Artificial Sequence
  Description of Artificial Sequence: Synthetic oligonucleotide
  Sense strand starting at position 1706 of SEQ ID NO: 914515
gccaguagcccuugaugau

SEQ ID NO: 1009883 - RNA, 19 nt, Artificial Sequence
  Description of Artificial Sequence: Synthetic oligonucleotide
  Antisense strand to SEQ ID NO: 1009882
aucaucaagggcuacuggc

SEQ ID NO: 1009884 - RNA, 19 nt, Artificial Sequence
  Description of Artificial Sequence: Synthetic oligonucleotide
  Sense strand starting at position 1707 of SEQ ID NO: 914515
ccaguagcccuugaugaug

SEQ ID NO: 1009885 - RNA, 19 nt, Artificial Sequence
  Description of Artificial Sequence: Synthetic oligonucleotide
  Antisense strand to SEQ ID NO: 1009884
caucaucaagggcuacugg

SEQ ID NO: 1009886 - RNA, 19 nt, Artificial Sequence
  Description of Artificial Sequence: Synthetic oligonucleotide
  Sense strand starting at position 1718 of SEQ ID NO: 914515
ugaugauguacacggugua

SEQ ID NO: 1009887 - RNA, 19 nt, Artificial Sequence
  Description of Artificial Sequence: Synthetic oligonucleotide
  Antisense strand to SEQ ID NO: 1009886
uacaccguguacaucauca

SEQ ID NO: 1009888 - RNA, 19 nt, Artificial Sequence
  Description of Artificial Sequence: Synthetic oligonucleotide
  Sense strand starting at position 1746 of SEQ ID NO: 914515
ggagaaggcgccuaugaug

SEQ ID NO: 1009889 - RNA, 19 nt, Artificial Sequence
  Description of Artificial Sequence: Synthetic oligonucleotide
  Antisense strand to SEQ ID NO: 1009888
caucauaggcgccuucucc

SEQ ID NO: 1009890 - RNA, 19 nt, Artificial Sequence
  Description of Artificial Sequence: Synthetic oligonucleotide
  Sense strand starting at position 1817 of SEQ ID NO: 914515
gccuguugaccuugaugga

SEQ ID NO: 1009891 - RNA, 19 nt, Artificial Sequence
  Description of Artificial Sequence: Synthetic oligonucleotide
  Antisense strand to SEQ ID NO: 1009890
uccaucaaggucaacaggc

SEQ ID NO: 1009892 - RNA, 19 nt, Artificial Sequence
  Description of Artificial Sequence: Synthetic oligonucleotide
  Sense strand starting at position 1847 of SEQ ID NO: 914515
ggauguugcccacgacagu

SEQ ID NO: 1009893 - RNA, 19 nt, Artificial Sequence
  Description of Artificial Sequence: Synthetic oligonucleotide
  Antisense strand to SEQ ID NO: 1009892
acugucgugggcaacaucc

SEQ ID NO: 1009894 - RNA, 19 nt, Artificial Sequence
  Description of Artificial Sequence: Synthetic oligonucleotide
  Sense strand starting at position 1916 of SEQ ID NO: 914515
ucucauagcgauuguggga

SEQ ID NO: 1009895 - RNA, 19 nt, Artificial Sequence
  Description of Artificial Sequence: Synthetic oligonucleotide
  Antisense strand to SEQ ID NO: 1009894
ucccacaaucgcuaugaga

SEQ ID NO: 1009896 - RNA, 19 nt, Artificial Sequence
  Description of Artificial Sequence: Synthetic oligonucleotide
  Sense strand starting at position 1972 of SEQ ID NO: 914515
cugccauugacagguguga

SEQ ID NO: 1009897 - RNA, 19 nt, Artificial Sequence
  Description of Artificial Sequence: Synthetic oligonucleotide
  Antisense strand to SEQ ID NO: 1009896
ucacaccugucaauggcag

SEQ ID NO: 1009898 - RNA, 19 nt, Artificial Sequence
  Description of Artificial Sequence: Synthetic oligonucleotide
  Sense strand starting at position 1974 of SEQ ID NO: 914515
gccauugacaggugugaag

SEQ ID NO: 1009899 - RNA, 19 nt, Artificial Sequence
  Description of Artificial Sequence: Synthetic oligonucleotide
  Antisense strand to SEQ ID NO: 1009898
cuucacaccugucaauggc

SEQ ID NO: 1009900 - RNA, 19 nt, Artificial Sequence
  Description of Artificial Sequence: Synthetic oligonucleotide
  Sense strand starting at position 1976 of SEQ ID NO: 914515
cauugacaggugugaaguu

SEQ ID NO: 1009901 - RNA, 19 nt, Artificial Sequence
  Description of Artificial Sequence: Synthetic oligonucleotide
  Antisense strand to SEQ ID NO: 1009900
aacuucacaccugucaaug

SEQ ID NO: 1009902 - RNA, 19 nt, Artificial Sequence
  Description of Artificial Sequence: Synthetic oligonucleotide
  Sense strand starting at position 2078 of SEQ ID NO: 914515
gagucaucuggagguacac

SEQ ID NO: 1009903 - RNA, 19 nt, Artificial Sequence
  Description of Artificial Sequence: Synthetic oligonucleotide
  Antisense strand to SEQ ID NO: 1009902
guguaccuccagaugacuc

SEQ ID NO: 1009904 - RNA, 19 nt, Artificial Sequence
  Description of Artificial Sequence: Synthetic oligonucleotide
  Sense strand starting at position 2114 of SEQ ID NO: 914515
agggacauucucuggcaga

SEQ ID NO: 1009905 - RNA, 19 nt, Artificial Sequence
  Description of Artificial Sequence: Synthetic oligonucleotide
  Antisense strand to SEQ ID NO: 1009904
ucugccagagaaugucccu

SEQ ID NO: 1009906 - RNA, 19 nt, Artificial Sequence
  Description of Artificial Sequence: Synthetic oligonucleotide
  Sense strand starting at position 2127 of SEQ ID NO: 914515
ggcagaaugccuugagaga

SEQ ID NO: 1009907 - RNA, 19 nt, Artificial Sequence
  Description of Artificial Sequence: Synthetic oligonucleotide
  Antisense strand to SEQ ID NO: 1009906
ucucucaaggcauucugcc

SEQ ID NO: 1009908 - RNA, 19 nt, Artificial Sequence
  Description of Artificial Sequence: Synthetic oligonucleotide
  Sense strand starting at position 2222 of SEQ ID NO: 914515
gggugcuguggcuacagaa

SEQ ID NO: 1009909 - RNA, 19 nt, Artificial Sequence
  Description of Artificial Sequence: Synthetic oligonucleotide
  Antisense strand to SEQ ID NO: 1009908
uucuguagccacagcaccc

SEQ ID NO: 1009910 - RNA, 19 nt, Artificial Sequence
  Description of Artificial Sequence: Synthetic oligonucleotide
  Sense strand starting at position 2230 of SEQ ID NO: 914515
uggcuacagaagugaauaa

SEQ ID NO: 1009911 - RNA, 19 nt, Artificial Sequence
  Description of Artificial Sequence: Synthetic oligonucleotide
  Antisense strand to SEQ ID NO: 1009910
uuauucacuucuguagcca

SEQ ID NO: 1009912 - RNA, 19 nt, Artificial Sequence
  Description of Artificial Sequence: Synthetic oligonucleotide
  Sense strand starting at position 2384 of SEQ ID NO: 914515
caggucaucugggugauga

SEQ ID NO: 1009913 - RNA, 19 nt, Artificial Sequence
  Description of Artificial Sequence: Synthetic oligonucleotide
  Antisense strand to SEQ ID NO: 1009912
ucaucacccagaugaccug

SEQ ID NO: 1009914 - RNA, 19 nt, Artificial Sequence
  Description of Artificial Sequence: Synthetic oligonucleotide
  Sense strand starting at position 2385 of SEQ ID NO: 914515
aggucaucugggugaugag

SEQ ID NO: 1009915 - RNA, 19 nt, Artificial Sequence
  Description of Artificial Sequence: Synthetic oligonucleotide
  Antisense strand to SEQ ID NO: 1009914
cucaucacccagaugaccu

SEQ ID NO: 1009916 - RNA, 19 nt, Artificial Sequence
  Description of Artificial Sequence: Synthetic oligonucleotide
  Sense strand starting at position 2529 of SEQ ID NO: 914515
ggaggagaguggucccaga

SEQ ID NO: 1009917 - RNA, 19 nt, Artificial Sequence
  Description of Artificial Sequence: Synthetic oligonucleotide
  Antisense strand to SEQ ID NO: 1009916
ucugggaccacucuccucc

SEQ ID NO: 1009918 - RNA, 19 nt, Artificial Sequence
  Description of Artificial Sequence: Synthetic oligonucleotide
  Sense strand starting at position 2598 of SEQ ID NO: 914515
cccauucggucauuucuua

SEQ ID NO: 1009919 - RNA, 19 nt, Artificial Sequence
  Description of Artificial Sequence: Synthetic oligonucleotide
  Antisense strand to SEQ ID NO: 1009918
uaagaaaugaccgaauggg

SEQ ID NO: 1009920 - RNA, 19 nt, Artificial Sequence
  Description of Artificial Sequence: Synthetic oligonucleotide
  Sense strand starting at position 2668 of SEQ ID NO: 914515
ggguauguaugagcaccua

SEQ ID NO: 1009921 - RNA, 19 nt, Artificial Sequence
  Description of Artificial Sequence: Synthetic oligonucleotide
  Antisense strand to SEQ ID NO: 1009920
uaggugcucauacauaccc

SEQ ID NO: 1009922 - RNA, 19 nt, Artificial Sequence
  Description of Artificial Sequence: Synthetic oligonucleotide
  Sense strand starting at position 2960 of SEQ ID NO: 914515
gaggcacggagcuguuaaa

SEQ ID NO: 1009923 - RNA, 19 nt, Artificial Sequence
  Description of Artificial Sequence: Synthetic oligonucleotide
  Antisense strand to SEQ ID NO: 1009922
uuuaacagcuccgugccuc

SEQ ID NO: 1009924 - RNA, 19 nt, Artificial Sequence
  Description of Artificial Sequence: Synthetic oligonucleotide
  Sense strand starting at position 3053 of SEQ ID NO: 914515
aaggcagucccguaacuua

SEQ ID NO: 1009925 - RNA, 19 nt, Artificial Sequence
  Description of Artificial Sequence: Synthetic oligonucleotide
  Antisense strand to SEQ ID NO: 1009924
uaaguuacgggacugccuu

SEQ ID NO: 1009926 - RNA, 19 nt, Artificial Sequence
  Description of Artificial Sequence: Synthetic oligonucleotide
  Sense strand starting at position 3067 of SEQ ID NO: 914515
acuuaagagcucuggcuga

SEQ ID NO: 1009927 - RNA, 19 nt, Artificial Sequence
  Description of Artificial Sequence: Synthetic oligonucleotide
  Antisense strand to SEQ ID NO: 1009926
ucagccagagcucuuaagu

SEQ ID NO: 1009928 - RNA, 19 nt, Artificial Sequence
  Description of Artificial Sequence: Synthetic oligonucleotide
  Sense strand starting at position 3277 of SEQ ID NO: 914515
gggucacuagguugucaga

SEQ ID NO: 1009929 - RNA, 19 nt, Artificial Sequence
  Description of Artificial Sequence: Synthetic oligonucleotide
  Antisense strand to SEQ ID NO: 1009928
ucugacaaccuagugaccc

SEQ ID NO: 1009930 - RNA, 19 nt, Artificial Sequence
  Description of Artificial Sequence: Synthetic oligonucleotide
  Sense strand starting at position 3279 of SEQ ID NO: 914515
gucacuagguugucagaga

SEQ ID NO: 1009931 - RNA, 19 nt, Artificial Sequence
  Description of Artificial Sequence: Synthetic oligonucleotide
  Antisense strand to SEQ ID NO: 1009930
ucucugacaaccuagugac

SEQ ID NO: 1009932 - RNA, 19 nt, Artificial Sequence
  Description of Artificial Sequence: Synthetic oligonucleotide
  Sense strand starting at position 3325 of SEQ ID NO: 914515
aggugaaagaauuguccca

SEQ ID NO: 1009933 - RNA, 19 nt, Artificial Sequence
  Description of Artificial Sequence: Synthetic oligonucleotide
  Antisense strand to SEQ ID NO: 1009932
ugggacaauucuuucaccu

SEQ ID NO: 1009934 - RNA, 19 nt, Artificial Sequence
  Description of Artificial Sequence: Synthetic oligonucleotide
  Sense strand starting at position 3327 of SEQ ID NO: 914515
gugaaagaauugucccaga

SEQ ID NO: 1009935 - RNA, 19 nt, Artificial Sequence
  Description of Artificial Sequence: Synthetic oligonucleotide
  Antisense strand to SEQ ID NO: 1009934
ucugggacaauucuuucac

SEQ ID NO: 1009936 - RNA, 19 nt, Artificial Sequence
  Description of Artificial Sequence: Synthetic oligonucleotide
  Sense strand starting at position 3801 of SEQ ID NO: 914515
ggauccuguccugggacau

SEQ ID NO: 1009937 - RNA, 19 nt, Artificial Sequence
  Description of Artificial Sequence: Synthetic oligonucleotide
  Antisense strand to SEQ ID NO: 1009936
augucccaggacaggaucc

SEQ ID NO: 1009938 - RNA, 19 nt, Artificial Sequence
  Description of Artificial Sequence: Synthetic oligonucleotide
  Sense strand starting at position 3967 of SEQ ID NO: 914515
gccuccuagccugauaguu

SEQ ID NO: 1009939 - RNA, 19 nt, Artificial Sequence
  Description of Artificial Sequence: Synthetic oligonucleotide
  Antisense strand to SEQ ID NO: 1009938
aacuaucaggcuaggaggc

SEQ ID NO: 1009940 - RNA, 19 nt, Artificial Sequence
  Description of Artificial Sequence: Synthetic oligonucleotide
  Sense strand starting at position 146 of SEQ ID NO: 914516
ccuguuuccucagcaggaa

SEQ ID NO: 1009941 - RNA, 19 nt, Artificial Sequence
  Description of Artificial Sequence: Synthetic oligonucleotide
  Antisense strand to SEQ ID NO: 1009940
uuccugcugaggaaacagg

SEQ ID NO: 1009942 - RNA, 19 nt, Artificial Sequence
  Description of Artificial Sequence: Synthetic oligonucleotide
  Sense strand starting at position 147 of SEQ ID NO: 914516
cuguuuccucagcaggaau

SEQ ID NO: 1009943 - RNA, 19 nt, Artificial Sequence
  Description of Artificial Sequence: Synthetic oligonucleotide
  Antisense strand to SEQ ID NO: 1009942
auuccugcugaggaaacag

SEQ ID NO: 1009944 - RNA, 19 nt, Artificial Sequence
  Description of Artificial Sequence: Synthetic oligonucleotide
  Sense strand starting at position 149 of SEQ ID NO: 914516
guuuccucagcaggaauau

SEQ ID NO: 1009945 - RNA, 19 nt, Artificial Sequence
  Description of Artificial Sequence: Synthetic oligonucleotide
  Antisense strand to SEQ ID NO: 1009944
auauuccugcugaggaaac

SEQ ID NO: 1009946 - RNA, 19 nt, Artificial Sequence
  Description of Artificial Sequence: Synthetic oligonucleotide
  Sense strand starting at position 169 of SEQ ID NO: 914516
gggugagaaucccugcuua

SEQ ID NO: 1009947 - RNA, 19 nt, Artificial Sequence
  Description of Artificial Sequence: Synthetic oligonucleotide
  Antisense strand to SEQ ID NO: 1009946
uaagcagggauucucaccc

SEQ ID NO: 1009948 - RNA, 19 nt, Artificial Sequence
  Description of Artificial Sequence: Synthetic oligonucleotide
  Sense strand starting at position 216 of SEQ ID NO: 914516
aaauauugggcacgaggua

SEQ ID NO: 1009949 - RNA, 19 nt, Artificial Sequence
  Description of Artificial Sequence: Synthetic oligonucleotide
  Antisense strand to SEQ ID NO: 1009948
uaccucgugcccaauauuu

SEQ ID NO: 1009950 - RNA, 19 nt, Artificial Sequence
  Description of Artificial Sequence: Synthetic oligonucleotide
  Sense strand starting at position 363 of SEQ ID NO: 914516
gacacugugacagguaaga

SEQ ID NO: 1009951 - RNA, 19 nt, Artificial Sequence
  Description of Artificial Sequence: Synthetic oligonucleotide
  Antisense strand to SEQ ID NO: 1009950
ucuuaccugucacaguguc

SEQ ID NO: 1009952 - RNA, 19 nt, Artificial Sequence
  Description of Artificial Sequence: Synthetic oligonucleotide
  Sense strand starting at position 415 of SEQ ID NO: 914516
gucgaugaucugggacagu

SEQ ID NO: 1009953 - RNA, 19 nt, Artificial Sequence
  Description of Artificial Sequence: Synthetic oligonucleotide
  Antisense strand to SEQ ID NO: 1009952
acugucccagaucaucgac

SEQ ID NO: 1009954 - RNA, 19 nt, Artificial Sequence
  Description of Artificial Sequence: Synthetic oligonucleotide
  Sense strand starting at position 649 of SEQ ID NO: 914516
uuaugaguguccuccuggu

SEQ ID NO: 1009955 - RNA, 19 nt, Artificial Sequence
  Description of Artificial Sequence: Synthetic oligonucleotide
  Antisense strand to SEQ ID NO: 1009954
accaggaggacacucauaa

SEQ ID NO: 1009956 - RNA, 19 nt, Artificial Sequence
  Description of Artificial Sequence: Synthetic oligonucleotide
  Sense strand starting at position 1284 of SEQ ID NO: 914516
cagugaccuuaguuggaaa

SEQ ID NO: 1009957 - RNA, 19 nt, Artificial Sequence
  Description of Artificial Sequence: Synthetic oligonucleotide
  Antisense strand to SEQ ID NO: 1009956
uuuccaacuaaggucacug

SEQ ID NO: 1009958 - RNA, 19 nt, Artificial Sequence
  Description of Artificial Sequence: Synthetic oligonucleotide
  Sense strand starting at position 1305 of SEQ ID NO: 914516
ugggaauuaucccucccuu

SEQ ID NO: 1009959 - RNA, 19 nt, Artificial Sequence
  Description of Artificial Sequence: Synthetic oligonucleotide
  Antisense strand to SEQ ID NO: 1009958
aagggagggauaauuccca

SEQ ID NO: 1009960 - RNA, 19 nt, Artificial Sequence
  Description of Artificial Sequence: Synthetic oligonucleotide
  Sense strand starting at position 1400 of SEQ ID NO: 914516
ugcgaaacaucgucuugag

SEQ ID NO: 1009961 - RNA, 19 nt, Artificial Sequence
  Description of Artificial Sequence: Synthetic oligonucleotide
  Antisense strand to SEQ ID NO: 1009960
cucaagacgauguuucgca

SEQ ID NO: 1009962 - RNA, 19 nt, Artificial Sequence
  Description of Artificial Sequence: Synthetic oligonucleotide
  Sense strand starting at position 1404 of SEQ ID NO: 914516
aaacaucgucuugagucua

SEQ ID NO: 1009963 - RNA, 19 nt, Artificial Sequence
  Description of Artificial Sequence: Synthetic oligonucleotide
  Antisense strand to SEQ ID NO: 1009962
uagacucaagacgauguuu

SEQ ID NO: 1009964 - RNA, 19 nt, Artificial Sequence
  Description of Artificial Sequence: Synthetic oligonucleotide
  Sense strand starting at position 1572 of SEQ ID NO: 914516
ccgucaucugcaggagaaa

SEQ ID NO: 1009965 - RNA, 19 nt, Artificial Sequence
  Description of Artificial Sequence: Synthetic oligonucleotide
  Antisense strand to SEQ ID NO: 1009964
uuucuccugcagaugacgg

SEQ ID NO: 1009966 - RNA, 19 nt, Artificial Sequence
  Description of Artificial Sequence: Synthetic oligonucleotide
  Sense strand starting at position 1740 of SEQ ID NO: 914516
uagagagcuuguucucaga

SEQ ID NO: 1009967 - RNA, 19 nt, Artificial Sequence
  Description of Artificial Sequence: Synthetic oligonucleotide
  Antisense strand to SEQ ID NO: 1009966
ucugagaacaagcucucua

SEQ ID NO: 1009968 - RNA, 19 nt, Artificial Sequence
  Description of Artificial Sequence: Synthetic oligonucleotide
  Sense strand starting at position 1742 of SEQ ID NO: 914516
gagagcuuguucucagaac

SEQ ID NO: 1009969 - RNA, 19 nt, Artificial Sequence
  Description of Artificial Sequence: Synthetic oligonucleotide
  Antisense strand to SEQ ID NO: 1009968
guucugagaacaagcucuc

SEQ ID NO: 1009970 - RNA, 19 nt, Artificial Sequence
  Description of Artificial Sequence: Synthetic oligonucleotide
  Sense strand starting at position 2022 of SEQ ID NO: 914516
guggacaguaccuagaagu

SEQ ID NO: 1009971 - RNA, 19 nt, Artificial Sequence
  Description of Artificial Sequence: Synthetic oligonucleotide
  Antisense strand to SEQ ID NO: 1009970
acuucuagguacuguccac

SEQ ID NO: 1009972 - RNA, 19 nt, Artificial Sequence
  Description of Artificial Sequence: Synthetic oligonucleotide
  Sense strand starting at position 2029 of SEQ ID NO: 914516
guaccuagaagucagaagu

SEQ ID NO: 1009973 - RNA, 19 nt, Artificial Sequence
  Description of Artificial Sequence: Synthetic oligonucleotide
  Antisense strand to SEQ ID NO: 1009972
acuucugacuucuagguac

SEQ ID NO: 1009974 - RNA, 19 nt, Artificial Sequence
  Description of Artificial Sequence: Synthetic oligonucleotide
  Sense strand starting at position 2408 of SEQ ID NO: 914516
cugcucucucagcagaaca

SEQ ID NO: 1009975 - RNA, 19 nt, Artificial Sequence
  Description of Artificial Sequence: Synthetic oligonucleotide
  Antisense strand to SEQ ID NO: 1009974
uguucugcugagagagcag

SEQ ID NO: 1009976 - RNA, 19 nt, Artificial Sequence
  Description of Artificial Sequence: Synthetic oligonucleotide
  Sense strand starting at position 2511 of SEQ ID NO: 914516
uuaauuacaccgugccuau

SEQ ID NO: 1009977 - RNA, 19 nt, Artificial Sequence
  Description of Artificial Sequence: Synthetic oligonucleotide
  Antisense strand to SEQ ID NO: 1009976
auaggcacgguguaauuaa

SEQ ID NO: 1009978 - RNA, 19 nt, Artificial Sequence
  Description of Artificial Sequence: Synthetic oligonucleotide
  Sense strand starting at position 2697 of SEQ ID NO: 914516
agggucaguggauggauaa

SEQ ID NO: 1009979 - RNA, 19 nt, Artificial Sequence
  Description of Artificial Sequence: Synthetic oligonucleotide
  Antisense strand to SEQ ID NO: 1009978
uuauccauccacugacccu

SEQ ID NO: 1009980 - RNA, 19 nt, Artificial Sequence
  Description of Artificial Sequence: Synthetic oligonucleotide
  Sense strand starting at position 2708 of SEQ ID NO: 914516
auggauaacuguccucuca

SEQ ID NO: 1009981 - RNA, 19 nt, Artificial Sequence
  Description of Artificial Sequence: Synthetic oligonucleotide
  Antisense strand to SEQ ID NO: 1009980
ugagaggacaguuauccau

SEQ ID NO: 1009982 - RNA, 19 nt, Artificial Sequence
  Description of Artificial Sequence: Synthetic oligonucleotide
  Sense strand starting at position 2710 of SEQ ID NO: 914516
ggauaacuguccucucauc

SEQ ID NO: 1009983 - RNA, 19 nt, Artificial Sequence
  Description of Artificial Sequence: Synthetic oligonucleotide
  Antisense strand to SEQ ID NO: 1009982
gaugagaggacaguuaucc

SEQ ID NO: 1009984 - RNA, 19 nt, Artificial Sequence
  Description of Artificial Sequence: Synthetic oligonucleotide
  Sense strand starting at position 2755 of SEQ ID NO: 914516
gguggagguuugccuuaga

SEQ ID NO: 1009985 - RNA, 19 nt, Artificial Sequence
  Description of Artificial Sequence: Synthetic oligonucleotide
  Antisense strand to SEQ ID NO: 1009984
ucuaaggcaaaccuccacc

SEQ ID NO: 1009986 - RNA, 19 nt, Artificial Sequence
  Description of Artificial Sequence: Synthetic oligonucleotide
  Sense strand starting at position 2758 of SEQ ID NO: 914516
ggagguuugccuuagaccu

SEQ ID NO: 1009987 - RNA, 19 nt, Artificial Sequence
  Description of Artificial Sequence: Synthetic oligonucleotide
  Antisense strand to SEQ ID NO: 1009986
aggucuaaggcaaaccucc

SEQ ID NO: 1009988 - RNA, 19 nt, Artificial Sequence
  Description of Artificial Sequence: Synthetic oligonucleotide
  Sense strand starting at position 2817 of SEQ ID NO: 914516
ggcacuuugggucaagcaa

SEQ ID NO: 1009989 - RNA, 19 nt, Artificial Sequence
  Description of Artificial Sequence: Synthetic oligonucleotide
  Antisense strand to SEQ ID NO: 1009988
uugcuugacccaaagugcc

SEQ ID NO: 1009990 - RNA, 19 nt, Artificial Sequence
  Description of Artificial Sequence: Synthetic oligonucleotide
  Sense strand starting at position 3027 of SEQ ID NO: 914516
ugucuuaugagcgcucuca

SEQ ID NO: 1009991 - RNA, 19 nt, Artificial Sequence
  Description of Artificial Sequence: Synthetic oligonucleotide
  Antisense strand to SEQ ID NO: 1009990
ugagagcgcucauaagaca

SEQ ID NO: 1009992 - RNA, 19 nt, Artificial Sequence
  Description of Artificial Sequence: Synthetic oligonucleotide
  Sense strand starting at position 3039 of SEQ ID NO: 914516
gcucucacuuggguaagau

SEQ ID NO: 1009993 - RNA, 19 nt, Artificial Sequence
  Description of Artificial Sequence: Synthetic oligonucleotide
  Antisense strand to SEQ ID NO: 1009992
aucuuacccaagugagagc

SEQ ID NO: 1009994 - RNA, 19 nt, Artificial Sequence
  Description of Artificial Sequence: Synthetic oligonucleotide
  Sense strand starting at position 3043 of SEQ ID NO: 914516
ucacuuggguaagauauuu

SEQ ID NO: 1009995 - RNA, 19 nt, Artificial Sequence
  Description of Artificial Sequence: Synthetic oligonucleotide
  Antisense strand to SEQ ID NO: 1009994
aaauaucuuacccaaguga

SEQ ID NO: 1009996 - RNA, 19 nt, Artificial Sequence
  Description of Artificial Sequence: Synthetic oligonucleotide
  Sense strand starting at position 3071 of SEQ ID NO: 914516
ggguuucuguucucucaau

SEQ ID NO: 1009997 - RNA, 19 nt, Artificial Sequence
  Description of Artificial Sequence: Synthetic oligonucleotide
  Antisense strand to SEQ ID NO: 1009996
auugagagaacagaaaccc

SEQ ID NO: 1009998 - RNA, 19 nt, Artificial Sequence
  Description of Artificial Sequence: Synthetic oligonucleotide
  Sense strand starting at position 3072 of SEQ ID NO: 914516
gguuucuguucucucaauc

SEQ ID NO: 1009999 - RNA, 19 nt, Artificial Sequence
  Description of Artificial Sequence: Synthetic oligonucleotide
  Antisense strand to SEQ ID NO: 1009998
gauugagagaacagaaacc

SEQ ID NO: 1010000 - RNA, 19 nt, Artificial Sequence
  Description of Artificial Sequence: Synthetic oligonucleotide
  Sense strand starting at position 3187 of SEQ ID NO: 914516
acagcaggucaucaacaau

SEQ ID NO: 1010001 - RNA, 19 nt, Artificial Sequence
  Description of Artificial Sequence: Synthetic oligonucleotide
  Antisense strand to SEQ ID NO: 1010000
auuguugaugaccugcugu

SEQ ID NO: 1010002 - RNA, 19 nt, Artificial Sequence
  Description of Artificial Sequence: Synthetic oligonucleotide
  Sense strand starting at position 3190 of SEQ ID NO: 914516
gcaggucaucaacaauauu

SEQ ID NO: 1010003 - RNA, 19 nt, Artificial Sequence
  Description of Artificial Sequence: Synthetic oligonucleotide
  Antisense strand to SEQ ID NO: 1010002
aauauuguugaugaccugc

SEQ ID NO: 1010004 - RNA, 19 nt, Artificial Sequence
  Description of Artificial Sequence: Synthetic oligonucleotide
  Sense strand starting at position 3253 of SEQ ID NO: 914516
agguauuuaucaugcacag

SEQ ID NO: 1010005 - RNA, 19 nt, Artificial Sequence
  Description of Artificial Sequence: Synthetic oligonucleotide
  Antisense strand to SEQ ID NO: 1010004
cugugcaugauaaauaccu

SEQ ID NO: 1010006 - RNA, 19 nt, Artificial Sequence
  Description of Artificial Sequence: Synthetic oligonucleotide
  Sense strand starting at position 3296 of SEQ ID NO: 914516
ugaccaguugccugaccaa

SEQ ID NO: 1010007 - RNA, 19 nt, Artificial Sequence
  Description of Artificial Sequence: Synthetic oligonucleotide
  Antisense strand to SEQ ID NO: 1010006
uuggucaggcaacugguca

SEQ ID NO: 1010008 - RNA, 19 nt, Artificial Sequence
  Description of Artificial Sequence: Synthetic oligonucleotide
  Sense strand starting at position 3320 of SEQ ID NO: 914516
gcacauacuucccuggcaa

SEQ ID NO: 1010009 - RNA, 19 nt, Artificial Sequence
  Description of Artificial Sequence: Synthetic oligonucleotide
  Antisense strand to SEQ ID NO: 1010008
uugccagggaaguaugugc

SEQ ID NO: 1010010 - RNA, 19 nt, Artificial Sequence
  Description of Artificial Sequence: Synthetic oligonucleotide
  Sense strand starting at position 3369 of SEQ ID NO: 914516
uggauaugccagugauucc

SEQ ID NO: 1010011 - RNA, 19 nt, Artificial Sequence
  Description of Artificial Sequence: Synthetic oligonucleotide
  Antisense strand to SEQ ID NO: 1010010
ggaaucacuggcauaucca

SEQ ID NO: 1010012 - RNA, 19 nt, Artificial Sequence
  Description of Artificial Sequence: Synthetic oligonucleotide
  Sense strand starting at position 3520 of SEQ ID NO: 914516
guccuuaacuuguuaaaga

SEQ ID NO: 1010013 - RNA, 19 nt, Artificial Sequence
  Description of Artificial Sequence: Synthetic oligonucleotide
  Antisense strand to SEQ ID NO: 1010012
ucuuuaacaaguuaaggac

SEQ ID NO: 1010014 - RNA, 19 nt, Artificial Sequence
  Description of Artificial Sequence: Synthetic oligonucleotide
  Sense strand starting at position 3779 of SEQ ID NO: 914516
aggaaagccuaagaaauga

SEQ ID NO: 1010015 - RNA, 19 nt, Artificial Sequence
  Description of Artificial Sequence: Synthetic oligonucleotide
  Antisense strand to SEQ ID NO: 1010014
ucauuucuuaggcuuuccu

SEQ ID NO: 1010016 - RNA, 19 nt, Artificial Sequence
  Description of Artificial Sequence: Synthetic oligonucleotide
  Sense strand starting at position 3850 of SEQ ID NO: 914516
acgucuaaggacugguuau

SEQ ID NO: 1010017 - RNA, 19 nt, Artificial Sequence
  Description of Artificial Sequence: Synthetic oligonucleotide
  Antisense strand to SEQ ID NO: 1010016
auaaccaguccuuagacgu

SEQ ID NO: 1010018 - RNA, 19 nt, Artificial Sequence
  Description of Artificial Sequence: Synthetic oligonucleotide
  Sense strand starting at position 3851 of SEQ ID NO: 914516
cgucuaaggacugguuauu

SEQ ID NO: 1010019 - RNA, 19 nt, Artificial Sequence
  Description of Artificial Sequence: Synthetic oligonucleotide
  Antisense strand to SEQ ID NO: 1010018
aauaaccaguccuuagacg

SEQ ID NO: 1010020 - RNA, 19 nt, Artificial Sequence
  Description of Artificial Sequence: Synthetic oligonucleotide
  Sense strand starting at position 217 of SEQ ID NO: 914517
ccugauaccucccugguga

SEQ ID NO: 1010021 - RNA, 19 nt, Artificial Sequence
  Description of Artificial Sequence: Synthetic oligonucleotide
  Antisense strand to SEQ ID NO: 1010020
ucaccagggagguaucagg

SEQ ID NO: 1010022 - RNA, 19 nt, Artificial Sequence
  Description of Artificial Sequence: Synthetic oligonucleotide
  Sense strand starting at position 218 of SEQ ID NO: 914517
cugauaccucccuggugaa

SEQ ID NO: 1010023 - RNA, 19 nt, Artificial Sequence
  Description of Artificial Sequence: Synthetic oligonucleotide
  Antisense strand to SEQ ID NO: 1010022
uucaccagggagguaucag

SEQ ID NO: 1010024 - RNA, 19 nt, Artificial Sequence
  Description of Artificial Sequence: Synthetic oligonucleotide
  Sense strand starting at position 219 of SEQ ID NO: 914517
ugauaccucccuggugaau

SEQ ID NO: 1010025 - RNA, 19 nt, Artificial Sequence
  Description of Artificial Sequence: Synthetic oligonucleotide
  Antisense strand to SEQ ID NO: 1010024
auucaccagggagguauca

SEQ ID NO: 1010026 - RNA, 19 nt, Artificial Sequence
  Description of Artificial Sequence: Synthetic oligonucleotide
  Sense strand starting at position 232 of SEQ ID NO: 914517
gugaaugugaugugugagu

SEQ ID NO: 1010027 - RNA, 19 nt, Artificial Sequence
  Description of Artificial Sequence: Synthetic oligonucleotide
  Antisense strand to SEQ ID NO: 1010026
acucacacaucacauucac

SEQ ID NO: 1010028 - RNA, 19 nt, Artificial Sequence
  Description of Artificial Sequence: Synthetic oligonucleotide
  Sense strand starting at position 237 of SEQ ID NO: 914517
ugugaugugugagucauga

SEQ ID NO: 1010029 - RNA, 19 nt, Artificial Sequence
  Description of Artificial Sequence: Synthetic oligonucleotide
  Antisense strand to SEQ ID NO: 1010028
ucaugacucacacaucaca

SEQ ID NO: 1010030 - RNA, 19 nt, Artificial Sequence
  Description of Artificial Sequence: Synthetic oligonucleotide
  Sense strand starting at position 245 of SEQ ID NO: 914517
gugagucaugacgaugaaa

SEQ ID NO: 1010031 - RNA, 19 nt, Artificial Sequence
  Description of Artificial Sequence: Synthetic oligonucleotide
  Antisense strand to SEQ ID NO: 1010030
uuucaucgucaugacucac

SEQ ID NO: 1010032 - RNA, 19 nt, Artificial Sequence
  Description of Artificial Sequence: Synthetic oligonucleotide
  Sense strand starting at position 247 of SEQ ID NO: 914517
gagucaugacgaugaaagc

SEQ ID NO: 1010033 - RNA, 19 nt, Artificial Sequence
  Description of Artificial Sequence: Synthetic oligonucleotide
  Antisense strand to SEQ ID NO: 1010032
gcuuucaucgucaugacuc

SEQ ID NO: 1010034 - RNA, 19 nt, Artificial Sequence
  Description of Artificial Sequence: Synthetic oligonucleotide
  Sense strand starting at position 287 of SEQ ID NO: 914517
caucaugaugccuggaagu

SEQ ID NO: 1010035 - RNA, 19 nt, Artificial Sequence
  Description of Artificial Sequence: Synthetic oligonucleotide
  Antisense strand to SEQ ID NO: 1010034
acuuccaggcaucaugaug

SEQ ID NO: 1010036 - RNA, 19 nt, Artificial Sequence
  Description of Artificial Sequence: Synthetic oligonucleotide
  Sense strand starting at position 289 of SEQ ID NO: 914517
ucaugaugccuggaagugu

SEQ ID NO: 1010037 - RNA, 19 nt, Artificial Sequence
  Description of Artificial Sequence: Synthetic oligonucleotide
  Antisense strand to SEQ ID NO: 1010036
acacuuccaggcaucauga

SEQ ID NO: 1010038 - RNA, 19 nt, Artificial Sequence
  Description of Artificial Sequence: Synthetic oligonucleotide
  Sense strand starting at position 347 of SEQ ID NO: 914517
agguaaggucucugccuga

SEQ ID NO: 1010039 - RNA, 19 nt, Artificial Sequence
  Description of Artificial Sequence: Synthetic oligonucleotide
  Antisense strand to SEQ ID NO: 1010038
ucaggcagagaccuuaccu

SEQ ID NO: 1010040 - RNA, 19 nt, Artificial Sequence
  Description of Artificial Sequence: Synthetic oligonucleotide
  Sense strand starting at position 351 of SEQ ID NO: 914517
aaggucucugccugagaca

SEQ ID NO: 1010041 - RNA, 19 nt, Artificial Sequence
  Description of Artificial Sequence: Synthetic oligonucleotide
  Antisense strand to SEQ ID NO: 1010040
ugucucaggcagagaccuu

SEQ ID NO: 1010042 - RNA, 19 nt, Artificial Sequence
  Description of Artificial Sequence: Synthetic oligonucleotide
  Sense strand starting at position 728 of SEQ ID NO: 914517
aaggcaguccugugaaagg

SEQ ID NO: 1010043 - RNA, 19 nt, Artificial Sequence
  Description of Artificial Sequence: Synthetic oligonucleotide
  Antisense strand to SEQ ID NO: 1010042
ccuuucacaggacugccuu

SEQ ID NO: 1010044 - RNA, 19 nt, Artificial Sequence
  Description of Artificial Sequence: Synthetic oligonucleotide
  Sense strand starting at position 867 of SEQ ID NO: 914517
ggguuacucugggcuguua

SEQ ID NO: 1010045 - RNA, 19 nt, Artificial Sequence
  Description of Artificial Sequence: Synthetic oligonucleotide
  Antisense strand to SEQ ID NO: 1010044
uaacagcccagaguaaccc

SEQ ID NO: 1010046 - RNA, 19 nt, Artificial Sequence
  Description of Artificial Sequence: Synthetic oligonucleotide
  Sense strand starting at position 933 of SEQ ID NO: 914517
ccggguccuacccagagaa

SEQ ID NO: 1010047 - RNA, 19 nt, Artificial Sequence
  Description of Artificial Sequence: Synthetic oligonucleotide
  Antisense strand to SEQ ID NO: 1010046
uucucuggguaggacccgg

SEQ ID NO: 1010048 - RNA, 19 nt, Artificial Sequence
  Description of Artificial Sequence: Synthetic oligonucleotide
  Sense strand starting at position 2391 of SEQ ID NO: 914517
accaucucugugugcaaua

SEQ ID NO: 1010049 - RNA, 19 nt, Artificial Sequence
  Description of Artificial Sequence: Synthetic oligonucleotide
  Antisense strand to SEQ ID NO: 1010048
uauugcacacagagauggu

SEQ ID NO: 1010050 - RNA, 19 nt, Artificial Sequence
  Description of Artificial Sequence: Synthetic oligonucleotide
  Sense strand starting at position 2401 of SEQ ID NO: 914517
ugugcaauacccugacaca

SEQ ID NO: 1010051 - RNA, 19 nt, Artificial Sequence
  Description of Artificial Sequence: Synthetic oligonucleotide
  Antisense strand to SEQ ID NO: 1010050
ugugucaggguauugcaca

SEQ ID NO: 1010052 - RNA, 19 nt, Artificial Sequence
  Description of Artificial Sequence: Synthetic oligonucleotide
  Sense strand starting at position 2613 of SEQ ID NO: 914517
uggcuuucuagguggcaau

SEQ ID NO: 1010053 - RNA, 19 nt, Artificial Sequence
  Description of Artificial Sequence: Synthetic oligonucleotide
  Antisense strand to SEQ ID NO: 1010052
auugccaccuagaaagcca

SEQ ID NO: 1010054 - RNA, 19 nt, Artificial Sequence
  Description of Artificial Sequence: Synthetic oligonucleotide
  Sense strand starting at position 2696 of SEQ ID NO: 914517
gccuguauccucugcacaa

SEQ ID NO: 1010055 - RNA, 19 nt, Artificial Sequence
  Description of Artificial Sequence: Synthetic oligonucleotide
  Antisense strand to SEQ ID NO: 1010054
uugugcagaggauacaggc

SEQ ID NO: 1010056 - RNA, 19 nt, Artificial Sequence
  Description of Artificial Sequence: Synthetic oligonucleotide
  Sense strand starting at position 2805 of SEQ ID NO: 914517
ggugcaugagcagagcaau

SEQ ID NO: 1010057 - RNA, 19 nt, Artificial Sequence
  Description of Artificial Sequence: Synthetic oligonucleotide
  Antisense strand to SEQ ID NO: 1010056
auugcucugcucaugcacc

SEQ ID NO: 1010058 - RNA, 19 nt, Artificial Sequence
  Description of Artificial Sequence: Synthetic oligonucleotide
  Sense strand starting at position 2945 of SEQ ID NO: 914517
aggugcuuugucuggcuga

SEQ ID NO: 1010059 - RNA, 19 nt, Artificial Sequence
  Description of Artificial Sequence: Synthetic oligonucleotide
  Antisense strand to SEQ ID NO: 1010058
ucagccagacaaagcaccu

SEQ ID NO: 1010060 - RNA, 19 nt, Artificial Sequence
  Description of Artificial Sequence: Synthetic oligonucleotide
  Sense strand starting at position 2969 of SEQ ID NO: 914517
ugaugcuccucaguucuga

SEQ ID NO: 1010061 - RNA, 19 nt, Artificial Sequence
  Description of Artificial Sequence: Synthetic oligonucleotide
  Antisense strand to SEQ ID NO: 1010060
ucagaacugaggagcauca

SEQ ID NO: 1010062 - RNA, 19 nt, Artificial Sequence
  Description of Artificial Sequence: Synthetic oligonucleotide
  Sense strand starting at position 2991 of SEQ ID NO: 914517
aaugguuauuucugaagca

SEQ ID NO: 1010063 - RNA, 19 nt, Artificial Sequence
  Description of Artificial Sequence: Synthetic oligonucleotide
  Antisense strand to SEQ ID NO: 1010062
ugcuucagaaauaaccauu

SEQ ID NO: 1010064 - RNA, 19 nt, Artificial Sequence
  Description of Artificial Sequence: Synthetic oligonucleotide
  Sense strand starting at position 3093 of SEQ ID NO: 914517
agcaguggauggcuugaaa

SEQ ID NO: 1010065 - RNA, 19 nt, Artificial Sequence
  Description of Artificial Sequence: Synthetic oligonucleotide
  Antisense strand to SEQ ID NO: 1010064
uuucaagccauccacugcu

SEQ ID NO: 1010066 - RNA, 19 nt, Artificial Sequence
  Description of Artificial Sequence: Synthetic oligonucleotide
  Sense strand starting at position 3207 of SEQ ID NO: 914517
agcaguuuccugggucaga

SEQ ID NO: 1010067 - RNA, 19 nt, Artificial Sequence
  Description of Artificial Sequence: Synthetic oligonucleotide
  Antisense strand to SEQ ID NO: 1010066
ucugacccaggaaacugcu

SEQ ID NO: 1010068 - RNA, 19 nt, Artificial Sequence
  Description of Artificial Sequence: Synthetic oligonucleotide
  Sense strand starting at position 3208 of SEQ ID NO: 914517
gcaguuuccugggucagag

SEQ ID NO: 1010069 - RNA, 19 nt, Artificial Sequence
  Description of Artificial Sequence: Synthetic oligonucleotide
  Antisense strand to SEQ ID NO: 1010068
cucugacccaggaaacugc

SEQ ID NO: 1010070 - RNA, 19 nt, Artificial Sequence
  Description of Artificial Sequence: Synthetic oligonucleotide
  Sense strand starting at position 3237 of SEQ ID NO: 914517
uguguuugcugggugacuu

SEQ ID NO: 1010071 - RNA, 19 nt, Artificial Sequence
  Description of Artificial Sequence: Synthetic oligonucleotide
  Antisense strand to SEQ ID NO: 1010070
aagucacccagcaaacaca

SEQ ID NO: 1010072 - RNA, 19 nt, Artificial Sequence
  Description of Artificial Sequence: Synthetic oligonucleotide
  Sense strand starting at position 3238 of SEQ ID NO: 914517
guguuugcugggugacuuu

SEQ ID NO: 1010073 - RNA, 19 nt, Artificial Sequence
  Description of Artificial Sequence: Synthetic oligonucleotide
  Antisense strand to SEQ ID NO: 1010072
aaagucacccagcaaacac

SEQ ID NO: 1010074 - RNA, 19 nt, Artificial Sequence
  Description of Artificial Sequence: Synthetic oligonucleotide
  Sense strand starting at position 3248 of SEQ ID NO: 914517
ggugacuuugugugaguga

SEQ ID NO: 1010075 - RNA, 19 nt, Artificial Sequence
  Description of Artificial Sequence: Synthetic oligonucleotide
  Antisense strand to SEQ ID NO: 1010074
ucacucacacaaagucacc

SEQ ID NO: 1010076 - RNA, 19 nt, Artificial Sequence
  Description of Artificial Sequence: Synthetic oligonucleotide
  Sense strand starting at position 3251 of SEQ ID NO: 914517
gacuuugugugagugauca

SEQ ID NO: 1010077 - RNA, 19 nt, Artificial Sequence
  Description of Artificial Sequence: Synthetic oligonucleotide
  Antisense strand to SEQ ID NO: 1010076
ugaucacucacacaaaguc

SEQ ID NO: 1010078 - RNA, 19 nt, Artificial Sequence
  Description of Artificial Sequence: Synthetic oligonucleotide
  Sense strand starting at position 3330 of SEQ ID NO: 914517
ggguguugugaacacugga

SEQ ID NO: 1010079 - RNA, 19 nt, Artificial Sequence
  Description of Artificial Sequence: Synthetic oligonucleotide
  Antisense strand to SEQ ID NO: 1010078
uccaguguucacaacaccc

SEQ ID NO: 1010080 - RNA, 19 nt, Artificial Sequence
  Description of Artificial Sequence: Synthetic oligonucleotide
  Sense strand starting at position 3335 of SEQ ID NO: 914517
uugugaacacuggauggua

SEQ ID NO: 1010081 - RNA, 19 nt, Artificial Sequence
  Description of Artificial Sequence: Synthetic oligonucleotide
  Antisense strand to SEQ ID NO: 1010080
uaccauccaguguucacaa

SEQ ID NO: 1010082 - RNA, 19 nt, Artificial Sequence
  Description of Artificial Sequence: Synthetic oligonucleotide
  Sense strand starting at position 3337 of SEQ ID NO: 914517
gugaacacuggaugguaau

SEQ ID NO: 1010083 - RNA, 19 nt, Artificial Sequence
  Description of Artificial Sequence: Synthetic oligonucleotide
  Antisense strand to SEQ ID NO: 1010082
auuaccauccaguguucac

SEQ ID NO: 1010084 - RNA, 19 nt, Artificial Sequence
  Description of Artificial Sequence: Synthetic oligonucleotide
  Sense strand starting at position 3347 of SEQ ID NO: 914517
gaugguaauguguguagag

SEQ ID NO: 1010085 - RNA, 19 nt, Artificial Sequence
  Description of Artificial Sequence: Synthetic oligonucleotide
  Antisense strand to SEQ ID NO: 1010084
cucuacacacauuaccauc

SEQ ID NO: 1010086 - RNA, 19 nt, Artificial Sequence
  Description of Artificial Sequence: Synthetic oligonucleotide
  Sense strand starting at position 3349 of SEQ ID NO: 914517
ugguaauguguguagagca

SEQ ID NO: 1010087 - RNA, 19 nt, Artificial Sequence
  Description of Artificial Sequence: Synthetic oligonucleotide
  Antisense strand to SEQ ID NO: 1010086
ugcucuacacacauuacca

SEQ ID NO: 1010088 - RNA, 19 nt, Artificial Sequence
  Description of Artificial Sequence: Synthetic oligonucleotide
  Sense strand starting at position 3410 of SEQ ID NO: 914517
cauuguugcguucagggua

SEQ ID NO: 1010089 - RNA, 19 nt, Artificial Sequence
  Description of Artificial Sequence: Synthetic oligonucleotide
  Antisense strand to SEQ ID NO: 1010088
uacccugaacgcaacaaug

SEQ ID NO: 1010090 - RNA, 19 nt, Artificial Sequence
  Description of Artificial Sequence: Synthetic oligonucleotide
  Sense strand starting at position 3497 of SEQ ID NO: 914517
gcucucgggucaucaagaa

SEQ ID NO: 1010091 - RNA, 19 nt, Artificial Sequence
  Description of Artificial Sequence: Synthetic oligonucleotide
  Antisense strand to SEQ ID NO: 1010090
uucuugaugacccgagagc

SEQ ID NO: 1010092 - RNA, 19 nt, Artificial Sequence
  Description of Artificial Sequence: Synthetic oligonucleotide
  Sense strand starting at position 3804 of SEQ ID NO: 914517
agcguacugagaugccuaa

SEQ ID NO: 1010093 - RNA, 19 nt, Artificial Sequence
  Description of Artificial Sequence: Synthetic oligonucleotide
  Antisense strand to SEQ ID NO: 1010092
uuaggcaucucaguacgcu

SEQ ID NO: 1010094 - RNA, 19 nt, Artificial Sequence
  Description of Artificial Sequence: Synthetic oligonucleotide
  Sense strand starting at position 3811 of SEQ ID NO: 914517
ugagaugccuaacaagagu

SEQ ID NO: 1010095 - RNA, 19 nt, Artificial Sequence
  Description of Artificial Sequence: Synthetic oligonucleotide
  Antisense strand to SEQ ID NO: 1010094
acucuuguuaggcaucuca

SEQ ID NO: 1010096 - RNA, 19 nt, Artificial Sequence
  Description of Artificial Sequence: Synthetic oligonucleotide
  Sense strand starting at position 3870 of SEQ ID NO: 914517
ucgugacugucccucuaua

SEQ ID NO: 1010097 - RNA, 19 nt, Artificial Sequence
  Description of Artificial Sequence: Synthetic oligonucleotide
  Antisense strand to SEQ ID NO: 1010096
uauagagggacagucacga

SEQ ID NO: 1010098 - RNA, 19 nt, Artificial Sequence
  Description of Artificial Sequence: Synthetic oligonucleotide
  Sense strand starting at position 3977 of SEQ ID NO: 914517
gagaauagucaggguuuag

SEQ ID NO: 1010099 - RNA, 19 nt, Artificial Sequence
  Description of Artificial Sequence: Synthetic oligonucleotide
  Antisense strand to SEQ ID NO: 1010098
cuaaacccugacuauucuc

SEQ ID NO: 1010100 - RNA, 19 nt, Artificial Sequence
  Description of Artificial Sequence: Synthetic oligonucleotide
  Sense strand starting at position 86 of SEQ ID NO: 914518
uacaauaaaccgugaaggu

SEQ ID NO: 1010101 - RNA, 19 nt, Artificial Sequence
  Description of Artificial Sequence: Synthetic oligonucleotide
  Antisense strand to SEQ ID NO: 1010100
accuucacgguuuauugua

SEQ ID NO: 1010102 - RNA, 19 nt, Artificial Sequence
  Description of Artificial Sequence: Synthetic oligonucleotide
  Sense strand starting at position 160 of SEQ ID NO: 914518
cugaacugucaguaguaga

SEQ ID NO: 1010103 - RNA, 19 nt, Artificial Sequence
  Description of Artificial Sequence: Synthetic oligonucleotide
  Antisense strand to SEQ ID NO: 1010102
ucuacuacugacaguucag

SEQ ID NO: 1010104 - RNA, 19 nt, Artificial Sequence
  Description of Artificial Sequence: Synthetic oligonucleotide
  Sense strand starting at position 176 of SEQ ID NO: 914518
agaagacugcgauggaauu

SEQ ID NO: 1010105 - RNA, 19 nt, Artificial Sequence
  Description of Artificial Sequence: Synthetic oligonucleotide
  Antisense strand to SEQ ID NO: 1010104
aauuccaucgcagucuucu

SEQ ID NO: 1010106 - RNA, 19 nt, Artificial Sequence
  Description of Artificial Sequence: Synthetic oligonucleotide
  Sense strand starting at position 177 of SEQ ID NO: 914518
gaagacugcgauggaauua

SEQ ID NO: 1010107 - RNA, 19 nt, Artificial Sequence
  Description of Artificial Sequence: Synthetic oligonucleotide
  Antisense strand to SEQ ID NO: 1010106
uaauuccaucgcagucuuc

SEQ ID NO: 1010108 - RNA, 19 nt, Artificial Sequence
  Description of Artificial Sequence: Synthetic oligonucleotide
  Sense strand starting at position 301 of SEQ ID NO: 914518
uugccauugccucagugaa

SEQ ID NO: 1010109 - RNA, 19 nt, Artificial Sequence
  Description of Artificial Sequence: Synthetic oligonucleotide
  Antisense strand to SEQ ID NO: 1010108
uucacugaggcaauggcaa

SEQ ID NO: 1010110 - RNA, 19 nt, Artificial Sequence
  Description of Artificial Sequence: Synthetic oligonucleotide
  Sense strand starting at position 691 of SEQ ID NO: 914518
uuuaacuuaugguugcaaa

SEQ ID NO: 1010111 - RNA, 19 nt, Artificial Sequence
  Description of Artificial Sequence: Synthetic oligonucleotide
  Antisense strand to SEQ ID NO: 1010110
uuugcaaccauaaguuaaa

SEQ ID NO: 1010112 - RNA, 19 nt, Artificial Sequence
  Description of Artificial Sequence: Synthetic oligonucleotide
  Sense strand starting at position 937 of SEQ ID NO: 914518
gcauaagacaggcagcauu

SEQ ID NO: 1010113 - RNA, 19 nt, Artificial Sequence
  Description of Artificial Sequence: Synthetic oligonucleotide
  Antisense strand to SEQ ID NO: 1010112
aaugcugccugucuuaugc

SEQ ID NO: 1010114 - RNA, 19 nt, Artificial Sequence
  Description of Artificial Sequence: Synthetic oligonucleotide
  Sense strand starting at position 948 of SEQ ID NO: 914518
gcagcauuucugggccaag

SEQ ID NO: 1010115 - RNA, 19 nt, Artificial Sequence
  Description of Artificial Sequence: Synthetic oligonucleotide
  Antisense strand to SEQ ID NO: 1010114
cuuggcccagaaaugcugc

SEQ ID NO: 1010116 - RNA, 19 nt, Artificial Sequence
  Description of Artificial Sequence: Synthetic oligonucleotide
  Sense strand starting at position 1357 of SEQ ID NO: 914518
gagaaagccagucguuaag

SEQ ID NO: 1010117 - RNA, 19 nt, Artificial Sequence
  Description of Artificial Sequence: Synthetic oligonucleotide
  Antisense strand to SEQ ID NO: 1010116
cuuaacgacuggcuuucuc

SEQ ID NO: 1010118 - RNA, 19 nt, Artificial Sequence
  Description of Artificial Sequence: Synthetic oligonucleotide
  Sense strand starting at position 1381 of SEQ ID NO: 914518
ggugguggaugaucggaau

SEQ ID NO: 1010119 - RNA, 19 nt, Artificial Sequence
  Description of Artificial Sequence: Synthetic oligonucleotide
  Antisense strand to SEQ ID NO: 1010118
auuccgaucauccaccacc

SEQ ID NO: 1010120 - RNA, 19 nt, Artificial Sequence
  Description of Artificial Sequence: Synthetic oligonucleotide
  Sense strand starting at position 1502 of SEQ ID NO: 914518
ccucguaggcgcuuacuua

SEQ ID NO: 1010121 - RNA, 19 nt, Artificial Sequence
  Description of Artificial Sequence: Synthetic oligonucleotide
  Antisense strand to SEQ ID NO: 1010120
uaaguaagcgccuacgagg

SEQ ID NO: 1010122 - RNA, 19 nt, Artificial Sequence
  Description of Artificial Sequence: Synthetic oligonucleotide
  Sense strand starting at position 1979 of SEQ ID NO: 914518
cgcaguguccucguucuuu

SEQ ID NO: 1010123 - RNA, 19 nt, Artificial Sequence
  Description of Artificial Sequence: Synthetic oligonucleotide
  Antisense strand to SEQ ID NO: 1010122
aaagaacgaggacacugcg

SEQ ID NO: 1010124 - RNA, 19 nt, Artificial Sequence
  Description of Artificial Sequence: Synthetic oligonucleotide
  Sense strand starting at position 1981 of SEQ ID NO: 914518
caguguccucguucuuuau

SEQ ID NO: 1010125 - RNA, 19 nt, Artificial Sequence
  Description of Artificial Sequence: Synthetic oligonucleotide
  Antisense strand to SEQ ID NO: 1010124
auaaagaacgaggacacug

SEQ ID NO: 1010126 - RNA, 19 nt, Artificial Sequence
  Description of Artificial Sequence: Synthetic oligonucleotide
  Sense strand starting at position 1982 of SEQ ID NO: 914518
aguguccucguucuuuauu

SEQ ID NO: 1010127 - RNA, 19 nt, Artificial Sequence
  Description of Artificial Sequence: Synthetic oligonucleotide
  Antisense strand to SEQ ID NO: 1010126
aauaaagaacgaggacacu

SEQ ID NO: 1010128 - RNA, 19 nt, Artificial Sequence
  Description of Artificial Sequence: Synthetic oligonucleotide
  Sense strand starting at position 1995 of SEQ ID NO: 914518
uuuauugguccucgacgga

SEQ ID NO: 1010129 - RNA, 19 nt, Artificial Sequence
  Description of Artificial Sequence: Synthetic oligonucleotide
  Antisense strand to SEQ ID NO: 1010128
uccgucgaggaccaauaaa

SEQ ID NO: 1010130 - RNA, 19 nt, Artificial Sequence
  Description of Artificial Sequence: Synthetic oligonucleotide
  Sense strand starting at position 2182 of SEQ ID NO: 914518
gcgaaagaauguguguaga

SEQ ID NO: 1010131 - RNA, 19 nt, Artificial Sequence
  Description of Artificial Sequence: Synthetic oligonucleotide
  Antisense strand to SEQ ID NO: 1010130
ucuacacacauucuuucgc

SEQ ID NO: 1010132 - RNA, 19 nt, Artificial Sequence
  Description of Artificial Sequence: Synthetic oligonucleotide
  Sense strand starting at position 2259 of SEQ ID NO: 914518
cugucaacacccgacaauu

SEQ ID NO: 1010133 - RNA, 19 nt, Artificial Sequence
  Description of Artificial Sequence: Synthetic oligonucleotide
  Antisense strand to SEQ ID NO: 1010132
aauugucggguguugacag

SEQ ID NO: 1010134 - RNA, 19 nt, Artificial Sequence
  Description of Artificial Sequence: Synthetic oligonucleotide
  Sense strand starting at position 2427 of SEQ ID NO: 914518
guaaaucuucuggaguugu

SEQ ID NO: 1010135 - RNA, 19 nt, Artificial Sequence
  Description of Artificial Sequence: Synthetic oligonucleotide
  Antisense strand to SEQ ID NO: 1010134
acaacuccagaagauuuac

SEQ ID NO: 1010136 - RNA, 19 nt, Artificial Sequence
  Description of Artificial Sequence: Synthetic oligonucleotide
  Sense strand starting at position 2437 of SEQ ID NO: 914518
uggaguuguuuccuuaucu

SEQ ID NO: 1010137 - RNA, 19 nt, Artificial Sequence
  Description of Artificial Sequence: Synthetic oligonucleotide
  Antisense strand to SEQ ID NO: 1010136
agauaaggaaacaacucca

SEQ ID NO: 1010138 - RNA, 19 nt, Artificial Sequence
  Description of Artificial Sequence: Synthetic oligonucleotide
  Sense strand starting at position 2438 of SEQ ID NO: 914518
ggaguuguuuccuuaucug

SEQ ID NO: 1010139 - RNA, 19 nt, Artificial Sequence
  Description of Artificial Sequence: Synthetic oligonucleotide
  Antisense strand to SEQ ID NO: 1010138
cagauaaggaaacaacucc

SEQ ID NO: 1010140 - RNA, 19 nt, Artificial Sequence
  Description of Artificial Sequence: Synthetic oligonucleotide
  Sense strand starting at position 2470 of SEQ ID NO: 914518
cgauguuucccuuacaauu

SEQ ID NO: 1010141 - RNA, 19 nt, Artificial Sequence
  Description of Artificial Sequence: Synthetic oligonucleotide
  Antisense strand to SEQ ID NO: 1010140
aauuguaagggaaacaucg

SEQ ID NO: 1010142 - RNA, 19 nt, Artificial Sequence
  Description of Artificial Sequence: Synthetic oligonucleotide
  Sense strand starting at position 2532 of SEQ ID NO: 914518
cuuugugaacuguaacgca

SEQ ID NO: 1010143 - RNA, 19 nt, Artificial Sequence
  Description of Artificial Sequence: Synthetic oligonucleotide
  Antisense strand to SEQ ID NO: 1010142
ugcguuacaguucacaaag

SEQ ID NO: 1010144 - RNA, 19 nt, Artificial Sequence
  Description of Artificial Sequence: Synthetic oligonucleotide
  Sense strand starting at position 2580 of SEQ ID NO: 914518
aaacgagaggcuugguuaa

SEQ ID NO: 1010145 - RNA, 19 nt, Artificial Sequence
  Description of Artificial Sequence: Synthetic oligonucleotide
  Antisense strand to SEQ ID NO: 1010144
uuaaccaagccucucguuu

SEQ ID NO: 1010146 - RNA, 19 nt, Artificial Sequence
  Description of Artificial Sequence: Synthetic oligonucleotide
  Sense strand starting at position 2582 of SEQ ID NO: 914518
acgagaggcuugguuaaca

SEQ ID NO: 1010147 - RNA, 19 nt, Artificial Sequence
  Description of Artificial Sequence: Synthetic oligonucleotide
  Antisense strand to SEQ ID NO: 1010146
uguuaaccaagccucucgu

SEQ ID NO: 1010148 - RNA, 19 nt, Artificial Sequence
  Description of Artificial Sequence: Synthetic oligonucleotide
  Sense strand starting at position 2678 of SEQ ID NO: 914518
guaaucuacagugguugga

SEQ ID NO: 1010149 - RNA, 19 nt, Artificial Sequence
  Description of Artificial Sequence: Synthetic oligonucleotide
  Antisense strand to SEQ ID NO: 1010148
uccaaccacuguagauuac

SEQ ID NO: 1010150 - RNA, 19 nt, Artificial Sequence
  Description of Artificial Sequence: Synthetic oligonucleotide
  Sense strand starting at position 2759 of SEQ ID NO: 914518
agcuauaaaugcuuagaga

SEQ ID NO: 1010151 - RNA, 19 nt, Artificial Sequence
  Description of Artificial Sequence: Synthetic oligonucleotide
  Antisense strand to SEQ ID NO: 1010150
ucucuaagcauuuauagcu

SEQ ID NO: 1010152 - RNA, 19 nt, Artificial Sequence
  Description of Artificial Sequence: Synthetic oligonucleotide
  Sense strand starting at position 2760 of SEQ ID NO: 914518
gcuauaaaugcuuagagac

SEQ ID NO: 1010153 - RNA, 19 nt, Artificial Sequence
  Description of Artificial Sequence: Synthetic oligonucleotide
  Antisense strand to SEQ ID NO: 1010152
gucucuaagcauuuauagc

SEQ ID NO: 1010154 - RNA, 19 nt, Artificial Sequence
  Description of Artificial Sequence: Synthetic oligonucleotide
  Sense strand starting at position 2845 of SEQ ID NO: 914518
guagauucccaacaggcua

SEQ ID NO: 1010155 - RNA, 19 nt, Artificial Sequence
  Description of Artificial Sequence: Synthetic oligonucleotide
  Antisense strand to SEQ ID NO: 1010154
uagccuguugggaaucuac

SEQ ID NO: 1010156 - RNA, 19 nt, Artificial Sequence
  Description of Artificial Sequence: Synthetic oligonucleotide
  Sense strand starting at position 2949 of SEQ ID NO: 914518
agccuuugguuggucaaga

SEQ ID NO: 1010157 - RNA, 19 nt, Artificial Sequence
  Description of Artificial Sequence: Synthetic oligonucleotide
  Antisense strand to SEQ ID NO: 1010156
ucuugaccaaccaaaggcu

SEQ ID NO: 1010158 - RNA, 19 nt, Artificial Sequence
  Description of Artificial Sequence: Synthetic oligonucleotide
  Sense strand starting at position 2950 of SEQ ID NO: 914518
gccuuugguuggucaagau

SEQ ID NO: 1010159 - RNA, 19 nt, Artificial Sequence
  Description of Artificial Sequence: Synthetic oligonucleotide
  Antisense strand to SEQ ID NO: 1010158
aucuugaccaaccaaaggc

SEQ ID NO: 1010160 - RNA, 19 nt, Artificial Sequence
  Description of Artificial Sequence: Synthetic oligonucleotide
  Sense strand starting at position 3151 of SEQ ID NO: 914518
guaagaguauaauugguac

SEQ ID NO: 1010161 - RNA, 19 nt, Artificial Sequence
  Description of Artificial Sequence: Synthetic oligonucleotide
  Antisense strand to SEQ ID NO: 1010160
guaccaauuauacucuuac

SEQ ID NO: 1010162 - RNA, 19 nt, Artificial Sequence
  Description of Artificial Sequence: Synthetic oligonucleotide
  Sense strand starting at position 3157 of SEQ ID NO: 914518
guauaauugguacaaaccu

SEQ ID NO: 1010163 - RNA, 19 nt, Artificial Sequence
  Description of Artificial Sequence: Synthetic oligonucleotide
  Antisense strand to SEQ ID NO: 1010162
agguuuguaccaauuauac

SEQ ID NO: 1010164 - RNA, 19 nt, Artificial Sequence
  Description of Artificial Sequence: Synthetic oligonucleotide
  Sense strand starting at position 3179 of SEQ ID NO: 914518
ggaggacaauuugacaguu

SEQ ID NO: 1010165 - RNA, 19 nt, Artificial Sequence
  Description of Artificial Sequence: Synthetic oligonucleotide
  Antisense strand to SEQ ID NO: 1010164
aacugucaaauuguccucc

SEQ ID NO: 1010166 - RNA, 19 nt, Artificial Sequence
  Description of Artificial Sequence: Synthetic oligonucleotide
  Sense strand starting at position 3215 of SEQ ID NO: 914518
cuaguucuggcccaguaau

SEQ ID NO: 1010167 - RNA, 19 nt, Artificial Sequence
  Description of Artificial Sequence: Synthetic oligonucleotide
  Antisense strand to SEQ ID NO: 1010166
auuacugggccagaacuag

SEQ ID NO: 1010168 - RNA, 19 nt, Artificial Sequence
  Description of Artificial Sequence: Synthetic oligonucleotide
  Sense strand starting at position 3240 of SEQ ID NO: 914518
ugaggaauuuaucguacag

SEQ ID NO: 1010169 - RNA, 19 nt, Artificial Sequence
  Description of Artificial Sequence: Synthetic oligonucleotide
  Antisense strand to SEQ ID NO: 1010168
cuguacgauaaauuccuca

SEQ ID NO: 1010170 - RNA, 19 nt, Artificial Sequence
  Description of Artificial Sequence: Synthetic oligonucleotide
  Sense strand starting at position 3242 of SEQ ID NO: 914518
aggaauuuaucguacagau

SEQ ID NO: 1010171 - RNA, 19 nt, Artificial Sequence
  Description of Artificial Sequence: Synthetic oligonucleotide
  Antisense strand to SEQ ID NO: 1010170
aucuguacgauaaauuccu

SEQ ID NO: 1010172 - RNA, 19 nt, Artificial Sequence
  Description of Artificial Sequence: Synthetic oligonucleotide
  Sense strand starting at position 3254 of SEQ ID NO: 914518
uacagaucugugcaaguau

SEQ ID NO: 1010173 - RNA, 19 nt, Artificial Sequence
  Description of Artificial Sequence: Synthetic oligonucleotide
  Antisense strand to SEQ ID NO: 1010172
auacuugcacagaucugua

SEQ ID NO: 1010174 - RNA, 19 nt, Artificial Sequence
  Description of Artificial Sequence: Synthetic oligonucleotide
  Sense strand starting at position 3262 of SEQ ID NO: 914518
ugugcaaguaugcaaagaa

SEQ ID NO: 1010175 - RNA, 19 nt, Artificial Sequence
  Description of Artificial Sequence: Synthetic oligonucleotide
  Antisense strand to SEQ ID NO: 1010174
uucuuugcauacuugcaca

SEQ ID NO: 1010176 - RNA, 19 nt, Artificial Sequence
  Description of Artificial Sequence: Synthetic oligonucleotide
  Sense strand starting at position 3288 of SEQ ID NO: 914518
caaggauguuuacugcaau

SEQ ID NO: 1010177 - RNA, 19 nt, Artificial Sequence
  Description of Artificial Sequence: Synthetic oligonucleotide
  Antisense strand to SEQ ID NO: 1010176
auugcaguaaacauccuug

SEQ ID NO: 1010178 - RNA, 19 nt, Artificial Sequence
  Description of Artificial Sequence: Synthetic oligonucleotide
  Sense strand starting at position 3291 of SEQ ID NO: 914518
ggauguuuacugcaauacu

SEQ ID NO: 1010179 - RNA, 19 nt, Artificial Sequence
  Description of Artificial Sequence: Synthetic oligonucleotide
  Antisense strand to SEQ ID NO: 1010178
aguauugcaguaaacaucc

SEQ ID NO: 1010180 - RNA, 19 nt, Artificial Sequence
  Description of Artificial Sequence: Synthetic oligonucleotide
  Sense strand starting at position 1519 of SEQ ID NO: 914519
gugggacauucugcaaacu

SEQ ID NO: 1010181 - RNA, 19 nt, Artificial Sequence
  Description of Artificial Sequence: Synthetic oligonucleotide
  Antisense strand to SEQ ID NO: 1010180
aguuugcagaaugucccac

SEQ ID NO: 1010182 - RNA, 19 nt, Artificial Sequence
  Description of Artificial Sequence: Synthetic oligonucleotide
  Sense strand starting at position 1520 of SEQ ID NO: 914519
ugggacauucugcaaacuu

SEQ ID NO: 1010183 - RNA, 19 nt, Artificial Sequence
  Description of Artificial Sequence: Synthetic oligonucleotide
  Antisense strand to SEQ ID NO: 1010182
aaguuugcagaauguccca

SEQ ID NO: 1010184 - RNA, 19 nt, Artificial Sequence
  Description of Artificial Sequence: Synthetic oligonucleotide
  Sense strand starting at position 1945 of SEQ ID NO: 914519
gaguaaaugcaaugacaca

SEQ ID NO: 1010185 - RNA, 19 nt, Artificial Sequence
  Description of Artificial Sequence: Synthetic oligonucleotide
  Antisense strand to SEQ ID NO: 1010184
ugugucauugcauuuacuc

SEQ ID NO: 1010186 - RNA, 19 nt, Artificial Sequence
  Description of Artificial Sequence: Synthetic oligonucleotide
  Sense strand starting at position 1992 of SEQ ID NO: 914519
ggagcaagugaugguguuu

SEQ ID NO: 1010187 - RNA, 19 nt, Artificial Sequence
  Description of Artificial Sequence: Synthetic oligonucleotide
  Antisense strand to SEQ ID NO: 1010186
aaacaccaucacuugcucc

SEQ ID NO: 1010188 - RNA, 19 nt, Artificial Sequence
  Description of Artificial Sequence: Synthetic oligonucleotide
  Sense strand starting at position 2333 of SEQ ID NO: 914519
aggcuucuugggugacuca

SEQ ID NO: 1010189 - RNA, 19 nt, Artificial Sequence
  Description of Artificial Sequence: Synthetic oligonucleotide
  Antisense strand to SEQ ID NO: 1010188
ugagucacccaagaagccu

SEQ ID NO: 1010190 - RNA, 19 nt, Artificial Sequence
  Description of Artificial Sequence: Synthetic oligonucleotide
  Sense strand starting at position 2352 of SEQ ID NO: 914519
gcgggaaugcuccgauuca

SEQ ID NO: 1010191 - RNA, 19 nt, Artificial Sequence
  Description of Artificial Sequence: Synthetic oligonucleotide
  Antisense strand to SEQ ID NO: 1010190
ugaaucggagcauucccgc

SEQ ID NO: 1010192 - RNA, 19 nt, Artificial Sequence
  Description of Artificial Sequence: Synthetic oligonucleotide
  Sense strand starting at position 2353 of SEQ ID NO: 914519
cgggaaugcuccgauucaa

SEQ ID NO: 1010193 - RNA, 19 nt, Artificial Sequence
  Description of Artificial Sequence: Synthetic oligonucleotide
  Antisense strand to SEQ ID NO: 1010192
uugaaucggagcauucccg

SEQ ID NO: 1010194 - RNA, 19 nt, Artificial Sequence
  Description of Artificial Sequence: Synthetic oligonucleotide
  Sense strand starting at position 2414 of SEQ ID NO: 914519
ccaugaagacccuggcauu

SEQ ID NO: 1010195 - RNA, 19 nt, Artificial Sequence
  Description of Artificial Sequence: Synthetic oligonucleotide
  Antisense strand to SEQ ID NO: 1010194
aaugccagggucuucaugg

SEQ ID NO: 1010196 - RNA, 19 nt, Artificial Sequence
  Description of Artificial Sequence: Synthetic oligonucleotide
  Sense strand starting at position 2729 of SEQ ID NO: 914519
ccaauuaaaucacugggua

SEQ ID NO: 1010197 - RNA, 19 nt, Artificial Sequence
  Description of Artificial Sequence: Synthetic oligonucleotide
  Antisense strand to SEQ ID NO: 1010196
uacccagugauuuaauugg

SEQ ID NO: 1010198 - RNA, 19 nt, Artificial Sequence
  Description of Artificial Sequence: Synthetic oligonucleotide
  Sense strand starting at position 3043 of SEQ ID NO: 914519
ucaauuaccucacuggagu

SEQ ID NO: 1010199 - RNA, 19 nt, Artificial Sequence
  Description of Artificial Sequence: Synthetic oligonucleotide
  Antisense strand to SEQ ID NO: 1010198
acuccagugagguaauuga

SEQ ID NO: 1010200 - RNA, 19 nt, Artificial Sequence
  Description of Artificial Sequence: Synthetic oligonucleotide
  Sense strand starting at position 3206 of SEQ ID NO: 914519
aguagcagcucugaugaaa

SEQ ID NO: 1010201 - RNA, 19 nt, Artificial Sequence
  Description of Artificial Sequence: Synthetic oligonucleotide
  Antisense strand to SEQ ID NO: 1010200
uuucaucagagcugcuacu

SEQ ID NO: 1010202 - RNA, 19 nt, Artificial Sequence
  Description of Artificial Sequence: Synthetic oligonucleotide
  Sense strand starting at position 3329 of SEQ ID NO: 914519
cagugacauuccugaugga

SEQ ID NO: 1010203 - RNA, 19 nt, Artificial Sequence
  Description of Artificial Sequence: Synthetic oligonucleotide
  Antisense strand to SEQ ID NO: 1010202
uccaucaggaaugucacug

SEQ ID NO: 1010204 - RNA, 19 nt, Artificial Sequence
  Description of Artificial Sequence: Synthetic oligonucleotide
  Sense strand starting at position 3332 of SEQ ID NO: 914519
ugacauuccugauggauga

SEQ ID NO: 1010205 - RNA, 19 nt, Artificial Sequence
  Description of Artificial Sequence: Synthetic oligonucleotide
  Antisense strand to SEQ ID NO: 1010204
ucauccaucaggaauguca

SEQ ID NO: 1010206 - RNA, 19 nt, Artificial Sequence
  Description of Artificial Sequence: Synthetic oligonucleotide
  Sense strand starting at position 3542 of SEQ ID NO: 914519
ugcacaaugugguuuggau

SEQ ID NO: 1010207 - RNA, 19 nt, Artificial Sequence
  Description of Artificial Sequence: Synthetic oligonucleotide
  Antisense strand to SEQ ID NO: 1010206
auccaaaccacauugugca

SEQ ID NO: 1010208 - RNA, 19 nt, Artificial Sequence
  Description of Artificial Sequence: Synthetic oligonucleotide
  Sense strand starting at position 3593 of SEQ ID NO: 914519
cuugcugagucagggagaa

SEQ ID NO: 1010209 - RNA, 19 nt, Artificial Sequence
  Description of Artificial Sequence: Synthetic oligonucleotide
  Antisense strand to SEQ ID NO: 1010208
uucucccugacucagcaag

SEQ ID NO: 1010210 - RNA, 19 nt, Artificial Sequence
  Description of Artificial Sequence: Synthetic oligonucleotide
  Sense strand starting at position 3942 of SEQ ID NO: 914519
agggacaauuggcuuuaca

SEQ ID NO: 1010211 - RNA, 19 nt, Artificial Sequence
  Description of Artificial Sequence: Synthetic oligonucleotide
  Antisense strand to SEQ ID NO: 1010210
uguaaagccaauugucccu

SEQ ID NO: 1010212 - RNA, 19 nt, Artificial Sequence
  Description of Artificial Sequence: Synthetic oligonucleotide
  Sense strand starting at position 3976 of SEQ ID NO: 914519
cccaguuugucuuugaauc

SEQ ID NO: 1010213 - RNA, 19 nt, Artificial Sequence
  Description of Artificial Sequence: Synthetic oligonucleotide
  Antisense strand to SEQ ID NO: 1010212
gauucaaagacaaacuggg

SEQ ID NO: 1010214 - RNA, 19 nt, Artificial Sequence
  Description of Artificial Sequence: Synthetic oligonucleotide
  Sense strand starting at position 3977 of SEQ ID NO: 914519
ccaguuugucuuugaaucu

SEQ ID NO: 1010215 - RNA, 19 nt, Artificial Sequence
  Description of Artificial Sequence: Synthetic oligonucleotide
  Antisense strand to SEQ ID NO: 1010214
agauucaaagacaaacugg

SEQ ID NO: 1010216 - RNA, 19 nt, Artificial Sequence
  Description of Artificial Sequence: Synthetic oligonucleotide
  Sense strand starting at position 64 of SEQ ID NO: 914520
ggaggaaugugaaguguca

SEQ ID NO: 1010217 - RNA, 19 nt, Artificial Sequence
  Description of Artificial Sequence: Synthetic oligonucleotide
  Antisense strand to SEQ ID NO: 1010216
ugacacuucacauuccucc

SEQ ID NO: 1010218 - RNA, 19 nt, Artificial Sequence
  Description of Artificial Sequence: Synthetic oligonucleotide
  Sense strand starting at position 66 of SEQ ID NO: 914520
aggaaugugaagugucagu

SEQ ID NO: 1010219 - RNA, 19 nt, Artificial Sequence
  Description of Artificial Sequence: Synthetic oligonucleotide
  Antisense strand to SEQ ID NO: 1010218
acugacacuucacauuccu

SEQ ID NO: 1010220 - RNA, 19 nt, Artificial Sequence
  Description of Artificial Sequence: Synthetic oligonucleotide
  Sense strand starting at position 128 of SEQ ID NO: 914520
gcagaagugugacggacaa

SEQ ID NO: 1010221 - RNA, 19 nt, Artificial Sequence
  Description of Artificial Sequence: Synthetic oligonucleotide
  Antisense strand to SEQ ID NO: 1010220
uuguccgucacacuucugc

SEQ ID NO: 1010222 - RNA, 19 nt, Artificial Sequence
  Description of Artificial Sequence: Synthetic oligonucleotide
  Sense strand starting at position 147 of SEQ ID NO: 914520
gagugugggucugugaaug

SEQ ID NO: 1010223 - RNA, 19 nt, Artificial Sequence
  Description of Artificial Sequence: Synthetic oligonucleotide
  Antisense strand to SEQ ID NO: 1010222
cauucacagacccacacuc

SEQ ID NO: 1010224 - RNA, 19 nt, Artificial Sequence
  Description of Artificial Sequence: Synthetic oligonucleotide
  Sense strand starting at position 296 of SEQ ID NO: 914520
gagcgcgucuggucuguua

SEQ ID NO: 1010225 - RNA, 19 nt, Artificial Sequence
  Description of Artificial Sequence: Synthetic oligonucleotide
  Antisense strand to SEQ ID NO: 1010224
uaacagaccagacgcgcuc

SEQ ID NO: 1010226 - RNA, 19 nt, Artificial Sequence
  Description of Artificial Sequence: Synthetic oligonucleotide
  Sense strand starting at position 316 of SEQ ID NO: 914520
gggaauauguacucgcauc

SEQ ID NO: 1010227 - RNA, 19 nt, Artificial Sequence
  Description of Artificial Sequence: Synthetic oligonucleotide
  Antisense strand to SEQ ID NO: 1010226
gaugcgaguacauauuccc

SEQ ID NO: 1010228 - RNA, 19 nt, Artificial Sequence
  Description of Artificial Sequence: Synthetic oligonucleotide
  Sense strand starting at position 1961 of SEQ ID NO: 914520
gugggacauucugcaaacu

SEQ ID NO: 1010229 - RNA, 19 nt, Artificial Sequence
  Description of Artificial Sequence: Synthetic oligonucleotide
  Antisense strand to SEQ ID NO: 1010228
aguuugcagaaugucccac

SEQ ID NO: 1010230 - RNA, 19 nt, Artificial Sequence
  Description of Artificial Sequence: Synthetic oligonucleotide
  Sense strand starting at position 1962 of SEQ ID NO: 914520
ugggacauucugcaaacuu

SEQ ID NO: 1010231 - RNA, 19 nt, Artificial Sequence
  Description of Artificial Sequence: Synthetic oligonucleotide
  Antisense strand to SEQ ID NO: 1010230
aaguuugcagaauguccca

SEQ ID NO: 1010232 - RNA, 19 nt, Artificial Sequence
  Description of Artificial Sequence: Synthetic oligonucleotide
  Sense strand starting at position 2387 of SEQ ID NO: 914520
gaguaaaugcaaugacaca

SEQ ID NO: 1010233 - RNA, 19 nt, Artificial Sequence
  Description of Artificial Sequence: Synthetic oligonucleotide
  Antisense strand to SEQ ID NO: 1010232
ugugucauugcauuuacuc

SEQ ID NO: 1010234 - RNA, 19 nt, Artificial Sequence
  Description of Artificial Sequence: Synthetic oligonucleotide
  Sense strand starting at position 2434 of SEQ ID NO: 914520
ggagcaagugaugguguuu

SEQ ID NO: 1010235 - RNA, 19 nt, Artificial Sequence
  Description of Artificial Sequence: Synthetic oligonucleotide
  Antisense strand to SEQ ID NO: 1010234
aaacaccaucacuugcucc

SEQ ID NO: 1010236 - RNA, 19 nt, Artificial Sequence
  Description of Artificial Sequence: Synthetic oligonucleotide
  Sense strand starting at position 2775 of SEQ ID NO: 914520
aggcuucuugggugacuca

SEQ ID NO: 1010237 - RNA, 19 nt, Artificial Sequence
  Description of Artificial Sequence: Synthetic oligonucleotide
  Antisense strand to SEQ ID NO: 1010236
ugagucacccaagaagccu

SEQ ID NO: 1010238 - RNA, 19 nt, Artificial Sequence
  Description of Artificial Sequence: Synthetic oligonucleotide
  Sense strand starting at position 2794 of SEQ ID NO: 914520
gcgggaaugcuccgauuca

SEQ ID NO: 1010239 - RNA, 19 nt, Artificial Sequence
  Description of Artificial Sequence: Synthetic oligonucleotide
  Antisense strand to SEQ ID NO: 1010238
ugaaucggagcauucccgc

SEQ ID NO: 1010240 - RNA, 19 nt, Artificial Sequence
  Description of Artificial Sequence: Synthetic oligonucleotide
  Sense strand starting at position 2795 of SEQ ID NO: 914520
cgggaaugcuccgauucaa

SEQ ID NO: 1010241 - RNA, 19 nt, Artificial Sequence
  Description of Artificial Sequence: Synthetic oligonucleotide
  Antisense strand to SEQ ID NO: 1010240
uugaaucggagcauucccg

SEQ ID NO: 1010242 - RNA, 19 nt, Artificial Sequence
  Description of Artificial Sequence: Synthetic oligonucleotide
  Sense strand starting at position 2856 of SEQ ID NO: 914520
ccaugaagacccuggcauu

SEQ ID NO: 1010243 - RNA, 19 nt, Artificial Sequence
  Description of Artificial Sequence: Synthetic oligonucleotide
  Antisense strand to SEQ ID NO: 1010242
aaugccagggucuucaugg

SEQ ID NO: 1010244 - RNA, 19 nt, Artificial Sequence
  Description of Artificial Sequence: Synthetic oligonucleotide
  Sense strand starting at position 3171 of SEQ ID NO: 914520
ccaauuaaaucacugggua

SEQ ID NO: 1010245 - RNA, 19 nt, Artificial Sequence
  Description of Artificial Sequence: Synthetic oligonucleotide
  Antisense strand to SEQ ID NO: 1010244
uacccagugauuuaauugg

SEQ ID NO: 1010246 - RNA, 19 nt, Artificial Sequence
  Description of Artificial Sequence: Synthetic oligonucleotide
  Sense strand starting at position 3485 of SEQ ID NO: 914520
ucaauuaccucacuggagu

SEQ ID NO: 1010247 - RNA, 19 nt, Artificial Sequence
  Description of Artificial Sequence: Synthetic oligonucleotide
  Antisense strand to SEQ ID NO: 1010246
acuccagugagguaauuga

SEQ ID NO: 1010248 - RNA, 19 nt, Artificial Sequence
  Description of Artificial Sequence: Synthetic oligonucleotide
  Sense strand starting at position 3648 of SEQ ID NO: 914520
aguagcagcucugaugaaa

SEQ ID NO: 1010249 - RNA, 19 nt, Artificial Sequence
  Description of Artificial Sequence: Synthetic oligonucleotide
  Antisense strand to SEQ ID NO: 1010248
uuucaucagagcugcuacu

SEQ ID NO: 1010250 - RNA, 19 nt, Artificial Sequence
  Description of Artificial Sequence: Synthetic oligonucleotide
  Sense strand starting at position 3771 of SEQ ID NO: 914520
cagugacauuccugaugga

SEQ ID NO: 1010251 - RNA, 19 nt, Artificial Sequence
  Description of Artificial Sequence: Synthetic oligonucleotide
  Antisense strand to SEQ ID NO: 1010250
uccaucaggaaugucacug

SEQ ID NO: 1010252 - RNA, 19 nt, Artificial Sequence
  Description of Artificial Sequence: Synthetic oligonucleotide
  Sense strand starting at position 3774 of SEQ ID NO: 914520
ugacauuccugauggauga

SEQ ID NO: 1010253 - RNA, 19 nt, Artificial Sequence
  Description of Artificial Sequence: Synthetic oligonucleotide
  Antisense strand to SEQ ID NO: 1010252
ucauccaucaggaauguca

SEQ ID NO: 1010254 - RNA, 19 nt, Artificial Sequence
  Description of Artificial Sequence: Synthetic oligonucleotide
  Sense strand starting at position 153 of SEQ ID NO: 914521
uuagguuaucguuauggaa

SEQ ID NO: 1010255 - RNA, 19 nt, Artificial Sequence
  Description of Artificial Sequence: Synthetic oligonucleotide
  Antisense strand to SEQ ID NO: 1010254
uuccauaacgauaaccuaa

SEQ ID NO: 1010256 - RNA, 19 nt, Artificial Sequence
  Description of Artificial Sequence: Synthetic oligonucleotide
  Sense strand starting at position 157 of SEQ ID NO: 914521
guuaucguuauggaaggga

SEQ ID NO: 1010257 - RNA, 19 nt, Artificial Sequence
  Description of Artificial Sequence: Synthetic oligonucleotide
  Antisense strand to SEQ ID NO: 1010256
ucccuuccauaacgauaac

SEQ ID NO: 1010258 - RNA, 19 nt, Artificial Sequence
  Description of Artificial Sequence: Synthetic oligonucleotide
  Sense strand starting at position 235 of SEQ ID NO: 914521
aggccagaaguuugauaac

SEQ ID NO: 1010259 - RNA, 19 nt, Artificial Sequence
  Description of Artificial Sequence: Synthetic oligonucleotide
  Antisense strand to SEQ ID NO: 1010258
guuaucaaacuucuggccu

SEQ ID NO: 1010260 - RNA, 19 nt, Artificial Sequence
  Description of Artificial Sequence: Synthetic oligonucleotide
  Sense strand starting at position 374 of SEQ ID NO: 914521
cuaauaagaguuugaggcu

SEQ ID NO: 1010261 - RNA, 19 nt, Artificial Sequence
  Description of Artificial Sequence: Synthetic oligonucleotide
  Antisense strand to SEQ ID NO: 1010260
agccucaaacucuuauuag

SEQ ID NO: 1010262 - RNA, 19 nt, Artificial Sequence
  Description of Artificial Sequence: Synthetic oligonucleotide
  Sense strand starting at position 533 of SEQ ID NO: 914521
agacauuucugagaagcua

SEQ ID NO: 1010263 - RNA, 19 nt, Artificial Sequence
  Description of Artificial Sequence: Synthetic oligonucleotide
  Antisense strand to SEQ ID NO: 1010262
uagcuucucagaaaugucu

SEQ ID NO: 1010264 - RNA, 19 nt, Artificial Sequence
  Description of Artificial Sequence: Synthetic oligonucleotide
  Sense strand starting at position 587 of SEQ ID NO: 914521
uggacacagucauucuaag

SEQ ID NO: 1010265 - RNA, 19 nt, Artificial Sequence
  Description of Artificial Sequence: Synthetic oligonucleotide
  Antisense strand to SEQ ID NO: 1010264
cuuagaaugacugugucca

SEQ ID NO: 1010266 - RNA, 19 nt, Artificial Sequence
  Description of Artificial Sequence: Synthetic oligonucleotide
  Sense strand starting at position 661 of SEQ ID NO: 914521
ccuuguucugggcaaacca

SEQ ID NO: 1010267 - RNA, 19 nt, Artificial Sequence
  Description of Artificial Sequence: Synthetic oligonucleotide
  Antisense strand to SEQ ID NO: 1010266
ugguuugcccagaacaagg

SEQ ID NO: 1010268 - RNA, 19 nt, Artificial Sequence
  Description of Artificial Sequence: Synthetic oligonucleotide
  Sense strand starting at position 737 of SEQ ID NO: 914521
gacagaguagacugcucau

SEQ ID NO: 1010269 - RNA, 19 nt, Artificial Sequence
  Description of Artificial Sequence: Synthetic oligonucleotide
  Antisense strand to SEQ ID NO: 1010268
augagcagucuacucuguc

SEQ ID NO: 1010270 - RNA, 19 nt, Artificial Sequence
  Description of Artificial Sequence: Synthetic oligonucleotide
  Sense strand starting at position 784 of SEQ ID NO: 914521
augucucuccuuugggaua

SEQ ID NO: 1010271 - RNA, 19 nt, Artificial Sequence
  Description of Artificial Sequence: Synthetic oligonucleotide
  Antisense strand to SEQ ID NO: 1010270
uaucccaaaggagagacau

SEQ ID NO: 1010272 - RNA, 19 nt, Artificial Sequence
  Description of Artificial Sequence: Synthetic oligonucleotide
  Sense strand starting at position 885 of SEQ ID NO: 914521
gaauuucuguccuaagaug

SEQ ID NO: 1010273 - RNA, 19 nt, Artificial Sequence
  Description of Artificial Sequence: Synthetic oligonucleotide
  Antisense strand to SEQ ID NO: 1010272
caucuuaggacagaaauuc

SEQ ID NO: 1010274 - RNA, 19 nt, Artificial Sequence
  Description of Artificial Sequence: Synthetic oligonucleotide
  Sense strand starting at position 896 of SEQ ID NO: 914521
cuaagaugcuguucuggaa

SEQ ID NO: 1010275 - RNA, 19 nt, Artificial Sequence
  Description of Artificial Sequence: Synthetic oligonucleotide
  Antisense strand to SEQ ID NO: 1010274
uuccagaacagcaucuuag

SEQ ID NO: 1010276 - RNA, 19 nt, Artificial Sequence
  Description of Artificial Sequence: Synthetic oligonucleotide
  Sense strand starting at position 900 of SEQ ID NO: 914521
gaugcuguucuggaacaau

SEQ ID NO: 1010277 - RNA, 19 nt, Artificial Sequence
  Description of Artificial Sequence: Synthetic oligonucleotide
  Antisense strand to SEQ ID NO: 1010276
auuguuccagaacagcauc

SEQ ID NO: 1010278 - RNA, 19 nt, Artificial Sequence
  Description of Artificial Sequence: Synthetic oligonucleotide
  Sense strand starting at position 903 of SEQ ID NO: 914521
gcuguucuggaacaauaau

SEQ ID NO: 1010279 - RNA, 19 nt, Artificial Sequence
  Description of Artificial Sequence: Synthetic oligonucleotide
  Antisense strand to SEQ ID NO: 1010278
auuauuguuccagaacagc

SEQ ID NO: 1010280 - RNA, 19 nt, Artificial Sequence
  Description of Artificial Sequence: Synthetic oligonucleotide
  Sense strand starting at position 1063 of SEQ ID NO: 914521
uguaauuaagguuaugagu

SEQ ID NO: 1010281 - RNA, 19 nt, Artificial Sequence
  Description of Artificial Sequence: Synthetic oligonucleotide
  Antisense strand to SEQ ID NO: 1010280
acucauaaccuuaauuaca

SEQ ID NO: 1010282 - RNA, 19 nt, Artificial Sequence
  Description of Artificial Sequence: Synthetic oligonucleotide
  Sense strand starting at position 1197 of SEQ ID NO: 914521
auccuugauaagugggaca

SEQ ID NO: 1010283 - RNA, 19 nt, Artificial Sequence
  Description of Artificial Sequence: Synthetic oligonucleotide
  Antisense strand to SEQ ID NO: 1010282
ugucccacuuaucaaggau

SEQ ID NO: 1010284 - RNA, 19 nt, Artificial Sequence
  Description of Artificial Sequence: Synthetic oligonucleotide
  Sense strand starting at position 1199 of SEQ ID NO: 914521
ccuugauaagugggacagu

SEQ ID NO: 1010285 - RNA, 19 nt, Artificial Sequence
  Description of Artificial Sequence: Synthetic oligonucleotide
  Antisense strand to SEQ ID NO: 1010284
acugucccacuuaucaagg

SEQ ID NO: 1010286 - RNA, 19 nt, Artificial Sequence
  Description of Artificial Sequence: Synthetic oligonucleotide
  Sense strand starting at position 1285 of SEQ ID NO: 914521
uccagagauccuuggcaga

SEQ ID NO: 1010287 - RNA, 19 nt, Artificial Sequence
  Description of Artificial Sequence: Synthetic oligonucleotide
  Antisense strand to SEQ ID NO: 1010286
ucugccaaggaucucugga

SEQ ID NO: 1010288 - RNA, 19 nt, Artificial Sequence
  Description of Artificial Sequence: Synthetic oligonucleotide
  Sense strand starting at position 1287 of SEQ ID NO: 914521
cagagauccuuggcagaag

SEQ ID NO: 1010289 - RNA, 19 nt, Artificial Sequence
  Description of Artificial Sequence: Synthetic oligonucleotide
  Antisense strand to SEQ ID NO: 1010288
cuucugccaaggaucucug

SEQ ID NO: 1010290 - RNA, 19 nt, Artificial Sequence
  Description of Artificial Sequence: Synthetic oligonucleotide
  Sense strand starting at position 2078 of SEQ ID NO: 914521
ggaggcuugaguggaagau

SEQ ID NO: 1010291 - RNA, 19 nt, Artificial Sequence
  Description of Artificial Sequence: Synthetic oligonucleotide
  Antisense strand to SEQ ID NO: 1010290
aucuuccacucaagccucc

SEQ ID NO: 1010292 - RNA, 19 nt, Artificial Sequence
  Description of Artificial Sequence: Synthetic oligonucleotide
  Sense strand starting at position 2082 of SEQ ID NO: 914521
gcuugaguggaagaucuuu

SEQ ID NO: 1010293 - RNA, 19 nt, Artificial Sequence
  Description of Artificial Sequence: Synthetic oligonucleotide
  Antisense strand to SEQ ID NO: 1010292
aaagaucuuccacucaagc

SEQ ID NO: 1010294 - RNA, 19 nt, Artificial Sequence
  Description of Artificial Sequence: Synthetic oligonucleotide
  Sense strand starting at position 2183 of SEQ ID NO: 914521
ggguguguccaauaucgga

SEQ ID NO: 1010295 - RNA, 19 nt, Artificial Sequence
  Description of Artificial Sequence: Synthetic oligonucleotide
  Antisense strand to SEQ ID NO: 1010294
uccgauauuggacacaccc

SEQ ID NO: 1010296 - RNA, 19 nt, Artificial Sequence
  Description of Artificial Sequence: Synthetic oligonucleotide
  Sense strand starting at position 2318 of SEQ ID NO: 914521
ucacaagaaugauugaugu

SEQ ID NO: 1010297 - RNA, 19 nt, Artificial Sequence
  Description of Artificial Sequence: Synthetic oligonucleotide
  Antisense strand to SEQ ID NO: 1010296
acaucaaucauucuuguga

SEQ ID NO: 1010298 - RNA, 19 nt, Artificial Sequence
  Description of Artificial Sequence: Synthetic oligonucleotide
  Sense strand starting at position 2325 of SEQ ID NO: 914521
aaugauugauguucuggaa

SEQ ID NO: 1010299 - RNA, 19 nt, Artificial Sequence
  Description of Artificial Sequence: Synthetic oligonucleotide
  Antisense strand to SEQ ID NO: 1010298
uuccagaacaucaaucauu

SEQ ID NO: 1010300 - RNA, 19 nt, Artificial Sequence
  Description of Artificial Sequence: Synthetic oligonucleotide
  Sense strand starting at position 2337 of SEQ ID NO: 914521
ucuggaaauauacguugau

SEQ ID NO: 1010301 - RNA, 19 nt, Artificial Sequence
  Description of Artificial Sequence: Synthetic oligonucleotide
  Antisense strand to SEQ ID NO: 1010300
aucaacguauauuuccaga

SEQ ID NO: 1010302 - RNA, 19 nt, Artificial Sequence
  Description of Artificial Sequence: Synthetic oligonucleotide
  Sense strand starting at position 2338 of SEQ ID NO: 914521
cuggaaauauacguugaua

SEQ ID NO: 1010303 - RNA, 19 nt, Artificial Sequence
  Description of Artificial Sequence: Synthetic oligonucleotide
  Antisense strand to SEQ ID NO: 1010302
uaucaacguauauuuccag

SEQ ID NO: 1010304 - RNA, 19 nt, Artificial Sequence
  Description of Artificial Sequence: Synthetic oligonucleotide
  Sense strand starting at position 2340 of SEQ ID NO: 914521
ggaaauauacguugauaua

SEQ ID NO: 1010305 - RNA, 19 nt, Artificial Sequence
  Description of Artificial Sequence: Synthetic oligonucleotide
  Antisense strand to SEQ ID NO: 1010304
uauaucaacguauauuucc

SEQ ID NO: 1010306 - RNA, 19 nt, Artificial Sequence
  Description of Artificial Sequence: Synthetic oligonucleotide
  Sense strand starting at position 2372 of SEQ ID NO: 914521
gcaacaugacuuuauguuu

SEQ ID NO: 1010307 - RNA, 19 nt, Artificial Sequence
  Description of Artificial Sequence: Synthetic oligonucleotide
  Antisense strand to SEQ ID NO: 1010306
aaacauaaagucauguugc

SEQ ID NO: 1010308 - RNA, 19 nt, Artificial Sequence
  Description of Artificial Sequence: Synthetic oligonucleotide
  Sense strand starting at position 2423 of SEQ ID NO: 914521
gcaccuuaucuccaggaau

SEQ ID NO: 1010309 - RNA, 19 nt, Artificial Sequence
  Description of Artificial Sequence: Synthetic oligonucleotide
  Antisense strand to SEQ ID NO: 1010308
auuccuggagauaaggugc

SEQ ID NO: 1010310 - RNA, 19 nt, Artificial Sequence
  Description of Artificial Sequence: Synthetic oligonucleotide
  Sense strand starting at position 2434 of SEQ ID NO: 914521
ccaggaaucuaccuaaugu

SEQ ID NO: 1010311 - RNA, 19 nt, Artificial Sequence
  Description of Artificial Sequence: Synthetic oligonucleotide
  Antisense strand to SEQ ID NO: 1010310
acauuagguagauuccugg

SEQ ID NO: 1010312 - RNA, 19 nt, Artificial Sequence
  Description of Artificial Sequence: Synthetic oligonucleotide
  Sense strand starting at position 3004 of SEQ ID NO: 914521
uguauauguguagaccaca

SEQ ID NO: 1010313 - RNA, 19 nt, Artificial Sequence
  Description of Artificial Sequence: Synthetic oligonucleotide
  Antisense strand to SEQ ID NO: 1010312
uguggucuacacauauaca

SEQ ID NO: 1010314 - RNA, 19 nt, Artificial Sequence
  Description of Artificial Sequence: Synthetic oligonucleotide
  Sense strand starting at position 3073 of SEQ ID NO: 914521
ccuuauuugugcuuaccua

SEQ ID NO: 1010315 - RNA, 19 nt, Artificial Sequence
  Description of Artificial Sequence: Synthetic oligonucleotide
  Antisense strand to SEQ ID NO: 1010314
uagguaagcacaaauaagg

SEQ ID NO: 1010316 - RNA, 19 nt, Artificial Sequence
  Description of Artificial Sequence: Synthetic oligonucleotide
  Sense strand starting at position 3080 of SEQ ID NO: 914521
ugugcuuaccuaugcauuu

SEQ ID NO: 1010317 - RNA, 19 nt, Artificial Sequence
  Description of Artificial Sequence: Synthetic oligonucleotide
  Antisense strand to SEQ ID NO: 1010316
aaaugcauagguaagcaca

SEQ ID NO: 1010318 - RNA, 19 nt, Artificial Sequence
  Description of Artificial Sequence: Synthetic oligonucleotide
  Sense strand starting at position 3265 of SEQ ID NO: 914521
ugggacagcagcuauaaau

SEQ ID NO: 1010319 - RNA, 19 nt, Artificial Sequence
  Description of Artificial Sequence: Synthetic oligonucleotide
  Antisense strand to SEQ ID NO: 1010318
auuuauagcugcuguccca

SEQ ID NO: 1010320 - RNA, 19 nt, Artificial Sequence
  Description of Artificial Sequence: Synthetic oligonucleotide
  Sense strand starting at position 3595 of SEQ ID NO: 914521
agucuuuauagcgagacag

SEQ ID NO: 1010321 - RNA, 19 nt, Artificial Sequence
  Description of Artificial Sequence: Synthetic oligonucleotide
  Antisense strand to SEQ ID NO: 1010320
cugucucgcuauaaagacu

SEQ ID NO: 1010322 - RNA, 19 nt, Artificial Sequence
  Description of Artificial Sequence: Synthetic oligonucleotide
  Sense strand starting at position 3623 of SEQ ID NO: 914521
cggacuuauucuguuggag

SEQ ID NO: 1010323 - RNA, 19 nt, Artificial Sequence
  Description of Artificial Sequence: Synthetic oligonucleotide
  Antisense strand to SEQ ID NO: 1010322
cuccaacagaauaaguccg

SEQ ID NO: 1010324 - RNA, 19 nt, Artificial Sequence
  Description of Artificial Sequence: Synthetic oligonucleotide
  Sense strand starting at position 3631 of SEQ ID NO: 914521
uucuguuggagucaugaau

SEQ ID NO: 1010325 - RNA, 19 nt, Artificial Sequence
  Description of Artificial Sequence: Synthetic oligonucleotide
  Antisense strand to SEQ ID NO: 1010324
auucaugacuccaacagaa

SEQ ID NO: 1010326 - RNA, 19 nt, Artificial Sequence
  Description of Artificial Sequence: Synthetic oligonucleotide
  Sense strand starting at position 3637 of SEQ ID NO: 914521
uggagucaugaaugucuga

SEQ ID NO: 1010327 - RNA, 19 nt, Artificial Sequence
  Description of Artificial Sequence: Synthetic oligonucleotide
  Antisense strand to SEQ ID NO: 1010326
ucagacauucaugacucca

SEQ ID NO: 1010328 - RNA, 19 nt, Artificial Sequence
  Description of Artificial Sequence: Synthetic oligonucleotide
  Sense strand starting at position 3644 of SEQ ID NO: 914521
augaaugucugacucaugu

SEQ ID NO: 1010329 - RNA, 19 nt, Artificial Sequence
  Description of Artificial Sequence: Synthetic oligonucleotide
  Antisense strand to SEQ ID NO: 1010328
acaugagucagacauucau

SEQ ID NO: 1010330 - RNA, 19 nt, Artificial Sequence
  Description of Artificial Sequence: Synthetic oligonucleotide
  Sense strand starting at position 3715 of SEQ ID NO: 914521
aagcaaagguguuccugaa

SEQ ID NO: 1010331 - RNA, 19 nt, Artificial Sequence
  Description of Artificial Sequence: Synthetic oligonucleotide
  Antisense strand to SEQ ID NO: 1010330
uucaggaacaccuuugcuu

SEQ ID NO: 1010332 - RNA, 19 nt, Artificial Sequence
  Description of Artificial Sequence: Synthetic oligonucleotide
  Sense strand starting at position 3723 of SEQ ID NO: 914521
guguuccugaaaggaagau

SEQ ID NO: 1010333 - RNA, 19 nt, Artificial Sequence
  Description of Artificial Sequence: Synthetic oligonucleotide
  Antisense strand to SEQ ID NO: 1010332
aucuuccuuucaggaacac

SEQ ID NO: 1010334 - RNA, 19 nt, Artificial Sequence
  Description of Artificial Sequence: Synthetic oligonucleotide
  Sense strand starting at position 4 of SEQ ID NO: 914522
gcuuguugugaagaacaaa

SEQ ID NO: 1010335 - RNA, 19 nt, Artificial Sequence
  Description of Artificial Sequence: Synthetic oligonucleotide
  Antisense strand to SEQ ID NO: 1010334
uuuguucuucacaacaagc

SEQ ID NO: 1010336 - RNA, 19 nt, Artificial Sequence
  Description of Artificial Sequence: Synthetic oligonucleotide
  Sense strand starting at position 83 of SEQ ID NO: 914522
auaagagagcccugaaguu

SEQ ID NO: 1010337 - RNA, 19 nt, Artificial Sequence
  Description of Artificial Sequence: Synthetic oligonucleotide
  Antisense strand to SEQ ID NO: 1010336
aacuucagggcucucuuau

SEQ ID NO: 1010338 - RNA, 19 nt, Artificial Sequence
  Description of Artificial Sequence: Synthetic oligonucleotide
  Sense strand starting at position 111 of SEQ ID NO: 914522
uaaauaucuggugauuggu

SEQ ID NO: 1010339 - RNA, 19 nt, Artificial Sequence
  Description of Artificial Sequence: Synthetic oligonucleotide
  Antisense strand to SEQ ID NO: 1010338
accaaucaccagauauuua

SEQ ID NO: 1010340 - RNA, 19 nt, Artificial Sequence
  Description of Artificial Sequence: Synthetic oligonucleotide
  Sense strand starting at position 113 of SEQ ID NO: 914522
aauaucuggugauugguaa

SEQ ID NO: 1010341 - RNA, 19 nt, Artificial Sequence
  Description of Artificial Sequence: Synthetic oligonucleotide
  Antisense strand to SEQ ID NO: 1010340
uuaccaaucaccagauauu

SEQ ID NO: 1010342 - RNA, 19 nt, Artificial Sequence
  Description of Artificial Sequence: Synthetic oligonucleotide
  Sense strand starting at position 135 of SEQ ID NO: 914522
agugguagaguccaguaaa

SEQ ID NO: 1010343 - RNA, 19 nt, Artificial Sequence
  Description of Artificial Sequence: Synthetic oligonucleotide
  Antisense strand to SEQ ID NO: 1010342
uuuacuggacucuaccacu

SEQ ID NO: 1010344 - RNA, 19 nt, Artificial Sequence
  Description of Artificial Sequence: Synthetic oligonucleotide
  Sense strand starting at position 203 of SEQ ID NO: 914522
ugcaguauuugguuaaguc

SEQ ID NO: 1010345 - RNA, 19 nt, Artificial Sequence
  Description of Artificial Sequence: Synthetic oligonucleotide
  Antisense strand to SEQ ID NO: 1010344
gacuuaaccaaauacugca

SEQ ID NO: 1010346 - RNA, 19 nt, Artificial Sequence
  Description of Artificial Sequence: Synthetic oligonucleotide
  Sense strand starting at position 204 of SEQ ID NO: 914522
gcaguauuugguuaagucu

SEQ ID NO: 1010347 - RNA, 19 nt, Artificial Sequence
  Description of Artificial Sequence: Synthetic oligonucleotide
  Antisense strand to SEQ ID NO: 1010346
agacuuaaccaaauacugc

SEQ ID NO: 1010348 - RNA, 19 nt, Artificial Sequence
  Description of Artificial Sequence: Synthetic oligonucleotide
  Sense strand starting at position 252 of SEQ ID NO: 914522
ccugccuuacuugagcaau

SEQ ID NO: 1010349 - RNA, 19 nt, Artificial Sequence
  Description of Artificial Sequence: Synthetic oligonucleotide
  Antisense strand to SEQ ID NO: 1010348
auugcucaaguaaggcagg

SEQ ID NO: 1010350 - RNA, 19 nt, Artificial Sequence
  Description of Artificial Sequence: Synthetic oligonucleotide
  Sense strand starting at position 254 of SEQ ID NO: 914522
ugccuuacuugagcaauag

SEQ ID NO: 1010351 - RNA, 19 nt, Artificial Sequence
  Description of Artificial Sequence: Synthetic oligonucleotide
  Antisense strand to SEQ ID NO: 1010350
cuauugcucaaguaaggca

SEQ ID NO: 1010352 - RNA, 19 nt, Artificial Sequence
  Description of Artificial Sequence: Synthetic oligonucleotide
  Sense strand starting at position 255 of SEQ ID NO: 914522
gccuuacuugagcaauagu

SEQ ID NO: 1010353 - RNA, 19 nt, Artificial Sequence
  Description of Artificial Sequence: Synthetic oligonucleotide
  Antisense strand to SEQ ID NO: 1010352
acuauugcucaaguaaggc

SEQ ID NO: 1010354 - RNA, 19 nt, Artificial Sequence
  Description of Artificial Sequence: Synthetic oligonucleotide
  Sense strand starting at position 311 of SEQ ID NO: 914522
ugauuaucagccugaggcu

SEQ ID NO: 1010355 - RNA, 19 nt, Artificial Sequence
  Description of Artificial Sequence: Synthetic oligonucleotide
  Antisense strand to SEQ ID NO: 1010354
agccucaggcugauaauca

SEQ ID NO: 1010356 - RNA, 19 nt, Artificial Sequence
  Description of Artificial Sequence: Synthetic oligonucleotide
  Sense strand starting at position 330 of SEQ ID NO: 914522
ggccaagauggguaugcau

SEQ ID NO: 1010357 - RNA, 19 nt, Artificial Sequence
  Description of Artificial Sequence: Synthetic oligonucleotide
  Antisense strand to SEQ ID NO: 1010356
augcauacccaucuuggcc

SEQ ID NO: 1010358 - RNA, 19 nt, Artificial Sequence
  Description of Artificial Sequence: Synthetic oligonucleotide
  Sense strand starting at position 338 of SEQ ID NO: 914522
uggguaugcauacaguaua

SEQ ID NO: 1010359 - RNA, 19 nt, Artificial Sequence
  Description of Artificial Sequence: Synthetic oligonucleotide
  Antisense strand to SEQ ID NO: 1010358
uauacuguaugcauaccca

SEQ ID NO: 1010360 - RNA, 19 nt, Artificial Sequence
  Description of Artificial Sequence: Synthetic oligonucleotide
  Sense strand starting at position 341 of SEQ ID NO: 914522
guaugcauacaguauaauu

SEQ ID NO: 1010361 - RNA, 19 nt, Artificial Sequence
  Description of Artificial Sequence: Synthetic oligonucleotide
  Antisense strand to SEQ ID NO: 1010360
aauuauacuguaugcauac

SEQ ID NO: 1010362 - RNA, 19 nt, Artificial Sequence
  Description of Artificial Sequence: Synthetic oligonucleotide
  Sense strand starting at position 349 of SEQ ID NO: 914522
acaguauaauugguuugua

SEQ ID NO: 1010363 - RNA, 19 nt, Artificial Sequence
  Description of Artificial Sequence: Synthetic oligonucleotide
  Antisense strand to SEQ ID NO: 1010362
uacaaaccaauuauacugu

SEQ ID NO: 1010364 - RNA, 19 nt, Artificial Sequence
  Description of Artificial Sequence: Synthetic oligonucleotide
  Sense strand starting at position 350 of SEQ ID NO: 914522
caguauaauugguuuguaa

SEQ ID NO: 1010365 - RNA, 19 nt, Artificial Sequence
  Description of Artificial Sequence: Synthetic oligonucleotide
  Antisense strand to SEQ ID NO: 1010364
uuacaaaccaauuauacug

SEQ ID NO: 1010366 - RNA, 19 nt, Artificial Sequence
  Description of Artificial Sequence: Synthetic oligonucleotide
  Sense strand starting at position 352 of SEQ ID NO: 914522
guauaauugguuuguaaag

SEQ ID NO: 1010367 - RNA, 19 nt, Artificial Sequence
  Description of Artificial Sequence: Synthetic oligonucleotide
  Antisense strand to SEQ ID NO: 1010366
cuuuacaaaccaauuauac

SEQ ID NO: 1010368 - RNA, 19 nt, Artificial Sequence
  Description of Artificial Sequence: Synthetic oligonucleotide
  Sense strand starting at position 384 of SEQ ID NO: 914522
agagaacucuaaccacgua

SEQ ID NO: 1010369 - RNA, 19 nt, Artificial Sequence
  Description of Artificial Sequence: Synthetic oligonucleotide
  Antisense strand to SEQ ID NO: 1010368
uacgugguuagaguucucu

SEQ ID NO: 1010370 - RNA, 19 nt, Artificial Sequence
  Description of Artificial Sequence: Synthetic oligonucleotide
  Sense strand starting at position 484 of SEQ ID NO: 914522
cuaguauucucuuuccaga

SEQ ID NO: 1010371 - RNA, 19 nt, Artificial Sequence
  Description of Artificial Sequence: Synthetic oligonucleotide
  Antisense strand to SEQ ID NO: 1010370
ucuggaaagagaauacuag

SEQ ID NO: 1010372 - RNA, 19 nt, Artificial Sequence
  Description of Artificial Sequence: Synthetic oligonucleotide
  Sense strand starting at position 526 of SEQ ID NO: 914522
uaaggaguaaguugucuga

SEQ ID NO: 1010373 - RNA, 19 nt, Artificial Sequence
  Description of Artificial Sequence: Synthetic oligonucleotide
  Antisense strand to SEQ ID NO: 1010372
ucagacaacuuacuccuua

SEQ ID NO: 1010374 - RNA, 19 nt, Artificial Sequence
  Description of Artificial Sequence: Synthetic oligonucleotide
  Sense strand starting at position 624 of SEQ ID NO: 914522
cuggcuggcucuuugauuu

SEQ ID NO: 1010375 - RNA, 19 nt, Artificial Sequence
  Description of Artificial Sequence: Synthetic oligonucleotide
  Antisense strand to SEQ ID NO: 1010374
aaaucaaagagccagccag

SEQ ID NO: 1010376 - RNA, 19 nt, Artificial Sequence
  Description of Artificial Sequence: Synthetic oligonucleotide
  Sense strand starting at position 925 of SEQ ID NO: 914522
aguggugcuugcucuauuu

SEQ ID NO: 1010377 - RNA, 19 nt, Artificial Sequence
  Description of Artificial Sequence: Synthetic oligonucleotide
  Antisense strand to SEQ ID NO: 1010376
aaauagagcaagcaccacu

SEQ ID NO: 1010378 - RNA, 19 nt, Artificial Sequence
  Description of Artificial Sequence: Synthetic oligonucleotide
  Sense strand starting at position 1411 of SEQ ID NO: 914522
ccagaugugcgagacaauc

SEQ ID NO: 1010379 - RNA, 19 nt, Artificial Sequence
  Description of Artificial Sequence: Synthetic oligonucleotide
  Antisense strand to SEQ ID NO: 1010378
gauugucucgcacaucugg

SEQ ID NO: 1010380 - RNA, 19 nt, Artificial Sequence
  Description of Artificial Sequence: Synthetic oligonucleotide
  Sense strand starting at position 2173 of SEQ ID NO: 914522
gggcguaggauugauucuu

SEQ ID NO: 1010381 - RNA, 19 nt, Artificial Sequence
  Description of Artificial Sequence: Synthetic oligonucleotide
  Antisense strand to SEQ ID NO: 1010380
aagaaucaauccuacgccc

SEQ ID NO: 1010382 - RNA, 19 nt, Artificial Sequence
  Description of Artificial Sequence: Synthetic oligonucleotide
  Sense strand starting at position 2181 of SEQ ID NO: 914522
gauugauucuuugcaggag

SEQ ID NO: 1010383 - RNA, 19 nt, Artificial Sequence
  Description of Artificial Sequence: Synthetic oligonucleotide
  Antisense strand to SEQ ID NO: 1010382
cuccugcaaagaaucaauc

SEQ ID NO: 1010384 - RNA, 19 nt, Artificial Sequence
  Description of Artificial Sequence: Synthetic oligonucleotide
  Sense strand starting at position 2184 of SEQ ID NO: 914522
ugauucuuugcaggaggca

SEQ ID NO: 1010385 - RNA, 19 nt, Artificial Sequence
  Description of Artificial Sequence: Synthetic oligonucleotide
  Antisense strand to SEQ ID NO: 1010384
ugccuccugcaaagaauca

SEQ ID NO: 1010386 - RNA, 19 nt, Artificial Sequence
  Description of Artificial Sequence: Synthetic oligonucleotide
  Sense strand starting at position 2185 of SEQ ID NO: 914522
gauucuuugcaggaggcau

SEQ ID NO: 1010387 - RNA, 19 nt, Artificial Sequence
  Description of Artificial Sequence: Synthetic oligonucleotide
  Antisense strand to SEQ ID NO: 1010386
augccuccugcaaagaauc

SEQ ID NO: 1010388 - RNA, 19 nt, Artificial Sequence
  Description of Artificial Sequence: Synthetic oligonucleotide
  Sense strand starting at position 2643 of SEQ ID NO: 914522
cgcuuucuacugucgguau

SEQ ID NO: 1010389 - RNA, 19 nt, Artificial Sequence
  Description of Artificial Sequence: Synthetic oligonucleotide
  Antisense strand to SEQ ID NO: 1010388
auaccgacaguagaaagcg

SEQ ID NO: 1010390 - RNA, 19 nt, Artificial Sequence
  Description of Artificial Sequence: Synthetic oligonucleotide
  Sense strand starting at position 2743 of SEQ ID NO: 914522
gaggucuaucgagaugcuu

SEQ ID NO: 1010391 - RNA, 19 nt, Artificial Sequence
  Description of Artificial Sequence: Synthetic oligonucleotide
  Antisense strand to SEQ ID NO: 1010390
aagcaucucgauagaccuc

SEQ ID NO: 1010392 - RNA, 19 nt, Artificial Sequence
  Description of Artificial Sequence: Synthetic oligonucleotide
  Sense strand starting at position 3235 of SEQ ID NO: 914522
gccagcgcucuugagaaga

SEQ ID NO: 1010393 - RNA, 19 nt, Artificial Sequence
  Description of Artificial Sequence: Synthetic oligonucleotide
  Antisense strand to SEQ ID NO: 1010392
ucuucucaagagcgcuggc

SEQ ID NO: 1010394 - RNA, 19 nt, Artificial Sequence
  Description of Artificial Sequence: Synthetic oligonucleotide
  Sense strand starting at position 3288 of SEQ ID NO: 914522
gucacacauuugcaaugaa

SEQ ID NO: 1010395 - RNA, 19 nt, Artificial Sequence
  Description of Artificial Sequence: Synthetic oligonucleotide
  Antisense strand to SEQ ID NO: 1010394
uucauugcaaaugugugac

SEQ ID NO: 1010396 - RNA, 19 nt, Artificial Sequence
  Description of Artificial Sequence: Synthetic oligonucleotide
  Sense strand starting at position 3305 of SEQ ID NO: 914522
aaaugcaaauguguaauga

SEQ ID NO: 1010397 - RNA, 19 nt, Artificial Sequence
  Description of Artificial Sequence: Synthetic oligonucleotide
  Antisense strand to SEQ ID NO: 1010396
ucauuacacauuugcauuu

SEQ ID NO: 1010398 - RNA, 19 nt, Artificial Sequence
  Description of Artificial Sequence: Synthetic oligonucleotide
  Sense strand starting at position 3306 of SEQ ID NO: 914522
aaugcaaauguguaaugaa

SEQ ID NO: 1010399 - RNA, 19 nt, Artificial Sequence
  Description of Artificial Sequence: Synthetic oligonucleotide
  Antisense strand to SEQ ID NO: 1010398
uucauuacacauuugcauu

SEQ ID NO: 1010400 - RNA, 19 nt, Artificial Sequence
  Description of Artificial Sequence: Synthetic oligonucleotide
  Sense strand starting at position 3443 of SEQ ID NO: 914522
ggagcauugcuuuagaauu

SEQ ID NO: 1010401 - RNA, 19 nt, Artificial Sequence
  Description of Artificial Sequence: Synthetic oligonucleotide
  Antisense strand to SEQ ID NO: 1010400
aauucuaaagcaaugcucc

SEQ ID NO: 1010402 - RNA, 19 nt, Artificial Sequence
  Description of Artificial Sequence: Synthetic oligonucleotide
  Sense strand starting at position 3555 of SEQ ID NO: 914522
gugaguagaacuuggaagu

SEQ ID NO: 1010403 - RNA, 19 nt, Artificial Sequence
  Description of Artificial Sequence: Synthetic oligonucleotide
  Antisense strand to SEQ ID NO: 1010402
acuuccaaguucuacucac

SEQ ID NO: 1010404 - RNA, 19 nt, Artificial Sequence
  Description of Artificial Sequence: Synthetic oligonucleotide
  Sense strand starting at position 3556 of SEQ ID NO: 914522
ugaguagaacuuggaaguu

SEQ ID NO: 1010405 - RNA, 19 nt, Artificial Sequence
  Description of Artificial Sequence: Synthetic oligonucleotide
  Antisense strand to SEQ ID NO: 1010404
aacuuccaaguucuacuca

SEQ ID NO: 1010406 - RNA, 19 nt, Artificial Sequence
  Description of Artificial Sequence: Synthetic oligonucleotide
  Sense strand starting at position 3565 of SEQ ID NO: 914522
cuuggaaguugacauuuaa

SEQ ID NO: 1010407 - RNA, 19 nt, Artificial Sequence
  Description of Artificial Sequence: Synthetic oligonucleotide
  Antisense strand to SEQ ID NO: 1010406
uuaaaugucaacuuccaag

SEQ ID NO: 1010408 - RNA, 19 nt, Artificial Sequence
  Description of Artificial Sequence: Synthetic oligonucleotide
  Sense strand starting at position 3602 of SEQ ID NO: 914522
ugucaugaacaccaaguau

SEQ ID NO: 1010409 - RNA, 19 nt, Artificial Sequence
  Description of Artificial Sequence: Synthetic oligonucleotide
  Antisense strand to SEQ ID NO: 1010408
auacuugguguucaugaca

SEQ ID NO: 1010410 - RNA, 19 nt, Artificial Sequence
  Description of Artificial Sequence: Synthetic oligonucleotide
  Sense strand starting at position 3885 of SEQ ID NO: 914522
aggucucuuugacuccgaa

SEQ ID NO: 1010411 - RNA, 19 nt, Artificial Sequence
  Description of Artificial Sequence: Synthetic oligonucleotide
  Antisense strand to SEQ ID NO: 1010410
uucggagucaaagagaccu

SEQ ID NO: 1010412 - RNA, 19 nt, Artificial Sequence
  Description of Artificial Sequence: Synthetic oligonucleotide
  Sense strand starting at position 3888 of SEQ ID NO: 914522
ucucuuugacuccgaagua

SEQ ID NO: 1010413 - RNA, 19 nt, Artificial Sequence
  Description of Artificial Sequence: Synthetic oligonucleotide
  Antisense strand to SEQ ID NO: 1010412
uacuucggagucaaagaga

SEQ ID NO: 1010414 - RNA, 19 nt, Artificial Sequence
  Description of Artificial Sequence: Synthetic oligonucleotide
  Sense strand starting at position 152 of SEQ ID NO: 914523
guccucuucucuucugaga

SEQ ID NO: 1010415 - RNA, 19 nt, Artificial Sequence
  Description of Artificial Sequence: Synthetic oligonucleotide
  Antisense strand to SEQ ID NO: 1010414
ucucagaagagaagaggac

SEQ ID NO: 1010416 - RNA, 19 nt, Artificial Sequence
  Description of Artificial Sequence: Synthetic oligonucleotide
  Sense strand starting at position 716 of SEQ ID NO: 914523
agcagagguucuuuacagu

SEQ ID NO: 1010417 - RNA, 19 nt, Artificial Sequence
  Description of Artificial Sequence: Synthetic oligonucleotide
  Antisense strand to SEQ ID NO: 1010416
acuguaaagaaccucugcu

SEQ ID NO: 1010418 - RNA, 19 nt, Artificial Sequence
  Description of Artificial Sequence: Synthetic oligonucleotide
  Sense strand starting at position 749 of SEQ ID NO: 914523
uucuguaguaggcagaauu

SEQ ID NO: 1010419 - RNA, 19 nt, Artificial Sequence
  Description of Artificial Sequence: Synthetic oligonucleotide
  Antisense strand to SEQ ID NO: 1010418
aauucugccuacuacagaa

SEQ ID NO: 1010420 - RNA, 19 nt, Artificial Sequence
  Description of Artificial Sequence: Synthetic oligonucleotide
  Sense strand starting at position 793 of SEQ ID NO: 914523
gugucaugcgggugaauau

SEQ ID NO: 1010421 - RNA, 19 nt, Artificial Sequence
  Description of Artificial Sequence: Synthetic oligonucleotide
  Antisense strand to SEQ ID NO: 1010420
auauucacccgcaugacac

SEQ ID NO: 1010422 - RNA, 19 nt, Artificial Sequence
  Description of Artificial Sequence: Synthetic oligonucleotide
  Sense strand starting at position 800 of SEQ ID NO: 914523
gcgggugaauauguuauau

SEQ ID NO: 1010423 - RNA, 19 nt, Artificial Sequence
  Description of Artificial Sequence: Synthetic oligonucleotide
  Antisense strand to SEQ ID NO: 1010422
auauaacauauucacccgc

SEQ ID NO: 1010424 - RNA, 19 nt, Artificial Sequence
  Description of Artificial Sequence: Synthetic oligonucleotide
  Sense strand starting at position 844 of SEQ ID NO: 914523
cguaauuaagguuaccagu

SEQ ID NO: 1010425 - RNA, 19 nt, Artificial Sequence
  Description of Artificial Sequence: Synthetic oligonucleotide
  Antisense strand to SEQ ID NO: 1010424
acugguaaccuuaauuacg

SEQ ID NO: 1010426 - RNA, 19 nt, Artificial Sequence
  Description of Artificial Sequence: Synthetic oligonucleotide
  Sense strand starting at position 851 of SEQ ID NO: 914523
aagguuaccagucgacagu

SEQ ID NO: 1010427 - RNA, 19 nt, Artificial Sequence
  Description of Artificial Sequence: Synthetic oligonucleotide
  Antisense strand to SEQ ID NO: 1010426
acugucgacugguaaccuu

SEQ ID NO: 1010428 - RNA, 19 nt, Artificial Sequence
  Description of Artificial Sequence: Synthetic oligonucleotide
  Sense strand starting at position 857 of SEQ ID NO: 914523
accagucgacaguaacaua

SEQ ID NO: 1010429 - RNA, 19 nt, Artificial Sequence
  Description of Artificial Sequence: Synthetic oligonucleotide
  Antisense strand to SEQ ID NO: 1010428
uauguuacugucgacuggu

SEQ ID NO: 1010430 - RNA, 19 nt, Artificial Sequence
  Description of Artificial Sequence: Synthetic oligonucleotide
  Sense strand starting at position 903 of SEQ ID NO: 914523
guuccaaaguaaucacaug

SEQ ID NO: 1010431 - RNA, 19 nt, Artificial Sequence
  Description of Artificial Sequence: Synthetic oligonucleotide
  Antisense strand to SEQ ID NO: 1010430
caugugauuacuuuggaac

SEQ ID NO: 1010432 - RNA, 19 nt, Artificial Sequence
  Description of Artificial Sequence: Synthetic oligonucleotide
  Sense strand starting at position 911 of SEQ ID NO: 914523
guaaucacaugagcucuua

SEQ ID NO: 1010433 - RNA, 19 nt, Artificial Sequence
  Description of Artificial Sequence: Synthetic oligonucleotide
  Antisense strand to SEQ ID NO: 1010432
uaagagcucaugugauuac

SEQ ID NO: 1010434 - RNA, 19 nt, Artificial Sequence
  Description of Artificial Sequence: Synthetic oligonucleotide
  Sense strand starting at position 950 of SEQ ID NO: 914523
gcuguagacaagugaugga

SEQ ID NO: 1010435 - RNA, 19 nt, Artificial Sequence
  Description of Artificial Sequence: Synthetic oligonucleotide
  Antisense strand to SEQ ID NO: 1010434
uccaucacuugucuacagc

SEQ ID NO: 1010436 - RNA, 19 nt, Artificial Sequence
  Description of Artificial Sequence: Synthetic oligonucleotide
  Sense strand starting at position 999 of SEQ ID NO: 914523
gcaggaaagauucgaugug

SEQ ID NO: 1010437 - RNA, 19 nt, Artificial Sequence
  Description of Artificial Sequence: Synthetic oligonucleotide
  Antisense strand to SEQ ID NO: 1010436
cacaucgaaucuuuccugc

SEQ ID NO: 1010438 - RNA, 19 nt, Artificial Sequence
  Description of Artificial Sequence: Synthetic oligonucleotide
  Sense strand starting at position 1005 of SEQ ID NO: 914523
aagauucgaugugucauua

SEQ ID NO: 1010439 - RNA, 19 nt, Artificial Sequence
  Description of Artificial Sequence: Synthetic oligonucleotide
  Antisense strand to SEQ ID NO: 1010438
uaaugacacaucgaaucuu

SEQ ID NO: 1010440 - RNA, 19 nt, Artificial Sequence
  Description of Artificial Sequence: Synthetic oligonucleotide
  Sense strand starting at position 1081 of SEQ ID NO: 914523
ccacaauauuuacgguaga

SEQ ID NO: 1010441 - RNA, 19 nt, Artificial Sequence
  Description of Artificial Sequence: Synthetic oligonucleotide
  Antisense strand to SEQ ID NO: 1010440
ucuaccguaaauauugugg

SEQ ID NO: 1010442 - RNA, 19 nt, Artificial Sequence
  Description of Artificial Sequence: Synthetic oligonucleotide
  Sense strand starting at position 1082 of SEQ ID NO: 914523
cacaauauuuacgguagau

SEQ ID NO: 1010443 - RNA, 19 nt, Artificial Sequence
  Description of Artificial Sequence: Synthetic oligonucleotide
  Antisense strand to SEQ ID NO: 1010442
aucuaccguaaauauugug

SEQ ID NO: 1010444 - RNA, 19 nt, Artificial Sequence
  Description of Artificial Sequence: Synthetic oligonucleotide
  Sense strand starting at position 1094 of SEQ ID NO: 914523
gguagaucuaucugacugu

SEQ ID NO: 1010445 - RNA, 19 nt, Artificial Sequence
  Description of Artificial Sequence: Synthetic oligonucleotide
  Antisense strand to SEQ ID NO: 1010444
acagucagauagaucuacc

SEQ ID NO: 1010446 - RNA, 19 nt, Artificial Sequence
  Description of Artificial Sequence: Synthetic oligonucleotide
  Sense strand starting at position 1097 of SEQ ID NO: 914523
agaucuaucugacugucaa

SEQ ID NO: 1010447 - RNA, 19 nt, Artificial Sequence
  Description of Artificial Sequence: Synthetic oligonucleotide
  Antisense strand to SEQ ID NO: 1010446
uugacagucagauagaucu

SEQ ID NO: 1010448 - RNA, 19 nt, Artificial Sequence
  Description of Artificial Sequence: Synthetic oligonucleotide
  Sense strand starting at position 1202 of SEQ ID NO: 914523
ccugucugugucgaguuaa

SEQ ID NO: 1010449 - RNA, 19 nt, Artificial Sequence
  Description of Artificial Sequence: Synthetic oligonucleotide
  Antisense strand to SEQ ID NO: 1010448
uuaacucgacacagacagg

SEQ ID NO: 1010450 - RNA, 19 nt, Artificial Sequence
  Description of Artificial Sequence: Synthetic oligonucleotide
  Sense strand starting at position 1221 of SEQ ID NO: 914523
ggguguuccucuccuuacu

SEQ ID NO: 1010451 - RNA, 19 nt, Artificial Sequence
  Description of Artificial Sequence: Synthetic oligonucleotide
  Antisense strand to SEQ ID NO: 1010450
aguaaggagaggaacaccc

SEQ ID NO: 1010452 - RNA, 19 nt, Artificial Sequence
  Description of Artificial Sequence: Synthetic oligonucleotide
  Sense strand starting at position 1223 of SEQ ID NO: 914523
guguuccucuccuuacuau

SEQ ID NO: 1010453 - RNA, 19 nt, Artificial Sequence
  Description of Artificial Sequence: Synthetic oligonucleotide
  Antisense strand to SEQ ID NO: 1010452
auaguaaggagaggaacac

SEQ ID NO: 1010454 - RNA, 19 nt, Artificial Sequence
  Description of Artificial Sequence: Synthetic oligonucleotide
  Sense strand starting at position 1256 of SEQ ID NO: 914523
aucuuuauuguguaaccaa

SEQ ID NO: 1010455 - RNA, 19 nt, Artificial Sequence
  Description of Artificial Sequence: Synthetic oligonucleotide
  Antisense strand to SEQ ID NO: 1010454
uugguuacacaauaaagau

SEQ ID NO: 1010456 - RNA, 19 nt, Artificial Sequence
  Description of Artificial Sequence: Synthetic oligonucleotide
  Sense strand starting at position 1259 of SEQ ID NO: 914523
uuuauuguguaaccaaacu

SEQ ID NO: 1010457 - RNA, 19 nt, Artificial Sequence
  Description of Artificial Sequence: Synthetic oligonucleotide
  Antisense strand to SEQ ID NO: 1010456
aguuugguuacacaauaaa

SEQ ID NO: 1010458 - RNA, 19 nt, Artificial Sequence
  Description of Artificial Sequence: Synthetic oligonucleotide
  Sense strand starting at position 1409 of SEQ ID NO: 914523
gcgccagaccuccaguaaa

SEQ ID NO: 1010459 - RNA, 19 nt, Artificial Sequence
  Description of Artificial Sequence: Synthetic oligonucleotide
  Antisense strand to SEQ ID NO: 1010458
uuuacuggaggucuggcgc

SEQ ID NO: 1010460 - RNA, 19 nt, Artificial Sequence
  Description of Artificial Sequence: Synthetic oligonucleotide
  Sense strand starting at position 1420 of SEQ ID NO: 914523
ccaguaaauaggcgaguua

SEQ ID NO: 1010461 - RNA, 19 nt, Artificial Sequence
  Description of Artificial Sequence: Synthetic oligonucleotide
  Antisense strand to SEQ ID NO: 1010460
uaacucgccuauuuacugg

SEQ ID NO: 1010462 - RNA, 19 nt, Artificial Sequence
  Description of Artificial Sequence: Synthetic oligonucleotide
  Sense strand starting at position 1421 of SEQ ID NO: 914523
caguaaauaggcgaguuaa

SEQ ID NO: 1010463 - RNA, 19 nt, Artificial Sequence
  Description of Artificial Sequence: Synthetic oligonucleotide
  Antisense strand to SEQ ID NO: 1010462
uuaacucgccuauuuacug

SEQ ID NO: 1010464 - RNA, 19 nt, Artificial Sequence
  Description of Artificial Sequence: Synthetic oligonucleotide
  Sense strand starting at position 1565 of SEQ ID NO: 914523
ggaaauuccggccggagaa

SEQ ID NO: 1010465 - RNA, 19 nt, Artificial Sequence
  Description of Artificial Sequence: Synthetic oligonucleotide
  Antisense strand to SEQ ID NO: 1010464
uucuccggccggaauuucc

SEQ ID NO: 1010466 - RNA, 19 nt, Artificial Sequence
  Description of Artificial Sequence: Synthetic oligonucleotide
  Sense strand starting at position 1566 of SEQ ID NO: 914523
gaaauuccggccggagaaa

SEQ ID NO: 1010467 - RNA, 19 nt, Artificial Sequence
  Description of Artificial Sequence: Synthetic oligonucleotide
  Antisense strand to SEQ ID NO: 1010466
uuucuccggccggaauuuc

SEQ ID NO: 1010468 - RNA, 19 nt, Artificial Sequence
  Description of Artificial Sequence: Synthetic oligonucleotide
  Sense strand starting at position 1779 of SEQ ID NO: 914523
ccuaccucucagcgaugua

SEQ ID NO: 1010469 - RNA, 19 nt, Artificial Sequence
  Description of Artificial Sequence: Synthetic oligonucleotide
  Antisense strand to SEQ ID NO: 1010468
uacaucgcugagagguagg

SEQ ID NO: 1010470 - RNA, 19 nt, Artificial Sequence
  Description of Artificial Sequence: Synthetic oligonucleotide
  Sense strand starting at position 1782 of SEQ ID NO: 914523
accucucagcgauguaaag

SEQ ID NO: 1010471 - RNA, 19 nt, Artificial Sequence
  Description of Artificial Sequence: Synthetic oligonucleotide
  Antisense strand to SEQ ID NO: 1010470
cuuuacaucgcugagaggu

SEQ ID NO: 1010472 - RNA, 19 nt, Artificial Sequence
  Description of Artificial Sequence: Synthetic oligonucleotide
  Sense strand starting at position 1940 of SEQ ID NO: 914523
ggaguuggagcacagcaau

SEQ ID NO: 1010473 - RNA, 19 nt, Artificial Sequence
  Description of Artificial Sequence: Synthetic oligonucleotide
  Antisense strand to SEQ ID NO: 1010472
auugcugugcuccaacucc

SEQ ID NO: 1010474 - RNA, 19 nt, Artificial Sequence
  Description of Artificial Sequence: Synthetic oligonucleotide
  Sense strand starting at position 2033 of SEQ ID NO: 914523
cgccgucgaccauagagau

SEQ ID NO: 1010475 - RNA, 19 nt, Artificial Sequence
  Description of Artificial Sequence: Synthetic oligonucleotide
  Antisense strand to SEQ ID NO: 1010474
aucucuauggucgacggcg

SEQ ID NO: 1010476 - RNA, 19 nt, Artificial Sequence
  Description of Artificial Sequence: Synthetic oligonucleotide
  Sense strand starting at position 2179 of SEQ ID NO: 914523
gucccucaggauugucaca

SEQ ID NO: 1010477 - RNA, 19 nt, Artificial Sequence
  Description of Artificial Sequence: Synthetic oligonucleotide
  Antisense strand to SEQ ID NO: 1010476
ugugacaauccugagggac

SEQ ID NO: 1010478 - RNA, 19 nt, Artificial Sequence
  Description of Artificial Sequence: Synthetic oligonucleotide
  Sense strand starting at position 2181 of SEQ ID NO: 914523
cccucaggauugucacagu

SEQ ID NO: 1010479 - RNA, 19 nt, Artificial Sequence
  Description of Artificial Sequence: Synthetic oligonucleotide
  Antisense strand to SEQ ID NO: 1010478
acugugacaauccugaggg

SEQ ID NO: 1010480 - RNA, 19 nt, Artificial Sequence
  Description of Artificial Sequence: Synthetic oligonucleotide
  Sense strand starting at position 2232 of SEQ ID NO: 914523
cugaaagcgaucugaccua

SEQ ID NO: 1010481 - RNA, 19 nt, Artificial Sequence
  Description of Artificial Sequence: Synthetic oligonucleotide
  Antisense strand to SEQ ID NO: 1010480
uaggucagaucgcuuucag

SEQ ID NO: 1010482 - RNA, 19 nt, Artificial Sequence
  Description of Artificial Sequence: Synthetic oligonucleotide
  Sense strand starting at position 3082 of SEQ ID NO: 914523
cccugaaugcucugggaaa

SEQ ID NO: 1010483 - RNA, 19 nt, Artificial Sequence
  Description of Artificial Sequence: Synthetic oligonucleotide
  Antisense strand to SEQ ID NO: 1010482
uuucccagagcauucaggg

SEQ ID NO: 1010484 - RNA, 19 nt, Artificial Sequence
  Description of Artificial Sequence: Synthetic oligonucleotide
  Sense strand starting at position 3084 of SEQ ID NO: 914523
cugaaugcucugggaaacu

SEQ ID NO: 1010485 - RNA, 19 nt, Artificial Sequence
  Description of Artificial Sequence: Synthetic oligonucleotide
  Antisense strand to SEQ ID NO: 1010484
aguuucccagagcauucag

SEQ ID NO: 1010486 - RNA, 19 nt, Artificial Sequence
  Description of Artificial Sequence: Synthetic oligonucleotide
  Sense strand starting at position 3096 of SEQ ID NO: 914523
ggaaacugauuugaguaaa

SEQ ID NO: 1010487 - RNA, 19 nt, Artificial Sequence
  Description of Artificial Sequence: Synthetic oligonucleotide
  Antisense strand to SEQ ID NO: 1010486
uuuacucaaaucaguuucc

SEQ ID NO: 1010488 - RNA, 19 nt, Artificial Sequence
  Description of Artificial Sequence: Synthetic oligonucleotide
  Sense strand starting at position 3446 of SEQ ID NO: 914523
gcagcucugcgugaauuac

SEQ ID NO: 1010489 - RNA, 19 nt, Artificial Sequence
  Description of Artificial Sequence: Synthetic oligonucleotide
  Antisense strand to SEQ ID NO: 1010488
guaauucacgcagagcugc

SEQ ID NO: 1010490 - RNA, 19 nt, Artificial Sequence
  Description of Artificial Sequence: Synthetic oligonucleotide
  Sense strand starting at position 3672 of SEQ ID NO: 914523
gaguaauacaccgguggca

SEQ ID NO: 1010491 - RNA, 19 nt, Artificial Sequence
  Description of Artificial Sequence: Synthetic oligonucleotide
  Antisense strand to SEQ ID NO: 1010490
ugccaccgguguauuacuc

SEQ ID NO: 1010492 - RNA, 19 nt, Artificial Sequence
  Description of Artificial Sequence: Synthetic oligonucleotide
  Sense strand starting at position 3674 of SEQ ID NO: 914523
guaauacaccgguggcaau

SEQ ID NO: 1010493 - RNA, 19 nt, Artificial Sequence
  Description of Artificial Sequence: Synthetic oligonucleotide
  Antisense strand to SEQ ID NO: 1010492
auugccaccgguguauuac

SEQ ID NO: 1010494 - RNA, 19 nt, Artificial Sequence
  Description of Artificial Sequence: Synthetic oligonucleotide
  Sense strand starting at position 280 of SEQ ID NO: 914524
agcugcugugccuagaaca

SEQ ID NO: 1010495 - RNA, 19 nt, Artificial Sequence
  Description of Artificial Sequence: Synthetic oligonucleotide
  Antisense strand to SEQ ID NO: 1010494
uguucuaggcacagcagcu

SEQ ID NO: 1010496 - RNA, 19 nt, Artificial Sequence
  Description of Artificial Sequence: Synthetic oligonucleotide
  Sense strand starting at position 322 of SEQ ID NO: 914524
auaagucagucuucuguua

SEQ ID NO: 1010497 - RNA, 19 nt, Artificial Sequence
  Description of Artificial Sequence: Synthetic oligonucleotide
  Antisense strand to SEQ ID NO: 1010496
uaacagaagacugacuuau

SEQ ID NO: 1010498 - RNA, 19 nt, Artificial Sequence
  Description of Artificial Sequence: Synthetic oligonucleotide
  Sense strand starting at position 1250 of SEQ ID NO: 914524
auguaagacuuaggcauuu

SEQ ID NO: 1010499 - RNA, 19 nt, Artificial Sequence
  Description of Artificial Sequence: Synthetic oligonucleotide
  Antisense strand to SEQ ID NO: 1010498
aaaugccuaagucuuacau

SEQ ID NO: 1010500 - RNA, 19 nt, Artificial Sequence
  Description of Artificial Sequence: Synthetic oligonucleotide
  Sense strand starting at position 1318 of SEQ ID NO: 914524
accucaauacauugaguga

SEQ ID NO: 1010501 - RNA, 19 nt, Artificial Sequence
  Description of Artificial Sequence: Synthetic oligonucleotide
  Antisense strand to SEQ ID NO: 1010500
ucacucaauguauugaggu

SEQ ID NO: 1010502 - RNA, 19 nt, Artificial Sequence
  Description of Artificial Sequence: Synthetic oligonucleotide
  Sense strand starting at position 1321 of SEQ ID NO: 914524
ucaauacauugagugaauu

SEQ ID NO: 1010503 - RNA, 19 nt, Artificial Sequence
  Description of Artificial Sequence: Synthetic oligonucleotide
  Antisense strand to SEQ ID NO: 1010502
aauucacucaauguauuga

SEQ ID NO: 1010504 - RNA, 19 nt, Artificial Sequence
  Description of Artificial Sequence: Synthetic oligonucleotide
  Sense strand starting at position 1333 of SEQ ID NO: 914524
gugaauuaaugucucagac

SEQ ID NO: 1010505 - RNA, 19 nt, Artificial Sequence
  Description of Artificial Sequence: Synthetic oligonucleotide
  Antisense strand to SEQ ID NO: 1010504
gucugagacauuaauucac

SEQ ID NO: 1010506 - RNA, 19 nt, Artificial Sequence
  Description of Artificial Sequence: Synthetic oligonucleotide
  Sense strand starting at position 1424 of SEQ ID NO: 914524
cuccaaacuugagaaggua

SEQ ID NO: 1010507 - RNA, 19 nt, Artificial Sequence
  Description of Artificial Sequence: Synthetic oligonucleotide
  Antisense strand to SEQ ID NO: 1010506
uaccuucucaaguuuggag

SEQ ID NO: 1010508 - RNA, 19 nt, Artificial Sequence
  Description of Artificial Sequence: Synthetic oligonucleotide
  Sense strand starting at position 1482 of SEQ ID NO: 914524
gggcgucugaaauacggau

SEQ ID NO: 1010509 - RNA, 19 nt, Artificial Sequence
  Description of Artificial Sequence: Synthetic oligonucleotide
  Antisense strand to SEQ ID NO: 1010508
auccguauuucagacgccc

SEQ ID NO: 1010510 - RNA, 19 nt, Artificial Sequence
  Description of Artificial Sequence: Synthetic oligonucleotide
  Sense strand starting at position 1486 of SEQ ID NO: 914524
gucugaaauacggaugcaa

SEQ ID NO: 1010511 - RNA, 19 nt, Artificial Sequence
  Description of Artificial Sequence: Synthetic oligonucleotide
  Antisense strand to SEQ ID NO: 1010510
uugcauccguauuucagac

SEQ ID NO: 1010512 - RNA, 19 nt, Artificial Sequence
  Description of Artificial Sequence: Synthetic oligonucleotide
  Sense strand starting at position 1538 of SEQ ID NO: 914524
gccuaauccucgucucugu

SEQ ID NO: 1010513 - RNA, 19 nt, Artificial Sequence
  Description of Artificial Sequence: Synthetic oligonucleotide
  Antisense strand to SEQ ID NO: 1010512
acagagacgaggauuaggc

SEQ ID NO: 1010514 - RNA, 19 nt, Artificial Sequence
  Description of Artificial Sequence: Synthetic oligonucleotide
  Sense strand starting at position 1543 of SEQ ID NO: 914524
auccucgucucuguaacua

SEQ ID NO: 1010515 - RNA, 19 nt, Artificial Sequence
  Description of Artificial Sequence: Synthetic oligonucleotide
  Antisense strand to SEQ ID NO: 1010514
uaguuacagagacgaggau

SEQ ID NO: 1010516 - RNA, 19 nt, Artificial Sequence
  Description of Artificial Sequence: Synthetic oligonucleotide
  Sense strand starting at position 1562 of SEQ ID NO: 914524
cuaguagugucuuuagaca

SEQ ID NO: 1010517 - RNA, 19 nt, Artificial Sequence
  Description of Artificial Sequence: Synthetic oligonucleotide
  Antisense strand to SEQ ID NO: 1010516
ugucuaaagacacuacuag

SEQ ID NO: 1010518 - RNA, 19 nt, Artificial Sequence
  Description of Artificial Sequence: Synthetic oligonucleotide
  Sense strand starting at position 1634 of SEQ ID NO: 914524
ccucaaauacaguguuguu

SEQ ID NO: 1010519 - RNA, 19 nt, Artificial Sequence
  Description of Artificial Sequence: Synthetic oligonucleotide
  Antisense strand to SEQ ID NO: 1010518
aacaacacuguauuugagg

SEQ ID NO: 1010520 - RNA, 19 nt, Artificial Sequence
  Description of Artificial Sequence: Synthetic oligonucleotide
  Sense strand starting at position 1664 of SEQ ID NO: 914524
caggaauugugggaggaaa

SEQ ID NO: 1010521 - RNA, 19 nt, Artificial Sequence
  Description of Artificial Sequence: Synthetic oligonucleotide
  Antisense strand to SEQ ID NO: 1010520
uuuccucccacaauuccug

SEQ ID NO: 1010522 - RNA, 19 nt, Artificial Sequence
  Description of Artificial Sequence: Synthetic oligonucleotide
  Sense strand starting at position 1713 of SEQ ID NO: 914524
aggaaacgauaugaauuau

SEQ ID NO: 1010523 - RNA, 19 nt, Artificial Sequence
  Description of Artificial Sequence: Synthetic oligonucleotide
  Antisense strand to SEQ ID NO: 1010522
auaauucauaucguuuccu

SEQ ID NO: 1010524 - RNA, 19 nt, Artificial Sequence
  Description of Artificial Sequence: Synthetic oligonucleotide
  Sense strand starting at position 1724 of SEQ ID NO: 914524
ugaauuauuucugauccug

SEQ ID NO: 1010525 - RNA, 19 nt, Artificial Sequence
  Description of Artificial Sequence: Synthetic oligonucleotide
  Antisense strand to SEQ ID NO: 1010524
caggaucagaaauaauuca

SEQ ID NO: 1010526 - RNA, 19 nt, Artificial Sequence
  Description of Artificial Sequence: Synthetic oligonucleotide
  Sense strand starting at position 1846 of SEQ ID NO: 914524
ggaggugacaguuguguuc

SEQ ID NO: 1010527 - RNA, 19 nt, Artificial Sequence
  Description of Artificial Sequence: Synthetic oligonucleotide
  Antisense strand to SEQ ID NO: 1010526
gaacacaacugucaccucc

SEQ ID NO: 1010528 - RNA, 19 nt, Artificial Sequence
  Description of Artificial Sequence: Synthetic oligonucleotide
  Sense strand starting at position 1855 of SEQ ID NO: 914524
aguuguguuccugcccuuu

SEQ ID NO: 1010529 - RNA, 19 nt, Artificial Sequence
  Description of Artificial Sequence: Synthetic oligonucleotide
  Antisense strand to SEQ ID NO: 1010528
aaagggcaggaacacaacu

SEQ ID NO: 1010530 - RNA, 19 nt, Artificial Sequence
  Description of Artificial Sequence: Synthetic oligonucleotide
  Sense strand starting at position 2033 of SEQ ID NO: 914524
cccuuugggauguguaguu

SEQ ID NO: 1010531 - RNA, 19 nt, Artificial Sequence
  Description of Artificial Sequence: Synthetic oligonucleotide
  Antisense strand to SEQ ID NO: 1010530
aacuacacaucccaaaggg

SEQ ID NO: 1010532 - RNA, 19 nt, Artificial Sequence
  Description of Artificial Sequence: Synthetic oligonucleotide
  Sense strand starting at position 2092 of SEQ ID NO: 914524
cggccuucugggaguugua

SEQ ID NO: 1010533 - RNA, 19 nt, Artificial Sequence
  Description of Artificial Sequence: Synthetic oligonucleotide
  Antisense strand to SEQ ID NO: 1010532
uacaacucccagaaggccg

SEQ ID NO: 1010534 - RNA, 19 nt, Artificial Sequence
  Description of Artificial Sequence: Synthetic oligonucleotide
  Sense strand starting at position 2105 of SEQ ID NO: 914524
guuguagucaaaggauugu

SEQ ID NO: 1010535 - RNA, 19 nt, Artificial Sequence
  Description of Artificial Sequence: Synthetic oligonucleotide
  Antisense strand to SEQ ID NO: 1010534
acaauccuuugacuacaac

SEQ ID NO: 1010536 - RNA, 19 nt, Artificial Sequence
  Description of Artificial Sequence: Synthetic oligonucleotide
  Sense strand starting at position 2154 of SEQ ID NO: 914524
ggcuguugucauuauucgu

SEQ ID NO: 1010537 - RNA, 19 nt, Artificial Sequence
  Description of Artificial Sequence: Synthetic oligonucleotide
  Antisense strand to SEQ ID NO: 1010536
acgaauaaugacaacagcc

SEQ ID NO: 1010538 - RNA, 19 nt, Artificial Sequence
  Description of Artificial Sequence: Synthetic oligonucleotide
  Sense strand starting at position 2571 of SEQ ID NO: 914524
agcuacaagucagucauua

SEQ ID NO: 1010539 - RNA, 19 nt, Artificial Sequence
  Description of Artificial Sequence: Synthetic oligonucleotide
  Antisense strand to SEQ ID NO: 1010538
uaaugacugacuuguagcu

SEQ ID NO: 1010540 - RNA, 19 nt, Artificial Sequence
  Description of Artificial Sequence: Synthetic oligonucleotide
  Sense strand starting at position 2575 of SEQ ID NO: 914524
acaagucagucauuaccca

SEQ ID NO: 1010541 - RNA, 19 nt, Artificial Sequence
  Description of Artificial Sequence: Synthetic oligonucleotide
  Antisense strand to SEQ ID NO: 1010540
uggguaaugacugacuugu

SEQ ID NO: 1010542 - RNA, 19 nt, Artificial Sequence
  Description of Artificial Sequence: Synthetic oligonucleotide
  Sense strand starting at position 2579 of SEQ ID NO: 914524
gucagucauuacccaacaa

SEQ ID NO: 1010543 - RNA, 19 nt, Artificial Sequence
  Description of Artificial Sequence: Synthetic oligonucleotide
  Antisense strand to SEQ ID NO: 1010542
uuguuggguaaugacugac

SEQ ID NO: 1010544 - RNA, 19 nt, Artificial Sequence
  Description of Artificial Sequence: Synthetic oligonucleotide
  Sense strand starting at position 2763 of SEQ ID NO: 914524
cuuacauuacugugugacu

SEQ ID NO: 1010545 - RNA, 19 nt, Artificial Sequence
  Description of Artificial Sequence: Synthetic oligonucleotide
  Antisense strand to SEQ ID NO: 1010544
agucacacaguaauguaag

SEQ ID NO: 1010546 - RNA, 19 nt, Artificial Sequence
  Description of Artificial Sequence: Synthetic oligonucleotide
  Sense strand starting at position 2764 of SEQ ID NO: 914524
uuacauuacugugugacuu

SEQ ID NO: 1010547 - RNA, 19 nt, Artificial Sequence
  Description of Artificial Sequence: Synthetic oligonucleotide
  Antisense strand to SEQ ID NO: 1010546
aagucacacaguaauguaa

SEQ ID NO: 1010548 - RNA, 19 nt, Artificial Sequence
  Description of Artificial Sequence: Synthetic oligonucleotide
  Sense strand starting at position 2914 of SEQ ID NO: 914524
ugggcucaagcgugauauc

SEQ ID NO: 1010549 - RNA, 19 nt, Artificial Sequence
  Description of Artificial Sequence: Synthetic oligonucleotide
  Antisense strand to SEQ ID NO: 1010548
gauaucacgcuugagccca

SEQ ID NO: 1010550 - RNA, 19 nt, Artificial Sequence
  Description of Artificial Sequence: Synthetic oligonucleotide
  Sense strand starting at position 2940 of SEQ ID NO: 914524
gucugcaaaguugggauaa

SEQ ID NO: 1010551 - RNA, 19 nt, Artificial Sequence
  Description of Artificial Sequence: Synthetic oligonucleotide
  Antisense strand to SEQ ID NO: 1010550
uuaucccaacuuugcagac

SEQ ID NO: 1010552 - RNA, 19 nt, Artificial Sequence
  Description of Artificial Sequence: Synthetic oligonucleotide
  Sense strand starting at position 2942 of SEQ ID NO: 914524
cugcaaaguugggauaaua

SEQ ID NO: 1010553 - RNA, 19 nt, Artificial Sequence
  Description of Artificial Sequence: Synthetic oligonucleotide
  Antisense strand to SEQ ID NO: 1010552
uauuaucccaacuuugcag

SEQ ID NO: 1010554 - RNA, 19 nt, Artificial Sequence
  Description of Artificial Sequence: Synthetic oligonucleotide
  Sense strand starting at position 2953 of SEQ ID NO: 914524
ggauaauaacagugcccaa

SEQ ID NO: 1010555 - RNA, 19 nt, Artificial Sequence
  Description of Artificial Sequence: Synthetic oligonucleotide
  Antisense strand to SEQ ID NO: 1010554
uugggcacuguuauuaucc

SEQ ID NO: 1010556 - RNA, 19 nt, Artificial Sequence
  Description of Artificial Sequence: Synthetic oligonucleotide
  Sense strand starting at position 2996 of SEQ ID NO: 914524
gcaggaaugugccuguaaa

SEQ ID NO: 1010557 - RNA, 19 nt, Artificial Sequence
  Description of Artificial Sequence: Synthetic oligonucleotide
  Antisense strand to SEQ ID NO: 1010556
uuuacaggcacauuccugc

SEQ ID NO: 1010558 - RNA, 19 nt, Artificial Sequence
  Description of Artificial Sequence: Synthetic oligonucleotide
  Sense strand starting at position 2997 of SEQ ID NO: 914524
caggaaugugccuguaaag

SEQ ID NO: 1010559 - RNA, 19 nt, Artificial Sequence
  Description of Artificial Sequence: Synthetic oligonucleotide
  Antisense strand to SEQ ID NO: 1010558
cuuuacaggcacauuccug

SEQ ID NO: 1010560 - RNA, 19 nt, Artificial Sequence
  Description of Artificial Sequence: Synthetic oligonucleotide
  Sense strand starting at position 3022 of SEQ ID NO: 914524
guacaaugccuguaauaua

SEQ ID NO: 1010561 - RNA, 19 nt, Artificial Sequence
  Description of Artificial Sequence: Synthetic oligonucleotide
  Antisense strand to SEQ ID NO: 1010560
uauauuacaggcauuguac

SEQ ID NO: 1010562 - RNA, 19 nt, Artificial Sequence
  Description of Artificial Sequence: Synthetic oligonucleotide
  Sense strand starting at position 3108 of SEQ ID NO: 914524
ucauucgugcaauacuuaa

SEQ ID NO: 1010563 - RNA, 19 nt, Artificial Sequence
  Description of Artificial Sequence: Synthetic oligonucleotide
  Antisense strand to SEQ ID NO: 1010562
uuaaguauugcacgaauga

SEQ ID NO: 1010564 - RNA, 19 nt, Artificial Sequence
  Description of Artificial Sequence: Synthetic oligonucleotide
  Sense strand starting at position 3207 of SEQ ID NO: 914524
ggaggagacucagauaggu

SEQ ID NO: 1010565 - RNA, 19 nt, Artificial Sequence
  Description of Artificial Sequence: Synthetic oligonucleotide
  Antisense strand to SEQ ID NO: 1010564
accuaucugagucuccucc

SEQ ID NO: 1010566 - RNA, 19 nt, Artificial Sequence
  Description of Artificial Sequence: Synthetic oligonucleotide
  Sense strand starting at position 3244 of SEQ ID NO: 914524
auuaacagccauugguaga

SEQ ID NO: 1010567 - RNA, 19 nt, Artificial Sequence
  Description of Artificial Sequence: Synthetic oligonucleotide
  Antisense strand to SEQ ID NO: 1010566
ucuaccaauggcuguuaau

SEQ ID NO: 1010568 - RNA, 19 nt, Artificial Sequence
  Description of Artificial Sequence: Synthetic oligonucleotide
  Sense strand starting at position 3287 of SEQ ID NO: 914524
ugaguccgguuauaauaau

SEQ ID NO: 1010569 - RNA, 19 nt, Artificial Sequence
  Description of Artificial Sequence: Synthetic oligonucleotide
  Antisense strand to SEQ ID NO: 1010568
auuauuauaaccggacuca

SEQ ID NO: 1010570 - RNA, 19 nt, Artificial Sequence
  Description of Artificial Sequence: Synthetic oligonucleotide
  Sense strand starting at position 3941 of SEQ ID NO: 914524
acuguuauaugccagauac

SEQ ID NO: 1010571 - RNA, 19 nt, Artificial Sequence
  Description of Artificial Sequence: Synthetic oligonucleotide
  Antisense strand to SEQ ID NO: 1010570
guaucuggcauauaacagu

SEQ ID NO: 1010572 - RNA, 19 nt, Artificial Sequence
  Description of Artificial Sequence: Synthetic oligonucleotide
  Sense strand starting at position 3955 of SEQ ID NO: 914524
gauacuggucuauggacuu

SEQ ID NO: 1010573 - RNA, 19 nt, Artificial Sequence
  Description of Artificial Sequence: Synthetic oligonucleotide
  Antisense strand to SEQ ID NO: 1010572
aaguccauagaccaguauc

SEQ ID NO: 1010574 - RNA, 19 nt, Artificial Sequence
  Description of Artificial Sequence: Synthetic oligonucleotide
  Sense strand starting at position 250 of SEQ ID NO: 914525
cagucuuucuucuugagga

SEQ ID NO: 1010575 - RNA, 19 nt, Artificial Sequence
  Description of Artificial Sequence: Synthetic oligonucleotide
  Antisense strand to SEQ ID NO: 1010574
uccucaagaagaaagacug

SEQ ID NO: 1010576 - RNA, 19 nt, Artificial Sequence
  Description of Artificial Sequence: Synthetic oligonucleotide
  Sense strand starting at position 252 of SEQ ID NO: 914525
gucuuucuucuugaggaac

SEQ ID NO: 1010577 - RNA, 19 nt, Artificial Sequence
  Description of Artificial Sequence: Synthetic oligonucleotide
  Antisense strand to SEQ ID NO: 1010576
guuccucaagaagaaagac

SEQ ID NO: 1010578 - RNA, 19 nt, Artificial Sequence
  Description of Artificial Sequence: Synthetic oligonucleotide
  Sense strand starting at position 350 of SEQ ID NO: 914525
cccggauccaaaugagaug

SEQ ID NO: 1010579 - RNA, 19 nt, Artificial Sequence
  Description of Artificial Sequence: Synthetic oligonucleotide
  Antisense strand to SEQ ID NO: 1010578
caucucauuuggauccggg

SEQ ID NO: 1010580 - RNA, 19 nt, Artificial Sequence
  Description of Artificial Sequence: Synthetic oligonucleotide
  Sense strand starting at position 361 of SEQ ID NO: 914525
augagaugcuaaucgggau

SEQ ID NO: 1010581 - RNA, 19 nt, Artificial Sequence
  Description of Artificial Sequence: Synthetic oligonucleotide
  Antisense strand to SEQ ID NO: 1010580
aucccgauuagcaucucau

SEQ ID NO: 1010582 - RNA, 19 nt, Artificial Sequence
  Description of Artificial Sequence: Synthetic oligonucleotide
  Sense strand starting at position 453 of SEQ ID NO: 914525
gcaagaucaccucacagca

SEQ ID NO: 1010583 - RNA, 19 nt, Artificial Sequence
  Description of Artificial Sequence: Synthetic oligonucleotide
  Antisense strand to SEQ ID NO: 1010582
ugcugugaggugaucuugc

SEQ ID NO: 1010584 - RNA, 19 nt, Artificial Sequence
  Description of Artificial Sequence: Synthetic oligonucleotide
  Sense strand starting at position 1045 of SEQ ID NO: 914525
uuccguuuccuggagaucu

SEQ ID NO: 1010585 - RNA, 19 nt, Artificial Sequence
  Description of Artificial Sequence: Synthetic oligonucleotide
  Antisense strand to SEQ ID NO: 1010584
agaucuccaggaaacggaa

SEQ ID NO: 1010586 - RNA, 19 nt, Artificial Sequence
  Description of Artificial Sequence: Synthetic oligonucleotide
  Sense strand starting at position 1047 of SEQ ID NO: 914525
ccguuuccuggagaucuca

SEQ ID NO: 1010587 - RNA, 19 nt, Artificial Sequence
  Description of Artificial Sequence: Synthetic oligonucleotide
  Antisense strand to SEQ ID NO: 1010586
ugagaucuccaggaaacgg

SEQ ID NO: 1010588 - RNA, 19 nt, Artificial Sequence
  Description of Artificial Sequence: Synthetic oligonucleotide
  Sense strand starting at position 1121 of SEQ ID NO: 914525
auauuagauguuuagucca

SEQ ID NO: 1010589 - RNA, 19 nt, Artificial Sequence
  Description of Artificial Sequence: Synthetic oligonucleotide
  Antisense strand to SEQ ID NO: 1010588
uggacuaaacaucuaauau

SEQ ID NO: 1010590 - RNA, 19 nt, Artificial Sequence
  Description of Artificial Sequence: Synthetic oligonucleotide
  Sense strand starting at position 1123 of SEQ ID NO: 914525
auuagauguuuaguccaau

SEQ ID NO: 1010591 - RNA, 19 nt, Artificial Sequence
  Description of Artificial Sequence: Synthetic oligonucleotide
  Antisense strand to SEQ ID NO: 1010590
auuggacuaaacaucuaau

SEQ ID NO: 1010592 - RNA, 19 nt, Artificial Sequence
  Description of Artificial Sequence: Synthetic oligonucleotide
  Sense strand starting at position 1124 of SEQ ID NO: 914525
uuagauguuuaguccaaua

SEQ ID NO: 1010593 - RNA, 19 nt, Artificial Sequence
  Description of Artificial Sequence: Synthetic oligonucleotide
  Antisense strand to SEQ ID NO: 1010592
uauuggacuaaacaucuaa

SEQ ID NO: 1010594 - RNA, 19 nt, Artificial Sequence
  Description of Artificial Sequence: Synthetic oligonucleotide
  Sense strand starting at position 1126 of SEQ ID NO: 914525
agauguuuaguccaauauc

SEQ ID NO: 1010595 - RNA, 19 nt, Artificial Sequence
  Description of Artificial Sequence: Synthetic oligonucleotide
  Antisense strand to SEQ ID NO: 1010594
gauauuggacuaaacaucu

SEQ ID NO: 1010596 - RNA, 19 nt, Artificial Sequence
  Description of Artificial Sequence: Synthetic oligonucleotide
  Sense strand starting at position 1188 of SEQ ID NO: 914525
ggaucuaugguacgagauu

SEQ ID NO: 1010597 - RNA, 19 nt, Artificial Sequence
  Description of Artificial Sequence: Synthetic oligonucleotide
  Antisense strand to SEQ ID NO: 1010596
aaucucguaccauagaucc

SEQ ID NO: 1010598 - RNA, 19 nt, Artificial Sequence
  Description of Artificial Sequence: Synthetic oligonucleotide
  Sense strand starting at position 1207 of SEQ ID NO: 914525
auacaacuccgaggugaug

SEQ ID NO: 1010599 - RNA, 19 nt, Artificial Sequence
  Description of Artificial Sequence: Synthetic oligonucleotide
  Antisense strand to SEQ ID NO: 1010598
caucaccucggaguuguau

SEQ ID NO: 1010600 - RNA, 19 nt, Artificial Sequence
  Description of Artificial Sequence: Synthetic oligonucleotide
  Sense strand starting at position 1221 of SEQ ID NO: 914525
ugaugaggucucuagggca

SEQ ID NO: 1010601 - RNA, 19 nt, Artificial Sequence
  Description of Artificial Sequence: Synthetic oligonucleotide
  Antisense strand to SEQ ID NO: 1010600
ugcccuagagaccucauca

SEQ ID NO: 1010602 - RNA, 19 nt, Artificial Sequence
  Description of Artificial Sequence: Synthetic oligonucleotide
  Sense strand starting at position 1403 of SEQ ID NO: 914525
ggacucuugcuguagcaau

SEQ ID NO: 1010603 - RNA, 19 nt, Artificial Sequence
  Description of Artificial Sequence: Synthetic oligonucleotide
  Antisense strand to SEQ ID NO: 1010602
auugcuacagcaagagucc

SEQ ID NO: 1010604 - RNA, 19 nt, Artificial Sequence
  Description of Artificial Sequence: Synthetic oligonucleotide
  Sense strand starting at position 1549 of SEQ ID NO: 914525
gcauuugguaucgaagcgu

SEQ ID NO: 1010605 - RNA, 19 nt, Artificial Sequence
  Description of Artificial Sequence: Synthetic oligonucleotide
  Antisense strand to SEQ ID NO: 1010604
acgcuucgauaccaaaugc

SEQ ID NO: 1010606 - RNA, 19 nt, Artificial Sequence
  Description of Artificial Sequence: Synthetic oligonucleotide
  Sense strand starting at position 1972 of SEQ ID NO: 914525
cccagaaggcugugggauu

SEQ ID NO: 1010607 - RNA, 19 nt, Artificial Sequence
  Description of Artificial Sequence: Synthetic oligonucleotide
  Antisense strand to SEQ ID NO: 1010606
aaucccacagccuucuggg

SEQ ID NO: 1010608 - RNA, 19 nt, Artificial Sequence
  Description of Artificial Sequence: Synthetic oligonucleotide
  Sense strand starting at position 1983 of SEQ ID NO: 914525
gugggauugcgucacaaug

SEQ ID NO: 1010609 - RNA, 19 nt, Artificial Sequence
  Description of Artificial Sequence: Synthetic oligonucleotide
  Antisense strand to SEQ ID NO: 1010608
cauugugacgcaaucccac

SEQ ID NO: 1010610 - RNA, 19 nt, Artificial Sequence
  Description of Artificial Sequence: Synthetic oligonucleotide
  Sense strand starting at position 1994 of SEQ ID NO: 914525
ucacaaugacugcgggauu

SEQ ID NO: 1010611 - RNA, 19 nt, Artificial Sequence
  Description of Artificial Sequence: Synthetic oligonucleotide
  Antisense strand to SEQ ID NO: 1010610
aaucccgcagucauuguga

SEQ ID NO: 1010612 - RNA, 19 nt, Artificial Sequence
  Description of Artificial Sequence: Synthetic oligonucleotide
  Sense strand starting at position 1997 of SEQ ID NO: 914525
caaugacugcgggauuaua

SEQ ID NO: 1010613 - RNA, 19 nt, Artificial Sequence
  Description of Artificial Sequence: Synthetic oligonucleotide
  Antisense strand to SEQ ID NO: 1010612
uauaaucccgcagucauug

SEQ ID NO: 1010614 - RNA, 19 nt, Artificial Sequence
  Description of Artificial Sequence: Synthetic oligonucleotide
  Sense strand starting at position 2034 of SEQ ID NO: 914525
ggaaauagaguucggguga

SEQ ID NO: 1010615 - RNA, 19 nt, Artificial Sequence
  Description of Artificial Sequence: Synthetic oligonucleotide
  Antisense strand to SEQ ID NO: 1010614
ucacccgaacucuauuucc

SEQ ID NO: 1010616 - RNA, 19 nt, Artificial Sequence
  Description of Artificial Sequence: Synthetic oligonucleotide
  Sense strand starting at position 2061 of SEQ ID NO: 914525
ggcgauuagaguuaaagau

SEQ ID NO: 1010617 - RNA, 19 nt, Artificial Sequence
  Description of Artificial Sequence: Synthetic oligonucleotide
  Antisense strand to SEQ ID NO: 1010616
aucuuuaacucuaaucgcc

SEQ ID NO: 1010618 - RNA, 19 nt, Artificial Sequence
  Description of Artificial Sequence: Synthetic oligonucleotide
  Sense strand starting at position 2444 of SEQ ID NO: 914525
ugguguaaauuacccaaga

SEQ ID NO: 1010619 - RNA, 19 nt, Artificial Sequence
  Description of Artificial Sequence: Synthetic oligonucleotide
  Antisense strand to SEQ ID NO: 1010618
ucuuggguaauuuacacca

SEQ ID NO: 1010620 - RNA, 19 nt, Artificial Sequence
  Description of Artificial Sequence: Synthetic oligonucleotide
  Sense strand starting at position 2445 of SEQ ID NO: 914525
gguguaaauuacccaagaa

SEQ ID NO: 1010621 - RNA, 19 nt, Artificial Sequence
  Description of Artificial Sequence: Synthetic oligonucleotide
  Antisense strand to SEQ ID NO: 1010620
uucuuggguaauuuacacc

SEQ ID NO: 1010622 - RNA, 19 nt, Artificial Sequence
  Description of Artificial Sequence: Synthetic oligonucleotide
  Sense strand starting at position 2494 of SEQ ID NO: 914525
gcuuauuuaguuuagccua

SEQ ID NO: 1010623 - RNA, 19 nt, Artificial Sequence
  Description of Artificial Sequence: Synthetic oligonucleotide
  Antisense strand to SEQ ID NO: 1010622
uaggcuaaacuaaauaagc

SEQ ID NO: 1010624 - RNA, 19 nt, Artificial Sequence
  Description of Artificial Sequence: Synthetic oligonucleotide
  Sense strand starting at position 2913 of SEQ ID NO: 914525
ggcccugauuguguuauuu

SEQ ID NO: 1010625 - RNA, 19 nt, Artificial Sequence
  Description of Artificial Sequence: Synthetic oligonucleotide
  Antisense strand to SEQ ID NO: 1010624
aaauaacacaaucagggcc

SEQ ID NO: 1010626 - RNA, 19 nt, Artificial Sequence
  Description of Artificial Sequence: Synthetic oligonucleotide
  Sense strand starting at position 2948 of SEQ ID NO: 914525
ugggucaucucaucugauc

SEQ ID NO: 1010627 - RNA, 19 nt, Artificial Sequence
  Description of Artificial Sequence: Synthetic oligonucleotide
  Antisense strand to SEQ ID NO: 1010626
gaucagaugagaugaccca

SEQ ID NO: 1010628 - RNA, 19 nt, Artificial Sequence
  Description of Artificial Sequence: Synthetic oligonucleotide
  Sense strand starting at position 2991 of SEQ ID NO: 914525
cugggcaagaacuguuauu

SEQ ID NO: 1010629 - RNA, 19 nt, Artificial Sequence
  Description of Artificial Sequence: Synthetic oligonucleotide
  Antisense strand to SEQ ID NO: 1010628
aauaacaguucuugcccag

SEQ ID NO: 1010630 - RNA, 19 nt, Artificial Sequence
  Description of Artificial Sequence: Synthetic oligonucleotide
  Sense strand starting at position 3058 of SEQ ID NO: 914525
aguaaaucaccuggaguaa

SEQ ID NO: 1010631 - RNA, 19 nt, Artificial Sequence
  Description of Artificial Sequence: Synthetic oligonucleotide
  Antisense strand to SEQ ID NO: 1010630
uuacuccaggugauuuacu

SEQ ID NO: 1010632 - RNA, 19 nt, Artificial Sequence
  Description of Artificial Sequence: Synthetic oligonucleotide
  Sense strand starting at position 3074 of SEQ ID NO: 914525
uaaaguaaugcucaggucu

SEQ ID NO: 1010633 - RNA, 19 nt, Artificial Sequence
  Description of Artificial Sequence: Synthetic oligonucleotide
  Antisense strand to SEQ ID NO: 1010632
agaccugagcauuacuuua

SEQ ID NO: 1010634 - RNA, 19 nt, Artificial Sequence
  Description of Artificial Sequence: Synthetic oligonucleotide
  Sense strand starting at position 3178 of SEQ ID NO: 914525
ggaggaaguucuucuuugu

SEQ ID NO: 1010635 - RNA, 19 nt, Artificial Sequence
  Description of Artificial Sequence: Synthetic oligonucleotide
  Antisense strand to SEQ ID NO: 1010634
acaaagaagaacuuccucc

SEQ ID NO: 1010636 - RNA, 19 nt, Artificial Sequence
  Description of Artificial Sequence: Synthetic oligonucleotide
  Sense strand starting at position 3191 of SEQ ID NO: 914525
cuuugugccaguucuguuu

SEQ ID NO: 1010637 - RNA, 19 nt, Artificial Sequence
  Description of Artificial Sequence: Synthetic oligonucleotide
  Antisense strand to SEQ ID NO: 1010636
aaacagaacuggcacaaag

SEQ ID NO: 1010638 - RNA, 19 nt, Artificial Sequence
  Description of Artificial Sequence: Synthetic oligonucleotide
  Sense strand starting at position 3244 of SEQ ID NO: 914525
ugaucagagucuucccuga

SEQ ID NO: 1010639 - RNA, 19 nt, Artificial Sequence
  Description of Artificial Sequence: Synthetic oligonucleotide
  Antisense strand to SEQ ID NO: 1010638
ucagggaagacucugauca

SEQ ID NO: 1010640 - RNA, 19 nt, Artificial Sequence
  Description of Artificial Sequence: Synthetic oligonucleotide
  Sense strand starting at position 3249 of SEQ ID NO: 914525
agagucuucccugaccauu

SEQ ID NO: 1010641 - RNA, 19 nt, Artificial Sequence
  Description of Artificial Sequence: Synthetic oligonucleotide
  Antisense strand to SEQ ID NO: 1010640
aauggucagggaagacucu

SEQ ID NO: 1010642 - RNA, 19 nt, Artificial Sequence
  Description of Artificial Sequence: Synthetic oligonucleotide
  Sense strand starting at position 3815 of SEQ ID NO: 914525
auuaguguuggagaguacu

SEQ ID NO: 1010643 - RNA, 19 nt, Artificial Sequence
  Description of Artificial Sequence: Synthetic oligonucleotide
  Antisense strand to SEQ ID NO: 1010642
aguacucuccaacacuaau

SEQ ID NO: 1010644 - RNA, 19 nt, Artificial Sequence
  Description of Artificial Sequence: Synthetic oligonucleotide
  Sense strand starting at position 3823 of SEQ ID NO: 914525
uggagaguacuugagcuuu

SEQ ID NO: 1010645 - RNA, 19 nt, Artificial Sequence
  Description of Artificial Sequence: Synthetic oligonucleotide
  Antisense strand to SEQ ID NO: 1010644
aaagcucaaguacucucca

SEQ ID NO: 1010646 - RNA, 19 nt, Artificial Sequence
  Description of Artificial Sequence: Synthetic oligonucleotide
  Sense strand starting at position 3915 of SEQ ID NO: 914525
ccucucugguaguuaauua

SEQ ID NO: 1010647 - RNA, 19 nt, Artificial Sequence
  Description of Artificial Sequence: Synthetic oligonucleotide
  Antisense strand to SEQ ID NO: 1010646
uaauuaacuaccagagagg

SEQ ID NO: 1010648 - RNA, 19 nt, Artificial Sequence
  Description of Artificial Sequence: Synthetic oligonucleotide
  Sense strand starting at position 3926 of SEQ ID NO: 914525
guuaauuacucauuguuga

SEQ ID NO: 1010649 - RNA, 19 nt, Artificial Sequence
  Description of Artificial Sequence: Synthetic oligonucleotide
  Antisense strand to SEQ ID NO: 1010648
ucaacaaugaguaauuaac

SEQ ID NO: 1010650 - RNA, 19 nt, Artificial Sequence
  Description of Artificial Sequence: Synthetic oligonucleotide
  Sense strand starting at position 3963 of SEQ ID NO: 914525
ucaagaugauugcuuguau

SEQ ID NO: 1010651 - RNA, 19 nt, Artificial Sequence
  Description of Artificial Sequence: Synthetic oligonucleotide
  Antisense strand to SEQ ID NO: 1010650
auacaagcaaucaucuuga

SEQ ID NO: 1010652 - RNA, 19 nt, Artificial Sequence
  Description of Artificial Sequence: Synthetic oligonucleotide
  Sense strand starting at position 3964 of SEQ ID NO: 914525
caagaugauugcuuguauu

SEQ ID NO: 1010653 - RNA, 19 nt, Artificial Sequence
  Description of Artificial Sequence: Synthetic oligonucleotide
  Antisense strand to SEQ ID NO: 1010652
aauacaagcaaucaucuug

SEQ ID NO: 1010654 - RNA, 19 nt, Artificial Sequence
  Description of Artificial Sequence: Synthetic oligonucleotide
  Sense strand starting at position 19 of SEQ ID NO: 914526
auagguagccaaugaucuu

SEQ ID NO: 1010655 - RNA, 19 nt, Artificial Sequence
  Description of Artificial Sequence: Synthetic oligonucleotide
  Antisense strand to SEQ ID NO: 1010654
aagaucauuggcuaccuau

SEQ ID NO: 1010656 - RNA, 19 nt, Artificial Sequence
  Description of Artificial Sequence: Synthetic oligonucleotide
  Sense strand starting at position 32 of SEQ ID NO: 914526
gaucuuguugcugaccauu

SEQ ID NO: 1010657 - RNA, 19 nt, Artificial Sequence
  Description of Artificial Sequence: Synthetic oligonucleotide
  Antisense strand to SEQ ID NO: 1010656
aauggucagcaacaagauc

SEQ ID NO: 1010658 - RNA, 19 nt, Artificial Sequence
  Description of Artificial Sequence: Synthetic oligonucleotide
  Sense strand starting at position 125 of SEQ ID NO: 914526
uucccuggucuccauauua

SEQ ID NO: 1010659 - RNA, 19 nt, Artificial Sequence
  Description of Artificial Sequence: Synthetic oligonucleotide
  Antisense strand to SEQ ID NO: 1010658
uaauauggagaccagggaa

SEQ ID NO: 1010660 - RNA, 19 nt, Artificial Sequence
  Description of Artificial Sequence: Synthetic oligonucleotide
  Sense strand starting at position 202 of SEQ ID NO: 914526
uccugauucccucaguuga

SEQ ID NO: 1010661 - RNA, 19 nt, Artificial Sequence
  Description of Artificial Sequence: Synthetic oligonucleotide
  Antisense strand to SEQ ID NO: 1010660
ucaacugagggaaucagga

SEQ ID NO: 1010662 - RNA, 19 nt, Artificial Sequence
  Description of Artificial Sequence: Synthetic oligonucleotide
  Sense strand starting at position 204 of SEQ ID NO: 914526
cugauucccucaguugaaa

SEQ ID NO: 1010663 - RNA, 19 nt, Artificial Sequence
  Description of Artificial Sequence: Synthetic oligonucleotide
  Antisense strand to SEQ ID NO: 1010662
uuucaacugagggaaucag

SEQ ID NO: 1010664 - RNA, 19 nt, Artificial Sequence
  Description of Artificial Sequence: Synthetic oligonucleotide
  Sense strand starting at position 1294 of SEQ ID NO: 914526
cccacugaccuguguggaa

SEQ ID NO: 1010665 - RNA, 19 nt, Artificial Sequence
  Description of Artificial Sequence: Synthetic oligonucleotide
  Antisense strand to SEQ ID NO: 1010664
uuccacacaggucaguggg

SEQ ID NO: 1010666 - RNA, 19 nt, Artificial Sequence
  Description of Artificial Sequence: Synthetic oligonucleotide
  Sense strand starting at position 1418 of SEQ ID NO: 914526
caggguuaagcaugauuga

SEQ ID NO: 1010667 - RNA, 19 nt, Artificial Sequence
  Description of Artificial Sequence: Synthetic oligonucleotide
  Antisense strand to SEQ ID NO: 1010666
ucaaucaugcuuaacccug

SEQ ID NO: 1010668 - RNA, 19 nt, Artificial Sequence
  Description of Artificial Sequence: Synthetic oligonucleotide
  Sense strand starting at position 1421 of SEQ ID NO: 914526
gguuaagcaugauugaauu

SEQ ID NO: 1010669 - RNA, 19 nt, Artificial Sequence
  Description of Artificial Sequence: Synthetic oligonucleotide
  Antisense strand to SEQ ID NO: 1010668
aauucaaucaugcuuaacc

SEQ ID NO: 1010670 - RNA, 19 nt, Artificial Sequence
  Description of Artificial Sequence: Synthetic oligonucleotide
  Sense strand starting at position 1701 of SEQ ID NO: 914526
agcaacuuccuguaagaaa

SEQ ID NO: 1010671 - RNA, 19 nt, Artificial Sequence
  Description of Artificial Sequence: Synthetic oligonucleotide
  Antisense strand to SEQ ID NO: 1010670
uuucuuacaggaaguugcu

SEQ ID NO: 1010672 - RNA, 19 nt, Artificial Sequence
  Description of Artificial Sequence: Synthetic oligonucleotide
  Sense strand starting at position 2241 of SEQ ID NO: 914526
agguguccucugggucaga

SEQ ID NO: 1010673 - RNA, 19 nt, Artificial Sequence
  Description of Artificial Sequence: Synthetic oligonucleotide
  Antisense strand to SEQ ID NO: 1010672
ucugacccagaggacaccu

SEQ ID NO: 1010674 - RNA, 19 nt, Artificial Sequence
  Description of Artificial Sequence: Synthetic oligonucleotide
  Sense strand starting at position 2242 of SEQ ID NO: 914526
gguguccucugggucagaa

SEQ ID NO: 1010675 - RNA, 19 nt, Artificial Sequence
  Description of Artificial Sequence: Synthetic oligonucleotide
  Antisense strand to SEQ ID NO: 1010674
uucugacccagaggacacc

SEQ ID NO: 1010676 - RNA, 19 nt, Artificial Sequence
  Description of Artificial Sequence: Synthetic oligonucleotide
  Sense strand starting at position 2244 of SEQ ID NO: 914526
uguccucugggucagaaga

SEQ ID NO: 1010677 - RNA, 19 nt, Artificial Sequence
  Description of Artificial Sequence: Synthetic oligonucleotide
  Antisense strand to SEQ ID NO: 1010676
ucuucugacccagaggaca

SEQ ID NO: 1010678 - RNA, 19 nt, Artificial Sequence
  Description of Artificial Sequence: Synthetic oligonucleotide
  Sense strand starting at position 2343 of SEQ ID NO: 914526
acuauuacugaauggcuua

SEQ ID NO: 1010679 - RNA, 19 nt, Artificial Sequence
  Description of Artificial Sequence: Synthetic oligonucleotide
  Antisense strand to SEQ ID NO: 1010678
uaagccauucaguaauagu

SEQ ID NO: 1010680 - RNA, 19 nt, Artificial Sequence
  Description of Artificial Sequence: Synthetic oligonucleotide
  Sense strand starting at position 2350 of SEQ ID NO: 914526
cugaauggcuuaucuaugu

SEQ ID NO: 1010681 - RNA, 19 nt, Artificial Sequence
  Description of Artificial Sequence: Synthetic oligonucleotide
  Antisense strand to SEQ ID NO: 1010680
acauagauaagccauucag

SEQ ID NO: 1010682 - RNA, 19 nt, Artificial Sequence
  Description of Artificial Sequence: Synthetic oligonucleotide
  Sense strand starting at position 2402 of SEQ ID NO: 914526
ugccucucacaugagaagu

SEQ ID NO: 1010683 - RNA, 19 nt, Artificial Sequence
  Description of Artificial Sequence: Synthetic oligonucleotide
  Antisense strand to SEQ ID NO: 1010682
acuucucaugugagaggca

SEQ ID NO: 1010684 - RNA, 19 nt, Artificial Sequence
  Description of Artificial Sequence: Synthetic oligonucleotide
  Sense strand starting at position 2552 of SEQ ID NO: 914526
cuucuagugccugauccua

SEQ ID NO: 1010685 - RNA, 19 nt, Artificial Sequence
  Description of Artificial Sequence: Synthetic oligonucleotide
  Antisense strand to SEQ ID NO: 1010684
uaggaucaggcacuagaag

SEQ ID NO: 1010686 - RNA, 19 nt, Artificial Sequence
  Description of Artificial Sequence: Synthetic oligonucleotide
  Sense strand starting at position 2571 of SEQ ID NO: 914526
ccaaccauuccauguguuu

SEQ ID NO: 1010687 - RNA, 19 nt, Artificial Sequence
  Description of Artificial Sequence: Synthetic oligonucleotide
  Antisense strand to SEQ ID NO: 1010686
aaacacauggaaugguugg

SEQ ID NO: 1010688 - RNA, 19 nt, Artificial Sequence
  Description of Artificial Sequence: Synthetic oligonucleotide
  Sense strand starting at position 2768 of SEQ ID NO: 914526
ggccaauauugugcuaaau

SEQ ID NO: 1010689 - RNA, 19 nt, Artificial Sequence
  Description of Artificial Sequence: Synthetic oligonucleotide
  Antisense strand to SEQ ID NO: 1010688
auuuagcacaauauuggcc

SEQ ID NO: 1010690 - RNA, 19 nt, Artificial Sequence
  Description of Artificial Sequence: Synthetic oligonucleotide
  Sense strand starting at position 2835 of SEQ ID NO: 914526
cacagucugcuaggugaaa

SEQ ID NO: 1010691 - RNA, 19 nt, Artificial Sequence
  Description of Artificial Sequence: Synthetic oligonucleotide
  Antisense strand to SEQ ID NO: 1010690
uuucaccuagcagacugug

SEQ ID NO: 1010692 - RNA, 19 nt, Artificial Sequence
  Description of Artificial Sequence: Synthetic oligonucleotide
  Sense strand starting at position 2836 of SEQ ID NO: 914526
acagucugcuaggugaaau

SEQ ID NO: 1010693 - RNA, 19 nt, Artificial Sequence
  Description of Artificial Sequence: Synthetic oligonucleotide
  Antisense strand to SEQ ID NO: 1010692
auuucaccuagcagacugu

SEQ ID NO: 1010694 - RNA, 19 nt, Artificial Sequence
  Description of Artificial Sequence: Synthetic oligonucleotide
  Sense strand starting at position 2868 of SEQ ID NO: 914526
gguaauuacacaugaggua

SEQ ID NO: 1010695 - RNA, 19 nt, Artificial Sequence
  Description of Artificial Sequence: Synthetic oligonucleotide
  Antisense strand to SEQ ID NO: 1010694
uaccucauguguaauuacc

SEQ ID NO: 1010696 - RNA, 19 nt, Artificial Sequence
  Description of Artificial Sequence: Synthetic oligonucleotide
  Sense strand starting at position 2950 of SEQ ID NO: 914526
gcuauuauaguacacauga

SEQ ID NO: 1010697 - RNA, 19 nt, Artificial Sequence
  Description of Artificial Sequence: Synthetic oligonucleotide
  Antisense strand to SEQ ID NO: 1010696
ucauguguacuauaauagc

SEQ ID NO: 1010698 - RNA, 19 nt, Artificial Sequence
  Description of Artificial Sequence: Synthetic oligonucleotide
  Sense strand starting at position 2985 of SEQ ID NO: 914526
cuggguucugcaggaugaa

SEQ ID NO: 1010699 - RNA, 19 nt, Artificial Sequence
  Description of Artificial Sequence: Synthetic oligonucleotide
  Antisense strand to SEQ ID NO: 1010698
uucauccugcagaacccag

SEQ ID NO: 1010700 - RNA, 19 nt, Artificial Sequence
  Description of Artificial Sequence: Synthetic oligonucleotide
  Sense strand starting at position 2986 of SEQ ID NO: 914526
uggguucugcaggaugaau

SEQ ID NO: 1010701 - RNA, 19 nt, Artificial Sequence
  Description of Artificial Sequence: Synthetic oligonucleotide
  Antisense strand to SEQ ID NO: 1010700
auucauccugcagaaccca

SEQ ID NO: 1010702 - RNA, 19 nt, Artificial Sequence
  Description of Artificial Sequence: Synthetic oligonucleotide
  Sense strand starting at position 3006 of SEQ ID NO: 914526
ggaguuggguacagagaug

SEQ ID NO: 1010703 - RNA, 19 nt, Artificial Sequence
  Description of Artificial Sequence: Synthetic oligonucleotide
  Antisense strand to SEQ ID NO: 1010702
caucucuguacccaacucc

SEQ ID NO: 1010704 - RNA, 19 nt, Artificial Sequence
  Description of Artificial Sequence: Synthetic oligonucleotide
  Sense strand starting at position 3090 of SEQ ID NO: 914526
gugggugacugggcaaaua

SEQ ID NO: 1010705 - RNA, 19 nt, Artificial Sequence
  Description of Artificial Sequence: Synthetic oligonucleotide
  Antisense strand to SEQ ID NO: 1010704
uauuugcccagucacccac

SEQ ID NO: 1010706 - RNA, 19 nt, Artificial Sequence
  Description of Artificial Sequence: Synthetic oligonucleotide
  Sense strand starting at position 3135 of SEQ ID NO: 914526
gcggguaguggugagagau

SEQ ID NO: 1010707 - RNA, 19 nt, Artificial Sequence
  Description of Artificial Sequence: Synthetic oligonucleotide
  Antisense strand to SEQ ID NO: 1010706
aucucucaccacuacccgc

SEQ ID NO: 1010708 - RNA, 19 nt, Artificial Sequence
  Description of Artificial Sequence: Synthetic oligonucleotide
  Sense strand starting at position 3313 of SEQ ID NO: 914526
accuguggucccuaauuaa

SEQ ID NO: 1010709 - RNA, 19 nt, Artificial Sequence
  Description of Artificial Sequence: Synthetic oligonucleotide
  Antisense strand to SEQ ID NO: 1010708
uuaauuagggaccacaggu

SEQ ID NO: 1010710 - RNA, 19 nt, Artificial Sequence
  Description of Artificial Sequence: Synthetic oligonucleotide
  Sense strand starting at position 3316 of SEQ ID NO: 914526
uguggucccuaauuaaauu

SEQ ID NO: 1010711 - RNA, 19 nt, Artificial Sequence
  Description of Artificial Sequence: Synthetic oligonucleotide
  Antisense strand to SEQ ID NO: 1010710
aauuuaauuagggaccaca

SEQ ID NO: 1010712 - RNA, 19 nt, Artificial Sequence
  Description of Artificial Sequence: Synthetic oligonucleotide
  Sense strand starting at position 3444 of SEQ ID NO: 914526
uuuguaaugccauaauguc

SEQ ID NO: 1010713 - RNA, 19 nt, Artificial Sequence
  Description of Artificial Sequence: Synthetic oligonucleotide
  Antisense strand to SEQ ID NO: 1010712
gacauuauggcauuacaaa

SEQ ID NO: 1010714 - RNA, 19 nt, Artificial Sequence
  Description of Artificial Sequence: Synthetic oligonucleotide
  Sense strand starting at position 3577 of SEQ ID NO: 914526
ccuaacucugucugauuga

SEQ ID NO: 1010715 - RNA, 19 nt, Artificial Sequence
  Description of Artificial Sequence: Synthetic oligonucleotide
  Antisense strand to SEQ ID NO: 1010714
ucaaucagacagaguuagg

SEQ ID NO: 1010716 - RNA, 19 nt, Artificial Sequence
  Description of Artificial Sequence: Synthetic oligonucleotide
  Sense strand starting at position 3638 of SEQ ID NO: 914526
cgagaacucucccugaguu

SEQ ID NO: 1010717 - RNA, 19 nt, Artificial Sequence
  Description of Artificial Sequence: Synthetic oligonucleotide
  Antisense strand to SEQ ID NO: 1010716
aacucagggagaguucucg

SEQ ID NO: 1010718 - RNA, 19 nt, Artificial Sequence
  Description of Artificial Sequence: Synthetic oligonucleotide
  Sense strand starting at position 3639 of SEQ ID NO: 914526
gagaacucucccugaguuu

SEQ ID NO: 1010719 - RNA, 19 nt, Artificial Sequence
  Description of Artificial Sequence: Synthetic oligonucleotide
  Antisense strand to SEQ ID NO: 1010718
aaacucagggagaguucuc

SEQ ID NO: 1010720 - RNA, 19 nt, Artificial Sequence
  Description of Artificial Sequence: Synthetic oligonucleotide
  Sense strand starting at position 3686 of SEQ ID NO: 914526
ggauguuccuacuugggua

SEQ ID NO: 1010721 - RNA, 19 nt, Artificial Sequence
  Description of Artificial Sequence: Synthetic oligonucleotide
  Antisense strand to SEQ ID NO: 1010720
uacccaaguaggaacaucc

SEQ ID NO: 1010722 - RNA, 19 nt, Artificial Sequence
  Description of Artificial Sequence: Synthetic oligonucleotide
  Sense strand starting at position 3722 of SEQ ID NO: 914526
acccauugggucuauaacu

SEQ ID NO: 1010723 - RNA, 19 nt, Artificial Sequence
  Description of Artificial Sequence: Synthetic oligonucleotide
  Antisense strand to SEQ ID NO: 1010722
aguuauagacccaaugggu

SEQ ID NO: 1010724 - RNA, 19 nt, Artificial Sequence
  Description of Artificial Sequence: Synthetic oligonucleotide
  Sense strand starting at position 3862 of SEQ ID NO: 914526
ggucacaaauucuucgaca

SEQ ID NO: 1010725 - RNA, 19 nt, Artificial Sequence
  Description of Artificial Sequence: Synthetic oligonucleotide
  Antisense strand to SEQ ID NO: 1010724
ugucgaagaauuugugacc

SEQ ID NO: 1010726 - RNA, 19 nt, Artificial Sequence
  Description of Artificial Sequence: Synthetic oligonucleotide
  Sense strand starting at position 3878 of SEQ ID NO: 914526
acaccacucccuugugaua

SEQ ID NO: 1010727 - RNA, 19 nt, Artificial Sequence
  Description of Artificial Sequence: Synthetic oligonucleotide
  Antisense strand to SEQ ID NO: 1010726
uaucacaagggaguggugu

SEQ ID NO: 1010728 - RNA, 19 nt, Artificial Sequence
  Description of Artificial Sequence: Synthetic oligonucleotide
  Sense strand starting at position 3898 of SEQ ID NO: 914526
uuuguauagcaggagugau

SEQ ID NO: 1010729 - RNA, 19 nt, Artificial Sequence
  Description of Artificial Sequence: Synthetic oligonucleotide
  Antisense strand to SEQ ID NO: 1010728
aucacuccugcuauacaaa

SEQ ID NO: 1010730 - RNA, 19 nt, Artificial Sequence
  Description of Artificial Sequence: Synthetic oligonucleotide
  Sense strand starting at position 3914 of SEQ ID NO: 914526
gauguugugugacuucuaa

SEQ ID NO: 1010731 - RNA, 19 nt, Artificial Sequence
  Description of Artificial Sequence: Synthetic oligonucleotide
  Antisense strand to SEQ ID NO: 1010730
uuagaagucacacaacauc

SEQ ID NO: 1010732 - RNA, 19 nt, Artificial Sequence
  Description of Artificial Sequence: Synthetic oligonucleotide
  Sense strand starting at position 3961 of SEQ ID NO: 914526
cccucugguucucuuggaa

SEQ ID NO: 1010733 - RNA, 19 nt, Artificial Sequence
  Description of Artificial Sequence: Synthetic oligonucleotide
  Antisense strand to SEQ ID NO: 1010732
uuccaagagaaccagaggg

SEQ ID NO: 1010734 - RNA, 19 nt, Artificial Sequence
  Description of Artificial Sequence: Synthetic oligonucleotide
  Sense strand starting at position 30 of SEQ ID NO: 914527
agagccugaucuuugggaa

SEQ ID NO: 1010735 - RNA, 19 nt, Artificial Sequence
  Description of Artificial Sequence: Synthetic oligonucleotide
  Antisense strand to SEQ ID NO: 1010734
uucccaaagaucaggcucu

SEQ ID NO: 1010736 - RNA, 19 nt, Artificial Sequence
  Description of Artificial Sequence: Synthetic oligonucleotide
  Sense strand starting at position 33 of SEQ ID NO: 914527
gccugaucuuugggaagca

SEQ ID NO: 1010737 - RNA, 19 nt, Artificial Sequence
  Description of Artificial Sequence: Synthetic oligonucleotide
  Antisense strand to SEQ ID NO: 1010736
ugcuucccaaagaucaggc

SEQ ID NO: 1010738 - RNA, 19 nt, Artificial Sequence
  Description of Artificial Sequence: Synthetic oligonucleotide
  Sense strand starting at position 34 of SEQ ID NO: 914527
ccugaucuuugggaagcau

SEQ ID NO: 1010739 - RNA, 19 nt, Artificial Sequence
  Description of Artificial Sequence: Synthetic oligonucleotide
  Antisense strand to SEQ ID NO: 1010738
augcuucccaaagaucagg

SEQ ID NO: 1010740 - RNA, 19 nt, Artificial Sequence
  Description of Artificial Sequence: Synthetic oligonucleotide
  Sense strand starting at position 67 of SEQ ID NO: 914527
uggauaaacugcugaggau

SEQ ID NO: 1010741 - RNA, 19 nt, Artificial Sequence
  Description of Artificial Sequence: Synthetic oligonucleotide
  Antisense strand to SEQ ID NO: 1010740
auccucagcaguuuaucca

SEQ ID NO: 1010742 - RNA, 19 nt, Artificial Sequence
  Description of Artificial Sequence: Synthetic oligonucleotide
  Sense strand starting at position 434 of SEQ ID NO: 914527
auggauucccgaugucaaa

SEQ ID NO: 1010743 - RNA, 19 nt, Artificial Sequence
  Description of Artificial Sequence: Synthetic oligonucleotide
  Antisense strand to SEQ ID NO: 1010742
uuugacaucgggaauccau

SEQ ID NO: 1010744 - RNA, 19 nt, Artificial Sequence
  Description of Artificial Sequence: Synthetic oligonucleotide
  Sense strand starting at position 806 of SEQ ID NO: 914527
gcugauugauaguucugua

SEQ ID NO: 1010745 - RNA, 19 nt, Artificial Sequence
  Description of Artificial Sequence: Synthetic oligonucleotide
  Antisense strand to SEQ ID NO: 1010744
uacagaacuaucaaucagc

SEQ ID NO: 1010746 - RNA, 19 nt, Artificial Sequence
  Description of Artificial Sequence: Synthetic oligonucleotide
  Sense strand starting at position 809 of SEQ ID NO: 914527
gauugauaguucuguagug

SEQ ID NO: 1010747 - RNA, 19 nt, Artificial Sequence
  Description of Artificial Sequence: Synthetic oligonucleotide
  Antisense strand to SEQ ID NO: 1010746
cacuacagaacuaucaauc

SEQ ID NO: 1010748 - RNA, 19 nt, Artificial Sequence
  Description of Artificial Sequence: Synthetic oligonucleotide
  Sense strand starting at position 810 of SEQ ID NO: 914527
auugauaguucuguaguga

SEQ ID NO: 1010749 - RNA, 19 nt, Artificial Sequence
  Description of Artificial Sequence: Synthetic oligonucleotide
  Antisense strand to SEQ ID NO: 1010748
ucacuacagaacuaucaau

SEQ ID NO: 1010750 - RNA, 19 nt, Artificial Sequence
  Description of Artificial Sequence: Synthetic oligonucleotide
  Sense strand starting at position 811 of SEQ ID NO: 914527
uugauaguucuguagugag

SEQ ID NO: 1010751 - RNA, 19 nt, Artificial Sequence
  Description of Artificial Sequence: Synthetic oligonucleotide
  Antisense strand to SEQ ID NO: 1010750
cucacuacagaacuaucaa

SEQ ID NO: 1010752 - RNA, 19 nt, Artificial Sequence
  Description of Artificial Sequence: Synthetic oligonucleotide
  Sense strand starting at position 1181 of SEQ ID NO: 914527
guuaauggacucugagauc

SEQ ID NO: 1010753 - RNA, 19 nt, Artificial Sequence
  Description of Artificial Sequence: Synthetic oligonucleotide
  Antisense strand to SEQ ID NO: 1010752
gaucucagaguccauuaac

SEQ ID NO: 1010754 - RNA, 19 nt, Artificial Sequence
  Description of Artificial Sequence: Synthetic oligonucleotide
  Sense strand starting at position 1188 of SEQ ID NO: 914527
gacucugagaucugugggu

SEQ ID NO: 1010755 - RNA, 19 nt, Artificial Sequence
  Description of Artificial Sequence: Synthetic oligonucleotide
  Antisense strand to SEQ ID NO: 1010754
acccacagaucucagaguc

SEQ ID NO: 1010756 - RNA, 19 nt, Artificial Sequence
  Description of Artificial Sequence: Synthetic oligonucleotide
  Sense strand starting at position 1197 of SEQ ID NO: 914527
aucuguggguccuguaaac

SEQ ID NO: 1010757 - RNA, 19 nt, Artificial Sequence
  Description of Artificial Sequence: Synthetic oligonucleotide
  Antisense strand to SEQ ID NO: 1010756
guuuacaggacccacagau

SEQ ID NO: 1010758 - RNA, 19 nt, Artificial Sequence
  Description of Artificial Sequence: Synthetic oligonucleotide
  Sense strand starting at position 1242 of SEQ ID NO: 914527
ccaucacucuggcuggaaa

SEQ ID NO: 1010759 - RNA, 19 nt, Artificial Sequence
  Description of Artificial Sequence: Synthetic oligonucleotide
  Antisense strand to SEQ ID NO: 1010758
uuuccagccagagugaugg

SEQ ID NO: 1010760 - RNA, 19 nt, Artificial Sequence
  Description of Artificial Sequence: Synthetic oligonucleotide
  Sense strand starting at position 1657 of SEQ ID NO: 914527
ggccuuacgugccagauga

SEQ ID NO: 1010761 - RNA, 19 nt, Artificial Sequence
  Description of Artificial Sequence: Synthetic oligonucleotide
  Antisense strand to SEQ ID NO: 1010760
ucaucuggcacguaaggcc

SEQ ID NO: 1010762 - RNA, 19 nt, Artificial Sequence
  Description of Artificial Sequence: Synthetic oligonucleotide
  Sense strand starting at position 1661 of SEQ ID NO: 914527
uuacgugccagaugacaaa

SEQ ID NO: 1010763 - RNA, 19 nt, Artificial Sequence
  Description of Artificial Sequence: Synthetic oligonucleotide
  Antisense strand to SEQ ID NO: 1010762
uuugucaucuggcacguaa

SEQ ID NO: 1010764 - RNA, 19 nt, Artificial Sequence
  Description of Artificial Sequence: Synthetic oligonucleotide
  Sense strand starting at position 2262 of SEQ ID NO: 914527
gugcgaggcacuugucacu

SEQ ID NO: 1010765 - RNA, 19 nt, Artificial Sequence
  Description of Artificial Sequence: Synthetic oligonucleotide
  Antisense strand to SEQ ID NO: 1010764
agugacaagugccucgcac

SEQ ID NO: 1010766 - RNA, 19 nt, Artificial Sequence
  Description of Artificial Sequence: Synthetic oligonucleotide
  Sense strand starting at position 2268 of SEQ ID NO: 914527
ggcacuugucacugucgga

SEQ ID NO: 1010767 - RNA, 19 nt, Artificial Sequence
  Description of Artificial Sequence: Synthetic oligonucleotide
  Antisense strand to SEQ ID NO: 1010766
uccgacagugacaagugcc

SEQ ID NO: 1010768 - RNA, 19 nt, Artificial Sequence
  Description of Artificial Sequence: Synthetic oligonucleotide
  Sense strand starting at position 2485 of SEQ ID NO: 914527
ugccucuuucccugacaga

SEQ ID NO: 1010769 - RNA, 19 nt, Artificial Sequence
  Description of Artificial Sequence: Synthetic oligonucleotide
  Antisense strand to SEQ ID NO: 1010768
ucugucagggaaagaggca

SEQ ID NO: 1010770 - RNA, 19 nt, Artificial Sequence
  Description of Artificial Sequence: Synthetic oligonucleotide
  Sense strand starting at position 2486 of SEQ ID NO: 914527
gccucuuucccugacagaa

SEQ ID NO: 1010771 - RNA, 19 nt, Artificial Sequence
  Description of Artificial Sequence: Synthetic oligonucleotide
  Antisense strand to SEQ ID NO: 1010770
uucugucagggaaagaggc

SEQ ID NO: 1010772 - RNA, 19 nt, Artificial Sequence
  Description of Artificial Sequence: Synthetic oligonucleotide
  Sense strand starting at position 2547 of SEQ ID NO: 914527
cuuuccuggccucaggaaa

SEQ ID NO: 1010773 - RNA, 19 nt, Artificial Sequence
  Description of Artificial Sequence: Synthetic oligonucleotide
  Antisense strand to SEQ ID NO: 1010772
uuuccugaggccaggaaag

SEQ ID NO: 1010774 - RNA, 19 nt, Artificial Sequence
  Description of Artificial Sequence: Synthetic oligonucleotide
  Sense strand starting at position 795 of SEQ ID NO: 914528
ggcucuaugacuggacuuu

SEQ ID NO: 1010775 - RNA, 19 nt, Artificial Sequence
  Description of Artificial Sequence: Synthetic oligonucleotide
  Antisense strand to SEQ ID NO: 1010774
aaaguccagucauagagcc

SEQ ID NO: 1010776 - RNA, 19 nt, Artificial Sequence
  Description of Artificial Sequence: Synthetic oligonucleotide
  Sense strand starting at position 796 of SEQ ID NO: 914528
gcucuaugacuggacuuua

SEQ ID NO: 1010777 - RNA, 19 nt, Artificial Sequence
  Description of Artificial Sequence: Synthetic oligonucleotide
  Antisense strand to SEQ ID NO: 1010776
uaaaguccagucauagagc

SEQ ID NO: 1010778 - RNA, 19 nt, Artificial Sequence
  Description of Artificial Sequence: Synthetic oligonucleotide
  Sense strand starting at position 822 of SEQ ID NO: 914528
ccaauacugccugaaauug

SEQ ID NO: 1010779 - RNA, 19 nt, Artificial Sequence
  Description of Artificial Sequence: Synthetic oligonucleotide
  Antisense strand to SEQ ID NO: 1010778
caauuucaggcaguauugg

SEQ ID NO: 1010780 - RNA, 19 nt, Artificial Sequence
  Description of Artificial Sequence: Synthetic oligonucleotide
  Sense strand starting at position 830 of SEQ ID NO: 914528
gccugaaauugacuaccua

SEQ ID NO: 1010781 - RNA, 19 nt, Artificial Sequence
  Description of Artificial Sequence: Synthetic oligonucleotide
  Antisense strand to SEQ ID NO: 1010780
uagguagucaauuucaggc

SEQ ID NO: 1010782 - RNA, 19 nt, Artificial Sequence
  Description of Artificial Sequence: Synthetic oligonucleotide
  Sense strand starting at position 881 of SEQ ID NO: 914528
uugaguucuaaagguugaa

SEQ ID NO: 1010783 - RNA, 19 nt, Artificial Sequence
  Description of Artificial Sequence: Synthetic oligonucleotide
  Antisense strand to SEQ ID NO: 1010782
uucaaccuuuagaacucaa

SEQ ID NO: 1010784 - RNA, 19 nt, Artificial Sequence
  Description of Artificial Sequence: Synthetic oligonucleotide
  Sense strand starting at position 1023 of SEQ ID NO: 914528
gaauauagccauuguagaa

SEQ ID NO: 1010785 - RNA, 19 nt, Artificial Sequence
  Description of Artificial Sequence: Synthetic oligonucleotide
  Antisense strand to SEQ ID NO: 1010784
uucuacaauggcuauauuc

SEQ ID NO: 1010786 - RNA, 19 nt, Artificial Sequence
  Description of Artificial Sequence: Synthetic oligonucleotide
  Sense strand starting at position 1074 of SEQ ID NO: 914528
cccaaagagucugauuucu

SEQ ID NO: 1010787 - RNA, 19 nt, Artificial Sequence
  Description of Artificial Sequence: Synthetic oligonucleotide
  Antisense strand to SEQ ID NO: 1010786
agaaaucagacucuuuggg

SEQ ID NO: 1010788 - RNA, 19 nt, Artificial Sequence
  Description of Artificial Sequence: Synthetic oligonucleotide
  Sense strand starting at position 1172 of SEQ ID NO: 914528
gcauaucucagguggaaau

SEQ ID NO: 1010789 - RNA, 19 nt, Artificial Sequence
  Description of Artificial Sequence: Synthetic oligonucleotide
  Antisense strand to SEQ ID NO: 1010788
auuuccaccugagauaugc

SEQ ID NO: 1010790 - RNA, 19 nt, Artificial Sequence
  Description of Artificial Sequence: Synthetic oligonucleotide
  Sense strand starting at position 1173 of SEQ ID NO: 914528
cauaucucagguggaaauu

SEQ ID NO: 1010791 - RNA, 19 nt, Artificial Sequence
  Description of Artificial Sequence: Synthetic oligonucleotide
  Antisense strand to SEQ ID NO: 1010790
aauuuccaccugagauaug

SEQ ID NO: 1010792 - RNA, 19 nt, Artificial Sequence
  Description of Artificial Sequence: Synthetic oligonucleotide
  Sense strand starting at position 1241 of SEQ ID NO: 914528
gcucaagaauuugacacuu

SEQ ID NO: 1010793 - RNA, 19 nt, Artificial Sequence
  Description of Artificial Sequence: Synthetic oligonucleotide
  Antisense strand to SEQ ID NO: 1010792
aagugucaaauucuugagc

SEQ ID NO: 1010794 - RNA, 19 nt, Artificial Sequence
  Description of Artificial Sequence: Synthetic oligonucleotide
  Sense strand starting at position 1357 of SEQ ID NO: 914528
uggcuaaugcuauauagga

SEQ ID NO: 1010795 - RNA, 19 nt, Artificial Sequence
  Description of Artificial Sequence: Synthetic oligonucleotide
  Antisense strand to SEQ ID NO: 1010794
uccuauauagcauuagcca

SEQ ID NO: 1010796 - RNA, 19 nt, Artificial Sequence
  Description of Artificial Sequence: Synthetic oligonucleotide
  Sense strand starting at position 1359 of SEQ ID NO: 914528
gcuaaugcuauauaggaga

SEQ ID NO: 1010797 - RNA, 19 nt, Artificial Sequence
  Description of Artificial Sequence: Synthetic oligonucleotide
  Antisense strand to SEQ ID NO: 1010796
ucuccuauauagcauuagc

SEQ ID NO: 1010798 - RNA, 19 nt, Artificial Sequence
  Description of Artificial Sequence: Synthetic oligonucleotide
  Sense strand starting at position 1372 of SEQ ID NO: 914528
aggagaaauugguaggauu

SEQ ID NO: 1010799 - RNA, 19 nt, Artificial Sequence
  Description of Artificial Sequence: Synthetic oligonucleotide
  Antisense strand to SEQ ID NO: 1010798
aauccuaccaauuucuccu

SEQ ID NO: 1010800 - RNA, 19 nt, Artificial Sequence
  Description of Artificial Sequence: Synthetic oligonucleotide
  Sense strand starting at position 1495 of SEQ ID NO: 914528
uggcuaaucuguucuagua

SEQ ID NO: 1010801 - RNA, 19 nt, Artificial Sequence
  Description of Artificial Sequence: Synthetic oligonucleotide
  Antisense strand to SEQ ID NO: 1010800
uacuagaacagauuagcca

SEQ ID NO: 1010802 - RNA, 19 nt, Artificial Sequence
  Description of Artificial Sequence: Synthetic oligonucleotide
  Sense strand starting at position 1745 of SEQ ID NO: 914528
ugguaaguugcuggaucaa

SEQ ID NO: 1010803 - RNA, 19 nt, Artificial Sequence
  Description of Artificial Sequence: Synthetic oligonucleotide
  Antisense strand to SEQ ID NO: 1010802
uugauccagcaacuuacca

SEQ ID NO: 1010804 - RNA, 19 nt, Artificial Sequence
  Description of Artificial Sequence: Synthetic oligonucleotide
  Sense strand starting at position 1990 of SEQ ID NO: 914528
agaugugacucucaaagac

SEQ ID NO: 1010805 - RNA, 19 nt, Artificial Sequence
  Description of Artificial Sequence: Synthetic oligonucleotide
  Antisense strand to SEQ ID NO: 1010804
gucuuugagagucacaucu

SEQ ID NO: 1010806 - RNA, 19 nt, Artificial Sequence
  Description of Artificial Sequence: Synthetic oligonucleotide
  Sense strand starting at position 2017 of SEQ ID NO: 914528
cugggcauucucuacuaau

SEQ ID NO: 1010807 - RNA, 19 nt, Artificial Sequence
  Description of Artificial Sequence: Synthetic oligonucleotide
  Antisense strand to SEQ ID NO: 1010806
auuaguagagaaugcccag

SEQ ID NO: 1010808 - RNA, 19 nt, Artificial Sequence
  Description of Artificial Sequence: Synthetic oligonucleotide
  Sense strand starting at position 2064 of SEQ ID NO: 914528
gccugacucagaggaggua

SEQ ID NO: 1010809 - RNA, 19 nt, Artificial Sequence
  Description of Artificial Sequence: Synthetic oligonucleotide
  Antisense strand to SEQ ID NO: 1010808
uaccuccucugagucaggc

SEQ ID NO: 1010810 - RNA, 19 nt, Artificial Sequence
  Description of Artificial Sequence: Synthetic oligonucleotide
  Sense strand starting at position 2083 of SEQ ID NO: 914528
gcaaauuccuggcugugga

SEQ ID NO: 1010811 - RNA, 19 nt, Artificial Sequence
  Description of Artificial Sequence: Synthetic oligonucleotide
  Antisense strand to SEQ ID NO: 1010810
uccacagccaggaauuugc

SEQ ID NO: 1010812 - RNA, 19 nt, Artificial Sequence
  Description of Artificial Sequence: Synthetic oligonucleotide
  Sense strand starting at position 2084 of SEQ ID NO: 914528
caaauuccuggcuguggau

SEQ ID NO: 1010813 - RNA, 19 nt, Artificial Sequence
  Description of Artificial Sequence: Synthetic oligonucleotide
  Antisense strand to SEQ ID NO: 1010812
auccacagccaggaauuug

SEQ ID NO: 1010814 - RNA, 19 nt, Artificial Sequence
  Description of Artificial Sequence: Synthetic oligonucleotide
  Sense strand starting at position 2192 of SEQ ID NO: 914528
uuagcacacuuguuucuau

SEQ ID NO: 1010815 - RNA, 19 nt, Artificial Sequence
  Description of Artificial Sequence: Synthetic oligonucleotide
  Antisense strand to SEQ ID NO: 1010814
auagaaacaagugugcuaa

SEQ ID NO: 1010816 - RNA, 19 nt, Artificial Sequence
  Description of Artificial Sequence: Synthetic oligonucleotide
  Sense strand starting at position 2235 of SEQ ID NO: 914528
gcaacaaggucacuaucau

SEQ ID NO: 1010817 - RNA, 19 nt, Artificial Sequence
  Description of Artificial Sequence: Synthetic oligonucleotide
  Antisense strand to SEQ ID NO: 1010816
augauagugaccuuguugc

SEQ ID NO: 1010818 - RNA, 19 nt, Artificial Sequence
  Description of Artificial Sequence: Synthetic oligonucleotide
  Sense strand starting at position 2352 of SEQ ID NO: 914528
uucucauaggcuggcgaaa

SEQ ID NO: 1010819 - RNA, 19 nt, Artificial Sequence
  Description of Artificial Sequence: Synthetic oligonucleotide
  Antisense strand to SEQ ID NO: 1010818
uuucgccagccuaugagaa

SEQ ID NO: 1010820 - RNA, 19 nt, Artificial Sequence
  Description of Artificial Sequence: Synthetic oligonucleotide
  Sense strand starting at position 2414 of SEQ ID NO: 914528
aaguaucuaccauggguca

SEQ ID NO: 1010821 - RNA, 19 nt, Artificial Sequence
  Description of Artificial Sequence: Synthetic oligonucleotide
  Antisense strand to SEQ ID NO: 1010820
ugacccaugguagauacuu

SEQ ID NO: 1010822 - RNA, 19 nt, Artificial Sequence
  Description of Artificial Sequence: Synthetic oligonucleotide
  Sense strand starting at position 2416 of SEQ ID NO: 914528
guaucuaccaugggucagu

SEQ ID NO: 1010823 - RNA, 19 nt, Artificial Sequence
  Description of Artificial Sequence: Synthetic oligonucleotide
  Antisense strand to SEQ ID NO: 1010822
acugacccaugguagauac

SEQ ID NO: 1010824 - RNA, 19 nt, Artificial Sequence
  Description of Artificial Sequence: Synthetic oligonucleotide
  Sense strand starting at position 2426 of SEQ ID NO: 914528
ugggucagucaguaagcua

SEQ ID NO: 1010825 - RNA, 19 nt, Artificial Sequence
  Description of Artificial Sequence: Synthetic oligonucleotide
  Antisense strand to SEQ ID NO: 1010824
uagcuuacugacugaccca

SEQ ID NO: 1010826 - RNA, 19 nt, Artificial Sequence
  Description of Artificial Sequence: Synthetic oligonucleotide
  Sense strand starting at position 2429 of SEQ ID NO: 914528
gucagucaguaagcuaaau

SEQ ID NO: 1010827 - RNA, 19 nt, Artificial Sequence
  Description of Artificial Sequence: Synthetic oligonucleotide
  Antisense strand to SEQ ID NO: 1010826
auuuagcuuacugacugac

SEQ ID NO: 1010828 - RNA, 19 nt, Artificial Sequence
  Description of Artificial Sequence: Synthetic oligonucleotide
  Sense strand starting at position 2473 of SEQ ID NO: 914528
ucagaauauuucugaggua

SEQ ID NO: 1010829 - RNA, 19 nt, Artificial Sequence
  Description of Artificial Sequence: Synthetic oligonucleotide
  Antisense strand to SEQ ID NO: 1010828
uaccucagaaauauucuga

SEQ ID NO: 1010830 - RNA, 19 nt, Artificial Sequence
  Description of Artificial Sequence: Synthetic oligonucleotide
  Sense strand starting at position 2474 of SEQ ID NO: 914528
cagaauauuucugagguaa

SEQ ID NO: 1010831 - RNA, 19 nt, Artificial Sequence
  Description of Artificial Sequence: Synthetic oligonucleotide
  Antisense strand to SEQ ID NO: 1010830
uuaccucagaaauauucug

SEQ ID NO: 1010832 - RNA, 19 nt, Artificial Sequence
  Description of Artificial Sequence: Synthetic oligonucleotide
  Sense strand starting at position 2476 of SEQ ID NO: 914528
gaauauuucugagguaaau

SEQ ID NO: 1010833 - RNA, 19 nt, Artificial Sequence
  Description of Artificial Sequence: Synthetic oligonucleotide
  Antisense strand to SEQ ID NO: 1010832
auuuaccucagaaauauuc

SEQ ID NO: 1010834 - RNA, 19 nt, Artificial Sequence
  Description of Artificial Sequence: Synthetic oligonucleotide
  Sense strand starting at position 2485 of SEQ ID NO: 914528
ugagguaaauguuauuucu

SEQ ID NO: 1010835 - RNA, 19 nt, Artificial Sequence
  Description of Artificial Sequence: Synthetic oligonucleotide
  Antisense strand to SEQ ID NO: 1010834
agaaauaacauuuaccuca

SEQ ID NO: 1010836 - RNA, 19 nt, Artificial Sequence
  Description of Artificial Sequence: Synthetic oligonucleotide
  Sense strand starting at position 2570 of SEQ ID NO: 914528
auagaagucugauucuaua

SEQ ID NO: 1010837 - RNA, 19 nt, Artificial Sequence
  Description of Artificial Sequence: Synthetic oligonucleotide
  Antisense strand to SEQ ID NO: 1010836
uauagaaucagacuucuau

SEQ ID NO: 1010838 - RNA, 19 nt, Artificial Sequence
  Description of Artificial Sequence: Synthetic oligonucleotide
  Sense strand starting at position 2864 of SEQ ID NO: 914528
ugguaacauuucuaaagca

SEQ ID NO: 1010839 - RNA, 19 nt, Artificial Sequence
  Description of Artificial Sequence: Synthetic oligonucleotide
  Antisense strand to SEQ ID NO: 1010838
ugcuuuagaaauguuacca

SEQ ID NO: 1010840 - RNA, 19 nt, Artificial Sequence
  Description of Artificial Sequence: Synthetic oligonucleotide
  Sense strand starting at position 2926 of SEQ ID NO: 914528
ccagucauaccacaugcuu

SEQ ID NO: 1010841 - RNA, 19 nt, Artificial Sequence
  Description of Artificial Sequence: Synthetic oligonucleotide
  Antisense strand to SEQ ID NO: 1010840
aagcaugugguaugacugg

SEQ ID NO: 1010842 - RNA, 19 nt, Artificial Sequence
  Description of Artificial Sequence: Synthetic oligonucleotide
  Sense strand starting at position 2953 of SEQ ID NO: 914528
aagagaaugagcugggcuu

SEQ ID NO: 1010843 - RNA, 19 nt, Artificial Sequence
  Description of Artificial Sequence: Synthetic oligonucleotide
  Antisense strand to SEQ ID NO: 1010842
aagcccagcucauucucuu

SEQ ID NO: 1010844 - RNA, 19 nt, Artificial Sequence
  Description of Artificial Sequence: Synthetic oligonucleotide
  Sense strand starting at position 2954 of SEQ ID NO: 914528
agagaaugagcugggcuuu

SEQ ID NO: 1010845 - RNA, 19 nt, Artificial Sequence
  Description of Artificial Sequence: Synthetic oligonucleotide
  Antisense strand to SEQ ID NO: 1010844
aaagcccagcucauucucu

SEQ ID NO: 1010846 - RNA, 19 nt, Artificial Sequence
  Description of Artificial Sequence: Synthetic oligonucleotide
  Sense strand starting at position 2960 of SEQ ID NO: 914528
ugagcugggcuuugaaaug

SEQ ID NO: 1010847 - RNA, 19 nt, Artificial Sequence
  Description of Artificial Sequence: Synthetic oligonucleotide
  Antisense strand to SEQ ID NO: 1010846
cauuucaaagcccagcuca

SEQ ID NO: 1010848 - RNA, 19 nt, Artificial Sequence
  Description of Artificial Sequence: Synthetic oligonucleotide
  Sense strand starting at position 2965 of SEQ ID NO: 914528
ugggcuuugaaaugacagu

SEQ ID NO: 1010849 - RNA, 19 nt, Artificial Sequence
  Description of Artificial Sequence: Synthetic oligonucleotide
  Antisense strand to SEQ ID NO: 1010848
acugucauuucaaagccca

SEQ ID NO: 1010850 - RNA, 19 nt, Artificial Sequence
  Description of Artificial Sequence: Synthetic oligonucleotide
  Sense strand starting at position 3001 of SEQ ID NO: 914528
cuuggaggguugucauucu

SEQ ID NO: 1010851 - RNA, 19 nt, Artificial Sequence
  Description of Artificial Sequence: Synthetic oligonucleotide
  Antisense strand to SEQ ID NO: 1010850
agaaugacaacccuccaag

SEQ ID NO: 1010852 - RNA, 19 nt, Artificial Sequence
  Description of Artificial Sequence: Synthetic oligonucleotide
  Sense strand starting at position 3037 of SEQ ID NO: 914528
aaaugaugcuuauugggua

SEQ ID NO: 1010853 - RNA, 19 nt, Artificial Sequence
  Description of Artificial Sequence: Synthetic oligonucleotide
  Antisense strand to SEQ ID NO: 1010852
uacccaauaagcaucauuu

SEQ ID NO: 1010854 - RNA, 19 nt, Artificial Sequence
  Description of Artificial Sequence: Synthetic oligonucleotide
  Sense strand starting at position 187 of SEQ ID NO: 914529
ucagauaggcuuuaauauc

SEQ ID NO: 1010855 - RNA, 19 nt, Artificial Sequence
  Description of Artificial Sequence: Synthetic oligonucleotide
  Antisense strand to SEQ ID NO: 1010854
gauauuaaagccuaucuga

SEQ ID NO: 1010856 - RNA, 19 nt, Artificial Sequence
  Description of Artificial Sequence: Synthetic oligonucleotide
  Sense strand starting at position 386 of SEQ ID NO: 914529
uucgauuagagucagagua

SEQ ID NO: 1010857 - RNA, 19 nt, Artificial Sequence
  Description of Artificial Sequence: Synthetic oligonucleotide
  Antisense strand to SEQ ID NO: 1010856
uacucugacucuaaucgaa

SEQ ID NO: 1010858 - RNA, 19 nt, Artificial Sequence
  Description of Artificial Sequence: Synthetic oligonucleotide
  Sense strand starting at position 412 of SEQ ID NO: 914529
gccuguuaaguuuaagacu

SEQ ID NO: 1010859 - RNA, 19 nt, Artificial Sequence
  Description of Artificial Sequence: Synthetic oligonucleotide
  Antisense strand to SEQ ID NO: 1010858
agucuuaaacuuaacaggc

SEQ ID NO: 1010860 - RNA, 19 nt, Artificial Sequence
  Description of Artificial Sequence: Synthetic oligonucleotide
  Sense strand starting at position 487 of SEQ ID NO: 914529
gcaagcaaccaugagaauu

SEQ ID NO: 1010861 - RNA, 19 nt, Artificial Sequence
  Description of Artificial Sequence: Synthetic oligonucleotide
  Antisense strand to SEQ ID NO: 1010860
aauucucaugguugcuugc

SEQ ID NO: 1010862 - RNA, 19 nt, Artificial Sequence
  Description of Artificial Sequence: Synthetic oligonucleotide
  Sense strand starting at position 611 of SEQ ID NO: 914529
cccuguaauggucauaagu

SEQ ID NO: 1010863 - RNA, 19 nt, Artificial Sequence
  Description of Artificial Sequence: Synthetic oligonucleotide
  Antisense strand to SEQ ID NO: 1010862
acuuaugaccauuacaggg

SEQ ID NO: 1010864 - RNA, 19 nt, Artificial Sequence
  Description of Artificial Sequence: Synthetic oligonucleotide
  Sense strand starting at position 624 of SEQ ID NO: 914529
auaaguacuucuguaauuc

SEQ ID NO: 1010865 - RNA, 19 nt, Artificial Sequence
  Description of Artificial Sequence: Synthetic oligonucleotide
  Antisense strand to SEQ ID NO: 1010864
gaauuacagaaguacuuau

SEQ ID NO: 1010866 - RNA, 19 nt, Artificial Sequence
  Description of Artificial Sequence: Synthetic oligonucleotide
  Sense strand starting at position 654 of SEQ ID NO: 914529
aacaguaaucgaugauauc

SEQ ID NO: 1010867 - RNA, 19 nt, Artificial Sequence
  Description of Artificial Sequence: Synthetic oligonucleotide
  Antisense strand to SEQ ID NO: 1010866
gauaucaucgauuacuguu

SEQ ID NO: 1010868 - RNA, 19 nt, Artificial Sequence
  Description of Artificial Sequence: Synthetic oligonucleotide
  Sense strand starting at position 655 of SEQ ID NO: 914529
acaguaaucgaugauaucu

SEQ ID NO: 1010869 - RNA, 19 nt, Artificial Sequence
  Description of Artificial Sequence: Synthetic oligonucleotide
  Antisense strand to SEQ ID NO: 1010868
agauaucaucgauuacugu

SEQ ID NO: 1010870 - RNA, 19 nt, Artificial Sequence
  Description of Artificial Sequence: Synthetic oligonucleotide
  Sense strand starting at position 663 of SEQ ID NO: 914529
cgaugauaucugcauuaau

SEQ ID NO: 1010871 - RNA, 19 nt, Artificial Sequence
  Description of Artificial Sequence: Synthetic oligonucleotide
  Antisense strand to SEQ ID NO: 1010870
auuaaugcagauaucaucg

SEQ ID NO: 1010872 - RNA, 19 nt, Artificial Sequence
  Description of Artificial Sequence: Synthetic oligonucleotide
  Sense strand starting at position 748 of SEQ ID NO: 914529
uccuuauuuccacagucgu

SEQ ID NO: 1010873 - RNA, 19 nt, Artificial Sequence
  Description of Artificial Sequence: Synthetic oligonucleotide
  Antisense strand to SEQ ID NO: 1010872
acgacuguggaaauaagga

SEQ ID NO: 1010874 - RNA, 19 nt, Artificial Sequence
  Description of Artificial Sequence: Synthetic oligonucleotide
  Sense strand starting at position 843 of SEQ ID NO: 914529
uagguaaggcauugaacau

SEQ ID NO: 1010875 - RNA, 19 nt, Artificial Sequence
  Description of Artificial Sequence: Synthetic oligonucleotide
  Antisense strand to SEQ ID NO: 1010874
auguucaaugccuuaccua

SEQ ID NO: 1010876 - RNA, 19 nt, Artificial Sequence
  Description of Artificial Sequence: Synthetic oligonucleotide
  Sense strand starting at position 1028 of SEQ ID NO: 914529
aggucaucagaguaauucu

SEQ ID NO: 1010877 - RNA, 19 nt, Artificial Sequence
  Description of Artificial Sequence: Synthetic oligonucleotide
  Antisense strand to SEQ ID NO: 1010876
agaauuacucugaugaccu

SEQ ID NO: 1010878 - RNA, 19 nt, Artificial Sequence
  Description of Artificial Sequence: Synthetic oligonucleotide
  Sense strand starting at position 1102 of SEQ ID NO: 914529
ugguaaggaugucugaaca

SEQ ID NO: 1010879 - RNA, 19 nt, Artificial Sequence
  Description of Artificial Sequence: Synthetic oligonucleotide
  Antisense strand to SEQ ID NO: 1010878
uguucagacauccuuacca

SEQ ID NO: 1010880 - RNA, 19 nt, Artificial Sequence
  Description of Artificial Sequence: Synthetic oligonucleotide
  Sense strand starting at position 1198 of SEQ ID NO: 914529
ucucacgaacuuuguagaa

SEQ ID NO: 1010881 - RNA, 19 nt, Artificial Sequence
  Description of Artificial Sequence: Synthetic oligonucleotide
  Antisense strand to SEQ ID NO: 1010880
uucuacaaaguucgugaga

SEQ ID NO: 1010882 - RNA, 19 nt, Artificial Sequence
  Description of Artificial Sequence: Synthetic oligonucleotide
  Sense strand starting at position 1262 of SEQ ID NO: 914529
augccagaugcccaauuau

SEQ ID NO: 1010883 - RNA, 19 nt, Artificial Sequence
  Description of Artificial Sequence: Synthetic oligonucleotide
  Antisense strand to SEQ ID NO: 1010882
auaauugggcaucuggcau

SEQ ID NO: 1010884 - RNA, 19 nt, Artificial Sequence
  Description of Artificial Sequence: Synthetic oligonucleotide
  Sense strand starting at position 1392 of SEQ ID NO: 914529
uggcauuuauugccuuaca

SEQ ID NO: 1010885 - RNA, 19 nt, Artificial Sequence
  Description of Artificial Sequence: Synthetic oligonucleotide
  Antisense strand to SEQ ID NO: 1010884
uguaaggcaauaaaugcca

SEQ ID NO: 1010886 - RNA, 19 nt, Artificial Sequence
  Description of Artificial Sequence: Synthetic oligonucleotide
  Sense strand starting at position 1415 of SEQ ID NO: 914529
gcaauuugcguguaggaau

SEQ ID NO: 1010887 - RNA, 19 nt, Artificial Sequence
  Description of Artificial Sequence: Synthetic oligonucleotide
  Antisense strand to SEQ ID NO: 1010886
auuccuacacgcaaauugc

SEQ ID NO: 1010888 - RNA, 19 nt, Artificial Sequence
  Description of Artificial Sequence: Synthetic oligonucleotide
  Sense strand starting at position 1426 of SEQ ID NO: 914529
guaggaauugcuuacucuu

SEQ ID NO: 1010889 - RNA, 19 nt, Artificial Sequence
  Description of Artificial Sequence: Synthetic oligonucleotide
  Antisense strand to SEQ ID NO: 1010888
aagaguaagcaauuccuac

SEQ ID NO: 1010890 - RNA, 19 nt, Artificial Sequence
  Description of Artificial Sequence: Synthetic oligonucleotide
  Sense strand starting at position 1428 of SEQ ID NO: 914529
aggaauugcuuacucuuau

SEQ ID NO: 1010891 - RNA, 19 nt, Artificial Sequence
  Description of Artificial Sequence: Synthetic oligonucleotide
  Antisense strand to SEQ ID NO: 1010890
auaagaguaagcaauuccu

SEQ ID NO: 1010892 - RNA, 19 nt, Artificial Sequence
  Description of Artificial Sequence: Synthetic oligonucleotide
  Sense strand starting at position 1476 of SEQ ID NO: 914529
gguuauauuuacucuuguu

SEQ ID NO: 1010893 - RNA, 19 nt, Artificial Sequence
  Description of Artificial Sequence: Synthetic oligonucleotide
  Antisense strand to SEQ ID NO: 1010892
aacaagaguaaauauaacc

SEQ ID NO: 1010894 - RNA, 19 nt, Artificial Sequence
  Description of Artificial Sequence: Synthetic oligonucleotide
  Sense strand starting at position 1600 of SEQ ID NO: 914529
aaaggauggcuuugcagaa

SEQ ID NO: 1010895 - RNA, 19 nt, Artificial Sequence
  Description of Artificial Sequence: Synthetic oligonucleotide
  Antisense strand to SEQ ID NO: 1010894
uucugcaaagccauccuuu

SEQ ID NO: 1010896 - RNA, 19 nt, Artificial Sequence
  Description of Artificial Sequence: Synthetic oligonucleotide
  Sense strand starting at position 1604 of SEQ ID NO: 914529
gauggcuuugcagaacaga

SEQ ID NO: 1010897 - RNA, 19 nt, Artificial Sequence
  Description of Artificial Sequence: Synthetic oligonucleotide
  Antisense strand to SEQ ID NO: 1010896
ucuguucugcaaagccauc

SEQ ID NO: 1010898 - RNA, 19 nt, Artificial Sequence
  Description of Artificial Sequence: Synthetic oligonucleotide
  Sense strand starting at position 1614 of SEQ ID NO: 914529
cagaacagagugugucaaa

SEQ ID NO: 1010899 - RNA, 19 nt, Artificial Sequence
  Description of Artificial Sequence: Synthetic oligonucleotide
  Antisense strand to SEQ ID NO: 1010898
uuugacacacucuguucug

SEQ ID NO: 1010900 - RNA, 19 nt, Artificial Sequence
  Description of Artificial Sequence: Synthetic oligonucleotide
  Sense strand starting at position 1686 of SEQ ID NO: 914529
aaaggaaugucagccacuu

SEQ ID NO: 1010901 - RNA, 19 nt, Artificial Sequence
  Description of Artificial Sequence: Synthetic oligonucleotide
  Antisense strand to SEQ ID NO: 1010900
aaguggcugacauuccuuu

SEQ ID NO: 1010902 - RNA, 19 nt, Artificial Sequence
  Description of Artificial Sequence: Synthetic oligonucleotide
  Sense strand starting at position 2711 of SEQ ID NO: 914529
auauuacaauggcuguaau

SEQ ID NO: 1010903 - RNA, 19 nt, Artificial Sequence
  Description of Artificial Sequence: Synthetic oligonucleotide
  Antisense strand to SEQ ID NO: 1010902
auuacagccauuguaauau

SEQ ID NO: 1010904 - RNA, 19 nt, Artificial Sequence
  Description of Artificial Sequence: Synthetic oligonucleotide
  Sense strand starting at position 2768 of SEQ ID NO: 914529
gcuuuagugccauuguucu

SEQ ID NO: 1010905 - RNA, 19 nt, Artificial Sequence
  Description of Artificial Sequence: Synthetic oligonucleotide
  Antisense strand to SEQ ID NO: 1010904
agaacaauggcacuaaagc

SEQ ID NO: 1010906 - RNA, 19 nt, Artificial Sequence
  Description of Artificial Sequence: Synthetic oligonucleotide
  Sense strand starting at position 2851 of SEQ ID NO: 914529
cacgauugggcugauggua

SEQ ID NO: 1010907 - RNA, 19 nt, Artificial Sequence
  Description of Artificial Sequence: Synthetic oligonucleotide
  Antisense strand to SEQ ID NO: 1010906
uaccaucagcccaaucgug

SEQ ID NO: 1010908 - RNA, 19 nt, Artificial Sequence
  Description of Artificial Sequence: Synthetic oligonucleotide
  Sense strand starting at position 3133 of SEQ ID NO: 914529
ucuaauuggcaaggagagu

SEQ ID NO: 1010909 - RNA, 19 nt, Artificial Sequence
  Description of Artificial Sequence: Synthetic oligonucleotide
  Antisense strand to SEQ ID NO: 1010908
acucuccuugccaauuaga

SEQ ID NO: 1010910 - RNA, 19 nt, Artificial Sequence
  Description of Artificial Sequence: Synthetic oligonucleotide
  Sense strand starting at position 3198 of SEQ ID NO: 914529
guguucuuucucuugcagu

SEQ ID NO: 1010911 - RNA, 19 nt, Artificial Sequence
  Description of Artificial Sequence: Synthetic oligonucleotide
  Antisense strand to SEQ ID NO: 1010910
acugcaagagaaagaacac

SEQ ID NO: 1010912 - RNA, 19 nt, Artificial Sequence
  Description of Artificial Sequence: Synthetic oligonucleotide
  Sense strand starting at position 3325 of SEQ ID NO: 914529
ggcugauugcuuguucugu

SEQ ID NO: 1010913 - RNA, 19 nt, Artificial Sequence
  Description of Artificial Sequence: Synthetic oligonucleotide
  Antisense strand to SEQ ID NO: 1010912
acagaacaagcaaucagcc

SEQ ID NO: 1010914 - RNA, 19 nt, Artificial Sequence
  Description of Artificial Sequence: Synthetic oligonucleotide
  Sense strand starting at position 3403 of SEQ ID NO: 914529
guguuccugcuuuccagua

SEQ ID NO: 1010915 - RNA, 19 nt, Artificial Sequence
  Description of Artificial Sequence: Synthetic oligonucleotide
  Antisense strand to SEQ ID NO: 1010914
uacuggaaagcaggaacac

SEQ ID NO: 1010916 - RNA, 19 nt, Artificial Sequence
  Description of Artificial Sequence: Synthetic oligonucleotide
  Sense strand starting at position 3408 of SEQ ID NO: 914529
ccugcuuuccaguaacuag

SEQ ID NO: 1010917 - RNA, 19 nt, Artificial Sequence
  Description of Artificial Sequence: Synthetic oligonucleotide
  Antisense strand to SEQ ID NO: 1010916
cuaguuacuggaaagcagg

SEQ ID NO: 1010918 - RNA, 19 nt, Artificial Sequence
  Description of Artificial Sequence: Synthetic oligonucleotide
  Sense strand starting at position 3437 of SEQ ID NO: 914529
uuauguguuaacugaggga

SEQ ID NO: 1010919 - RNA, 19 nt, Artificial Sequence
  Description of Artificial Sequence: Synthetic oligonucleotide
  Antisense strand to SEQ ID NO: 1010918
ucccucaguuaacacauaa

SEQ ID NO: 1010920 - RNA, 19 nt, Artificial Sequence
  Description of Artificial Sequence: Synthetic oligonucleotide
  Sense strand starting at position 3442 of SEQ ID NO: 914529
uguuaacugagggaucguu

SEQ ID NO: 1010921 - RNA, 19 nt, Artificial Sequence
  Description of Artificial Sequence: Synthetic oligonucleotide
  Antisense strand to SEQ ID NO: 1010920
aacgaucccucaguuaaca

SEQ ID NO: 1010922 - RNA, 19 nt, Artificial Sequence
  Description of Artificial Sequence: Synthetic oligonucleotide
  Sense strand starting at position 3676 of SEQ ID NO: 914529
agggaucgggaguguagaa

SEQ ID NO: 1010923 - RNA, 19 nt, Artificial Sequence
  Description of Artificial Sequence: Synthetic oligonucleotide
  Antisense strand to SEQ ID NO: 1010922
uucuacacucccgaucccu

SEQ ID NO: 1010924 - RNA, 19 nt, Artificial Sequence
  Description of Artificial Sequence: Synthetic oligonucleotide
  Sense strand starting at position 3689 of SEQ ID NO: 914529
guagaaagcuuucugaaag

SEQ ID NO: 1010925 - RNA, 19 nt, Artificial Sequence
  Description of Artificial Sequence: Synthetic oligonucleotide
  Antisense strand to SEQ ID NO: 1010924
cuuucagaaagcuuucuac

SEQ ID NO: 1010926 - RNA, 19 nt, Artificial Sequence
  Description of Artificial Sequence: Synthetic oligonucleotide
  Sense strand starting at position 3798 of SEQ ID NO: 914529
cuagcuuugcccuagaaag

SEQ ID NO: 1010927 - RNA, 19 nt, Artificial Sequence
  Description of Artificial Sequence: Synthetic oligonucleotide
  Antisense strand to SEQ ID NO: 1010926
cuuucuagggcaaagcuag

SEQ ID NO: 1010928 - RNA, 19 nt, Artificial Sequence
  Description of Artificial Sequence: Synthetic oligonucleotide
  Sense strand starting at position 3800 of SEQ ID NO: 914529
agcuuugcccuagaaagga

SEQ ID NO: 1010929 - RNA, 19 nt, Artificial Sequence
  Description of Artificial Sequence: Synthetic oligonucleotide
  Antisense strand to SEQ ID NO: 1010928
uccuuucuagggcaaagcu

SEQ ID NO: 1010930 - RNA, 19 nt, Artificial Sequence
  Description of Artificial Sequence: Synthetic oligonucleotide
  Sense strand starting at position 3866 of SEQ ID NO: 914529
aaauguaggucagugagau

SEQ ID NO: 1010931 - RNA, 19 nt, Artificial Sequence
  Description of Artificial Sequence: Synthetic oligonucleotide
  Antisense strand to SEQ ID NO: 1010930
aucucacugaccuacauuu

SEQ ID NO: 1010932 - RNA, 19 nt, Artificial Sequence
  Description of Artificial Sequence: Synthetic oligonucleotide
  Sense strand starting at position 3867 of SEQ ID NO: 914529
aauguaggucagugagauc

SEQ ID NO: 1010933 - RNA, 19 nt, Artificial Sequence
  Description of Artificial Sequence: Synthetic oligonucleotide
  Antisense strand to SEQ ID NO: 1010932
gaucucacugaccuacauu

SEQ ID NO: 1010934 - RNA, 19 nt, Artificial Sequence
  Description of Artificial Sequence: Synthetic oligonucleotide
  Sense strand starting at position 267 of SEQ ID NO: 914530
uuuagaugagugcagguau

SEQ ID NO: 1010935 - RNA, 19 nt, Artificial Sequence
  Description of Artificial Sequence: Synthetic oligonucleotide
  Antisense strand to SEQ ID NO: 1010934
auaccugcacucaucuaaa

SEQ ID NO: 1010936 - RNA, 19 nt, Artificial Sequence
  Description of Artificial Sequence: Synthetic oligonucleotide
  Sense strand starting at position 280 of SEQ ID NO: 914530
agguaugcugcagauauua

SEQ ID NO: 1010937 - RNA, 19 nt, Artificial Sequence
  Description of Artificial Sequence: Synthetic oligonucleotide
  Antisense strand to SEQ ID NO: 1010936
uaauaucugcagcauaccu

SEQ ID NO: 1010938 - RNA, 19 nt, Artificial Sequence
  Description of Artificial Sequence: Synthetic oligonucleotide
  Sense strand starting at position 383 of SEQ ID NO: 914530
uuuggagcauaaucugaua

SEQ ID NO: 1010939 - RNA, 19 nt, Artificial Sequence
  Description of Artificial Sequence: Synthetic oligonucleotide
  Antisense strand to SEQ ID NO: 1010938
uaucagauuaugcuccaaa

SEQ ID NO: 1010940 - RNA, 19 nt, Artificial Sequence
  Description of Artificial Sequence: Synthetic oligonucleotide
  Sense strand starting at position 470 of SEQ ID NO: 914530
guacauuacgaauaguaau

SEQ ID NO: 1010941 - RNA, 19 nt, Artificial Sequence
  Description of Artificial Sequence: Synthetic oligonucleotide
  Antisense strand to SEQ ID NO: 1010940
auuacuauucguaauguac

SEQ ID NO: 1010942 - RNA, 19 nt, Artificial Sequence
  Description of Artificial Sequence: Synthetic oligonucleotide
  Sense strand starting at position 670 of SEQ ID NO: 914530
ggagaauguguuuaguucu

SEQ ID NO: 1010943 - RNA, 19 nt, Artificial Sequence
  Description of Artificial Sequence: Synthetic oligonucleotide
  Antisense strand to SEQ ID NO: 1010942
agaacuaaacacauucucc

SEQ ID NO: 1010944 - RNA, 19 nt, Artificial Sequence
  Description of Artificial Sequence: Synthetic oligonucleotide
  Sense strand starting at position 759 of SEQ ID NO: 914530
gaggcaauauuagugauca

SEQ ID NO: 1010945 - RNA, 19 nt, Artificial Sequence
  Description of Artificial Sequence: Synthetic oligonucleotide
  Antisense strand to SEQ ID NO: 1010944
ugaucacuaauauugccuc

SEQ ID NO: 1010946 - RNA, 19 nt, Artificial Sequence
  Description of Artificial Sequence: Synthetic oligonucleotide
  Sense strand starting at position 859 of SEQ ID NO: 914530
auguguuauccucauauau

SEQ ID NO: 1010947 - RNA, 19 nt, Artificial Sequence
  Description of Artificial Sequence: Synthetic oligonucleotide
  Antisense strand to SEQ ID NO: 1010946
auauaugaggauaacacau

SEQ ID NO: 1010948 - RNA, 19 nt, Artificial Sequence
  Description of Artificial Sequence: Synthetic oligonucleotide
  Sense strand starting at position 920 of SEQ ID NO: 914530
uagaguacugaaugaucau

SEQ ID NO: 1010949 - RNA, 19 nt, Artificial Sequence
  Description of Artificial Sequence: Synthetic oligonucleotide
  Antisense strand to SEQ ID NO: 1010948
augaucauucaguacucua

SEQ ID NO: 1010950 - RNA, 19 nt, Artificial Sequence
  Description of Artificial Sequence: Synthetic oligonucleotide
  Sense strand starting at position 1121 of SEQ ID NO: 914530
auaaucaagcuguaaaugu

SEQ ID NO: 1010951 - RNA, 19 nt, Artificial Sequence
  Description of Artificial Sequence: Synthetic oligonucleotide
  Antisense strand to SEQ ID NO: 1010950
acauuuacagcuugauuau

SEQ ID NO: 1010952 - RNA, 19 nt, Artificial Sequence
  Description of Artificial Sequence: Synthetic oligonucleotide
  Sense strand starting at position 1536 of SEQ ID NO: 914530
uauauaugugugggagaua

SEQ ID NO: 1010953 - RNA, 19 nt, Artificial Sequence
  Description of Artificial Sequence: Synthetic oligonucleotide
  Antisense strand to SEQ ID NO: 1010952
uaucucccacacauauaua

SEQ ID NO: 1010954 - RNA, 19 nt, Artificial Sequence
  Description of Artificial Sequence: Synthetic oligonucleotide
  Sense strand starting at position 1601 of SEQ ID NO: 914530
uucugaaagcuagaugguu

SEQ ID NO: 1010955 - RNA, 19 nt, Artificial Sequence
  Description of Artificial Sequence: Synthetic oligonucleotide
  Antisense strand to SEQ ID NO: 1010954
aaccaucuagcuuucagaa

SEQ ID NO: 1010956 - RNA, 19 nt, Artificial Sequence
  Description of Artificial Sequence: Synthetic oligonucleotide
  Sense strand starting at position 1603 of SEQ ID NO: 914530
cugaaagcuagaugguuua

SEQ ID NO: 1010957 - RNA, 19 nt, Artificial Sequence
  Description of Artificial Sequence: Synthetic oligonucleotide
  Antisense strand to SEQ ID NO: 1010956
uaaaccaucuagcuuucag

SEQ ID NO: 1010958 - RNA, 19 nt, Artificial Sequence
  Description of Artificial Sequence: Synthetic oligonucleotide
  Sense strand starting at position 1606 of SEQ ID NO: 914530
aaagcuagaugguuuagau

SEQ ID NO: 1010959 - RNA, 19 nt, Artificial Sequence
  Description of Artificial Sequence: Synthetic oligonucleotide
  Antisense strand to SEQ ID NO: 1010958
aucuaaaccaucuagcuuu

SEQ ID NO: 1010960 - RNA, 19 nt, Artificial Sequence
  Description of Artificial Sequence: Synthetic oligonucleotide
  Sense strand starting at position 1613 of SEQ ID NO: 914530
gaugguuuagauugcaaau

SEQ ID NO: 1010961 - RNA, 19 nt, Artificial Sequence
  Description of Artificial Sequence: Synthetic oligonucleotide
  Antisense strand to SEQ ID NO: 1010960
auuugcaaucuaaaccauc

SEQ ID NO: 1010962 - RNA, 19 nt, Artificial Sequence
  Description of Artificial Sequence: Synthetic oligonucleotide
  Sense strand starting at position 1806 of SEQ ID NO: 914530
uggagaccuugauauauuu

SEQ ID NO: 1010963 - RNA, 19 nt, Artificial Sequence
  Description of Artificial Sequence: Synthetic oligonucleotide
  Antisense strand to SEQ ID NO: 1010962
aaauauaucaaggucucca

SEQ ID NO: 1010964 - RNA, 19 nt, Artificial Sequence
  Description of Artificial Sequence: Synthetic oligonucleotide
  Sense strand starting at position 2103 of SEQ ID NO: 914530
uaaccauuagugcaaaggu

SEQ ID NO: 1010965 - RNA, 19 nt, Artificial Sequence
  Description of Artificial Sequence: Synthetic oligonucleotide
  Antisense strand to SEQ ID NO: 1010964
accuuugcacuaaugguua

SEQ ID NO: 1010966 - RNA, 19 nt, Artificial Sequence
  Description of Artificial Sequence: Synthetic oligonucleotide
  Sense strand starting at position 2110 of SEQ ID NO: 914530
uagugcaaaggucagauua

SEQ ID NO: 1010967 - RNA, 19 nt, Artificial Sequence
  Description of Artificial Sequence: Synthetic oligonucleotide
  Antisense strand to SEQ ID NO: 1010966
uaaucugaccuuugcacua

SEQ ID NO: 1010968 - RNA, 19 nt, Artificial Sequence
  Description of Artificial Sequence: Synthetic oligonucleotide
  Sense strand starting at position 2132 of SEQ ID NO: 914530
ugcacuagacagcaauaau

SEQ ID NO: 1010969 - RNA, 19 nt, Artificial Sequence
  Description of Artificial Sequence: Synthetic oligonucleotide
  Antisense strand to SEQ ID NO: 1010968
auuauugcugucuagugca

SEQ ID NO: 1010970 - RNA, 19 nt, Artificial Sequence
  Description of Artificial Sequence: Synthetic oligonucleotide
  Sense strand starting at position 2188 of SEQ ID NO: 914530
guacuuaggaaaugugauc

SEQ ID NO: 1010971 - RNA, 19 nt, Artificial Sequence
  Description of Artificial Sequence: Synthetic oligonucleotide
  Antisense strand to SEQ ID NO: 1010970
gaucacauuuccuaaguac

SEQ ID NO: 1010972 - RNA, 19 nt, Artificial Sequence
  Description of Artificial Sequence: Synthetic oligonucleotide
  Sense strand starting at position 2193 of SEQ ID NO: 914530
uaggaaaugugaucaacuc

SEQ ID NO: 1010973 - RNA, 19 nt, Artificial Sequence
  Description of Artificial Sequence: Synthetic oligonucleotide
  Antisense strand to SEQ ID NO: 1010972
gaguugaucacauuuccua

SEQ ID NO: 1010974 - RNA, 19 nt, Artificial Sequence
  Description of Artificial Sequence: Synthetic oligonucleotide
  Sense strand starting at position 2381 of SEQ ID NO: 914530
acuccuuuggucuagagca

SEQ ID NO: 1010975 - RNA, 19 nt, Artificial Sequence
  Description of Artificial Sequence: Synthetic oligonucleotide
  Antisense strand to SEQ ID NO: 1010974
ugcucuagaccaaaggagu

SEQ ID NO: 1010976 - RNA, 19 nt, Artificial Sequence
  Description of Artificial Sequence: Synthetic oligonucleotide
  Sense strand starting at position 2383 of SEQ ID NO: 914530
uccuuuggucuagagcaua

SEQ ID NO: 1010977 - RNA, 19 nt, Artificial Sequence
  Description of Artificial Sequence: Synthetic oligonucleotide
  Antisense strand to SEQ ID NO: 1010976
uaugcucuagaccaaagga

SEQ ID NO: 1010978 - RNA, 19 nt, Artificial Sequence
  Description of Artificial Sequence: Synthetic oligonucleotide
  Sense strand starting at position 2388 of SEQ ID NO: 914530
uggucuagagcauaacuaa

SEQ ID NO: 1010979 - RNA, 19 nt, Artificial Sequence
  Description of Artificial Sequence: Synthetic oligonucleotide
  Antisense strand to SEQ ID NO: 1010978
uuaguuaugcucuagacca

SEQ ID NO: 1010980 - RNA, 19 nt, Artificial Sequence
  Description of Artificial Sequence: Synthetic oligonucleotide
  Sense strand starting at position 2544 of SEQ ID NO: 914530
cucuccuuuggugaauuau

SEQ ID NO: 1010981 - RNA, 19 nt, Artificial Sequence
  Description of Artificial Sequence: Synthetic oligonucleotide
  Antisense strand to SEQ ID NO: 1010980
auaauucaccaaaggagag

SEQ ID NO: 1010982 - RNA, 19 nt, Artificial Sequence
  Description of Artificial Sequence: Synthetic oligonucleotide
  Sense strand starting at position 2780 of SEQ ID NO: 914530
uucuguaauccacaaguac

SEQ ID NO: 1010983 - RNA, 19 nt, Artificial Sequence
  Description of Artificial Sequence: Synthetic oligonucleotide
  Antisense strand to SEQ ID NO: 1010982
guacuuguggauuacagaa

SEQ ID NO: 1010984 - RNA, 19 nt, Artificial Sequence
  Description of Artificial Sequence: Synthetic oligonucleotide
  Sense strand starting at position 2928 of SEQ ID NO: 914530
auuagaagucuagguuauc

SEQ ID NO: 1010985 - RNA, 19 nt, Artificial Sequence
  Description of Artificial Sequence: Synthetic oligonucleotide
  Antisense strand to SEQ ID NO: 1010984
gauaaccuagacuucuaau

SEQ ID NO: 1010986 - RNA, 19 nt, Artificial Sequence
  Description of Artificial Sequence: Synthetic oligonucleotide
  Sense strand starting at position 3100 of SEQ ID NO: 914530
aagucuugguagucuauuu

SEQ ID NO: 1010987 - RNA, 19 nt, Artificial Sequence
  Description of Artificial Sequence: Synthetic oligonucleotide
  Antisense strand to SEQ ID NO: 1010986
aaauagacuaccaagacuu

SEQ ID NO: 1010988 - RNA, 19 nt, Artificial Sequence
  Description of Artificial Sequence: Synthetic oligonucleotide
  Sense strand starting at position 3302 of SEQ ID NO: 914530
gcaucuugguuauuuauac

SEQ ID NO: 1010989 - RNA, 19 nt, Artificial Sequence
  Description of Artificial Sequence: Synthetic oligonucleotide
  Antisense strand to SEQ ID NO: 1010988
guauaaauaaccaagaugc

SEQ ID NO: 1010990 - RNA, 19 nt, Artificial Sequence
  Description of Artificial Sequence: Synthetic oligonucleotide
  Sense strand starting at position 3378 of SEQ ID NO: 914530
agagauuaaaguugccaga

SEQ ID NO: 1010991 - RNA, 19 nt, Artificial Sequence
  Description of Artificial Sequence: Synthetic oligonucleotide
  Antisense strand to SEQ ID NO: 1010990
ucuggcaacuuuaaucucu

SEQ ID NO: 1010992 - RNA, 19 nt, Artificial Sequence
  Description of Artificial Sequence: Synthetic oligonucleotide
  Sense strand starting at position 3380 of SEQ ID NO: 914530
agauuaaaguugccagaag

SEQ ID NO: 1010993 - RNA, 19 nt, Artificial Sequence
  Description of Artificial Sequence: Synthetic oligonucleotide
  Antisense strand to SEQ ID NO: 1010992
cuucuggcaacuuuaaucu

SEQ ID NO: 1010994 - RNA, 19 nt, Artificial Sequence
  Description of Artificial Sequence: Synthetic oligonucleotide
  Sense strand starting at position 3387 of SEQ ID NO: 914530
aguugccagaaguaugauu

SEQ ID NO: 1010995 - RNA, 19 nt, Artificial Sequence
  Description of Artificial Sequence: Synthetic oligonucleotide
  Antisense strand to SEQ ID NO: 1010994
aaucauacuucuggcaacu

SEQ ID NO: 1010996 - RNA, 19 nt, Artificial Sequence
  Description of Artificial Sequence: Synthetic oligonucleotide
  Sense strand starting at position 3392 of SEQ ID NO: 914530
ccagaaguaugauuaugac

SEQ ID NO: 1010997 - RNA, 19 nt, Artificial Sequence
  Description of Artificial Sequence: Synthetic oligonucleotide
  Antisense strand to SEQ ID NO: 1010996
gucauaaucauacuucugg

SEQ ID NO: 1010998 - RNA, 19 nt, Artificial Sequence
  Description of Artificial Sequence: Synthetic oligonucleotide
  Sense strand starting at position 3398 of SEQ ID NO: 914530
guaugauuaugacucauga

SEQ ID NO: 1010999 - RNA, 19 nt, Artificial Sequence
  Description of Artificial Sequence: Synthetic oligonucleotide
  Antisense strand to SEQ ID NO: 1010998
ucaugagucauaaucauac

SEQ ID NO: 1011000 - RNA, 19 nt, Artificial Sequence
  Description of Artificial Sequence: Synthetic oligonucleotide
  Sense strand starting at position 3411 of SEQ ID NO: 914530
ucaugagaacugcacaguu

SEQ ID NO: 1011001 - RNA, 19 nt, Artificial Sequence
  Description of Artificial Sequence: Synthetic oligonucleotide
  Antisense strand to SEQ ID NO: 1011000
aacugugcaguucucauga

SEQ ID NO: 1011002 - RNA, 19 nt, Artificial Sequence
  Description of Artificial Sequence: Synthetic oligonucleotide
  Sense strand starting at position 3526 of SEQ ID NO: 914530
gcuugugcucagucccaua

SEQ ID NO: 1011003 - RNA, 19 nt, Artificial Sequence
  Description of Artificial Sequence: Synthetic oligonucleotide
  Antisense strand to SEQ ID NO: 1011002
uaugggacugagcacaagc

SEQ ID NO: 1011004 - RNA, 19 nt, Artificial Sequence
  Description of Artificial Sequence: Synthetic oligonucleotide
  Sense strand starting at position 3796 of SEQ ID NO: 914530
aggaguuauuggucuuaga

SEQ ID NO: 1011005 - RNA, 19 nt, Artificial Sequence
  Description of Artificial Sequence: Synthetic oligonucleotide
  Antisense strand to SEQ ID NO: 1011004
ucuaagaccaauaacuccu

SEQ ID NO: 1011006 - RNA, 19 nt, Artificial Sequence
  Description of Artificial Sequence: Synthetic oligonucleotide
  Sense strand starting at position 3870 of SEQ ID NO: 914530
auaaauaagucagugucaa

SEQ ID NO: 1011007 - RNA, 19 nt, Artificial Sequence
  Description of Artificial Sequence: Synthetic oligonucleotide
  Antisense strand to SEQ ID NO: 1011006
uugacacugacuuauuuau

SEQ ID NO: 1011008 - RNA, 19 nt, Artificial Sequence
  Description of Artificial Sequence: Synthetic oligonucleotide
  Sense strand starting at position 3881 of SEQ ID NO: 914530
agugucaaacagugauaca

SEQ ID NO: 1011009 - RNA, 19 nt, Artificial Sequence
  Description of Artificial Sequence: Synthetic oligonucleotide
  Antisense strand to SEQ ID NO: 1011008
uguaucacuguuugacacu

SEQ ID NO: 1011010 - RNA, 19 nt, Artificial Sequence
  Description of Artificial Sequence: Synthetic oligonucleotide
  Sense strand starting at position 3882 of SEQ ID NO: 914530
gugucaaacagugauacau

SEQ ID NO: 1011011 - RNA, 19 nt, Artificial Sequence
  Description of Artificial Sequence: Synthetic oligonucleotide
  Antisense strand to SEQ ID NO: 1011010
auguaucacuguuugacac

SEQ ID NO: 1011012 - RNA, 19 nt, Artificial Sequence
  Description of Artificial Sequence: Synthetic oligonucleotide
  Sense strand starting at position 3891 of SEQ ID NO: 914530
agugauacauacucugaag

SEQ ID NO: 1011013 - RNA, 19 nt, Artificial Sequence
  Description of Artificial Sequence: Synthetic oligonucleotide
  Antisense strand to SEQ ID NO: 1011012
cuucagaguauguaucacu

SEQ ID NO: 1011014 - RNA, 19 nt, Artificial Sequence
  Description of Artificial Sequence: Synthetic oligonucleotide
  Sense strand starting at position 163 of SEQ ID NO: 914531
gugaaagagugcccaaaua

SEQ ID NO: 1011015 - RNA, 19 nt, Artificial Sequence
  Description of Artificial Sequence: Synthetic oligonucleotide
  Antisense strand to SEQ ID NO: 1011014
uauuugggcacucuuucac

SEQ ID NO: 1011016 - RNA, 19 nt, Artificial Sequence
  Description of Artificial Sequence: Synthetic oligonucleotide
  Sense strand starting at position 174 of SEQ ID NO: 914531
cccaaauauggguagguuu

SEQ ID NO: 1011017 - RNA, 19 nt, Artificial Sequence
  Description of Artificial Sequence: Synthetic oligonucleotide
  Antisense strand to SEQ ID NO: 1011016
aaaccuacccauauuuggg

SEQ ID NO: 1011018 - RNA, 19 nt, Artificial Sequence
  Description of Artificial Sequence: Synthetic oligonucleotide
  Sense strand starting at position 261 of SEQ ID NO: 914531
gggucuauaaggugagaug

SEQ ID NO: 1011019 - RNA, 19 nt, Artificial Sequence
  Description of Artificial Sequence: Synthetic oligonucleotide
  Antisense strand to SEQ ID NO: 1011018
caucucaccuuauagaccc

SEQ ID NO: 1011020 - RNA, 19 nt, Artificial Sequence
  Description of Artificial Sequence: Synthetic oligonucleotide
  Sense strand starting at position 740 of SEQ ID NO: 914531
aacagaaguuagccagaga

SEQ ID NO: 1011021 - RNA, 19 nt, Artificial Sequence
  Description of Artificial Sequence: Synthetic oligonucleotide
  Antisense strand to SEQ ID NO: 1011020
ucucuggcuaacuucuguu

SEQ ID NO: 1011022 - RNA, 19 nt, Artificial Sequence
  Description of Artificial Sequence: Synthetic oligonucleotide
  Sense strand starting at position 877 of SEQ ID NO: 914531
uuaaacuggcgauauaagu

SEQ ID NO: 1011023 - RNA, 19 nt, Artificial Sequence
  Description of Artificial Sequence: Synthetic oligonucleotide
  Antisense strand to SEQ ID NO: 1011022
acuuauaucgccaguuuaa

SEQ ID NO: 1011024 - RNA, 19 nt, Artificial Sequence
  Description of Artificial Sequence: Synthetic oligonucleotide
  Sense strand starting at position 883 of SEQ ID NO: 914531
uggcgauauaaguaaguga

SEQ ID NO: 1011025 - RNA, 19 nt, Artificial Sequence
  Description of Artificial Sequence: Synthetic oligonucleotide
  Antisense strand to SEQ ID NO: 1011024
ucacuuacuuauaucgcca

SEQ ID NO: 1011026 - RNA, 19 nt, Artificial Sequence
  Description of Artificial Sequence: Synthetic oligonucleotide
  Sense strand starting at position 886 of SEQ ID NO: 914531
cgauauaaguaagugauca

SEQ ID NO: 1011027 - RNA, 19 nt, Artificial Sequence
  Description of Artificial Sequence: Synthetic oligonucleotide
  Antisense strand to SEQ ID NO: 1011026
ugaucacuuacuuauaucg

SEQ ID NO: 1011028 - RNA, 19 nt, Artificial Sequence
  Description of Artificial Sequence: Synthetic oligonucleotide
  Sense strand starting at position 890 of SEQ ID NO: 914531
auaaguaagugaucaucac

SEQ ID NO: 1011029 - RNA, 19 nt, Artificial Sequence
  Description of Artificial Sequence: Synthetic oligonucleotide
  Antisense strand to SEQ ID NO: 1011028
gugaugaucacuuacuuau

SEQ ID NO: 1011030 - RNA, 19 nt, Artificial Sequence
  Description of Artificial Sequence: Synthetic oligonucleotide
  Sense strand starting at position 911 of SEQ ID NO: 914531
ggcuuuguaggacauagua

SEQ ID NO: 1011031 - RNA, 19 nt, Artificial Sequence
  Description of Artificial Sequence: Synthetic oligonucleotide
  Antisense strand to SEQ ID NO: 1011030
uacuauguccuacaaagcc

SEQ ID NO: 1011032 - RNA, 19 nt, Artificial Sequence
  Description of Artificial Sequence: Synthetic oligonucleotide
  Sense strand starting at position 974 of SEQ ID NO: 914531
gagggaguuaggcacuuua

SEQ ID NO: 1011033 - RNA, 19 nt, Artificial Sequence
  Description of Artificial Sequence: Synthetic oligonucleotide
  Antisense strand to SEQ ID NO: 1011032
uaaagugccuaacucccuc

SEQ ID NO: 1011034 - RNA, 19 nt, Artificial Sequence
  Description of Artificial Sequence: Synthetic oligonucleotide
  Sense strand starting at position 1307 of SEQ ID NO: 914531
aagguaagguuuguaagga

SEQ ID NO: 1011035 - RNA, 19 nt, Artificial Sequence
  Description of Artificial Sequence: Synthetic oligonucleotide
  Antisense strand to SEQ ID NO: 1011034
uccuuacaaaccuuaccuu

SEQ ID NO: 1011036 - RNA, 19 nt, Artificial Sequence
  Description of Artificial Sequence: Synthetic oligonucleotide
  Sense strand starting at position 1406 of SEQ ID NO: 914531
gcaaauaauuuagagaaag

SEQ ID NO: 1011037 - RNA, 19 nt, Artificial Sequence
  Description of Artificial Sequence: Synthetic oligonucleotide
  Antisense strand to SEQ ID NO: 1011036
cuuucucuaaauuauuugc

SEQ ID NO: 1011038 - RNA, 19 nt, Artificial Sequence
  Description of Artificial Sequence: Synthetic oligonucleotide
  Sense strand starting at position 1433 of SEQ ID NO: 914531
aauagaaagugccuugauc

SEQ ID NO: 1011039 - RNA, 19 nt, Artificial Sequence
  Description of Artificial Sequence: Synthetic oligonucleotide
  Antisense strand to SEQ ID NO: 1011038
gaucaaggcacuuucuauu

SEQ ID NO: 1011040 - RNA, 19 nt, Artificial Sequence
  Description of Artificial Sequence: Synthetic oligonucleotide
  Sense strand starting at position 1644 of SEQ ID NO: 914531
cagucuccucuggaguaaa

SEQ ID NO: 1011041 - RNA, 19 nt, Artificial Sequence
  Description of Artificial Sequence: Synthetic oligonucleotide
  Antisense strand to SEQ ID NO: 1011040
uuuacuccagaggagacug

SEQ ID NO: 1011042 - RNA, 19 nt, Artificial Sequence
  Description of Artificial Sequence: Synthetic oligonucleotide
  Sense strand starting at position 1807 of SEQ ID NO: 914531
uaucgaggacuuugaacuu

SEQ ID NO: 1011043 - RNA, 19 nt, Artificial Sequence
  Description of Artificial Sequence: Synthetic oligonucleotide
  Antisense strand to SEQ ID NO: 1011042
aaguucaaaguccucgaua

SEQ ID NO: 1011044 - RNA, 19 nt, Artificial Sequence
  Description of Artificial Sequence: Synthetic oligonucleotide
  Sense strand starting at position 2268 of SEQ ID NO: 914531
uguugcuuugcgucaagga

SEQ ID NO: 1011045 - RNA, 19 nt, Artificial Sequence
  Description of Artificial Sequence: Synthetic oligonucleotide
  Antisense strand to SEQ ID NO: 1011044
uccuugacgcaaagcaaca

SEQ ID NO: 1011046 - RNA, 19 nt, Artificial Sequence
  Description of Artificial Sequence: Synthetic oligonucleotide
  Sense strand starting at position 2327 of SEQ ID NO: 914531
ucaauugucgagggauaug

SEQ ID NO: 1011047 - RNA, 19 nt, Artificial Sequence
  Description of Artificial Sequence: Synthetic oligonucleotide
  Antisense strand to SEQ ID NO: 1011046
cauaucccucgacaauuga

SEQ ID NO: 1011048 - RNA, 19 nt, Artificial Sequence
  Description of Artificial Sequence: Synthetic oligonucleotide
  Sense strand starting at position 2631 of SEQ ID NO: 914531
ggcauacuggacgauacua

SEQ ID NO: 1011049 - RNA, 19 nt, Artificial Sequence
  Description of Artificial Sequence: Synthetic oligonucleotide
  Antisense strand to SEQ ID NO: 1011048
uaguaucguccaguaugcc

SEQ ID NO: 1011050 - RNA, 19 nt, Artificial Sequence
  Description of Artificial Sequence: Synthetic oligonucleotide
  Sense strand starting at position 2698 of SEQ ID NO: 914531
agcucagauguauacucua

SEQ ID NO: 1011051 - RNA, 19 nt, Artificial Sequence
  Description of Artificial Sequence: Synthetic oligonucleotide
  Antisense strand to SEQ ID NO: 1011050
uagaguauacaucugagcu

SEQ ID NO: 1011052 - RNA, 19 nt, Artificial Sequence
  Description of Artificial Sequence: Synthetic oligonucleotide
  Sense strand starting at position 2805 of SEQ ID NO: 914531
cugagauugguggaucagu

SEQ ID NO: 1011053 - RNA, 19 nt, Artificial Sequence
  Description of Artificial Sequence: Synthetic oligonucleotide
  Antisense strand to SEQ ID NO: 1011052
acugauccaccaaucucag

SEQ ID NO: 1011054 - RNA, 19 nt, Artificial Sequence
  Description of Artificial Sequence: Synthetic oligonucleotide
  Sense strand starting at position 3018 of SEQ ID NO: 914531
gugacagagcgauacucau

SEQ ID NO: 1011055 - RNA, 19 nt, Artificial Sequence
  Description of Artificial Sequence: Synthetic oligonucleotide
  Antisense strand to SEQ ID NO: 1011054
augaguaucgcucugucac

SEQ ID NO: 1011056 - RNA, 19 nt, Artificial Sequence
  Description of Artificial Sequence: Synthetic oligonucleotide
  Sense strand starting at position 3056 of SEQ ID NO: 914531
ugacgucuuaauuaggaau

SEQ ID NO: 1011057 - RNA, 19 nt, Artificial Sequence
  Description of Artificial Sequence: Synthetic oligonucleotide
  Antisense strand to SEQ ID NO: 1011056
auuccuaauuaagacguca

SEQ ID NO: 1011058 - RNA, 19 nt, Artificial Sequence
  Description of Artificial Sequence: Synthetic oligonucleotide
  Sense strand starting at position 3123 of SEQ ID NO: 914531
ccaguuauuucucuaggcu

SEQ ID NO: 1011059 - RNA, 19 nt, Artificial Sequence
  Description of Artificial Sequence: Synthetic oligonucleotide
  Antisense strand to SEQ ID NO: 1011058
agccuagagaaauaacugg

SEQ ID NO: 1011060 - RNA, 19 nt, Artificial Sequence
  Description of Artificial Sequence: Synthetic oligonucleotide
  Sense strand starting at position 3315 of SEQ ID NO: 914531
uaguacacagaaugugaua

SEQ ID NO: 1011061 - RNA, 19 nt, Artificial Sequence
  Description of Artificial Sequence: Synthetic oligonucleotide
  Antisense strand to SEQ ID NO: 1011060
uaucacauucuguguacua

SEQ ID NO: 1011062 - RNA, 19 nt, Artificial Sequence
  Description of Artificial Sequence: Synthetic oligonucleotide
  Sense strand starting at position 3363 of SEQ ID NO: 914531
acuagcuaccuaugagaaa

SEQ ID NO: 1011063 - RNA, 19 nt, Artificial Sequence
  Description of Artificial Sequence: Synthetic oligonucleotide
  Antisense strand to SEQ ID NO: 1011062
uuucucauagguagcuagu

SEQ ID NO: 1011064 - RNA, 19 nt, Artificial Sequence
  Description of Artificial Sequence: Synthetic oligonucleotide
  Sense strand starting at position 3390 of SEQ ID NO: 914531
ccagaaucagaaggcuuaa

SEQ ID NO: 1011065 - RNA, 19 nt, Artificial Sequence
  Description of Artificial Sequence: Synthetic oligonucleotide
  Antisense strand to SEQ ID NO: 1011064
uuaagccuucugauucugg

SEQ ID NO: 1011066 - RNA, 19 nt, Artificial Sequence
  Description of Artificial Sequence: Synthetic oligonucleotide
  Sense strand starting at position 3430 of SEQ ID NO: 914531
cgucaaaugauagaggguu

SEQ ID NO: 1011067 - RNA, 19 nt, Artificial Sequence
  Description of Artificial Sequence: Synthetic oligonucleotide
  Antisense strand to SEQ ID NO: 1011066
aacccucuaucauuugacg

SEQ ID NO: 1011068 - RNA, 19 nt, Artificial Sequence
  Description of Artificial Sequence: Synthetic oligonucleotide
  Sense strand starting at position 3522 of SEQ ID NO: 914531
agaucaggauuuggaugau

SEQ ID NO: 1011069 - RNA, 19 nt, Artificial Sequence
  Description of Artificial Sequence: Synthetic oligonucleotide
  Antisense strand to SEQ ID NO: 1011068
aucauccaaauccugaucu

SEQ ID NO: 1011070 - RNA, 19 nt, Artificial Sequence
  Description of Artificial Sequence: Synthetic oligonucleotide
  Sense strand starting at position 3580 of SEQ ID NO: 914531
uauugugaggguuaaugau

SEQ ID NO: 1011071 - RNA, 19 nt, Artificial Sequence
  Description of Artificial Sequence: Synthetic oligonucleotide
  Antisense strand to SEQ ID NO: 1011070
aucauuaacccucacaaua

SEQ ID NO: 1011072 - RNA, 19 nt, Artificial Sequence
  Description of Artificial Sequence: Synthetic oligonucleotide
  Sense strand starting at position 3593 of SEQ ID NO: 914531
aaugauuguguauggaaag

SEQ ID NO: 1011073 - RNA, 19 nt, Artificial Sequence
  Description of Artificial Sequence: Synthetic oligonucleotide
  Antisense strand to SEQ ID NO: 1011072
cuuuccauacacaaucauu

SEQ ID NO: 1011074 - RNA, 19 nt, Artificial Sequence
  Description of Artificial Sequence: Synthetic oligonucleotide
  Sense strand starting at position 3621 of SEQ ID NO: 914531
cagggcuugguuuacaaua

SEQ ID NO: 1011075 - RNA, 19 nt, Artificial Sequence
  Description of Artificial Sequence: Synthetic oligonucleotide
  Antisense strand to SEQ ID NO: 1011074
uauuguaaaccaagcccug

SEQ ID NO: 1011076 - RNA, 19 nt, Artificial Sequence
  Description of Artificial Sequence: Synthetic oligonucleotide
  Sense strand starting at position 3629 of SEQ ID NO: 914531
gguuuacaauaauccugau

SEQ ID NO: 1011077 - RNA, 19 nt, Artificial Sequence
  Description of Artificial Sequence: Synthetic oligonucleotide
  Antisense strand to SEQ ID NO: 1011076
aucaggauuauuguaaacc

SEQ ID NO: 1011078 - RNA, 19 nt, Artificial Sequence
  Description of Artificial Sequence: Synthetic oligonucleotide
  Sense strand starting at position 3679 of SEQ ID NO: 914531
gagcucacuguugauggau

SEQ ID NO: 1011079 - RNA, 19 nt, Artificial Sequence
  Description of Artificial Sequence: Synthetic oligonucleotide
  Antisense strand to SEQ ID NO: 1011078
auccaucaacagugagcuc

SEQ ID NO: 1011080 - RNA, 19 nt, Artificial Sequence
  Description of Artificial Sequence: Synthetic oligonucleotide
  Sense strand starting at position 3688 of SEQ ID NO: 914531
guugauggaugagcauuaa

SEQ ID NO: 1011081 - RNA, 19 nt, Artificial Sequence
  Description of Artificial Sequence: Synthetic oligonucleotide
  Antisense strand to SEQ ID NO: 1011080
uuaaugcucauccaucaac

SEQ ID NO: 1011082 - RNA, 19 nt, Artificial Sequence
  Description of Artificial Sequence: Synthetic oligonucleotide
  Sense strand starting at position 3774 of SEQ ID NO: 914531
ucugucuuagaaugaucua

SEQ ID NO: 1011083 - RNA, 19 nt, Artificial Sequence
  Description of Artificial Sequence: Synthetic oligonucleotide
  Antisense strand to SEQ ID NO: 1011082
uagaucauucuaagacaga

SEQ ID NO: 1011084 - RNA, 19 nt, Artificial Sequence
  Description of Artificial Sequence: Synthetic oligonucleotide
  Sense strand starting at position 3777 of SEQ ID NO: 914531
gucuuagaaugaucuauac

SEQ ID NO: 1011085 - RNA, 19 nt, Artificial Sequence
  Description of Artificial Sequence: Synthetic oligonucleotide
  Antisense strand to SEQ ID NO: 1011084
guauagaucauucuaagac

SEQ ID NO: 1011086 - RNA, 19 nt, Artificial Sequence
  Description of Artificial Sequence: Synthetic oligonucleotide
  Sense strand starting at position 3788 of SEQ ID NO: 914531
aucuauacucgaugagagg

SEQ ID NO: 1011087 - RNA, 19 nt, Artificial Sequence
  Description of Artificial Sequence: Synthetic oligonucleotide
  Antisense strand to SEQ ID NO: 1011086
ccucucaucgaguauagau

SEQ ID NO: 1011088 - RNA, 19 nt, Artificial Sequence
  Description of Artificial Sequence: Synthetic oligonucleotide
  Sense strand starting at position 3789 of SEQ ID NO: 914531
ucuauacucgaugagaggu

SEQ ID NO: 1011089 - RNA, 19 nt, Artificial Sequence
  Description of Artificial Sequence: Synthetic oligonucleotide
  Antisense strand to SEQ ID NO: 1011088
accucucaucgaguauaga

SEQ ID NO: 1011090 - RNA, 19 nt, Artificial Sequence
  Description of Artificial Sequence: Synthetic oligonucleotide
  Sense strand starting at position 3797 of SEQ ID NO: 914531
cgaugagagguuggacuau

SEQ ID NO: 1011091 - RNA, 19 nt, Artificial Sequence
  Description of Artificial Sequence: Synthetic oligonucleotide
  Antisense strand to SEQ ID NO: 1011090
auaguccaaccucucaucg

SEQ ID NO: 1011092 - RNA, 19 nt, Artificial Sequence
  Description of Artificial Sequence: Synthetic oligonucleotide
  Sense strand starting at position 3821 of SEQ ID NO: 914531
gucuaaguacuaugaccaa

SEQ ID NO: 1011093 - RNA, 19 nt, Artificial Sequence
  Description of Artificial Sequence: Synthetic oligonucleotide
  Antisense strand to SEQ ID NO: 1011092
uuggucauaguacuuagac

SEQ ID NO: 1011094 - RNA, 19 nt, Artificial Sequence
  Description of Artificial Sequence: Synthetic oligonucleotide
  Sense strand starting at position 39 of SEQ ID NO: 914532
ggcaaucacgaauggaagu

SEQ ID NO: 1011095 - RNA, 19 nt, Artificial Sequence
  Description of Artificial Sequence: Synthetic oligonucleotide
  Antisense strand to SEQ ID NO: 1011094
acuuccauucgugauugcc

SEQ ID NO: 1011096 - RNA, 19 nt, Artificial Sequence
  Description of Artificial Sequence: Synthetic oligonucleotide
  Sense strand starting at position 53 of SEQ ID NO: 914532
gaaguuauagguugagaca

SEQ ID NO: 1011097 - RNA, 19 nt, Artificial Sequence
  Description of Artificial Sequence: Synthetic oligonucleotide
  Antisense strand to SEQ ID NO: 1011096
ugucucaaccuauaacuuc

SEQ ID NO: 1011098 - RNA, 19 nt, Artificial Sequence
  Description of Artificial Sequence: Synthetic oligonucleotide
  Sense strand starting at position 101 of SEQ ID NO: 914532
caagcagugccggaagaaa

SEQ ID NO: 1011099 - RNA, 19 nt, Artificial Sequence
  Description of Artificial Sequence: Synthetic oligonucleotide
  Antisense strand to SEQ ID NO: 1011098
uuucuuccggcacugcuug

SEQ ID NO: 1011100 - RNA, 19 nt, Artificial Sequence
  Description of Artificial Sequence: Synthetic oligonucleotide
  Sense strand starting at position 112 of SEQ ID NO: 914532
ggaagaaacuguguguaug

SEQ ID NO: 1011101 - RNA, 19 nt, Artificial Sequence
  Description of Artificial Sequence: Synthetic oligonucleotide
  Antisense strand to SEQ ID NO: 1011100
cauacacacaguuucuucc

SEQ ID NO: 1011102 - RNA, 19 nt, Artificial Sequence
  Description of Artificial Sequence: Synthetic oligonucleotide
  Sense strand starting at position 238 of SEQ ID NO: 914532
aaggaaacuugaguuaguc

SEQ ID NO: 1011103 - RNA, 19 nt, Artificial Sequence
  Description of Artificial Sequence: Synthetic oligonucleotide
  Antisense strand to SEQ ID NO: 1011102
gacuaacucaaguuuccuu

SEQ ID NO: 1011104 - RNA, 19 nt, Artificial Sequence
  Description of Artificial Sequence: Synthetic oligonucleotide
  Sense strand starting at position 240 of SEQ ID NO: 914532
ggaaacuugaguuagucgu

SEQ ID NO: 1011105 - RNA, 19 nt, Artificial Sequence
  Description of Artificial Sequence: Synthetic oligonucleotide
  Antisense strand to SEQ ID NO: 1011104
acgacuaacucaaguuucc

SEQ ID NO: 1011106 - RNA, 19 nt, Artificial Sequence
  Description of Artificial Sequence: Synthetic oligonucleotide
  Sense strand starting at position 329 of SEQ ID NO: 914532
uaaauuguagacugugaau

SEQ ID NO: 1011107 - RNA, 19 nt, Artificial Sequence
  Description of Artificial Sequence: Synthetic oligonucleotide
  Antisense strand to SEQ ID NO: 1011106
auucacagucuacaauuua

SEQ ID NO: 1011108 - RNA, 19 nt, Artificial Sequence
  Description of Artificial Sequence: Synthetic oligonucleotide
  Sense strand starting at position 389 of SEQ ID NO: 914532
guauucuuggagcaaagua

SEQ ID NO: 1011109 - RNA, 19 nt, Artificial Sequence
  Description of Artificial Sequence: Synthetic oligonucleotide
  Antisense strand to SEQ ID NO: 1011108
uacuuugcuccaagaauac

SEQ ID NO: 1011110 - RNA, 19 nt, Artificial Sequence
  Description of Artificial Sequence: Synthetic oligonucleotide
  Sense strand starting at position 590 of SEQ ID NO: 914532
gcagccaaauauuugcaua

SEQ ID NO: 1011111 - RNA, 19 nt, Artificial Sequence
  Description of Artificial Sequence: Synthetic oligonucleotide
  Antisense strand to SEQ ID NO: 1011110
uaugcaaauauuuggcugc

SEQ ID NO: 1011112 - RNA, 19 nt, Artificial Sequence
  Description of Artificial Sequence: Synthetic oligonucleotide
  Sense strand starting at position 603 of SEQ ID NO: 914532
ugcauaaagagcugguaaa

SEQ ID NO: 1011113 - RNA, 19 nt, Artificial Sequence
  Description of Artificial Sequence: Synthetic oligonucleotide
  Antisense strand to SEQ ID NO: 1011112
uuuaccagcucuuuaugca

SEQ ID NO: 1011114 - RNA, 19 nt, Artificial Sequence
  Description of Artificial Sequence: Synthetic oligonucleotide
  Sense strand starting at position 604 of SEQ ID NO: 914532
gcauaaagagcugguaaag

SEQ ID NO: 1011115 - RNA, 19 nt, Artificial Sequence
  Description of Artificial Sequence: Synthetic oligonucleotide
  Antisense strand to SEQ ID NO: 1011114
cuuuaccagcucuuuaugc

SEQ ID NO: 1011116 - RNA, 19 nt, Artificial Sequence
  Description of Artificial Sequence: Synthetic oligonucleotide
  Sense strand starting at position 727 of SEQ ID NO: 914532
agaguaugggagugaguau

SEQ ID NO: 1011117 - RNA, 19 nt, Artificial Sequence
  Description of Artificial Sequence: Synthetic oligonucleotide
  Antisense strand to SEQ ID NO: 1011116
auacucacucccauacucu

SEQ ID NO: 1011118 - RNA, 19 nt, Artificial Sequence
  Description of Artificial Sequence: Synthetic oligonucleotide
  Sense strand starting at position 800 of SEQ ID NO: 914532
gagcaauacggguaccuuu

SEQ ID NO: 1011119 - RNA, 19 nt, Artificial Sequence
  Description of Artificial Sequence: Synthetic oligonucleotide
  Antisense strand to SEQ ID NO: 1011118
aaagguacccguauugcuc

SEQ ID NO: 1011120 - RNA, 19 nt, Artificial Sequence
  Description of Artificial Sequence: Synthetic oligonucleotide
  Sense strand starting at position 1046 of SEQ ID NO: 914532
gaaugaaaguagguuccaa

SEQ ID NO: 1011121 - RNA, 19 nt, Artificial Sequence
  Description of Artificial Sequence: Synthetic oligonucleotide
  Antisense strand to SEQ ID NO: 1011120
uuggaaccuacuuucauuc

SEQ ID NO: 1011122 - RNA, 19 nt, Artificial Sequence
  Description of Artificial Sequence: Synthetic oligonucleotide
  Sense strand starting at position 1247 of SEQ ID NO: 914532
agccauagauaguugagau

SEQ ID NO: 1011123 - RNA, 19 nt, Artificial Sequence
  Description of Artificial Sequence: Synthetic oligonucleotide
  Antisense strand to SEQ ID NO: 1011122
aucucaacuaucuauggcu

SEQ ID NO: 1011124 - RNA, 19 nt, Artificial Sequence
  Description of Artificial Sequence: Synthetic oligonucleotide
  Sense strand starting at position 1248 of SEQ ID NO: 914532
gccauagauaguugagauu

SEQ ID NO: 1011125 - RNA, 19 nt, Artificial Sequence
  Description of Artificial Sequence: Synthetic oligonucleotide
  Antisense strand to SEQ ID NO: 1011124
aaucucaacuaucuauggc

SEQ ID NO: 1011126 - RNA, 19 nt, Artificial Sequence
  Description of Artificial Sequence: Synthetic oligonucleotide
  Sense strand starting at position 1763 of SEQ ID NO: 914532
ggaagaaucuggcuuaccu

SEQ ID NO: 1011127 - RNA, 19 nt, Artificial Sequence
  Description of Artificial Sequence: Synthetic oligonucleotide
  Antisense strand to SEQ ID NO: 1011126
agguaagccagauucuucc

SEQ ID NO: 1011128 - RNA, 19 nt, Artificial Sequence
  Description of Artificial Sequence: Synthetic oligonucleotide
  Sense strand starting at position 2225 of SEQ ID NO: 914532
ucagaauuguucucaggaa

SEQ ID NO: 1011129 - RNA, 19 nt, Artificial Sequence
  Description of Artificial Sequence: Synthetic oligonucleotide
  Antisense strand to SEQ ID NO: 1011128
uuccugagaacaauucuga

SEQ ID NO: 1011130 - RNA, 19 nt, Artificial Sequence
  Description of Artificial Sequence: Synthetic oligonucleotide
  Sense strand starting at position 2259 of SEQ ID NO: 914532
ugcacuguuagauggaaua

SEQ ID NO: 1011131 - RNA, 19 nt, Artificial Sequence
  Description of Artificial Sequence: Synthetic oligonucleotide
  Antisense strand to SEQ ID NO: 1011130
uauuccaucuaacagugca

SEQ ID NO: 1011132 - RNA, 19 nt, Artificial Sequence
  Description of Artificial Sequence: Synthetic oligonucleotide
  Sense strand starting at position 2310 of SEQ ID NO: 914532
ugcucuguuccuuuaguuu

SEQ ID NO: 1011133 - RNA, 19 nt, Artificial Sequence
  Description of Artificial Sequence: Synthetic oligonucleotide
  Antisense strand to SEQ ID NO: 1011132
aaacuaaaggaacagagca

SEQ ID NO: 1011134 - RNA, 19 nt, Artificial Sequence
  Description of Artificial Sequence: Synthetic oligonucleotide
  Sense strand starting at position 2667 of SEQ ID NO: 914532
gaguaauguuuacugauua

SEQ ID NO: 1011135 - RNA, 19 nt, Artificial Sequence
  Description of Artificial Sequence: Synthetic oligonucleotide
  Antisense strand to SEQ ID NO: 1011134
uaaucaguaaacauuacuc

SEQ ID NO: 1011136 - RNA, 19 nt, Artificial Sequence
  Description of Artificial Sequence: Synthetic oligonucleotide
  Sense strand starting at position 2680 of SEQ ID NO: 914532
ugauuaucuuuguuugaug

SEQ ID NO: 1011137 - RNA, 19 nt, Artificial Sequence
  Description of Artificial Sequence: Synthetic oligonucleotide
  Antisense strand to SEQ ID NO: 1011136
caucaaacaaagauaauca

SEQ ID NO: 1011138 - RNA, 19 nt, Artificial Sequence
  Description of Artificial Sequence: Synthetic oligonucleotide
  Sense strand starting at position 2689 of SEQ ID NO: 914532
uuguuugauguuuaacaac

SEQ ID NO: 1011139 - RNA, 19 nt, Artificial Sequence
  Description of Artificial Sequence: Synthetic oligonucleotide
  Antisense strand to SEQ ID NO: 1011138
guuguuaaacaucaaacaa

SEQ ID NO: 1011140 - RNA, 19 nt, Artificial Sequence
  Description of Artificial Sequence: Synthetic oligonucleotide
  Sense strand starting at position 2804 of SEQ ID NO: 914532
ccugguuuccaugauuauc

SEQ ID NO: 1011141 - RNA, 19 nt, Artificial Sequence
  Description of Artificial Sequence: Synthetic oligonucleotide
  Antisense strand to SEQ ID NO: 1011140
gauaaucauggaaaccagg

SEQ ID NO: 1011142 - RNA, 19 nt, Artificial Sequence
  Description of Artificial Sequence: Synthetic oligonucleotide
  Sense strand starting at position 2806 of SEQ ID NO: 914532
ugguuuccaugauuaucau

SEQ ID NO: 1011143 - RNA, 19 nt, Artificial Sequence
  Description of Artificial Sequence: Synthetic oligonucleotide
  Antisense strand to SEQ ID NO: 1011142
augauaaucauggaaacca

SEQ ID NO: 1011144 - RNA, 19 nt, Artificial Sequence
  Description of Artificial Sequence: Synthetic oligonucleotide
  Sense strand starting at position 2807 of SEQ ID NO: 914532
gguuuccaugauuaucauu

SEQ ID NO: 1011145 - RNA, 19 nt, Artificial Sequence
  Description of Artificial Sequence: Synthetic oligonucleotide
  Antisense strand to SEQ ID NO: 1011144
aaugauaaucauggaaacc

SEQ ID NO: 1011146 - RNA, 19 nt, Artificial Sequence
  Description of Artificial Sequence: Synthetic oligonucleotide
  Sense strand starting at position 2870 of SEQ ID NO: 914532
uuaaguuacugaguaagag

SEQ ID NO: 1011147 - RNA, 19 nt, Artificial Sequence
  Description of Artificial Sequence: Synthetic oligonucleotide
  Antisense strand to SEQ ID NO: 1011146
cucuuacucaguaacuuaa

SEQ ID NO: 1011148 - RNA, 19 nt, Artificial Sequence
  Description of Artificial Sequence: Synthetic oligonucleotide
  Sense strand starting at position 2871 of SEQ ID NO: 914532
uaaguuacugaguaagagu

SEQ ID NO: 1011149 - RNA, 19 nt, Artificial Sequence
  Description of Artificial Sequence: Synthetic oligonucleotide
  Antisense strand to SEQ ID NO: 1011148
acucuuacucaguaacuua

SEQ ID NO: 1011150 - RNA, 19 nt, Artificial Sequence
  Description of Artificial Sequence: Synthetic oligonucleotide
  Sense strand starting at position 2983 of SEQ ID NO: 914532
uucugagagguuuacguga

SEQ ID NO: 1011151 - RNA, 19 nt, Artificial Sequence
  Description of Artificial Sequence: Synthetic oligonucleotide
  Antisense strand to SEQ ID NO: 1011150
ucacguaaaccucucagaa

SEQ ID NO: 1011152 - RNA, 19 nt, Artificial Sequence
  Description of Artificial Sequence: Synthetic oligonucleotide
  Sense strand starting at position 3049 of SEQ ID NO: 914532
ggaaguuugagccauuauu

SEQ ID NO: 1011153 - RNA, 19 nt, Artificial Sequence
  Description of Artificial Sequence: Synthetic oligonucleotide
  Antisense strand to SEQ ID NO: 1011152
aauaauggcucaaacuucc

SEQ ID NO: 1011154 - RNA, 19 nt, Artificial Sequence
  Description of Artificial Sequence: Synthetic oligonucleotide
  Sense strand starting at position 3163 of SEQ ID NO: 914532
uucccuggagcuugaauua

SEQ ID NO: 1011155 - RNA, 19 nt, Artificial Sequence
  Description of Artificial Sequence: Synthetic oligonucleotide
  Antisense strand to SEQ ID NO: 1011154
uaauucaagcuccagggaa

SEQ ID NO: 1011156 - RNA, 19 nt, Artificial Sequence
  Description of Artificial Sequence: Synthetic oligonucleotide
  Sense strand starting at position 3172 of SEQ ID NO: 914532
gcuugaauuagcuaggaca

SEQ ID NO: 1011157 - RNA, 19 nt, Artificial Sequence
  Description of Artificial Sequence: Synthetic oligonucleotide
  Antisense strand to SEQ ID NO: 1011156
uguccuagcuaauucaagc

SEQ ID NO: 1011158 - RNA, 19 nt, Artificial Sequence
  Description of Artificial Sequence: Synthetic oligonucleotide
  Sense strand starting at position 3563 of SEQ ID NO: 914532
uaaccagagccugguaauu

SEQ ID NO: 1011159 - RNA, 19 nt, Artificial Sequence
  Description of Artificial Sequence: Synthetic oligonucleotide
  Antisense strand to SEQ ID NO: 1011158
aauuaccaggcucugguua

SEQ ID NO: 1011160 - RNA, 19 nt, Artificial Sequence
  Description of Artificial Sequence: Synthetic oligonucleotide
  Sense strand starting at position 3601 of SEQ ID NO: 914532
ccugauugugucuaacuau

SEQ ID NO: 1011161 - RNA, 19 nt, Artificial Sequence
  Description of Artificial Sequence: Synthetic oligonucleotide
  Antisense strand to SEQ ID NO: 1011160
auaguuagacacaaucagg

SEQ ID NO: 1011162 - RNA, 19 nt, Artificial Sequence
  Description of Artificial Sequence: Synthetic oligonucleotide
  Sense strand starting at position 3629 of SEQ ID NO: 914532
gugcuuugugaguuugcac

SEQ ID NO: 1011163 - RNA, 19 nt, Artificial Sequence
  Description of Artificial Sequence: Synthetic oligonucleotide
  Antisense strand to SEQ ID NO: 1011162
gugcaaacucacaaagcac

SEQ ID NO: 1011164 - RNA, 19 nt, Artificial Sequence
  Description of Artificial Sequence: Synthetic oligonucleotide
  Sense strand starting at position 3753 of SEQ ID NO: 914532
ggcauaaaccuuuggauac

SEQ ID NO: 1011165 - RNA, 19 nt, Artificial Sequence
  Description of Artificial Sequence: Synthetic oligonucleotide
  Antisense strand to SEQ ID NO: 1011164
guauccaaagguuuaugcc

SEQ ID NO: 1011166 - RNA, 19 nt, Artificial Sequence
  Description of Artificial Sequence: Synthetic oligonucleotide
  Sense strand starting at position 3904 of SEQ ID NO: 914532
ggaagucagugguuuaaac

SEQ ID NO: 1011167 - RNA, 19 nt, Artificial Sequence
  Description of Artificial Sequence: Synthetic oligonucleotide
  Antisense strand to SEQ ID NO: 1011166
guuuaaaccacugacuucc

SEQ ID NO: 1011168 - RNA, 19 nt, Artificial Sequence
  Description of Artificial Sequence: Synthetic oligonucleotide
  Sense strand starting at position 3906 of SEQ ID NO: 914532
aagucagugguuuaaacaa

SEQ ID NO: 1011169 - RNA, 19 nt, Artificial Sequence
  Description of Artificial Sequence: Synthetic oligonucleotide
  Antisense strand to SEQ ID NO: 1011168
uuguuuaaaccacugacuu

SEQ ID NO: 1011170 - RNA, 19 nt, Artificial Sequence
  Description of Artificial Sequence: Synthetic oligonucleotide
  Sense strand starting at position 3954 of SEQ ID NO: 914532
aguucuuggaaauggaauu

SEQ ID NO: 1011171 - RNA, 19 nt, Artificial Sequence
  Description of Artificial Sequence: Synthetic oligonucleotide
  Antisense strand to SEQ ID NO: 1011170
aauuccauuuccaagaacu

SEQ ID NO: 1011172 - RNA, 19 nt, Artificial Sequence
  Description of Artificial Sequence: Synthetic oligonucleotide
  Sense strand starting at position 3955 of SEQ ID NO: 914532
guucuuggaaauggaauua

SEQ ID NO: 1011173 - RNA, 19 nt, Artificial Sequence
  Description of Artificial Sequence: Synthetic oligonucleotide
  Antisense strand to SEQ ID NO: 1011172
uaauuccauuuccaagaac

SEQ ID NO: 1011174 - RNA, 19 nt, Artificial Sequence
  Description of Artificial Sequence: Synthetic oligonucleotide
  Sense strand starting at position 52 of SEQ ID NO: 914533
uuguuaagccuuugaauau

SEQ ID NO: 1011175 - RNA, 19 nt, Artificial Sequence
  Description of Artificial Sequence: Synthetic oligonucleotide
  Antisense strand to SEQ ID NO: 1011174
auauucaaaggcuuaacaa

SEQ ID NO: 1011176 - RNA, 19 nt, Artificial Sequence
  Description of Artificial Sequence: Synthetic oligonucleotide
  Sense strand starting at position 78 of SEQ ID NO: 914533
gaaaguaucgcgcaaucau

SEQ ID NO: 1011177 - RNA, 19 nt, Artificial Sequence
  Description of Artificial Sequence: Synthetic oligonucleotide
  Antisense strand to SEQ ID NO: 1011176
augauugcgcgauacuuuc

SEQ ID NO: 1011178 - RNA, 19 nt, Artificial Sequence
  Description of Artificial Sequence: Synthetic oligonucleotide
  Sense strand starting at position 88 of SEQ ID NO: 914533
cgcaaucauugauugucaa

SEQ ID NO: 1011179 - RNA, 19 nt, Artificial Sequence
  Description of Artificial Sequence: Synthetic oligonucleotide
  Antisense strand to SEQ ID NO: 1011178
uugacaaucaaugauugcg

SEQ ID NO: 1011180 - RNA, 19 nt, Artificial Sequence
  Description of Artificial Sequence: Synthetic oligonucleotide
  Sense strand starting at position 89 of SEQ ID NO: 914533
gcaaucauugauugucaaa

SEQ ID NO: 1011181 - RNA, 19 nt, Artificial Sequence
  Description of Artificial Sequence: Synthetic oligonucleotide
  Antisense strand to SEQ ID NO: 1011180
uuugacaaucaaugauugc

SEQ ID NO: 1011182 - RNA, 19 nt, Artificial Sequence
  Description of Artificial Sequence: Synthetic oligonucleotide
  Sense strand starting at position 102 of SEQ ID NO: 914533
gucaaaucauggguuucua

SEQ ID NO: 1011183 - RNA, 19 nt, Artificial Sequence
  Description of Artificial Sequence: Synthetic oligonucleotide
  Antisense strand to SEQ ID NO: 1011182
uagaaacccaugauuugac

SEQ ID NO: 1011184 - RNA, 19 nt, Artificial Sequence
  Description of Artificial Sequence: Synthetic oligonucleotide
  Sense strand starting at position 161 of SEQ ID NO: 914533
ccuauacccgaagguauaa

SEQ ID NO: 1011185 - RNA, 19 nt, Artificial Sequence
  Description of Artificial Sequence: Synthetic oligonucleotide
  Antisense strand to SEQ ID NO: 1011184
uuauaccuucggguauagg

SEQ ID NO: 1011186 - RNA, 19 nt, Artificial Sequence
  Description of Artificial Sequence: Synthetic oligonucleotide
  Sense strand starting at position 413 of SEQ ID NO: 914533
ggguguguuuccacggcuu

SEQ ID NO: 1011187 - RNA, 19 nt, Artificial Sequence
  Description of Artificial Sequence: Synthetic oligonucleotide
  Antisense strand to SEQ ID NO: 1011186
aagccguggaaacacaccc

SEQ ID NO: 1011188 - RNA, 19 nt, Artificial Sequence
  Description of Artificial Sequence: Synthetic oligonucleotide
  Sense strand starting at position 1844 of SEQ ID NO: 914533
cuacgucagccgccauaau

SEQ ID NO: 1011189 - RNA, 19 nt, Artificial Sequence
  Description of Artificial Sequence: Synthetic oligonucleotide
  Antisense strand to SEQ ID NO: 1011188
auuauggcggcugacguag

SEQ ID NO: 1011190 - RNA, 19 nt, Artificial Sequence
  Description of Artificial Sequence: Synthetic oligonucleotide
  Sense strand starting at position 1980 of SEQ ID NO: 914533
cugcacuggucuccauauu

SEQ ID NO: 1011191 - RNA, 19 nt, Artificial Sequence
  Description of Artificial Sequence: Synthetic oligonucleotide
  Antisense strand to SEQ ID NO: 1011190
aauauggagaccagugcag

SEQ ID NO: 1011192 - RNA, 19 nt, Artificial Sequence
  Description of Artificial Sequence: Synthetic oligonucleotide
  Sense strand starting at position 1990 of SEQ ID NO: 914533
cuccauauuccagagcaga

SEQ ID NO: 1011193 - RNA, 19 nt, Artificial Sequence
  Description of Artificial Sequence: Synthetic oligonucleotide
  Antisense strand to SEQ ID NO: 1011192
ucugcucuggaauauggag

SEQ ID NO: 1011194 - RNA, 19 nt, Artificial Sequence
  Description of Artificial Sequence: Synthetic oligonucleotide
  Sense strand starting at position 2018 of SEQ ID NO: 914533
uugcuauuggccuaggacu

SEQ ID NO: 1011195 - RNA, 19 nt, Artificial Sequence
  Description of Artificial Sequence: Synthetic oligonucleotide
  Antisense strand to SEQ ID NO: 1011194
aguccuaggccaauagcaa

SEQ ID NO: 1011196 - RNA, 19 nt, Artificial Sequence
  Description of Artificial Sequence: Synthetic oligonucleotide
  Sense strand starting at position 2061 of SEQ ID NO: 914533
cccacaaauuuccacggau

SEQ ID NO: 1011197 - RNA, 19 nt, Artificial Sequence
  Description of Artificial Sequence: Synthetic oligonucleotide
  Antisense strand to SEQ ID NO: 1011196
auccguggaaauuuguggg

SEQ ID NO: 1011198 - RNA, 19 nt, Artificial Sequence
  Description of Artificial Sequence: Synthetic oligonucleotide
  Sense strand starting at position 2097 of SEQ ID NO: 914533
ucugaaaccugcucagcua

SEQ ID NO: 1011199 - RNA, 19 nt, Artificial Sequence
  Description of Artificial Sequence: Synthetic oligonucleotide
  Antisense strand to SEQ ID NO: 1011198
uagcugagcagguuucaga

SEQ ID NO: 1011200 - RNA, 19 nt, Artificial Sequence
  Description of Artificial Sequence: Synthetic oligonucleotide
  Sense strand starting at position 2132 of SEQ ID NO: 914533
guuugaaauguuuggguuu

SEQ ID NO: 1011201 - RNA, 19 nt, Artificial Sequence
  Description of Artificial Sequence: Synthetic oligonucleotide
  Antisense strand to SEQ ID NO: 1011200
aaacccaaacauuucaaac

SEQ ID NO: 1011202 - RNA, 19 nt, Artificial Sequence
  Description of Artificial Sequence: Synthetic oligonucleotide
  Sense strand starting at position 2279 of SEQ ID NO: 914533
aguugccuuucuccagaaa

SEQ ID NO: 1011203 - RNA, 19 nt, Artificial Sequence
  Description of Artificial Sequence: Synthetic oligonucleotide
  Antisense strand to SEQ ID NO: 1011202
uuucuggagaaaggcaacu

SEQ ID NO: 1011204 - RNA, 19 nt, Artificial Sequence
  Description of Artificial Sequence: Synthetic oligonucleotide
  Sense strand starting at position 2791 of SEQ ID NO: 914533
auagcaucuguguggaaca

SEQ ID NO: 1011205 - RNA, 19 nt, Artificial Sequence
  Description of Artificial Sequence: Synthetic oligonucleotide
  Antisense strand to SEQ ID NO: 1011204
uguuccacacagaugcuau

SEQ ID NO: 1011206 - RNA, 19 nt, Artificial Sequence
  Description of Artificial Sequence: Synthetic oligonucleotide
  Sense strand starting at position 2859 of SEQ ID NO: 914533
aucuguaaaucaucaguua

SEQ ID NO: 1011207 - RNA, 19 nt, Artificial Sequence
  Description of Artificial Sequence: Synthetic oligonucleotide
  Antisense strand to SEQ ID NO: 1011206
uaacugaugauuuacagau

SEQ ID NO: 1011208 - RNA, 19 nt, Artificial Sequence
  Description of Artificial Sequence: Synthetic oligonucleotide
  Sense strand starting at position 2860 of SEQ ID NO: 914533
ucuguaaaucaucaguuac

SEQ ID NO: 1011209 - RNA, 19 nt, Artificial Sequence
  Description of Artificial Sequence: Synthetic oligonucleotide
  Antisense strand to SEQ ID NO: 1011208
guaacugaugauuuacaga

SEQ ID NO: 1011210 - RNA, 19 nt, Artificial Sequence
  Description of Artificial Sequence: Synthetic oligonucleotide
  Sense strand starting at position 2862 of SEQ ID NO: 914533
uguaaaucaucaguuaccu

SEQ ID NO: 1011211 - RNA, 19 nt, Artificial Sequence
  Description of Artificial Sequence: Synthetic oligonucleotide
  Antisense strand to SEQ ID NO: 1011210
agguaacugaugauuuaca

SEQ ID NO: 1011212 - RNA, 19 nt, Artificial Sequence
  Description of Artificial Sequence: Synthetic oligonucleotide
  Sense strand starting at position 2988 of SEQ ID NO: 914533
aauugaacugagcagucau

SEQ ID NO: 1011213 - RNA, 19 nt, Artificial Sequence
  Description of Artificial Sequence: Synthetic oligonucleotide
  Antisense strand to SEQ ID NO: 1011212
augacugcucaguucaauu

SEQ ID NO: 1011214 - RNA, 19 nt, Artificial Sequence
  Description of Artificial Sequence: Synthetic oligonucleotide
  Sense strand starting at position 3007 of SEQ ID NO: 914533
aaggguauacccugacacu

SEQ ID NO: 1011215 - RNA, 19 nt, Artificial Sequence
  Description of Artificial Sequence: Synthetic oligonucleotide
  Antisense strand to SEQ ID NO: 1011214
agugucaggguauacccuu

SEQ ID NO: 1011216 - RNA, 19 nt, Artificial Sequence
  Description of Artificial Sequence: Synthetic oligonucleotide
  Sense strand starting at position 3157 of SEQ ID NO: 914533
ggguugguuugggugugaa

SEQ ID NO: 1011217 - RNA, 19 nt, Artificial Sequence
  Description of Artificial Sequence: Synthetic oligonucleotide
  Antisense strand to SEQ ID NO: 1011216
uucacacccaaaccaaccc

SEQ ID NO: 1011218 - RNA, 19 nt, Artificial Sequence
  Description of Artificial Sequence: Synthetic oligonucleotide
  Sense strand starting at position 3158 of SEQ ID NO: 914533
gguugguuugggugugaac

SEQ ID NO: 1011219 - RNA, 19 nt, Artificial Sequence
  Description of Artificial Sequence: Synthetic oligonucleotide
  Antisense strand to SEQ ID NO: 1011218
guucacacccaaaccaacc

SEQ ID NO: 1011220 - RNA, 19 nt, Artificial Sequence
  Description of Artificial Sequence: Synthetic oligonucleotide
  Sense strand starting at position 3160 of SEQ ID NO: 914533
uugguuugggugugaacau

SEQ ID NO: 1011221 - RNA, 19 nt, Artificial Sequence
  Description of Artificial Sequence: Synthetic oligonucleotide
  Antisense strand to SEQ ID NO: 1011220
auguucacacccaaaccaa

SEQ ID NO: 1011222 - RNA, 19 nt, Artificial Sequence
  Description of Artificial Sequence: Synthetic oligonucleotide
  Sense strand starting at position 3199 of SEQ ID NO: 914533
cauauugccucuguuagga

SEQ ID NO: 1011223 - RNA, 19 nt, Artificial Sequence
  Description of Artificial Sequence: Synthetic oligonucleotide
  Antisense strand to SEQ ID NO: 1011222
uccuaacagaggcaauaug

SEQ ID NO: 1011224 - RNA, 19 nt, Artificial Sequence
  Description of Artificial Sequence: Synthetic oligonucleotide
  Sense strand starting at position 3213 of SEQ ID NO: 914533
uaggauugguccuucucca

SEQ ID NO: 1011225 - RNA, 19 nt, Artificial Sequence
  Description of Artificial Sequence: Synthetic oligonucleotide
  Antisense strand to SEQ ID NO: 1011224
uggagaaggaccaauccua

SEQ ID NO: 1011226 - RNA, 19 nt, Artificial Sequence
  Description of Artificial Sequence: Synthetic oligonucleotide
  Sense strand starting at position 3497 of SEQ ID NO: 914533
gguuaaucgaguuauugca

SEQ ID NO: 1011227 - RNA, 19 nt, Artificial Sequence
  Description of Artificial Sequence: Synthetic oligonucleotide
  Antisense strand to SEQ ID NO: 1011226
ugcaauaacucgauuaacc

SEQ ID NO: 1011228 - RNA, 19 nt, Artificial Sequence
  Description of Artificial Sequence: Synthetic oligonucleotide
  Sense strand starting at position 3499 of SEQ ID NO: 914533
uuaaucgaguuauugcaua

SEQ ID NO: 1011229 - RNA, 19 nt, Artificial Sequence
  Description of Artificial Sequence: Synthetic oligonucleotide
  Antisense strand to SEQ ID NO: 1011228
uaugcaauaacucgauuaa

SEQ ID NO: 1011230 - RNA, 19 nt, Artificial Sequence
  Description of Artificial Sequence: Synthetic oligonucleotide
  Sense strand starting at position 3504 of SEQ ID NO: 914533
cgaguuauugcauacaaag

SEQ ID NO: 1011231 - RNA, 19 nt, Artificial Sequence
  Description of Artificial Sequence: Synthetic oligonucleotide
  Antisense strand to SEQ ID NO: 1011230
cuuuguaugcaauaacucg

SEQ ID NO: 1011232 - RNA, 19 nt, Artificial Sequence
  Description of Artificial Sequence: Synthetic oligonucleotide
  Sense strand starting at position 3515 of SEQ ID NO: 914533
auacaaagccguuagaaga

SEQ ID NO: 1011233 - RNA, 19 nt, Artificial Sequence
  Description of Artificial Sequence: Synthetic oligonucleotide
  Antisense strand to SEQ ID NO: 1011232
ucuucuaacggcuuuguau

SEQ ID NO: 1011234 - RNA, 19 nt, Artificial Sequence
  Description of Artificial Sequence: Synthetic oligonucleotide
  Sense strand starting at position 3532 of SEQ ID NO: 914533
gaaugcuuuccacauagug

SEQ ID NO: 1011235 - RNA, 19 nt, Artificial Sequence
  Description of Artificial Sequence: Synthetic oligonucleotide
  Antisense strand to SEQ ID NO: 1011234
cacuauguggaaagcauuc

SEQ ID NO: 1011236 - RNA, 19 nt, Artificial Sequence
  Description of Artificial Sequence: Synthetic oligonucleotide
  Sense strand starting at position 3628 of SEQ ID NO: 914533
aggauugaaagccagcuau

SEQ ID NO: 1011237 - RNA, 19 nt, Artificial Sequence
  Description of Artificial Sequence: Synthetic oligonucleotide
  Antisense strand to SEQ ID NO: 1011236
auagcuggcuuucaauccu

SEQ ID NO: 1011238 - RNA, 19 nt, Artificial Sequence
  Description of Artificial Sequence: Synthetic oligonucleotide
  Sense strand starting at position 3638 of SEQ ID NO: 914533
gccagcuauuugguaaugu

SEQ ID NO: 1011239 - RNA, 19 nt, Artificial Sequence
  Description of Artificial Sequence: Synthetic oligonucleotide
  Antisense strand to SEQ ID NO: 1011238
acauuaccaaauagcuggc

SEQ ID NO: 1011240 - RNA, 19 nt, Artificial Sequence
  Description of Artificial Sequence: Synthetic oligonucleotide
  Sense strand starting at position 3663 of SEQ ID NO: 914533
acacccuuugcucagaguu

SEQ ID NO: 1011241 - RNA, 19 nt, Artificial Sequence
  Description of Artificial Sequence: Synthetic oligonucleotide
  Antisense strand to SEQ ID NO: 1011240
aacucugagcaaagggugu

SEQ ID NO: 1011242 - RNA, 19 nt, Artificial Sequence
  Description of Artificial Sequence: Synthetic oligonucleotide
  Sense strand starting at position 3701 of SEQ ID NO: 914533
agcugcaauuuggcauaua

SEQ ID NO: 1011243 - RNA, 19 nt, Artificial Sequence
  Description of Artificial Sequence: Synthetic oligonucleotide
  Antisense strand to SEQ ID NO: 1011242
uauaugccaaauugcagcu

SEQ ID NO: 1011244 - RNA, 19 nt, Artificial Sequence
  Description of Artificial Sequence: Synthetic oligonucleotide
  Sense strand starting at position 3745 of SEQ ID NO: 914533
gaccuccaugugcagaauu

SEQ ID NO: 1011245 - RNA, 19 nt, Artificial Sequence
  Description of Artificial Sequence: Synthetic oligonucleotide
  Antisense strand to SEQ ID NO: 1011244
aauucugcacauggagguc

SEQ ID NO: 1011246 - RNA, 19 nt, Artificial Sequence
  Description of Artificial Sequence: Synthetic oligonucleotide
  Sense strand starting at position 3765 of SEQ ID NO: 914533
cagguaacgcauuaacacu

SEQ ID NO: 1011247 - RNA, 19 nt, Artificial Sequence
  Description of Artificial Sequence: Synthetic oligonucleotide
  Antisense strand to SEQ ID NO: 1011246
aguguuaaugcguuaccug

SEQ ID NO: 1011248 - RNA, 19 nt, Artificial Sequence
  Description of Artificial Sequence: Synthetic oligonucleotide
  Sense strand starting at position 3784 of SEQ ID NO: 914533
cccuuacauuucuagagga

SEQ ID NO: 1011249 - RNA, 19 nt, Artificial Sequence
  Description of Artificial Sequence: Synthetic oligonucleotide
  Antisense strand to SEQ ID NO: 1011248
uccucuagaaauguaaggg

SEQ ID NO: 1011250 - RNA, 19 nt, Artificial Sequence
  Description of Artificial Sequence: Synthetic oligonucleotide
  Sense strand starting at position 3889 of SEQ ID NO: 914533
agagaucuguaccucgauu

SEQ ID NO: 1011251 - RNA, 19 nt, Artificial Sequence
  Description of Artificial Sequence: Synthetic oligonucleotide
  Antisense strand to SEQ ID NO: 1011250
aaucgagguacagaucucu

SEQ ID NO: 1011252 - RNA, 19 nt, Artificial Sequence
  Description of Artificial Sequence: Synthetic oligonucleotide
  Sense strand starting at position 3891 of SEQ ID NO: 914533
agaucuguaccucgauuac

SEQ ID NO: 1011253 - RNA, 19 nt, Artificial Sequence
  Description of Artificial Sequence: Synthetic oligonucleotide
  Antisense strand to SEQ ID NO: 1011252
guaaucgagguacagaucu

SEQ ID NO: 1011254 - RNA, 19 nt, Artificial Sequence
  Description of Artificial Sequence: Synthetic oligonucleotide
  Sense strand starting at position 19 of SEQ ID NO: 914534
uggaaauaucuugguuauu

SEQ ID NO: 1011255 - RNA, 19 nt, Artificial Sequence
  Description of Artificial Sequence: Synthetic oligonucleotide
  Antisense strand to SEQ ID NO: 1011254
aauaaccaagauauuucca

SEQ ID NO: 1011256 - RNA, 19 nt, Artificial Sequence
  Description of Artificial Sequence: Synthetic oligonucleotide
  Sense strand starting at position 348 of SEQ ID NO: 914534
gagccaaacuugucauugu

SEQ ID NO: 1011257 - RNA, 19 nt, Artificial Sequence
  Description of Artificial Sequence: Synthetic oligonucleotide
  Antisense strand to SEQ ID NO: 1011256
acaaugacaaguuuggcuc

SEQ ID NO: 1011258 - RNA, 19 nt, Artificial Sequence
  Description of Artificial Sequence: Synthetic oligonucleotide
  Sense strand starting at position 357 of SEQ ID NO: 914534
uugucauuguuuccuaaca

SEQ ID NO: 1011259 - RNA, 19 nt, Artificial Sequence
  Description of Artificial Sequence: Synthetic oligonucleotide
  Antisense strand to SEQ ID NO: 1011258
uguuaggaaacaaugacaa

SEQ ID NO: 1011260 - RNA, 19 nt, Artificial Sequence
  Description of Artificial Sequence: Synthetic oligonucleotide
  Sense strand starting at position 358 of SEQ ID NO: 914534
ugucauuguuuccuaacau

SEQ ID NO: 1011261 - RNA, 19 nt, Artificial Sequence
  Description of Artificial Sequence: Synthetic oligonucleotide
  Antisense strand to SEQ ID NO: 1011260
auguuaggaaacaaugaca

SEQ ID NO: 1011262 - RNA, 19 nt, Artificial Sequence
  Description of Artificial Sequence: Synthetic oligonucleotide
  Sense strand starting at position 522 of SEQ ID NO: 914534
gggucuuaaugggcaguca

SEQ ID NO: 1011263 - RNA, 19 nt, Artificial Sequence
  Description of Artificial Sequence: Synthetic oligonucleotide
  Antisense strand to SEQ ID NO: 1011262
ugacugcccauuaagaccc

SEQ ID NO: 1011264 - RNA, 19 nt, Artificial Sequence
  Description of Artificial Sequence: Synthetic oligonucleotide
  Sense strand starting at position 523 of SEQ ID NO: 914534
ggucuuaaugggcagucau

SEQ ID NO: 1011265 - RNA, 19 nt, Artificial Sequence
  Description of Artificial Sequence: Synthetic oligonucleotide
  Antisense strand to SEQ ID NO: 1011264
augacugcccauuaagacc

SEQ ID NO: 1011266 - RNA, 19 nt, Artificial Sequence
  Description of Artificial Sequence: Synthetic oligonucleotide
  Sense strand starting at position 535 of SEQ ID NO: 914534
cagucauucugagcagaaa

SEQ ID NO: 1011267 - RNA, 19 nt, Artificial Sequence
  Description of Artificial Sequence: Synthetic oligonucleotide
  Antisense strand to SEQ ID NO: 1011266
uuucugcucagaaugacug

SEQ ID NO: 1011268 - RNA, 19 nt, Artificial Sequence
  Description of Artificial Sequence: Synthetic oligonucleotide
  Sense strand starting at position 536 of SEQ ID NO: 914534
agucauucugagcagaaac

SEQ ID NO: 1011269 - RNA, 19 nt, Artificial Sequence
  Description of Artificial Sequence: Synthetic oligonucleotide
  Antisense strand to SEQ ID NO: 1011268
guuucugcucagaaugacu

SEQ ID NO: 1011270 - RNA, 19 nt, Artificial Sequence
  Description of Artificial Sequence: Synthetic oligonucleotide
  Sense strand starting at position 689 of SEQ ID NO: 914534
gacuucuugcugugccaca

SEQ ID NO: 1011271 - RNA, 19 nt, Artificial Sequence
  Description of Artificial Sequence: Synthetic oligonucleotide
  Antisense strand to SEQ ID NO: 1011270
uguggcacagcaagaaguc

SEQ ID NO: 1011272 - RNA, 19 nt, Artificial Sequence
  Description of Artificial Sequence: Synthetic oligonucleotide
  Sense strand starting at position 850 of SEQ ID NO: 914534
ugcccugaaggcugaaaua

SEQ ID NO: 1011273 - RNA, 19 nt, Artificial Sequence
  Description of Artificial Sequence: Synthetic oligonucleotide
  Antisense strand to SEQ ID NO: 1011272
uauuucagccuucagggca

SEQ ID NO: 1011274 - RNA, 19 nt, Artificial Sequence
  Description of Artificial Sequence: Synthetic oligonucleotide
  Sense strand starting at position 869 of SEQ ID NO: 914534
cagagcaucuuugaggaca

SEQ ID NO: 1011275 - RNA, 19 nt, Artificial Sequence
  Description of Artificial Sequence: Synthetic oligonucleotide
  Antisense strand to SEQ ID NO: 1011274
uguccucaaagaugcucug

SEQ ID NO: 1011276 - RNA, 19 nt, Artificial Sequence
  Description of Artificial Sequence: Synthetic oligonucleotide
  Sense strand starting at position 881 of SEQ ID NO: 914534
gaggacaucugcucuaucu

SEQ ID NO: 1011277 - RNA, 19 nt, Artificial Sequence
  Description of Artificial Sequence: Synthetic oligonucleotide
  Antisense strand to SEQ ID NO: 1011276
agauagagcagauguccuc

SEQ ID NO: 1011278 - RNA, 19 nt, Artificial Sequence
  Description of Artificial Sequence: Synthetic oligonucleotide
  Sense strand starting at position 883 of SEQ ID NO: 914534
ggacaucugcucuaucugu

SEQ ID NO: 1011279 - RNA, 19 nt, Artificial Sequence
  Description of Artificial Sequence: Synthetic oligonucleotide
  Antisense strand to SEQ ID NO: 1011278
acagauagagcagaugucc

SEQ ID NO: 1011280 - RNA, 19 nt, Artificial Sequence
  Description of Artificial Sequence: Synthetic oligonucleotide
  Sense strand starting at position 888 of SEQ ID NO: 914534
ucugcucuaucugugggaa

SEQ ID NO: 1011281 - RNA, 19 nt, Artificial Sequence
  Description of Artificial Sequence: Synthetic oligonucleotide
  Antisense strand to SEQ ID NO: 1011280
uucccacagauagagcaga

SEQ ID NO: 1011282 - RNA, 19 nt, Artificial Sequence
  Description of Artificial Sequence: Synthetic oligonucleotide
  Sense strand starting at position 889 of SEQ ID NO: 914534
cugcucuaucugugggaag

SEQ ID NO: 1011283 - RNA, 19 nt, Artificial Sequence
  Description of Artificial Sequence: Synthetic oligonucleotide
  Antisense strand to SEQ ID NO: 1011282
cuucccacagauagagcag

SEQ ID NO: 1011284 - RNA, 19 nt, Artificial Sequence
  Description of Artificial Sequence: Synthetic oligonucleotide
  Sense strand starting at position 891 of SEQ ID NO: 914534
gcucuaucugugggaagga

SEQ ID NO: 1011285 - RNA, 19 nt, Artificial Sequence
  Description of Artificial Sequence: Synthetic oligonucleotide
  Antisense strand to SEQ ID NO: 1011284
uccuucccacagauagagc

SEQ ID NO: 1011286 - RNA, 19 nt, Artificial Sequence
  Description of Artificial Sequence: Synthetic oligonucleotide
  Sense strand starting at position 1031 of SEQ ID NO: 914534
uuguuaagccuuugaauau

SEQ ID NO: 1011287 - RNA, 19 nt, Artificial Sequence
  Description of Artificial Sequence: Synthetic oligonucleotide
  Antisense strand to SEQ ID NO: 1011286
auauucaaaggcuuaacaa

SEQ ID NO: 1011288 - RNA, 19 nt, Artificial Sequence
  Description of Artificial Sequence: Synthetic oligonucleotide
  Sense strand starting at position 1057 of SEQ ID NO: 914534
gaaaguaucgcgcaaucau

SEQ ID NO: 1011289 - RNA, 19 nt, Artificial Sequence
  Description of Artificial Sequence: Synthetic oligonucleotide
  Antisense strand to SEQ ID NO: 1011288
augauugcgcgauacuuuc

SEQ ID NO: 1011290 - RNA, 19 nt, Artificial Sequence
  Description of Artificial Sequence: Synthetic oligonucleotide
  Sense strand starting at position 1067 of SEQ ID NO: 914534
cgcaaucauugauugucaa

SEQ ID NO: 1011291 - RNA, 19 nt, Artificial Sequence
  Description of Artificial Sequence: Synthetic oligonucleotide
  Antisense strand to SEQ ID NO: 1011290
uugacaaucaaugauugcg

SEQ ID NO: 1011292 - RNA, 19 nt, Artificial Sequence
  Description of Artificial Sequence: Synthetic oligonucleotide
  Sense strand starting at position 1068 of SEQ ID NO: 914534
gcaaucauugauugucaaa

SEQ ID NO: 1011293 - RNA, 19 nt, Artificial Sequence
  Description of Artificial Sequence: Synthetic oligonucleotide
  Antisense strand to SEQ ID NO: 1011292
uuugacaaucaaugauugc

SEQ ID NO: 1011294 - RNA, 19 nt, Artificial Sequence
  Description of Artificial Sequence: Synthetic oligonucleotide
  Sense strand starting at position 1081 of SEQ ID NO: 914534
gucaaaucauggguuucua

SEQ ID NO: 1011295 - RNA, 19 nt, Artificial Sequence
  Description of Artificial Sequence: Synthetic oligonucleotide
  Antisense strand to SEQ ID NO: 1011294
uagaaacccaugauuugac

SEQ ID NO: 1011296 - RNA, 19 nt, Artificial Sequence
  Description of Artificial Sequence: Synthetic oligonucleotide
  Sense strand starting at position 1140 of SEQ ID NO: 914534
ccuauacccgaagguauaa

SEQ ID NO: 1011297 - RNA, 19 nt, Artificial Sequence
  Description of Artificial Sequence: Synthetic oligonucleotide
  Antisense strand to SEQ ID NO: 1011296
uuauaccuucggguauagg

SEQ ID NO: 1011298 - RNA, 19 nt, Artificial Sequence
  Description of Artificial Sequence: Synthetic oligonucleotide
  Sense strand starting at position 1202 of SEQ ID NO: 914534
gccggaugcuuugugaaau

SEQ ID NO: 1011299 - RNA, 19 nt, Artificial Sequence
  Description of Artificial Sequence: Synthetic oligonucleotide
  Antisense strand to SEQ ID NO: 1011298
auuucacaaagcauccggc

SEQ ID NO: 1011300 - RNA, 19 nt, Artificial Sequence
  Description of Artificial Sequence: Synthetic oligonucleotide
  Sense strand starting at position 1383 of SEQ ID NO: 914534
uuucaauccggguguguuu

SEQ ID NO: 1011301 - RNA, 19 nt, Artificial Sequence
  Description of Artificial Sequence: Synthetic oligonucleotide
  Antisense strand to SEQ ID NO: 1011300
aaacacacccggauugaaa

SEQ ID NO: 1011302 - RNA, 19 nt, Artificial Sequence
  Description of Artificial Sequence: Synthetic oligonucleotide
  Sense strand starting at position 1392 of SEQ ID NO: 914534
ggguguguuuccacggcuu

SEQ ID NO: 1011303 - RNA, 19 nt, Artificial Sequence
  Description of Artificial Sequence: Synthetic oligonucleotide
  Antisense strand to SEQ ID NO: 1011302
aagccguggaaacacaccc

SEQ ID NO: 1011304 - RNA, 19 nt, Artificial Sequence
  Description of Artificial Sequence: Synthetic oligonucleotide
  Sense strand starting at position 2782 of SEQ ID NO: 914534
ucgggacuuccaugcuagu

SEQ ID NO: 1011305 - RNA, 19 nt, Artificial Sequence
  Description of Artificial Sequence: Synthetic oligonucleotide
  Antisense strand to SEQ ID NO: 1011304
acuagcauggaagucccga

SEQ ID NO: 1011306 - RNA, 19 nt, Artificial Sequence
  Description of Artificial Sequence: Synthetic oligonucleotide
  Sense strand starting at position 2823 of SEQ ID NO: 914534
cuacgucagccgccauaau

SEQ ID NO: 1011307 - RNA, 19 nt, Artificial Sequence
  Description of Artificial Sequence: Synthetic oligonucleotide
  Antisense strand to SEQ ID NO: 1011306
auuauggcggcugacguag

SEQ ID NO: 1011308 - RNA, 19 nt, Artificial Sequence
  Description of Artificial Sequence: Synthetic oligonucleotide
  Sense strand starting at position 2959 of SEQ ID NO: 914534
cugcacuggucuccauauu

SEQ ID NO: 1011309 - RNA, 19 nt, Artificial Sequence
  Description of Artificial Sequence: Synthetic oligonucleotide
  Antisense strand to SEQ ID NO: 1011308
aauauggagaccagugcag

SEQ ID NO: 1011310 - RNA, 19 nt, Artificial Sequence
  Description of Artificial Sequence: Synthetic oligonucleotide
  Sense strand starting at position 2969 of SEQ ID NO: 914534
cuccauauuccagagcaga

SEQ ID NO: 1011311 - RNA, 19 nt, Artificial Sequence
  Description of Artificial Sequence: Synthetic oligonucleotide
  Antisense strand to SEQ ID NO: 1011310
ucugcucuggaauauggag

SEQ ID NO: 1011312 - RNA, 19 nt, Artificial Sequence
  Description of Artificial Sequence: Synthetic oligonucleotide
  Sense strand starting at position 2997 of SEQ ID NO: 914534
uugcuauuggccuaggacu

SEQ ID NO: 1011313 - RNA, 19 nt, Artificial Sequence
  Description of Artificial Sequence: Synthetic oligonucleotide
  Antisense strand to SEQ ID NO: 1011312
aguccuaggccaauagcaa

SEQ ID NO: 1011314 - RNA, 19 nt, Artificial Sequence
  Description of Artificial Sequence: Synthetic oligonucleotide
  Sense strand starting at position 3040 of SEQ ID NO: 914534
cccacaaauuuccacggau

SEQ ID NO: 1011315 - RNA, 19 nt, Artificial Sequence
  Description of Artificial Sequence: Synthetic oligonucleotide
  Antisense strand to SEQ ID NO: 1011314
auccguggaaauuuguggg

SEQ ID NO: 1011316 - RNA, 19 nt, Artificial Sequence
  Description of Artificial Sequence: Synthetic oligonucleotide
  Sense strand starting at position 3076 of SEQ ID NO: 914534
ucugaaaccugcucagcua

SEQ ID NO: 1011317 - RNA, 19 nt, Artificial Sequence
  Description of Artificial Sequence: Synthetic oligonucleotide
  Antisense strand to SEQ ID NO: 1011316
uagcugagcagguuucaga

SEQ ID NO: 1011318 - RNA, 19 nt, Artificial Sequence
  Description of Artificial Sequence: Synthetic oligonucleotide
  Sense strand starting at position 3111 of SEQ ID NO: 914534
guuugaaauguuuggguuu

SEQ ID NO: 1011319 - RNA, 19 nt, Artificial Sequence
  Description of Artificial Sequence: Synthetic oligonucleotide
  Antisense strand to SEQ ID NO: 1011318
aaacccaaacauuucaaac

SEQ ID NO: 1011320 - RNA, 19 nt, Artificial Sequence
  Description of Artificial Sequence: Synthetic oligonucleotide
  Sense strand starting at position 3258 of SEQ ID NO: 914534
aguugccuuucuccagaaa

SEQ ID NO: 1011321 - RNA, 19 nt, Artificial Sequence
  Description of Artificial Sequence: Synthetic oligonucleotide
  Antisense strand to SEQ ID NO: 1011320
uuucuggagaaaggcaacu

SEQ ID NO: 1011322 - RNA, 19 nt, Artificial Sequence
  Description of Artificial Sequence: Synthetic oligonucleotide
  Sense strand starting at position 3770 of SEQ ID NO: 914534
auagcaucuguguggaaca

SEQ ID NO: 1011323 - RNA, 19 nt, Artificial Sequence
  Description of Artificial Sequence: Synthetic oligonucleotide
  Antisense strand to SEQ ID NO: 1011322
uguuccacacagaugcuau

SEQ ID NO: 1011324 - RNA, 19 nt, Artificial Sequence
  Description of Artificial Sequence: Synthetic oligonucleotide
  Sense strand starting at position 3838 of SEQ ID NO: 914534
aucuguaaaucaucaguua

SEQ ID NO: 1011325 - RNA, 19 nt, Artificial Sequence
  Description of Artificial Sequence: Synthetic oligonucleotide
  Antisense strand to SEQ ID NO: 1011324
uaacugaugauuuacagau

SEQ ID NO: 1011326 - RNA, 19 nt, Artificial Sequence
  Description of Artificial Sequence: Synthetic oligonucleotide
  Sense strand starting at position 3839 of SEQ ID NO: 914534
ucuguaaaucaucaguuac

SEQ ID NO: 1011327 - RNA, 19 nt, Artificial Sequence
  Description of Artificial Sequence: Synthetic oligonucleotide
  Antisense strand to SEQ ID NO: 1011326
guaacugaugauuuacaga

SEQ ID NO: 1011328 - RNA, 19 nt, Artificial Sequence
  Description of Artificial Sequence: Synthetic oligonucleotide
  Sense strand starting at position 3841 of SEQ ID NO: 914534
uguaaaucaucaguuaccu

SEQ ID NO: 1011329 - RNA, 19 nt, Artificial Sequence
  Description of Artificial Sequence: Synthetic oligonucleotide
  Antisense strand to SEQ ID NO: 1011328
agguaacugaugauuuaca

SEQ ID NO: 1011330 - RNA, 19 nt, Artificial Sequence
  Description of Artificial Sequence: Synthetic oligonucleotide
  Sense strand starting at position 3878 of SEQ ID NO: 914534
gggcccugucucugcagaa

SEQ ID NO: 1011331 - RNA, 19 nt, Artificial Sequence
  Description of Artificial Sequence: Synthetic oligonucleotide
  Antisense strand to SEQ ID NO: 1011330
uucugcagagacagggccc

SEQ ID NO: 1011332 - RNA, 19 nt, Artificial Sequence
  Description of Artificial Sequence: Synthetic oligonucleotide
  Sense strand starting at position 3967 of SEQ ID NO: 914534
aauugaacugagcagucau

SEQ ID NO: 1011333 - RNA, 19 nt, Artificial Sequence
  Description of Artificial Sequence: Synthetic oligonucleotide
  Antisense strand to SEQ ID NO: 1011332
augacugcucaguucaauu

SEQ ID NO: 1011334 - RNA, 19 nt, Artificial Sequence
  Description of Artificial Sequence: Synthetic oligonucleotide
  Sense strand starting at position 67 of SEQ ID NO: 914535
ugcccugaaggcugaaaua

SEQ ID NO: 1011335 - RNA, 19 nt, Artificial Sequence
  Description of Artificial Sequence: Synthetic oligonucleotide
  Antisense strand to SEQ ID NO: 1011334
uauuucagccuucagggca

SEQ ID NO: 1011336 - RNA, 19 nt, Artificial Sequence
  Description of Artificial Sequence: Synthetic oligonucleotide
  Sense strand starting at position 98 of SEQ ID NO: 914535
gaggacaucugcucuaucu

SEQ ID NO: 1011337 - RNA, 19 nt, Artificial Sequence
  Description of Artificial Sequence: Synthetic oligonucleotide
  Antisense strand to SEQ ID NO: 1011336
agauagagcagauguccuc

SEQ ID NO: 1011338 - RNA, 19 nt, Artificial Sequence
  Description of Artificial Sequence: Synthetic oligonucleotide
  Sense strand starting at position 100 of SEQ ID NO: 914535
ggacaucugcucuaucugu

SEQ ID NO: 1011339 - RNA, 19 nt, Artificial Sequence
  Description of Artificial Sequence: Synthetic oligonucleotide
  Antisense strand to SEQ ID NO: 1011338
acagauagagcagaugucc

SEQ ID NO: 1011340 - RNA, 19 nt, Artificial Sequence
  Description of Artificial Sequence: Synthetic oligonucleotide
  Sense strand starting at position 105 of SEQ ID NO: 914535
ucugcucuaucugugggaa

SEQ ID NO: 1011341 - RNA, 19 nt, Artificial Sequence
  Description of Artificial Sequence: Synthetic oligonucleotide
  Antisense strand to SEQ ID NO: 1011340
uucccacagauagagcaga

SEQ ID NO: 1011342 - RNA, 19 nt, Artificial Sequence
  Description of Artificial Sequence: Synthetic oligonucleotide
  Sense strand starting at position 106 of SEQ ID NO: 914535
cugcucuaucugugggaag

SEQ ID NO: 1011343 - RNA, 19 nt, Artificial Sequence
  Description of Artificial Sequence: Synthetic oligonucleotide
  Antisense strand to SEQ ID NO: 1011342
cuucccacagauagagcag

SEQ ID NO: 1011344 - RNA, 19 nt, Artificial Sequence
  Description of Artificial Sequence: Synthetic oligonucleotide
  Sense strand starting at position 108 of SEQ ID NO: 914535
gcucuaucugugggaagga

SEQ ID NO: 1011345 - RNA, 19 nt, Artificial Sequence
  Description of Artificial Sequence: Synthetic oligonucleotide
  Antisense strand to SEQ ID NO: 1011344
uccuucccacagauagagc

SEQ ID NO: 1011346 - RNA, 19 nt, Artificial Sequence
  Description of Artificial Sequence: Synthetic oligonucleotide
  Sense strand starting at position 248 of SEQ ID NO: 914535
uuguuaagccuuugaauau

SEQ ID NO: 1011347 - RNA, 19 nt, Artificial Sequence
  Description of Artificial Sequence: Synthetic oligonucleotide
  Antisense strand to SEQ ID NO: 1011346
auauucaaaggcuuaacaa

SEQ ID NO: 1011348 - RNA, 19 nt, Artificial Sequence
  Description of Artificial Sequence: Synthetic oligonucleotide
  Sense strand starting at position 284 of SEQ ID NO: 914535
cgcaaucauugauugucaa

SEQ ID NO: 1011349 - RNA, 19 nt, Artificial Sequence
  Description of Artificial Sequence: Synthetic oligonucleotide
  Antisense strand to SEQ ID NO: 1011348
uugacaaucaaugauugcg

SEQ ID NO: 1011350 - RNA, 19 nt, Artificial Sequence
  Description of Artificial Sequence: Synthetic oligonucleotide
  Sense strand starting at position 285 of SEQ ID NO: 914535
gcaaucauugauugucaaa

SEQ ID NO: 1011351 - RNA, 19 nt, Artificial Sequence
  Description of Artificial Sequence: Synthetic oligonucleotide
  Antisense strand to SEQ ID NO: 1011350
uuugacaaucaaugauugc

SEQ ID NO: 1011352 - RNA, 19 nt, Artificial Sequence
  Description of Artificial Sequence: Synthetic oligonucleotide
  Sense strand starting at position 298 of SEQ ID NO: 914535
gucaaaucauggguuucua

SEQ ID NO: 1011353 - RNA, 19 nt, Artificial Sequence
  Description of Artificial Sequence: Synthetic oligonucleotide
  Antisense strand to SEQ ID NO: 1011352
uagaaacccaugauuugac

SEQ ID NO: 1011354 - RNA, 19 nt, Artificial Sequence
  Description of Artificial Sequence: Synthetic oligonucleotide
  Sense strand starting at position 357 of SEQ ID NO: 914535
ccuauacccgaagguauaa

SEQ ID NO: 1011355 - RNA, 19 nt, Artificial Sequence
  Description of Artificial Sequence: Synthetic oligonucleotide
  Antisense strand to SEQ ID NO: 1011354
uuauaccuucggguauagg

SEQ ID NO: 1011356 - RNA, 19 nt, Artificial Sequence
  Description of Artificial Sequence: Synthetic oligonucleotide
  Sense strand starting at position 609 of SEQ ID NO: 914535
ggguguguuuccacggcuu

SEQ ID NO: 1011357 - RNA, 19 nt, Artificial Sequence
  Description of Artificial Sequence: Synthetic oligonucleotide
  Antisense strand to SEQ ID NO: 1011356
aagccguggaaacacaccc

SEQ ID NO: 1011358 - RNA, 19 nt, Artificial Sequence
  Description of Artificial Sequence: Synthetic oligonucleotide
  Sense strand starting at position 2040 of SEQ ID NO: 914535
cuacgucagccgccauaau

SEQ ID NO: 1011359 - RNA, 19 nt, Artificial Sequence
  Description of Artificial Sequence: Synthetic oligonucleotide
  Antisense strand to SEQ ID NO: 1011358
auuauggcggcugacguag

SEQ ID NO: 1011360 - RNA, 19 nt, Artificial Sequence
  Description of Artificial Sequence: Synthetic oligonucleotide
  Sense strand starting at position 2186 of SEQ ID NO: 914535
cuccauauuccagagcaga

SEQ ID NO: 1011361 - RNA, 19 nt, Artificial Sequence
  Description of Artificial Sequence: Synthetic oligonucleotide
  Antisense strand to SEQ ID NO: 1011360
ucugcucuggaauauggag

SEQ ID NO: 1011362 - RNA, 19 nt, Artificial Sequence
  Description of Artificial Sequence: Synthetic oligonucleotide
  Sense strand starting at position 2214 of SEQ ID NO: 914535
uugcuauuggccuaggacu

SEQ ID NO: 1011363 - RNA, 19 nt, Artificial Sequence
  Description of Artificial Sequence: Synthetic oligonucleotide
  Antisense strand to SEQ ID NO: 1011362
aguccuaggccaauagcaa

SEQ ID NO: 1011364 - RNA, 19 nt, Artificial Sequence
  Description of Artificial Sequence: Synthetic oligonucleotide
  Sense strand starting at position 2257 of SEQ ID NO: 914535
cccacaaauuuccacggau

SEQ ID NO: 1011365 - RNA, 19 nt, Artificial Sequence
  Description of Artificial Sequence: Synthetic oligonucleotide
  Antisense strand to SEQ ID NO: 1011364
auccguggaaauuuguggg

SEQ ID NO: 1011366 - RNA, 19 nt, Artificial Sequence
  Description of Artificial Sequence: Synthetic oligonucleotide
  Sense strand starting at position 2293 of SEQ ID NO: 914535
ucugaaaccugcucagcua

SEQ ID NO: 1011367 - RNA, 19 nt, Artificial Sequence
  Description of Artificial Sequence: Synthetic oligonucleotide
  Antisense strand to SEQ ID NO: 1011366
uagcugagcagguuucaga

SEQ ID NO: 1011368 - RNA, 19 nt, Artificial Sequence
  Description of Artificial Sequence: Synthetic oligonucleotide
  Sense strand starting at position 2475 of SEQ ID NO: 914535
aguugccuuucuccagaaa

SEQ ID NO: 1011369 - RNA, 19 nt, Artificial Sequence
  Description of Artificial Sequence: Synthetic oligonucleotide
  Antisense strand to SEQ ID NO: 1011368
uuucuggagaaaggcaacu

SEQ ID NO: 1011370 - RNA, 19 nt, Artificial Sequence
  Description of Artificial Sequence: Synthetic oligonucleotide
  Sense strand starting at position 2987 of SEQ ID NO: 914535
auagcaucuguguggaaca

SEQ ID NO: 1011371 - RNA, 19 nt, Artificial Sequence
  Description of Artificial Sequence: Synthetic oligonucleotide
  Antisense strand to SEQ ID NO: 1011370
uguuccacacagaugcuau

SEQ ID NO: 1011372 - RNA, 19 nt, Artificial Sequence
  Description of Artificial Sequence: Synthetic oligonucleotide
  Sense strand starting at position 3055 of SEQ ID NO: 914535
aucuguaaaucaucaguua

SEQ ID NO: 1011373 - RNA, 19 nt, Artificial Sequence
  Description of Artificial Sequence: Synthetic oligonucleotide
  Antisense strand to SEQ ID NO: 1011372
uaacugaugauuuacagau

SEQ ID NO: 1011374 - RNA, 19 nt, Artificial Sequence
  Description of Artificial Sequence: Synthetic oligonucleotide
  Sense strand starting at position 3056 of SEQ ID NO: 914535
ucuguaaaucaucaguuac

SEQ ID NO: 1011375 - RNA, 19 nt, Artificial Sequence
  Description of Artificial Sequence: Synthetic oligonucleotide
  Antisense strand to SEQ ID NO: 1011374
guaacugaugauuuacaga

SEQ ID NO: 1011376 - RNA, 19 nt, Artificial Sequence
  Description of Artificial Sequence: Synthetic oligonucleotide
  Sense strand starting at position 3058 of SEQ ID NO: 914535
uguaaaucaucaguuaccu

SEQ ID NO: 1011377 - RNA, 19 nt, Artificial Sequence
  Description of Artificial Sequence: Synthetic oligonucleotide
  Antisense strand to SEQ ID NO: 1011376
agguaacugaugauuuaca

SEQ ID NO: 1011378 - RNA, 19 nt, Artificial Sequence
  Description of Artificial Sequence: Synthetic oligonucleotide
  Sense strand starting at position 3184 of SEQ ID NO: 914535
aauugaacugagcagucau

SEQ ID NO: 1011379 - RNA, 19 nt, Artificial Sequence
  Description of Artificial Sequence: Synthetic oligonucleotide
  Antisense strand to SEQ ID NO: 1011378
augacugcucaguucaauu

SEQ ID NO: 1011380 - RNA, 19 nt, Artificial Sequence
  Description of Artificial Sequence: Synthetic oligonucleotide
  Sense strand starting at position 3203 of SEQ ID NO: 914535
aaggguauacccugacacu

SEQ ID NO: 1011381 - RNA, 19 nt, Artificial Sequence
  Description of Artificial Sequence: Synthetic oligonucleotide
  Antisense strand to SEQ ID NO: 1011380
agugucaggguauacccuu

SEQ ID NO: 1011382 - RNA, 19 nt, Artificial Sequence
  Description of Artificial Sequence: Synthetic oligonucleotide
  Sense strand starting at position 3353 of SEQ ID NO: 914535
ggguugguuugggugugaa

SEQ ID NO: 1011383 - RNA, 19 nt, Artificial Sequence
  Description of Artificial Sequence: Synthetic oligonucleotide
  Antisense strand to SEQ ID NO: 1011382
uucacacccaaaccaaccc

SEQ ID NO: 1011384 - RNA, 19 nt, Artificial Sequence
  Description of Artificial Sequence: Synthetic oligonucleotide
  Sense strand starting at position 3356 of SEQ ID NO: 914535
uugguuugggugugaacau

SEQ ID NO: 1011385 - RNA, 19 nt, Artificial Sequence
  Description of Artificial Sequence: Synthetic oligonucleotide
  Antisense strand to SEQ ID NO: 1011384
auguucacacccaaaccaa

SEQ ID NO: 1011386 - RNA, 19 nt, Artificial Sequence
  Description of Artificial Sequence: Synthetic oligonucleotide
  Sense strand starting at position 3395 of SEQ ID NO: 914535
cauauugccucuguuagga

SEQ ID NO: 1011387 - RNA, 19 nt, Artificial Sequence
  Description of Artificial Sequence: Synthetic oligonucleotide
  Antisense strand to SEQ ID NO: 1011386
uccuaacagaggcaauaug

SEQ ID NO: 1011388 - RNA, 19 nt, Artificial Sequence
  Description of Artificial Sequence: Synthetic oligonucleotide
  Sense strand starting at position 3409 of SEQ ID NO: 914535
uaggauugguccuucucca

SEQ ID NO: 1011389 - RNA, 19 nt, Artificial Sequence
  Description of Artificial Sequence: Synthetic oligonucleotide
  Antisense strand to SEQ ID NO: 1011388
uggagaaggaccaauccua

SEQ ID NO: 1011390 - RNA, 19 nt, Artificial Sequence
  Description of Artificial Sequence: Synthetic oligonucleotide
  Sense strand starting at position 3693 of SEQ ID NO: 914535
gguuaaucgaguuauugca

SEQ ID NO: 1011391 - RNA, 19 nt, Artificial Sequence
  Description of Artificial Sequence: Synthetic oligonucleotide
  Antisense strand to SEQ ID NO: 1011390
ugcaauaacucgauuaacc

SEQ ID NO: 1011392 - RNA, 19 nt, Artificial Sequence
  Description of Artificial Sequence: Synthetic oligonucleotide
  Sense strand starting at position 3695 of SEQ ID NO: 914535
uuaaucgaguuauugcaua

SEQ ID NO: 1011393 - RNA, 19 nt, Artificial Sequence
  Description of Artificial Sequence: Synthetic oligonucleotide
  Antisense strand to SEQ ID NO: 1011392
uaugcaauaacucgauuaa

SEQ ID NO: 1011394 - RNA, 19 nt, Artificial Sequence
  Description of Artificial Sequence: Synthetic oligonucleotide
  Sense strand starting at position 3700 of SEQ ID NO: 914535
cgaguuauugcauacaaag

SEQ ID NO: 1011395 - RNA, 19 nt, Artificial Sequence
  Description of Artificial Sequence: Synthetic oligonucleotide
  Antisense strand to SEQ ID NO: 1011394
cuuuguaugcaauaacucg

SEQ ID NO: 1011396 - RNA, 19 nt, Artificial Sequence
  Description of Artificial Sequence: Synthetic oligonucleotide
  Sense strand starting at position 3711 of SEQ ID NO: 914535
auacaaagccguuagaaga

SEQ ID NO: 1011397 - RNA, 19 nt, Artificial Sequence
  Description of Artificial Sequence: Synthetic oligonucleotide
  Antisense strand to SEQ ID NO: 1011396
ucuucuaacggcuuuguau

SEQ ID NO: 1011398 - RNA, 19 nt, Artificial Sequence
  Description of Artificial Sequence: Synthetic oligonucleotide
  Sense strand starting at position 3728 of SEQ ID NO: 914535
gaaugcuuuccacauagug

SEQ ID NO: 1011399 - RNA, 19 nt, Artificial Sequence
  Description of Artificial Sequence: Synthetic oligonucleotide
  Antisense strand to SEQ ID NO: 1011398
cacuauguggaaagcauuc

SEQ ID NO: 1011400 - RNA, 19 nt, Artificial Sequence
  Description of Artificial Sequence: Synthetic oligonucleotide
  Sense strand starting at position 3824 of SEQ ID NO: 914535
aggauugaaagccagcuau

SEQ ID NO: 1011401 - RNA, 19 nt, Artificial Sequence
  Description of Artificial Sequence: Synthetic oligonucleotide
  Antisense strand to SEQ ID NO: 1011400
auagcuggcuuucaauccu

SEQ ID NO: 1011402 - RNA, 19 nt, Artificial Sequence
  Description of Artificial Sequence: Synthetic oligonucleotide
  Sense strand starting at position 3834 of SEQ ID NO: 914535
gccagcuauuugguaaugu

SEQ ID NO: 1011403 - RNA, 19 nt, Artificial Sequence
  Description of Artificial Sequence: Synthetic oligonucleotide
  Antisense strand to SEQ ID NO: 1011402
acauuaccaaauagcuggc

SEQ ID NO: 1011404 - RNA, 19 nt, Artificial Sequence
  Description of Artificial Sequence: Synthetic oligonucleotide
  Sense strand starting at position 3859 of SEQ ID NO: 914535
acacccuuugcucagaguu

SEQ ID NO: 1011405 - RNA, 19 nt, Artificial Sequence
  Description of Artificial Sequence: Synthetic oligonucleotide
  Antisense strand to SEQ ID NO: 1011404
aacucugagcaaagggugu

SEQ ID NO: 1011406 - RNA, 19 nt, Artificial Sequence
  Description of Artificial Sequence: Synthetic oligonucleotide
  Sense strand starting at position 3897 of SEQ ID NO: 914535
agcugcaauuuggcauaua

SEQ ID NO: 1011407 - RNA, 19 nt, Artificial Sequence
  Description of Artificial Sequence: Synthetic oligonucleotide
  Antisense strand to SEQ ID NO: 1011406
uauaugccaaauugcagcu

SEQ ID NO: 1011408 - RNA, 19 nt, Artificial Sequence
  Description of Artificial Sequence: Synthetic oligonucleotide
  Sense strand starting at position 3941 of SEQ ID NO: 914535
gaccuccaugugcagaauu

SEQ ID NO: 1011409 - RNA, 19 nt, Artificial Sequence
  Description of Artificial Sequence: Synthetic oligonucleotide
  Antisense strand to SEQ ID NO: 1011408
aauucugcacauggagguc

SEQ ID NO: 1011410 - RNA, 19 nt, Artificial Sequence
  Description of Artificial Sequence: Synthetic oligonucleotide
  Sense strand starting at position 3961 of SEQ ID NO: 914535
cagguaacgcauuaacacu

SEQ ID NO: 1011411 - RNA, 19 nt, Artificial Sequence
  Description of Artificial Sequence: Synthetic oligonucleotide
  Antisense strand to SEQ ID NO: 1011410
aguguuaaugcguuaccug

SEQ ID NO: 1011412 - RNA, 19 nt, Artificial Sequence
  Description of Artificial Sequence: Synthetic oligonucleotide
  Sense strand starting at position 3980 of SEQ ID NO: 914535
cccuuacauuucuagagga

SEQ ID NO: 1011413 - RNA, 19 nt, Artificial Sequence
  Description of Artificial Sequence: Synthetic oligonucleotide
  Antisense strand to SEQ ID NO: 1011412
uccucuagaaauguaaggg

SEQ ID NO: 1011414 - RNA, 19 nt, Artificial Sequence
  Description of Artificial Sequence: Synthetic oligonucleotide
  Sense strand starting at position 207 of SEQ ID NO: 914536
ugcccugaaggcugaaaua

SEQ ID NO: 1011415 - RNA, 19 nt, Artificial Sequence
  Description of Artificial Sequence: Synthetic oligonucleotide
  Antisense strand to SEQ ID NO: 1011414
uauuucagccuucagggca

SEQ ID NO: 1011416 - RNA, 19 nt, Artificial Sequence
  Description of Artificial Sequence: Synthetic oligonucleotide
  Sense strand starting at position 238 of SEQ ID NO: 914536
gaggacaucugcucuaucu

SEQ ID NO: 1011417 - RNA, 19 nt, Artificial Sequence
  Description of Artificial Sequence: Synthetic oligonucleotide
  Antisense strand to SEQ ID NO: 1011416
agauagagcagauguccuc

SEQ ID NO: 1011418 - RNA, 19 nt, Artificial Sequence
  Description of Artificial Sequence: Synthetic oligonucleotide
  Sense strand starting at position 240 of SEQ ID NO: 914536
ggacaucugcucuaucugu

SEQ ID NO: 1011419 - RNA, 19 nt, Artificial Sequence
  Description of Artificial Sequence: Synthetic oligonucleotide
  Antisense strand to SEQ ID NO: 1011418
acagauagagcagaugucc

SEQ ID NO: 1011420 - RNA, 19 nt, Artificial Sequence
  Description of Artificial Sequence: Synthetic oligonucleotide
  Sense strand starting at position 245 of SEQ ID NO: 914536
ucugcucuaucugugggaa

SEQ ID NO: 1011421 - RNA, 19 nt, Artificial Sequence
  Description of Artificial Sequence: Synthetic oligonucleotide
  Antisense strand to SEQ ID NO: 1011420
uucccacagauagagcaga

SEQ ID NO: 1011422 - RNA, 19 nt, Artificial Sequence
  Description of Artificial Sequence: Synthetic oligonucleotide
  Sense strand starting at position 246 of SEQ ID NO: 914536
cugcucuaucugugggaag

SEQ ID NO: 1011423 - RNA, 19 nt, Artificial Sequence
  Description of Artificial Sequence: Synthetic oligonucleotide
  Antisense strand to SEQ ID NO: 1011422
cuucccacagauagagcag

SEQ ID NO: 1011424 - RNA, 19 nt, Artificial Sequence
  Description of Artificial Sequence: Synthetic oligonucleotide
  Sense strand starting at position 248 of SEQ ID NO: 914536
gcucuaucugugggaagga

SEQ ID NO: 1011425 - RNA, 19 nt, Artificial Sequence
  Description of Artificial Sequence: Synthetic oligonucleotide
  Antisense strand to SEQ ID NO: 1011424
uccuucccacagauagagc

SEQ ID NO: 1011426 - RNA, 19 nt, Artificial Sequence
  Description of Artificial Sequence: Synthetic oligonucleotide
  Sense strand starting at position 388 of SEQ ID NO: 914536
uuguuaagccuuugaauau

SEQ ID NO: 1011427 - RNA, 19 nt, Artificial Sequence
  Description of Artificial Sequence: Synthetic oligonucleotide
  Antisense strand to SEQ ID NO: 1011426
auauucaaaggcuuaacaa

SEQ ID NO: 1011428 - RNA, 19 nt, Artificial Sequence
  Description of Artificial Sequence: Synthetic oligonucleotide
  Sense strand starting at position 414 of SEQ ID NO: 914536
gaaaguaucgcgcaaucau

SEQ ID NO: 1011429 - RNA, 19 nt, Artificial Sequence
  Description of Artificial Sequence: Synthetic oligonucleotide
  Antisense strand to SEQ ID NO: 1011428
augauugcgcgauacuuuc

SEQ ID NO: 1011430 - RNA, 19 nt, Artificial Sequence
  Description of Artificial Sequence: Synthetic oligonucleotide
  Sense strand starting at position 424 of SEQ ID NO: 914536
cgcaaucauugauugucaa

SEQ ID NO: 1011431 - RNA, 19 nt, Artificial Sequence
  Description of Artificial Sequence: Synthetic oligonucleotide
  Antisense strand to SEQ ID NO: 1011430
uugacaaucaaugauugcg

SEQ ID NO: 1011432 - RNA, 19 nt, Artificial Sequence
  Description of Artificial Sequence: Synthetic oligonucleotide
  Sense strand starting at position 425 of SEQ ID NO: 914536
gcaaucauugauugucaaa

SEQ ID NO: 1011433 - RNA, 19 nt, Artificial Sequence
  Description of Artificial Sequence: Synthetic oligonucleotide
  Antisense strand to SEQ ID NO: 1011432
uuugacaaucaaugauugc

SEQ ID NO: 1011434 - RNA, 19 nt, Artificial Sequence
  Description of Artificial Sequence: Synthetic oligonucleotide
  Sense strand starting at position 438 of SEQ ID NO: 914536
gucaaaucauggguuucua

SEQ ID NO: 1011435 - RNA, 19 nt, Artificial Sequence
  Description of Artificial Sequence: Synthetic oligonucleotide
  Antisense strand to SEQ ID NO: 1011434
uagaaacccaugauuugac

SEQ ID NO: 1011436 - RNA, 19 nt, Artificial Sequence
  Description of Artificial Sequence: Synthetic oligonucleotide
  Sense strand starting at position 497 of SEQ ID NO: 914536
ccuauacccgaagguauaa

SEQ ID NO: 1011437 - RNA, 19 nt, Artificial Sequence
  Description of Artificial Sequence: Synthetic oligonucleotide
  Antisense strand to SEQ ID NO: 1011436
uuauaccuucggguauagg

SEQ ID NO: 1011438 - RNA, 19 nt, Artificial Sequence
  Description of Artificial Sequence: Synthetic oligonucleotide
  Sense strand starting at position 749 of SEQ ID NO: 914536
ggguguguuuccacggcuu

SEQ ID NO: 1011439 - RNA, 19 nt, Artificial Sequence
  Description of Artificial Sequence: Synthetic oligonucleotide
  Antisense strand to SEQ ID NO: 1011438
aagccguggaaacacaccc

SEQ ID NO: 1011440 - RNA, 19 nt, Artificial Sequence
  Description of Artificial Sequence: Synthetic oligonucleotide
  Sense strand starting at position 2139 of SEQ ID NO: 914536
ucgggacuuccaugcuagu

SEQ ID NO: 1011441 - RNA, 19 nt, Artificial Sequence
  Description of Artificial Sequence: Synthetic oligonucleotide
  Antisense strand to SEQ ID NO: 1011440
acuagcauggaagucccga

SEQ ID NO: 1011442 - RNA, 19 nt, Artificial Sequence
  Description of Artificial Sequence: Synthetic oligonucleotide
  Sense strand starting at position 2180 of SEQ ID NO: 914536
cuacgucagccgccauaau

SEQ ID NO: 1011443 - RNA, 19 nt, Artificial Sequence
  Description of Artificial Sequence: Synthetic oligonucleotide
  Antisense strand to SEQ ID NO: 1011442
auuauggcggcugacguag

SEQ ID NO: 1011444 - RNA, 19 nt, Artificial Sequence
  Description of Artificial Sequence: Synthetic oligonucleotide
  Sense strand starting at position 2316 of SEQ ID NO: 914536
cugcacuggucuccauauu

SEQ ID NO: 1011445 - RNA, 19 nt, Artificial Sequence
  Description of Artificial Sequence: Synthetic oligonucleotide
  Antisense strand to SEQ ID NO: 1011444
aauauggagaccagugcag

SEQ ID NO: 1011446 - RNA, 19 nt, Artificial Sequence
  Description of Artificial Sequence: Synthetic oligonucleotide
  Sense strand starting at position 2326 of SEQ ID NO: 914536
cuccauauuccagagcaga

SEQ ID NO: 1011447 - RNA, 19 nt, Artificial Sequence
  Description of Artificial Sequence: Synthetic oligonucleotide
  Antisense strand to SEQ ID NO: 1011446
ucugcucuggaauauggag

SEQ ID NO: 1011448 - RNA, 19 nt, Artificial Sequence
  Description of Artificial Sequence: Synthetic oligonucleotide
  Sense strand starting at position 2354 of SEQ ID NO: 914536
uugcuauuggccuaggacu

SEQ ID NO: 1011449 - RNA, 19 nt, Artificial Sequence
  Description of Artificial Sequence: Synthetic oligonucleotide
  Antisense strand to SEQ ID NO: 1011448
aguccuaggccaauagcaa

SEQ ID NO: 1011450 - RNA, 19 nt, Artificial Sequence
  Description of Artificial Sequence: Synthetic oligonucleotide
  Sense strand starting at position 2397 of SEQ ID NO: 914536
cccacaaauuuccacggau

SEQ ID NO: 1011451 - RNA, 19 nt, Artificial Sequence
  Description of Artificial Sequence: Synthetic oligonucleotide
  Antisense strand to SEQ ID NO: 1011450
auccguggaaauuuguggg

SEQ ID NO: 1011452 - RNA, 19 nt, Artificial Sequence
  Description of Artificial Sequence: Synthetic oligonucleotide
  Sense strand starting at position 2433 of SEQ ID NO: 914536
ucugaaaccugcucagcua

SEQ ID NO: 1011453 - RNA, 19 nt, Artificial Sequence
  Description of Artificial Sequence: Synthetic oligonucleotide
  Antisense strand to SEQ ID NO: 1011452
uagcugagcagguuucaga

SEQ ID NO: 1011454 - RNA, 19 nt, Artificial Sequence
  Description of Artificial Sequence: Synthetic oligonucleotide
  Sense strand starting at position 2468 of SEQ ID NO: 914536
guuugaaauguuuggguuu

SEQ ID NO: 1011455 - RNA, 19 nt, Artificial Sequence
  Description of Artificial Sequence: Synthetic oligonucleotide
  Antisense strand to SEQ ID NO: 1011454
aaacccaaacauuucaaac

SEQ ID NO: 1011456 - RNA, 19 nt, Artificial Sequence
  Description of Artificial Sequence: Synthetic oligonucleotide
  Sense strand starting at position 2615 of SEQ ID NO: 914536
aguugccuuucuccagaaa

SEQ ID NO: 1011457 - RNA, 19 nt, Artificial Sequence
  Description of Artificial Sequence: Synthetic oligonucleotide
  Antisense strand to SEQ ID NO: 1011456
uuucuggagaaaggcaacu

SEQ ID NO: 1011458 - RNA, 19 nt, Artificial Sequence
  Description of Artificial Sequence: Synthetic oligonucleotide
  Sense strand starting at position 3127 of SEQ ID NO: 914536
auagcaucuguguggaaca

SEQ ID NO: 1011459 - RNA, 19 nt, Artificial Sequence
  Description of Artificial Sequence: Synthetic oligonucleotide
  Antisense strand to SEQ ID NO: 1011458
uguuccacacagaugcuau

SEQ ID NO: 1011460 - RNA, 19 nt, Artificial Sequence
  Description of Artificial Sequence: Synthetic oligonucleotide
  Sense strand starting at position 3195 of SEQ ID NO: 914536
aucuguaaaucaucaguua

SEQ ID NO: 1011461 - RNA, 19 nt, Artificial Sequence
  Description of Artificial Sequence: Synthetic oligonucleotide
  Antisense strand to SEQ ID NO: 1011460
uaacugaugauuuacagau

SEQ ID NO: 1011462 - RNA, 19 nt, Artificial Sequence
  Description of Artificial Sequence: Synthetic oligonucleotide
  Sense strand starting at position 3196 of SEQ ID NO: 914536
ucuguaaaucaucaguuac

SEQ ID NO: 1011463 - RNA, 19 nt, Artificial Sequence
  Description of Artificial Sequence: Synthetic oligonucleotide
  Antisense strand to SEQ ID NO: 1011462
guaacugaugauuuacaga

SEQ ID NO: 1011464 - RNA, 19 nt, Artificial Sequence
  Description of Artificial Sequence: Synthetic oligonucleotide
  Sense strand starting at position 3198 of SEQ ID NO: 914536
uguaaaucaucaguuaccu

SEQ ID NO: 1011465 - RNA, 19 nt, Artificial Sequence
  Description of Artificial Sequence: Synthetic oligonucleotide
  Antisense strand to SEQ ID NO: 1011464
agguaacugaugauuuaca

SEQ ID NO: 1011466 - RNA, 19 nt, Artificial Sequence
  Description of Artificial Sequence: Synthetic oligonucleotide
  Sense strand starting at position 3324 of SEQ ID NO: 914536
aauugaacugagcagucau

SEQ ID NO: 1011467 - RNA, 19 nt, Artificial Sequence
  Description of Artificial Sequence: Synthetic oligonucleotide
  Antisense strand to SEQ ID NO: 1011466
augacugcucaguucaauu

SEQ ID NO: 1011468 - RNA, 19 nt, Artificial Sequence
  Description of Artificial Sequence: Synthetic oligonucleotide
  Sense strand starting at position 3343 of SEQ ID NO: 914536
aaggguauacccugacacu

SEQ ID NO: 1011469 - RNA, 19 nt, Artificial Sequence
  Description of Artificial Sequence: Synthetic oligonucleotide
  Antisense strand to SEQ ID NO: 1011468
agugucaggguauacccuu

SEQ ID NO: 1011470 - RNA, 19 nt, Artificial Sequence
  Description of Artificial Sequence: Synthetic oligonucleotide
  Sense strand starting at position 3493 of SEQ ID NO: 914536
ggguugguuugggugugaa

SEQ ID NO: 1011471 - RNA, 19 nt, Artificial Sequence
  Description of Artificial Sequence: Synthetic oligonucleotide
  Antisense strand to SEQ ID NO: 1011470
uucacacccaaaccaaccc

SEQ ID NO: 1011472 - RNA, 19 nt, Artificial Sequence
  Description of Artificial Sequence: Synthetic oligonucleotide
  Sense strand starting at position 3494 of SEQ ID NO: 914536
gguugguuugggugugaac

SEQ ID NO: 1011473 - RNA, 19 nt, Artificial Sequence
  Description of Artificial Sequence: Synthetic oligonucleotide
  Antisense strand to SEQ ID NO: 1011472
guucacacccaaaccaacc

SEQ ID NO: 1011474 - RNA, 19 nt, Artificial Sequence
  Description of Artificial Sequence: Synthetic oligonucleotide
  Sense strand starting at position 3496 of SEQ ID NO: 914536
uugguuugggugugaacau

SEQ ID NO: 1011475 - RNA, 19 nt, Artificial Sequence
  Description of Artificial Sequence: Synthetic oligonucleotide
  Antisense strand to SEQ ID NO: 1011474
auguucacacccaaaccaa

SEQ ID NO: 1011476 - RNA, 19 nt, Artificial Sequence
  Description of Artificial Sequence: Synthetic oligonucleotide
  Sense strand starting at position 3535 of SEQ ID NO: 914536
cauauugccucuguuagga

SEQ ID NO: 1011477 - RNA, 19 nt, Artificial Sequence
  Description of Artificial Sequence: Synthetic oligonucleotide
  Antisense strand to SEQ ID NO: 1011476
uccuaacagaggcaauaug

SEQ ID NO: 1011478 - RNA, 19 nt, Artificial Sequence
  Description of Artificial Sequence: Synthetic oligonucleotide
  Sense strand starting at position 3549 of SEQ ID NO: 914536
uaggauugguccuucucca

SEQ ID NO: 1011479 - RNA, 19 nt, Artificial Sequence
  Description of Artificial Sequence: Synthetic oligonucleotide
  Antisense strand to SEQ ID NO: 1011478
uggagaaggaccaauccua

SEQ ID NO: 1011480 - RNA, 19 nt, Artificial Sequence
  Description of Artificial Sequence: Synthetic oligonucleotide
  Sense strand starting at position 3833 of SEQ ID NO: 914536
gguuaaucgaguuauugca

SEQ ID NO: 1011481 - RNA, 19 nt, Artificial Sequence
  Description of Artificial Sequence: Synthetic oligonucleotide
  Antisense strand to SEQ ID NO: 1011480
ugcaauaacucgauuaacc

SEQ ID NO: 1011482 - RNA, 19 nt, Artificial Sequence
  Description of Artificial Sequence: Synthetic oligonucleotide
  Sense strand starting at position 3835 of SEQ ID NO: 914536
uuaaucgaguuauugcaua

SEQ ID NO: 1011483 - RNA, 19 nt, Artificial Sequence
  Description of Artificial Sequence: Synthetic oligonucleotide
  Antisense strand to SEQ ID NO: 1011482
uaugcaauaacucgauuaa

SEQ ID NO: 1011484 - RNA, 19 nt, Artificial Sequence
  Description of Artificial Sequence: Synthetic oligonucleotide
  Sense strand starting at position 3840 of SEQ ID NO: 914536
cgaguuauugcauacaaag

SEQ ID NO: 1011485 - RNA, 19 nt, Artificial Sequence
  Description of Artificial Sequence: Synthetic oligonucleotide
  Antisense strand to SEQ ID NO: 1011484
cuuuguaugcaauaacucg

SEQ ID NO: 1011486 - RNA, 19 nt, Artificial Sequence
  Description of Artificial Sequence: Synthetic oligonucleotide
  Sense strand starting at position 3851 of SEQ ID NO: 914536
auacaaagccguuagaaga

SEQ ID NO: 1011487 - RNA, 19 nt, Artificial Sequence
  Description of Artificial Sequence: Synthetic oligonucleotide
  Antisense strand to SEQ ID NO: 1011486
ucuucuaacggcuuuguau

SEQ ID NO: 1011488 - RNA, 19 nt, Artificial Sequence
  Description of Artificial Sequence: Synthetic oligonucleotide
  Sense strand starting at position 3868 of SEQ ID NO: 914536
gaaugcuuuccacauagug

SEQ ID NO: 1011489 - RNA, 19 nt, Artificial Sequence
  Description of Artificial Sequence: Synthetic oligonucleotide
  Antisense strand to SEQ ID NO: 1011488
cacuauguggaaagcauuc

SEQ ID NO: 1011490 - RNA, 19 nt, Artificial Sequence
  Description of Artificial Sequence: Synthetic oligonucleotide
  Sense strand starting at position 3964 of SEQ ID NO: 914536
aggauugaaagccagcuau

SEQ ID NO: 1011491 - RNA, 19 nt, Artificial Sequence
  Description of Artificial Sequence: Synthetic oligonucleotide
  Antisense strand to SEQ ID NO: 1011490
auagcuggcuuucaauccu

SEQ ID NO: 1011492 - RNA, 19 nt, Artificial Sequence
  Description of Artificial Sequence: Synthetic oligonucleotide
  Sense strand starting at position 3974 of SEQ ID NO: 914536
gccagcuauuugguaaugu

SEQ ID NO: 1011493 - RNA, 19 nt, Artificial Sequence
  Description of Artificial Sequence: Synthetic oligonucleotide
  Antisense strand to SEQ ID NO: 1011492
acauuaccaaauagcuggc

SEQ ID NO: 1011494 - RNA, 19 nt, Artificial Sequence
  Description of Artificial Sequence: Synthetic oligonucleotide
  Sense strand starting at position 41 of SEQ ID NO: 914537
accugaaacugcuuaaggu

SEQ ID NO: 1011495 - RNA, 19 nt, Artificial Sequence
  Description of Artificial Sequence: Synthetic oligonucleotide
  Antisense strand to SEQ ID NO: 1011494
accuuaagcaguuucaggu

SEQ ID NO: 1011496 - RNA, 19 nt, Artificial Sequence
  Description of Artificial Sequence: Synthetic oligonucleotide
  Sense strand starting at position 51 of SEQ ID NO: 914537
gcuuaagguguugauacau

SEQ ID NO: 1011497 - RNA, 19 nt, Artificial Sequence
  Description of Artificial Sequence: Synthetic oligonucleotide
  Antisense strand to SEQ ID NO: 1011496
auguaucaacaccuuaagc

SEQ ID NO: 1011498 - RNA, 19 nt, Artificial Sequence
  Description of Artificial Sequence: Synthetic oligonucleotide
  Sense strand starting at position 95 of SEQ ID NO: 914537
gcugucucuucugcagaga

SEQ ID NO: 1011499 - RNA, 19 nt, Artificial Sequence
  Description of Artificial Sequence: Synthetic oligonucleotide
  Antisense strand to SEQ ID NO: 1011498
ucucugcagaagagacagc

SEQ ID NO: 1011500 - RNA, 19 nt, Artificial Sequence
  Description of Artificial Sequence: Synthetic oligonucleotide
  Sense strand starting at position 129 of SEQ ID NO: 914537
cuagauacuuuagguaacu

SEQ ID NO: 1011501 - RNA, 19 nt, Artificial Sequence
  Description of Artificial Sequence: Synthetic oligonucleotide
  Antisense strand to SEQ ID NO: 1011500
aguuaccuaaaguaucuag

SEQ ID NO: 1011502 - RNA, 19 nt, Artificial Sequence
  Description of Artificial Sequence: Synthetic oligonucleotide
  Sense strand starting at position 138 of SEQ ID NO: 914537
uuagguaacugaugauuua

SEQ ID NO: 1011503 - RNA, 19 nt, Artificial Sequence
  Description of Artificial Sequence: Synthetic oligonucleotide
  Antisense strand to SEQ ID NO: 1011502
uaaaucaucaguuaccuaa

SEQ ID NO: 1011504 - RNA, 19 nt, Artificial Sequence
  Description of Artificial Sequence: Synthetic oligonucleotide
  Sense strand starting at position 145 of SEQ ID NO: 914537
acugaugauuuacagauaa

SEQ ID NO: 1011505 - RNA, 19 nt, Artificial Sequence
  Description of Artificial Sequence: Synthetic oligonucleotide
  Antisense strand to SEQ ID NO: 1011504
uuaucuguaaaucaucagu

SEQ ID NO: 1011506 - RNA, 19 nt, Artificial Sequence
  Description of Artificial Sequence: Synthetic oligonucleotide
  Sense strand starting at position 173 of SEQ ID NO: 914537
gagggugaguuccagaaga

SEQ ID NO: 1011507 - RNA, 19 nt, Artificial Sequence
  Description of Artificial Sequence: Synthetic oligonucleotide
  Antisense strand to SEQ ID NO: 1011506
ucuucuggaacucacccuc

SEQ ID NO: 1011508 - RNA, 19 nt, Artificial Sequence
  Description of Artificial Sequence: Synthetic oligonucleotide
  Sense strand starting at position 252 of SEQ ID NO: 914537
aggugaauuucugggagag

SEQ ID NO: 1011509 - RNA, 19 nt, Artificial Sequence
  Description of Artificial Sequence: Synthetic oligonucleotide
  Antisense strand to SEQ ID NO: 1011508
cucucccagaaauucaccu

SEQ ID NO: 1011510 - RNA, 19 nt, Artificial Sequence
  Description of Artificial Sequence: Synthetic oligonucleotide
  Sense strand starting at position 254 of SEQ ID NO: 914537
gugaauuucugggagagau

SEQ ID NO: 1011511 - RNA, 19 nt, Artificial Sequence
  Description of Artificial Sequence: Synthetic oligonucleotide
  Antisense strand to SEQ ID NO: 1011510
aucucucccagaaauucac

SEQ ID NO: 1011512 - RNA, 19 nt, Artificial Sequence
  Description of Artificial Sequence: Synthetic oligonucleotide
  Sense strand starting at position 284 of SEQ ID NO: 914537
cugcaagggcuguacauau

SEQ ID NO: 1011513 - RNA, 19 nt, Artificial Sequence
  Description of Artificial Sequence: Synthetic oligonucleotide
  Antisense strand to SEQ ID NO: 1011512
auauguacagcccuugcag

SEQ ID NO: 1011514 - RNA, 19 nt, Artificial Sequence
  Description of Artificial Sequence: Synthetic oligonucleotide
  Sense strand starting at position 610 of SEQ ID NO: 914537
gagggaagggcuuaugcuu

SEQ ID NO: 1011515 - RNA, 19 nt, Artificial Sequence
  Description of Artificial Sequence: Synthetic oligonucleotide
  Antisense strand to SEQ ID NO: 1011514
aagcauaagcccuucccuc

SEQ ID NO: 1011516 - RNA, 19 nt, Artificial Sequence
  Description of Artificial Sequence: Synthetic oligonucleotide
  Sense strand starting at position 819 of SEQ ID NO: 914537
ccaaguuucuaaguucgga

SEQ ID NO: 1011517 - RNA, 19 nt, Artificial Sequence
  Description of Artificial Sequence: Synthetic oligonucleotide
  Antisense strand to SEQ ID NO: 1011516
uccgaacuuagaaacuugg

SEQ ID NO: 1011518 - RNA, 19 nt, Artificial Sequence
  Description of Artificial Sequence: Synthetic oligonucleotide
  Sense strand starting at position 822 of SEQ ID NO: 914537
aguuucuaaguucggagaa

SEQ ID NO: 1011519 - RNA, 19 nt, Artificial Sequence
  Description of Artificial Sequence: Synthetic oligonucleotide
  Antisense strand to SEQ ID NO: 1011518
uucuccgaacuuagaaacu

SEQ ID NO: 1011520 - RNA, 19 nt, Artificial Sequence
  Description of Artificial Sequence: Synthetic oligonucleotide
  Sense strand starting at position 824 of SEQ ID NO: 914537
uuucuaaguucggagaaca

SEQ ID NO: 1011521 - RNA, 19 nt, Artificial Sequence
  Description of Artificial Sequence: Synthetic oligonucleotide
  Antisense strand to SEQ ID NO: 1011520
uguucuccgaacuuagaaa

SEQ ID NO: 1011522 - RNA, 19 nt, Artificial Sequence
  Description of Artificial Sequence: Synthetic oligonucleotide
  Sense strand starting at position 979 of SEQ ID NO: 914537
gccucaguccuaggccaau

SEQ ID NO: 1011523 - RNA, 19 nt, Artificial Sequence
  Description of Artificial Sequence: Synthetic oligonucleotide
  Antisense strand to SEQ ID NO: 1011522
auuggccuaggacugaggc

SEQ ID NO: 1011524 - RNA, 19 nt, Artificial Sequence
  Description of Artificial Sequence: Synthetic oligonucleotide
  Sense strand starting at position 2569 of SEQ ID NO: 914537
cucucuguucuaugcagga

SEQ ID NO: 1011525 - RNA, 19 nt, Artificial Sequence
  Description of Artificial Sequence: Synthetic oligonucleotide
  Antisense strand to SEQ ID NO: 1011524
uccugcauagaacagagag

SEQ ID NO: 1011526 - RNA, 19 nt, Artificial Sequence
  Description of Artificial Sequence: Synthetic oligonucleotide
  Sense strand starting at position 2644 of SEQ ID NO: 914537
aggagaagcagccgaguua

SEQ ID NO: 1011527 - RNA, 19 nt, Artificial Sequence
  Description of Artificial Sequence: Synthetic oligonucleotide
  Antisense strand to SEQ ID NO: 1011526
uaacucggcugcuucuccu

SEQ ID NO: 1011528 - RNA, 19 nt, Artificial Sequence
  Description of Artificial Sequence: Synthetic oligonucleotide
  Sense strand starting at position 2850 of SEQ ID NO: 914537
cggguauagguuugaguuu

SEQ ID NO: 1011529 - RNA, 19 nt, Artificial Sequence
  Description of Artificial Sequence: Synthetic oligonucleotide
  Antisense strand to SEQ ID NO: 1011528
aaacucaaaccuauacccg

SEQ ID NO: 1011530 - RNA, 19 nt, Artificial Sequence
  Description of Artificial Sequence: Synthetic oligonucleotide
  Sense strand starting at position 2922 of SEQ ID NO: 914537
caaugauugcgcgauacuu

SEQ ID NO: 1011531 - RNA, 19 nt, Artificial Sequence
  Description of Artificial Sequence: Synthetic oligonucleotide
  Antisense strand to SEQ ID NO: 1011530
aaguaucgcgcaaucauug

SEQ ID NO: 1011532 - RNA, 19 nt, Artificial Sequence
  Description of Artificial Sequence: Synthetic oligonucleotide
  Sense strand starting at position 2971 of SEQ ID NO: 914537
uggacuaucuucugcagaa

SEQ ID NO: 1011533 - RNA, 19 nt, Artificial Sequence
  Description of Artificial Sequence: Synthetic oligonucleotide
  Antisense strand to SEQ ID NO: 1011532
uucugcagaagauagucca

SEQ ID NO: 1011534 - RNA, 19 nt, Artificial Sequence
  Description of Artificial Sequence: Synthetic oligonucleotide
  Sense strand starting at position 2972 of SEQ ID NO: 914537
ggacuaucuucugcagaaa

SEQ ID NO: 1011535 - RNA, 19 nt, Artificial Sequence
  Description of Artificial Sequence: Synthetic oligonucleotide
  Antisense strand to SEQ ID NO: 1011534
uuucugcagaagauagucc

SEQ ID NO: 1011536 - RNA, 19 nt, Artificial Sequence
  Description of Artificial Sequence: Synthetic oligonucleotide
  Sense strand starting at position 3085 of SEQ ID NO: 914537
uguccuccuucccacagau

SEQ ID NO: 1011537 - RNA, 19 nt, Artificial Sequence
  Description of Artificial Sequence: Synthetic oligonucleotide
  Antisense strand to SEQ ID NO: 1011536
aucugugggaaggaggaca

SEQ ID NO: 1011538 - RNA, 19 nt, Artificial Sequence
  Description of Artificial Sequence: Synthetic oligonucleotide
  Sense strand starting at position 3103 of SEQ ID NO: 914537
uagagcagauguccucaaa

SEQ ID NO: 1011539 - RNA, 19 nt, Artificial Sequence
  Description of Artificial Sequence: Synthetic oligonucleotide
  Antisense strand to SEQ ID NO: 1011538
uuugaggacaucugcucua

SEQ ID NO: 1011540 - RNA, 19 nt, Artificial Sequence
  Description of Artificial Sequence: Synthetic oligonucleotide
  Sense strand starting at position 3106 of SEQ ID NO: 914537
agcagauguccucaaagau

SEQ ID NO: 1011541 - RNA, 19 nt, Artificial Sequence
  Description of Artificial Sequence: Synthetic oligonucleotide
  Antisense strand to SEQ ID NO: 1011540
aucuuugaggacaucugcu

SEQ ID NO: 1011542 - RNA, 19 nt, Artificial Sequence
  Description of Artificial Sequence: Synthetic oligonucleotide
  Sense strand starting at position 3115 of SEQ ID NO: 914537
ccucaaagaugcucuguau

SEQ ID NO: 1011543 - RNA, 19 nt, Artificial Sequence
  Description of Artificial Sequence: Synthetic oligonucleotide
  Antisense strand to SEQ ID NO: 1011542
auacagagcaucuuugagg

SEQ ID NO: 1011544 - RNA, 19 nt, Artificial Sequence
  Description of Artificial Sequence: Synthetic oligonucleotide
  Sense strand starting at position 3154 of SEQ ID NO: 914537
agaagccaugagugacuua

SEQ ID NO: 1011545 - RNA, 19 nt, Artificial Sequence
  Description of Artificial Sequence: Synthetic oligonucleotide
  Antisense strand to SEQ ID NO: 1011544
uaagucacucauggcuucu

SEQ ID NO: 1011546 - RNA, 19 nt, Artificial Sequence
  Description of Artificial Sequence: Synthetic oligonucleotide
  Sense strand starting at position 3444 of SEQ ID NO: 914537
gguuucugcucagaaugac

SEQ ID NO: 1011547 - RNA, 19 nt, Artificial Sequence
  Description of Artificial Sequence: Synthetic oligonucleotide
  Antisense strand to SEQ ID NO: 1011546
gucauucugagcagaaacc

SEQ ID NO: 1011548 - RNA, 19 nt, Artificial Sequence
  Description of Artificial Sequence: Synthetic oligonucleotide
  Sense strand starting at position 3512 of SEQ ID NO: 914537
gccucauccucuggagacu

SEQ ID NO: 1011549 - RNA, 19 nt, Artificial Sequence
  Description of Artificial Sequence: Synthetic oligonucleotide
  Antisense strand to SEQ ID NO: 1011548
agucuccagaggaugaggc

SEQ ID NO: 1011550 - RNA, 19 nt, Artificial Sequence
  Description of Artificial Sequence: Synthetic oligonucleotide
  Sense strand starting at position 3513 of SEQ ID NO: 914537
ccucauccucuggagacuu

SEQ ID NO: 1011551 - RNA, 19 nt, Artificial Sequence
  Description of Artificial Sequence: Synthetic oligonucleotide
  Antisense strand to SEQ ID NO: 1011550
aagucuccagaggaugagg

SEQ ID NO: 1011552 - RNA, 19 nt, Artificial Sequence
  Description of Artificial Sequence: Synthetic oligonucleotide
  Sense strand starting at position 3610 of SEQ ID NO: 914537
gcuguaggagcacauguua

SEQ ID NO: 1011553 - RNA, 19 nt, Artificial Sequence
  Description of Artificial Sequence: Synthetic oligonucleotide
  Antisense strand to SEQ ID NO: 1011552
uaacaugugcuccuacagc

SEQ ID NO: 1011554 - RNA, 19 nt, Artificial Sequence
  Description of Artificial Sequence: Synthetic oligonucleotide
  Sense strand starting at position 3618 of SEQ ID NO: 914537
agcacauguuaggaaacaa

SEQ ID NO: 1011555 - RNA, 19 nt, Artificial Sequence
  Description of Artificial Sequence: Synthetic oligonucleotide
  Antisense strand to SEQ ID NO: 1011554
uuguuuccuaacaugugcu

SEQ ID NO: 1011556 - RNA, 19 nt, Artificial Sequence
  Description of Artificial Sequence: Synthetic oligonucleotide
  Sense strand starting at position 3665 of SEQ ID NO: 914537
cugaaaggauguggacuua

SEQ ID NO: 1011557 - RNA, 19 nt, Artificial Sequence
  Description of Artificial Sequence: Synthetic oligonucleotide
  Antisense strand to SEQ ID NO: 1011556
uaaguccacauccuuucag

SEQ ID NO: 1011558 - RNA, 19 nt, Artificial Sequence
  Description of Artificial Sequence: Synthetic oligonucleotide
  Sense strand starting at position 3775 of SEQ ID NO: 914537
uugggauucuacuggguca

SEQ ID NO: 1011559 - RNA, 19 nt, Artificial Sequence
  Description of Artificial Sequence: Synthetic oligonucleotide
  Antisense strand to SEQ ID NO: 1011558
ugacccaguagaaucccaa

SEQ ID NO: 1011560 - RNA, 19 nt, Artificial Sequence
  Description of Artificial Sequence: Synthetic oligonucleotide
  Sense strand starting at position 3776 of SEQ ID NO: 914537
ugggauucuacugggucau

SEQ ID NO: 1011561 - RNA, 19 nt, Artificial Sequence
  Description of Artificial Sequence: Synthetic oligonucleotide
  Antisense strand to SEQ ID NO: 1011560
augacccaguagaauccca

SEQ ID NO: 1011562 - RNA, 19 nt, Artificial Sequence
  Description of Artificial Sequence: Synthetic oligonucleotide
  Sense strand starting at position 3777 of SEQ ID NO: 914537
gggauucuacugggucauc

SEQ ID NO: 1011563 - RNA, 19 nt, Artificial Sequence
  Description of Artificial Sequence: Synthetic oligonucleotide
  Antisense strand to SEQ ID NO: 1011562
gaugacccaguagaauccc

SEQ ID NO: 1011564 - RNA, 19 nt, Artificial Sequence
  Description of Artificial Sequence: Synthetic oligonucleotide
  Sense strand starting at position 3788 of SEQ ID NO: 914537
gggucaucuucugugagua

SEQ ID NO: 1011565 - RNA, 19 nt, Artificial Sequence
  Description of Artificial Sequence: Synthetic oligonucleotide
  Antisense strand to SEQ ID NO: 1011564
uacucacagaagaugaccc

SEQ ID NO: 1011566 - RNA, 19 nt, Artificial Sequence
  Description of Artificial Sequence: Synthetic oligonucleotide
  Sense strand starting at position 3789 of SEQ ID NO: 914537
ggucaucuucugugaguac

SEQ ID NO: 1011567 - RNA, 19 nt, Artificial Sequence
  Description of Artificial Sequence: Synthetic oligonucleotide
  Antisense strand to SEQ ID NO: 1011566
guacucacagaagaugacc

SEQ ID NO: 1011568 - RNA, 19 nt, Artificial Sequence
  Description of Artificial Sequence: Synthetic oligonucleotide
  Sense strand starting at position 3790 of SEQ ID NO: 914537
gucaucuucugugaguacu

SEQ ID NO: 1011569 - RNA, 19 nt, Artificial Sequence
  Description of Artificial Sequence: Synthetic oligonucleotide
  Antisense strand to SEQ ID NO: 1011568
aguacucacagaagaugac

SEQ ID NO: 1011570 - RNA, 19 nt, Artificial Sequence
  Description of Artificial Sequence: Synthetic oligonucleotide
  Sense strand starting at position 3813 of SEQ ID NO: 914537
gugccucuuccaugugauu

SEQ ID NO: 1011571 - RNA, 19 nt, Artificial Sequence
  Description of Artificial Sequence: Synthetic oligonucleotide
  Antisense strand to SEQ ID NO: 1011570
aaucacauggaagaggcac

SEQ ID NO: 1011572 - RNA, 19 nt, Artificial Sequence
  Description of Artificial Sequence: Synthetic oligonucleotide
  Sense strand starting at position 3967 of SEQ ID NO: 914537
ccaagauauuuccaggauu

SEQ ID NO: 1011573 - RNA, 19 nt, Artificial Sequence
  Description of Artificial Sequence: Synthetic oligonucleotide
  Antisense strand to SEQ ID NO: 1011572
aauccuggaaauaucuugg

SEQ ID NO: 1011574 - RNA, 19 nt, Artificial Sequence
  Description of Artificial Sequence: Synthetic oligonucleotide
  Sense strand starting at position 199 of SEQ ID NO: 914538
gagggaagggcuuaugcuu

SEQ ID NO: 1011575 - RNA, 19 nt, Artificial Sequence
  Description of Artificial Sequence: Synthetic oligonucleotide
  Antisense strand to SEQ ID NO: 1011574
aagcauaagcccuucccuc

SEQ ID NO: 1011576 - RNA, 19 nt, Artificial Sequence
  Description of Artificial Sequence: Synthetic oligonucleotide
  Sense strand starting at position 408 of SEQ ID NO: 914538
ccaaguuucuaaguucgga

SEQ ID NO: 1011577 - RNA, 19 nt, Artificial Sequence
  Description of Artificial Sequence: Synthetic oligonucleotide
  Antisense strand to SEQ ID NO: 1011576
uccgaacuuagaaacuugg

SEQ ID NO: 1011578 - RNA, 19 nt, Artificial Sequence
  Description of Artificial Sequence: Synthetic oligonucleotide
  Sense strand starting at position 411 of SEQ ID NO: 914538
aguuucuaaguucggagaa

SEQ ID NO: 1011579 - RNA, 19 nt, Artificial Sequence
  Description of Artificial Sequence: Synthetic oligonucleotide
  Antisense strand to SEQ ID NO: 1011578
uucuccgaacuuagaaacu

SEQ ID NO: 1011580 - RNA, 19 nt, Artificial Sequence
  Description of Artificial Sequence: Synthetic oligonucleotide
  Sense strand starting at position 412 of SEQ ID NO: 914538
guuucuaaguucggagaac

SEQ ID NO: 1011581 - RNA, 19 nt, Artificial Sequence
  Description of Artificial Sequence: Synthetic oligonucleotide
  Antisense strand to SEQ ID NO: 1011580
guucuccgaacuuagaaac

SEQ ID NO: 1011582 - RNA, 19 nt, Artificial Sequence
  Description of Artificial Sequence: Synthetic oligonucleotide
  Sense strand starting at position 413 of SEQ ID NO: 914538
uuucuaaguucggagaaca

SEQ ID NO: 1011583 - RNA, 19 nt, Artificial Sequence
  Description of Artificial Sequence: Synthetic oligonucleotide
  Antisense strand to SEQ ID NO: 1011582
uguucuccgaacuuagaaa

SEQ ID NO: 1011584 - RNA, 19 nt, Artificial Sequence
  Description of Artificial Sequence: Synthetic oligonucleotide
  Sense strand starting at position 568 of SEQ ID NO: 914538
gccucaguccuaggccaau

SEQ ID NO: 1011585 - RNA, 19 nt, Artificial Sequence
  Description of Artificial Sequence: Synthetic oligonucleotide
  Antisense strand to SEQ ID NO: 1011584
auuggccuaggacugaggc

SEQ ID NO: 1011586 - RNA, 19 nt, Artificial Sequence
  Description of Artificial Sequence: Synthetic oligonucleotide
  Sense strand starting at position 2158 of SEQ ID NO: 914538
cucucuguucuaugcagga

SEQ ID NO: 1011587 - RNA, 19 nt, Artificial Sequence
  Description of Artificial Sequence: Synthetic oligonucleotide
  Antisense strand to SEQ ID NO: 1011586
uccugcauagaacagagag

SEQ ID NO: 1011588 - RNA, 19 nt, Artificial Sequence
  Description of Artificial Sequence: Synthetic oligonucleotide
  Sense strand starting at position 2233 of SEQ ID NO: 914538
aggagaagcagccgaguua

SEQ ID NO: 1011589 - RNA, 19 nt, Artificial Sequence
  Description of Artificial Sequence: Synthetic oligonucleotide
  Antisense strand to SEQ ID NO: 1011588
uaacucggcugcuucuccu

SEQ ID NO: 1011590 - RNA, 19 nt, Artificial Sequence
  Description of Artificial Sequence: Synthetic oligonucleotide
  Sense strand starting at position 2439 of SEQ ID NO: 914538
cggguauagguuugaguuu

SEQ ID NO: 1011591 - RNA, 19 nt, Artificial Sequence
  Description of Artificial Sequence: Synthetic oligonucleotide
  Antisense strand to SEQ ID NO: 1011590
aaacucaaaccuauacccg

SEQ ID NO: 1011592 - RNA, 19 nt, Artificial Sequence
  Description of Artificial Sequence: Synthetic oligonucleotide
  Sense strand starting at position 2508 of SEQ ID NO: 914538
aaucaaugauugcgcgaua

SEQ ID NO: 1011593 - RNA, 19 nt, Artificial Sequence
  Description of Artificial Sequence: Synthetic oligonucleotide
  Antisense strand to SEQ ID NO: 1011592
uaucgcgcaaucauugauu

SEQ ID NO: 1011594 - RNA, 19 nt, Artificial Sequence
  Description of Artificial Sequence: Synthetic oligonucleotide
  Sense strand starting at position 2511 of SEQ ID NO: 914538
caaugauugcgcgauacuu

SEQ ID NO: 1011595 - RNA, 19 nt, Artificial Sequence
  Description of Artificial Sequence: Synthetic oligonucleotide
  Antisense strand to SEQ ID NO: 1011594
aaguaucgcgcaaucauug

SEQ ID NO: 1011596 - RNA, 19 nt, Artificial Sequence
  Description of Artificial Sequence: Synthetic oligonucleotide
  Sense strand starting at position 2560 of SEQ ID NO: 914538
uggacuaucuucugcagaa

SEQ ID NO: 1011597 - RNA, 19 nt, Artificial Sequence
  Description of Artificial Sequence: Synthetic oligonucleotide
  Antisense strand to SEQ ID NO: 1011596
uucugcagaagauagucca

SEQ ID NO: 1011598 - RNA, 19 nt, Artificial Sequence
  Description of Artificial Sequence: Synthetic oligonucleotide
  Sense strand starting at position 2561 of SEQ ID NO: 914538
ggacuaucuucugcagaaa

SEQ ID NO: 1011599 - RNA, 19 nt, Artificial Sequence
  Description of Artificial Sequence: Synthetic oligonucleotide
  Antisense strand to SEQ ID NO: 1011598
uuucugcagaagauagucc

SEQ ID NO: 1011600 - RNA, 19 nt, Artificial Sequence
  Description of Artificial Sequence: Synthetic oligonucleotide
  Sense strand starting at position 2674 of SEQ ID NO: 914538
uguccuccuucccacagau

SEQ ID NO: 1011601 - RNA, 19 nt, Artificial Sequence
  Description of Artificial Sequence: Synthetic oligonucleotide
  Antisense strand to SEQ ID NO: 1011600
aucugugggaaggaggaca

SEQ ID NO: 1011602 - RNA, 19 nt, Artificial Sequence
  Description of Artificial Sequence: Synthetic oligonucleotide
  Sense strand starting at position 2692 of SEQ ID NO: 914538
uagagcagauguccucaaa

SEQ ID NO: 1011603 - RNA, 19 nt, Artificial Sequence
  Description of Artificial Sequence: Synthetic oligonucleotide
  Antisense strand to SEQ ID NO: 1011602
uuugaggacaucugcucua

SEQ ID NO: 1011604 - RNA, 19 nt, Artificial Sequence
  Description of Artificial Sequence: Synthetic oligonucleotide
  Sense strand starting at position 2695 of SEQ ID NO: 914538
agcagauguccucaaagau

SEQ ID NO: 1011605 - RNA, 19 nt, Artificial Sequence
  Description of Artificial Sequence: Synthetic oligonucleotide
  Antisense strand to SEQ ID NO: 1011604
aucuuugaggacaucugcu

SEQ ID NO: 1011606 - RNA, 19 nt, Artificial Sequence
  Description of Artificial Sequence: Synthetic oligonucleotide
  Sense strand starting at position 2704 of SEQ ID NO: 914538
ccucaaagaugcucuguau

SEQ ID NO: 1011607 - RNA, 19 nt, Artificial Sequence
  Description of Artificial Sequence: Synthetic oligonucleotide
  Antisense strand to SEQ ID NO: 1011606
auacagagcaucuuugagg

SEQ ID NO: 1011608 - RNA, 19 nt, Artificial Sequence
  Description of Artificial Sequence: Synthetic oligonucleotide
  Sense strand starting at position 2743 of SEQ ID NO: 914538
agaagccaugagugacuua

SEQ ID NO: 1011609 - RNA, 19 nt, Artificial Sequence
  Description of Artificial Sequence: Synthetic oligonucleotide
  Antisense strand to SEQ ID NO: 1011608
uaagucacucauggcuucu

SEQ ID NO: 1011610 - RNA, 19 nt, Artificial Sequence
  Description of Artificial Sequence: Synthetic oligonucleotide
  Sense strand starting at position 3033 of SEQ ID NO: 914538
gguuucugcucagaaugac

SEQ ID NO: 1011611 - RNA, 19 nt, Artificial Sequence
  Description of Artificial Sequence: Synthetic oligonucleotide
  Antisense strand to SEQ ID NO: 1011610
gucauucugagcagaaacc

SEQ ID NO: 1011612 - RNA, 19 nt, Artificial Sequence
  Description of Artificial Sequence: Synthetic oligonucleotide
  Sense strand starting at position 3101 of SEQ ID NO: 914538
gccucauccucuggagacu

SEQ ID NO: 1011613 - RNA, 19 nt, Artificial Sequence
  Description of Artificial Sequence: Synthetic oligonucleotide
  Antisense strand to SEQ ID NO: 1011612
agucuccagaggaugaggc

SEQ ID NO: 1011614 - RNA, 19 nt, Artificial Sequence
  Description of Artificial Sequence: Synthetic oligonucleotide
  Sense strand starting at position 3102 of SEQ ID NO: 914538
ccucauccucuggagacuu

SEQ ID NO: 1011615 - RNA, 19 nt, Artificial Sequence
  Description of Artificial Sequence: Synthetic oligonucleotide
  Antisense strand to SEQ ID NO: 1011614
aagucuccagaggaugagg

SEQ ID NO: 1011616 - RNA, 19 nt, Artificial Sequence
  Description of Artificial Sequence: Synthetic oligonucleotide
  Sense strand starting at position 3199 of SEQ ID NO: 914538
gcuguaggagcacauguua

SEQ ID NO: 1011617 - RNA, 19 nt, Artificial Sequence
  Description of Artificial Sequence: Synthetic oligonucleotide
  Antisense strand to SEQ ID NO: 1011616
uaacaugugcuccuacagc

SEQ ID NO: 1011618 - RNA, 19 nt, Artificial Sequence
  Description of Artificial Sequence: Synthetic oligonucleotide
  Sense strand starting at position 3207 of SEQ ID NO: 914538
agcacauguuaggaaacaa

SEQ ID NO: 1011619 - RNA, 19 nt, Artificial Sequence
  Description of Artificial Sequence: Synthetic oligonucleotide
  Antisense strand to SEQ ID NO: 1011618
uuguuuccuaacaugugcu

SEQ ID NO: 1011620 - RNA, 19 nt, Artificial Sequence
  Description of Artificial Sequence: Synthetic oligonucleotide
  Sense strand starting at position 3254 of SEQ ID NO: 914538
cugaaaggauguggacuua

SEQ ID NO: 1011621 - RNA, 19 nt, Artificial Sequence
  Description of Artificial Sequence: Synthetic oligonucleotide
  Antisense strand to SEQ ID NO: 1011620
uaaguccacauccuuucag

SEQ ID NO: 1011622 - RNA, 19 nt, Artificial Sequence
  Description of Artificial Sequence: Synthetic oligonucleotide
  Sense strand starting at position 3364 of SEQ ID NO: 914538
uugggauucuacuggguca

SEQ ID NO: 1011623 - RNA, 19 nt, Artificial Sequence
  Description of Artificial Sequence: Synthetic oligonucleotide
  Antisense strand to SEQ ID NO: 1011622
ugacccaguagaaucccaa

SEQ ID NO: 1011624 - RNA, 19 nt, Artificial Sequence
  Description of Artificial Sequence: Synthetic oligonucleotide
  Sense strand starting at position 3365 of SEQ ID NO: 914538
ugggauucuacugggucau

SEQ ID NO: 1011625 - RNA, 19 nt, Artificial Sequence
  Description of Artificial Sequence: Synthetic oligonucleotide
  Antisense strand to SEQ ID NO: 1011624
augacccaguagaauccca

SEQ ID NO: 1011626 - RNA, 19 nt, Artificial Sequence
  Description of Artificial Sequence: Synthetic oligonucleotide
  Sense strand starting at position 3366 of SEQ ID NO: 914538
gggauucuacugggucauc

SEQ ID NO: 1011627 - RNA, 19 nt, Artificial Sequence
  Description of Artificial Sequence: Synthetic oligonucleotide
  Antisense strand to SEQ ID NO: 1011626
gaugacccaguagaauccc

SEQ ID NO: 1011628 - RNA, 19 nt, Artificial Sequence
  Description of Artificial Sequence: Synthetic oligonucleotide
  Sense strand starting at position 3376 of SEQ ID NO: 914538
ugggucaucuucugugagu

SEQ ID NO: 1011629 - RNA, 19 nt, Artificial Sequence
  Description of Artificial Sequence: Synthetic oligonucleotide
  Antisense strand to SEQ ID NO: 1011628
acucacagaagaugaccca

SEQ ID NO: 1011630 - RNA, 19 nt, Artificial Sequence
  Description of Artificial Sequence: Synthetic oligonucleotide
  Sense strand starting at position 3377 of SEQ ID NO: 914538
gggucaucuucugugagua

SEQ ID NO: 1011631 - RNA, 19 nt, Artificial Sequence
  Description of Artificial Sequence: Synthetic oligonucleotide
  Antisense strand to SEQ ID NO: 1011630
uacucacagaagaugaccc

SEQ ID NO: 1011632 - RNA, 19 nt, Artificial Sequence
  Description of Artificial Sequence: Synthetic oligonucleotide
  Sense strand starting at position 3378 of SEQ ID NO: 914538
ggucaucuucugugaguac

SEQ ID NO: 1011633 - RNA, 19 nt, Artificial Sequence
  Description of Artificial Sequence: Synthetic oligonucleotide
  Antisense strand to SEQ ID NO: 1011632
guacucacagaagaugacc

SEQ ID NO: 1011634 - RNA, 19 nt, Artificial Sequence
  Description of Artificial Sequence: Synthetic oligonucleotide
  Sense strand starting at position 3379 of SEQ ID NO: 914538
gucaucuucugugaguacu

SEQ ID NO: 1011635 - RNA, 19 nt, Artificial Sequence
  Description of Artificial Sequence: Synthetic oligonucleotide
  Antisense strand to SEQ ID NO: 1011634
aguacucacagaagaugac

SEQ ID NO: 1011636 - RNA, 19 nt, Artificial Sequence
  Description of Artificial Sequence: Synthetic oligonucleotide
  Sense strand starting at position 3402 of SEQ ID NO: 914538
gugccucuuccaugugauu

SEQ ID NO: 1011637 - RNA, 19 nt, Artificial Sequence
  Description of Artificial Sequence: Synthetic oligonucleotide
  Antisense strand to SEQ ID NO: 1011636
aaucacauggaagaggcac

SEQ ID NO: 1011638 - RNA, 19 nt, Artificial Sequence
  Description of Artificial Sequence: Synthetic oligonucleotide
  Sense strand starting at position 3556 of SEQ ID NO: 914538
ccaagauauuuccaggauu

SEQ ID NO: 1011639 - RNA, 19 nt, Artificial Sequence
  Description of Artificial Sequence: Synthetic oligonucleotide
  Antisense strand to SEQ ID NO: 1011638
aauccuggaaauaucuugg

SEQ ID NO: 1011640 - RNA, 19 nt, Artificial Sequence
  Description of Artificial Sequence: Synthetic oligonucleotide
  Sense strand starting at position 3604 of SEQ ID NO: 914538
cuguuuauucucugaguuc

SEQ ID NO: 1011641 - RNA, 19 nt, Artificial Sequence
  Description of Artificial Sequence: Synthetic oligonucleotide
  Antisense strand to SEQ ID NO: 1011640
gaacucagagaauaaacag

SEQ ID NO: 1011642 - RNA, 19 nt, Artificial Sequence
  Description of Artificial Sequence: Synthetic oligonucleotide
  Sense strand starting at position 3605 of SEQ ID NO: 914538
uguuuauucucugaguucu

SEQ ID NO: 1011643 - RNA, 19 nt, Artificial Sequence
  Description of Artificial Sequence: Synthetic oligonucleotide
  Antisense strand to SEQ ID NO: 1011642
agaacucagagaauaaaca

SEQ ID NO: 1011644 - RNA, 19 nt, Artificial Sequence
  Description of Artificial Sequence: Synthetic oligonucleotide
  Sense strand starting at position 3607 of SEQ ID NO: 914538
uuuauucucugaguucuca

SEQ ID NO: 1011645 - RNA, 19 nt, Artificial Sequence
  Description of Artificial Sequence: Synthetic oligonucleotide
  Antisense strand to SEQ ID NO: 1011644
ugagaacucagagaauaaa

SEQ ID NO: 1011646 - RNA, 19 nt, Artificial Sequence
  Description of Artificial Sequence: Synthetic oligonucleotide
  Sense strand starting at position 3741 of SEQ ID NO: 914538
ugacaagacugauaggaau

SEQ ID NO: 1011647 - RNA, 19 nt, Artificial Sequence
  Description of Artificial Sequence: Synthetic oligonucleotide
  Antisense strand to SEQ ID NO: 1011646
auuccuaucagucuuguca

SEQ ID NO: 1011648 - RNA, 19 nt, Artificial Sequence
  Description of Artificial Sequence: Synthetic oligonucleotide
  Sense strand starting at position 3859 of SEQ ID NO: 914538
cugacagcuucuggaacuu

SEQ ID NO: 1011649 - RNA, 19 nt, Artificial Sequence
  Description of Artificial Sequence: Synthetic oligonucleotide
  Antisense strand to SEQ ID NO: 1011648
aaguuccagaagcugucag

SEQ ID NO: 1011650 - RNA, 19 nt, Artificial Sequence
  Description of Artificial Sequence: Synthetic oligonucleotide
  Sense strand starting at position 3896 of SEQ ID NO: 914538
gagccuguguccuagguuu

SEQ ID NO: 1011651 - RNA, 19 nt, Artificial Sequence
  Description of Artificial Sequence: Synthetic oligonucleotide
  Antisense strand to SEQ ID NO: 1011650
aaaccuaggacacaggcuc

SEQ ID NO: 1011652 - RNA, 19 nt, Artificial Sequence
  Description of Artificial Sequence: Synthetic oligonucleotide
  Sense strand starting at position 3907 of SEQ ID NO: 914538
cuagguuucccugauggac

SEQ ID NO: 1011653 - RNA, 19 nt, Artificial Sequence
  Description of Artificial Sequence: Synthetic oligonucleotide
  Antisense strand to SEQ ID NO: 1011652
guccaucagggaaaccuag

SEQ ID NO: 1011654 - RNA, 19 nt, Artificial Sequence
  Description of Artificial Sequence: Synthetic oligonucleotide
  Sense strand starting at position 114 of SEQ ID NO: 914539
ccaaguuucuaaguucgga

SEQ ID NO: 1011655 - RNA, 19 nt, Artificial Sequence
  Description of Artificial Sequence: Synthetic oligonucleotide
  Antisense strand to SEQ ID NO: 1011654
uccgaacuuagaaacuugg

SEQ ID NO: 1011656 - RNA, 19 nt, Artificial Sequence
  Description of Artificial Sequence: Synthetic oligonucleotide
  Sense strand starting at position 117 of SEQ ID NO: 914539
aguuucuaaguucggagaa

SEQ ID NO: 1011657 - RNA, 19 nt, Artificial Sequence
  Description of Artificial Sequence: Synthetic oligonucleotide
  Antisense strand to SEQ ID NO: 1011656
uucuccgaacuuagaaacu

SEQ ID NO: 1011658 - RNA, 19 nt, Artificial Sequence
  Description of Artificial Sequence: Synthetic oligonucleotide
  Sense strand starting at position 119 of SEQ ID NO: 914539
uuucuaaguucggagaaca

SEQ ID NO: 1011659 - RNA, 19 nt, Artificial Sequence
  Description of Artificial Sequence: Synthetic oligonucleotide
  Antisense strand to SEQ ID NO: 1011658
uguucuccgaacuuagaaa

SEQ ID NO: 1011660 - RNA, 19 nt, Artificial Sequence
  Description of Artificial Sequence: Synthetic oligonucleotide
  Sense strand starting at position 274 of SEQ ID NO: 914539
gccucaguccuaggccaau

SEQ ID NO: 1011661 - RNA, 19 nt, Artificial Sequence
  Description of Artificial Sequence: Synthetic oligonucleotide
  Antisense strand to SEQ ID NO: 1011660
auuggccuaggacugaggc

SEQ ID NO: 1011662 - RNA, 19 nt, Artificial Sequence
  Description of Artificial Sequence: Synthetic oligonucleotide
  Sense strand starting at position 1864 of SEQ ID NO: 914539
cucucuguucuaugcagga

SEQ ID NO: 1011663 - RNA, 19 nt, Artificial Sequence
  Description of Artificial Sequence: Synthetic oligonucleotide
  Antisense strand to SEQ ID NO: 1011662
uccugcauagaacagagag

SEQ ID NO: 1011664 - RNA, 19 nt, Artificial Sequence
  Description of Artificial Sequence: Synthetic oligonucleotide
  Sense strand starting at position 1939 of SEQ ID NO: 914539
aggagaagcagccgaguua

SEQ ID NO: 1011665 - RNA, 19 nt, Artificial Sequence
  Description of Artificial Sequence: Synthetic oligonucleotide
  Antisense strand to SEQ ID NO: 1011664
uaacucggcugcuucuccu

SEQ ID NO: 1011666 - RNA, 19 nt, Artificial Sequence
  Description of Artificial Sequence: Synthetic oligonucleotide
  Sense strand starting at position 2145 of SEQ ID NO: 914539
cggguauagguuugaguuu

SEQ ID NO: 1011667 - RNA, 19 nt, Artificial Sequence
  Description of Artificial Sequence: Synthetic oligonucleotide
  Antisense strand to SEQ ID NO: 1011666
aaacucaaaccuauacccg

SEQ ID NO: 1011668 - RNA, 19 nt, Artificial Sequence
  Description of Artificial Sequence: Synthetic oligonucleotide
  Sense strand starting at position 2217 of SEQ ID NO: 914539
caaugauugcgcgauacuu

SEQ ID NO: 1011669 - RNA, 19 nt, Artificial Sequence
  Description of Artificial Sequence: Synthetic oligonucleotide
  Antisense strand to SEQ ID NO: 1011668
aaguaucgcgcaaucauug

SEQ ID NO: 1011670 - RNA, 19 nt, Artificial Sequence
  Description of Artificial Sequence: Synthetic oligonucleotide
  Sense strand starting at position 2266 of SEQ ID NO: 914539
uggacuaucuucugcagaa

SEQ ID NO: 1011671 - RNA, 19 nt, Artificial Sequence
  Description of Artificial Sequence: Synthetic oligonucleotide
  Antisense strand to SEQ ID NO: 1011670
uucugcagaagauagucca

SEQ ID NO: 1011672 - RNA, 19 nt, Artificial Sequence
  Description of Artificial Sequence: Synthetic oligonucleotide
  Sense strand starting at position 2267 of SEQ ID NO: 914539
ggacuaucuucugcagaaa

SEQ ID NO: 1011673 - RNA, 19 nt, Artificial Sequence
  Description of Artificial Sequence: Synthetic oligonucleotide
  Antisense strand to SEQ ID NO: 1011672
uuucugcagaagauagucc

SEQ ID NO: 1011674 - RNA, 19 nt, Artificial Sequence
  Description of Artificial Sequence: Synthetic oligonucleotide
  Sense strand starting at position 2380 of SEQ ID NO: 914539
uguccuccuucccacagau

SEQ ID NO: 1011675 - RNA, 19 nt, Artificial Sequence
  Description of Artificial Sequence: Synthetic oligonucleotide
  Antisense strand to SEQ ID NO: 1011674
aucugugggaaggaggaca

SEQ ID NO: 1011676 - RNA, 19 nt, Artificial Sequence
  Description of Artificial Sequence: Synthetic oligonucleotide
  Sense strand starting at position 2398 of SEQ ID NO: 914539
uagagcagauguccucaaa

SEQ ID NO: 1011677 - RNA, 19 nt, Artificial Sequence
  Description of Artificial Sequence: Synthetic oligonucleotide
  Antisense strand to SEQ ID NO: 1011676
uuugaggacaucugcucua

SEQ ID NO: 1011678 - RNA, 19 nt, Artificial Sequence
  Description of Artificial Sequence: Synthetic oligonucleotide
  Sense strand starting at position 2401 of SEQ ID NO: 914539
agcagauguccucaaagau

SEQ ID NO: 1011679 - RNA, 19 nt, Artificial Sequence
  Description of Artificial Sequence: Synthetic oligonucleotide
  Antisense strand to SEQ ID NO: 1011678
aucuuugaggacaucugcu

SEQ ID NO: 1011680 - RNA, 19 nt, Artificial Sequence
  Description of Artificial Sequence: Synthetic oligonucleotide
  Sense strand starting at position 2410 of SEQ ID NO: 914539
ccucaaagaugcucuguau

SEQ ID NO: 1011681 - RNA, 19 nt, Artificial Sequence
  Description of Artificial Sequence: Synthetic oligonucleotide
  Antisense strand to SEQ ID NO: 1011680
auacagagcaucuuugagg

SEQ ID NO: 1011682 - RNA, 19 nt, Artificial Sequence
  Description of Artificial Sequence: Synthetic oligonucleotide
  Sense strand starting at position 2449 of SEQ ID NO: 914539
agaagccaugagugacuua

SEQ ID NO: 1011683 - RNA, 19 nt, Artificial Sequence
  Description of Artificial Sequence: Synthetic oligonucleotide
  Antisense strand to SEQ ID NO: 1011682
uaagucacucauggcuucu

SEQ ID NO: 1011684 - RNA, 19 nt, Artificial Sequence
  Description of Artificial Sequence: Synthetic oligonucleotide
  Sense strand starting at position 2739 of SEQ ID NO: 914539
gguuucugcucagaaugac

SEQ ID NO: 1011685 - RNA, 19 nt, Artificial Sequence
  Description of Artificial Sequence: Synthetic oligonucleotide
  Antisense strand to SEQ ID NO: 1011684
gucauucugagcagaaacc

SEQ ID NO: 1011686 - RNA, 19 nt, Artificial Sequence
  Description of Artificial Sequence: Synthetic oligonucleotide
  Sense strand starting at position 2807 of SEQ ID NO: 914539
gccucauccucuggagacu

SEQ ID NO: 1011687 - RNA, 19 nt, Artificial Sequence
  Description of Artificial Sequence: Synthetic oligonucleotide
  Antisense strand to SEQ ID NO: 1011686
agucuccagaggaugaggc

SEQ ID NO: 1011688 - RNA, 19 nt, Artificial Sequence
  Description of Artificial Sequence: Synthetic oligonucleotide
  Sense strand starting at position 2808 of SEQ ID NO: 914539
ccucauccucuggagacuu

SEQ ID NO: 1011689 - RNA, 19 nt, Artificial Sequence
  Description of Artificial Sequence: Synthetic oligonucleotide
  Antisense strand to SEQ ID NO: 1011688
aagucuccagaggaugagg

SEQ ID NO: 1011690 - RNA, 19 nt, Artificial Sequence
  Description of Artificial Sequence: Synthetic oligonucleotide
  Sense strand starting at position 2905 of SEQ ID NO: 914539
gcuguaggagcacauguua

SEQ ID NO: 1011691 - RNA, 19 nt, Artificial Sequence
  Description of Artificial Sequence: Synthetic oligonucleotide
  Antisense strand to SEQ ID NO: 1011690
uaacaugugcuccuacagc

SEQ ID NO: 1011692 - RNA, 19 nt, Artificial Sequence
  Description of Artificial Sequence: Synthetic oligonucleotide
  Sense strand starting at position 2913 of SEQ ID NO: 914539
agcacauguuaggaaacaa

SEQ ID NO: 1011693 - RNA, 19 nt, Artificial Sequence
  Description of Artificial Sequence: Synthetic oligonucleotide
  Antisense strand to SEQ ID NO: 1011692
uuguuuccuaacaugugcu

SEQ ID NO: 1011694 - RNA, 19 nt, Artificial Sequence
  Description of Artificial Sequence: Synthetic oligonucleotide
  Sense strand starting at position 2960 of SEQ ID NO: 914539
cugaaaggauguggacuua

SEQ ID NO: 1011695 - RNA, 19 nt, Artificial Sequence
  Description of Artificial Sequence: Synthetic oligonucleotide
  Antisense strand to SEQ ID NO: 1011694
uaaguccacauccuuucag

SEQ ID NO: 1011696 - RNA, 19 nt, Artificial Sequence
  Description of Artificial Sequence: Synthetic oligonucleotide
  Sense strand starting at position 3070 of SEQ ID NO: 914539
uugggauucuacuggguca

SEQ ID NO: 1011697 - RNA, 19 nt, Artificial Sequence
  Description of Artificial Sequence: Synthetic oligonucleotide
  Antisense strand to SEQ ID NO: 1011696
ugacccaguagaaucccaa

SEQ ID NO: 1011698 - RNA, 19 nt, Artificial Sequence
  Description of Artificial Sequence: Synthetic oligonucleotide
  Sense strand starting at position 3071 of SEQ ID NO: 914539
ugggauucuacugggucau

SEQ ID NO: 1011699 - RNA, 19 nt, Artificial Sequence
  Description of Artificial Sequence: Synthetic oligonucleotide
  Antisense strand to SEQ ID NO: 1011698
augacccaguagaauccca

SEQ ID NO: 1011700 - RNA, 19 nt, Artificial Sequence
  Description of Artificial Sequence: Synthetic oligonucleotide
  Sense strand starting at position 3072 of SEQ ID NO: 914539
gggauucuacugggucauc

SEQ ID NO: 1011701 - RNA, 19 nt, Artificial Sequence
  Description of Artificial Sequence: Synthetic oligonucleotide
  Antisense strand to SEQ ID NO: 1011700
gaugacccaguagaauccc

SEQ ID NO: 1011702 - RNA, 19 nt, Artificial Sequence
  Description of Artificial Sequence: Synthetic oligonucleotide
  Sense strand starting at position 3083 of SEQ ID NO: 914539
gggucaucuucugugagua

SEQ ID NO: 1011703 - RNA, 19 nt, Artificial Sequence
  Description of Artificial Sequence: Synthetic oligonucleotide
  Antisense strand to SEQ ID NO: 1011702
uacucacagaagaugaccc

SEQ ID NO: 1011704 - RNA, 19 nt, Artificial Sequence
  Description of Artificial Sequence: Synthetic oligonucleotide
  Sense strand starting at position 3084 of SEQ ID NO: 914539
ggucaucuucugugaguac

SEQ ID NO: 1011705 - RNA, 19 nt, Artificial Sequence
  Description of Artificial Sequence: Synthetic oligonucleotide
  Antisense strand to SEQ ID NO: 1011704
guacucacagaagaugacc

SEQ ID NO: 1011706 - RNA, 19 nt, Artificial Sequence
  Description of Artificial Sequence: Synthetic oligonucleotide
  Sense strand starting at position 3108 of SEQ ID NO: 914539
gugccucuuccaugugauu

SEQ ID NO: 1011707 - RNA, 19 nt, Artificial Sequence
  Description of Artificial Sequence: Synthetic oligonucleotide
  Antisense strand to SEQ ID NO: 1011706
aaucacauggaagaggcac

SEQ ID NO: 1011708 - RNA, 19 nt, Artificial Sequence
  Description of Artificial Sequence: Synthetic oligonucleotide
  Sense strand starting at position 3262 of SEQ ID NO: 914539
ccaagauauuuccaggauu

SEQ ID NO: 1011709 - RNA, 19 nt, Artificial Sequence
  Description of Artificial Sequence: Synthetic oligonucleotide
  Antisense strand to SEQ ID NO: 1011708
aauccuggaaauaucuugg

SEQ ID NO: 1011710 - RNA, 19 nt, Artificial Sequence
  Description of Artificial Sequence: Synthetic oligonucleotide
  Sense strand starting at position 3310 of SEQ ID NO: 914539
cuguuuauucucugaguuc

SEQ ID NO: 1011711 - RNA, 19 nt, Artificial Sequence
  Description of Artificial Sequence: Synthetic oligonucleotide
  Antisense strand to SEQ ID NO: 1011710
gaacucagagaauaaacag

SEQ ID NO: 1011712 - RNA, 19 nt, Artificial Sequence
  Description of Artificial Sequence: Synthetic oligonucleotide
  Sense strand starting at position 3311 of SEQ ID NO: 914539
uguuuauucucugaguucu

SEQ ID NO: 1011713 - RNA, 19 nt, Artificial Sequence
  Description of Artificial Sequence: Synthetic oligonucleotide
  Antisense strand to SEQ ID NO: 1011712
agaacucagagaauaaaca

SEQ ID NO: 1011714 - RNA, 19 nt, Artificial Sequence
  Description of Artificial Sequence: Synthetic oligonucleotide
  Sense strand starting at position 3313 of SEQ ID NO: 914539
uuuauucucugaguucuca

SEQ ID NO: 1011715 - RNA, 19 nt, Artificial Sequence
  Description of Artificial Sequence: Synthetic oligonucleotide
  Antisense strand to SEQ ID NO: 1011714
ugagaacucagagaauaaa

SEQ ID NO: 1011716 - RNA, 19 nt, Artificial Sequence
  Description of Artificial Sequence: Synthetic oligonucleotide
  Sense strand starting at position 3447 of SEQ ID NO: 914539
ugacaagacugauaggaau

SEQ ID NO: 1011717 - RNA, 19 nt, Artificial Sequence
  Description of Artificial Sequence: Synthetic oligonucleotide
  Antisense strand to SEQ ID NO: 1011716
auuccuaucagucuuguca

SEQ ID NO: 1011718 - RNA, 19 nt, Artificial Sequence
  Description of Artificial Sequence: Synthetic oligonucleotide
  Sense strand starting at position 3565 of SEQ ID NO: 914539
cugacagcuucuggaacuu

SEQ ID NO: 1011719 - RNA, 19 nt, Artificial Sequence
  Description of Artificial Sequence: Synthetic oligonucleotide
  Antisense strand to SEQ ID NO: 1011718
aaguuccagaagcugucag

SEQ ID NO: 1011720 - RNA, 19 nt, Artificial Sequence
  Description of Artificial Sequence: Synthetic oligonucleotide
  Sense strand starting at position 3613 of SEQ ID NO: 914539
cuagguuucccugauggac

SEQ ID NO: 1011721 - RNA, 19 nt, Artificial Sequence
  Description of Artificial Sequence: Synthetic oligonucleotide
  Antisense strand to SEQ ID NO: 1011720
guccaucagggaaaccuag

SEQ ID NO: 1011722 - RNA, 19 nt, Artificial Sequence
  Description of Artificial Sequence: Synthetic oligonucleotide
  Sense strand starting at position 3748 of SEQ ID NO: 914539
cuuggaaucuagggauggu

SEQ ID NO: 1011723 - RNA, 19 nt, Artificial Sequence
  Description of Artificial Sequence: Synthetic oligonucleotide
  Antisense strand to SEQ ID NO: 1011722
accaucccuagauuccaag

SEQ ID NO: 1011724 - RNA, 19 nt, Artificial Sequence
  Description of Artificial Sequence: Synthetic oligonucleotide
  Sense strand starting at position 3762 of SEQ ID NO: 914539
auggucucuuguccucaua

SEQ ID NO: 1011725 - RNA, 19 nt, Artificial Sequence
  Description of Artificial Sequence: Synthetic oligonucleotide
  Antisense strand to SEQ ID NO: 1011724
uaugaggacaagagaccau

SEQ ID NO: 1011726 - RNA, 19 nt, Artificial Sequence
  Description of Artificial Sequence: Synthetic oligonucleotide
  Sense strand starting at position 3775 of SEQ ID NO: 914539
cucauagcgucuuccauua

SEQ ID NO: 1011727 - RNA, 19 nt, Artificial Sequence
  Description of Artificial Sequence: Synthetic oligonucleotide
  Antisense strand to SEQ ID NO: 1011726
uaauggaagacgcuaugag

SEQ ID NO: 1011728 - RNA, 19 nt, Artificial Sequence
  Description of Artificial Sequence: Synthetic oligonucleotide
  Sense strand starting at position 3877 of SEQ ID NO: 914539
guuuauuucuuucuguguu

SEQ ID NO: 1011729 - RNA, 19 nt, Artificial Sequence
  Description of Artificial Sequence: Synthetic oligonucleotide
  Antisense strand to SEQ ID NO: 1011728
aacacagaaagaaauaaac

SEQ ID NO: 1011730 - RNA, 19 nt, Artificial Sequence
  Description of Artificial Sequence: Synthetic oligonucleotide
  Sense strand starting at position 3912 of SEQ ID NO: 914539
ugucauugcuuucuuccau

SEQ ID NO: 1011731 - RNA, 19 nt, Artificial Sequence
  Description of Artificial Sequence: Synthetic oligonucleotide
  Antisense strand to SEQ ID NO: 1011730
auggaagaaagcaaugaca

SEQ ID NO: 1011732 - RNA, 19 nt, Artificial Sequence
  Description of Artificial Sequence: Synthetic oligonucleotide
  Sense strand starting at position 3913 of SEQ ID NO: 914539
gucauugcuuucuuccauu

SEQ ID NO: 1011733 - RNA, 19 nt, Artificial Sequence
  Description of Artificial Sequence: Synthetic oligonucleotide
  Antisense strand to SEQ ID NO: 1011732
aauggaagaaagcaaugac

SEQ ID NO: 1011734 - RNA, 19 nt, Artificial Sequence
  Description of Artificial Sequence: Synthetic oligonucleotide
  Sense strand starting at position 47 of SEQ ID NO: 914540
cgcagaauccugcagaacu

SEQ ID NO: 1011735 - RNA, 19 nt, Artificial Sequence
  Description of Artificial Sequence: Synthetic oligonucleotide
  Antisense strand to SEQ ID NO: 1011734
aguucugcaggauucugcg

SEQ ID NO: 1011736 - RNA, 19 nt, Artificial Sequence
  Description of Artificial Sequence: Synthetic oligonucleotide
  Sense strand starting at position 440 of SEQ ID NO: 914540
uuacauugguguguaauaa

SEQ ID NO: 1011737 - RNA, 19 nt, Artificial Sequence
  Description of Artificial Sequence: Synthetic oligonucleotide
  Antisense strand to SEQ ID NO: 1011736
uuauuacacaccaauguaa

SEQ ID NO: 1011738 - RNA, 19 nt, Artificial Sequence
  Description of Artificial Sequence: Synthetic oligonucleotide
  Sense strand starting at position 441 of SEQ ID NO: 914540
uacauugguguguaauaaa

SEQ ID NO: 1011739 - RNA, 19 nt, Artificial Sequence
  Description of Artificial Sequence: Synthetic oligonucleotide
  Antisense strand to SEQ ID NO: 1011738
uuuauuacacaccaaugua

SEQ ID NO: 1011740 - RNA, 19 nt, Artificial Sequence
  Description of Artificial Sequence: Synthetic oligonucleotide
  Sense strand starting at position 467 of SEQ ID NO: 914540
acuguaaauguaugguuua

SEQ ID NO: 1011741 - RNA, 19 nt, Artificial Sequence
  Description of Artificial Sequence: Synthetic oligonucleotide
  Antisense strand to SEQ ID NO: 1011740
uaaaccauacauuuacagu

SEQ ID NO: 1011742 - RNA, 19 nt, Artificial Sequence
  Description of Artificial Sequence: Synthetic oligonucleotide
  Sense strand starting at position 497 of SEQ ID NO: 914540
guauguauacuacacacua

SEQ ID NO: 1011743 - RNA, 19 nt, Artificial Sequence
  Description of Artificial Sequence: Synthetic oligonucleotide
  Antisense strand to SEQ ID NO: 1011742
uaguguguaguauacauac

SEQ ID NO: 1011744 - RNA, 19 nt, Artificial Sequence
  Description of Artificial Sequence: Synthetic oligonucleotide
  Sense strand starting at position 621 of SEQ ID NO: 914540
agcugagagcccuagauug

SEQ ID NO: 1011745 - RNA, 19 nt, Artificial Sequence
  Description of Artificial Sequence: Synthetic oligonucleotide
  Antisense strand to SEQ ID NO: 1011744
caaucuagggcucucagcu

SEQ ID NO: 1011746 - RNA, 19 nt, Artificial Sequence
  Description of Artificial Sequence: Synthetic oligonucleotide
  Sense strand starting at position 722 of SEQ ID NO: 914540
ucuacuuauugggcauuaa

SEQ ID NO: 1011747 - RNA, 19 nt, Artificial Sequence
  Description of Artificial Sequence: Synthetic oligonucleotide
  Antisense strand to SEQ ID NO: 1011746
uuaaugcccaauaaguaga

SEQ ID NO: 1011748 - RNA, 19 nt, Artificial Sequence
  Description of Artificial Sequence: Synthetic oligonucleotide
  Sense strand starting at position 723 of SEQ ID NO: 914540
cuacuuauugggcauuaac

SEQ ID NO: 1011749 - RNA, 19 nt, Artificial Sequence
  Description of Artificial Sequence: Synthetic oligonucleotide
  Antisense strand to SEQ ID NO: 1011748
guuaaugcccaauaaguag

SEQ ID NO: 1011750 - RNA, 19 nt, Artificial Sequence
  Description of Artificial Sequence: Synthetic oligonucleotide
  Sense strand starting at position 770 of SEQ ID NO: 914540
aggaguggagaaugcuaau

SEQ ID NO: 1011751 - RNA, 19 nt, Artificial Sequence
  Description of Artificial Sequence: Synthetic oligonucleotide
  Antisense strand to SEQ ID NO: 1011750
auuagcauucuccacuccu

SEQ ID NO: 1011752 - RNA, 19 nt, Artificial Sequence
  Description of Artificial Sequence: Synthetic oligonucleotide
  Sense strand starting at position 854 of SEQ ID NO: 914540
ugaugaugaugugccauaa

SEQ ID NO: 1011753 - RNA, 19 nt, Artificial Sequence
  Description of Artificial Sequence: Synthetic oligonucleotide
  Antisense strand to SEQ ID NO: 1011752
uuauggcacaucaucauca

SEQ ID NO: 1011754 - RNA, 19 nt, Artificial Sequence
  Description of Artificial Sequence: Synthetic oligonucleotide
  Sense strand starting at position 858 of SEQ ID NO: 914540
gaugaugugccauaaauug

SEQ ID NO: 1011755 - RNA, 19 nt, Artificial Sequence
  Description of Artificial Sequence: Synthetic oligonucleotide
  Antisense strand to SEQ ID NO: 1011754
caauuuauggcacaucauc

SEQ ID NO: 1011756 - RNA, 19 nt, Artificial Sequence
  Description of Artificial Sequence: Synthetic oligonucleotide
  Sense strand starting at position 1002 of SEQ ID NO: 914540
cgacaaguucuacgaagga

SEQ ID NO: 1011757 - RNA, 19 nt, Artificial Sequence
  Description of Artificial Sequence: Synthetic oligonucleotide
  Antisense strand to SEQ ID NO: 1011756
uccuucguagaacuugucg

SEQ ID NO: 1011758 - RNA, 19 nt, Artificial Sequence
  Description of Artificial Sequence: Synthetic oligonucleotide
  Sense strand starting at position 1047 of SEQ ID NO: 914540
ggcaaaucauaaguuaaau

SEQ ID NO: 1011759 - RNA, 19 nt, Artificial Sequence
  Description of Artificial Sequence: Synthetic oligonucleotide
  Antisense strand to SEQ ID NO: 1011758
auuuaacuuaugauuugcc

SEQ ID NO: 1011760 - RNA, 19 nt, Artificial Sequence
  Description of Artificial Sequence: Synthetic oligonucleotide
  Sense strand starting at position 1532 of SEQ ID NO: 914540
gacgcaguaggagauaauu

SEQ ID NO: 1011761 - RNA, 19 nt, Artificial Sequence
  Description of Artificial Sequence: Synthetic oligonucleotide
  Antisense strand to SEQ ID NO: 1011760
aauuaucuccuacugcguc

SEQ ID NO: 1011762 - RNA, 19 nt, Artificial Sequence
  Description of Artificial Sequence: Synthetic oligonucleotide
  Sense strand starting at position 1656 of SEQ ID NO: 914540
agacuaauagcaggagguu

SEQ ID NO: 1011763 - RNA, 19 nt, Artificial Sequence
  Description of Artificial Sequence: Synthetic oligonucleotide
  Antisense strand to SEQ ID NO: 1011762
aaccuccugcuauuagucu

SEQ ID NO: 1011764 - RNA, 19 nt, Artificial Sequence
  Description of Artificial Sequence: Synthetic oligonucleotide
  Sense strand starting at position 1856 of SEQ ID NO: 914540
gucuaaagucucggagaca

SEQ ID NO: 1011765 - RNA, 19 nt, Artificial Sequence
  Description of Artificial Sequence: Synthetic oligonucleotide
  Antisense strand to SEQ ID NO: 1011764
ugucuccgagacuuuagac

SEQ ID NO: 1011766 - RNA, 19 nt, Artificial Sequence
  Description of Artificial Sequence: Synthetic oligonucleotide
  Sense strand starting at position 2194 of SEQ ID NO: 914540
ggaggaaauuggcuugacu

SEQ ID NO: 1011767 - RNA, 19 nt, Artificial Sequence
  Description of Artificial Sequence: Synthetic oligonucleotide
  Antisense strand to SEQ ID NO: 1011766
agucaagccaauuuccucc

SEQ ID NO: 1011768 - RNA, 19 nt, Artificial Sequence
  Description of Artificial Sequence: Synthetic oligonucleotide
  Sense strand starting at position 2197 of SEQ ID NO: 914540
ggaaauuggcuugacuugu

SEQ ID NO: 1011769 - RNA, 19 nt, Artificial Sequence
  Description of Artificial Sequence: Synthetic oligonucleotide
  Antisense strand to SEQ ID NO: 1011768
acaagucaagccaauuucc

SEQ ID NO: 1011770 - RNA, 19 nt, Artificial Sequence
  Description of Artificial Sequence: Synthetic oligonucleotide
  Sense strand starting at position 2205 of SEQ ID NO: 914540
gcuugacuugucuacuuac

SEQ ID NO: 1011771 - RNA, 19 nt, Artificial Sequence
  Description of Artificial Sequence: Synthetic oligonucleotide
  Antisense strand to SEQ ID NO: 1011770
guaaguagacaagucaagc

SEQ ID NO: 1011772 - RNA, 19 nt, Artificial Sequence
  Description of Artificial Sequence: Synthetic oligonucleotide
  Sense strand starting at position 2316 of SEQ ID NO: 914540
guaguuguucaggagugau

SEQ ID NO: 1011773 - RNA, 19 nt, Artificial Sequence
  Description of Artificial Sequence: Synthetic oligonucleotide
  Antisense strand to SEQ ID NO: 1011772
aucacuccugaacaacuac

SEQ ID NO: 1011774 - RNA, 19 nt, Artificial Sequence
  Description of Artificial Sequence: Synthetic oligonucleotide
  Sense strand starting at position 2335 of SEQ ID NO: 914540
cggcguaccaguguuugga

SEQ ID NO: 1011775 - RNA, 19 nt, Artificial Sequence
  Description of Artificial Sequence: Synthetic oligonucleotide
  Antisense strand to SEQ ID NO: 1011774
uccaaacacugguacgccg

SEQ ID NO: 1011776 - RNA, 19 nt, Artificial Sequence
  Description of Artificial Sequence: Synthetic oligonucleotide
  Sense strand starting at position 2409 of SEQ ID NO: 914540
acauccugucuugaaugua

SEQ ID NO: 1011777 - RNA, 19 nt, Artificial Sequence
  Description of Artificial Sequence: Synthetic oligonucleotide
  Antisense strand to SEQ ID NO: 1011776
uacauucaagacaggaugu

SEQ ID NO: 1011778 - RNA, 19 nt, Artificial Sequence
  Description of Artificial Sequence: Synthetic oligonucleotide
  Sense strand starting at position 2430 of SEQ ID NO: 914540
auuacuucugcguauauag

SEQ ID NO: 1011779 - RNA, 19 nt, Artificial Sequence
  Description of Artificial Sequence: Synthetic oligonucleotide
  Antisense strand to SEQ ID NO: 1011778
cuauauacgcagaaguaau

SEQ ID NO: 1011780 - RNA, 19 nt, Artificial Sequence
  Description of Artificial Sequence: Synthetic oligonucleotide
  Sense strand starting at position 2527 of SEQ ID NO: 914540
guaacuuucccauagucau

SEQ ID NO: 1011781 - RNA, 19 nt, Artificial Sequence
  Description of Artificial Sequence: Synthetic oligonucleotide
  Antisense strand to SEQ ID NO: 1011780
augacuaugggaaaguuac

SEQ ID NO: 1011782 - RNA, 19 nt, Artificial Sequence
  Description of Artificial Sequence: Synthetic oligonucleotide
  Sense strand starting at position 2530 of SEQ ID NO: 914540
acuuucccauagucauaga

SEQ ID NO: 1011783 - RNA, 19 nt, Artificial Sequence
  Description of Artificial Sequence: Synthetic oligonucleotide
  Antisense strand to SEQ ID NO: 1011782
ucuaugacuaugggaaagu

SEQ ID NO: 1011784 - RNA, 19 nt, Artificial Sequence
  Description of Artificial Sequence: Synthetic oligonucleotide
  Sense strand starting at position 2767 of SEQ ID NO: 914540
ccuguucucagagaccgua

SEQ ID NO: 1011785 - RNA, 19 nt, Artificial Sequence
  Description of Artificial Sequence: Synthetic oligonucleotide
  Antisense strand to SEQ ID NO: 1011784
uacggucucugagaacagg

SEQ ID NO: 1011786 - RNA, 19 nt, Artificial Sequence
  Description of Artificial Sequence: Synthetic oligonucleotide
  Sense strand starting at position 2885 of SEQ ID NO: 914540
uggguucugauauauucga

SEQ ID NO: 1011787 - RNA, 19 nt, Artificial Sequence
  Description of Artificial Sequence: Synthetic oligonucleotide
  Antisense strand to SEQ ID NO: 1011786
ucgaauauaucagaaccca

SEQ ID NO: 1011788 - RNA, 19 nt, Artificial Sequence
  Description of Artificial Sequence: Synthetic oligonucleotide
  Sense strand starting at position 3180 of SEQ ID NO: 914540
guuauaacucaauguaggu

SEQ ID NO: 1011789 - RNA, 19 nt, Artificial Sequence
  Description of Artificial Sequence: Synthetic oligonucleotide
  Antisense strand to SEQ ID NO: 1011788
accuacauugaguuauaac

SEQ ID NO: 1011790 - RNA, 19 nt, Artificial Sequence
  Description of Artificial Sequence: Synthetic oligonucleotide
  Sense strand starting at position 3239 of SEQ ID NO: 914540
auugucuuggguuaauuga

SEQ ID NO: 1011791 - RNA, 19 nt, Artificial Sequence
  Description of Artificial Sequence: Synthetic oligonucleotide
  Antisense strand to SEQ ID NO: 1011790
ucaauuaacccaagacaau

SEQ ID NO: 1011792 - RNA, 19 nt, Artificial Sequence
  Description of Artificial Sequence: Synthetic oligonucleotide
  Sense strand starting at position 3290 of SEQ ID NO: 914540
ugauuagacuaagaugaaa

SEQ ID NO: 1011793 - RNA, 19 nt, Artificial Sequence
  Description of Artificial Sequence: Synthetic oligonucleotide
  Antisense strand to SEQ ID NO: 1011792
uuucaucuuagucuaauca

SEQ ID NO: 1011794 - RNA, 19 nt, Artificial Sequence
  Description of Artificial Sequence: Synthetic oligonucleotide
  Sense strand starting at position 3312 of SEQ ID NO: 914540
ugugacuuauuugaggaua

SEQ ID NO: 1011795 - RNA, 19 nt, Artificial Sequence
  Description of Artificial Sequence: Synthetic oligonucleotide
  Antisense strand to SEQ ID NO: 1011794
uauccucaaauaagucaca

SEQ ID NO: 1011796 - RNA, 19 nt, Artificial Sequence
  Description of Artificial Sequence: Synthetic oligonucleotide
  Sense strand starting at position 3314 of SEQ ID NO: 914540
ugacuuauuugaggauauu

SEQ ID NO: 1011797 - RNA, 19 nt, Artificial Sequence
  Description of Artificial Sequence: Synthetic oligonucleotide
  Antisense strand to SEQ ID NO: 1011796
aauauccucaaauaaguca

SEQ ID NO: 1011798 - RNA, 19 nt, Artificial Sequence
  Description of Artificial Sequence: Synthetic oligonucleotide
  Sense strand starting at position 3323 of SEQ ID NO: 914540
ugaggauauugccuuggua

SEQ ID NO: 1011799 - RNA, 19 nt, Artificial Sequence
  Description of Artificial Sequence: Synthetic oligonucleotide
  Antisense strand to SEQ ID NO: 1011798
uaccaaggcaauauccuca

SEQ ID NO: 1011800 - RNA, 19 nt, Artificial Sequence
  Description of Artificial Sequence: Synthetic oligonucleotide
  Sense strand starting at position 3336 of SEQ ID NO: 914540
uugguauuugcaggauugu

SEQ ID NO: 1011801 - RNA, 19 nt, Artificial Sequence
  Description of Artificial Sequence: Synthetic oligonucleotide
  Antisense strand to SEQ ID NO: 1011800
acaauccugcaaauaccaa

SEQ ID NO: 1011802 - RNA, 19 nt, Artificial Sequence
  Description of Artificial Sequence: Synthetic oligonucleotide
  Sense strand starting at position 3360 of SEQ ID NO: 914540
cuugucuuacuuuagagua

SEQ ID NO: 1011803 - RNA, 19 nt, Artificial Sequence
  Description of Artificial Sequence: Synthetic oligonucleotide
  Antisense strand to SEQ ID NO: 1011802
uacucuaaaguaagacaag

SEQ ID NO: 1011804 - RNA, 19 nt, Artificial Sequence
  Description of Artificial Sequence: Synthetic oligonucleotide
  Sense strand starting at position 3471 of SEQ ID NO: 914540
ccaggauugguaugcauga

SEQ ID NO: 1011805 - RNA, 19 nt, Artificial Sequence
  Description of Artificial Sequence: Synthetic oligonucleotide
  Antisense strand to SEQ ID NO: 1011804
ucaugcauaccaauccugg

SEQ ID NO: 1011806 - RNA, 19 nt, Artificial Sequence
  Description of Artificial Sequence: Synthetic oligonucleotide
  Sense strand starting at position 3476 of SEQ ID NO: 914540
auugguaugcaugaccaau

SEQ ID NO: 1011807 - RNA, 19 nt, Artificial Sequence
  Description of Artificial Sequence: Synthetic oligonucleotide
  Antisense strand to SEQ ID NO: 1011806
auuggucaugcauaccaau

SEQ ID NO: 1011808 - RNA, 19 nt, Artificial Sequence
  Description of Artificial Sequence: Synthetic oligonucleotide
  Sense strand starting at position 3507 of SEQ ID NO: 914540
gugugaauggcauaucacu

SEQ ID NO: 1011809 - RNA, 19 nt, Artificial Sequence
  Description of Artificial Sequence: Synthetic oligonucleotide
  Antisense strand to SEQ ID NO: 1011808
agugauaugccauucacac

SEQ ID NO: 1011810 - RNA, 19 nt, Artificial Sequence
  Description of Artificial Sequence: Synthetic oligonucleotide
  Sense strand starting at position 3705 of SEQ ID NO: 914540
ugaagcaucuggccaacaa

SEQ ID NO: 1011811 - RNA, 19 nt, Artificial Sequence
  Description of Artificial Sequence: Synthetic oligonucleotide
  Antisense strand to SEQ ID NO: 1011810
uuguuggccagaugcuuca

SEQ ID NO: 1011812 - RNA, 19 nt, Artificial Sequence
  Description of Artificial Sequence: Synthetic oligonucleotide
  Sense strand starting at position 3815 of SEQ ID NO: 914540
gagagauucugagccagca

SEQ ID NO: 1011813 - RNA, 19 nt, Artificial Sequence
  Description of Artificial Sequence: Synthetic oligonucleotide
  Antisense strand to SEQ ID NO: 1011812
ugcuggcucagaaucucuc

SEQ ID NO: 1011814 - RNA, 19 nt, Artificial Sequence
  Description of Artificial Sequence: Synthetic oligonucleotide
  Sense strand starting at position 127 of SEQ ID NO: 914541
augguuaucagagguggga

SEQ ID NO: 1011815 - RNA, 19 nt, Artificial Sequence
  Description of Artificial Sequence: Synthetic oligonucleotide
  Antisense strand to SEQ ID NO: 1011814
ucccaccucugauaaccau

SEQ ID NO: 1011816 - RNA, 19 nt, Artificial Sequence
  Description of Artificial Sequence: Synthetic oligonucleotide
  Sense strand starting at position 191 of SEQ ID NO: 914541
augaguuagacccgauauu

SEQ ID NO: 1011817 - RNA, 19 nt, Artificial Sequence
  Description of Artificial Sequence: Synthetic oligonucleotide
  Antisense strand to SEQ ID NO: 1011816
aauaucgggucuaacucau

SEQ ID NO: 1011818 - RNA, 19 nt, Artificial Sequence
  Description of Artificial Sequence: Synthetic oligonucleotide
  Sense strand starting at position 267 of SEQ ID NO: 914541
cugaaaguguaacuggauu

SEQ ID NO: 1011819 - RNA, 19 nt, Artificial Sequence
  Description of Artificial Sequence: Synthetic oligonucleotide
  Antisense strand to SEQ ID NO: 1011818
aauccaguuacacuuucag

SEQ ID NO: 1011820 - RNA, 19 nt, Artificial Sequence
  Description of Artificial Sequence: Synthetic oligonucleotide
  Sense strand starting at position 275 of SEQ ID NO: 914541
guaacuggauugucacaca

SEQ ID NO: 1011821 - RNA, 19 nt, Artificial Sequence
  Description of Artificial Sequence: Synthetic oligonucleotide
  Antisense strand to SEQ ID NO: 1011820
ugugugacaauccaguuac

SEQ ID NO: 1011822 - RNA, 19 nt, Artificial Sequence
  Description of Artificial Sequence: Synthetic oligonucleotide
  Sense strand starting at position 592 of SEQ ID NO: 914541
aguuaagugcacgauggaa

SEQ ID NO: 1011823 - RNA, 19 nt, Artificial Sequence
  Description of Artificial Sequence: Synthetic oligonucleotide
  Antisense strand to SEQ ID NO: 1011822
uuccaucgugcacuuaacu

SEQ ID NO: 1011824 - RNA, 19 nt, Artificial Sequence
  Description of Artificial Sequence: Synthetic oligonucleotide
  Sense strand starting at position 634 of SEQ ID NO: 914541
ucaaccuguugccuagaga

SEQ ID NO: 1011825 - RNA, 19 nt, Artificial Sequence
  Description of Artificial Sequence: Synthetic oligonucleotide
  Antisense strand to SEQ ID NO: 1011824
ucucuaggcaacagguuga

SEQ ID NO: 1011826 - RNA, 19 nt, Artificial Sequence
  Description of Artificial Sequence: Synthetic oligonucleotide
  Sense strand starting at position 635 of SEQ ID NO: 914541
caaccuguugccuagagaa

SEQ ID NO: 1011827 - RNA, 19 nt, Artificial Sequence
  Description of Artificial Sequence: Synthetic oligonucleotide
  Antisense strand to SEQ ID NO: 1011826
uucucuaggcaacagguug

SEQ ID NO: 1011828 - RNA, 19 nt, Artificial Sequence
  Description of Artificial Sequence: Synthetic oligonucleotide
  Sense strand starting at position 729 of SEQ ID NO: 914541
ucuuuagguuuacuaagau

SEQ ID NO: 1011829 - RNA, 19 nt, Artificial Sequence
  Description of Artificial Sequence: Synthetic oligonucleotide
  Antisense strand to SEQ ID NO: 1011828
aucuuaguaaaccuaaaga

SEQ ID NO: 1011830 - RNA, 19 nt, Artificial Sequence
  Description of Artificial Sequence: Synthetic oligonucleotide
  Sense strand starting at position 780 of SEQ ID NO: 914541
uuuaaagaaguucgcauuu

SEQ ID NO: 1011831 - RNA, 19 nt, Artificial Sequence
  Description of Artificial Sequence: Synthetic oligonucleotide
  Antisense strand to SEQ ID NO: 1011830
aaaugcgaacuucuuuaaa

SEQ ID NO: 1011832 - RNA, 19 nt, Artificial Sequence
  Description of Artificial Sequence: Synthetic oligonucleotide
  Sense strand starting at position 809 of SEQ ID NO: 914541
gucuaucgaagagauccua

SEQ ID NO: 1011833 - RNA, 19 nt, Artificial Sequence
  Description of Artificial Sequence: Synthetic oligonucleotide
  Antisense strand to SEQ ID NO: 1011832
uaggaucucuucgauagac

SEQ ID NO: 1011834 - RNA, 19 nt, Artificial Sequence
  Description of Artificial Sequence: Synthetic oligonucleotide
  Sense strand starting at position 930 of SEQ ID NO: 914541
uaucgaaguuuaccuagau

SEQ ID NO: 1011835 - RNA, 19 nt, Artificial Sequence
  Description of Artificial Sequence: Synthetic oligonucleotide
  Antisense strand to SEQ ID NO: 1011834
aucuagguaaacuucgaua

SEQ ID NO: 1011836 - RNA, 19 nt, Artificial Sequence
  Description of Artificial Sequence: Synthetic oligonucleotide
  Sense strand starting at position 931 of SEQ ID NO: 914541
aucgaaguuuaccuagauc

SEQ ID NO: 1011837 - RNA, 19 nt, Artificial Sequence
  Description of Artificial Sequence: Synthetic oligonucleotide
  Antisense strand to SEQ ID NO: 1011836
gaucuagguaaacuucgau

SEQ ID NO: 1011838 - RNA, 19 nt, Artificial Sequence
  Description of Artificial Sequence: Synthetic oligonucleotide
  Sense strand starting at position 996 of SEQ ID NO: 914541
uuaauuaacguguagcaua

SEQ ID NO: 1011839 - RNA, 19 nt, Artificial Sequence
  Description of Artificial Sequence: Synthetic oligonucleotide
  Antisense strand to SEQ ID NO: 1011838
uaugcuacacguuaauuaa

SEQ ID NO: 1011840 - RNA, 19 nt, Artificial Sequence
  Description of Artificial Sequence: Synthetic oligonucleotide
  Sense strand starting at position 1032 of SEQ ID NO: 914541
augguuucugguuauauua

SEQ ID NO: 1011841 - RNA, 19 nt, Artificial Sequence
  Description of Artificial Sequence: Synthetic oligonucleotide
  Antisense strand to SEQ ID NO: 1011840
uaauauaaccagaaaccau

SEQ ID NO: 1011842 - RNA, 19 nt, Artificial Sequence
  Description of Artificial Sequence: Synthetic oligonucleotide
  Sense strand starting at position 1239 of SEQ ID NO: 914541
ucagcucuggcauaaggua

SEQ ID NO: 1011843 - RNA, 19 nt, Artificial Sequence
  Description of Artificial Sequence: Synthetic oligonucleotide
  Antisense strand to SEQ ID NO: 1011842
uaccuuaugccagagcuga

SEQ ID NO: 1011844 - RNA, 19 nt, Artificial Sequence
  Description of Artificial Sequence: Synthetic oligonucleotide
  Sense strand starting at position 1403 of SEQ ID NO: 914541
gcaugcucaaguuaagaga

SEQ ID NO: 1011845 - RNA, 19 nt, Artificial Sequence
  Description of Artificial Sequence: Synthetic oligonucleotide
  Antisense strand to SEQ ID NO: 1011844
ucucuuaacuugagcaugc

SEQ ID NO: 1011846 - RNA, 19 nt, Artificial Sequence
  Description of Artificial Sequence: Synthetic oligonucleotide
  Sense strand starting at position 1418 of SEQ ID NO: 914541
gagaccuugugccugaaua

SEQ ID NO: 1011847 - RNA, 19 nt, Artificial Sequence
  Description of Artificial Sequence: Synthetic oligonucleotide
  Antisense strand to SEQ ID NO: 1011846
uauucaggcacaaggucuc

SEQ ID NO: 1011848 - RNA, 19 nt, Artificial Sequence
  Description of Artificial Sequence: Synthetic oligonucleotide
  Sense strand starting at position 1419 of SEQ ID NO: 914541
agaccuugugccugaauac

SEQ ID NO: 1011849 - RNA, 19 nt, Artificial Sequence
  Description of Artificial Sequence: Synthetic oligonucleotide
  Antisense strand to SEQ ID NO: 1011848
guauucaggcacaaggucu

SEQ ID NO: 1011850 - RNA, 19 nt, Artificial Sequence
  Description of Artificial Sequence: Synthetic oligonucleotide
  Sense strand starting at position 1420 of SEQ ID NO: 914541
gaccuugugccugaauacu

SEQ ID NO: 1011851 - RNA, 19 nt, Artificial Sequence
  Description of Artificial Sequence: Synthetic oligonucleotide
  Antisense strand to SEQ ID NO: 1011850
aguauucaggcacaagguc

SEQ ID NO: 1011852 - RNA, 19 nt, Artificial Sequence
  Description of Artificial Sequence: Synthetic oligonucleotide
  Sense strand starting at position 2158 of SEQ ID NO: 914541
ugaguuaagcacuaugcua

SEQ ID NO: 1011853 - RNA, 19 nt, Artificial Sequence
  Description of Artificial Sequence: Synthetic oligonucleotide
  Antisense strand to SEQ ID NO: 1011852
uagcauagugcuuaacuca

SEQ ID NO: 1011854 - RNA, 19 nt, Artificial Sequence
  Description of Artificial Sequence: Synthetic oligonucleotide
  Sense strand starting at position 2223 of SEQ ID NO: 914541
gggagaaagugcuuggaga

SEQ ID NO: 1011855 - RNA, 19 nt, Artificial Sequence
  Description of Artificial Sequence: Synthetic oligonucleotide
  Antisense strand to SEQ ID NO: 1011854
ucuccaagcacuuucuccc

SEQ ID NO: 1011856 - RNA, 19 nt, Artificial Sequence
  Description of Artificial Sequence: Synthetic oligonucleotide
  Sense strand starting at position 2224 of SEQ ID NO: 914541
ggagaaagugcuuggagag

SEQ ID NO: 1011857 - RNA, 19 nt, Artificial Sequence
  Description of Artificial Sequence: Synthetic oligonucleotide
  Antisense strand to SEQ ID NO: 1011856
cucuccaagcacuuucucc

SEQ ID NO: 1011858 - RNA, 19 nt, Artificial Sequence
  Description of Artificial Sequence: Synthetic oligonucleotide
  Sense strand starting at position 2225 of SEQ ID NO: 914541
gagaaagugcuuggagaga

SEQ ID NO: 1011859 - RNA, 19 nt, Artificial Sequence
  Description of Artificial Sequence: Synthetic oligonucleotide
  Antisense strand to SEQ ID NO: 1011858
ucucuccaagcacuuucuc

SEQ ID NO: 1011860 - RNA, 19 nt, Artificial Sequence
  Description of Artificial Sequence: Synthetic oligonucleotide
  Sense strand starting at position 2296 of SEQ ID NO: 914541
guggaaacccaguaauccu

SEQ ID NO: 1011861 - RNA, 19 nt, Artificial Sequence
  Description of Artificial Sequence: Synthetic oligonucleotide
  Antisense strand to SEQ ID NO: 1011860
aggauuacuggguuuccac

SEQ ID NO: 1011862 - RNA, 19 nt, Artificial Sequence
  Description of Artificial Sequence: Synthetic oligonucleotide
  Sense strand starting at position 2355 of SEQ ID NO: 914541
uacuauugggaagguaauu

SEQ ID NO: 1011863 - RNA, 19 nt, Artificial Sequence
  Description of Artificial Sequence: Synthetic oligonucleotide
  Antisense strand to SEQ ID NO: 1011862
aauuaccuucccaauagua

SEQ ID NO: 1011864 - RNA, 19 nt, Artificial Sequence
  Description of Artificial Sequence: Synthetic oligonucleotide
  Sense strand starting at position 2453 of SEQ ID NO: 914541
cagguagggcuggaguuau

SEQ ID NO: 1011865 - RNA, 19 nt, Artificial Sequence
  Description of Artificial Sequence: Synthetic oligonucleotide
  Antisense strand to SEQ ID NO: 1011864
auaacuccagcccuaccug

SEQ ID NO: 1011866 - RNA, 19 nt, Artificial Sequence
  Description of Artificial Sequence: Synthetic oligonucleotide
  Sense strand starting at position 2543 of SEQ ID NO: 914541
cugagcacccaguagauua

SEQ ID NO: 1011867 - RNA, 19 nt, Artificial Sequence
  Description of Artificial Sequence: Synthetic oligonucleotide
  Antisense strand to SEQ ID NO: 1011866
uaaucuacugggugcucag

SEQ ID NO: 1011868 - RNA, 19 nt, Artificial Sequence
  Description of Artificial Sequence: Synthetic oligonucleotide
  Sense strand starting at position 2638 of SEQ ID NO: 914541
ugcaaucagccauaguacu

SEQ ID NO: 1011869 - RNA, 19 nt, Artificial Sequence
  Description of Artificial Sequence: Synthetic oligonucleotide
  Antisense strand to SEQ ID NO: 1011868
aguacuauggcugauugca

SEQ ID NO: 1011870 - RNA, 19 nt, Artificial Sequence
  Description of Artificial Sequence: Synthetic oligonucleotide
  Sense strand starting at position 2950 of SEQ ID NO: 914541
auguguugacagcacuuua

SEQ ID NO: 1011871 - RNA, 19 nt, Artificial Sequence
  Description of Artificial Sequence: Synthetic oligonucleotide
  Antisense strand to SEQ ID NO: 1011870
uaaagugcugucaacacau

SEQ ID NO: 1011872 - RNA, 19 nt, Artificial Sequence
  Description of Artificial Sequence: Synthetic oligonucleotide
  Sense strand starting at position 2955 of SEQ ID NO: 914541
uugacagcacuuuaagagu

SEQ ID NO: 1011873 - RNA, 19 nt, Artificial Sequence
  Description of Artificial Sequence: Synthetic oligonucleotide
  Antisense strand to SEQ ID NO: 1011872
acucuuaaagugcugucaa

SEQ ID NO: 1011874 - RNA, 19 nt, Artificial Sequence
  Description of Artificial Sequence: Synthetic oligonucleotide
  Sense strand starting at position 3021 of SEQ ID NO: 914541
gguagagugacaugaauac

SEQ ID NO: 1011875 - RNA, 19 nt, Artificial Sequence
  Description of Artificial Sequence: Synthetic oligonucleotide
  Antisense strand to SEQ ID NO: 1011874
guauucaugucacucuacc

SEQ ID NO: 1011876 - RNA, 19 nt, Artificial Sequence
  Description of Artificial Sequence: Synthetic oligonucleotide
  Sense strand starting at position 3211 of SEQ ID NO: 914541
cuuauauguguguaaucac

SEQ ID NO: 1011877 - RNA, 19 nt, Artificial Sequence
  Description of Artificial Sequence: Synthetic oligonucleotide
  Antisense strand to SEQ ID NO: 1011876
gugauuacacacauauaag

SEQ ID NO: 1011878 - RNA, 19 nt, Artificial Sequence
  Description of Artificial Sequence: Synthetic oligonucleotide
  Sense strand starting at position 3214 of SEQ ID NO: 914541
auauguguguaaucaccaa

SEQ ID NO: 1011879 - RNA, 19 nt, Artificial Sequence
  Description of Artificial Sequence: Synthetic oligonucleotide
  Antisense strand to SEQ ID NO: 1011878
uuggugauuacacacauau

SEQ ID NO: 1011880 - RNA, 19 nt, Artificial Sequence
  Description of Artificial Sequence: Synthetic oligonucleotide
  Sense strand starting at position 3218 of SEQ ID NO: 914541
guguguaaucaccaacaca

SEQ ID NO: 1011881 - RNA, 19 nt, Artificial Sequence
  Description of Artificial Sequence: Synthetic oligonucleotide
  Antisense strand to SEQ ID NO: 1011880
uguguuggugauuacacac

SEQ ID NO: 1011882 - RNA, 19 nt, Artificial Sequence
  Description of Artificial Sequence: Synthetic oligonucleotide
  Sense strand starting at position 3251 of SEQ ID NO: 914541
guucuaucacaaggauucu

SEQ ID NO: 1011883 - RNA, 19 nt, Artificial Sequence
  Description of Artificial Sequence: Synthetic oligonucleotide
  Antisense strand to SEQ ID NO: 1011882
agaauccuugugauagaac

SEQ ID NO: 1011884 - RNA, 19 nt, Artificial Sequence
  Description of Artificial Sequence: Synthetic oligonucleotide
  Sense strand starting at position 3312 of SEQ ID NO: 914541
uguggcaaccacuaauaau

SEQ ID NO: 1011885 - RNA, 19 nt, Artificial Sequence
  Description of Artificial Sequence: Synthetic oligonucleotide
  Antisense strand to SEQ ID NO: 1011884
auuauuagugguugccaca

SEQ ID NO: 1011886 - RNA, 19 nt, Artificial Sequence
  Description of Artificial Sequence: Synthetic oligonucleotide
  Sense strand starting at position 3678 of SEQ ID NO: 914541
acagaauaacuuugagguu

SEQ ID NO: 1011887 - RNA, 19 nt, Artificial Sequence
  Description of Artificial Sequence: Synthetic oligonucleotide
  Antisense strand to SEQ ID NO: 1011886
aaccucaaaguuauucugu

SEQ ID NO: 1011888 - RNA, 19 nt, Artificial Sequence
  Description of Artificial Sequence: Synthetic oligonucleotide
  Sense strand starting at position 3687 of SEQ ID NO: 914541
cuuugagguuucucaugac

SEQ ID NO: 1011889 - RNA, 19 nt, Artificial Sequence
  Description of Artificial Sequence: Synthetic oligonucleotide
  Antisense strand to SEQ ID NO: 1011888
gucaugagaaaccucaaag

SEQ ID NO: 1011890 - RNA, 19 nt, Artificial Sequence
  Description of Artificial Sequence: Synthetic oligonucleotide
  Sense strand starting at position 3782 of SEQ ID NO: 914541
cuacaauugucauuggcag

SEQ ID NO: 1011891 - RNA, 19 nt, Artificial Sequence
  Description of Artificial Sequence: Synthetic oligonucleotide
  Antisense strand to SEQ ID NO: 1011890
cugccaaugacaauuguag

SEQ ID NO: 1011892 - RNA, 19 nt, Artificial Sequence
  Description of Artificial Sequence: Synthetic oligonucleotide
  Sense strand starting at position 3970 of SEQ ID NO: 914541
gagcaaagaccuugucauu

SEQ ID NO: 1011893 - RNA, 19 nt, Artificial Sequence
  Description of Artificial Sequence: Synthetic oligonucleotide
  Antisense strand to SEQ ID NO: 1011892
aaugacaaggucuuugcuc

SEQ ID NO: 1011894 - RNA, 19 nt, Artificial Sequence
  Description of Artificial Sequence: Synthetic oligonucleotide
  Sense strand starting at position 153 of SEQ ID NO: 914542
augguuaucagagguggga

SEQ ID NO: 1011895 - RNA, 19 nt, Artificial Sequence
  Description of Artificial Sequence: Synthetic oligonucleotide
  Antisense strand to SEQ ID NO: 1011894
ucccaccucugauaaccau

SEQ ID NO: 1011896 - RNA, 19 nt, Artificial Sequence
  Description of Artificial Sequence: Synthetic oligonucleotide
  Sense strand starting at position 217 of SEQ ID NO: 914542
augaguuagacccgauauu

SEQ ID NO: 1011897 - RNA, 19 nt, Artificial Sequence
  Description of Artificial Sequence: Synthetic oligonucleotide
  Antisense strand to SEQ ID NO: 1011896
aauaucgggucuaacucau

SEQ ID NO: 1011898 - RNA, 19 nt, Artificial Sequence
  Description of Artificial Sequence: Synthetic oligonucleotide
  Sense strand starting at position 293 of SEQ ID NO: 914542
cugaaaguguaacuggauu

SEQ ID NO: 1011899 - RNA, 19 nt, Artificial Sequence
  Description of Artificial Sequence: Synthetic oligonucleotide
  Antisense strand to SEQ ID NO: 1011898
aauccaguuacacuuucag

SEQ ID NO: 1011900 - RNA, 19 nt, Artificial Sequence
  Description of Artificial Sequence: Synthetic oligonucleotide
  Sense strand starting at position 301 of SEQ ID NO: 914542
guaacuggauugucacaca

SEQ ID NO: 1011901 - RNA, 19 nt, Artificial Sequence
  Description of Artificial Sequence: Synthetic oligonucleotide
  Antisense strand to SEQ ID NO: 1011900
ugugugacaauccaguuac

SEQ ID NO: 1011902 - RNA, 19 nt, Artificial Sequence
  Description of Artificial Sequence: Synthetic oligonucleotide
  Sense strand starting at position 555 of SEQ ID NO: 914542
aauuguuuggguggguaau

SEQ ID NO: 1011903 - RNA, 19 nt, Artificial Sequence
  Description of Artificial Sequence: Synthetic oligonucleotide
  Antisense strand to SEQ ID NO: 1011902
auuacccacccaaacaauu

SEQ ID NO: 1011904 - RNA, 19 nt, Artificial Sequence
  Description of Artificial Sequence: Synthetic oligonucleotide
  Sense strand starting at position 618 of SEQ ID NO: 914542
aguuaagugcacgauggaa

SEQ ID NO: 1011905 - RNA, 19 nt, Artificial Sequence
  Description of Artificial Sequence: Synthetic oligonucleotide
  Antisense strand to SEQ ID NO: 1011904
uuccaucgugcacuuaacu

SEQ ID NO: 1011906 - RNA, 19 nt, Artificial Sequence
  Description of Artificial Sequence: Synthetic oligonucleotide
  Sense strand starting at position 660 of SEQ ID NO: 914542
ucaaccuguugccuagaga

SEQ ID NO: 1011907 - RNA, 19 nt, Artificial Sequence
  Description of Artificial Sequence: Synthetic oligonucleotide
  Antisense strand to SEQ ID NO: 1011906
ucucuaggcaacagguuga

SEQ ID NO: 1011908 - RNA, 19 nt, Artificial Sequence
  Description of Artificial Sequence: Synthetic oligonucleotide
  Sense strand starting at position 661 of SEQ ID NO: 914542
caaccuguugccuagagaa

SEQ ID NO: 1011909 - RNA, 19 nt, Artificial Sequence
  Description of Artificial Sequence: Synthetic oligonucleotide
  Antisense strand to SEQ ID NO: 1011908
uucucuaggcaacagguug

SEQ ID NO: 1011910 - RNA, 19 nt, Artificial Sequence
  Description of Artificial Sequence: Synthetic oligonucleotide
  Sense strand starting at position 755 of SEQ ID NO: 914542
ucuuuagguuuacuaagau

SEQ ID NO: 1011911 - RNA, 19 nt, Artificial Sequence
  Description of Artificial Sequence: Synthetic oligonucleotide
  Antisense strand to SEQ ID NO: 1011910
aucuuaguaaaccuaaaga

SEQ ID NO: 1011912 - RNA, 19 nt, Artificial Sequence
  Description of Artificial Sequence: Synthetic oligonucleotide
  Sense strand starting at position 806 of SEQ ID NO: 914542
uuuaaagaaguucgcauuu

SEQ ID NO: 1011913 - RNA, 19 nt, Artificial Sequence
  Description of Artificial Sequence: Synthetic oligonucleotide
  Antisense strand to SEQ ID NO: 1011912
aaaugcgaacuucuuuaaa

SEQ ID NO: 1011914 - RNA, 19 nt, Artificial Sequence
  Description of Artificial Sequence: Synthetic oligonucleotide
  Sense strand starting at position 835 of SEQ ID NO: 914542
gucuaucgaagagauccua

SEQ ID NO: 1011915 - RNA, 19 nt, Artificial Sequence
  Description of Artificial Sequence: Synthetic oligonucleotide
  Antisense strand to SEQ ID NO: 1011914
uaggaucucuucgauagac

SEQ ID NO: 1011916 - RNA, 19 nt, Artificial Sequence
  Description of Artificial Sequence: Synthetic oligonucleotide
  Sense strand starting at position 956 of SEQ ID NO: 914542
uaucgaaguuuaccuagau

SEQ ID NO: 1011917 - RNA, 19 nt, Artificial Sequence
  Description of Artificial Sequence: Synthetic oligonucleotide
  Antisense strand to SEQ ID NO: 1011916
aucuagguaaacuucgaua

SEQ ID NO: 1011918 - RNA, 19 nt, Artificial Sequence
  Description of Artificial Sequence: Synthetic oligonucleotide
  Sense strand starting at position 957 of SEQ ID NO: 914542
aucgaaguuuaccuagauc

SEQ ID NO: 1011919 - RNA, 19 nt, Artificial Sequence
  Description of Artificial Sequence: Synthetic oligonucleotide
  Antisense strand to SEQ ID NO: 1011918
gaucuagguaaacuucgau

SEQ ID NO: 1011920 - RNA, 19 nt, Artificial Sequence
  Description of Artificial Sequence: Synthetic oligonucleotide
  Sense strand starting at position 1022 of SEQ ID NO: 914542
uuaauuaacguguagcaua

SEQ ID NO: 1011921 - RNA, 19 nt, Artificial Sequence
  Description of Artificial Sequence: Synthetic oligonucleotide
  Antisense strand to SEQ ID NO: 1011920
uaugcuacacguuaauuaa

SEQ ID NO: 1011922 - RNA, 19 nt, Artificial Sequence
  Description of Artificial Sequence: Synthetic oligonucleotide
  Sense strand starting at position 1058 of SEQ ID NO: 914542
augguuucugguuauauua

SEQ ID NO: 1011923 - RNA, 19 nt, Artificial Sequence
  Description of Artificial Sequence: Synthetic oligonucleotide
  Antisense strand to SEQ ID NO: 1011922
uaauauaaccagaaaccau

SEQ ID NO: 1011924 - RNA, 19 nt, Artificial Sequence
  Description of Artificial Sequence: Synthetic oligonucleotide
  Sense strand starting at position 1265 of SEQ ID NO: 914542
ucagcucuggcauaaggua

SEQ ID NO: 1011925 - RNA, 19 nt, Artificial Sequence
  Description of Artificial Sequence: Synthetic oligonucleotide
  Antisense strand to SEQ ID NO: 1011924
uaccuuaugccagagcuga

SEQ ID NO: 1011926 - RNA, 19 nt, Artificial Sequence
  Description of Artificial Sequence: Synthetic oligonucleotide
  Sense strand starting at position 1429 of SEQ ID NO: 914542
gcaugcucaaguuaagaga

SEQ ID NO: 1011927 - RNA, 19 nt, Artificial Sequence
  Description of Artificial Sequence: Synthetic oligonucleotide
  Antisense strand to SEQ ID NO: 1011926
ucucuuaacuugagcaugc

SEQ ID NO: 1011928 - RNA, 19 nt, Artificial Sequence
  Description of Artificial Sequence: Synthetic oligonucleotide
  Sense strand starting at position 1444 of SEQ ID NO: 914542
gagaccuugugccugaaua

SEQ ID NO: 1011929 - RNA, 19 nt, Artificial Sequence
  Description of Artificial Sequence: Synthetic oligonucleotide
  Antisense strand to SEQ ID NO: 1011928
uauucaggcacaaggucuc

SEQ ID NO: 1011930 - RNA, 19 nt, Artificial Sequence
  Description of Artificial Sequence: Synthetic oligonucleotide
  Sense strand starting at position 1445 of SEQ ID NO: 914542
agaccuugugccugaauac

SEQ ID NO: 1011931 - RNA, 19 nt, Artificial Sequence
  Description of Artificial Sequence: Synthetic oligonucleotide
  Antisense strand to SEQ ID NO: 1011930
guauucaggcacaaggucu

SEQ ID NO: 1011932 - RNA, 19 nt, Artificial Sequence
  Description of Artificial Sequence: Synthetic oligonucleotide
  Sense strand starting at position 1446 of SEQ ID NO: 914542
gaccuugugccugaauacu

SEQ ID NO: 1011933 - RNA, 19 nt, Artificial Sequence
  Description of Artificial Sequence: Synthetic oligonucleotide
  Antisense strand to SEQ ID NO: 1011932
aguauucaggcacaagguc

SEQ ID NO: 1011934 - RNA, 19 nt, Artificial Sequence
  Description of Artificial Sequence: Synthetic oligonucleotide
  Sense strand starting at position 2184 of SEQ ID NO: 914542
ugaguuaagcacuaugcua

SEQ ID NO: 1011935 - RNA, 19 nt, Artificial Sequence
  Description of Artificial Sequence: Synthetic oligonucleotide
  Antisense strand to SEQ ID NO: 1011934
uagcauagugcuuaacuca

SEQ ID NO: 1011936 - RNA, 19 nt, Artificial Sequence
  Description of Artificial Sequence: Synthetic oligonucleotide
  Sense strand starting at position 2249 of SEQ ID NO: 914542
gggagaaagugcuuggaga

SEQ ID NO: 1011937 - RNA, 19 nt, Artificial Sequence
  Description of Artificial Sequence: Synthetic oligonucleotide
  Antisense strand to SEQ ID NO: 1011936
ucuccaagcacuuucuccc

SEQ ID NO: 1011938 - RNA, 19 nt, Artificial Sequence
  Description of Artificial Sequence: Synthetic oligonucleotide
  Sense strand starting at position 2250 of SEQ ID NO: 914542
ggagaaagugcuuggagag

SEQ ID NO: 1011939 - RNA, 19 nt, Artificial Sequence
  Description of Artificial Sequence: Synthetic oligonucleotide
  Antisense strand to SEQ ID NO: 1011938
cucuccaagcacuuucucc

SEQ ID NO: 1011940 - RNA, 19 nt, Artificial Sequence
  Description of Artificial Sequence: Synthetic oligonucleotide
  Sense strand starting at position 2251 of SEQ ID NO: 914542
gagaaagugcuuggagaga

SEQ ID NO: 1011941 - RNA, 19 nt, Artificial Sequence
  Description of Artificial Sequence: Synthetic oligonucleotide
  Antisense strand to SEQ ID NO: 1011940
ucucuccaagcacuuucuc

SEQ ID NO: 1011942 - RNA, 19 nt, Artificial Sequence
  Description of Artificial Sequence: Synthetic oligonucleotide
  Sense strand starting at position 2322 of SEQ ID NO: 914542
guggaaacccaguaauccu

SEQ ID NO: 1011943 - RNA, 19 nt, Artificial Sequence
  Description of Artificial Sequence: Synthetic oligonucleotide
  Antisense strand to SEQ ID NO: 1011942
aggauuacuggguuuccac

SEQ ID NO: 1011944 - RNA, 19 nt, Artificial Sequence
  Description of Artificial Sequence: Synthetic oligonucleotide
  Sense strand starting at position 2381 of SEQ ID NO: 914542
uacuauugggaagguaauu

SEQ ID NO: 1011945 - RNA, 19 nt, Artificial Sequence
  Description of Artificial Sequence: Synthetic oligonucleotide
  Antisense strand to SEQ ID NO: 1011944
aauuaccuucccaauagua

SEQ ID NO: 1011946 - RNA, 19 nt, Artificial Sequence
  Description of Artificial Sequence: Synthetic oligonucleotide
  Sense strand starting at position 2479 of SEQ ID NO: 914542
cagguagggcuggaguuau

SEQ ID NO: 1011947 - RNA, 19 nt, Artificial Sequence
  Description of Artificial Sequence: Synthetic oligonucleotide
  Antisense strand to SEQ ID NO: 1011946
auaacuccagcccuaccug

SEQ ID NO: 1011948 - RNA, 19 nt, Artificial Sequence
  Description of Artificial Sequence: Synthetic oligonucleotide
  Sense strand starting at position 2569 of SEQ ID NO: 914542
cugagcacccaguagauua

SEQ ID NO: 1011949 - RNA, 19 nt, Artificial Sequence
  Description of Artificial Sequence: Synthetic oligonucleotide
  Antisense strand to SEQ ID NO: 1011948
uaaucuacugggugcucag

SEQ ID NO: 1011950 - RNA, 19 nt, Artificial Sequence
  Description of Artificial Sequence: Synthetic oligonucleotide
  Sense strand starting at position 2664 of SEQ ID NO: 914542
ugcaaucagccauaguacu

SEQ ID NO: 1011951 - RNA, 19 nt, Artificial Sequence
  Description of Artificial Sequence: Synthetic oligonucleotide
  Antisense strand to SEQ ID NO: 1011950
aguacuauggcugauugca

SEQ ID NO: 1011952 - RNA, 19 nt, Artificial Sequence
  Description of Artificial Sequence: Synthetic oligonucleotide
  Sense strand starting at position 2976 of SEQ ID NO: 914542
auguguugacagcacuuua

SEQ ID NO: 1011953 - RNA, 19 nt, Artificial Sequence
  Description of Artificial Sequence: Synthetic oligonucleotide
  Antisense strand to SEQ ID NO: 1011952
uaaagugcugucaacacau

SEQ ID NO: 1011954 - RNA, 19 nt, Artificial Sequence
  Description of Artificial Sequence: Synthetic oligonucleotide
  Sense strand starting at position 2981 of SEQ ID NO: 914542
uugacagcacuuuaagagu

SEQ ID NO: 1011955 - RNA, 19 nt, Artificial Sequence
  Description of Artificial Sequence: Synthetic oligonucleotide
  Antisense strand to SEQ ID NO: 1011954
acucuuaaagugcugucaa

SEQ ID NO: 1011956 - RNA, 19 nt, Artificial Sequence
  Description of Artificial Sequence: Synthetic oligonucleotide
  Sense strand starting at position 3047 of SEQ ID NO: 914542
gguagagugacaugaauac

SEQ ID NO: 1011957 - RNA, 19 nt, Artificial Sequence
  Description of Artificial Sequence: Synthetic oligonucleotide
  Antisense strand to SEQ ID NO: 1011956
guauucaugucacucuacc

SEQ ID NO: 1011958 - RNA, 19 nt, Artificial Sequence
  Description of Artificial Sequence: Synthetic oligonucleotide
  Sense strand starting at position 3237 of SEQ ID NO: 914542
cuuauauguguguaaucac

SEQ ID NO: 1011959 - RNA, 19 nt, Artificial Sequence
  Description of Artificial Sequence: Synthetic oligonucleotide
  Antisense strand to SEQ ID NO: 1011958
gugauuacacacauauaag

SEQ ID NO: 1011960 - RNA, 19 nt, Artificial Sequence
  Description of Artificial Sequence: Synthetic oligonucleotide
  Sense strand starting at position 3240 of SEQ ID NO: 914542
auauguguguaaucaccaa

SEQ ID NO: 1011961 - RNA, 19 nt, Artificial Sequence
  Description of Artificial Sequence: Synthetic oligonucleotide
  Antisense strand to SEQ ID NO: 1011960
uuggugauuacacacauau

SEQ ID NO: 1011962 - RNA, 19 nt, Artificial Sequence
  Description of Artificial Sequence: Synthetic oligonucleotide
  Sense strand starting at position 3244 of SEQ ID NO: 914542
guguguaaucaccaacaca

SEQ ID NO: 1011963 - RNA, 19 nt, Artificial Sequence
  Description of Artificial Sequence: Synthetic oligonucleotide
  Antisense strand to SEQ ID NO: 1011962
uguguuggugauuacacac

SEQ ID NO: 1011964 - RNA, 19 nt, Artificial Sequence
  Description of Artificial Sequence: Synthetic oligonucleotide
  Sense strand starting at position 3277 of SEQ ID NO: 914542
guucuaucacaaggauucu

SEQ ID NO: 1011965 - RNA, 19 nt, Artificial Sequence
  Description of Artificial Sequence: Synthetic oligonucleotide
  Antisense strand to SEQ ID NO: 1011964
agaauccuugugauagaac

SEQ ID NO: 1011966 - RNA, 19 nt, Artificial Sequence
  Description of Artificial Sequence: Synthetic oligonucleotide
  Sense strand starting at position 3338 of SEQ ID NO: 914542
uguggcaaccacuaauaau

SEQ ID NO: 1011967 - RNA, 19 nt, Artificial Sequence
  Description of Artificial Sequence: Synthetic oligonucleotide
  Antisense strand to SEQ ID NO: 1011966
auuauuagugguugccaca

SEQ ID NO: 1011968 - RNA, 19 nt, Artificial Sequence
  Description of Artificial Sequence: Synthetic oligonucleotide
  Sense strand starting at position 3704 of SEQ ID NO: 914542
acagaauaacuuugagguu

SEQ ID NO: 1011969 - RNA, 19 nt, Artificial Sequence
  Description of Artificial Sequence: Synthetic oligonucleotide
  Antisense strand to SEQ ID NO: 1011968
aaccucaaaguuauucugu

SEQ ID NO: 1011970 - RNA, 19 nt, Artificial Sequence
  Description of Artificial Sequence: Synthetic oligonucleotide
  Sense strand starting at position 3713 of SEQ ID NO: 914542
cuuugagguuucucaugac

SEQ ID NO: 1011971 - RNA, 19 nt, Artificial Sequence
  Description of Artificial Sequence: Synthetic oligonucleotide
  Antisense strand to SEQ ID NO: 1011970
gucaugagaaaccucaaag

SEQ ID NO: 1011972 - RNA, 19 nt, Artificial Sequence
  Description of Artificial Sequence: Synthetic oligonucleotide
  Sense strand starting at position 3808 of SEQ ID NO: 914542
cuacaauugucauuggcag

SEQ ID NO: 1011973 - RNA, 19 nt, Artificial Sequence
  Description of Artificial Sequence: Synthetic oligonucleotide
  Antisense strand to SEQ ID NO: 1011972
cugccaaugacaauuguag

SEQ ID NO: 1011974 - RNA, 19 nt, Artificial Sequence
  Description of Artificial Sequence: Synthetic oligonucleotide
  Sense strand starting at position 164 of SEQ ID NO: 914543
augguuaucagagguggga

SEQ ID NO: 1011975 - RNA, 19 nt, Artificial Sequence
  Description of Artificial Sequence: Synthetic oligonucleotide
  Antisense strand to SEQ ID NO: 1011974
ucccaccucugauaaccau

SEQ ID NO: 1011976 - RNA, 19 nt, Artificial Sequence
  Description of Artificial Sequence: Synthetic oligonucleotide
  Sense strand starting at position 228 of SEQ ID NO: 914543
augaguuagacccgauauu

SEQ ID NO: 1011977 - RNA, 19 nt, Artificial Sequence
  Description of Artificial Sequence: Synthetic oligonucleotide
  Antisense strand to SEQ ID NO: 1011976
aauaucgggucuaacucau

SEQ ID NO: 1011978 - RNA, 19 nt, Artificial Sequence
  Description of Artificial Sequence: Synthetic oligonucleotide
  Sense strand starting at position 304 of SEQ ID NO: 914543
cugaaaguguaacuggauu

SEQ ID NO: 1011979 - RNA, 19 nt, Artificial Sequence
  Description of Artificial Sequence: Synthetic oligonucleotide
  Antisense strand to SEQ ID NO: 1011978
aauccaguuacacuuucag

SEQ ID NO: 1011980 - RNA, 19 nt, Artificial Sequence
  Description of Artificial Sequence: Synthetic oligonucleotide
  Sense strand starting at position 312 of SEQ ID NO: 914543
guaacuggauugucacaca

SEQ ID NO: 1011981 - RNA, 19 nt, Artificial Sequence
  Description of Artificial Sequence: Synthetic oligonucleotide
  Antisense strand to SEQ ID NO: 1011980
ugugugacaauccaguuac

SEQ ID NO: 1011982 - RNA, 19 nt, Artificial Sequence
  Description of Artificial Sequence: Synthetic oligonucleotide
  Sense strand starting at position 566 of SEQ ID NO: 914543
aauuguuuggguggguaau

SEQ ID NO: 1011983 - RNA, 19 nt, Artificial Sequence
  Description of Artificial Sequence: Synthetic oligonucleotide
  Antisense strand to SEQ ID NO: 1011982
auuacccacccaaacaauu

SEQ ID NO: 1011984 - RNA, 19 nt, Artificial Sequence
  Description of Artificial Sequence: Synthetic oligonucleotide
  Sense strand starting at position 629 of SEQ ID NO: 914543
aguuaagugcacgauggaa

SEQ ID NO: 1011985 - RNA, 19 nt, Artificial Sequence
  Description of Artificial Sequence: Synthetic oligonucleotide
  Antisense strand to SEQ ID NO: 1011984
uuccaucgugcacuuaacu

SEQ ID NO: 1011986 - RNA, 19 nt, Artificial Sequence
  Description of Artificial Sequence: Synthetic oligonucleotide
  Sense strand starting at position 671 of SEQ ID NO: 914543
ucaaccuguugccuagaga

SEQ ID NO: 1011987 - RNA, 19 nt, Artificial Sequence
  Description of Artificial Sequence: Synthetic oligonucleotide
  Antisense strand to SEQ ID NO: 1011986
ucucuaggcaacagguuga

SEQ ID NO: 1011988 - RNA, 19 nt, Artificial Sequence
  Description of Artificial Sequence: Synthetic oligonucleotide
  Sense strand starting at position 672 of SEQ ID NO: 914543
caaccuguugccuagagaa

SEQ ID NO: 1011989 - RNA, 19 nt, Artificial Sequence
  Description of Artificial Sequence: Synthetic oligonucleotide
  Antisense strand to SEQ ID NO: 1011988
uucucuaggcaacagguug

SEQ ID NO: 1011990 - RNA, 19 nt, Artificial Sequence
  Description of Artificial Sequence: Synthetic oligonucleotide
  Sense strand starting at position 766 of SEQ ID NO: 914543
ucuuuagguuuacuaagau

SEQ ID NO: 1011991 - RNA, 19 nt, Artificial Sequence
  Description of Artificial Sequence: Synthetic oligonucleotide
  Antisense strand to SEQ ID NO: 1011990
aucuuaguaaaccuaaaga

SEQ ID NO: 1011992 - RNA, 19 nt, Artificial Sequence
  Description of Artificial Sequence: Synthetic oligonucleotide
  Sense strand starting at position 817 of SEQ ID NO: 914543
uuuaaagaaguucgcauuu

SEQ ID NO: 1011993 - RNA, 19 nt, Artificial Sequence
  Description of Artificial Sequence: Synthetic oligonucleotide
  Antisense strand to SEQ ID NO: 1011992
aaaugcgaacuucuuuaaa

SEQ ID NO: 1011994 - RNA, 19 nt, Artificial Sequence
  Description of Artificial Sequence: Synthetic oligonucleotide
  Sense strand starting at position 846 of SEQ ID NO: 914543
gucuaucgaagagauccua

SEQ ID NO: 1011995 - RNA, 19 nt, Artificial Sequence
  Description of Artificial Sequence: Synthetic oligonucleotide
  Antisense strand to SEQ ID NO: 1011994
uaggaucucuucgauagac

SEQ ID NO: 1011996 - RNA, 19 nt, Artificial Sequence
  Description of Artificial Sequence: Synthetic oligonucleotide
  Sense strand starting at position 967 of SEQ ID NO: 914543
uaucgaaguuuaccuagau

SEQ ID NO: 1011997 - RNA, 19 nt, Artificial Sequence
  Description of Artificial Sequence: Synthetic oligonucleotide
  Antisense strand to SEQ ID NO: 1011996
aucuagguaaacuucgaua

SEQ ID NO: 1011998 - RNA, 19 nt, Artificial Sequence
  Description of Artificial Sequence: Synthetic oligonucleotide
  Sense strand starting at position 968 of SEQ ID NO: 914543
aucgaaguuuaccuagauc

SEQ ID NO: 1011999 - RNA, 19 nt, Artificial Sequence
  Description of Artificial Sequence: Synthetic oligonucleotide
  Antisense strand to SEQ ID NO: 1011998
gaucuagguaaacuucgau

SEQ ID NO: 1012000 - RNA, 19 nt, Artificial Sequence
  Description of Artificial Sequence: Synthetic oligonucleotide
  Sense strand starting at position 1033 of SEQ ID NO: 914543
uuaauuaacguguagcaua

SEQ ID NO: 1012001 - RNA, 19 nt, Artificial Sequence
  Description of Artificial Sequence: Synthetic oligonucleotide
  Antisense strand to SEQ ID NO: 1012000
uaugcuacacguuaauuaa

SEQ ID NO: 1012002 - RNA, 19 nt, Artificial Sequence
  Description of Artificial Sequence: Synthetic oligonucleotide
  Sense strand starting at position 1069 of SEQ ID NO: 914543
augguuucugguuauauua

SEQ ID NO: 1012003 - RNA, 19 nt, Artificial Sequence
  Description of Artificial Sequence: Synthetic oligonucleotide
  Antisense strand to SEQ ID NO: 1012002
uaauauaaccagaaaccau

SEQ ID NO: 1012004 - RNA, 19 nt, Artificial Sequence
  Description of Artificial Sequence: Synthetic oligonucleotide
  Sense strand starting at position 1276 of SEQ ID NO: 914543
ucagcucuggcauaaggua

SEQ ID NO: 1012005 - RNA, 19 nt, Artificial Sequence
  Description of Artificial Sequence: Synthetic oligonucleotide
  Antisense strand to SEQ ID NO: 1012004
uaccuuaugccagagcuga

SEQ ID NO: 1012006 - RNA, 19 nt, Artificial Sequence
  Description of Artificial Sequence: Synthetic oligonucleotide
  Sense strand starting at position 1440 of SEQ ID NO: 914543
gcaugcucaaguuaagaga

SEQ ID NO: 1012007 - RNA, 19 nt, Artificial Sequence
  Description of Artificial Sequence: Synthetic oligonucleotide
  Antisense strand to SEQ ID NO: 1012006
ucucuuaacuugagcaugc

SEQ ID NO: 1012008 - RNA, 19 nt, Artificial Sequence
  Description of Artificial Sequence: Synthetic oligonucleotide
  Sense strand starting at position 1455 of SEQ ID NO: 914543
gagaccuugugccugaaua

SEQ ID NO: 1012009 - RNA, 19 nt, Artificial Sequence
  Description of Artificial Sequence: Synthetic oligonucleotide
  Antisense strand to SEQ ID NO: 1012008
uauucaggcacaaggucuc

SEQ ID NO: 1012010 - RNA, 19 nt, Artificial Sequence
  Description of Artificial Sequence: Synthetic oligonucleotide
  Sense strand starting at position 1456 of SEQ ID NO: 914543
agaccuugugccugaauac

SEQ ID NO: 1012011 - RNA, 19 nt, Artificial Sequence
  Description of Artificial Sequence: Synthetic oligonucleotide
  Antisense strand to SEQ ID NO: 1012010
guauucaggcacaaggucu

SEQ ID NO: 1012012 - RNA, 19 nt, Artificial Sequence
  Description of Artificial Sequence: Synthetic oligonucleotide
  Sense strand starting at position 1457 of SEQ ID NO: 914543
gaccuugugccugaauacu

SEQ ID NO: 1012013 - RNA, 19 nt, Artificial Sequence
  Description of Artificial Sequence: Synthetic oligonucleotide
  Antisense strand to SEQ ID NO: 1012012
aguauucaggcacaagguc

SEQ ID NO: 1012014 - RNA, 19 nt, Artificial Sequence
  Description of Artificial Sequence: Synthetic oligonucleotide
  Sense strand starting at position 2195 of SEQ ID NO: 914543
ugaguuaagcacuaugcua

SEQ ID NO: 1012015 - RNA, 19 nt, Artificial Sequence
  Description of Artificial Sequence: Synthetic oligonucleotide
  Antisense strand to SEQ ID NO: 1012014
uagcauagugcuuaacuca

SEQ ID NO: 1012016 - RNA, 19 nt, Artificial Sequence
  Description of Artificial Sequence: Synthetic oligonucleotide
  Sense strand starting at position 2260 of SEQ ID NO: 914543
gggagaaagugcuuggaga

SEQ ID NO: 1012017 - RNA, 19 nt, Artificial Sequence
  Description of Artificial Sequence: Synthetic oligonucleotide
  Antisense strand to SEQ ID NO: 1012016
ucuccaagcacuuucuccc

SEQ ID NO: 1012018 - RNA, 19 nt, Artificial Sequence
  Description of Artificial Sequence: Synthetic oligonucleotide
  Sense strand starting at position 2261 of SEQ ID NO: 914543
ggagaaagugcuuggagag

SEQ ID NO: 1012019 - RNA, 19 nt, Artificial Sequence
  Description of Artificial Sequence: Synthetic oligonucleotide
  Antisense strand to SEQ ID NO: 1012018
cucuccaagcacuuucucc

SEQ ID NO: 1012020 - RNA, 19 nt, Artificial Sequence
  Description of Artificial Sequence: Synthetic oligonucleotide
  Sense strand starting at position 2262 of SEQ ID NO: 914543
gagaaagugcuuggagaga

SEQ ID NO: 1012021 - RNA, 19 nt, Artificial Sequence
  Description of Artificial Sequence: Synthetic oligonucleotide
  Antisense strand to SEQ ID NO: 1012020
ucucuccaagcacuuucuc

SEQ ID NO: 1012022 - RNA, 19 nt, Artificial Sequence
  Description of Artificial Sequence: Synthetic oligonucleotide
  Sense strand starting at position 2333 of SEQ ID NO: 914543
guggaaacccaguaauccu

SEQ ID NO: 1012023 - RNA, 19 nt, Artificial Sequence
  Description of Artificial Sequence: Synthetic oligonucleotide
  Antisense strand to SEQ ID NO: 1012022
aggauuacuggguuuccac

SEQ ID NO: 1012024 - RNA, 19 nt, Artificial Sequence
  Description of Artificial Sequence: Synthetic oligonucleotide
  Sense strand starting at position 2392 of SEQ ID NO: 914543
uacuauugggaagguaauu

SEQ ID NO: 1012025 - RNA, 19 nt, Artificial Sequence
  Description of Artificial Sequence: Synthetic oligonucleotide
  Antisense strand to SEQ ID NO: 1012024
aauuaccuucccaauagua

SEQ ID NO: 1012026 - RNA, 19 nt, Artificial Sequence
  Description of Artificial Sequence: Synthetic oligonucleotide
  Sense strand starting at position 2490 of SEQ ID NO: 914543
cagguagggcuggaguuau

SEQ ID NO: 1012027 - RNA, 19 nt, Artificial Sequence
  Description of Artificial Sequence: Synthetic oligonucleotide
  Antisense strand to SEQ ID NO: 1012026
auaacuccagcccuaccug

SEQ ID NO: 1012028 - RNA, 19 nt, Artificial Sequence
  Description of Artificial Sequence: Synthetic oligonucleotide
  Sense strand starting at position 2580 of SEQ ID NO: 914543
cugagcacccaguagauua

SEQ ID NO: 1012029 - RNA, 19 nt, Artificial Sequence
  Description of Artificial Sequence: Synthetic oligonucleotide
  Antisense strand to SEQ ID NO: 1012028
uaaucuacugggugcucag

SEQ ID NO: 1012030 - RNA, 19 nt, Artificial Sequence
  Description of Artificial Sequence: Synthetic oligonucleotide
  Sense strand starting at position 2675 of SEQ ID NO: 914543
ugcaaucagccauaguacu

SEQ ID NO: 1012031 - RNA, 19 nt, Artificial Sequence
  Description of Artificial Sequence: Synthetic oligonucleotide
  Antisense strand to SEQ ID NO: 1012030
aguacuauggcugauugca

SEQ ID NO: 1012032 - RNA, 19 nt, Artificial Sequence
  Description of Artificial Sequence: Synthetic oligonucleotide
  Sense strand starting at position 2987 of SEQ ID NO: 914543
auguguugacagcacuuua

SEQ ID NO: 1012033 - RNA, 19 nt, Artificial Sequence
  Description of Artificial Sequence: Synthetic oligonucleotide
  Antisense strand to SEQ ID NO: 1012032
uaaagugcugucaacacau

SEQ ID NO: 1012034 - RNA, 19 nt, Artificial Sequence
  Description of Artificial Sequence: Synthetic oligonucleotide
  Sense strand starting at position 2992 of SEQ ID NO: 914543
uugacagcacuuuaagagu

SEQ ID NO: 1012035 - RNA, 19 nt, Artificial Sequence
  Description of Artificial Sequence: Synthetic oligonucleotide
  Antisense strand to SEQ ID NO: 1012034
acucuuaaagugcugucaa

SEQ ID NO: 1012036 - RNA, 19 nt, Artificial Sequence
  Description of Artificial Sequence: Synthetic oligonucleotide
  Sense strand starting at position 3058 of SEQ ID NO: 914543
gguagagugacaugaauac

SEQ ID NO: 1012037 - RNA, 19 nt, Artificial Sequence
  Description of Artificial Sequence: Synthetic oligonucleotide
  Antisense strand to SEQ ID NO: 1012036
guauucaugucacucuacc

SEQ ID NO: 1012038 - RNA, 19 nt, Artificial Sequence
  Description of Artificial Sequence: Synthetic oligonucleotide
  Sense strand starting at position 3248 of SEQ ID NO: 914543
cuuauauguguguaaucac

SEQ ID NO: 1012039 - RNA, 19 nt, Artificial Sequence
  Description of Artificial Sequence: Synthetic oligonucleotide
  Antisense strand to SEQ ID NO: 1012038
gugauuacacacauauaag

SEQ ID NO: 1012040 - RNA, 19 nt, Artificial Sequence
  Description of Artificial Sequence: Synthetic oligonucleotide
  Sense strand starting at position 3251 of SEQ ID NO: 914543
auauguguguaaucaccaa

SEQ ID NO: 1012041 - RNA, 19 nt, Artificial Sequence
  Description of Artificial Sequence: Synthetic oligonucleotide
  Antisense strand to SEQ ID NO: 1012040
uuggugauuacacacauau

SEQ ID NO: 1012042 - RNA, 19 nt, Artificial Sequence
  Description of Artificial Sequence: Synthetic oligonucleotide
  Sense strand starting at position 3255 of SEQ ID NO: 914543
guguguaaucaccaacaca

SEQ ID NO: 1012043 - RNA, 19 nt, Artificial Sequence
  Description of Artificial Sequence: Synthetic oligonucleotide
  Antisense strand to SEQ ID NO: 1012042
uguguuggugauuacacac

SEQ ID NO: 1012044 - RNA, 19 nt, Artificial Sequence
  Description of Artificial Sequence: Synthetic oligonucleotide
  Sense strand starting at position 3288 of SEQ ID NO: 914543
guucuaucacaaggauucu

SEQ ID NO: 1012045 - RNA, 19 nt, Artificial Sequence
  Description of Artificial Sequence: Synthetic oligonucleotide
  Antisense strand to SEQ ID NO: 1012044
agaauccuugugauagaac

SEQ ID NO: 1012046 - RNA, 19 nt, Artificial Sequence
  Description of Artificial Sequence: Synthetic oligonucleotide
  Sense strand starting at position 3349 of SEQ ID NO: 914543
uguggcaaccacuaauaau

SEQ ID NO: 1012047 - RNA, 19 nt, Artificial Sequence
  Description of Artificial Sequence: Synthetic oligonucleotide
  Antisense strand to SEQ ID NO: 1012046
auuauuagugguugccaca

SEQ ID NO: 1012048 - RNA, 19 nt, Artificial Sequence
  Description of Artificial Sequence: Synthetic oligonucleotide
  Sense strand starting at position 3715 of SEQ ID NO: 914543
acagaauaacuuugagguu

SEQ ID NO: 1012049 - RNA, 19 nt, Artificial Sequence
  Description of Artificial Sequence: Synthetic oligonucleotide
  Antisense strand to SEQ ID NO: 1012048
aaccucaaaguuauucugu

SEQ ID NO: 1012050 - RNA, 19 nt, Artificial Sequence
  Description of Artificial Sequence: Synthetic oligonucleotide
  Sense strand starting at position 3724 of SEQ ID NO: 914543
cuuugagguuucucaugac

SEQ ID NO: 1012051 - RNA, 19 nt, Artificial Sequence
  Description of Artificial Sequence: Synthetic oligonucleotide
  Antisense strand to SEQ ID NO: 1012050
gucaugagaaaccucaaag

SEQ ID NO: 1012052 - RNA, 19 nt, Artificial Sequence
  Description of Artificial Sequence: Synthetic oligonucleotide
  Sense strand starting at position 3819 of SEQ ID NO: 914543
cuacaauugucauuggcag

SEQ ID NO: 1012053 - RNA, 19 nt, Artificial Sequence
  Description of Artificial Sequence: Synthetic oligonucleotide
  Antisense strand to SEQ ID NO: 1012052
cugccaaugacaauuguag

SEQ ID NO: 1012054 - RNA, 19 nt, Artificial Sequence
  Description of Artificial Sequence: Synthetic oligonucleotide
  Sense strand starting at position 171 of SEQ ID NO: 914544
uggcuaugacuucgucguu

SEQ ID NO: 1012055 - RNA, 19 nt, Artificial Sequence
  Description of Artificial Sequence: Synthetic oligonucleotide
  Antisense strand to SEQ ID NO: 1012054
aacgacgaagucauagcca

SEQ ID NO: 1012056 - RNA, 19 nt, Artificial Sequence
  Description of Artificial Sequence: Synthetic oligonucleotide
  Sense strand starting at position 240 of SEQ ID NO: 914544
ucggguaggccuugucaau

SEQ ID NO: 1012057 - RNA, 19 nt, Artificial Sequence
  Description of Artificial Sequence: Synthetic oligonucleotide
  Antisense strand to SEQ ID NO: 1012056
auugacaaggccuacccga

SEQ ID NO: 1012058 - RNA, 19 nt, Artificial Sequence
  Description of Artificial Sequence: Synthetic oligonucleotide
  Sense strand starting at position 474 of SEQ ID NO: 914544
gggcgauaaaucuggguua

SEQ ID NO: 1012059 - RNA, 19 nt, Artificial Sequence
  Description of Artificial Sequence: Synthetic oligonucleotide
  Antisense strand to SEQ ID NO: 1012058
uaacccagauuuaucgccc

SEQ ID NO: 1012060 - RNA, 19 nt, Artificial Sequence
  Description of Artificial Sequence: Synthetic oligonucleotide
  Sense strand starting at position 475 of SEQ ID NO: 914544
ggcgauaaaucuggguuau

SEQ ID NO: 1012061 - RNA, 19 nt, Artificial Sequence
  Description of Artificial Sequence: Synthetic oligonucleotide
  Antisense strand to SEQ ID NO: 1012060
auaacccagauuuaucgcc

SEQ ID NO: 1012062 - RNA, 19 nt, Artificial Sequence
  Description of Artificial Sequence: Synthetic oligonucleotide
  Sense strand starting at position 476 of SEQ ID NO: 914544
gcgauaaaucuggguuaua

SEQ ID NO: 1012063 - RNA, 19 nt, Artificial Sequence
  Description of Artificial Sequence: Synthetic oligonucleotide
  Antisense strand to SEQ ID NO: 1012062
uauaacccagauuuaucgc

SEQ ID NO: 1012064 - RNA, 19 nt, Artificial Sequence
  Description of Artificial Sequence: Synthetic oligonucleotide
  Sense strand starting at position 477 of SEQ ID NO: 914544
cgauaaaucuggguuauaa

SEQ ID NO: 1012065 - RNA, 19 nt, Artificial Sequence
  Description of Artificial Sequence: Synthetic oligonucleotide
  Antisense strand to SEQ ID NO: 1012064
uuauaacccagauuuaucg

SEQ ID NO: 1012066 - RNA, 19 nt, Artificial Sequence
  Description of Artificial Sequence: Synthetic oligonucleotide
  Sense strand starting at position 500 of SEQ ID NO: 914544
ugcccagcagugugagaaa

SEQ ID NO: 1012067 - RNA, 19 nt, Artificial Sequence
  Description of Artificial Sequence: Synthetic oligonucleotide
  Antisense strand to SEQ ID NO: 1012066
uuucucacacugcugggca

SEQ ID NO: 1012068 - RNA, 19 nt, Artificial Sequence
  Description of Artificial Sequence: Synthetic oligonucleotide
  Sense strand starting at position 531 of SEQ ID NO: 914544
ggauucaaggugugcagaa

SEQ ID NO: 1012069 - RNA, 19 nt, Artificial Sequence
  Description of Artificial Sequence: Synthetic oligonucleotide
  Antisense strand to SEQ ID NO: 1012068
uucugcacaccuugaaucc

SEQ ID NO: 1012070 - RNA, 19 nt, Artificial Sequence
  Description of Artificial Sequence: Synthetic oligonucleotide
  Sense strand starting at position 691 of SEQ ID NO: 914544
ggugcugucccagguaaca

SEQ ID NO: 1012071 - RNA, 19 nt, Artificial Sequence
  Description of Artificial Sequence: Synthetic oligonucleotide
  Antisense strand to SEQ ID NO: 1012070
uguuaccugggacagcacc

SEQ ID NO: 1012072 - RNA, 19 nt, Artificial Sequence
  Description of Artificial Sequence: Synthetic oligonucleotide
  Sense strand starting at position 717 of SEQ ID NO: 914544
cgcgaauguccucauagca

SEQ ID NO: 1012073 - RNA, 19 nt, Artificial Sequence
  Description of Artificial Sequence: Synthetic oligonucleotide
  Antisense strand to SEQ ID NO: 1012072
ugcuaugaggacauucgcg

SEQ ID NO: 1012074 - RNA, 19 nt, Artificial Sequence
  Description of Artificial Sequence: Synthetic oligonucleotide
  Sense strand starting at position 770 of SEQ ID NO: 914544
cggaauuugcucugccgga

SEQ ID NO: 1012075 - RNA, 19 nt, Artificial Sequence
  Description of Artificial Sequence: Synthetic oligonucleotide
  Antisense strand to SEQ ID NO: 1012074
uccggcagagcaaauuccg

SEQ ID NO: 1012076 - RNA, 19 nt, Artificial Sequence
  Description of Artificial Sequence: Synthetic oligonucleotide
  Sense strand starting at position 801 of SEQ ID NO: 914544
aggacaugucugcgggaca

SEQ ID NO: 1012077 - RNA, 19 nt, Artificial Sequence
  Description of Artificial Sequence: Synthetic oligonucleotide
  Antisense strand to SEQ ID NO: 1012076
ugucccgcagacauguccu

SEQ ID NO: 1012078 - RNA, 19 nt, Artificial Sequence
  Description of Artificial Sequence: Synthetic oligonucleotide
  Sense strand starting at position 997 of SEQ ID NO: 914544
agugaucugagagguaaau

SEQ ID NO: 1012079 - RNA, 19 nt, Artificial Sequence
  Description of Artificial Sequence: Synthetic oligonucleotide
  Antisense strand to SEQ ID NO: 1012078
auuuaccucucagaucacu

SEQ ID NO: 1012080 - RNA, 19 nt, Artificial Sequence
  Description of Artificial Sequence: Synthetic oligonucleotide
  Sense strand starting at position 1169 of SEQ ID NO: 914544
ccuuccugcucccagagau

SEQ ID NO: 1012081 - RNA, 19 nt, Artificial Sequence
  Description of Artificial Sequence: Synthetic oligonucleotide
  Antisense strand to SEQ ID NO: 1012080
aucucugggagcaggaagg

SEQ ID NO: 1012082 - RNA, 19 nt, Artificial Sequence
  Description of Artificial Sequence: Synthetic oligonucleotide
  Sense strand starting at position 1179 of SEQ ID NO: 914544
cccagagauuuggaggcua

SEQ ID NO: 1012083 - RNA, 19 nt, Artificial Sequence
  Description of Artificial Sequence: Synthetic oligonucleotide
  Antisense strand to SEQ ID NO: 1012082
uagccuccaaaucucuggg

SEQ ID NO: 1012084 - RNA, 19 nt, Artificial Sequence
  Description of Artificial Sequence: Synthetic oligonucleotide
  Sense strand starting at position 1264 of SEQ ID NO: 914544
aguucugagucccagggaa

SEQ ID NO: 1012085 - RNA, 19 nt, Artificial Sequence
  Description of Artificial Sequence: Synthetic oligonucleotide
  Antisense strand to SEQ ID NO: 1012084
uucccugggacucagaacu

SEQ ID NO: 1012086 - RNA, 19 nt, Artificial Sequence
  Description of Artificial Sequence: Synthetic oligonucleotide
  Sense strand starting at position 1266 of SEQ ID NO: 914544
uucugagucccagggaaug

SEQ ID NO: 1012087 - RNA, 19 nt, Artificial Sequence
  Description of Artificial Sequence: Synthetic oligonucleotide
  Antisense strand to SEQ ID NO: 1012086
cauucccugggacucagaa

SEQ ID NO: 1012088 - RNA, 19 nt, Artificial Sequence
  Description of Artificial Sequence: Synthetic oligonucleotide
  Sense strand starting at position 1951 of SEQ ID NO: 914544
cgcguucuugcuccucaua

SEQ ID NO: 1012089 - RNA, 19 nt, Artificial Sequence
  Description of Artificial Sequence: Synthetic oligonucleotide
  Antisense strand to SEQ ID NO: 1012088
uaugaggagcaagaacgcg

SEQ ID NO: 1012090 - RNA, 19 nt, Artificial Sequence
  Description of Artificial Sequence: Synthetic oligonucleotide
  Sense strand starting at position 1952 of SEQ ID NO: 914544
gcguucuugcuccucauaa

SEQ ID NO: 1012091 - RNA, 19 nt, Artificial Sequence
  Description of Artificial Sequence: Synthetic oligonucleotide
  Antisense strand to SEQ ID NO: 1012090
uuaugaggagcaagaacgc

SEQ ID NO: 1012092 - RNA, 19 nt, Artificial Sequence
  Description of Artificial Sequence: Synthetic oligonucleotide
  Sense strand starting at position 1953 of SEQ ID NO: 914544
cguucuugcuccucauaau

SEQ ID NO: 1012093 - RNA, 19 nt, Artificial Sequence
  Description of Artificial Sequence: Synthetic oligonucleotide
  Antisense strand to SEQ ID NO: 1012092
auuaugaggagcaagaacg

SEQ ID NO: 1012094 - RNA, 19 nt, Artificial Sequence
  Description of Artificial Sequence: Synthetic oligonucleotide
  Sense strand starting at position 1954 of SEQ ID NO: 914544
guucuugcuccucauaaug

SEQ ID NO: 1012095 - RNA, 19 nt, Artificial Sequence
  Description of Artificial Sequence: Synthetic oligonucleotide
  Antisense strand to SEQ ID NO: 1012094
cauuaugaggagcaagaac

SEQ ID NO: 1012096 - RNA, 19 nt, Artificial Sequence
  Description of Artificial Sequence: Synthetic oligonucleotide
  Sense strand starting at position 2092 of SEQ ID NO: 914544
aguggauauguucacguga

SEQ ID NO: 1012097 - RNA, 19 nt, Artificial Sequence
  Description of Artificial Sequence: Synthetic oligonucleotide
  Antisense strand to SEQ ID NO: 1012096
ucacgugaacauauccacu

SEQ ID NO: 1012098 - RNA, 19 nt, Artificial Sequence
  Description of Artificial Sequence: Synthetic oligonucleotide
  Sense strand starting at position 2436 of SEQ ID NO: 914544
ucaugcucuugguuaacaa

SEQ ID NO: 1012099 - RNA, 19 nt, Artificial Sequence
  Description of Artificial Sequence: Synthetic oligonucleotide
  Antisense strand to SEQ ID NO: 1012098
uuguuaaccaagagcauga

SEQ ID NO: 1012100 - RNA, 19 nt, Artificial Sequence
  Description of Artificial Sequence: Synthetic oligonucleotide
  Sense strand starting at position 2440 of SEQ ID NO: 914544
gcucuugguuaacaaugua

SEQ ID NO: 1012101 - RNA, 19 nt, Artificial Sequence
  Description of Artificial Sequence: Synthetic oligonucleotide
  Antisense strand to SEQ ID NO: 1012100
uacauuguuaaccaagagc

SEQ ID NO: 1012102 - RNA, 19 nt, Artificial Sequence
  Description of Artificial Sequence: Synthetic oligonucleotide
  Sense strand starting at position 2443 of SEQ ID NO: 914544
cuugguuaacaauguaaag

SEQ ID NO: 1012103 - RNA, 19 nt, Artificial Sequence
  Description of Artificial Sequence: Synthetic oligonucleotide
  Antisense strand to SEQ ID NO: 1012102
cuuuacauuguuaaccaag

SEQ ID NO: 1012104 - RNA, 19 nt, Artificial Sequence
  Description of Artificial Sequence: Synthetic oligonucleotide
  Sense strand starting at position 2504 of SEQ ID NO: 914544
gaggcaaggucugucacua

SEQ ID NO: 1012105 - RNA, 19 nt, Artificial Sequence
  Description of Artificial Sequence: Synthetic oligonucleotide
  Antisense strand to SEQ ID NO: 1012104
uagugacagaccuugccuc

SEQ ID NO: 1012106 - RNA, 19 nt, Artificial Sequence
  Description of Artificial Sequence: Synthetic oligonucleotide
  Sense strand starting at position 2532 of SEQ ID NO: 914544
aauguagugccaugaucau

SEQ ID NO: 1012107 - RNA, 19 nt, Artificial Sequence
  Description of Artificial Sequence: Synthetic oligonucleotide
  Antisense strand to SEQ ID NO: 1012106
augaucauggcacuacauu

SEQ ID NO: 1012108 - RNA, 19 nt, Artificial Sequence
  Description of Artificial Sequence: Synthetic oligonucleotide
  Sense strand starting at position 3060 of SEQ ID NO: 914544
aggguaaacaccugugcau

SEQ ID NO: 1012109 - RNA, 19 nt, Artificial Sequence
  Description of Artificial Sequence: Synthetic oligonucleotide
  Antisense strand to SEQ ID NO: 1012108
augcacagguguuuacccu

SEQ ID NO: 1012110 - RNA, 19 nt, Artificial Sequence
  Description of Artificial Sequence: Synthetic oligonucleotide
  Sense strand starting at position 3062 of SEQ ID NO: 914544
gguaaacaccugugcauuc

SEQ ID NO: 1012111 - RNA, 19 nt, Artificial Sequence
  Description of Artificial Sequence: Synthetic oligonucleotide
  Antisense strand to SEQ ID NO: 1012110
gaaugcacagguguuuacc

SEQ ID NO: 1012112 - RNA, 19 nt, Artificial Sequence
  Description of Artificial Sequence: Synthetic oligonucleotide
  Sense strand starting at position 3073 of SEQ ID NO: 914544
gugcauucugcugagcuuu

SEQ ID NO: 1012113 - RNA, 19 nt, Artificial Sequence
  Description of Artificial Sequence: Synthetic oligonucleotide
  Antisense strand to SEQ ID NO: 1012112
aaagcucagcagaaugcac

SEQ ID NO: 1012114 - RNA, 19 nt, Artificial Sequence
  Description of Artificial Sequence: Synthetic oligonucleotide
  Sense strand starting at position 3081 of SEQ ID NO: 914544
ugcugagcuuucuuauuac

SEQ ID NO: 1012115 - RNA, 19 nt, Artificial Sequence
  Description of Artificial Sequence: Synthetic oligonucleotide
  Antisense strand to SEQ ID NO: 1012114
guaauaagaaagcucagca

SEQ ID NO: 1012116 - RNA, 19 nt, Artificial Sequence
  Description of Artificial Sequence: Synthetic oligonucleotide
  Sense strand starting at position 3431 of SEQ ID NO: 914544
ggagccuugucucuggcua

SEQ ID NO: 1012117 - RNA, 19 nt, Artificial Sequence
  Description of Artificial Sequence: Synthetic oligonucleotide
  Antisense strand to SEQ ID NO: 1012116
uagccagagacaaggcucc

SEQ ID NO: 1012118 - RNA, 19 nt, Artificial Sequence
  Description of Artificial Sequence: Synthetic oligonucleotide
  Sense strand starting at position 3432 of SEQ ID NO: 914544
gagccuugucucuggcuaa

SEQ ID NO: 1012119 - RNA, 19 nt, Artificial Sequence
  Description of Artificial Sequence: Synthetic oligonucleotide
  Antisense strand to SEQ ID NO: 1012118
uuagccagagacaaggcuc

SEQ ID NO: 1012120 - RNA, 19 nt, Artificial Sequence
  Description of Artificial Sequence: Synthetic oligonucleotide
  Sense strand starting at position 3485 of SEQ ID NO: 914544
gggcuugucucccaucuca

SEQ ID NO: 1012121 - RNA, 19 nt, Artificial Sequence
  Description of Artificial Sequence: Synthetic oligonucleotide
  Antisense strand to SEQ ID NO: 1012120
ugagaugggagacaagccc

SEQ ID NO: 1012122 - RNA, 19 nt, Artificial Sequence
  Description of Artificial Sequence: Synthetic oligonucleotide
  Sense strand starting at position 3711 of SEQ ID NO: 914544
ucuggaagcucuuuccuca

SEQ ID NO: 1012123 - RNA, 19 nt, Artificial Sequence
  Description of Artificial Sequence: Synthetic oligonucleotide
  Antisense strand to SEQ ID NO: 1012122
ugaggaaagagcuuccaga

SEQ ID NO: 1012124 - RNA, 19 nt, Artificial Sequence
  Description of Artificial Sequence: Synthetic oligonucleotide
  Sense strand starting at position 3714 of SEQ ID NO: 914544
ggaagcucuuuccucagau

SEQ ID NO: 1012125 - RNA, 19 nt, Artificial Sequence
  Description of Artificial Sequence: Synthetic oligonucleotide
  Antisense strand to SEQ ID NO: 1012124
aucugaggaaagagcuucc

SEQ ID NO: 1012126 - RNA, 19 nt, Artificial Sequence
  Description of Artificial Sequence: Synthetic oligonucleotide
  Sense strand starting at position 3761 of SEQ ID NO: 914544
ucaggucucuggucagaca

SEQ ID NO: 1012127 - RNA, 19 nt, Artificial Sequence
  Description of Artificial Sequence: Synthetic oligonucleotide
  Antisense strand to SEQ ID NO: 1012126
ugucugaccagagaccuga

SEQ ID NO: 1012128 - RNA, 19 nt, Artificial Sequence
  Description of Artificial Sequence: Synthetic oligonucleotide
  Sense strand starting at position 3762 of SEQ ID NO: 914544
caggucucuggucagacau

SEQ ID NO: 1012129 - RNA, 19 nt, Artificial Sequence
  Description of Artificial Sequence: Synthetic oligonucleotide
  Antisense strand to SEQ ID NO: 1012128
augucugaccagagaccug

SEQ ID NO: 1012130 - RNA, 19 nt, Artificial Sequence
  Description of Artificial Sequence: Synthetic oligonucleotide
  Sense strand starting at position 3764 of SEQ ID NO: 914544
ggucucuggucagacauca

SEQ ID NO: 1012131 - RNA, 19 nt, Artificial Sequence
  Description of Artificial Sequence: Synthetic oligonucleotide
  Antisense strand to SEQ ID NO: 1012130
ugaugucugaccagagacc

SEQ ID NO: 1012132 - RNA, 19 nt, Artificial Sequence
  Description of Artificial Sequence: Synthetic oligonucleotide
  Sense strand starting at position 3830 of SEQ ID NO: 914544
ggucuuacuuguccugacu

SEQ ID NO: 1012133 - RNA, 19 nt, Artificial Sequence
  Description of Artificial Sequence: Synthetic oligonucleotide
  Antisense strand to SEQ ID NO: 1012132
agucaggacaaguaagacc

SEQ ID NO: 1012134 - RNA, 19 nt, Artificial Sequence
  Description of Artificial Sequence: Synthetic oligonucleotide
  Sense strand starting at position 480 of SEQ ID NO: 914545
uggcuaugacuucgucguu

SEQ ID NO: 1012135 - RNA, 19 nt, Artificial Sequence
  Description of Artificial Sequence: Synthetic oligonucleotide
  Antisense strand to SEQ ID NO: 1012134
aacgacgaagucauagcca

SEQ ID NO: 1012136 - RNA, 19 nt, Artificial Sequence
  Description of Artificial Sequence: Synthetic oligonucleotide
  Sense strand starting at position 549 of SEQ ID NO: 914545
ucggguaggccuugucaau

SEQ ID NO: 1012137 - RNA, 19 nt, Artificial Sequence
  Description of Artificial Sequence: Synthetic oligonucleotide
  Antisense strand to SEQ ID NO: 1012136
auugacaaggccuacccga

SEQ ID NO: 1012138 - RNA, 19 nt, Artificial Sequence
  Description of Artificial Sequence: Synthetic oligonucleotide
  Sense strand starting at position 715 of SEQ ID NO: 914545
ggaaauguuugcugccucu

SEQ ID NO: 1012139 - RNA, 19 nt, Artificial Sequence
  Description of Artificial Sequence: Synthetic oligonucleotide
  Antisense strand to SEQ ID NO: 1012138
agaggcagcaaacauuucc

SEQ ID NO: 1012140 - RNA, 19 nt, Artificial Sequence
  Description of Artificial Sequence: Synthetic oligonucleotide
  Sense strand starting at position 783 of SEQ ID NO: 914545
gggcgauaaaucuggguua

SEQ ID NO: 1012141 - RNA, 19 nt, Artificial Sequence
  Description of Artificial Sequence: Synthetic oligonucleotide
  Antisense strand to SEQ ID NO: 1012140
uaacccagauuuaucgccc

SEQ ID NO: 1012142 - RNA, 19 nt, Artificial Sequence
  Description of Artificial Sequence: Synthetic oligonucleotide
  Sense strand starting at position 784 of SEQ ID NO: 914545
ggcgauaaaucuggguuau

SEQ ID NO: 1012143 - RNA, 19 nt, Artificial Sequence
  Description of Artificial Sequence: Synthetic oligonucleotide
  Antisense strand to SEQ ID NO: 1012142
auaacccagauuuaucgcc

SEQ ID NO: 1012144 - RNA, 19 nt, Artificial Sequence
  Description of Artificial Sequence: Synthetic oligonucleotide
  Sense strand starting at position 785 of SEQ ID NO: 914545
gcgauaaaucuggguuaua

SEQ ID NO: 1012145 - RNA, 19 nt, Artificial Sequence
  Description of Artificial Sequence: Synthetic oligonucleotide
  Antisense strand to SEQ ID NO: 1012144
uauaacccagauuuaucgc

SEQ ID NO: 1012146 - RNA, 19 nt, Artificial Sequence
  Description of Artificial Sequence: Synthetic oligonucleotide
  Sense strand starting at position 786 of SEQ ID NO: 914545
cgauaaaucuggguuauaa

SEQ ID NO: 1012147 - RNA, 19 nt, Artificial Sequence
  Description of Artificial Sequence: Synthetic oligonucleotide
  Antisense strand to SEQ ID NO: 1012146
uuauaacccagauuuaucg

SEQ ID NO: 1012148 - RNA, 19 nt, Artificial Sequence
  Description of Artificial Sequence: Synthetic oligonucleotide
  Sense strand starting at position 809 of SEQ ID NO: 914545
ugcccagcagugugagaaa

SEQ ID NO: 1012149 - RNA, 19 nt, Artificial Sequence
  Description of Artificial Sequence: Synthetic oligonucleotide
  Antisense strand to SEQ ID NO: 1012148
uuucucacacugcugggca

SEQ ID NO: 1012150 - RNA, 19 nt, Artificial Sequence
  Description of Artificial Sequence: Synthetic oligonucleotide
  Sense strand starting at position 840 of SEQ ID NO: 914545
ggauucaaggugugcagaa

SEQ ID NO: 1012151 - RNA, 19 nt, Artificial Sequence
  Description of Artificial Sequence: Synthetic oligonucleotide
  Antisense strand to SEQ ID NO: 1012150
uucugcacaccuugaaucc

SEQ ID NO: 1012152 - RNA, 19 nt, Artificial Sequence
  Description of Artificial Sequence: Synthetic oligonucleotide
  Sense strand starting at position 1000 of SEQ ID NO: 914545
ggugcugucccagguaaca

SEQ ID NO: 1012153 - RNA, 19 nt, Artificial Sequence
  Description of Artificial Sequence: Synthetic oligonucleotide
  Antisense strand to SEQ ID NO: 1012152
uguuaccugggacagcacc

SEQ ID NO: 1012154 - RNA, 19 nt, Artificial Sequence
  Description of Artificial Sequence: Synthetic oligonucleotide
  Sense strand starting at position 1026 of SEQ ID NO: 914545
cgcgaauguccucauagca

SEQ ID NO: 1012155 - RNA, 19 nt, Artificial Sequence
  Description of Artificial Sequence: Synthetic oligonucleotide
  Antisense strand to SEQ ID NO: 1012154
ugcuaugaggacauucgcg

SEQ ID NO: 1012156 - RNA, 19 nt, Artificial Sequence
  Description of Artificial Sequence: Synthetic oligonucleotide
  Sense strand starting at position 1079 of SEQ ID NO: 914545
cggaauuugcucugccgga

SEQ ID NO: 1012157 - RNA, 19 nt, Artificial Sequence
  Description of Artificial Sequence: Synthetic oligonucleotide
  Antisense strand to SEQ ID NO: 1012156
uccggcagagcaaauuccg

SEQ ID NO: 1012158 - RNA, 19 nt, Artificial Sequence
  Description of Artificial Sequence: Synthetic oligonucleotide
  Sense strand starting at position 1110 of SEQ ID NO: 914545
aggacaugucugcgggaca

SEQ ID NO: 1012159 - RNA, 19 nt, Artificial Sequence
  Description of Artificial Sequence: Synthetic oligonucleotide
  Antisense strand to SEQ ID NO: 1012158
ugucccgcagacauguccu

SEQ ID NO: 1012160 - RNA, 19 nt, Artificial Sequence
  Description of Artificial Sequence: Synthetic oligonucleotide
  Sense strand starting at position 1306 of SEQ ID NO: 914545
agugaucugagagguaaau

SEQ ID NO: 1012161 - RNA, 19 nt, Artificial Sequence
  Description of Artificial Sequence: Synthetic oligonucleotide
  Antisense strand to SEQ ID NO: 1012160
auuuaccucucagaucacu

SEQ ID NO: 1012162 - RNA, 19 nt, Artificial Sequence
  Description of Artificial Sequence: Synthetic oligonucleotide
  Sense strand starting at position 1478 of SEQ ID NO: 914545
ccuuccugcucccagagau

SEQ ID NO: 1012163 - RNA, 19 nt, Artificial Sequence
  Description of Artificial Sequence: Synthetic oligonucleotide
  Antisense strand to SEQ ID NO: 1012162
aucucugggagcaggaagg

SEQ ID NO: 1012164 - RNA, 19 nt, Artificial Sequence
  Description of Artificial Sequence: Synthetic oligonucleotide
  Sense strand starting at position 1488 of SEQ ID NO: 914545
cccagagauuuggaggcua

SEQ ID NO: 1012165 - RNA, 19 nt, Artificial Sequence
  Description of Artificial Sequence: Synthetic oligonucleotide
  Antisense strand to SEQ ID NO: 1012164
uagccuccaaaucucuggg

SEQ ID NO: 1012166 - RNA, 19 nt, Artificial Sequence
  Description of Artificial Sequence: Synthetic oligonucleotide
  Sense strand starting at position 1573 of SEQ ID NO: 914545
aguucugagucccagggaa

SEQ ID NO: 1012167 - RNA, 19 nt, Artificial Sequence
  Description of Artificial Sequence: Synthetic oligonucleotide
  Antisense strand to SEQ ID NO: 1012166
uucccugggacucagaacu

SEQ ID NO: 1012168 - RNA, 19 nt, Artificial Sequence
  Description of Artificial Sequence: Synthetic oligonucleotide
  Sense strand starting at position 1575 of SEQ ID NO: 914545
uucugagucccagggaaug

SEQ ID NO: 1012169 - RNA, 19 nt, Artificial Sequence
  Description of Artificial Sequence: Synthetic oligonucleotide
  Antisense strand to SEQ ID NO: 1012168
cauucccugggacucagaa

SEQ ID NO: 1012170 - RNA, 19 nt, Artificial Sequence
  Description of Artificial Sequence: Synthetic oligonucleotide
  Sense strand starting at position 2260 of SEQ ID NO: 914545
cgcguucuugcuccucaua

SEQ ID NO: 1012171 - RNA, 19 nt, Artificial Sequence
  Description of Artificial Sequence: Synthetic oligonucleotide
  Antisense strand to SEQ ID NO: 1012170
uaugaggagcaagaacgcg

SEQ ID NO: 1012172 - RNA, 19 nt, Artificial Sequence
  Description of Artificial Sequence: Synthetic oligonucleotide
  Sense strand starting at position 2261 of SEQ ID NO: 914545
gcguucuugcuccucauaa

SEQ ID NO: 1012173 - RNA, 19 nt, Artificial Sequence
  Description of Artificial Sequence: Synthetic oligonucleotide
  Antisense strand to SEQ ID NO: 1012172
uuaugaggagcaagaacgc

SEQ ID NO: 1012174 - RNA, 19 nt, Artificial Sequence
  Description of Artificial Sequence: Synthetic oligonucleotide
  Sense strand starting at position 2262 of SEQ ID NO: 914545
cguucuugcuccucauaau

SEQ ID NO: 1012175 - RNA, 19 nt, Artificial Sequence
  Description of Artificial Sequence: Synthetic oligonucleotide
  Antisense strand to SEQ ID NO: 1012174
auuaugaggagcaagaacg

SEQ ID NO: 1012176 - RNA, 19 nt, Artificial Sequence
  Description of Artificial Sequence: Synthetic oligonucleotide
  Sense strand starting at position 2263 of SEQ ID NO: 914545
guucuugcuccucauaaug

SEQ ID NO: 1012177 - RNA, 19 nt, Artificial Sequence
  Description of Artificial Sequence: Synthetic oligonucleotide
  Antisense strand to SEQ ID NO: 1012176
cauuaugaggagcaagaac

SEQ ID NO: 1012178 - RNA, 19 nt, Artificial Sequence
  Description of Artificial Sequence: Synthetic oligonucleotide
  Sense strand starting at position 2401 of SEQ ID NO: 914545
aguggauauguucacguga

SEQ ID NO: 1012179 - RNA, 19 nt, Artificial Sequence
  Description of Artificial Sequence: Synthetic oligonucleotide
  Antisense strand to SEQ ID NO: 1012178
ucacgugaacauauccacu

SEQ ID NO: 1012180 - RNA, 19 nt, Artificial Sequence
  Description of Artificial Sequence: Synthetic oligonucleotide
  Sense strand starting at position 2403 of SEQ ID NO: 914545
uggauauguucacgugacu

SEQ ID NO: 1012181 - RNA, 19 nt, Artificial Sequence
  Description of Artificial Sequence: Synthetic oligonucleotide
  Antisense strand to SEQ ID NO: 1012180
agucacgugaacauaucca

SEQ ID NO: 1012182 - RNA, 19 nt, Artificial Sequence
  Description of Artificial Sequence: Synthetic oligonucleotide
  Sense strand starting at position 2745 of SEQ ID NO: 914545
ucaugcucuugguuaacaa

SEQ ID NO: 1012183 - RNA, 19 nt, Artificial Sequence
  Description of Artificial Sequence: Synthetic oligonucleotide
  Antisense strand to SEQ ID NO: 1012182
uuguuaaccaagagcauga

SEQ ID NO: 1012184 - RNA, 19 nt, Artificial Sequence
  Description of Artificial Sequence: Synthetic oligonucleotide
  Sense strand starting at position 2749 of SEQ ID NO: 914545
gcucuugguuaacaaugua

SEQ ID NO: 1012185 - RNA, 19 nt, Artificial Sequence
  Description of Artificial Sequence: Synthetic oligonucleotide
  Antisense strand to SEQ ID NO: 1012184
uacauuguuaaccaagagc

SEQ ID NO: 1012186 - RNA, 19 nt, Artificial Sequence
  Description of Artificial Sequence: Synthetic oligonucleotide
  Sense strand starting at position 2752 of SEQ ID NO: 914545
cuugguuaacaauguaaag

SEQ ID NO: 1012187 - RNA, 19 nt, Artificial Sequence
  Description of Artificial Sequence: Synthetic oligonucleotide
  Antisense strand to SEQ ID NO: 1012186
cuuuacauuguuaaccaag

SEQ ID NO: 1012188 - RNA, 19 nt, Artificial Sequence
  Description of Artificial Sequence: Synthetic oligonucleotide
  Sense strand starting at position 2813 of SEQ ID NO: 914545
gaggcaaggucugucacua

SEQ ID NO: 1012189 - RNA, 19 nt, Artificial Sequence
  Description of Artificial Sequence: Synthetic oligonucleotide
  Antisense strand to SEQ ID NO: 1012188
uagugacagaccuugccuc

SEQ ID NO: 1012190 - RNA, 19 nt, Artificial Sequence
  Description of Artificial Sequence: Synthetic oligonucleotide
  Sense strand starting at position 2841 of SEQ ID NO: 914545
aauguagugccaugaucau

SEQ ID NO: 1012191 - RNA, 19 nt, Artificial Sequence
  Description of Artificial Sequence: Synthetic oligonucleotide
  Antisense strand to SEQ ID NO: 1012190
augaucauggcacuacauu

SEQ ID NO: 1012192 - RNA, 19 nt, Artificial Sequence
  Description of Artificial Sequence: Synthetic oligonucleotide
  Sense strand starting at position 3369 of SEQ ID NO: 914545
aggguaaacaccugugcau

SEQ ID NO: 1012193 - RNA, 19 nt, Artificial Sequence
  Description of Artificial Sequence: Synthetic oligonucleotide
  Antisense strand to SEQ ID NO: 1012192
augcacagguguuuacccu

SEQ ID NO: 1012194 - RNA, 19 nt, Artificial Sequence
  Description of Artificial Sequence: Synthetic oligonucleotide
  Sense strand starting at position 3371 of SEQ ID NO: 914545
gguaaacaccugugcauuc

SEQ ID NO: 1012195 - RNA, 19 nt, Artificial Sequence
  Description of Artificial Sequence: Synthetic oligonucleotide
  Antisense strand to SEQ ID NO: 1012194
gaaugcacagguguuuacc

SEQ ID NO: 1012196 - RNA, 19 nt, Artificial Sequence
  Description of Artificial Sequence: Synthetic oligonucleotide
  Sense strand starting at position 3381 of SEQ ID NO: 914545
ugugcauucugcugagcuu

SEQ ID NO: 1012197 - RNA, 19 nt, Artificial Sequence
  Description of Artificial Sequence: Synthetic oligonucleotide
  Antisense strand to SEQ ID NO: 1012196
aagcucagcagaaugcaca

SEQ ID NO: 1012198 - RNA, 19 nt, Artificial Sequence
  Description of Artificial Sequence: Synthetic oligonucleotide
  Sense strand starting at position 3382 of SEQ ID NO: 914545
gugcauucugcugagcuuu

SEQ ID NO: 1012199 - RNA, 19 nt, Artificial Sequence
  Description of Artificial Sequence: Synthetic oligonucleotide
  Antisense strand to SEQ ID NO: 1012198
aaagcucagcagaaugcac

SEQ ID NO: 1012200 - RNA, 19 nt, Artificial Sequence
  Description of Artificial Sequence: Synthetic oligonucleotide
  Sense strand starting at position 3390 of SEQ ID NO: 914545
ugcugagcuuucuuauuac

SEQ ID NO: 1012201 - RNA, 19 nt, Artificial Sequence
  Description of Artificial Sequence: Synthetic oligonucleotide
  Antisense strand to SEQ ID NO: 1012200
guaauaagaaagcucagca

SEQ ID NO: 1012202 - RNA, 19 nt, Artificial Sequence
  Description of Artificial Sequence: Synthetic oligonucleotide
  Sense strand starting at position 3740 of SEQ ID NO: 914545
ggagccuugucucuggcua

SEQ ID NO: 1012203 - RNA, 19 nt, Artificial Sequence
  Description of Artificial Sequence: Synthetic oligonucleotide
  Antisense strand to SEQ ID NO: 1012202
uagccagagacaaggcucc

SEQ ID NO: 1012204 - RNA, 19 nt, Artificial Sequence
  Description of Artificial Sequence: Synthetic oligonucleotide
  Sense strand starting at position 3741 of SEQ ID NO: 914545
gagccuugucucuggcuaa

SEQ ID NO: 1012205 - RNA, 19 nt, Artificial Sequence
  Description of Artificial Sequence: Synthetic oligonucleotide
  Antisense strand to SEQ ID NO: 1012204
uuagccagagacaaggcuc

SEQ ID NO: 1012206 - RNA, 19 nt, Artificial Sequence
  Description of Artificial Sequence: Synthetic oligonucleotide
  Sense strand starting at position 3742 of SEQ ID NO: 914545
agccuugucucuggcuaaa

SEQ ID NO: 1012207 - RNA, 19 nt, Artificial Sequence
  Description of Artificial Sequence: Synthetic oligonucleotide
  Antisense strand to SEQ ID NO: 1012206
uuuagccagagacaaggcu

SEQ ID NO: 1012208 - RNA, 19 nt, Artificial Sequence
  Description of Artificial Sequence: Synthetic oligonucleotide
  Sense strand starting at position 3794 of SEQ ID NO: 914545
gggcuugucucccaucuca

SEQ ID NO: 1012209 - RNA, 19 nt, Artificial Sequence
  Description of Artificial Sequence: Synthetic oligonucleotide
  Antisense strand to SEQ ID NO: 1012208
ugagaugggagacaagccc

SEQ ID NO: 1012210 - RNA, 19 nt, Artificial Sequence
  Description of Artificial Sequence: Synthetic oligonucleotide
  Sense strand starting at position 407 of SEQ ID NO: 914546
gcaccucggagucaguauu

SEQ ID NO: 1012211 - RNA, 19 nt, Artificial Sequence
  Description of Artificial Sequence: Synthetic oligonucleotide
  Antisense strand to SEQ ID NO: 1012210
aauacugacuccgaggugc

SEQ ID NO: 1012212 - RNA, 19 nt, Artificial Sequence
  Description of Artificial Sequence: Synthetic oligonucleotide
  Sense strand starting at position 435 of SEQ ID NO: 914546
ucucuaaguccuugcaguu

SEQ ID NO: 1012213 - RNA, 19 nt, Artificial Sequence
  Description of Artificial Sequence: Synthetic oligonucleotide
  Antisense strand to SEQ ID NO: 1012212
aacugcaaggacuuagaga

SEQ ID NO: 1012214 - RNA, 19 nt, Artificial Sequence
  Description of Artificial Sequence: Synthetic oligonucleotide
  Sense strand starting at position 510 of SEQ ID NO: 914546
cccgcauccucacguuaaa

SEQ ID NO: 1012215 - RNA, 19 nt, Artificial Sequence
  Description of Artificial Sequence: Synthetic oligonucleotide
  Antisense strand to SEQ ID NO: 1012214
uuuaacgugaggaugcggg

SEQ ID NO: 1012216 - RNA, 19 nt, Artificial Sequence
  Description of Artificial Sequence: Synthetic oligonucleotide
  Sense strand starting at position 513 of SEQ ID NO: 914546
gcauccucacguuaaagga

SEQ ID NO: 1012217 - RNA, 19 nt, Artificial Sequence
  Description of Artificial Sequence: Synthetic oligonucleotide
  Antisense strand to SEQ ID NO: 1012216
uccuuuaacgugaggaugc

SEQ ID NO: 1012218 - RNA, 19 nt, Artificial Sequence
  Description of Artificial Sequence: Synthetic oligonucleotide
  Sense strand starting at position 570 of SEQ ID NO: 914546
uacgcuaacccuugaggua

SEQ ID NO: 1012219 - RNA, 19 nt, Artificial Sequence
  Description of Artificial Sequence: Synthetic oligonucleotide
  Antisense strand to SEQ ID NO: 1012218
uaccucaaggguuagcgua

SEQ ID NO: 1012220 - RNA, 19 nt, Artificial Sequence
  Description of Artificial Sequence: Synthetic oligonucleotide
  Sense strand starting at position 571 of SEQ ID NO: 914546
acgcuaacccuugagguaa

SEQ ID NO: 1012221 - RNA, 19 nt, Artificial Sequence
  Description of Artificial Sequence: Synthetic oligonucleotide
  Antisense strand to SEQ ID NO: 1012220
uuaccucaaggguuagcgu

SEQ ID NO: 1012222 - RNA, 19 nt, Artificial Sequence
  Description of Artificial Sequence: Synthetic oligonucleotide
  Sense strand starting at position 583 of SEQ ID NO: 914546
gagguaaagggucaguuau

SEQ ID NO: 1012223 - RNA, 19 nt, Artificial Sequence
  Description of Artificial Sequence: Synthetic oligonucleotide
  Antisense strand to SEQ ID NO: 1012222
auaacugacccuuuaccuc

SEQ ID NO: 1012224 - RNA, 19 nt, Artificial Sequence
  Description of Artificial Sequence: Synthetic oligonucleotide
  Sense strand starting at position 585 of SEQ ID NO: 914546
gguaaagggucaguuauaa

SEQ ID NO: 1012225 - RNA, 19 nt, Artificial Sequence
  Description of Artificial Sequence: Synthetic oligonucleotide
  Antisense strand to SEQ ID NO: 1012224
uuauaacugacccuuuacc

SEQ ID NO: 1012226 - RNA, 19 nt, Artificial Sequence
  Description of Artificial Sequence: Synthetic oligonucleotide
  Sense strand starting at position 916 of SEQ ID NO: 914546
aggagaauggcuuggcuua

SEQ ID NO: 1012227 - RNA, 19 nt, Artificial Sequence
  Description of Artificial Sequence: Synthetic oligonucleotide
  Antisense strand to SEQ ID NO: 1012226
uaagccaagccauucuccu

SEQ ID NO: 1012228 - RNA, 19 nt, Artificial Sequence
  Description of Artificial Sequence: Synthetic oligonucleotide
  Sense strand starting at position 917 of SEQ ID NO: 914546
ggagaauggcuuggcuuaa

SEQ ID NO: 1012229 - RNA, 19 nt, Artificial Sequence
  Description of Artificial Sequence: Synthetic oligonucleotide
  Antisense strand to SEQ ID NO: 1012228
uuaagccaagccauucucc

SEQ ID NO: 1012230 - RNA, 19 nt, Artificial Sequence
  Description of Artificial Sequence: Synthetic oligonucleotide
  Sense strand starting at position 918 of SEQ ID NO: 914546
gagaauggcuuggcuuaaa

SEQ ID NO: 1012231 - RNA, 19 nt, Artificial Sequence
  Description of Artificial Sequence: Synthetic oligonucleotide
  Antisense strand to SEQ ID NO: 1012230
uuuaagccaagccauucuc

SEQ ID NO: 1012232 - RNA, 19 nt, Artificial Sequence
  Description of Artificial Sequence: Synthetic oligonucleotide
  Sense strand starting at position 1039 of SEQ ID NO: 914546
aagcaaagccuguauguua

SEQ ID NO: 1012233 - RNA, 19 nt, Artificial Sequence
  Description of Artificial Sequence: Synthetic oligonucleotide
  Antisense strand to SEQ ID NO: 1012232
uaacauacaggcuuugcuu

SEQ ID NO: 1012234 - RNA, 19 nt, Artificial Sequence
  Description of Artificial Sequence: Synthetic oligonucleotide
  Sense strand starting at position 1801 of SEQ ID NO: 914546
gcccguuccucaccaugau

SEQ ID NO: 1012235 - RNA, 19 nt, Artificial Sequence
  Description of Artificial Sequence: Synthetic oligonucleotide
  Antisense strand to SEQ ID NO: 1012234
aucauggugaggaacgggc

SEQ ID NO: 1012236 - RNA, 19 nt, Artificial Sequence
  Description of Artificial Sequence: Synthetic oligonucleotide
  Sense strand starting at position 2037 of SEQ ID NO: 914546
gcgcggaagucucucggaa

SEQ ID NO: 1012237 - RNA, 19 nt, Artificial Sequence
  Description of Artificial Sequence: Synthetic oligonucleotide
  Antisense strand to SEQ ID NO: 1012236
uuccgagagacuuccgcgc

SEQ ID NO: 1012238 - RNA, 19 nt, Artificial Sequence
  Description of Artificial Sequence: Synthetic oligonucleotide
  Sense strand starting at position 2039 of SEQ ID NO: 914546
gcggaagucucucggaaau

SEQ ID NO: 1012239 - RNA, 19 nt, Artificial Sequence
  Description of Artificial Sequence: Synthetic oligonucleotide
  Antisense strand to SEQ ID NO: 1012238
auuuccgagagacuuccgc

SEQ ID NO: 1012240 - RNA, 19 nt, Artificial Sequence
  Description of Artificial Sequence: Synthetic oligonucleotide
  Sense strand starting at position 2041 of SEQ ID NO: 914546
ggaagucucucggaaauga

SEQ ID NO: 1012241 - RNA, 19 nt, Artificial Sequence
  Description of Artificial Sequence: Synthetic oligonucleotide
  Antisense strand to SEQ ID NO: 1012240
ucauuuccgagagacuucc

SEQ ID NO: 1012242 - RNA, 19 nt, Artificial Sequence
  Description of Artificial Sequence: Synthetic oligonucleotide
  Sense strand starting at position 2096 of SEQ ID NO: 914546
uggcgcguuccucgaaaca

SEQ ID NO: 1012243 - RNA, 19 nt, Artificial Sequence
  Description of Artificial Sequence: Synthetic oligonucleotide
  Antisense strand to SEQ ID NO: 1012242
uguuucgaggaacgcgcca

SEQ ID NO: 1012244 - RNA, 19 nt, Artificial Sequence
  Description of Artificial Sequence: Synthetic oligonucleotide
  Sense strand starting at position 2153 of SEQ ID NO: 914546
aagggcucuucuucgaguu

SEQ ID NO: 1012245 - RNA, 19 nt, Artificial Sequence
  Description of Artificial Sequence: Synthetic oligonucleotide
  Antisense strand to SEQ ID NO: 1012244
aacucgaagaagagcccuu

SEQ ID NO: 1012246 - RNA, 19 nt, Artificial Sequence
  Description of Artificial Sequence: Synthetic oligonucleotide
  Sense strand starting at position 2154 of SEQ ID NO: 914546
agggcucuucuucgaguua

SEQ ID NO: 1012247 - RNA, 19 nt, Artificial Sequence
  Description of Artificial Sequence: Synthetic oligonucleotide
  Antisense strand to SEQ ID NO: 1012246
uaacucgaagaagagcccu

SEQ ID NO: 1012248 - RNA, 19 nt, Artificial Sequence
  Description of Artificial Sequence: Synthetic oligonucleotide
  Sense strand starting at position 2155 of SEQ ID NO: 914546
gggcucuucuucgaguuau

SEQ ID NO: 1012249 - RNA, 19 nt, Artificial Sequence
  Description of Artificial Sequence: Synthetic oligonucleotide
  Antisense strand to SEQ ID NO: 1012248
auaacucgaagaagagccc

SEQ ID NO: 1012250 - RNA, 19 nt, Artificial Sequence
  Description of Artificial Sequence: Synthetic oligonucleotide
  Sense strand starting at position 2157 of SEQ ID NO: 914546
gcucuucuucgaguuaugu

SEQ ID NO: 1012251 - RNA, 19 nt, Artificial Sequence
  Description of Artificial Sequence: Synthetic oligonucleotide
  Antisense strand to SEQ ID NO: 1012250
acauaacucgaagaagagc

SEQ ID NO: 1012252 - RNA, 19 nt, Artificial Sequence
  Description of Artificial Sequence: Synthetic oligonucleotide
  Sense strand starting at position 2167 of SEQ ID NO: 914546
gaguuauguuccgccucca

SEQ ID NO: 1012253 - RNA, 19 nt, Artificial Sequence
  Description of Artificial Sequence: Synthetic oligonucleotide
  Antisense strand to SEQ ID NO: 1012252
uggaggcggaacauaacuc

SEQ ID NO: 1012254 - RNA, 19 nt, Artificial Sequence
  Description of Artificial Sequence: Synthetic oligonucleotide
  Sense strand starting at position 2184 of SEQ ID NO: 914546
caaggcuuauacuugugaa

SEQ ID NO: 1012255 - RNA, 19 nt, Artificial Sequence
  Description of Artificial Sequence: Synthetic oligonucleotide
  Antisense strand to SEQ ID NO: 1012254
uucacaaguauaagccuug

SEQ ID NO: 1012256 - RNA, 19 nt, Artificial Sequence
  Description of Artificial Sequence: Synthetic oligonucleotide
  Sense strand starting at position 2187 of SEQ ID NO: 914546
ggcuuauacuugugaauga

SEQ ID NO: 1012257 - RNA, 19 nt, Artificial Sequence
  Description of Artificial Sequence: Synthetic oligonucleotide
  Antisense strand to SEQ ID NO: 1012256
ucauucacaaguauaagcc

SEQ ID NO: 1012258 - RNA, 19 nt, Artificial Sequence
  Description of Artificial Sequence: Synthetic oligonucleotide
  Sense strand starting at position 2188 of SEQ ID NO: 914546
gcuuauacuugugaaugac

SEQ ID NO: 1012259 - RNA, 19 nt, Artificial Sequence
  Description of Artificial Sequence: Synthetic oligonucleotide
  Antisense strand to SEQ ID NO: 1012258
gucauucacaaguauaagc

SEQ ID NO: 1012260 - RNA, 19 nt, Artificial Sequence
  Description of Artificial Sequence: Synthetic oligonucleotide
  Sense strand starting at position 2218 of SEQ ID NO: 914546
cccaaucauguacgcgaga

SEQ ID NO: 1012261 - RNA, 19 nt, Artificial Sequence
  Description of Artificial Sequence: Synthetic oligonucleotide
  Antisense strand to SEQ ID NO: 1012260
ucucgcguacaugauuggg

SEQ ID NO: 1012262 - RNA, 19 nt, Artificial Sequence
  Description of Artificial Sequence: Synthetic oligonucleotide
  Sense strand starting at position 2219 of SEQ ID NO: 914546
ccaaucauguacgcgagaa

SEQ ID NO: 1012263 - RNA, 19 nt, Artificial Sequence
  Description of Artificial Sequence: Synthetic oligonucleotide
  Antisense strand to SEQ ID NO: 1012262
uucucgcguacaugauugg

SEQ ID NO: 1012264 - RNA, 19 nt, Artificial Sequence
  Description of Artificial Sequence: Synthetic oligonucleotide
  Sense strand starting at position 2220 of SEQ ID NO: 914546
caaucauguacgcgagaag

SEQ ID NO: 1012265 - RNA, 19 nt, Artificial Sequence
  Description of Artificial Sequence: Synthetic oligonucleotide
  Antisense strand to SEQ ID NO: 1012264
cuucucgcguacaugauug

SEQ ID NO: 1012266 - RNA, 19 nt, Artificial Sequence
  Description of Artificial Sequence: Synthetic oligonucleotide
  Sense strand starting at position 2337 of SEQ ID NO: 914546
ggaggccgucuguacuaaa

SEQ ID NO: 1012267 - RNA, 19 nt, Artificial Sequence
  Description of Artificial Sequence: Synthetic oligonucleotide
  Antisense strand to SEQ ID NO: 1012266
uuuaguacagacggccucc

SEQ ID NO: 1012268 - RNA, 19 nt, Artificial Sequence
  Description of Artificial Sequence: Synthetic oligonucleotide
  Sense strand starting at position 2443 of SEQ ID NO: 914546
ggaguuugacaccagucuu

SEQ ID NO: 1012269 - RNA, 19 nt, Artificial Sequence
  Description of Artificial Sequence: Synthetic oligonucleotide
  Antisense strand to SEQ ID NO: 1012268
aagacuggugucaaacucc

SEQ ID NO: 1012270 - RNA, 19 nt, Artificial Sequence
  Description of Artificial Sequence: Synthetic oligonucleotide
  Sense strand starting at position 3436 of SEQ ID NO: 914546
ucccaauucccggauguca

SEQ ID NO: 1012271 - RNA, 19 nt, Artificial Sequence
  Description of Artificial Sequence: Synthetic oligonucleotide
  Antisense strand to SEQ ID NO: 1012270
ugacauccgggaauuggga

SEQ ID NO: 1012272 - RNA, 19 nt, Artificial Sequence
  Description of Artificial Sequence: Synthetic oligonucleotide
  Sense strand starting at position 3753 of SEQ ID NO: 914546
gaaauagagucuugcgcug

SEQ ID NO: 1012273 - RNA, 19 nt, Artificial Sequence
  Description of Artificial Sequence: Synthetic oligonucleotide
  Antisense strand to SEQ ID NO: 1012272
cagcgcaagacucuauuuc

SEQ ID NO: 1012274 - RNA, 19 nt, Artificial Sequence
  Description of Artificial Sequence: Synthetic oligonucleotide
  Sense strand starting at position 3755 of SEQ ID NO: 914546
aauagagucuugcgcuguu

SEQ ID NO: 1012275 - RNA, 19 nt, Artificial Sequence
  Description of Artificial Sequence: Synthetic oligonucleotide
  Antisense strand to SEQ ID NO: 1012274
aacagcgcaagacucuauu

SEQ ID NO: 1012276 - RNA, 19 nt, Artificial Sequence
  Description of Artificial Sequence: Synthetic oligonucleotide
  Sense strand starting at position 14 of SEQ ID NO: 914547
auguguacccacuggaaga

SEQ ID NO: 1012277 - RNA, 19 nt, Artificial Sequence
  Description of Artificial Sequence: Synthetic oligonucleotide
  Antisense strand to SEQ ID NO: 1012276
ucuuccaguggguacacau

SEQ ID NO: 1012278 - RNA, 19 nt, Artificial Sequence
  Description of Artificial Sequence: Synthetic oligonucleotide
  Sense strand starting at position 15 of SEQ ID NO: 914547
uguguacccacuggaagau

SEQ ID NO: 1012279 - RNA, 19 nt, Artificial Sequence
  Description of Artificial Sequence: Synthetic oligonucleotide
  Antisense strand to SEQ ID NO: 1012278
aucuuccaguggguacaca

SEQ ID NO: 1012280 - RNA, 19 nt, Artificial Sequence
  Description of Artificial Sequence: Synthetic oligonucleotide
  Sense strand starting at position 155 of SEQ ID NO: 914547
acuuaacugcauggaagau

SEQ ID NO: 1012281 - RNA, 19 nt, Artificial Sequence
  Description of Artificial Sequence: Synthetic oligonucleotide
  Antisense strand to SEQ ID NO: 1012280
aucuuccaugcaguuaagu

SEQ ID NO: 1012282 - RNA, 19 nt, Artificial Sequence
  Description of Artificial Sequence: Synthetic oligonucleotide
  Sense strand starting at position 304 of SEQ ID NO: 914547
ccucacucuccagaguaga

SEQ ID NO: 1012283 - RNA, 19 nt, Artificial Sequence
  Description of Artificial Sequence: Synthetic oligonucleotide
  Antisense strand to SEQ ID NO: 1012282
ucuacucuggagagugagg

SEQ ID NO: 1012284 - RNA, 19 nt, Artificial Sequence
  Description of Artificial Sequence: Synthetic oligonucleotide
  Sense strand starting at position 485 of SEQ ID NO: 914547
ugcccagcucuagauaaau

SEQ ID NO: 1012285 - RNA, 19 nt, Artificial Sequence
  Description of Artificial Sequence: Synthetic oligonucleotide
  Antisense strand to SEQ ID NO: 1012284
auuuaucuagagcugggca

SEQ ID NO: 1012286 - RNA, 19 nt, Artificial Sequence
  Description of Artificial Sequence: Synthetic oligonucleotide
  Sense strand starting at position 553 of SEQ ID NO: 914547
ugugcaugggucuauuauc

SEQ ID NO: 1012287 - RNA, 19 nt, Artificial Sequence
  Description of Artificial Sequence: Synthetic oligonucleotide
  Antisense strand to SEQ ID NO: 1012286
gauaauagacccaugcaca

SEQ ID NO: 1012288 - RNA, 19 nt, Artificial Sequence
  Description of Artificial Sequence: Synthetic oligonucleotide
  Sense strand starting at position 558 of SEQ ID NO: 914547
augggucuauuaucaguuu

SEQ ID NO: 1012289 - RNA, 19 nt, Artificial Sequence
  Description of Artificial Sequence: Synthetic oligonucleotide
  Antisense strand to SEQ ID NO: 1012288
aaacugauaauagacccau

SEQ ID NO: 1012290 - RNA, 19 nt, Artificial Sequence
  Description of Artificial Sequence: Synthetic oligonucleotide
  Sense strand starting at position 576 of SEQ ID NO: 914547
uucuaacugguuugucuaa

SEQ ID NO: 1012291 - RNA, 19 nt, Artificial Sequence
  Description of Artificial Sequence: Synthetic oligonucleotide
  Antisense strand to SEQ ID NO: 1012290
uuagacaaaccaguuagaa

SEQ ID NO: 1012292 - RNA, 19 nt, Artificial Sequence
  Description of Artificial Sequence: Synthetic oligonucleotide
  Sense strand starting at position 712 of SEQ ID NO: 914547
acuuaauuggaauggaguu

SEQ ID NO: 1012293 - RNA, 19 nt, Artificial Sequence
  Description of Artificial Sequence: Synthetic oligonucleotide
  Antisense strand to SEQ ID NO: 1012292
aacuccauuccaauuaagu

SEQ ID NO: 1012294 - RNA, 19 nt, Artificial Sequence
  Description of Artificial Sequence: Synthetic oligonucleotide
  Sense strand starting at position 807 of SEQ ID NO: 914547
gcagguugagaauguaaag

SEQ ID NO: 1012295 - RNA, 19 nt, Artificial Sequence
  Description of Artificial Sequence: Synthetic oligonucleotide
  Antisense strand to SEQ ID NO: 1012294
cuuuacauucucaaccugc

SEQ ID NO: 1012296 - RNA, 19 nt, Artificial Sequence
  Description of Artificial Sequence: Synthetic oligonucleotide
  Sense strand starting at position 847 of SEQ ID NO: 914547
ucaugaauaccguagcaaa

SEQ ID NO: 1012297 - RNA, 19 nt, Artificial Sequence
  Description of Artificial Sequence: Synthetic oligonucleotide
  Antisense strand to SEQ ID NO: 1012296
uuugcuacgguauucauga

SEQ ID NO: 1012298 - RNA, 19 nt, Artificial Sequence
  Description of Artificial Sequence: Synthetic oligonucleotide
  Sense strand starting at position 882 of SEQ ID NO: 914547
aagugugguuagucugaca

SEQ ID NO: 1012299 - RNA, 19 nt, Artificial Sequence
  Description of Artificial Sequence: Synthetic oligonucleotide
  Antisense strand to SEQ ID NO: 1012298
ugucagacuaaccacacuu

SEQ ID NO: 1012300 - RNA, 19 nt, Artificial Sequence
  Description of Artificial Sequence: Synthetic oligonucleotide
  Sense strand starting at position 1029 of SEQ ID NO: 914547
aauggaguguagucuuuaa

SEQ ID NO: 1012301 - RNA, 19 nt, Artificial Sequence
  Description of Artificial Sequence: Synthetic oligonucleotide
  Antisense strand to SEQ ID NO: 1012300
uuaaagacuacacuccauu

SEQ ID NO: 1012302 - RNA, 19 nt, Artificial Sequence
  Description of Artificial Sequence: Synthetic oligonucleotide
  Sense strand starting at position 1033 of SEQ ID NO: 914547
gaguguagucuuuaaaguu

SEQ ID NO: 1012303 - RNA, 19 nt, Artificial Sequence
  Description of Artificial Sequence: Synthetic oligonucleotide
  Antisense strand to SEQ ID NO: 1012302
aacuuuaaagacuacacuc

SEQ ID NO: 1012304 - RNA, 19 nt, Artificial Sequence
  Description of Artificial Sequence: Synthetic oligonucleotide
  Sense strand starting at position 1165 of SEQ ID NO: 914547
cccaaagcuccugaugaca

SEQ ID NO: 1012305 - RNA, 19 nt, Artificial Sequence
  Description of Artificial Sequence: Synthetic oligonucleotide
  Antisense strand to SEQ ID NO: 1012304
ugucaucaggagcuuuggg

SEQ ID NO: 1012306 - RNA, 19 nt, Artificial Sequence
  Description of Artificial Sequence: Synthetic oligonucleotide
  Sense strand starting at position 1195 of SEQ ID NO: 914547
ugaacuccucgucagcaua

SEQ ID NO: 1012307 - RNA, 19 nt, Artificial Sequence
  Description of Artificial Sequence: Synthetic oligonucleotide
  Antisense strand to SEQ ID NO: 1012306
uaugcugacgaggaguuca

SEQ ID NO: 1012308 - RNA, 19 nt, Artificial Sequence
  Description of Artificial Sequence: Synthetic oligonucleotide
  Sense strand starting at position 1198 of SEQ ID NO: 914547
acuccucgucagcauauau

SEQ ID NO: 1012309 - RNA, 19 nt, Artificial Sequence
  Description of Artificial Sequence: Synthetic oligonucleotide
  Antisense strand to SEQ ID NO: 1012308
auauaugcugacgaggagu

SEQ ID NO: 1012310 - RNA, 19 nt, Artificial Sequence
  Description of Artificial Sequence: Synthetic oligonucleotide
  Sense strand starting at position 1355 of SEQ ID NO: 914547
gaggguaaugauugcuaac

SEQ ID NO: 1012311 - RNA, 19 nt, Artificial Sequence
  Description of Artificial Sequence: Synthetic oligonucleotide
  Antisense strand to SEQ ID NO: 1012310
guuagcaaucauuacccuc

SEQ ID NO: 1012312 - RNA, 19 nt, Artificial Sequence
  Description of Artificial Sequence: Synthetic oligonucleotide
  Sense strand starting at position 1357 of SEQ ID NO: 914547
ggguaaugauugcuaaccu

SEQ ID NO: 1012313 - RNA, 19 nt, Artificial Sequence
  Description of Artificial Sequence: Synthetic oligonucleotide
  Antisense strand to SEQ ID NO: 1012312
agguuagcaaucauuaccc

SEQ ID NO: 1012314 - RNA, 19 nt, Artificial Sequence
  Description of Artificial Sequence: Synthetic oligonucleotide
  Sense strand starting at position 2102 of SEQ ID NO: 914547
cuaggaguucccggaagug

SEQ ID NO: 1012315 - RNA, 19 nt, Artificial Sequence
  Description of Artificial Sequence: Synthetic oligonucleotide
  Antisense strand to SEQ ID NO: 1012314
cacuuccgggaacuccuag

SEQ ID NO: 1012316 - RNA, 19 nt, Artificial Sequence
  Description of Artificial Sequence: Synthetic oligonucleotide
  Sense strand starting at position 2234 of SEQ ID NO: 914547
gggauuacccuuugucuuc

SEQ ID NO: 1012317 - RNA, 19 nt, Artificial Sequence
  Description of Artificial Sequence: Synthetic oligonucleotide
  Antisense strand to SEQ ID NO: 1012316
gaagacaaaggguaauccc

SEQ ID NO: 1012318 - RNA, 19 nt, Artificial Sequence
  Description of Artificial Sequence: Synthetic oligonucleotide
  Sense strand starting at position 2342 of SEQ ID NO: 914547
aaauaaaggucgcuuccau

SEQ ID NO: 1012319 - RNA, 19 nt, Artificial Sequence
  Description of Artificial Sequence: Synthetic oligonucleotide
  Antisense strand to SEQ ID NO: 1012318
auggaagcgaccuuuauuu

SEQ ID NO: 1012320 - RNA, 19 nt, Artificial Sequence
  Description of Artificial Sequence: Synthetic oligonucleotide
  Sense strand starting at position 2357 of SEQ ID NO: 914547
ccauucuuuggugagccua

SEQ ID NO: 1012321 - RNA, 19 nt, Artificial Sequence
  Description of Artificial Sequence: Synthetic oligonucleotide
  Antisense strand to SEQ ID NO: 1012320
uaggcucaccaaagaaugg

SEQ ID NO: 1012322 - RNA, 19 nt, Artificial Sequence
  Description of Artificial Sequence: Synthetic oligonucleotide
  Sense strand starting at position 2379 of SEQ ID NO: 914547
ugugccggucuggaaauau

SEQ ID NO: 1012323 - RNA, 19 nt, Artificial Sequence
  Description of Artificial Sequence: Synthetic oligonucleotide
  Antisense strand to SEQ ID NO: 1012322
auauuuccagaccggcaca

SEQ ID NO: 1012324 - RNA, 19 nt, Artificial Sequence
  Description of Artificial Sequence: Synthetic oligonucleotide
  Sense strand starting at position 2388 of SEQ ID NO: 914547
cuggaaauaucugcuuaaa

SEQ ID NO: 1012325 - RNA, 19 nt, Artificial Sequence
  Description of Artificial Sequence: Synthetic oligonucleotide
  Antisense strand to SEQ ID NO: 1012324
uuuaagcagauauuuccag

SEQ ID NO: 1012326 - RNA, 19 nt, Artificial Sequence
  Description of Artificial Sequence: Synthetic oligonucleotide
  Sense strand starting at position 2390 of SEQ ID NO: 914547
ggaaauaucugcuuaaacg

SEQ ID NO: 1012327 - RNA, 19 nt, Artificial Sequence
  Description of Artificial Sequence: Synthetic oligonucleotide
  Antisense strand to SEQ ID NO: 1012326
cguuuaagcagauauuucc

SEQ ID NO: 1012328 - RNA, 19 nt, Artificial Sequence
  Description of Artificial Sequence: Synthetic oligonucleotide
  Sense strand starting at position 2399 of SEQ ID NO: 914547
ugcuuaaacgaucagucau

SEQ ID NO: 1012329 - RNA, 19 nt, Artificial Sequence
  Description of Artificial Sequence: Synthetic oligonucleotide
  Antisense strand to SEQ ID NO: 1012328
augacugaucguuuaagca

SEQ ID NO: 1012330 - RNA, 19 nt, Artificial Sequence
  Description of Artificial Sequence: Synthetic oligonucleotide
  Sense strand starting at position 2605 of SEQ ID NO: 914547
aauacauguguacaucgaa

SEQ ID NO: 1012331 - RNA, 19 nt, Artificial Sequence
  Description of Artificial Sequence: Synthetic oligonucleotide
  Antisense strand to SEQ ID NO: 1012330
uucgauguacacauguauu

SEQ ID NO: 1012332 - RNA, 19 nt, Artificial Sequence
  Description of Artificial Sequence: Synthetic oligonucleotide
  Sense strand starting at position 2608 of SEQ ID NO: 914547
acauguguacaucgaauaa

SEQ ID NO: 1012333 - RNA, 19 nt, Artificial Sequence
  Description of Artificial Sequence: Synthetic oligonucleotide
  Antisense strand to SEQ ID NO: 1012332
uuauucgauguacacaugu

SEQ ID NO: 1012334 - RNA, 19 nt, Artificial Sequence
  Description of Artificial Sequence: Synthetic oligonucleotide
  Sense strand starting at position 2612 of SEQ ID NO: 914547
guguacaucgaauaaucaa

SEQ ID NO: 1012335 - RNA, 19 nt, Artificial Sequence
  Description of Artificial Sequence: Synthetic oligonucleotide
  Antisense strand to SEQ ID NO: 1012334
uugauuauucgauguacac

SEQ ID NO: 1012336 - RNA, 19 nt, Artificial Sequence
  Description of Artificial Sequence: Synthetic oligonucleotide
  Sense strand starting at position 2888 of SEQ ID NO: 914547
gggacucgaucuuuauucu

SEQ ID NO: 1012337 - RNA, 19 nt, Artificial Sequence
  Description of Artificial Sequence: Synthetic oligonucleotide
  Antisense strand to SEQ ID NO: 1012336
agaauaaagaucgaguccc

SEQ ID NO: 1012338 - RNA, 19 nt, Artificial Sequence
  Description of Artificial Sequence: Synthetic oligonucleotide
  Sense strand starting at position 2889 of SEQ ID NO: 914547
ggacucgaucuuuauucuu

SEQ ID NO: 1012339 - RNA, 19 nt, Artificial Sequence
  Description of Artificial Sequence: Synthetic oligonucleotide
  Antisense strand to SEQ ID NO: 1012338
aagaauaaagaucgagucc

SEQ ID NO: 1012340 - RNA, 19 nt, Artificial Sequence
  Description of Artificial Sequence: Synthetic oligonucleotide
  Sense strand starting at position 2912 of SEQ ID NO: 914547
gauguaggcguuuacacua

SEQ ID NO: 1012341 - RNA, 19 nt, Artificial Sequence
  Description of Artificial Sequence: Synthetic oligonucleotide
  Antisense strand to SEQ ID NO: 1012340
uaguguaaacgccuacauc

SEQ ID NO: 1012342 - RNA, 19 nt, Artificial Sequence
  Description of Artificial Sequence: Synthetic oligonucleotide
  Sense strand starting at position 2917 of SEQ ID NO: 914547
aggcguuuacacuauaaac

SEQ ID NO: 1012343 - RNA, 19 nt, Artificial Sequence
  Description of Artificial Sequence: Synthetic oligonucleotide
  Antisense strand to SEQ ID NO: 1012342
guuuauaguguaaacgccu

SEQ ID NO: 1012344 - RNA, 19 nt, Artificial Sequence
  Description of Artificial Sequence: Synthetic oligonucleotide
  Sense strand starting at position 2919 of SEQ ID NO: 914547
gcguuuacacuauaaacuu

SEQ ID NO: 1012345 - RNA, 19 nt, Artificial Sequence
  Description of Artificial Sequence: Synthetic oligonucleotide
  Antisense strand to SEQ ID NO: 1012344
aaguuuauaguguaaacgc

SEQ ID NO: 1012346 - RNA, 19 nt, Artificial Sequence
  Description of Artificial Sequence: Synthetic oligonucleotide
  Sense strand starting at position 3529 of SEQ ID NO: 914547
uugauuguucaagagugug

SEQ ID NO: 1012347 - RNA, 19 nt, Artificial Sequence
  Description of Artificial Sequence: Synthetic oligonucleotide
  Antisense strand to SEQ ID NO: 1012346
cacacucuugaacaaucaa

SEQ ID NO: 1012348 - RNA, 19 nt, Artificial Sequence
  Description of Artificial Sequence: Synthetic oligonucleotide
  Sense strand starting at position 3592 of SEQ ID NO: 914547
gccauugauuuccagauuu

SEQ ID NO: 1012349 - RNA, 19 nt, Artificial Sequence
  Description of Artificial Sequence: Synthetic oligonucleotide
  Antisense strand to SEQ ID NO: 1012348
aaaucuggaaaucaauggc

SEQ ID NO: 1012350 - RNA, 19 nt, Artificial Sequence
  Description of Artificial Sequence: Synthetic oligonucleotide
  Sense strand starting at position 3620 of SEQ ID NO: 914547
gucucuugugcggcauaua

SEQ ID NO: 1012351 - RNA, 19 nt, Artificial Sequence
  Description of Artificial Sequence: Synthetic oligonucleotide
  Antisense strand to SEQ ID NO: 1012350
uauaugccgcacaagagac

SEQ ID NO: 1012352 - RNA, 19 nt, Artificial Sequence
  Description of Artificial Sequence: Synthetic oligonucleotide
  Sense strand starting at position 3630 of SEQ ID NO: 914547
cggcauauaguugaaucuu

SEQ ID NO: 1012353 - RNA, 19 nt, Artificial Sequence
  Description of Artificial Sequence: Synthetic oligonucleotide
  Antisense strand to SEQ ID NO: 1012352
aagauucaacuauaugccg

SEQ ID NO: 1012354 - RNA, 19 nt, Artificial Sequence
  Description of Artificial Sequence: Synthetic oligonucleotide
  Sense strand starting at position 3807 of SEQ ID NO: 914547
ccaaucuccugguuuagga

SEQ ID NO: 1012355 - RNA, 19 nt, Artificial Sequence
  Description of Artificial Sequence: Synthetic oligonucleotide
  Antisense strand to SEQ ID NO: 1012354
uccuaaaccaggagauugg

SEQ ID NO: 1012356 - RNA, 19 nt, Artificial Sequence
  Description of Artificial Sequence: Synthetic oligonucleotide
  Sense strand starting at position 23 of SEQ ID NO: 914548
uaucaaagucagggucaaa

SEQ ID NO: 1012357 - RNA, 19 nt, Artificial Sequence
  Description of Artificial Sequence: Synthetic oligonucleotide
  Antisense strand to SEQ ID NO: 1012356
uuugacccugacuuugaua

SEQ ID NO: 1012358 - RNA, 19 nt, Artificial Sequence
  Description of Artificial Sequence: Synthetic oligonucleotide
  Sense strand starting at position 44 of SEQ ID NO: 914548
agggaacuuucccuuucua

SEQ ID NO: 1012359 - RNA, 19 nt, Artificial Sequence
  Description of Artificial Sequence: Synthetic oligonucleotide
  Antisense strand to SEQ ID NO: 1012358
uagaaagggaaaguucccu

SEQ ID NO: 1012360 - RNA, 19 nt, Artificial Sequence
  Description of Artificial Sequence: Synthetic oligonucleotide
  Sense strand starting at position 95 of SEQ ID NO: 914548
auguguacccacuggaaga

SEQ ID NO: 1012361 - RNA, 19 nt, Artificial Sequence
  Description of Artificial Sequence: Synthetic oligonucleotide
  Antisense strand to SEQ ID NO: 1012360
ucuuccaguggguacacau

SEQ ID NO: 1012362 - RNA, 19 nt, Artificial Sequence
  Description of Artificial Sequence: Synthetic oligonucleotide
  Sense strand starting at position 96 of SEQ ID NO: 914548
uguguacccacuggaagau

SEQ ID NO: 1012363 - RNA, 19 nt, Artificial Sequence
  Description of Artificial Sequence: Synthetic oligonucleotide
  Antisense strand to SEQ ID NO: 1012362
aucuuccaguggguacaca

SEQ ID NO: 1012364 - RNA, 19 nt, Artificial Sequence
  Description of Artificial Sequence: Synthetic oligonucleotide
  Sense strand starting at position 236 of SEQ ID NO: 914548
acuuaacugcauggaagau

SEQ ID NO: 1012365 - RNA, 19 nt, Artificial Sequence
  Description of Artificial Sequence: Synthetic oligonucleotide
  Antisense strand to SEQ ID NO: 1012364
aucuuccaugcaguuaagu

SEQ ID NO: 1012366 - RNA, 19 nt, Artificial Sequence
  Description of Artificial Sequence: Synthetic oligonucleotide
  Sense strand starting at position 385 of SEQ ID NO: 914548
ccucacucuccagaguaga

SEQ ID NO: 1012367 - RNA, 19 nt, Artificial Sequence
  Description of Artificial Sequence: Synthetic oligonucleotide
  Antisense strand to SEQ ID NO: 1012366
ucuacucuggagagugagg

SEQ ID NO: 1012368 - RNA, 19 nt, Artificial Sequence
  Description of Artificial Sequence: Synthetic oligonucleotide
  Sense strand starting at position 566 of SEQ ID NO: 914548
ugcccagcucuagauaaau

SEQ ID NO: 1012369 - RNA, 19 nt, Artificial Sequence
  Description of Artificial Sequence: Synthetic oligonucleotide
  Antisense strand to SEQ ID NO: 1012368
auuuaucuagagcugggca

SEQ ID NO: 1012370 - RNA, 19 nt, Artificial Sequence
  Description of Artificial Sequence: Synthetic oligonucleotide
  Sense strand starting at position 634 of SEQ ID NO: 914548
ugugcaugggucuauuauc

SEQ ID NO: 1012371 - RNA, 19 nt, Artificial Sequence
  Description of Artificial Sequence: Synthetic oligonucleotide
  Antisense strand to SEQ ID NO: 1012370
gauaauagacccaugcaca

SEQ ID NO: 1012372 - RNA, 19 nt, Artificial Sequence
  Description of Artificial Sequence: Synthetic oligonucleotide
  Sense strand starting at position 639 of SEQ ID NO: 914548
augggucuauuaucaguuu

SEQ ID NO: 1012373 - RNA, 19 nt, Artificial Sequence
  Description of Artificial Sequence: Synthetic oligonucleotide
  Antisense strand to SEQ ID NO: 1012372
aaacugauaauagacccau

SEQ ID NO: 1012374 - RNA, 19 nt, Artificial Sequence
  Description of Artificial Sequence: Synthetic oligonucleotide
  Sense strand starting at position 793 of SEQ ID NO: 914548
acuuaauuggaauggaguu

SEQ ID NO: 1012375 - RNA, 19 nt, Artificial Sequence
  Description of Artificial Sequence: Synthetic oligonucleotide
  Antisense strand to SEQ ID NO: 1012374
aacuccauuccaauuaagu

SEQ ID NO: 1012376 - RNA, 19 nt, Artificial Sequence
  Description of Artificial Sequence: Synthetic oligonucleotide
  Sense strand starting at position 888 of SEQ ID NO: 914548
gcagguugagaauguaaag

SEQ ID NO: 1012377 - RNA, 19 nt, Artificial Sequence
  Description of Artificial Sequence: Synthetic oligonucleotide
  Antisense strand to SEQ ID NO: 1012376
cuuuacauucucaaccugc

SEQ ID NO: 1012378 - RNA, 19 nt, Artificial Sequence
  Description of Artificial Sequence: Synthetic oligonucleotide
  Sense strand starting at position 928 of SEQ ID NO: 914548
ucaugaauaccguagcaaa

SEQ ID NO: 1012379 - RNA, 19 nt, Artificial Sequence
  Description of Artificial Sequence: Synthetic oligonucleotide
  Antisense strand to SEQ ID NO: 1012378
uuugcuacgguauucauga

SEQ ID NO: 1012380 - RNA, 19 nt, Artificial Sequence
  Description of Artificial Sequence: Synthetic oligonucleotide
  Sense strand starting at position 1110 of SEQ ID NO: 914548
aauggaguguagucuuuaa

SEQ ID NO: 1012381 - RNA, 19 nt, Artificial Sequence
  Description of Artificial Sequence: Synthetic oligonucleotide
  Antisense strand to SEQ ID NO: 1012380
uuaaagacuacacuccauu

SEQ ID NO: 1012382 - RNA, 19 nt, Artificial Sequence
  Description of Artificial Sequence: Synthetic oligonucleotide
  Sense strand starting at position 1114 of SEQ ID NO: 914548
gaguguagucuuuaaaguu

SEQ ID NO: 1012383 - RNA, 19 nt, Artificial Sequence
  Description of Artificial Sequence: Synthetic oligonucleotide
  Antisense strand to SEQ ID NO: 1012382
aacuuuaaagacuacacuc

SEQ ID NO: 1012384 - RNA, 19 nt, Artificial Sequence
  Description of Artificial Sequence: Synthetic oligonucleotide
  Sense strand starting at position 1246 of SEQ ID NO: 914548
cccaaagcuccugaugaca

SEQ ID NO: 1012385 - RNA, 19 nt, Artificial Sequence
  Description of Artificial Sequence: Synthetic oligonucleotide
  Antisense strand to SEQ ID NO: 1012384
ugucaucaggagcuuuggg

SEQ ID NO: 1012386 - RNA, 19 nt, Artificial Sequence
  Description of Artificial Sequence: Synthetic oligonucleotide
  Sense strand starting at position 1276 of SEQ ID NO: 914548
ugaacuccucgucagcaua

SEQ ID NO: 1012387 - RNA, 19 nt, Artificial Sequence
  Description of Artificial Sequence: Synthetic oligonucleotide
  Antisense strand to SEQ ID NO: 1012386
uaugcugacgaggaguuca

SEQ ID NO: 1012388 - RNA, 19 nt, Artificial Sequence
  Description of Artificial Sequence: Synthetic oligonucleotide
  Sense strand starting at position 1279 of SEQ ID NO: 914548
acuccucgucagcauauau

SEQ ID NO: 1012389 - RNA, 19 nt, Artificial Sequence
  Description of Artificial Sequence: Synthetic oligonucleotide
  Antisense strand to SEQ ID NO: 1012388
auauaugcugacgaggagu

SEQ ID NO: 1012390 - RNA, 19 nt, Artificial Sequence
  Description of Artificial Sequence: Synthetic oligonucleotide
  Sense strand starting at position 1436 of SEQ ID NO: 914548
gaggguaaugauugcuaac

SEQ ID NO: 1012391 - RNA, 19 nt, Artificial Sequence
  Description of Artificial Sequence: Synthetic oligonucleotide
  Antisense strand to SEQ ID NO: 1012390
guuagcaaucauuacccuc

SEQ ID NO: 1012392 - RNA, 19 nt, Artificial Sequence
  Description of Artificial Sequence: Synthetic oligonucleotide
  Sense strand starting at position 1438 of SEQ ID NO: 914548
ggguaaugauugcuaaccu

SEQ ID NO: 1012393 - RNA, 19 nt, Artificial Sequence
  Description of Artificial Sequence: Synthetic oligonucleotide
  Antisense strand to SEQ ID NO: 1012392
agguuagcaaucauuaccc

SEQ ID NO: 1012394 - RNA, 19 nt, Artificial Sequence
  Description of Artificial Sequence: Synthetic oligonucleotide
  Sense strand starting at position 2183 of SEQ ID NO: 914548
cuaggaguucccggaagug

SEQ ID NO: 1012395 - RNA, 19 nt, Artificial Sequence
  Description of Artificial Sequence: Synthetic oligonucleotide
  Antisense strand to SEQ ID NO: 1012394
cacuuccgggaacuccuag

SEQ ID NO: 1012396 - RNA, 19 nt, Artificial Sequence
  Description of Artificial Sequence: Synthetic oligonucleotide
  Sense strand starting at position 2315 of SEQ ID NO: 914548
gggauuacccuuugucuuc

SEQ ID NO: 1012397 - RNA, 19 nt, Artificial Sequence
  Description of Artificial Sequence: Synthetic oligonucleotide
  Antisense strand to SEQ ID NO: 1012396
gaagacaaaggguaauccc

SEQ ID NO: 1012398 - RNA, 19 nt, Artificial Sequence
  Description of Artificial Sequence: Synthetic oligonucleotide
  Sense strand starting at position 2423 of SEQ ID NO: 914548
aaauaaaggucgcuuccau

SEQ ID NO: 1012399 - RNA, 19 nt, Artificial Sequence
  Description of Artificial Sequence: Synthetic oligonucleotide
  Antisense strand to SEQ ID NO: 1012398
auggaagcgaccuuuauuu

SEQ ID NO: 1012400 - RNA, 19 nt, Artificial Sequence
  Description of Artificial Sequence: Synthetic oligonucleotide
  Sense strand starting at position 2438 of SEQ ID NO: 914548
ccauucuuuggugagccua

SEQ ID NO: 1012401 - RNA, 19 nt, Artificial Sequence
  Description of Artificial Sequence: Synthetic oligonucleotide
  Antisense strand to SEQ ID NO: 1012400
uaggcucaccaaagaaugg

SEQ ID NO: 1012402 - RNA, 19 nt, Artificial Sequence
  Description of Artificial Sequence: Synthetic oligonucleotide
  Sense strand starting at position 2460 of SEQ ID NO: 914548
ugugccggucuggaaauau

SEQ ID NO: 1012403 - RNA, 19 nt, Artificial Sequence
  Description of Artificial Sequence: Synthetic oligonucleotide
  Antisense strand to SEQ ID NO: 1012402
auauuuccagaccggcaca

SEQ ID NO: 1012404 - RNA, 19 nt, Artificial Sequence
  Description of Artificial Sequence: Synthetic oligonucleotide
  Sense strand starting at position 2469 of SEQ ID NO: 914548
cuggaaauaucugcuuaaa

SEQ ID NO: 1012405 - RNA, 19 nt, Artificial Sequence
  Description of Artificial Sequence: Synthetic oligonucleotide
  Antisense strand to SEQ ID NO: 1012404
uuuaagcagauauuuccag

SEQ ID NO: 1012406 - RNA, 19 nt, Artificial Sequence
  Description of Artificial Sequence: Synthetic oligonucleotide
  Sense strand starting at position 2471 of SEQ ID NO: 914548
ggaaauaucugcuuaaacg

SEQ ID NO: 1012407 - RNA, 19 nt, Artificial Sequence
  Description of Artificial Sequence: Synthetic oligonucleotide
  Antisense strand to SEQ ID NO: 1012406
cguuuaagcagauauuucc

SEQ ID NO: 1012408 - RNA, 19 nt, Artificial Sequence
  Description of Artificial Sequence: Synthetic oligonucleotide
  Sense strand starting at position 2480 of SEQ ID NO: 914548
ugcuuaaacgaucagucau

SEQ ID NO: 1012409 - RNA, 19 nt, Artificial Sequence
  Description of Artificial Sequence: Synthetic oligonucleotide
  Antisense strand to SEQ ID NO: 1012408
augacugaucguuuaagca

SEQ ID NO: 1012410 - RNA, 19 nt, Artificial Sequence
  Description of Artificial Sequence: Synthetic oligonucleotide
  Sense strand starting at position 2686 of SEQ ID NO: 914548
aauacauguguacaucgaa

SEQ ID NO: 1012411 - RNA, 19 nt, Artificial Sequence
  Description of Artificial Sequence: Synthetic oligonucleotide
  Antisense strand to SEQ ID NO: 1012410
uucgauguacacauguauu

SEQ ID NO: 1012412 - RNA, 19 nt, Artificial Sequence
  Description of Artificial Sequence: Synthetic oligonucleotide
  Sense strand starting at position 2689 of SEQ ID NO: 914548
acauguguacaucgaauaa

SEQ ID NO: 1012413 - RNA, 19 nt, Artificial Sequence
  Description of Artificial Sequence: Synthetic oligonucleotide
  Antisense strand to SEQ ID NO: 1012412
uuauucgauguacacaugu

SEQ ID NO: 1012414 - RNA, 19 nt, Artificial Sequence
  Description of Artificial Sequence: Synthetic oligonucleotide
  Sense strand starting at position 2693 of SEQ ID NO: 914548
guguacaucgaauaaucaa

SEQ ID NO: 1012415 - RNA, 19 nt, Artificial Sequence
  Description of Artificial Sequence: Synthetic oligonucleotide
  Antisense strand to SEQ ID NO: 1012414
uugauuauucgauguacac

SEQ ID NO: 1012416 - RNA, 19 nt, Artificial Sequence
  Description of Artificial Sequence: Synthetic oligonucleotide
  Sense strand starting at position 2969 of SEQ ID NO: 914548
gggacucgaucuuuauucu

SEQ ID NO: 1012417 - RNA, 19 nt, Artificial Sequence
  Description of Artificial Sequence: Synthetic oligonucleotide
  Antisense strand to SEQ ID NO: 1012416
agaauaaagaucgaguccc

SEQ ID NO: 1012418 - RNA, 19 nt, Artificial Sequence
  Description of Artificial Sequence: Synthetic oligonucleotide
  Sense strand starting at position 2970 of SEQ ID NO: 914548
ggacucgaucuuuauucuu

SEQ ID NO: 1012419 - RNA, 19 nt, Artificial Sequence
  Description of Artificial Sequence: Synthetic oligonucleotide
  Antisense strand to SEQ ID NO: 1012418
aagaauaaagaucgagucc

SEQ ID NO: 1012420 - RNA, 19 nt, Artificial Sequence
  Description of Artificial Sequence: Synthetic oligonucleotide
  Sense strand starting at position 2993 of SEQ ID NO: 914548
gauguaggcguuuacacua

SEQ ID NO: 1012421 - RNA, 19 nt, Artificial Sequence
  Description of Artificial Sequence: Synthetic oligonucleotide
  Antisense strand to SEQ ID NO: 1012420
uaguguaaacgccuacauc

SEQ ID NO: 1012422 - RNA, 19 nt, Artificial Sequence
  Description of Artificial Sequence: Synthetic oligonucleotide
  Sense strand starting at position 2998 of SEQ ID NO: 914548
aggcguuuacacuauaaac

SEQ ID NO: 1012423 - RNA, 19 nt, Artificial Sequence
  Description of Artificial Sequence: Synthetic oligonucleotide
  Antisense strand to SEQ ID NO: 1012422
guuuauaguguaaacgccu

SEQ ID NO: 1012424 - RNA, 19 nt, Artificial Sequence
  Description of Artificial Sequence: Synthetic oligonucleotide
  Sense strand starting at position 3000 of SEQ ID NO: 914548
gcguuuacacuauaaacuu

SEQ ID NO: 1012425 - RNA, 19 nt, Artificial Sequence
  Description of Artificial Sequence: Synthetic oligonucleotide
  Antisense strand to SEQ ID NO: 1012424
aaguuuauaguguaaacgc

SEQ ID NO: 1012426 - RNA, 19 nt, Artificial Sequence
  Description of Artificial Sequence: Synthetic oligonucleotide
  Sense strand starting at position 3610 of SEQ ID NO: 914548
uugauuguucaagagugug

SEQ ID NO: 1012427 - RNA, 19 nt, Artificial Sequence
  Description of Artificial Sequence: Synthetic oligonucleotide
  Antisense strand to SEQ ID NO: 1012426
cacacucuugaacaaucaa

SEQ ID NO: 1012428 - RNA, 19 nt, Artificial Sequence
  Description of Artificial Sequence: Synthetic oligonucleotide
  Sense strand starting at position 3673 of SEQ ID NO: 914548
gccauugauuuccagauuu

SEQ ID NO: 1012429 - RNA, 19 nt, Artificial Sequence
  Description of Artificial Sequence: Synthetic oligonucleotide
  Antisense strand to SEQ ID NO: 1012428
aaaucuggaaaucaauggc

SEQ ID NO: 1012430 - RNA, 19 nt, Artificial Sequence
  Description of Artificial Sequence: Synthetic oligonucleotide
  Sense strand starting at position 3701 of SEQ ID NO: 914548
gucucuugugcggcauaua

SEQ ID NO: 1012431 - RNA, 19 nt, Artificial Sequence
  Description of Artificial Sequence: Synthetic oligonucleotide
  Antisense strand to SEQ ID NO: 1012430
uauaugccgcacaagagac

SEQ ID NO: 1012432 - RNA, 19 nt, Artificial Sequence
  Description of Artificial Sequence: Synthetic oligonucleotide
  Sense strand starting at position 3711 of SEQ ID NO: 914548
cggcauauaguugaaucuu

SEQ ID NO: 1012433 - RNA, 19 nt, Artificial Sequence
  Description of Artificial Sequence: Synthetic oligonucleotide
  Antisense strand to SEQ ID NO: 1012432
aagauucaacuauaugccg

SEQ ID NO: 1012434 - RNA, 19 nt, Artificial Sequence
  Description of Artificial Sequence: Synthetic oligonucleotide
  Sense strand starting at position 3888 of SEQ ID NO: 914548
ccaaucuccugguuuagga

SEQ ID NO: 1012435 - RNA, 19 nt, Artificial Sequence
  Description of Artificial Sequence: Synthetic oligonucleotide
  Antisense strand to SEQ ID NO: 1012434
uccuaaaccaggagauugg

SEQ ID NO: 1012436 - RNA, 19 nt, Artificial Sequence
  Description of Artificial Sequence: Synthetic oligonucleotide
  Sense strand starting at position 114 of SEQ ID NO: 914549
caaggucuaggcuagcaau

SEQ ID NO: 1012437 - RNA, 19 nt, Artificial Sequence
  Description of Artificial Sequence: Synthetic oligonucleotide
  Antisense strand to SEQ ID NO: 1012436
auugcuagccuagaccuug

SEQ ID NO: 1012438 - RNA, 19 nt, Artificial Sequence
  Description of Artificial Sequence: Synthetic oligonucleotide
  Sense strand starting at position 149 of SEQ ID NO: 914549
accaguaauuuacaugcga

SEQ ID NO: 1012439 - RNA, 19 nt, Artificial Sequence
  Description of Artificial Sequence: Synthetic oligonucleotide
  Antisense strand to SEQ ID NO: 1012438
ucgcauguaaauuacuggu

SEQ ID NO: 1012440 - RNA, 19 nt, Artificial Sequence
  Description of Artificial Sequence: Synthetic oligonucleotide
  Sense strand starting at position 182 of SEQ ID NO: 914549
gcucuugguauugaggcaa

SEQ ID NO: 1012441 - RNA, 19 nt, Artificial Sequence
  Description of Artificial Sequence: Synthetic oligonucleotide
  Antisense strand to SEQ ID NO: 1012440
uugccucaauaccaagagc

SEQ ID NO: 1012442 - RNA, 19 nt, Artificial Sequence
  Description of Artificial Sequence: Synthetic oligonucleotide
  Sense strand starting at position 280 of SEQ ID NO: 914549
gugcauucucagcgacacu

SEQ ID NO: 1012443 - RNA, 19 nt, Artificial Sequence
  Description of Artificial Sequence: Synthetic oligonucleotide
  Antisense strand to SEQ ID NO: 1012442
agugucgcugagaaugcac

SEQ ID NO: 1012444 - RNA, 19 nt, Artificial Sequence
  Description of Artificial Sequence: Synthetic oligonucleotide
  Sense strand starting at position 292 of SEQ ID NO: 914549
cgacacuuauguccucaau

SEQ ID NO: 1012445 - RNA, 19 nt, Artificial Sequence
  Description of Artificial Sequence: Synthetic oligonucleotide
  Antisense strand to SEQ ID NO: 1012444
auugaggacauaagugucg

SEQ ID NO: 1012446 - RNA, 19 nt, Artificial Sequence
  Description of Artificial Sequence: Synthetic oligonucleotide
  Sense strand starting at position 317 of SEQ ID NO: 914549
cuacguucacucggucaga

SEQ ID NO: 1012447 - RNA, 19 nt, Artificial Sequence
  Description of Artificial Sequence: Synthetic oligonucleotide
  Antisense strand to SEQ ID NO: 1012446
ucugaccgagugaacguag

SEQ ID NO: 1012448 - RNA, 19 nt, Artificial Sequence
  Description of Artificial Sequence: Synthetic oligonucleotide
  Sense strand starting at position 328 of SEQ ID NO: 914549
cggucagagucgccuuaaa

SEQ ID NO: 1012449 - RNA, 19 nt, Artificial Sequence
  Description of Artificial Sequence: Synthetic oligonucleotide
  Antisense strand to SEQ ID NO: 1012448
uuuaaggcgacucugaccg

SEQ ID NO: 1012450 - RNA, 19 nt, Artificial Sequence
  Description of Artificial Sequence: Synthetic oligonucleotide
  Sense strand starting at position 422 of SEQ ID NO: 914549
cuugguuuguggcuuagaa

SEQ ID NO: 1012451 - RNA, 19 nt, Artificial Sequence
  Description of Artificial Sequence: Synthetic oligonucleotide
  Antisense strand to SEQ ID NO: 1012450
uucuaagccacaaaccaag

SEQ ID NO: 1012452 - RNA, 19 nt, Artificial Sequence
  Description of Artificial Sequence: Synthetic oligonucleotide
  Sense strand starting at position 424 of SEQ ID NO: 914549
ugguuuguggcuuagaaug

SEQ ID NO: 1012453 - RNA, 19 nt, Artificial Sequence
  Description of Artificial Sequence: Synthetic oligonucleotide
  Antisense strand to SEQ ID NO: 1012452
cauucuaagccacaaacca

SEQ ID NO: 1012454 - RNA, 19 nt, Artificial Sequence
  Description of Artificial Sequence: Synthetic oligonucleotide
  Sense strand starting at position 429 of SEQ ID NO: 914549
uguggcuuagaaugaaaua

SEQ ID NO: 1012455 - RNA, 19 nt, Artificial Sequence
  Description of Artificial Sequence: Synthetic oligonucleotide
  Antisense strand to SEQ ID NO: 1012454
uauuucauucuaagccaca

SEQ ID NO: 1012456 - RNA, 19 nt, Artificial Sequence
  Description of Artificial Sequence: Synthetic oligonucleotide
  Sense strand starting at position 546 of SEQ ID NO: 914549
uuuauucgguaacuuacaa

SEQ ID NO: 1012457 - RNA, 19 nt, Artificial Sequence
  Description of Artificial Sequence: Synthetic oligonucleotide
  Antisense strand to SEQ ID NO: 1012456
uuguaaguuaccgaauaaa

SEQ ID NO: 1012458 - RNA, 19 nt, Artificial Sequence
  Description of Artificial Sequence: Synthetic oligonucleotide
  Sense strand starting at position 647 of SEQ ID NO: 914549
ugggaauauuaacuuuguu

SEQ ID NO: 1012459 - RNA, 19 nt, Artificial Sequence
  Description of Artificial Sequence: Synthetic oligonucleotide
  Antisense strand to SEQ ID NO: 1012458
aacaaaguuaauauuccca

SEQ ID NO: 1012460 - RNA, 19 nt, Artificial Sequence
  Description of Artificial Sequence: Synthetic oligonucleotide
  Sense strand starting at position 667 of SEQ ID NO: 914549
uguauuuaaccugguaggu

SEQ ID NO: 1012461 - RNA, 19 nt, Artificial Sequence
  Description of Artificial Sequence: Synthetic oligonucleotide
  Antisense strand to SEQ ID NO: 1012460
accuaccagguuaaauaca

SEQ ID NO: 1012462 - RNA, 19 nt, Artificial Sequence
  Description of Artificial Sequence: Synthetic oligonucleotide
  Sense strand starting at position 697 of SEQ ID NO: 914549
uuaacucucugaguuguuu

SEQ ID NO: 1012463 - RNA, 19 nt, Artificial Sequence
  Description of Artificial Sequence: Synthetic oligonucleotide
  Antisense strand to SEQ ID NO: 1012462
aaacaacucagagaguuaa

SEQ ID NO: 1012464 - RNA, 19 nt, Artificial Sequence
  Description of Artificial Sequence: Synthetic oligonucleotide
  Sense strand starting at position 745 of SEQ ID NO: 914549
cuuugaguucugcggcuuu

SEQ ID NO: 1012465 - RNA, 19 nt, Artificial Sequence
  Description of Artificial Sequence: Synthetic oligonucleotide
  Antisense strand to SEQ ID NO: 1012464
aaagccgcagaacucaaag

SEQ ID NO: 1012466 - RNA, 19 nt, Artificial Sequence
  Description of Artificial Sequence: Synthetic oligonucleotide
  Sense strand starting at position 780 of SEQ ID NO: 914549
ggauuuacauuauaaagac

SEQ ID NO: 1012467 - RNA, 19 nt, Artificial Sequence
  Description of Artificial Sequence: Synthetic oligonucleotide
  Antisense strand to SEQ ID NO: 1012466
gucuuuauaauguaaaucc

SEQ ID NO: 1012468 - RNA, 19 nt, Artificial Sequence
  Description of Artificial Sequence: Synthetic oligonucleotide
  Sense strand starting at position 2151 of SEQ ID NO: 914549
ggacgagauuccucacccu

SEQ ID NO: 1012469 - RNA, 19 nt, Artificial Sequence
  Description of Artificial Sequence: Synthetic oligonucleotide
  Antisense strand to SEQ ID NO: 1012468
agggugaggaaucucgucc

SEQ ID NO: 1012470 - RNA, 19 nt, Artificial Sequence
  Description of Artificial Sequence: Synthetic oligonucleotide
  Sense strand starting at position 2249 of SEQ ID NO: 914549
gcugauccucgcgacuuau

SEQ ID NO: 1012471 - RNA, 19 nt, Artificial Sequence
  Description of Artificial Sequence: Synthetic oligonucleotide
  Antisense strand to SEQ ID NO: 1012470
auaagucgcgaggaucagc

SEQ ID NO: 1012472 - RNA, 19 nt, Artificial Sequence
  Description of Artificial Sequence: Synthetic oligonucleotide
  Sense strand starting at position 2282 of SEQ ID NO: 914549
ccguguaaugcuccaggca

SEQ ID NO: 1012473 - RNA, 19 nt, Artificial Sequence
  Description of Artificial Sequence: Synthetic oligonucleotide
  Antisense strand to SEQ ID NO: 1012472
ugccuggagcauuacacgg

SEQ ID NO: 1012474 - RNA, 19 nt, Artificial Sequence
  Description of Artificial Sequence: Synthetic oligonucleotide
  Sense strand starting at position 2528 of SEQ ID NO: 914549
agugauagaucggacauug

SEQ ID NO: 1012475 - RNA, 19 nt, Artificial Sequence
  Description of Artificial Sequence: Synthetic oligonucleotide
  Antisense strand to SEQ ID NO: 1012474
caauguccgaucuaucacu

SEQ ID NO: 1012476 - RNA, 19 nt, Artificial Sequence
  Description of Artificial Sequence: Synthetic oligonucleotide
  Sense strand starting at position 2637 of SEQ ID NO: 914549
cucaucuagcuaggauaaa

SEQ ID NO: 1012477 - RNA, 19 nt, Artificial Sequence
  Description of Artificial Sequence: Synthetic oligonucleotide
  Antisense strand to SEQ ID NO: 1012476
uuuauccuagcuagaugag

SEQ ID NO: 1012478 - RNA, 19 nt, Artificial Sequence
  Description of Artificial Sequence: Synthetic oligonucleotide
  Sense strand starting at position 2695 of SEQ ID NO: 914549
uaauucuuccagcgucaag

SEQ ID NO: 1012479 - RNA, 19 nt, Artificial Sequence
  Description of Artificial Sequence: Synthetic oligonucleotide
  Antisense strand to SEQ ID NO: 1012478
cuugacgcuggaagaauua

SEQ ID NO: 1012480 - RNA, 19 nt, Artificial Sequence
  Description of Artificial Sequence: Synthetic oligonucleotide
  Sense strand starting at position 2944 of SEQ ID NO: 914549
cccuaucuuugcccgcaau

SEQ ID NO: 1012481 - RNA, 19 nt, Artificial Sequence
  Description of Artificial Sequence: Synthetic oligonucleotide
  Antisense strand to SEQ ID NO: 1012480
auugcgggcaaagauaggg

SEQ ID NO: 1012482 - RNA, 19 nt, Artificial Sequence
  Description of Artificial Sequence: Synthetic oligonucleotide
  Sense strand starting at position 3005 of SEQ ID NO: 914549
ccauaaaugcaccgauguu

SEQ ID NO: 1012483 - RNA, 19 nt, Artificial Sequence
  Description of Artificial Sequence: Synthetic oligonucleotide
  Antisense strand to SEQ ID NO: 1012482
aacaucggugcauuuaugg

SEQ ID NO: 1012484 - RNA, 19 nt, Artificial Sequence
  Description of Artificial Sequence: Synthetic oligonucleotide
  Sense strand starting at position 3014 of SEQ ID NO: 914549
caccgauguuaugaacaaa

SEQ ID NO: 1012485 - RNA, 19 nt, Artificial Sequence
  Description of Artificial Sequence: Synthetic oligonucleotide
  Antisense strand to SEQ ID NO: 1012484
uuuguucauaacaucggug

SEQ ID NO: 1012486 - RNA, 19 nt, Artificial Sequence
  Description of Artificial Sequence: Synthetic oligonucleotide
  Sense strand starting at position 3124 of SEQ ID NO: 914549
cuuucuguaucauuuaguu

SEQ ID NO: 1012487 - RNA, 19 nt, Artificial Sequence
  Description of Artificial Sequence: Synthetic oligonucleotide
  Antisense strand to SEQ ID NO: 1012486
aacuaaaugauacagaaag

SEQ ID NO: 1012488 - RNA, 19 nt, Artificial Sequence
  Description of Artificial Sequence: Synthetic oligonucleotide
  Sense strand starting at position 3128 of SEQ ID NO: 914549
cuguaucauuuaguuguua

SEQ ID NO: 1012489 - RNA, 19 nt, Artificial Sequence
  Description of Artificial Sequence: Synthetic oligonucleotide
  Antisense strand to SEQ ID NO: 1012488
uaacaacuaaaugauacag

SEQ ID NO: 1012490 - RNA, 19 nt, Artificial Sequence
  Description of Artificial Sequence: Synthetic oligonucleotide
  Sense strand starting at position 3140 of SEQ ID NO: 914549
guuguuaccgcagaagaau

SEQ ID NO: 1012491 - RNA, 19 nt, Artificial Sequence
  Description of Artificial Sequence: Synthetic oligonucleotide
  Antisense strand to SEQ ID NO: 1012490
auucuucugcgguaacaac

SEQ ID NO: 1012492 - RNA, 19 nt, Artificial Sequence
  Description of Artificial Sequence: Synthetic oligonucleotide
  Sense strand starting at position 3261 of SEQ ID NO: 914549
gaugcaagcugucuguaag

SEQ ID NO: 1012493 - RNA, 19 nt, Artificial Sequence
  Description of Artificial Sequence: Synthetic oligonucleotide
  Antisense strand to SEQ ID NO: 1012492
cuuacagacagcuugcauc

SEQ ID NO: 1012494 - RNA, 19 nt, Artificial Sequence
  Description of Artificial Sequence: Synthetic oligonucleotide
  Sense strand starting at position 3374 of SEQ ID NO: 914549
uugacuaugcugugaucca

SEQ ID NO: 1012495 - RNA, 19 nt, Artificial Sequence
  Description of Artificial Sequence: Synthetic oligonucleotide
  Antisense strand to SEQ ID NO: 1012494
uggaucacagcauagucaa

SEQ ID NO: 1012496 - RNA, 19 nt, Artificial Sequence
  Description of Artificial Sequence: Synthetic oligonucleotide
  Sense strand starting at position 3441 of SEQ ID NO: 914549
cccaccauugcagguauaa

SEQ ID NO: 1012497 - RNA, 19 nt, Artificial Sequence
  Description of Artificial Sequence: Synthetic oligonucleotide
  Antisense strand to SEQ ID NO: 1012496
uuauaccugcaaugguggg

SEQ ID NO: 1012498 - RNA, 19 nt, Artificial Sequence
  Description of Artificial Sequence: Synthetic oligonucleotide
  Sense strand starting at position 3502 of SEQ ID NO: 914549
gauuauccuguaggauaga

SEQ ID NO: 1012499 - RNA, 19 nt, Artificial Sequence
  Description of Artificial Sequence: Synthetic oligonucleotide
  Antisense strand to SEQ ID NO: 1012498
ucuauccuacaggauaauc

SEQ ID NO: 1012500 - RNA, 19 nt, Artificial Sequence
  Description of Artificial Sequence: Synthetic oligonucleotide
  Sense strand starting at position 3503 of SEQ ID NO: 914549
auuauccuguaggauagau

SEQ ID NO: 1012501 - RNA, 19 nt, Artificial Sequence
  Description of Artificial Sequence: Synthetic oligonucleotide
  Antisense strand to SEQ ID NO: 1012500
aucuauccuacaggauaau

SEQ ID NO: 1012502 - RNA, 19 nt, Artificial Sequence
  Description of Artificial Sequence: Synthetic oligonucleotide
  Sense strand starting at position 3627 of SEQ ID NO: 914549
gggcccugucuccgauuau

SEQ ID NO: 1012503 - RNA, 19 nt, Artificial Sequence
  Description of Artificial Sequence: Synthetic oligonucleotide
  Antisense strand to SEQ ID NO: 1012502
auaaucggagacagggccc

SEQ ID NO: 1012504 - RNA, 19 nt, Artificial Sequence
  Description of Artificial Sequence: Synthetic oligonucleotide
  Sense strand starting at position 3631 of SEQ ID NO: 914549
ccugucuccgauuauggau

SEQ ID NO: 1012505 - RNA, 19 nt, Artificial Sequence
  Description of Artificial Sequence: Synthetic oligonucleotide
  Antisense strand to SEQ ID NO: 1012504
auccauaaucggagacagg

SEQ ID NO: 1012506 - RNA, 19 nt, Artificial Sequence
  Description of Artificial Sequence: Synthetic oligonucleotide
  Sense strand starting at position 3719 of SEQ ID NO: 914549
uugcauuucuuugagguua

SEQ ID NO: 1012507 - RNA, 19 nt, Artificial Sequence
  Description of Artificial Sequence: Synthetic oligonucleotide
  Antisense strand to SEQ ID NO: 1012506
uaaccucaaagaaaugcaa

SEQ ID NO: 1012508 - RNA, 19 nt, Artificial Sequence
  Description of Artificial Sequence: Synthetic oligonucleotide
  Sense strand starting at position 3724 of SEQ ID NO: 914549
uuucuuugagguuagaagu

SEQ ID NO: 1012509 - RNA, 19 nt, Artificial Sequence
  Description of Artificial Sequence: Synthetic oligonucleotide
  Antisense strand to SEQ ID NO: 1012508
acuucuaaccucaaagaaa

SEQ ID NO: 1012510 - RNA, 19 nt, Artificial Sequence
  Description of Artificial Sequence: Synthetic oligonucleotide
  Sense strand starting at position 3927 of SEQ ID NO: 914549
cgcgguuugcacuacggaa

SEQ ID NO: 1012511 - RNA, 19 nt, Artificial Sequence
  Description of Artificial Sequence: Synthetic oligonucleotide
  Antisense strand to SEQ ID NO: 1012510
uuccguagugcaaaccgcg

SEQ ID NO: 1012512 - RNA, 19 nt, Artificial Sequence
  Description of Artificial Sequence: Synthetic oligonucleotide
  Sense strand starting at position 3952 of SEQ ID NO: 914549
cugucauucucaccgcaaa

SEQ ID NO: 1012513 - RNA, 19 nt, Artificial Sequence
  Description of Artificial Sequence: Synthetic oligonucleotide
  Antisense strand to SEQ ID NO: 1012512
uuugcggugagaaugacag

SEQ ID NO: 1012514 - RNA, 19 nt, Artificial Sequence
  Description of Artificial Sequence: Synthetic oligonucleotide
  Sense strand starting at position 3953 of SEQ ID NO: 914549
ugucauucucaccgcaaau

SEQ ID NO: 1012515 - RNA, 19 nt, Artificial Sequence
  Description of Artificial Sequence: Synthetic oligonucleotide
  Antisense strand to SEQ ID NO: 1012514
auuugcggugagaaugaca

SEQ ID NO: 1012516 - RNA, 19 nt, Artificial Sequence
  Description of Artificial Sequence: Synthetic oligonucleotide
  Sense strand starting at position 340 of SEQ ID NO: 914550
gcagcaaacccuuaggaga

SEQ ID NO: 1012517 - RNA, 19 nt, Artificial Sequence
  Description of Artificial Sequence: Synthetic oligonucleotide
  Antisense strand to SEQ ID NO: 1012516
ucuccuaaggguuugcugc

SEQ ID NO: 1012518 - RNA, 19 nt, Artificial Sequence
  Description of Artificial Sequence: Synthetic oligonucleotide
  Sense strand starting at position 525 of SEQ ID NO: 914550
gcugcugccucaugaaaug

SEQ ID NO: 1012519 - RNA, 19 nt, Artificial Sequence
  Description of Artificial Sequence: Synthetic oligonucleotide
  Antisense strand to SEQ ID NO: 1012518
cauuucaugaggcagcagc

SEQ ID NO: 1012520 - RNA, 19 nt, Artificial Sequence
  Description of Artificial Sequence: Synthetic oligonucleotide
  Sense strand starting at position 540 of SEQ ID NO: 914550
aaugcaaauucugcgggaa

SEQ ID NO: 1012521 - RNA, 19 nt, Artificial Sequence
  Description of Artificial Sequence: Synthetic oligonucleotide
  Antisense strand to SEQ ID NO: 1012520
uucccgcagaauuugcauu

SEQ ID NO: 1012522 - RNA, 19 nt, Artificial Sequence
  Description of Artificial Sequence: Synthetic oligonucleotide
  Sense strand starting at position 541 of SEQ ID NO: 914550
augcaaauucugcgggaaa

SEQ ID NO: 1012523 - RNA, 19 nt, Artificial Sequence
  Description of Artificial Sequence: Synthetic oligonucleotide
  Antisense strand to SEQ ID NO: 1012522
uuucccgcagaauuugcau

SEQ ID NO: 1012524 - RNA, 19 nt, Artificial Sequence
  Description of Artificial Sequence: Synthetic oligonucleotide
  Sense strand starting at position 542 of SEQ ID NO: 914550
ugcaaauucugcgggaaau

SEQ ID NO: 1012525 - RNA, 19 nt, Artificial Sequence
  Description of Artificial Sequence: Synthetic oligonucleotide
  Antisense strand to SEQ ID NO: 1012524
auuucccgcagaauuugca

SEQ ID NO: 1012526 - RNA, 19 nt, Artificial Sequence
  Description of Artificial Sequence: Synthetic oligonucleotide
  Sense strand starting at position 543 of SEQ ID NO: 914550
gcaaauucugcgggaaauc

SEQ ID NO: 1012527 - RNA, 19 nt, Artificial Sequence
  Description of Artificial Sequence: Synthetic oligonucleotide
  Antisense strand to SEQ ID NO: 1012526
gauuucccgcagaauuugc

SEQ ID NO: 1012528 - RNA, 19 nt, Artificial Sequence
  Description of Artificial Sequence: Synthetic oligonucleotide
  Sense strand starting at position 544 of SEQ ID NO: 914550
caaauucugcgggaaauca

SEQ ID NO: 1012529 - RNA, 19 nt, Artificial Sequence
  Description of Artificial Sequence: Synthetic oligonucleotide
  Antisense strand to SEQ ID NO: 1012528
ugauuucccgcagaauuug

SEQ ID NO: 1012530 - RNA, 19 nt, Artificial Sequence
  Description of Artificial Sequence: Synthetic oligonucleotide
  Sense strand starting at position 917 of SEQ ID NO: 914550
gagcgauuaccagggcugu

SEQ ID NO: 1012531 - RNA, 19 nt, Artificial Sequence
  Description of Artificial Sequence: Synthetic oligonucleotide
  Antisense strand to SEQ ID NO: 1012530
acagcccugguaaucgcuc

SEQ ID NO: 1012532 - RNA, 19 nt, Artificial Sequence
  Description of Artificial Sequence: Synthetic oligonucleotide
  Sense strand starting at position 1016 of SEQ ID NO: 914550
cuuccuuauucugguccua

SEQ ID NO: 1012533 - RNA, 19 nt, Artificial Sequence
  Description of Artificial Sequence: Synthetic oligonucleotide
  Antisense strand to SEQ ID NO: 1012532
uaggaccagaauaaggaag

SEQ ID NO: 1012534 - RNA, 19 nt, Artificial Sequence
  Description of Artificial Sequence: Synthetic oligonucleotide
  Sense strand starting at position 1018 of SEQ ID NO: 914550
uccuuauucugguccuauu

SEQ ID NO: 1012535 - RNA, 19 nt, Artificial Sequence
  Description of Artificial Sequence: Synthetic oligonucleotide
  Antisense strand to SEQ ID NO: 1012534
aauaggaccagaauaagga

SEQ ID NO: 1012536 - RNA, 19 nt, Artificial Sequence
  Description of Artificial Sequence: Synthetic oligonucleotide
  Sense strand starting at position 1029 of SEQ ID NO: 914550
guccuauuggccuggaaac

SEQ ID NO: 1012537 - RNA, 19 nt, Artificial Sequence
  Description of Artificial Sequence: Synthetic oligonucleotide
  Antisense strand to SEQ ID NO: 1012536
guuuccaggccaauaggac

SEQ ID NO: 1012538 - RNA, 19 nt, Artificial Sequence
  Description of Artificial Sequence: Synthetic oligonucleotide
  Sense strand starting at position 1030 of SEQ ID NO: 914550
uccuauuggccuggaaaca

SEQ ID NO: 1012539 - RNA, 19 nt, Artificial Sequence
  Description of Artificial Sequence: Synthetic oligonucleotide
  Antisense strand to SEQ ID NO: 1012538
uguuuccaggccaauagga

SEQ ID NO: 1012540 - RNA, 19 nt, Artificial Sequence
  Description of Artificial Sequence: Synthetic oligonucleotide
  Sense strand starting at position 1157 of SEQ ID NO: 914550
gcgagugcgugcagacaaa

SEQ ID NO: 1012541 - RNA, 19 nt, Artificial Sequence
  Description of Artificial Sequence: Synthetic oligonucleotide
  Antisense strand to SEQ ID NO: 1012540
uuugucugcacgcacucgc

SEQ ID NO: 1012542 - RNA, 19 nt, Artificial Sequence
  Description of Artificial Sequence: Synthetic oligonucleotide
  Sense strand starting at position 2088 of SEQ ID NO: 914550
gagaucugaucccaaguga

SEQ ID NO: 1012543 - RNA, 19 nt, Artificial Sequence
  Description of Artificial Sequence: Synthetic oligonucleotide
  Antisense strand to SEQ ID NO: 1012542
ucacuugggaucagaucuc

SEQ ID NO: 1012544 - RNA, 19 nt, Artificial Sequence
  Description of Artificial Sequence: Synthetic oligonucleotide
  Sense strand starting at position 2842 of SEQ ID NO: 914550
gaccgagacgcucagguuu

SEQ ID NO: 1012545 - RNA, 19 nt, Artificial Sequence
  Description of Artificial Sequence: Synthetic oligonucleotide
  Antisense strand to SEQ ID NO: 1012544
aaaccugagcgucucgguc

SEQ ID NO: 1012546 - RNA, 19 nt, Artificial Sequence
  Description of Artificial Sequence: Synthetic oligonucleotide
  Sense strand starting at position 3746 of SEQ ID NO: 914550
auguuuaacuuagcaguau

SEQ ID NO: 1012547 - RNA, 19 nt, Artificial Sequence
  Description of Artificial Sequence: Synthetic oligonucleotide
  Antisense strand to SEQ ID NO: 1012546
auacugcuaaguuaaacau

SEQ ID NO: 1012548 - RNA, 19 nt, Artificial Sequence
  Description of Artificial Sequence: Synthetic oligonucleotide
  Sense strand starting at position 3747 of SEQ ID NO: 914550
uguuuaacuuagcaguauu

SEQ ID NO: 1012549 - RNA, 19 nt, Artificial Sequence
  Description of Artificial Sequence: Synthetic oligonucleotide
  Antisense strand to SEQ ID NO: 1012548
aauacugcuaaguuaaaca

SEQ ID NO: 1012550 - RNA, 19 nt, Artificial Sequence
  Description of Artificial Sequence: Synthetic oligonucleotide
  Sense strand starting at position 3767 of SEQ ID NO: 914550
aguguauauguauggguga

SEQ ID NO: 1012551 - RNA, 19 nt, Artificial Sequence
  Description of Artificial Sequence: Synthetic oligonucleotide
  Antisense strand to SEQ ID NO: 1012550
ucacccauacauauacacu

SEQ ID NO: 1012552 - RNA, 19 nt, Artificial Sequence
  Description of Artificial Sequence: Synthetic oligonucleotide
  Sense strand starting at position 3768 of SEQ ID NO: 914550
guguauauguaugggugaa

SEQ ID NO: 1012553 - RNA, 19 nt, Artificial Sequence
  Description of Artificial Sequence: Synthetic oligonucleotide
  Antisense strand to SEQ ID NO: 1012552
uucacccauacauauacac

SEQ ID NO: 1012554 - RNA, 19 nt, Artificial Sequence
  Description of Artificial Sequence: Synthetic oligonucleotide
  Sense strand starting at position 3769 of SEQ ID NO: 914550
uguauauguaugggugaac

SEQ ID NO: 1012555 - RNA, 19 nt, Artificial Sequence
  Description of Artificial Sequence: Synthetic oligonucleotide
  Antisense strand to SEQ ID NO: 1012554
guucacccauacauauaca

SEQ ID NO: 1012556 - RNA, 19 nt, Artificial Sequence
  Description of Artificial Sequence: Synthetic oligonucleotide
  Sense strand starting at position 219 of SEQ ID NO: 914551
ggaugugcugcuuaaugga

SEQ ID NO: 1012557 - RNA, 19 nt, Artificial Sequence
  Description of Artificial Sequence: Synthetic oligonucleotide
  Antisense strand to SEQ ID NO: 1012556
uccauuaagcagcacaucc

SEQ ID NO: 1012558 - RNA, 19 nt, Artificial Sequence
  Description of Artificial Sequence: Synthetic oligonucleotide
  Sense strand starting at position 349 of SEQ ID NO: 914551
gcucaaguccucuaaggac

SEQ ID NO: 1012559 - RNA, 19 nt, Artificial Sequence
  Description of Artificial Sequence: Synthetic oligonucleotide
  Antisense strand to SEQ ID NO: 1012558
guccuuagaggacuugagc

SEQ ID NO: 1012560 - RNA, 19 nt, Artificial Sequence
  Description of Artificial Sequence: Synthetic oligonucleotide
  Sense strand starting at position 406 of SEQ ID NO: 914551
gguagaggucagcagguaa

SEQ ID NO: 1012561 - RNA, 19 nt, Artificial Sequence
  Description of Artificial Sequence: Synthetic oligonucleotide
  Antisense strand to SEQ ID NO: 1012560
uuaccugcugaccucuacc

SEQ ID NO: 1012562 - RNA, 19 nt, Artificial Sequence
  Description of Artificial Sequence: Synthetic oligonucleotide
  Sense strand starting at position 427 of SEQ ID NO: 914551
agucucaagugcuugauca

SEQ ID NO: 1012563 - RNA, 19 nt, Artificial Sequence
  Description of Artificial Sequence: Synthetic oligonucleotide
  Antisense strand to SEQ ID NO: 1012562
ugaucaagcacuugagacu

SEQ ID NO: 1012564 - RNA, 19 nt, Artificial Sequence
  Description of Artificial Sequence: Synthetic oligonucleotide
  Sense strand starting at position 429 of SEQ ID NO: 914551
ucucaagugcuugaucaca

SEQ ID NO: 1012565 - RNA, 19 nt, Artificial Sequence
  Description of Artificial Sequence: Synthetic oligonucleotide
  Antisense strand to SEQ ID NO: 1012564
ugugaucaagcacuugaga

SEQ ID NO: 1012566 - RNA, 19 nt, Artificial Sequence
  Description of Artificial Sequence: Synthetic oligonucleotide
  Sense strand starting at position 492 of SEQ ID NO: 914551
acuggugguucacugaaga

SEQ ID NO: 1012567 - RNA, 19 nt, Artificial Sequence
  Description of Artificial Sequence: Synthetic oligonucleotide
  Antisense strand to SEQ ID NO: 1012566
ucuucagugaaccaccagu

SEQ ID NO: 1012568 - RNA, 19 nt, Artificial Sequence
  Description of Artificial Sequence: Synthetic oligonucleotide
  Sense strand starting at position 837 of SEQ ID NO: 914551
gagccaucacccuauguug

SEQ ID NO: 1012569 - RNA, 19 nt, Artificial Sequence
  Description of Artificial Sequence: Synthetic oligonucleotide
  Antisense strand to SEQ ID NO: 1012568
caacauagggugauggcuc

SEQ ID NO: 1012570 - RNA, 19 nt, Artificial Sequence
  Description of Artificial Sequence: Synthetic oligonucleotide
  Sense strand starting at position 938 of SEQ ID NO: 914551
aggguagcacccugaaauu

SEQ ID NO: 1012571 - RNA, 19 nt, Artificial Sequence
  Description of Artificial Sequence: Synthetic oligonucleotide
  Antisense strand to SEQ ID NO: 1012570
aauuucagggugcuacccu

SEQ ID NO: 1012572 - RNA, 19 nt, Artificial Sequence
  Description of Artificial Sequence: Synthetic oligonucleotide
  Sense strand starting at position 1151 of SEQ ID NO: 914551
cgggauuggugucucuuga

SEQ ID NO: 1012573 - RNA, 19 nt, Artificial Sequence
  Description of Artificial Sequence: Synthetic oligonucleotide
  Antisense strand to SEQ ID NO: 1012572
ucaagagacaccaaucccg

SEQ ID NO: 1012574 - RNA, 19 nt, Artificial Sequence
  Description of Artificial Sequence: Synthetic oligonucleotide
  Sense strand starting at position 1158 of SEQ ID NO: 914551
ggugucucuugagcucaga

SEQ ID NO: 1012575 - RNA, 19 nt, Artificial Sequence
  Description of Artificial Sequence: Synthetic oligonucleotide
  Antisense strand to SEQ ID NO: 1012574
ucugagcucaagagacacc

SEQ ID NO: 1012576 - RNA, 19 nt, Artificial Sequence
  Description of Artificial Sequence: Synthetic oligonucleotide
  Sense strand starting at position 2070 of SEQ ID NO: 914551
agggcguggcucgaggaau

SEQ ID NO: 1012577 - RNA, 19 nt, Artificial Sequence
  Description of Artificial Sequence: Synthetic oligonucleotide
  Antisense strand to SEQ ID NO: 1012576
auuccucgagccacgcccu

SEQ ID NO: 1012578 - RNA, 19 nt, Artificial Sequence
  Description of Artificial Sequence: Synthetic oligonucleotide
  Sense strand starting at position 2162 of SEQ ID NO: 914551
ggcuuaaagcaacaauagu

SEQ ID NO: 1012579 - RNA, 19 nt, Artificial Sequence
  Description of Artificial Sequence: Synthetic oligonucleotide
  Antisense strand to SEQ ID NO: 1012578
acuauuguugcuuuaagcc

SEQ ID NO: 1012580 - RNA, 19 nt, Artificial Sequence
  Description of Artificial Sequence: Synthetic oligonucleotide
  Sense strand starting at position 2189 of SEQ ID NO: 914551
cgauaacaguguuccugga

SEQ ID NO: 1012581 - RNA, 19 nt, Artificial Sequence
  Description of Artificial Sequence: Synthetic oligonucleotide
  Antisense strand to SEQ ID NO: 1012580
uccaggaacacuguuaucg

SEQ ID NO: 1012582 - RNA, 19 nt, Artificial Sequence
  Description of Artificial Sequence: Synthetic oligonucleotide
  Sense strand starting at position 2233 of SEQ ID NO: 914551
accacugucccguaaauug

SEQ ID NO: 1012583 - RNA, 19 nt, Artificial Sequence
  Description of Artificial Sequence: Synthetic oligonucleotide
  Antisense strand to SEQ ID NO: 1012582
caauuuacgggacaguggu

SEQ ID NO: 1012584 - RNA, 19 nt, Artificial Sequence
  Description of Artificial Sequence: Synthetic oligonucleotide
  Sense strand starting at position 2256 of SEQ ID NO: 914551
gggagcuauuuccauccuu

SEQ ID NO: 1012585 - RNA, 19 nt, Artificial Sequence
  Description of Artificial Sequence: Synthetic oligonucleotide
  Antisense strand to SEQ ID NO: 1012584
aaggauggaaauagcuccc

SEQ ID NO: 1012586 - RNA, 19 nt, Artificial Sequence
  Description of Artificial Sequence: Synthetic oligonucleotide
  Sense strand starting at position 2725 of SEQ ID NO: 914551
ccuguuucuucuuccagga

SEQ ID NO: 1012587 - RNA, 19 nt, Artificial Sequence
  Description of Artificial Sequence: Synthetic oligonucleotide
  Antisense strand to SEQ ID NO: 1012586
uccuggaagaagaaacagg

SEQ ID NO: 1012588 - RNA, 19 nt, Artificial Sequence
  Description of Artificial Sequence: Synthetic oligonucleotide
  Sense strand starting at position 2769 of SEQ ID NO: 914551
agcaguuaccaacgguaua

SEQ ID NO: 1012589 - RNA, 19 nt, Artificial Sequence
  Description of Artificial Sequence: Synthetic oligonucleotide
  Antisense strand to SEQ ID NO: 1012588
uauaccguugguaacugcu

SEQ ID NO: 1012590 - RNA, 19 nt, Artificial Sequence
  Description of Artificial Sequence: Synthetic oligonucleotide
  Sense strand starting at position 2823 of SEQ ID NO: 914551
uccagucuaaugugguauu

SEQ ID NO: 1012591 - RNA, 19 nt, Artificial Sequence
  Description of Artificial Sequence: Synthetic oligonucleotide
  Antisense strand to SEQ ID NO: 1012590
aauaccacauuagacugga

SEQ ID NO: 1012592 - RNA, 19 nt, Artificial Sequence
  Description of Artificial Sequence: Synthetic oligonucleotide
  Sense strand starting at position 2834 of SEQ ID NO: 914551
gugguauuguccuuauuug

SEQ ID NO: 1012593 - RNA, 19 nt, Artificial Sequence
  Description of Artificial Sequence: Synthetic oligonucleotide
  Antisense strand to SEQ ID NO: 1012592
caaauaaggacaauaccac

SEQ ID NO: 1012594 - RNA, 19 nt, Artificial Sequence
  Description of Artificial Sequence: Synthetic oligonucleotide
  Sense strand starting at position 2842 of SEQ ID NO: 914551
guccuuauuugcucacauu

SEQ ID NO: 1012595 - RNA, 19 nt, Artificial Sequence
  Description of Artificial Sequence: Synthetic oligonucleotide
  Antisense strand to SEQ ID NO: 1012594
aaugugagcaaauaaggac

SEQ ID NO: 1012596 - RNA, 19 nt, Artificial Sequence
  Description of Artificial Sequence: Synthetic oligonucleotide
  Sense strand starting at position 2972 of SEQ ID NO: 914551
ucuucuccucgauagucaa

SEQ ID NO: 1012597 - RNA, 19 nt, Artificial Sequence
  Description of Artificial Sequence: Synthetic oligonucleotide
  Antisense strand to SEQ ID NO: 1012596
uugacuaucgaggagaaga

SEQ ID NO: 1012598 - RNA, 19 nt, Artificial Sequence
  Description of Artificial Sequence: Synthetic oligonucleotide
  Sense strand starting at position 3042 of SEQ ID NO: 914551
gguucuggaaucugaauga

SEQ ID NO: 1012599 - RNA, 19 nt, Artificial Sequence
  Description of Artificial Sequence: Synthetic oligonucleotide
  Antisense strand to SEQ ID NO: 1012598
ucauucagauuccagaacc

SEQ ID NO: 1012600 - RNA, 19 nt, Artificial Sequence
  Description of Artificial Sequence: Synthetic oligonucleotide
  Sense strand starting at position 3115 of SEQ ID NO: 914551
cgggauccauuaccuaagu

SEQ ID NO: 1012601 - RNA, 19 nt, Artificial Sequence
  Description of Artificial Sequence: Synthetic oligonucleotide
  Antisense strand to SEQ ID NO: 1012600
acuuagguaauggaucccg

SEQ ID NO: 1012602 - RNA, 19 nt, Artificial Sequence
  Description of Artificial Sequence: Synthetic oligonucleotide
  Sense strand starting at position 3244 of SEQ ID NO: 914551
acuguuuccugaccagaag

SEQ ID NO: 1012603 - RNA, 19 nt, Artificial Sequence
  Description of Artificial Sequence: Synthetic oligonucleotide
  Antisense strand to SEQ ID NO: 1012602
cuucuggucaggaaacagu

SEQ ID NO: 1012604 - RNA, 19 nt, Artificial Sequence
  Description of Artificial Sequence: Synthetic oligonucleotide
  Sense strand starting at position 3245 of SEQ ID NO: 914551
cuguuuccugaccagaagu

SEQ ID NO: 1012605 - RNA, 19 nt, Artificial Sequence
  Description of Artificial Sequence: Synthetic oligonucleotide
  Antisense strand to SEQ ID NO: 1012604
acuucuggucaggaaacag

SEQ ID NO: 1012606 - RNA, 19 nt, Artificial Sequence
  Description of Artificial Sequence: Synthetic oligonucleotide
  Sense strand starting at position 3247 of SEQ ID NO: 914551
guuuccugaccagaaguua

SEQ ID NO: 1012607 - RNA, 19 nt, Artificial Sequence
  Description of Artificial Sequence: Synthetic oligonucleotide
  Antisense strand to SEQ ID NO: 1012606
uaacuucuggucaggaaac

SEQ ID NO: 1012608 - RNA, 19 nt, Artificial Sequence
  Description of Artificial Sequence: Synthetic oligonucleotide
  Sense strand starting at position 3299 of SEQ ID NO: 914551
acguuuaauuagcucagga

SEQ ID NO: 1012609 - RNA, 19 nt, Artificial Sequence
  Description of Artificial Sequence: Synthetic oligonucleotide
  Antisense strand to SEQ ID NO: 1012608
uccugagcuaauuaaacgu

SEQ ID NO: 1012610 - RNA, 19 nt, Artificial Sequence
  Description of Artificial Sequence: Synthetic oligonucleotide
  Sense strand starting at position 3301 of SEQ ID NO: 914551
guuuaauuagcucaggaac

SEQ ID NO: 1012611 - RNA, 19 nt, Artificial Sequence
  Description of Artificial Sequence: Synthetic oligonucleotide
  Antisense strand to SEQ ID NO: 1012610
guuccugagcuaauuaaac

SEQ ID NO: 1012612 - RNA, 19 nt, Artificial Sequence
  Description of Artificial Sequence: Synthetic oligonucleotide
  Sense strand starting at position 3337 of SEQ ID NO: 914551
uagagaugucauugcagcu

SEQ ID NO: 1012613 - RNA, 19 nt, Artificial Sequence
  Description of Artificial Sequence: Synthetic oligonucleotide
  Antisense strand to SEQ ID NO: 1012612
agcugcaaugacaucucua

SEQ ID NO: 1012614 - RNA, 19 nt, Artificial Sequence
  Description of Artificial Sequence: Synthetic oligonucleotide
  Sense strand starting at position 3494 of SEQ ID NO: 914551
aguucuggagagugaaguu

SEQ ID NO: 1012615 - RNA, 19 nt, Artificial Sequence
  Description of Artificial Sequence: Synthetic oligonucleotide
  Antisense strand to SEQ ID NO: 1012614
aacuucacucuccagaacu

SEQ ID NO: 1012616 - RNA, 19 nt, Artificial Sequence
  Description of Artificial Sequence: Synthetic oligonucleotide
  Sense strand starting at position 3547 of SEQ ID NO: 914551
ccaggccuccuguagaauu

SEQ ID NO: 1012617 - RNA, 19 nt, Artificial Sequence
  Description of Artificial Sequence: Synthetic oligonucleotide
  Antisense strand to SEQ ID NO: 1012616
aauucuacaggaggccugg

SEQ ID NO: 1012618 - RNA, 19 nt, Artificial Sequence
  Description of Artificial Sequence: Synthetic oligonucleotide
  Sense strand starting at position 3560 of SEQ ID NO: 914551
agaauuugcuccugagaaa

SEQ ID NO: 1012619 - RNA, 19 nt, Artificial Sequence
  Description of Artificial Sequence: Synthetic oligonucleotide
  Antisense strand to SEQ ID NO: 1012618
uuucucaggagcaaauucu

SEQ ID NO: 1012620 - RNA, 19 nt, Artificial Sequence
  Description of Artificial Sequence: Synthetic oligonucleotide
  Sense strand starting at position 3563 of SEQ ID NO: 914551
auuugcuccugagaaagua

SEQ ID NO: 1012621 - RNA, 19 nt, Artificial Sequence
  Description of Artificial Sequence: Synthetic oligonucleotide
  Antisense strand to SEQ ID NO: 1012620
uacuuucucaggagcaaau

SEQ ID NO: 1012622 - RNA, 19 nt, Artificial Sequence
  Description of Artificial Sequence: Synthetic oligonucleotide
  Sense strand starting at position 3571 of SEQ ID NO: 914551
cugagaaaguaggauuaua

SEQ ID NO: 1012623 - RNA, 19 nt, Artificial Sequence
  Description of Artificial Sequence: Synthetic oligonucleotide
  Antisense strand to SEQ ID NO: 1012622
uauaauccuacuuucucag

SEQ ID NO: 1012624 - RNA, 19 nt, Artificial Sequence
  Description of Artificial Sequence: Synthetic oligonucleotide
  Sense strand starting at position 3620 of SEQ ID NO: 914551
augcaacuccgagaaguaa

SEQ ID NO: 1012625 - RNA, 19 nt, Artificial Sequence
  Description of Artificial Sequence: Synthetic oligonucleotide
  Antisense strand to SEQ ID NO: 1012624
uuacuucucggaguugcau

SEQ ID NO: 1012626 - RNA, 19 nt, Artificial Sequence
  Description of Artificial Sequence: Synthetic oligonucleotide
  Sense strand starting at position 3672 of SEQ ID NO: 914551
aacaguggcggguagaauu

SEQ ID NO: 1012627 - RNA, 19 nt, Artificial Sequence
  Description of Artificial Sequence: Synthetic oligonucleotide
  Antisense strand to SEQ ID NO: 1012626
aauucuacccgccacuguu

SEQ ID NO: 1012628 - RNA, 19 nt, Artificial Sequence
  Description of Artificial Sequence: Synthetic oligonucleotide
  Sense strand starting at position 3759 of SEQ ID NO: 914551
cugggauguggcugauacu

SEQ ID NO: 1012629 - RNA, 19 nt, Artificial Sequence
  Description of Artificial Sequence: Synthetic oligonucleotide
  Antisense strand to SEQ ID NO: 1012628
aguaucagccacaucccag

SEQ ID NO: 1012630 - RNA, 19 nt, Artificial Sequence
  Description of Artificial Sequence: Synthetic oligonucleotide
  Sense strand starting at position 3760 of SEQ ID NO: 914551
ugggauguggcugauacuu

SEQ ID NO: 1012631 - RNA, 19 nt, Artificial Sequence
  Description of Artificial Sequence: Synthetic oligonucleotide
  Antisense strand to SEQ ID NO: 1012630
aaguaucagccacauccca

SEQ ID NO: 1012632 - RNA, 19 nt, Artificial Sequence
  Description of Artificial Sequence: Synthetic oligonucleotide
  Sense strand starting at position 3912 of SEQ ID NO: 914551
gccugagguuggcuggaaa

SEQ ID NO: 1012633 - RNA, 19 nt, Artificial Sequence
  Description of Artificial Sequence: Synthetic oligonucleotide
  Antisense strand to SEQ ID NO: 1012632
uuuccagccaaccucaggc

SEQ ID NO: 1012634 - RNA, 19 nt, Artificial Sequence
  Description of Artificial Sequence: Synthetic oligonucleotide
  Sense strand starting at position 3952 of SEQ ID NO: 914551
ccugcucuguaauuagaga

SEQ ID NO: 1012635 - RNA, 19 nt, Artificial Sequence
  Description of Artificial Sequence: Synthetic oligonucleotide
  Antisense strand to SEQ ID NO: 1012634
ucucuaauuacagagcagg

SEQ ID NO: 1012636 - RNA, 19 nt, Artificial Sequence
  Description of Artificial Sequence: Synthetic oligonucleotide
  Sense strand starting at position 316 of SEQ ID NO: 914552
cugagauguugcccauuaa

SEQ ID NO: 1012637 - RNA, 19 nt, Artificial Sequence
  Description of Artificial Sequence: Synthetic oligonucleotide
  Antisense strand to SEQ ID NO: 1012636
uuaaugggcaacaucucag

SEQ ID NO: 1012638 - RNA, 19 nt, Artificial Sequence
  Description of Artificial Sequence: Synthetic oligonucleotide
  Sense strand starting at position 317 of SEQ ID NO: 914552
ugagauguugcccauuaaa

SEQ ID NO: 1012639 - RNA, 19 nt, Artificial Sequence
  Description of Artificial Sequence: Synthetic oligonucleotide
  Antisense strand to SEQ ID NO: 1012638
uuuaaugggcaacaucuca

SEQ ID NO: 1012640 - RNA, 19 nt, Artificial Sequence
  Description of Artificial Sequence: Synthetic oligonucleotide
  Sense strand starting at position 320 of SEQ ID NO: 914552
gauguugcccauuaaagua

SEQ ID NO: 1012641 - RNA, 19 nt, Artificial Sequence
  Description of Artificial Sequence: Synthetic oligonucleotide
  Antisense strand to SEQ ID NO: 1012640
uacuuuaaugggcaacauc

SEQ ID NO: 1012642 - RNA, 19 nt, Artificial Sequence
  Description of Artificial Sequence: Synthetic oligonucleotide
  Sense strand starting at position 356 of SEQ ID NO: 914552
ugagcguuacgggaagaga

SEQ ID NO: 1012643 - RNA, 19 nt, Artificial Sequence
  Description of Artificial Sequence: Synthetic oligonucleotide
  Antisense strand to SEQ ID NO: 1012642
ucucuucccguaacgcuca

SEQ ID NO: 1012644 - RNA, 19 nt, Artificial Sequence
  Description of Artificial Sequence: Synthetic oligonucleotide
  Sense strand starting at position 373 of SEQ ID NO: 914552
gauggauccuuaccagguu

SEQ ID NO: 1012645 - RNA, 19 nt, Artificial Sequence
  Description of Artificial Sequence: Synthetic oligonucleotide
  Antisense strand to SEQ ID NO: 1012644
aaccugguaaggauccauc

SEQ ID NO: 1012646 - RNA, 19 nt, Artificial Sequence
  Description of Artificial Sequence: Synthetic oligonucleotide
  Sense strand starting at position 399 of SEQ ID NO: 914552
gggaacgacuguucuguaa

SEQ ID NO: 1012647 - RNA, 19 nt, Artificial Sequence
  Description of Artificial Sequence: Synthetic oligonucleotide
  Antisense strand to SEQ ID NO: 1012646
uuacagaacagucguuccc

SEQ ID NO: 1012648 - RNA, 19 nt, Artificial Sequence
  Description of Artificial Sequence: Synthetic oligonucleotide
  Sense strand starting at position 458 of SEQ ID NO: 914552
aagaaacugucagagagau

SEQ ID NO: 1012649 - RNA, 19 nt, Artificial Sequence
  Description of Artificial Sequence: Synthetic oligonucleotide
  Antisense strand to SEQ ID NO: 1012648
aucucucugacaguuucuu

SEQ ID NO: 1012650 - RNA, 19 nt, Artificial Sequence
  Description of Artificial Sequence: Synthetic oligonucleotide
  Sense strand starting at position 486 of SEQ ID NO: 914552
acauguuaucauuaggagu

SEQ ID NO: 1012651 - RNA, 19 nt, Artificial Sequence
  Description of Artificial Sequence: Synthetic oligonucleotide
  Antisense strand to SEQ ID NO: 1012650
acuccuaaugauaacaugu

SEQ ID NO: 1012652 - RNA, 19 nt, Artificial Sequence
  Description of Artificial Sequence: Synthetic oligonucleotide
  Sense strand starting at position 494 of SEQ ID NO: 914552
ucauuaggaguugguuacu

SEQ ID NO: 1012653 - RNA, 19 nt, Artificial Sequence
  Description of Artificial Sequence: Synthetic oligonucleotide
  Antisense strand to SEQ ID NO: 1012652
aguaaccaacuccuaauga

SEQ ID NO: 1012654 - RNA, 19 nt, Artificial Sequence
  Description of Artificial Sequence: Synthetic oligonucleotide
  Sense strand starting at position 577 of SEQ ID NO: 914552
aaauguguccggugaagau

SEQ ID NO: 1012655 - RNA, 19 nt, Artificial Sequence
  Description of Artificial Sequence: Synthetic oligonucleotide
  Antisense strand to SEQ ID NO: 1012654
aucuucaccggacacauuu

SEQ ID NO: 1012656 - RNA, 19 nt, Artificial Sequence
  Description of Artificial Sequence: Synthetic oligonucleotide
  Sense strand starting at position 586 of SEQ ID NO: 914552
cggugaagaugucccacua

SEQ ID NO: 1012657 - RNA, 19 nt, Artificial Sequence
  Description of Artificial Sequence: Synthetic oligonucleotide
  Antisense strand to SEQ ID NO: 1012656
uagugggacaucuucaccg

SEQ ID NO: 1012658 - RNA, 19 nt, Artificial Sequence
  Description of Artificial Sequence: Synthetic oligonucleotide
  Sense strand starting at position 608 of SEQ ID NO: 914552
uaaguuugacaugguguaa

SEQ ID NO: 1012659 - RNA, 19 nt, Artificial Sequence
  Description of Artificial Sequence: Synthetic oligonucleotide
  Antisense strand to SEQ ID NO: 1012658
uuacaccaugucaaacuua

SEQ ID NO: 1012660 - RNA, 19 nt, Artificial Sequence
  Description of Artificial Sequence: Synthetic oligonucleotide
  Sense strand starting at position 647 of SEQ ID NO: 914552
gcggauaaagagcagauua

SEQ ID NO: 1012661 - RNA, 19 nt, Artificial Sequence
  Description of Artificial Sequence: Synthetic oligonucleotide
  Antisense strand to SEQ ID NO: 1012660
uaaucugcucuuuauccgc

SEQ ID NO: 1012662 - RNA, 19 nt, Artificial Sequence
  Description of Artificial Sequence: Synthetic oligonucleotide
  Sense strand starting at position 657 of SEQ ID NO: 914552
agcagauuacuugacccua

SEQ ID NO: 1012663 - RNA, 19 nt, Artificial Sequence
  Description of Artificial Sequence: Synthetic oligonucleotide
  Antisense strand to SEQ ID NO: 1012662
uagggucaaguaaucugcu

SEQ ID NO: 1012664 - RNA, 19 nt, Artificial Sequence
  Description of Artificial Sequence: Synthetic oligonucleotide
  Sense strand starting at position 2038 of SEQ ID NO: 914552
ggccguagugucgcgagau

SEQ ID NO: 1012665 - RNA, 19 nt, Artificial Sequence
  Description of Artificial Sequence: Synthetic oligonucleotide
  Antisense strand to SEQ ID NO: 1012664
aucucgcgacacuacggcc

SEQ ID NO: 1012666 - RNA, 19 nt, Artificial Sequence
  Description of Artificial Sequence: Synthetic oligonucleotide
  Sense strand starting at position 2040 of SEQ ID NO: 914552
ccguagugucgcgagauuu

SEQ ID NO: 1012667 - RNA, 19 nt, Artificial Sequence
  Description of Artificial Sequence: Synthetic oligonucleotide
  Antisense strand to SEQ ID NO: 1012666
aaaucucgcgacacuacgg

SEQ ID NO: 1012668 - RNA, 19 nt, Artificial Sequence
  Description of Artificial Sequence: Synthetic oligonucleotide
  Sense strand starting at position 2041 of SEQ ID NO: 914552
cguagugucgcgagauuuc

SEQ ID NO: 1012669 - RNA, 19 nt, Artificial Sequence
  Description of Artificial Sequence: Synthetic oligonucleotide
  Antisense strand to SEQ ID NO: 1012668
gaaaucucgcgacacuacg

SEQ ID NO: 1012670 - RNA, 19 nt, Artificial Sequence
  Description of Artificial Sequence: Synthetic oligonucleotide
  Sense strand starting at position 2050 of SEQ ID NO: 914552
gcgagauuucagggugcuu

SEQ ID NO: 1012671 - RNA, 19 nt, Artificial Sequence
  Description of Artificial Sequence: Synthetic oligonucleotide
  Antisense strand to SEQ ID NO: 1012670
aagcacccugaaaucucgc

SEQ ID NO: 1012672 - RNA, 19 nt, Artificial Sequence
  Description of Artificial Sequence: Synthetic oligonucleotide
  Sense strand starting at position 2062 of SEQ ID NO: 914552
ggugcuuuagagugggaau

SEQ ID NO: 1012673 - RNA, 19 nt, Artificial Sequence
  Description of Artificial Sequence: Synthetic oligonucleotide
  Antisense strand to SEQ ID NO: 1012672
auucccacucuaaagcacc

SEQ ID NO: 1012674 - RNA, 19 nt, Artificial Sequence
  Description of Artificial Sequence: Synthetic oligonucleotide
  Sense strand starting at position 2063 of SEQ ID NO: 914552
gugcuuuagagugggaaua

SEQ ID NO: 1012675 - RNA, 19 nt, Artificial Sequence
  Description of Artificial Sequence: Synthetic oligonucleotide
  Antisense strand to SEQ ID NO: 1012674
uauucccacucuaaagcac

SEQ ID NO: 1012676 - RNA, 19 nt, Artificial Sequence
  Description of Artificial Sequence: Synthetic oligonucleotide
  Sense strand starting at position 2064 of SEQ ID NO: 914552
ugcuuuagagugggaauaa

SEQ ID NO: 1012677 - RNA, 19 nt, Artificial Sequence
  Description of Artificial Sequence: Synthetic oligonucleotide
  Antisense strand to SEQ ID NO: 1012676
uuauucccacucuaaagca

SEQ ID NO: 1012678 - RNA, 19 nt, Artificial Sequence
  Description of Artificial Sequence: Synthetic oligonucleotide
  Sense strand starting at position 2409 of SEQ ID NO: 914552
auguccucaguuggauaau

SEQ ID NO: 1012679 - RNA, 19 nt, Artificial Sequence
  Description of Artificial Sequence: Synthetic oligonucleotide
  Antisense strand to SEQ ID NO: 1012678
auuauccaacugaggacau

SEQ ID NO: 1012680 - RNA, 19 nt, Artificial Sequence
  Description of Artificial Sequence: Synthetic oligonucleotide
  Sense strand starting at position 2421 of SEQ ID NO: 914552
ggauaauggauaugcuagu

SEQ ID NO: 1012681 - RNA, 19 nt, Artificial Sequence
  Description of Artificial Sequence: Synthetic oligonucleotide
  Antisense strand to SEQ ID NO: 1012680
acuagcauauccauuaucc

SEQ ID NO: 1012682 - RNA, 19 nt, Artificial Sequence
  Description of Artificial Sequence: Synthetic oligonucleotide
  Sense strand starting at position 2656 of SEQ ID NO: 914552
gcauuuggguaacaaacaa

SEQ ID NO: 1012683 - RNA, 19 nt, Artificial Sequence
  Description of Artificial Sequence: Synthetic oligonucleotide
  Antisense strand to SEQ ID NO: 1012682
uuguuuguuacccaaaugc

SEQ ID NO: 1012684 - RNA, 19 nt, Artificial Sequence
  Description of Artificial Sequence: Synthetic oligonucleotide
  Sense strand starting at position 2807 of SEQ ID NO: 914552
aaggaugucugcccagaaa

SEQ ID NO: 1012685 - RNA, 19 nt, Artificial Sequence
  Description of Artificial Sequence: Synthetic oligonucleotide
  Antisense strand to SEQ ID NO: 1012684
uuucugggcagacauccuu

SEQ ID NO: 1012686 - RNA, 19 nt, Artificial Sequence
  Description of Artificial Sequence: Synthetic oligonucleotide
  Sense strand starting at position 2864 of SEQ ID NO: 914552
ugaccuuuguagcuaagau

SEQ ID NO: 1012687 - RNA, 19 nt, Artificial Sequence
  Description of Artificial Sequence: Synthetic oligonucleotide
  Antisense strand to SEQ ID NO: 1012686
aucuuagcuacaaagguca

SEQ ID NO: 1012688 - RNA, 19 nt, Artificial Sequence
  Description of Artificial Sequence: Synthetic oligonucleotide
  Sense strand starting at position 2945 of SEQ ID NO: 914552
cuucgucuuccugaauaca

SEQ ID NO: 1012689 - RNA, 19 nt, Artificial Sequence
  Description of Artificial Sequence: Synthetic oligonucleotide
  Antisense strand to SEQ ID NO: 1012688
uguauucaggaagacgaag

SEQ ID NO: 1012690 - RNA, 19 nt, Artificial Sequence
  Description of Artificial Sequence: Synthetic oligonucleotide
  Sense strand starting at position 3084 of SEQ ID NO: 914552
uuugaagcaguuuacaaau

SEQ ID NO: 1012691 - RNA, 19 nt, Artificial Sequence
  Description of Artificial Sequence: Synthetic oligonucleotide
  Antisense strand to SEQ ID NO: 1012690
auuuguaaacugcuucaaa

SEQ ID NO: 1012692 - RNA, 19 nt, Artificial Sequence
  Description of Artificial Sequence: Synthetic oligonucleotide
  Sense strand starting at position 3254 of SEQ ID NO: 914552
aagguuaaucuuggaauug

SEQ ID NO: 1012693 - RNA, 19 nt, Artificial Sequence
  Description of Artificial Sequence: Synthetic oligonucleotide
  Antisense strand to SEQ ID NO: 1012692
caauuccaagauuaaccuu

SEQ ID NO: 1012694 - RNA, 19 nt, Artificial Sequence
  Description of Artificial Sequence: Synthetic oligonucleotide
  Sense strand starting at position 3280 of SEQ ID NO: 914552
gcaauaucuuacucaguug

SEQ ID NO: 1012695 - RNA, 19 nt, Artificial Sequence
  Description of Artificial Sequence: Synthetic oligonucleotide
  Antisense strand to SEQ ID NO: 1012694
caacugaguaagauauugc

SEQ ID NO: 1012696 - RNA, 19 nt, Artificial Sequence
  Description of Artificial Sequence: Synthetic oligonucleotide
  Sense strand starting at position 3287 of SEQ ID NO: 914552
cuuacucaguuguuugaau

SEQ ID NO: 1012697 - RNA, 19 nt, Artificial Sequence
  Description of Artificial Sequence: Synthetic oligonucleotide
  Antisense strand to SEQ ID NO: 1012696
auucaaacaacugaguaag

SEQ ID NO: 1012698 - RNA, 19 nt, Artificial Sequence
  Description of Artificial Sequence: Synthetic oligonucleotide
  Sense strand starting at position 3288 of SEQ ID NO: 914552
uuacucaguuguuugaauu

SEQ ID NO: 1012699 - RNA, 19 nt, Artificial Sequence
  Description of Artificial Sequence: Synthetic oligonucleotide
  Antisense strand to SEQ ID NO: 1012698
aauucaaacaacugaguaa

SEQ ID NO: 1012700 - RNA, 19 nt, Artificial Sequence
  Description of Artificial Sequence: Synthetic oligonucleotide
  Sense strand starting at position 3289 of SEQ ID NO: 914552
uacucaguuguuugaauug

SEQ ID NO: 1012701 - RNA, 19 nt, Artificial Sequence
  Description of Artificial Sequence: Synthetic oligonucleotide
  Antisense strand to SEQ ID NO: 1012700
caauucaaacaacugagua

SEQ ID NO: 1012702 - RNA, 19 nt, Artificial Sequence
  Description of Artificial Sequence: Synthetic oligonucleotide
  Sense strand starting at position 3453 of SEQ ID NO: 914552
aguagauauccucgaggau

SEQ ID NO: 1012703 - RNA, 19 nt, Artificial Sequence
  Description of Artificial Sequence: Synthetic oligonucleotide
  Antisense strand to SEQ ID NO: 1012702
auccucgaggauaucuacu

SEQ ID NO: 1012704 - RNA, 19 nt, Artificial Sequence
  Description of Artificial Sequence: Synthetic oligonucleotide
  Sense strand starting at position 3466 of SEQ ID NO: 914552
gaggauagcugcuucuaua

SEQ ID NO: 1012705 - RNA, 19 nt, Artificial Sequence
  Description of Artificial Sequence: Synthetic oligonucleotide
  Antisense strand to SEQ ID NO: 1012704
uauagaagcagcuauccuc

SEQ ID NO: 1012706 - RNA, 19 nt, Artificial Sequence
  Description of Artificial Sequence: Synthetic oligonucleotide
  Sense strand starting at position 3582 of SEQ ID NO: 914552
acaaauauugagugaguga

SEQ ID NO: 1012707 - RNA, 19 nt, Artificial Sequence
  Description of Artificial Sequence: Synthetic oligonucleotide
  Antisense strand to SEQ ID NO: 1012706
ucacucacucaauauuugu

SEQ ID NO: 1012708 - RNA, 19 nt, Artificial Sequence
  Description of Artificial Sequence: Synthetic oligonucleotide
  Sense strand starting at position 3589 of SEQ ID NO: 914552
uugagugagugagugaaua

SEQ ID NO: 1012709 - RNA, 19 nt, Artificial Sequence
  Description of Artificial Sequence: Synthetic oligonucleotide
  Antisense strand to SEQ ID NO: 1012708
uauucacucacucacucaa

SEQ ID NO: 1012710 - RNA, 19 nt, Artificial Sequence
  Description of Artificial Sequence: Synthetic oligonucleotide
  Sense strand starting at position 3601 of SEQ ID NO: 914552
gugaauaaagucuacaguu

SEQ ID NO: 1012711 - RNA, 19 nt, Artificial Sequence
  Description of Artificial Sequence: Synthetic oligonucleotide
  Antisense strand to SEQ ID NO: 1012710
aacuguagacuuuauucac

SEQ ID NO: 1012712 - RNA, 19 nt, Artificial Sequence
  Description of Artificial Sequence: Synthetic oligonucleotide
  Sense strand starting at position 3682 of SEQ ID NO: 914552
aaguaugaccugugguauc

SEQ ID NO: 1012713 - RNA, 19 nt, Artificial Sequence
  Description of Artificial Sequence: Synthetic oligonucleotide
  Antisense strand to SEQ ID NO: 1012712
gauaccacaggucauacuu

SEQ ID NO: 1012714 - RNA, 19 nt, Artificial Sequence
  Description of Artificial Sequence: Synthetic oligonucleotide
  Sense strand starting at position 3787 of SEQ ID NO: 914552
gugauauauguauacucug

SEQ ID NO: 1012715 - RNA, 19 nt, Artificial Sequence
  Description of Artificial Sequence: Synthetic oligonucleotide
  Antisense strand to SEQ ID NO: 1012714
cagaguauacauauaucac

SEQ ID NO: 1012716 - RNA, 19 nt, Artificial Sequence
  Description of Artificial Sequence: Synthetic oligonucleotide
  Sense strand starting at position 168 of SEQ ID NO: 914553
gcuuuauaggcugguauuu

SEQ ID NO: 1012717 - RNA, 19 nt, Artificial Sequence
  Description of Artificial Sequence: Synthetic oligonucleotide
  Antisense strand to SEQ ID NO: 1012716
aaauaccagccuauaaagc

SEQ ID NO: 1012718 - RNA, 19 nt, Artificial Sequence
  Description of Artificial Sequence: Synthetic oligonucleotide
  Sense strand starting at position 312 of SEQ ID NO: 914553
cucagcacugugcaugaaa

SEQ ID NO: 1012719 - RNA, 19 nt, Artificial Sequence
  Description of Artificial Sequence: Synthetic oligonucleotide
  Antisense strand to SEQ ID NO: 1012718
uuucaugcacagugcugag

SEQ ID NO: 1012720 - RNA, 19 nt, Artificial Sequence
  Description of Artificial Sequence: Synthetic oligonucleotide
  Sense strand starting at position 315 of SEQ ID NO: 914553
agcacugugcaugaaacaa

SEQ ID NO: 1012721 - RNA, 19 nt, Artificial Sequence
  Description of Artificial Sequence: Synthetic oligonucleotide
  Antisense strand to SEQ ID NO: 1012720
uuguuucaugcacagugcu

SEQ ID NO: 1012722 - RNA, 19 nt, Artificial Sequence
  Description of Artificial Sequence: Synthetic oligonucleotide
  Sense strand starting at position 370 of SEQ ID NO: 914553
uuagguuuaccuugaaaca

SEQ ID NO: 1012723 - RNA, 19 nt, Artificial Sequence
  Description of Artificial Sequence: Synthetic oligonucleotide
  Antisense strand to SEQ ID NO: 1012722
uguuucaagguaaaccuaa

SEQ ID NO: 1012724 - RNA, 19 nt, Artificial Sequence
  Description of Artificial Sequence: Synthetic oligonucleotide
  Sense strand starting at position 463 of SEQ ID NO: 914553
aaguuaaggucagugaaag

SEQ ID NO: 1012725 - RNA, 19 nt, Artificial Sequence
  Description of Artificial Sequence: Synthetic oligonucleotide
  Antisense strand to SEQ ID NO: 1012724
cuuucacugaccuuaacuu

SEQ ID NO: 1012726 - RNA, 19 nt, Artificial Sequence
  Description of Artificial Sequence: Synthetic oligonucleotide
  Sense strand starting at position 469 of SEQ ID NO: 914553
aggucagugaaaggcuuua

SEQ ID NO: 1012727 - RNA, 19 nt, Artificial Sequence
  Description of Artificial Sequence: Synthetic oligonucleotide
  Antisense strand to SEQ ID NO: 1012726
uaaagccuuucacugaccu

SEQ ID NO: 1012728 - RNA, 19 nt, Artificial Sequence
  Description of Artificial Sequence: Synthetic oligonucleotide
  Sense strand starting at position 474 of SEQ ID NO: 914553
agugaaaggcuuuaaacuc

SEQ ID NO: 1012729 - RNA, 19 nt, Artificial Sequence
  Description of Artificial Sequence: Synthetic oligonucleotide
  Antisense strand to SEQ ID NO: 1012728
gaguuuaaagccuuucacu

SEQ ID NO: 1012730 - RNA, 19 nt, Artificial Sequence
  Description of Artificial Sequence: Synthetic oligonucleotide
  Sense strand starting at position 603 of SEQ ID NO: 914553
auugaauccuuauuaagug

SEQ ID NO: 1012731 - RNA, 19 nt, Artificial Sequence
  Description of Artificial Sequence: Synthetic oligonucleotide
  Antisense strand to SEQ ID NO: 1012730
cacuuaauaaggauucaau

SEQ ID NO: 1012732 - RNA, 19 nt, Artificial Sequence
  Description of Artificial Sequence: Synthetic oligonucleotide
  Sense strand starting at position 613 of SEQ ID NO: 914553
uauuaagugccucagggua

SEQ ID NO: 1012733 - RNA, 19 nt, Artificial Sequence
  Description of Artificial Sequence: Synthetic oligonucleotide
  Antisense strand to SEQ ID NO: 1012732
uacccugaggcacuuaaua

SEQ ID NO: 1012734 - RNA, 19 nt, Artificial Sequence
  Description of Artificial Sequence: Synthetic oligonucleotide
  Sense strand starting at position 735 of SEQ ID NO: 914553
gccauuccagauuaaaugu

SEQ ID NO: 1012735 - RNA, 19 nt, Artificial Sequence
  Description of Artificial Sequence: Synthetic oligonucleotide
  Antisense strand to SEQ ID NO: 1012734
acauuuaaucuggaauggc

SEQ ID NO: 1012736 - RNA, 19 nt, Artificial Sequence
  Description of Artificial Sequence: Synthetic oligonucleotide
  Sense strand starting at position 749 of SEQ ID NO: 914553
aauguagauuuagaaggau

SEQ ID NO: 1012737 - RNA, 19 nt, Artificial Sequence
  Description of Artificial Sequence: Synthetic oligonucleotide
  Antisense strand to SEQ ID NO: 1012736
auccuucuaaaucuacauu

SEQ ID NO: 1012738 - RNA, 19 nt, Artificial Sequence
  Description of Artificial Sequence: Synthetic oligonucleotide
  Sense strand starting at position 850 of SEQ ID NO: 914553
agggauguccuuugcauga

SEQ ID NO: 1012739 - RNA, 19 nt, Artificial Sequence
  Description of Artificial Sequence: Synthetic oligonucleotide
  Antisense strand to SEQ ID NO: 1012738
ucaugcaaaggacaucccu

SEQ ID NO: 1012740 - RNA, 19 nt, Artificial Sequence
  Description of Artificial Sequence: Synthetic oligonucleotide
  Sense strand starting at position 874 of SEQ ID NO: 914553
auacaauuguaagcagaga

SEQ ID NO: 1012741 - RNA, 19 nt, Artificial Sequence
  Description of Artificial Sequence: Synthetic oligonucleotide
  Antisense strand to SEQ ID NO: 1012740
ucucugcuuacaauuguau

SEQ ID NO: 1012742 - RNA, 19 nt, Artificial Sequence
  Description of Artificial Sequence: Synthetic oligonucleotide
  Sense strand starting at position 1098 of SEQ ID NO: 914553
gucucauuauuaccucuga

SEQ ID NO: 1012743 - RNA, 19 nt, Artificial Sequence
  Description of Artificial Sequence: Synthetic oligonucleotide
  Antisense strand to SEQ ID NO: 1012742
ucagagguaauaaugagac

SEQ ID NO: 1012744 - RNA, 19 nt, Artificial Sequence
  Description of Artificial Sequence: Synthetic oligonucleotide
  Sense strand starting at position 1129 of SEQ ID NO: 914553
uugcacagcgcuuuaucau

SEQ ID NO: 1012745 - RNA, 19 nt, Artificial Sequence
  Description of Artificial Sequence: Synthetic oligonucleotide
  Antisense strand to SEQ ID NO: 1012744
augauaaagcgcugugcaa

SEQ ID NO: 1012746 - RNA, 19 nt, Artificial Sequence
  Description of Artificial Sequence: Synthetic oligonucleotide
  Sense strand starting at position 1182 of SEQ ID NO: 914553
ucuaacaauccagggaguu

SEQ ID NO: 1012747 - RNA, 19 nt, Artificial Sequence
  Description of Artificial Sequence: Synthetic oligonucleotide
  Antisense strand to SEQ ID NO: 1012746
aacucccuggauuguuaga

SEQ ID NO: 1012748 - RNA, 19 nt, Artificial Sequence
  Description of Artificial Sequence: Synthetic oligonucleotide
  Sense strand starting at position 1183 of SEQ ID NO: 914553
cuaacaauccagggaguuu

SEQ ID NO: 1012749 - RNA, 19 nt, Artificial Sequence
  Description of Artificial Sequence: Synthetic oligonucleotide
  Antisense strand to SEQ ID NO: 1012748
aaacucccuggauuguuag

SEQ ID NO: 1012750 - RNA, 19 nt, Artificial Sequence
  Description of Artificial Sequence: Synthetic oligonucleotide
  Sense strand starting at position 1263 of SEQ ID NO: 914553
uaaaucguuuggcuaagau

SEQ ID NO: 1012751 - RNA, 19 nt, Artificial Sequence
  Description of Artificial Sequence: Synthetic oligonucleotide
  Antisense strand to SEQ ID NO: 1012750
aucuuagccaaacgauuua

SEQ ID NO: 1012752 - RNA, 19 nt, Artificial Sequence
  Description of Artificial Sequence: Synthetic oligonucleotide
  Sense strand starting at position 1281 of SEQ ID NO: 914553
uuuauacagcaaggaaauu

SEQ ID NO: 1012753 - RNA, 19 nt, Artificial Sequence
  Description of Artificial Sequence: Synthetic oligonucleotide
  Antisense strand to SEQ ID NO: 1012752
aauuuccuugcuguauaaa

SEQ ID NO: 1012754 - RNA, 19 nt, Artificial Sequence
  Description of Artificial Sequence: Synthetic oligonucleotide
  Sense strand starting at position 1785 of SEQ ID NO: 914553
gcaguaacaucccucagau

SEQ ID NO: 1012755 - RNA, 19 nt, Artificial Sequence
  Description of Artificial Sequence: Synthetic oligonucleotide
  Antisense strand to SEQ ID NO: 1012754
aucugagggauguuacugc

SEQ ID NO: 1012756 - RNA, 19 nt, Artificial Sequence
  Description of Artificial Sequence: Synthetic oligonucleotide
  Sense strand starting at position 1823 of SEQ ID NO: 914553
uggaaaguauuagcaguua

SEQ ID NO: 1012757 - RNA, 19 nt, Artificial Sequence
  Description of Artificial Sequence: Synthetic oligonucleotide
  Antisense strand to SEQ ID NO: 1012756
uaacugcuaauacuuucca

SEQ ID NO: 1012758 - RNA, 19 nt, Artificial Sequence
  Description of Artificial Sequence: Synthetic oligonucleotide
  Sense strand starting at position 1870 of SEQ ID NO: 914553
uguaaaugcaguugacuga

SEQ ID NO: 1012759 - RNA, 19 nt, Artificial Sequence
  Description of Artificial Sequence: Synthetic oligonucleotide
  Antisense strand to SEQ ID NO: 1012758
ucagucaacugcauuuaca

SEQ ID NO: 1012760 - RNA, 19 nt, Artificial Sequence
  Description of Artificial Sequence: Synthetic oligonucleotide
  Sense strand starting at position 1877 of SEQ ID NO: 914553
gcaguugacugacugauag

SEQ ID NO: 1012761 - RNA, 19 nt, Artificial Sequence
  Description of Artificial Sequence: Synthetic oligonucleotide
  Antisense strand to SEQ ID NO: 1012760
cuaucagucagucaacugc

SEQ ID NO: 1012762 - RNA, 19 nt, Artificial Sequence
  Description of Artificial Sequence: Synthetic oligonucleotide
  Sense strand starting at position 2093 of SEQ ID NO: 914553
guagaucugugaccucaug

SEQ ID NO: 1012763 - RNA, 19 nt, Artificial Sequence
  Description of Artificial Sequence: Synthetic oligonucleotide
  Antisense strand to SEQ ID NO: 1012762
caugaggucacagaucuac

SEQ ID NO: 1012764 - RNA, 19 nt, Artificial Sequence
  Description of Artificial Sequence: Synthetic oligonucleotide
  Sense strand starting at position 2193 of SEQ ID NO: 914553
ccacauguauuaucuugau

SEQ ID NO: 1012765 - RNA, 19 nt, Artificial Sequence
  Description of Artificial Sequence: Synthetic oligonucleotide
  Antisense strand to SEQ ID NO: 1012764
aucaagauaauacaugugg

SEQ ID NO: 1012766 - RNA, 19 nt, Artificial Sequence
  Description of Artificial Sequence: Synthetic oligonucleotide
  Sense strand starting at position 2197 of SEQ ID NO: 914553
auguauuaucuugauggca

SEQ ID NO: 1012767 - RNA, 19 nt, Artificial Sequence
  Description of Artificial Sequence: Synthetic oligonucleotide
  Antisense strand to SEQ ID NO: 1012766
ugccaucaagauaauacau

SEQ ID NO: 1012768 - RNA, 19 nt, Artificial Sequence
  Description of Artificial Sequence: Synthetic oligonucleotide
  Sense strand starting at position 2405 of SEQ ID NO: 914553
uugcucaaccuuugggaau

SEQ ID NO: 1012769 - RNA, 19 nt, Artificial Sequence
  Description of Artificial Sequence: Synthetic oligonucleotide
  Antisense strand to SEQ ID NO: 1012768
auucccaaagguugagcaa

SEQ ID NO: 1012770 - RNA, 19 nt, Artificial Sequence
  Description of Artificial Sequence: Synthetic oligonucleotide
  Sense strand starting at position 2666 of SEQ ID NO: 914553
guauuaccugcccacucau

SEQ ID NO: 1012771 - RNA, 19 nt, Artificial Sequence
  Description of Artificial Sequence: Synthetic oligonucleotide
  Antisense strand to SEQ ID NO: 1012770
augagugggcagguaauac

SEQ ID NO: 1012772 - RNA, 19 nt, Artificial Sequence
  Description of Artificial Sequence: Synthetic oligonucleotide
  Sense strand starting at position 3247 of SEQ ID NO: 914553
uggacaaauugagauagau

SEQ ID NO: 1012773 - RNA, 19 nt, Artificial Sequence
  Description of Artificial Sequence: Synthetic oligonucleotide
  Antisense strand to SEQ ID NO: 1012772
aucuaucucaauuugucca

SEQ ID NO: 1012774 - RNA, 19 nt, Artificial Sequence
  Description of Artificial Sequence: Synthetic oligonucleotide
  Sense strand starting at position 3324 of SEQ ID NO: 914553
cagagaucagucugcaaug

SEQ ID NO: 1012775 - RNA, 19 nt, Artificial Sequence
  Description of Artificial Sequence: Synthetic oligonucleotide
  Antisense strand to SEQ ID NO: 1012774
cauugcagacugaucucug

SEQ ID NO: 1012776 - RNA, 19 nt, Artificial Sequence
  Description of Artificial Sequence: Synthetic oligonucleotide
  Sense strand starting at position 3326 of SEQ ID NO: 914553
gagaucagucugcaaugcu

SEQ ID NO: 1012777 - RNA, 19 nt, Artificial Sequence
  Description of Artificial Sequence: Synthetic oligonucleotide
  Antisense strand to SEQ ID NO: 1012776
agcauugcagacugaucuc

SEQ ID NO: 1012778 - RNA, 19 nt, Artificial Sequence
  Description of Artificial Sequence: Synthetic oligonucleotide
  Sense strand starting at position 3367 of SEQ ID NO: 914553
acuuacuggcucuaauuga

SEQ ID NO: 1012779 - RNA, 19 nt, Artificial Sequence
  Description of Artificial Sequence: Synthetic oligonucleotide
  Antisense strand to SEQ ID NO: 1012778
ucaauuagagccaguaagu

SEQ ID NO: 1012780 - RNA, 19 nt, Artificial Sequence
  Description of Artificial Sequence: Synthetic oligonucleotide
  Sense strand starting at position 3391 of SEQ ID NO: 914553
guguuaauacucugauaaa

SEQ ID NO: 1012781 - RNA, 19 nt, Artificial Sequence
  Description of Artificial Sequence: Synthetic oligonucleotide
  Antisense strand to SEQ ID NO: 1012780
uuuaucagaguauuaacac

SEQ ID NO: 1012782 - RNA, 19 nt, Artificial Sequence
  Description of Artificial Sequence: Synthetic oligonucleotide
  Sense strand starting at position 3401 of SEQ ID NO: 914553
ucugauaaauuugaugaag

SEQ ID NO: 1012783 - RNA, 19 nt, Artificial Sequence
  Description of Artificial Sequence: Synthetic oligonucleotide
  Antisense strand to SEQ ID NO: 1012782
cuucaucaaauuuaucaga

SEQ ID NO: 1012784 - RNA, 19 nt, Artificial Sequence
  Description of Artificial Sequence: Synthetic oligonucleotide
  Sense strand starting at position 3413 of SEQ ID NO: 914553
gaugaaguuuggguaggaa

SEQ ID NO: 1012785 - RNA, 19 nt, Artificial Sequence
  Description of Artificial Sequence: Synthetic oligonucleotide
  Antisense strand to SEQ ID NO: 1012784
uuccuacccaaacuucauc

SEQ ID NO: 1012786 - RNA, 19 nt, Artificial Sequence
  Description of Artificial Sequence: Synthetic oligonucleotide
  Sense strand starting at position 3522 of SEQ ID NO: 914553
gugugaggaucaucugaag

SEQ ID NO: 1012787 - RNA, 19 nt, Artificial Sequence
  Description of Artificial Sequence: Synthetic oligonucleotide
  Antisense strand to SEQ ID NO: 1012786
cuucagaugauccucacac

SEQ ID NO: 1012788 - RNA, 19 nt, Artificial Sequence
  Description of Artificial Sequence: Synthetic oligonucleotide
  Sense strand starting at position 3658 of SEQ ID NO: 914553
guggaaggguugcuugaau

SEQ ID NO: 1012789 - RNA, 19 nt, Artificial Sequence
  Description of Artificial Sequence: Synthetic oligonucleotide
  Antisense strand to SEQ ID NO: 1012788
auucaagcaacccuuccac

SEQ ID NO: 1012790 - RNA, 19 nt, Artificial Sequence
  Description of Artificial Sequence: Synthetic oligonucleotide
  Sense strand starting at position 3718 of SEQ ID NO: 914553
uacugcaaucugggugaca

SEQ ID NO: 1012791 - RNA, 19 nt, Artificial Sequence
  Description of Artificial Sequence: Synthetic oligonucleotide
  Antisense strand to SEQ ID NO: 1012790
ugucacccagauugcagua

SEQ ID NO: 1012792 - RNA, 19 nt, Artificial Sequence
  Description of Artificial Sequence: Synthetic oligonucleotide
  Sense strand starting at position 3870 of SEQ ID NO: 914553
acuuguccucaguagaaga

SEQ ID NO: 1012793 - RNA, 19 nt, Artificial Sequence
  Description of Artificial Sequence: Synthetic oligonucleotide
  Antisense strand to SEQ ID NO: 1012792
ucuucuacugaggacaagu

SEQ ID NO: 1012794 - RNA, 19 nt, Artificial Sequence
  Description of Artificial Sequence: Synthetic oligonucleotide
  Sense strand starting at position 3903 of SEQ ID NO: 914553
gggucacucuuccuccaua

SEQ ID NO: 1012795 - RNA, 19 nt, Artificial Sequence
  Description of Artificial Sequence: Synthetic oligonucleotide
  Antisense strand to SEQ ID NO: 1012794
uauggaggaagagugaccc

SEQ ID NO: 1012796 - RNA, 19 nt, Artificial Sequence
  Description of Artificial Sequence: Synthetic oligonucleotide
  Sense strand starting at position 32 of SEQ ID NO: 914554
acaagaagguagucggauu

SEQ ID NO: 1012797 - RNA, 19 nt, Artificial Sequence
  Description of Artificial Sequence: Synthetic oligonucleotide
  Antisense strand to SEQ ID NO: 1012796
aauccgacuaccuucuugu

SEQ ID NO: 1012798 - RNA, 19 nt, Artificial Sequence
  Description of Artificial Sequence: Synthetic oligonucleotide
  Sense strand starting at position 94 of SEQ ID NO: 914554
uggcuuaaugugcacacua

SEQ ID NO: 1012799 - RNA, 19 nt, Artificial Sequence
  Description of Artificial Sequence: Synthetic oligonucleotide
  Antisense strand to SEQ ID NO: 1012798
uagugugcacauuaagcca

SEQ ID NO: 1012800 - RNA, 19 nt, Artificial Sequence
  Description of Artificial Sequence: Synthetic oligonucleotide
  Sense strand starting at position 125 of SEQ ID NO: 914554
ugaugaugcuugucaaacc

SEQ ID NO: 1012801 - RNA, 19 nt, Artificial Sequence
  Description of Artificial Sequence: Synthetic oligonucleotide
  Antisense strand to SEQ ID NO: 1012800
gguuugacaagcaucauca

SEQ ID NO: 1012802 - RNA, 19 nt, Artificial Sequence
  Description of Artificial Sequence: Synthetic oligonucleotide
  Sense strand starting at position 349 of SEQ ID NO: 914554
uggaaauaacccuguccau

SEQ ID NO: 1012803 - RNA, 19 nt, Artificial Sequence
  Description of Artificial Sequence: Synthetic oligonucleotide
  Antisense strand to SEQ ID NO: 1012802
auggacaggguuauuucca

SEQ ID NO: 1012804 - RNA, 19 nt, Artificial Sequence
  Description of Artificial Sequence: Synthetic oligonucleotide
  Sense strand starting at position 433 of SEQ ID NO: 914554
agguguucugaagagcgau

SEQ ID NO: 1012805 - RNA, 19 nt, Artificial Sequence
  Description of Artificial Sequence: Synthetic oligonucleotide
  Antisense strand to SEQ ID NO: 1012804
aucgcucuucagaacaccu

SEQ ID NO: 1012806 - RNA, 19 nt, Artificial Sequence
  Description of Artificial Sequence: Synthetic oligonucleotide
  Sense strand starting at position 441 of SEQ ID NO: 914554
ugaagagcgauggguacau

SEQ ID NO: 1012807 - RNA, 19 nt, Artificial Sequence
  Description of Artificial Sequence: Synthetic oligonucleotide
  Antisense strand to SEQ ID NO: 1012806
auguacccaucgcucuuca

SEQ ID NO: 1012808 - RNA, 19 nt, Artificial Sequence
  Description of Artificial Sequence: Synthetic oligonucleotide
  Sense strand starting at position 443 of SEQ ID NO: 914554
aagagcgauggguacauua

SEQ ID NO: 1012809 - RNA, 19 nt, Artificial Sequence
  Description of Artificial Sequence: Synthetic oligonucleotide
  Antisense strand to SEQ ID NO: 1012808
uaauguacccaucgcucuu

SEQ ID NO: 1012810 - RNA, 19 nt, Artificial Sequence
  Description of Artificial Sequence: Synthetic oligonucleotide
  Sense strand starting at position 445 of SEQ ID NO: 914554
gagcgauggguacauuaug

SEQ ID NO: 1012811 - RNA, 19 nt, Artificial Sequence
  Description of Artificial Sequence: Synthetic oligonucleotide
  Antisense strand to SEQ ID NO: 1012810
cauaauguacccaucgcuc

SEQ ID NO: 1012812 - RNA, 19 nt, Artificial Sequence
  Description of Artificial Sequence: Synthetic oligonucleotide
  Sense strand starting at position 480 of SEQ ID NO: 914554
uuugaauacuguuuacagu

SEQ ID NO: 1012813 - RNA, 19 nt, Artificial Sequence
  Description of Artificial Sequence: Synthetic oligonucleotide
  Antisense strand to SEQ ID NO: 1012812
acuguaaacaguauucaaa

SEQ ID NO: 1012814 - RNA, 19 nt, Artificial Sequence
  Description of Artificial Sequence: Synthetic oligonucleotide
  Sense strand starting at position 762 of SEQ ID NO: 914554
cuggauucucuggagcuuu

SEQ ID NO: 1012815 - RNA, 19 nt, Artificial Sequence
  Description of Artificial Sequence: Synthetic oligonucleotide
  Antisense strand to SEQ ID NO: 1012814
aaagcuccagagaauccag

SEQ ID NO: 1012816 - RNA, 19 nt, Artificial Sequence
  Description of Artificial Sequence: Synthetic oligonucleotide
  Sense strand starting at position 807 of SEQ ID NO: 914554
cgccuuuggcuucuuuauu

SEQ ID NO: 1012817 - RNA, 19 nt, Artificial Sequence
  Description of Artificial Sequence: Synthetic oligonucleotide
  Antisense strand to SEQ ID NO: 1012816
aauaaagaagccaaaggcg

SEQ ID NO: 1012818 - RNA, 19 nt, Artificial Sequence
  Description of Artificial Sequence: Synthetic oligonucleotide
  Sense strand starting at position 808 of SEQ ID NO: 914554
gccuuuggcuucuuuauuu

SEQ ID NO: 1012819 - RNA, 19 nt, Artificial Sequence
  Description of Artificial Sequence: Synthetic oligonucleotide
  Antisense strand to SEQ ID NO: 1012818
aaauaaagaagccaaaggc

SEQ ID NO: 1012820 - RNA, 19 nt, Artificial Sequence
  Description of Artificial Sequence: Synthetic oligonucleotide
  Sense strand starting at position 920 of SEQ ID NO: 914554
ggugguagggcggauucaa

SEQ ID NO: 1012821 - RNA, 19 nt, Artificial Sequence
  Description of Artificial Sequence: Synthetic oligonucleotide
  Antisense strand to SEQ ID NO: 1012820
uugaauccgcccuaccacc

SEQ ID NO: 1012822 - RNA, 19 nt, Artificial Sequence
  Description of Artificial Sequence: Synthetic oligonucleotide
  Sense strand starting at position 1048 of SEQ ID NO: 914554
cccugaguagaccguaaga

SEQ ID NO: 1012823 - RNA, 19 nt, Artificial Sequence
  Description of Artificial Sequence: Synthetic oligonucleotide
  Antisense strand to SEQ ID NO: 1012822
ucuuacggucuacucaggg

SEQ ID NO: 1012824 - RNA, 19 nt, Artificial Sequence
  Description of Artificial Sequence: Synthetic oligonucleotide
  Sense strand starting at position 1226 of SEQ ID NO: 914554
gcgcuuugucagaggcuga

SEQ ID NO: 1012825 - RNA, 19 nt, Artificial Sequence
  Description of Artificial Sequence: Synthetic oligonucleotide
  Antisense strand to SEQ ID NO: 1012824
ucagccucugacaaagcgc

SEQ ID NO: 1012826 - RNA, 19 nt, Artificial Sequence
  Description of Artificial Sequence: Synthetic oligonucleotide
  Sense strand starting at position 2392 of SEQ ID NO: 914554
cgaagauccuugguaauuc

SEQ ID NO: 1012827 - RNA, 19 nt, Artificial Sequence
  Description of Artificial Sequence: Synthetic oligonucleotide
  Antisense strand to SEQ ID NO: 1012826
gaauuaccaaggaucuucg

SEQ ID NO: 1012828 - RNA, 19 nt, Artificial Sequence
  Description of Artificial Sequence: Synthetic oligonucleotide
  Sense strand starting at position 2403 of SEQ ID NO: 914554
gguaauuccaaguggcaga

SEQ ID NO: 1012829 - RNA, 19 nt, Artificial Sequence
  Description of Artificial Sequence: Synthetic oligonucleotide
  Antisense strand to SEQ ID NO: 1012828
ucugccacuuggaauuacc

SEQ ID NO: 1012830 - RNA, 19 nt, Artificial Sequence
  Description of Artificial Sequence: Synthetic oligonucleotide
  Sense strand starting at position 2445 of SEQ ID NO: 914554
ccuaauaugcagcaguaga

SEQ ID NO: 1012831 - RNA, 19 nt, Artificial Sequence
  Description of Artificial Sequence: Synthetic oligonucleotide
  Antisense strand to SEQ ID NO: 1012830
ucuacugcugcauauuagg

SEQ ID NO: 1012832 - RNA, 19 nt, Artificial Sequence
  Description of Artificial Sequence: Synthetic oligonucleotide
  Sense strand starting at position 2590 of SEQ ID NO: 914554
ccggguaggguucagagau

SEQ ID NO: 1012833 - RNA, 19 nt, Artificial Sequence
  Description of Artificial Sequence: Synthetic oligonucleotide
  Antisense strand to SEQ ID NO: 1012832
aucucugaacccuacccgg

SEQ ID NO: 1012834 - RNA, 19 nt, Artificial Sequence
  Description of Artificial Sequence: Synthetic oligonucleotide
  Sense strand starting at position 2648 of SEQ ID NO: 914554
gaacccucuugggcuaaga

SEQ ID NO: 1012835 - RNA, 19 nt, Artificial Sequence
  Description of Artificial Sequence: Synthetic oligonucleotide
  Antisense strand to SEQ ID NO: 1012834
ucuuagcccaagaggguuc

SEQ ID NO: 1012836 - RNA, 19 nt, Artificial Sequence
  Description of Artificial Sequence: Synthetic oligonucleotide
  Sense strand starting at position 2789 of SEQ ID NO: 914554
aguaauuuagucugcaauu

SEQ ID NO: 1012837 - RNA, 19 nt, Artificial Sequence
  Description of Artificial Sequence: Synthetic oligonucleotide
  Antisense strand to SEQ ID NO: 1012836
aauugcagacuaaauuacu

SEQ ID NO: 1012838 - RNA, 19 nt, Artificial Sequence
  Description of Artificial Sequence: Synthetic oligonucleotide
  Sense strand starting at position 2866 of SEQ ID NO: 914554
cugucauuuccagggcuuu

SEQ ID NO: 1012839 - RNA, 19 nt, Artificial Sequence
  Description of Artificial Sequence: Synthetic oligonucleotide
  Antisense strand to SEQ ID NO: 1012838
aaagcccuggaaaugacag

SEQ ID NO: 1012840 - RNA, 19 nt, Artificial Sequence
  Description of Artificial Sequence: Synthetic oligonucleotide
  Sense strand starting at position 3043 of SEQ ID NO: 914554
cuugucuuggcacacaaua

SEQ ID NO: 1012841 - RNA, 19 nt, Artificial Sequence
  Description of Artificial Sequence: Synthetic oligonucleotide
  Antisense strand to SEQ ID NO: 1012840
uauugugugccaagacaag

SEQ ID NO: 1012842 - RNA, 19 nt, Artificial Sequence
  Description of Artificial Sequence: Synthetic oligonucleotide
  Sense strand starting at position 3123 of SEQ ID NO: 914554
ggcuguggcuuauuuacau

SEQ ID NO: 1012843 - RNA, 19 nt, Artificial Sequence
  Description of Artificial Sequence: Synthetic oligonucleotide
  Antisense strand to SEQ ID NO: 1012842
auguaaauaagccacagcc

SEQ ID NO: 1012844 - RNA, 19 nt, Artificial Sequence
  Description of Artificial Sequence: Synthetic oligonucleotide
  Sense strand starting at position 3176 of SEQ ID NO: 914554
gcaccuaacgcucaaggau

SEQ ID NO: 1012845 - RNA, 19 nt, Artificial Sequence
  Description of Artificial Sequence: Synthetic oligonucleotide
  Antisense strand to SEQ ID NO: 1012844
auccuugagcguuaggugc

SEQ ID NO: 1012846 - RNA, 19 nt, Artificial Sequence
  Description of Artificial Sequence: Synthetic oligonucleotide
  Sense strand starting at position 3188 of SEQ ID NO: 914554
caaggauuauuugaguaaa

SEQ ID NO: 1012847 - RNA, 19 nt, Artificial Sequence
  Description of Artificial Sequence: Synthetic oligonucleotide
  Antisense strand to SEQ ID NO: 1012846
uuuacucaaauaauccuug

SEQ ID NO: 1012848 - RNA, 19 nt, Artificial Sequence
  Description of Artificial Sequence: Synthetic oligonucleotide
  Sense strand starting at position 3237 of SEQ ID NO: 914554
cuuaaagguuuauccuagu

SEQ ID NO: 1012849 - RNA, 19 nt, Artificial Sequence
  Description of Artificial Sequence: Synthetic oligonucleotide
  Antisense strand to SEQ ID NO: 1012848
acuaggauaaaccuuuaag

SEQ ID NO: 1012850 - RNA, 19 nt, Artificial Sequence
  Description of Artificial Sequence: Synthetic oligonucleotide
  Sense strand starting at position 3307 of SEQ ID NO: 914554
ugaauaaaucgaugcaauc

SEQ ID NO: 1012851 - RNA, 19 nt, Artificial Sequence
  Description of Artificial Sequence: Synthetic oligonucleotide
  Antisense strand to SEQ ID NO: 1012850
gauugcaucgauuuauuca

SEQ ID NO: 1012852 - RNA, 19 nt, Artificial Sequence
  Description of Artificial Sequence: Synthetic oligonucleotide
  Sense strand starting at position 3396 of SEQ ID NO: 914554
cuuugcuaggaaugaaaca

SEQ ID NO: 1012853 - RNA, 19 nt, Artificial Sequence
  Description of Artificial Sequence: Synthetic oligonucleotide
  Antisense strand to SEQ ID NO: 1012852
uguuucauuccuagcaaag

SEQ ID NO: 1012854 - RNA, 19 nt, Artificial Sequence
  Description of Artificial Sequence: Synthetic oligonucleotide
  Sense strand starting at position 3423 of SEQ ID NO: 914554
ggaggugguucucccuuaa

SEQ ID NO: 1012855 - RNA, 19 nt, Artificial Sequence
  Description of Artificial Sequence: Synthetic oligonucleotide
  Antisense strand to SEQ ID NO: 1012854
uuaagggagaaccaccucc

SEQ ID NO: 1012856 - RNA, 19 nt, Artificial Sequence
  Description of Artificial Sequence: Synthetic oligonucleotide
  Sense strand starting at position 3563 of SEQ ID NO: 914554
guacucugguaccuaacau

SEQ ID NO: 1012857 - RNA, 19 nt, Artificial Sequence
  Description of Artificial Sequence: Synthetic oligonucleotide
  Antisense strand to SEQ ID NO: 1012856
auguuagguaccagaguac

SEQ ID NO: 1012858 - RNA, 19 nt, Artificial Sequence
  Description of Artificial Sequence: Synthetic oligonucleotide
  Sense strand starting at position 3675 of SEQ ID NO: 914554
ugauguaaugguuaaaccu

SEQ ID NO: 1012859 - RNA, 19 nt, Artificial Sequence
  Description of Artificial Sequence: Synthetic oligonucleotide
  Antisense strand to SEQ ID NO: 1012858
agguuuaaccauuacauca

SEQ ID NO: 1012860 - RNA, 19 nt, Artificial Sequence
  Description of Artificial Sequence: Synthetic oligonucleotide
  Sense strand starting at position 3757 of SEQ ID NO: 914554
uggauaagcuaguuaaccu

SEQ ID NO: 1012861 - RNA, 19 nt, Artificial Sequence
  Description of Artificial Sequence: Synthetic oligonucleotide
  Antisense strand to SEQ ID NO: 1012860
agguuaacuagcuuaucca

SEQ ID NO: 1012862 - RNA, 19 nt, Artificial Sequence
  Description of Artificial Sequence: Synthetic oligonucleotide
  Sense strand starting at position 3799 of SEQ ID NO: 914554
uuugcaauagggugauaau

SEQ ID NO: 1012863 - RNA, 19 nt, Artificial Sequence
  Description of Artificial Sequence: Synthetic oligonucleotide
  Antisense strand to SEQ ID NO: 1012862
auuaucacccuauugcaaa

SEQ ID NO: 1012864 - RNA, 19 nt, Artificial Sequence
  Description of Artificial Sequence: Synthetic oligonucleotide
  Sense strand starting at position 3817 of SEQ ID NO: 914554
uagcacuuaggauauagua

SEQ ID NO: 1012865 - RNA, 19 nt, Artificial Sequence
  Description of Artificial Sequence: Synthetic oligonucleotide
  Antisense strand to SEQ ID NO: 1012864
uacuauauccuaagugcua

SEQ ID NO: 1012866 - RNA, 19 nt, Artificial Sequence
  Description of Artificial Sequence: Synthetic oligonucleotide
  Sense strand starting at position 3916 of SEQ ID NO: 914554
cugggucuuacauguaaug

SEQ ID NO: 1012867 - RNA, 19 nt, Artificial Sequence
  Description of Artificial Sequence: Synthetic oligonucleotide
  Antisense strand to SEQ ID NO: 1012866
cauuacauguaagacccag

SEQ ID NO: 1012868 - RNA, 19 nt, Artificial Sequence
  Description of Artificial Sequence: Synthetic oligonucleotide
  Sense strand starting at position 3918 of SEQ ID NO: 914554
gggucuuacauguaaugug

SEQ ID NO: 1012869 - RNA, 19 nt, Artificial Sequence
  Description of Artificial Sequence: Synthetic oligonucleotide
  Antisense strand to SEQ ID NO: 1012868
cacauuacauguaagaccc

SEQ ID NO: 1012870 - RNA, 19 nt, Artificial Sequence
  Description of Artificial Sequence: Synthetic oligonucleotide
  Sense strand starting at position 3930 of SEQ ID NO: 914554
uaaugugggcuccauaagu

SEQ ID NO: 1012871 - RNA, 19 nt, Artificial Sequence
  Description of Artificial Sequence: Synthetic oligonucleotide
  Antisense strand to SEQ ID NO: 1012870
acuuauggagcccacauua

SEQ ID NO: 1012872 - RNA, 19 nt, Artificial Sequence
  Description of Artificial Sequence: Synthetic oligonucleotide
  Sense strand starting at position 3941 of SEQ ID NO: 914554
ccauaaguugcugacuaca

SEQ ID NO: 1012873 - RNA, 19 nt, Artificial Sequence
  Description of Artificial Sequence: Synthetic oligonucleotide
  Antisense strand to SEQ ID NO: 1012872
uguagucagcaacuuaugg

SEQ ID NO: 1012874 - RNA, 19 nt, Artificial Sequence
  Description of Artificial Sequence: Synthetic oligonucleotide
  Sense strand starting at position 3943 of SEQ ID NO: 914554
auaaguugcugacuacaua

SEQ ID NO: 1012875 - RNA, 19 nt, Artificial Sequence
  Description of Artificial Sequence: Synthetic oligonucleotide
  Antisense strand to SEQ ID NO: 1012874
uauguagucagcaacuuau

SEQ ID NO: 1012876 - RNA, 19 nt, Artificial Sequence
  Description of Artificial Sequence: Synthetic oligonucleotide
  Sense strand starting at position 11 of SEQ ID NO: 914555
agagcaguaccuggcagau

SEQ ID NO: 1012877 - RNA, 19 nt, Artificial Sequence
  Description of Artificial Sequence: Synthetic oligonucleotide
  Antisense strand to SEQ ID NO: 1012876
aucugccagguacugcucu

SEQ ID NO: 1012878 - RNA, 19 nt, Artificial Sequence
  Description of Artificial Sequence: Synthetic oligonucleotide
  Sense strand starting at position 15 of SEQ ID NO: 914555
caguaccuggcagauauua

SEQ ID NO: 1012879 - RNA, 19 nt, Artificial Sequence
  Description of Artificial Sequence: Synthetic oligonucleotide
  Antisense strand to SEQ ID NO: 1012878
uaauaucugccagguacug

SEQ ID NO: 1012880 - RNA, 19 nt, Artificial Sequence
  Description of Artificial Sequence: Synthetic oligonucleotide
  Sense strand starting at position 23 of SEQ ID NO: 914555
ggcagauauuaggcacuua

SEQ ID NO: 1012881 - RNA, 19 nt, Artificial Sequence
  Description of Artificial Sequence: Synthetic oligonucleotide
  Antisense strand to SEQ ID NO: 1012880
uaagugccuaauaucugcc

SEQ ID NO: 1012882 - RNA, 19 nt, Artificial Sequence
  Description of Artificial Sequence: Synthetic oligonucleotide
  Sense strand starting at position 34 of SEQ ID NO: 914555
ggcacuuauuaagugauca

SEQ ID NO: 1012883 - RNA, 19 nt, Artificial Sequence
  Description of Artificial Sequence: Synthetic oligonucleotide
  Antisense strand to SEQ ID NO: 1012882
ugaucacuuaauaagugcc

SEQ ID NO: 1012884 - RNA, 19 nt, Artificial Sequence
  Description of Artificial Sequence: Synthetic oligonucleotide
  Sense strand starting at position 135 of SEQ ID NO: 914555
gauugauagcacgaucaca

SEQ ID NO: 1012885 - RNA, 19 nt, Artificial Sequence
  Description of Artificial Sequence: Synthetic oligonucleotide
  Antisense strand to SEQ ID NO: 1012884
ugugaucgugcuaucaauc

SEQ ID NO: 1012886 - RNA, 19 nt, Artificial Sequence
  Description of Artificial Sequence: Synthetic oligonucleotide
  Sense strand starting at position 320 of SEQ ID NO: 914555
acaagaagguagucggauu

SEQ ID NO: 1012887 - RNA, 19 nt, Artificial Sequence
  Description of Artificial Sequence: Synthetic oligonucleotide
  Antisense strand to SEQ ID NO: 1012886
aauccgacuaccuucuugu

SEQ ID NO: 1012888 - RNA, 19 nt, Artificial Sequence
  Description of Artificial Sequence: Synthetic oligonucleotide
  Sense strand starting at position 382 of SEQ ID NO: 914555
uggcuuaaugugcacacua

SEQ ID NO: 1012889 - RNA, 19 nt, Artificial Sequence
  Description of Artificial Sequence: Synthetic oligonucleotide
  Antisense strand to SEQ ID NO: 1012888
uagugugcacauuaagcca

SEQ ID NO: 1012890 - RNA, 19 nt, Artificial Sequence
  Description of Artificial Sequence: Synthetic oligonucleotide
  Sense strand starting at position 413 of SEQ ID NO: 914555
ugaugaugcuugucaaacc

SEQ ID NO: 1012891 - RNA, 19 nt, Artificial Sequence
  Description of Artificial Sequence: Synthetic oligonucleotide
  Antisense strand to SEQ ID NO: 1012890
gguuugacaagcaucauca

SEQ ID NO: 1012892 - RNA, 19 nt, Artificial Sequence
  Description of Artificial Sequence: Synthetic oligonucleotide
  Sense strand starting at position 637 of SEQ ID NO: 914555
uggaaauaacccuguccau

SEQ ID NO: 1012893 - RNA, 19 nt, Artificial Sequence
  Description of Artificial Sequence: Synthetic oligonucleotide
  Antisense strand to SEQ ID NO: 1012892
auggacaggguuauuucca

SEQ ID NO: 1012894 - RNA, 19 nt, Artificial Sequence
  Description of Artificial Sequence: Synthetic oligonucleotide
  Sense strand starting at position 721 of SEQ ID NO: 914555
agguguucugaagagcgau

SEQ ID NO: 1012895 - RNA, 19 nt, Artificial Sequence
  Description of Artificial Sequence: Synthetic oligonucleotide
  Antisense strand to SEQ ID NO: 1012894
aucgcucuucagaacaccu

SEQ ID NO: 1012896 - RNA, 19 nt, Artificial Sequence
  Description of Artificial Sequence: Synthetic oligonucleotide
  Sense strand starting at position 729 of SEQ ID NO: 914555
ugaagagcgauggguacau

SEQ ID NO: 1012897 - RNA, 19 nt, Artificial Sequence
  Description of Artificial Sequence: Synthetic oligonucleotide
  Antisense strand to SEQ ID NO: 1012896
auguacccaucgcucuuca

SEQ ID NO: 1012898 - RNA, 19 nt, Artificial Sequence
  Description of Artificial Sequence: Synthetic oligonucleotide
  Sense strand starting at position 731 of SEQ ID NO: 914555
aagagcgauggguacauua

SEQ ID NO: 1012899 - RNA, 19 nt, Artificial Sequence
  Description of Artificial Sequence: Synthetic oligonucleotide
  Antisense strand to SEQ ID NO: 1012898
uaauguacccaucgcucuu

SEQ ID NO: 1012900 - RNA, 19 nt, Artificial Sequence
  Description of Artificial Sequence: Synthetic oligonucleotide
  Sense strand starting at position 733 of SEQ ID NO: 914555
gagcgauggguacauuaug

SEQ ID NO: 1012901 - RNA, 19 nt, Artificial Sequence
  Description of Artificial Sequence: Synthetic oligonucleotide
  Antisense strand to SEQ ID NO: 1012900
cauaauguacccaucgcuc

SEQ ID NO: 1012902 - RNA, 19 nt, Artificial Sequence
  Description of Artificial Sequence: Synthetic oligonucleotide
  Sense strand starting at position 768 of SEQ ID NO: 914555
uuugaauacuguuuacagu

SEQ ID NO: 1012903 - RNA, 19 nt, Artificial Sequence
  Description of Artificial Sequence: Synthetic oligonucleotide
  Antisense strand to SEQ ID NO: 1012902
acuguaaacaguauucaaa

SEQ ID NO: 1012904 - RNA, 19 nt, Artificial Sequence
  Description of Artificial Sequence: Synthetic oligonucleotide
  Sense strand starting at position 1050 of SEQ ID NO: 914555
cuggauucucuggagcuuu

SEQ ID NO: 1012905 - RNA, 19 nt, Artificial Sequence
  Description of Artificial Sequence: Synthetic oligonucleotide
  Antisense strand to SEQ ID NO: 1012904
aaagcuccagagaauccag

SEQ ID NO: 1012906 - RNA, 19 nt, Artificial Sequence
  Description of Artificial Sequence: Synthetic oligonucleotide
  Sense strand starting at position 1095 of SEQ ID NO: 914555
cgccuuuggcuucuuuauu

SEQ ID NO: 1012907 - RNA, 19 nt, Artificial Sequence
  Description of Artificial Sequence: Synthetic oligonucleotide
  Antisense strand to SEQ ID NO: 1012906
aauaaagaagccaaaggcg

SEQ ID NO: 1012908 - RNA, 19 nt, Artificial Sequence
  Description of Artificial Sequence: Synthetic oligonucleotide
  Sense strand starting at position 1096 of SEQ ID NO: 914555
gccuuuggcuucuuuauuu

SEQ ID NO: 1012909 - RNA, 19 nt, Artificial Sequence
  Description of Artificial Sequence: Synthetic oligonucleotide
  Antisense strand to SEQ ID NO: 1012908
aaauaaagaagccaaaggc

SEQ ID NO: 1012910 - RNA, 19 nt, Artificial Sequence
  Description of Artificial Sequence: Synthetic oligonucleotide
  Sense strand starting at position 1208 of SEQ ID NO: 914555
ggugguagggcggauucaa

SEQ ID NO: 1012911 - RNA, 19 nt, Artificial Sequence
  Description of Artificial Sequence: Synthetic oligonucleotide
  Antisense strand to SEQ ID NO: 1012910
uugaauccgcccuaccacc

SEQ ID NO: 1012912 - RNA, 19 nt, Artificial Sequence
  Description of Artificial Sequence: Synthetic oligonucleotide
  Sense strand starting at position 1273 of SEQ ID NO: 914555
ucuugaagaaugcgagcaa

SEQ ID NO: 1012913 - RNA, 19 nt, Artificial Sequence
  Description of Artificial Sequence: Synthetic oligonucleotide
  Antisense strand to SEQ ID NO: 1012912
uugcucgcauucuucaaga

SEQ ID NO: 1012914 - RNA, 19 nt, Artificial Sequence
  Description of Artificial Sequence: Synthetic oligonucleotide
  Sense strand starting at position 1336 of SEQ ID NO: 914555
cccugaguagaccguaaga

SEQ ID NO: 1012915 - RNA, 19 nt, Artificial Sequence
  Description of Artificial Sequence: Synthetic oligonucleotide
  Antisense strand to SEQ ID NO: 1012914
ucuuacggucuacucaggg

SEQ ID NO: 1012916 - RNA, 19 nt, Artificial Sequence
  Description of Artificial Sequence: Synthetic oligonucleotide
  Sense strand starting at position 1514 of SEQ ID NO: 914555
gcgcuuugucagaggcuga

SEQ ID NO: 1012917 - RNA, 19 nt, Artificial Sequence
  Description of Artificial Sequence: Synthetic oligonucleotide
  Antisense strand to SEQ ID NO: 1012916
ucagccucugacaaagcgc

SEQ ID NO: 1012918 - RNA, 19 nt, Artificial Sequence
  Description of Artificial Sequence: Synthetic oligonucleotide
  Sense strand starting at position 2441 of SEQ ID NO: 914555
augaucaucuccuuacgua

SEQ ID NO: 1012919 - RNA, 19 nt, Artificial Sequence
  Description of Artificial Sequence: Synthetic oligonucleotide
  Antisense strand to SEQ ID NO: 1012918
uacguaaggagaugaucau

SEQ ID NO: 1012920 - RNA, 19 nt, Artificial Sequence
  Description of Artificial Sequence: Synthetic oligonucleotide
  Sense strand starting at position 2680 of SEQ ID NO: 914555
cgaagauccuugguaauuc

SEQ ID NO: 1012921 - RNA, 19 nt, Artificial Sequence
  Description of Artificial Sequence: Synthetic oligonucleotide
  Antisense strand to SEQ ID NO: 1012920
gaauuaccaaggaucuucg

SEQ ID NO: 1012922 - RNA, 19 nt, Artificial Sequence
  Description of Artificial Sequence: Synthetic oligonucleotide
  Sense strand starting at position 2691 of SEQ ID NO: 914555
gguaauuccaaguggcaga

SEQ ID NO: 1012923 - RNA, 19 nt, Artificial Sequence
  Description of Artificial Sequence: Synthetic oligonucleotide
  Antisense strand to SEQ ID NO: 1012922
ucugccacuuggaauuacc

SEQ ID NO: 1012924 - RNA, 19 nt, Artificial Sequence
  Description of Artificial Sequence: Synthetic oligonucleotide
  Sense strand starting at position 2733 of SEQ ID NO: 914555
ccuaauaugcagcaguaga

SEQ ID NO: 1012925 - RNA, 19 nt, Artificial Sequence
  Description of Artificial Sequence: Synthetic oligonucleotide
  Antisense strand to SEQ ID NO: 1012924
ucuacugcugcauauuagg

SEQ ID NO: 1012926 - RNA, 19 nt, Artificial Sequence
  Description of Artificial Sequence: Synthetic oligonucleotide
  Sense strand starting at position 2746 of SEQ ID NO: 914555
aguagaggauuugggagua

SEQ ID NO: 1012927 - RNA, 19 nt, Artificial Sequence
  Description of Artificial Sequence: Synthetic oligonucleotide
  Antisense strand to SEQ ID NO: 1012926
uacucccaaauccucuacu

SEQ ID NO: 1012928 - RNA, 19 nt, Artificial Sequence
  Description of Artificial Sequence: Synthetic oligonucleotide
  Sense strand starting at position 2878 of SEQ ID NO: 914555
ccggguaggguucagagau

SEQ ID NO: 1012929 - RNA, 19 nt, Artificial Sequence
  Description of Artificial Sequence: Synthetic oligonucleotide
  Antisense strand to SEQ ID NO: 1012928
aucucugaacccuacccgg

SEQ ID NO: 1012930 - RNA, 19 nt, Artificial Sequence
  Description of Artificial Sequence: Synthetic oligonucleotide
  Sense strand starting at position 2936 of SEQ ID NO: 914555
gaacccucuugggcuaaga

SEQ ID NO: 1012931 - RNA, 19 nt, Artificial Sequence
  Description of Artificial Sequence: Synthetic oligonucleotide
  Antisense strand to SEQ ID NO: 1012930
ucuuagcccaagaggguuc

SEQ ID NO: 1012932 - RNA, 19 nt, Artificial Sequence
  Description of Artificial Sequence: Synthetic oligonucleotide
  Sense strand starting at position 3077 of SEQ ID NO: 914555
aguaauuuagucugcaauu

SEQ ID NO: 1012933 - RNA, 19 nt, Artificial Sequence
  Description of Artificial Sequence: Synthetic oligonucleotide
  Antisense strand to SEQ ID NO: 1012932
aauugcagacuaaauuacu

SEQ ID NO: 1012934 - RNA, 19 nt, Artificial Sequence
  Description of Artificial Sequence: Synthetic oligonucleotide
  Sense strand starting at position 3154 of SEQ ID NO: 914555
cugucauuuccagggcuuu

SEQ ID NO: 1012935 - RNA, 19 nt, Artificial Sequence
  Description of Artificial Sequence: Synthetic oligonucleotide
  Antisense strand to SEQ ID NO: 1012934
aaagcccuggaaaugacag

SEQ ID NO: 1012936 - RNA, 19 nt, Artificial Sequence
  Description of Artificial Sequence: Synthetic oligonucleotide
  Sense strand starting at position 3331 of SEQ ID NO: 914555
cuugucuuggcacacaaua

SEQ ID NO: 1012937 - RNA, 19 nt, Artificial Sequence
  Description of Artificial Sequence: Synthetic oligonucleotide
  Antisense strand to SEQ ID NO: 1012936
uauugugugccaagacaag

SEQ ID NO: 1012938 - RNA, 19 nt, Artificial Sequence
  Description of Artificial Sequence: Synthetic oligonucleotide
  Sense strand starting at position 3411 of SEQ ID NO: 914555
ggcuguggcuuauuuacau

SEQ ID NO: 1012939 - RNA, 19 nt, Artificial Sequence
  Description of Artificial Sequence: Synthetic oligonucleotide
  Antisense strand to SEQ ID NO: 1012938
auguaaauaagccacagcc

SEQ ID NO: 1012940 - RNA, 19 nt, Artificial Sequence
  Description of Artificial Sequence: Synthetic oligonucleotide
  Sense strand starting at position 3464 of SEQ ID NO: 914555
gcaccuaacgcucaaggau

SEQ ID NO: 1012941 - RNA, 19 nt, Artificial Sequence
  Description of Artificial Sequence: Synthetic oligonucleotide
  Antisense strand to SEQ ID NO: 1012940
auccuugagcguuaggugc

SEQ ID NO: 1012942 - RNA, 19 nt, Artificial Sequence
  Description of Artificial Sequence: Synthetic oligonucleotide
  Sense strand starting at position 3476 of SEQ ID NO: 914555
caaggauuauuugaguaaa

SEQ ID NO: 1012943 - RNA, 19 nt, Artificial Sequence
  Description of Artificial Sequence: Synthetic oligonucleotide
  Antisense strand to SEQ ID NO: 1012942
uuuacucaaauaauccuug

SEQ ID NO: 1012944 - RNA, 19 nt, Artificial Sequence
  Description of Artificial Sequence: Synthetic oligonucleotide
  Sense strand starting at position 3525 of SEQ ID NO: 914555
cuuaaagguuuauccuagu

SEQ ID NO: 1012945 - RNA, 19 nt, Artificial Sequence
  Description of Artificial Sequence: Synthetic oligonucleotide
  Antisense strand to SEQ ID NO: 1012944
acuaggauaaaccuuuaag

SEQ ID NO: 1012946 - RNA, 19 nt, Artificial Sequence
  Description of Artificial Sequence: Synthetic oligonucleotide
  Sense strand starting at position 3595 of SEQ ID NO: 914555
ugaauaaaucgaugcaauc

SEQ ID NO: 1012947 - RNA, 19 nt, Artificial Sequence
  Description of Artificial Sequence: Synthetic oligonucleotide
  Antisense strand to SEQ ID NO: 1012946
gauugcaucgauuuauuca

SEQ ID NO: 1012948 - RNA, 19 nt, Artificial Sequence
  Description of Artificial Sequence: Synthetic oligonucleotide
  Sense strand starting at position 3684 of SEQ ID NO: 914555
cuuugcuaggaaugaaaca

SEQ ID NO: 1012949 - RNA, 19 nt, Artificial Sequence
  Description of Artificial Sequence: Synthetic oligonucleotide
  Antisense strand to SEQ ID NO: 1012948
uguuucauuccuagcaaag

SEQ ID NO: 1012950 - RNA, 19 nt, Artificial Sequence
  Description of Artificial Sequence: Synthetic oligonucleotide
  Sense strand starting at position 3711 of SEQ ID NO: 914555
ggaggugguucucccuuaa

SEQ ID NO: 1012951 - RNA, 19 nt, Artificial Sequence
  Description of Artificial Sequence: Synthetic oligonucleotide
  Antisense strand to SEQ ID NO: 1012950
uuaagggagaaccaccucc

SEQ ID NO: 1012952 - RNA, 19 nt, Artificial Sequence
  Description of Artificial Sequence: Synthetic oligonucleotide
  Sense strand starting at position 3851 of SEQ ID NO: 914555
guacucugguaccuaacau

SEQ ID NO: 1012953 - RNA, 19 nt, Artificial Sequence
  Description of Artificial Sequence: Synthetic oligonucleotide
  Antisense strand to SEQ ID NO: 1012952
auguuagguaccagaguac

SEQ ID NO: 1012954 - RNA, 19 nt, Artificial Sequence
  Description of Artificial Sequence: Synthetic oligonucleotide
  Sense strand starting at position 3963 of SEQ ID NO: 914555
ugauguaaugguuaaaccu

SEQ ID NO: 1012955 - RNA, 19 nt, Artificial Sequence
  Description of Artificial Sequence: Synthetic oligonucleotide
  Antisense strand to SEQ ID NO: 1012954
agguuuaaccauuacauca

SEQ ID NO: 1012956 - RNA, 19 nt, Artificial Sequence
  Description of Artificial Sequence: Synthetic oligonucleotide
  Sense strand starting at position 21 of SEQ ID NO: 914556
cccugcagauugucaugaa

SEQ ID NO: 1012957 - RNA, 19 nt, Artificial Sequence
  Description of Artificial Sequence: Synthetic oligonucleotide
  Antisense strand to SEQ ID NO: 1012956
uucaugacaaucugcaggg

SEQ ID NO: 1012958 - RNA, 19 nt, Artificial Sequence
  Description of Artificial Sequence: Synthetic oligonucleotide
  Sense strand starting at position 25 of SEQ ID NO: 914556
gcagauugucaugaaccaa

SEQ ID NO: 1012959 - RNA, 19 nt, Artificial Sequence
  Description of Artificial Sequence: Synthetic oligonucleotide
  Antisense strand to SEQ ID NO: 1012958
uugguucaugacaaucugc

SEQ ID NO: 1012960 - RNA, 19 nt, Artificial Sequence
  Description of Artificial Sequence: Synthetic oligonucleotide
  Sense strand starting at position 53 of SEQ ID NO: 914556
ggguauccuguagagaagu

SEQ ID NO: 1012961 - RNA, 19 nt, Artificial Sequence
  Description of Artificial Sequence: Synthetic oligonucleotide
  Antisense strand to SEQ ID NO: 1012960
acuucucuacaggauaccc

SEQ ID NO: 1012962 - RNA, 19 nt, Artificial Sequence
  Description of Artificial Sequence: Synthetic oligonucleotide
  Sense strand starting at position 55 of SEQ ID NO: 914556
guauccuguagagaaguua

SEQ ID NO: 1012963 - RNA, 19 nt, Artificial Sequence
  Description of Artificial Sequence: Synthetic oligonucleotide
  Antisense strand to SEQ ID NO: 1012962
uaacuucucuacaggauac

SEQ ID NO: 1012964 - RNA, 19 nt, Artificial Sequence
  Description of Artificial Sequence: Synthetic oligonucleotide
  Sense strand starting at position 251 of SEQ ID NO: 914556
ggagaaguuuccaggaggu

SEQ ID NO: 1012965 - RNA, 19 nt, Artificial Sequence
  Description of Artificial Sequence: Synthetic oligonucleotide
  Antisense strand to SEQ ID NO: 1012964
accuccuggaaacuucucc

SEQ ID NO: 1012966 - RNA, 19 nt, Artificial Sequence
  Description of Artificial Sequence: Synthetic oligonucleotide
  Sense strand starting at position 302 of SEQ ID NO: 914556
gagacucaccucugagagu

SEQ ID NO: 1012967 - RNA, 19 nt, Artificial Sequence
  Description of Artificial Sequence: Synthetic oligonucleotide
  Antisense strand to SEQ ID NO: 1012966
acucucagaggugagucuc

SEQ ID NO: 1012968 - RNA, 19 nt, Artificial Sequence
  Description of Artificial Sequence: Synthetic oligonucleotide
  Sense strand starting at position 313 of SEQ ID NO: 914556
cugagaguccagugucaaa

SEQ ID NO: 1012969 - RNA, 19 nt, Artificial Sequence
  Description of Artificial Sequence: Synthetic oligonucleotide
  Antisense strand to SEQ ID NO: 1012968
uuugacacuggacucucag

SEQ ID NO: 1012970 - RNA, 19 nt, Artificial Sequence
  Description of Artificial Sequence: Synthetic oligonucleotide
  Sense strand starting at position 383 of SEQ ID NO: 914556
ggaaguagacgucgggaaa

SEQ ID NO: 1012971 - RNA, 19 nt, Artificial Sequence
  Description of Artificial Sequence: Synthetic oligonucleotide
  Antisense strand to SEQ ID NO: 1012970
uuucccgacgucuacuucc

SEQ ID NO: 1012972 - RNA, 19 nt, Artificial Sequence
  Description of Artificial Sequence: Synthetic oligonucleotide
  Sense strand starting at position 415 of SEQ ID NO: 914556
acaggugcucuccgaagaa

SEQ ID NO: 1012973 - RNA, 19 nt, Artificial Sequence
  Description of Artificial Sequence: Synthetic oligonucleotide
  Antisense strand to SEQ ID NO: 1012972
uucuucggagagcaccugu

SEQ ID NO: 1012974 - RNA, 19 nt, Artificial Sequence
  Description of Artificial Sequence: Synthetic oligonucleotide
  Sense strand starting at position 424 of SEQ ID NO: 914556
cuccgaagaacuggucaaa

SEQ ID NO: 1012975 - RNA, 19 nt, Artificial Sequence
  Description of Artificial Sequence: Synthetic oligonucleotide
  Antisense strand to SEQ ID NO: 1012974
uuugaccaguucuucggag

SEQ ID NO: 1012976 - RNA, 19 nt, Artificial Sequence
  Description of Artificial Sequence: Synthetic oligonucleotide
  Sense strand starting at position 599 of SEQ ID NO: 914556
aagcuucuggaauggugau

SEQ ID NO: 1012977 - RNA, 19 nt, Artificial Sequence
  Description of Artificial Sequence: Synthetic oligonucleotide
  Antisense strand to SEQ ID NO: 1012976
aucaccauuccagaagcuu

SEQ ID NO: 1012978 - RNA, 19 nt, Artificial Sequence
  Description of Artificial Sequence: Synthetic oligonucleotide
  Sense strand starting at position 656 of SEQ ID NO: 914556
ggagacuugugauccggga

SEQ ID NO: 1012979 - RNA, 19 nt, Artificial Sequence
  Description of Artificial Sequence: Synthetic oligonucleotide
  Antisense strand to SEQ ID NO: 1012978
ucccggaucacaagucucc

SEQ ID NO: 1012980 - RNA, 19 nt, Artificial Sequence
  Description of Artificial Sequence: Synthetic oligonucleotide
  Sense strand starting at position 658 of SEQ ID NO: 914556
agacuugugauccgggauu

SEQ ID NO: 1012981 - RNA, 19 nt, Artificial Sequence
  Description of Artificial Sequence: Synthetic oligonucleotide
  Antisense strand to SEQ ID NO: 1012980
aaucccggaucacaagucu

SEQ ID NO: 1012982 - RNA, 19 nt, Artificial Sequence
  Description of Artificial Sequence: Synthetic oligonucleotide
  Sense strand starting at position 694 of SEQ ID NO: 914556
cccaguacucacugagcua

SEQ ID NO: 1012983 - RNA, 19 nt, Artificial Sequence
  Description of Artificial Sequence: Synthetic oligonucleotide
  Antisense strand to SEQ ID NO: 1012982
uagcucagugaguacuggg

SEQ ID NO: 1012984 - RNA, 19 nt, Artificial Sequence
  Description of Artificial Sequence: Synthetic oligonucleotide
  Sense strand starting at position 697 of SEQ ID NO: 914556
aguacucacugagcuaaga

SEQ ID NO: 1012985 - RNA, 19 nt, Artificial Sequence
  Description of Artificial Sequence: Synthetic oligonucleotide
  Antisense strand to SEQ ID NO: 1012984
ucuuagcucagugaguacu

SEQ ID NO: 1012986 - RNA, 19 nt, Artificial Sequence
  Description of Artificial Sequence: Synthetic oligonucleotide
  Sense strand starting at position 964 of SEQ ID NO: 914556
acuggaaucuuccuaggcu

SEQ ID NO: 1012987 - RNA, 19 nt, Artificial Sequence
  Description of Artificial Sequence: Synthetic oligonucleotide
  Antisense strand to SEQ ID NO: 1012986
agccuaggaagauuccagu

SEQ ID NO: 1012988 - RNA, 19 nt, Artificial Sequence
  Description of Artificial Sequence: Synthetic oligonucleotide
  Sense strand starting at position 993 of SEQ ID NO: 914556
gacauuaacucuuugugag

SEQ ID NO: 1012989 - RNA, 19 nt, Artificial Sequence
  Description of Artificial Sequence: Synthetic oligonucleotide
  Antisense strand to SEQ ID NO: 1012988
cucacaaagaguuaauguc

SEQ ID NO: 1012990 - RNA, 19 nt, Artificial Sequence
  Description of Artificial Sequence: Synthetic oligonucleotide
  Sense strand starting at position 994 of SEQ ID NO: 914556
acauuaacucuuugugagu

SEQ ID NO: 1012991 - RNA, 19 nt, Artificial Sequence
  Description of Artificial Sequence: Synthetic oligonucleotide
  Antisense strand to SEQ ID NO: 1012990
acucacaaagaguuaaugu

SEQ ID NO: 1012992 - RNA, 19 nt, Artificial Sequence
  Description of Artificial Sequence: Synthetic oligonucleotide
  Sense strand starting at position 1003 of SEQ ID NO: 914556
cuuugugaguccuuggaag

SEQ ID NO: 1012993 - RNA, 19 nt, Artificial Sequence
  Description of Artificial Sequence: Synthetic oligonucleotide
  Antisense strand to SEQ ID NO: 1012992
cuuccaaggacucacaaag

SEQ ID NO: 1012994 - RNA, 19 nt, Artificial Sequence
  Description of Artificial Sequence: Synthetic oligonucleotide
  Sense strand starting at position 1005 of SEQ ID NO: 914556
uugugaguccuuggaagag

SEQ ID NO: 1012995 - RNA, 19 nt, Artificial Sequence
  Description of Artificial Sequence: Synthetic oligonucleotide
  Antisense strand to SEQ ID NO: 1012994
cucuuccaaggacucacaa

SEQ ID NO: 1012996 - RNA, 19 nt, Artificial Sequence
  Description of Artificial Sequence: Synthetic oligonucleotide
  Sense strand starting at position 1017 of SEQ ID NO: 914556
ggaagagagcagugauggu

SEQ ID NO: 1012997 - RNA, 19 nt, Artificial Sequence
  Description of Artificial Sequence: Synthetic oligonucleotide
  Antisense strand to SEQ ID NO: 1012996
accaucacugcucucuucc

SEQ ID NO: 1012998 - RNA, 19 nt, Artificial Sequence
  Description of Artificial Sequence: Synthetic oligonucleotide
  Sense strand starting at position 1027 of SEQ ID NO: 914556
agugauggucaacauguca

SEQ ID NO: 1012999 - RNA, 19 nt, Artificial Sequence
  Description of Artificial Sequence: Synthetic oligonucleotide
  Antisense strand to SEQ ID NO: 1012998
ugacauguugaccaucacu

SEQ ID NO: 1013000 - RNA, 19 nt, Artificial Sequence
  Description of Artificial Sequence: Synthetic oligonucleotide
  Sense strand starting at position 1096 of SEQ ID NO: 914556
ucccacaucugggcagaaa

SEQ ID NO: 1013001 - RNA, 19 nt, Artificial Sequence
  Description of Artificial Sequence: Synthetic oligonucleotide
  Antisense strand to SEQ ID NO: 1013000
uuucugcccagauguggga

SEQ ID NO: 1013002 - RNA, 19 nt, Artificial Sequence
  Description of Artificial Sequence: Synthetic oligonucleotide
  Sense strand starting at position 1181 of SEQ ID NO: 914556
cauuaaauccaggagugcu

SEQ ID NO: 1013003 - RNA, 19 nt, Artificial Sequence
  Description of Artificial Sequence: Synthetic oligonucleotide
  Antisense strand to SEQ ID NO: 1013002
agcacuccuggauuuaaug

SEQ ID NO: 1013004 - RNA, 19 nt, Artificial Sequence
  Description of Artificial Sequence: Synthetic oligonucleotide
  Sense strand starting at position 1189 of SEQ ID NO: 914556
ccaggagugcuuuaggaau

SEQ ID NO: 1013005 - RNA, 19 nt, Artificial Sequence
  Description of Artificial Sequence: Synthetic oligonucleotide
  Antisense strand to SEQ ID NO: 1013004
auuccuaaagcacuccugg

SEQ ID NO: 1013006 - RNA, 19 nt, Artificial Sequence
  Description of Artificial Sequence: Synthetic oligonucleotide
  Sense strand starting at position 1255 of SEQ ID NO: 914556
acgugcaaaccguuuguga

SEQ ID NO: 1013007 - RNA, 19 nt, Artificial Sequence
  Description of Artificial Sequence: Synthetic oligonucleotide
  Antisense strand to SEQ ID NO: 1013006
ucacaaacgguuugcacgu

SEQ ID NO: 1013008 - RNA, 19 nt, Artificial Sequence
  Description of Artificial Sequence: Synthetic oligonucleotide
  Sense strand starting at position 1906 of SEQ ID NO: 914556
ggugcuugcagugcugaua

SEQ ID NO: 1013009 - RNA, 19 nt, Artificial Sequence
  Description of Artificial Sequence: Synthetic oligonucleotide
  Antisense strand to SEQ ID NO: 1013008
uaucagcacugcaagcacc

SEQ ID NO: 1013010 - RNA, 19 nt, Artificial Sequence
  Description of Artificial Sequence: Synthetic oligonucleotide
  Sense strand starting at position 2897 of SEQ ID NO: 914556
ccuauucuguggccgggaa

SEQ ID NO: 1013011 - RNA, 19 nt, Artificial Sequence
  Description of Artificial Sequence: Synthetic oligonucleotide
  Antisense strand to SEQ ID NO: 1013010
uucccggccacagaauagg

SEQ ID NO: 1013012 - RNA, 19 nt, Artificial Sequence
  Description of Artificial Sequence: Synthetic oligonucleotide
  Sense strand starting at position 3096 of SEQ ID NO: 914556
gagugauccugggagggaa

SEQ ID NO: 1013013 - RNA, 19 nt, Artificial Sequence
  Description of Artificial Sequence: Synthetic oligonucleotide
  Antisense strand to SEQ ID NO: 1013012
uucccucccaggaucacuc

SEQ ID NO: 1013014 - RNA, 19 nt, Artificial Sequence
  Description of Artificial Sequence: Synthetic oligonucleotide
  Sense strand starting at position 3150 of SEQ ID NO: 914556
gucugagcuggugauuaga

SEQ ID NO: 1013015 - RNA, 19 nt, Artificial Sequence
  Description of Artificial Sequence: Synthetic oligonucleotide
  Antisense strand to SEQ ID NO: 1013014
ucuaaucaccagcucagac

SEQ ID NO: 1013016 - RNA, 19 nt, Artificial Sequence
  Description of Artificial Sequence: Synthetic oligonucleotide
  Sense strand starting at position 3152 of SEQ ID NO: 914556
cugagcuggugauuagaga

SEQ ID NO: 1013017 - RNA, 19 nt, Artificial Sequence
  Description of Artificial Sequence: Synthetic oligonucleotide
  Antisense strand to SEQ ID NO: 1013016
ucucuaaucaccagcucag

SEQ ID NO: 1013018 - RNA, 19 nt, Artificial Sequence
  Description of Artificial Sequence: Synthetic oligonucleotide
  Sense strand starting at position 3238 of SEQ ID NO: 914556
uggugagaguugccuaaag

SEQ ID NO: 1013019 - RNA, 19 nt, Artificial Sequence
  Description of Artificial Sequence: Synthetic oligonucleotide
  Antisense strand to SEQ ID NO: 1013018
cuuuaggcaacucucacca

SEQ ID NO: 1013020 - RNA, 19 nt, Artificial Sequence
  Description of Artificial Sequence: Synthetic oligonucleotide
  Sense strand starting at position 3249 of SEQ ID NO: 914556
gccuaaaguccuggaguga

SEQ ID NO: 1013021 - RNA, 19 nt, Artificial Sequence
  Description of Artificial Sequence: Synthetic oligonucleotide
  Antisense strand to SEQ ID NO: 1013020
ucacuccaggacuuuaggc

SEQ ID NO: 1013022 - RNA, 19 nt, Artificial Sequence
  Description of Artificial Sequence: Synthetic oligonucleotide
  Sense strand starting at position 3260 of SEQ ID NO: 914556
uggagugaauacuuuguuu

SEQ ID NO: 1013023 - RNA, 19 nt, Artificial Sequence
  Description of Artificial Sequence: Synthetic oligonucleotide
  Antisense strand to SEQ ID NO: 1013022
aaacaaaguauucacucca

SEQ ID NO: 1013024 - RNA, 19 nt, Artificial Sequence
  Description of Artificial Sequence: Synthetic oligonucleotide
  Sense strand starting at position 3283 of SEQ ID NO: 914556
guacuaaggucuguccacu

SEQ ID NO: 1013025 - RNA, 19 nt, Artificial Sequence
  Description of Artificial Sequence: Synthetic oligonucleotide
  Antisense strand to SEQ ID NO: 1013024
aguggacagaccuuaguac

SEQ ID NO: 1013026 - RNA, 19 nt, Artificial Sequence
  Description of Artificial Sequence: Synthetic oligonucleotide
  Sense strand starting at position 3297 of SEQ ID NO: 914556
ccacuuaaauggucacuga

SEQ ID NO: 1013027 - RNA, 19 nt, Artificial Sequence
  Description of Artificial Sequence: Synthetic oligonucleotide
  Antisense strand to SEQ ID NO: 1013026
ucagugaccauuuaagugg

SEQ ID NO: 1013028 - RNA, 19 nt, Artificial Sequence
  Description of Artificial Sequence: Synthetic oligonucleotide
  Sense strand starting at position 3527 of SEQ ID NO: 914556
uucauuaggcugugguaga

SEQ ID NO: 1013029 - RNA, 19 nt, Artificial Sequence
  Description of Artificial Sequence: Synthetic oligonucleotide
  Antisense strand to SEQ ID NO: 1013028
ucuaccacagccuaaugaa

SEQ ID NO: 1013030 - RNA, 19 nt, Artificial Sequence
  Description of Artificial Sequence: Synthetic oligonucleotide
  Sense strand starting at position 3537 of SEQ ID NO: 914556
ugugguagauaccuacaau

SEQ ID NO: 1013031 - RNA, 19 nt, Artificial Sequence
  Description of Artificial Sequence: Synthetic oligonucleotide
  Antisense strand to SEQ ID NO: 1013030
auuguagguaucuaccaca

SEQ ID NO: 1013032 - RNA, 19 nt, Artificial Sequence
  Description of Artificial Sequence: Synthetic oligonucleotide
  Sense strand starting at position 3881 of SEQ ID NO: 914556
aaauuaagugguuguuucu

SEQ ID NO: 1013033 - RNA, 19 nt, Artificial Sequence
  Description of Artificial Sequence: Synthetic oligonucleotide
  Antisense strand to SEQ ID NO: 1013032
agaaacaaccacuuaauuu

SEQ ID NO: 1013034 - RNA, 19 nt, Artificial Sequence
  Description of Artificial Sequence: Synthetic oligonucleotide
  Sense strand starting at position 3884 of SEQ ID NO: 914556
uuaagugguuguuucuuaa

SEQ ID NO: 1013035 - RNA, 19 nt, Artificial Sequence
  Description of Artificial Sequence: Synthetic oligonucleotide
  Antisense strand to SEQ ID NO: 1013034
uuaagaaacaaccacuuaa

SEQ ID NO: 1013036 - RNA, 19 nt, Artificial Sequence
  Description of Artificial Sequence: Synthetic oligonucleotide
  Sense strand starting at position 15 of SEQ ID NO: 914557
auucuaauguggcccagau

SEQ ID NO: 1013037 - RNA, 19 nt, Artificial Sequence
  Description of Artificial Sequence: Synthetic oligonucleotide
  Antisense strand to SEQ ID NO: 1013036
aucugggccacauuagaau

SEQ ID NO: 1013038 - RNA, 19 nt, Artificial Sequence
  Description of Artificial Sequence: Synthetic oligonucleotide
  Sense strand starting at position 75 of SEQ ID NO: 914557
cccaucuaaggcgaucaaa

SEQ ID NO: 1013039 - RNA, 19 nt, Artificial Sequence
  Description of Artificial Sequence: Synthetic oligonucleotide
  Antisense strand to SEQ ID NO: 1013038
uuugaucgccuuagauggg

SEQ ID NO: 1013040 - RNA, 19 nt, Artificial Sequence
  Description of Artificial Sequence: Synthetic oligonucleotide
  Sense strand starting at position 148 of SEQ ID NO: 914557
cuuagucuucuagacauug

SEQ ID NO: 1013041 - RNA, 19 nt, Artificial Sequence
  Description of Artificial Sequence: Synthetic oligonucleotide
  Antisense strand to SEQ ID NO: 1013040
caaugucuagaagacuaag

SEQ ID NO: 1013042 - RNA, 19 nt, Artificial Sequence
  Description of Artificial Sequence: Synthetic oligonucleotide
  Sense strand starting at position 177 of SEQ ID NO: 914557
ccugaucccgacuguuaug

SEQ ID NO: 1013043 - RNA, 19 nt, Artificial Sequence
  Description of Artificial Sequence: Synthetic oligonucleotide
  Antisense strand to SEQ ID NO: 1013042
cauaacagucgggaucagg

SEQ ID NO: 1013044 - RNA, 19 nt, Artificial Sequence
  Description of Artificial Sequence: Synthetic oligonucleotide
  Sense strand starting at position 187 of SEQ ID NO: 914557
acuguuauggcuugggacu

SEQ ID NO: 1013045 - RNA, 19 nt, Artificial Sequence
  Description of Artificial Sequence: Synthetic oligonucleotide
  Antisense strand to SEQ ID NO: 1013044
agucccaagccauaacagu

SEQ ID NO: 1013046 - RNA, 19 nt, Artificial Sequence
  Description of Artificial Sequence: Synthetic oligonucleotide
  Sense strand starting at position 243 of SEQ ID NO: 914557
ggacuauuacaguaugcac

SEQ ID NO: 1013047 - RNA, 19 nt, Artificial Sequence
  Description of Artificial Sequence: Synthetic oligonucleotide
  Antisense strand to SEQ ID NO: 1013046
gugcauacuguaauagucc

SEQ ID NO: 1013048 - RNA, 19 nt, Artificial Sequence
  Description of Artificial Sequence: Synthetic oligonucleotide
  Sense strand starting at position 250 of SEQ ID NO: 914557
uacaguaugcacugaauga

SEQ ID NO: 1013049 - RNA, 19 nt, Artificial Sequence
  Description of Artificial Sequence: Synthetic oligonucleotide
  Antisense strand to SEQ ID NO: 1013048
ucauucagugcauacugua

SEQ ID NO: 1013050 - RNA, 19 nt, Artificial Sequence
  Description of Artificial Sequence: Synthetic oligonucleotide
  Sense strand starting at position 254 of SEQ ID NO: 914557
guaugcacugaaugaauga

SEQ ID NO: 1013051 - RNA, 19 nt, Artificial Sequence
  Description of Artificial Sequence: Synthetic oligonucleotide
  Antisense strand to SEQ ID NO: 1013050
ucauucauucagugcauac

SEQ ID NO: 1013052 - RNA, 19 nt, Artificial Sequence
  Description of Artificial Sequence: Synthetic oligonucleotide
  Sense strand starting at position 490 of SEQ ID NO: 914557
ugucuuauucugcagagcu

SEQ ID NO: 1013053 - RNA, 19 nt, Artificial Sequence
  Description of Artificial Sequence: Synthetic oligonucleotide
  Antisense strand to SEQ ID NO: 1013052
agcucugcagaauaagaca

SEQ ID NO: 1013054 - RNA, 19 nt, Artificial Sequence
  Description of Artificial Sequence: Synthetic oligonucleotide
  Sense strand starting at position 890 of SEQ ID NO: 914557
uuuaaaccagaguguuauc

SEQ ID NO: 1013055 - RNA, 19 nt, Artificial Sequence
  Description of Artificial Sequence: Synthetic oligonucleotide
  Antisense strand to SEQ ID NO: 1013054
gauaacacucugguuuaaa

SEQ ID NO: 1013056 - RNA, 19 nt, Artificial Sequence
  Description of Artificial Sequence: Synthetic oligonucleotide
  Sense strand starting at position 895 of SEQ ID NO: 914557
accagaguguuaucuguga

SEQ ID NO: 1013057 - RNA, 19 nt, Artificial Sequence
  Description of Artificial Sequence: Synthetic oligonucleotide
  Antisense strand to SEQ ID NO: 1013056
ucacagauaacacucuggu

SEQ ID NO: 1013058 - RNA, 19 nt, Artificial Sequence
  Description of Artificial Sequence: Synthetic oligonucleotide
  Sense strand starting at position 1022 of SEQ ID NO: 914557
ugucguagcccugagaaac

SEQ ID NO: 1013059 - RNA, 19 nt, Artificial Sequence
  Description of Artificial Sequence: Synthetic oligonucleotide
  Antisense strand to SEQ ID NO: 1013058
guuucucagggcuacgaca

SEQ ID NO: 1013060 - RNA, 19 nt, Artificial Sequence
  Description of Artificial Sequence: Synthetic oligonucleotide
  Sense strand starting at position 1124 of SEQ ID NO: 914557
ggcucugaaaccugagaug

SEQ ID NO: 1013061 - RNA, 19 nt, Artificial Sequence
  Description of Artificial Sequence: Synthetic oligonucleotide
  Antisense strand to SEQ ID NO: 1013060
caucucagguuucagagcc

SEQ ID NO: 1013062 - RNA, 19 nt, Artificial Sequence
  Description of Artificial Sequence: Synthetic oligonucleotide
  Sense strand starting at position 1208 of SEQ ID NO: 914557
cccugcagauugucaugaa

SEQ ID NO: 1013063 - RNA, 19 nt, Artificial Sequence
  Description of Artificial Sequence: Synthetic oligonucleotide
  Antisense strand to SEQ ID NO: 1013062
uucaugacaaucugcaggg

SEQ ID NO: 1013064 - RNA, 19 nt, Artificial Sequence
  Description of Artificial Sequence: Synthetic oligonucleotide
  Sense strand starting at position 1212 of SEQ ID NO: 914557
gcagauugucaugaaccaa

SEQ ID NO: 1013065 - RNA, 19 nt, Artificial Sequence
  Description of Artificial Sequence: Synthetic oligonucleotide
  Antisense strand to SEQ ID NO: 1013064
uugguucaugacaaucugc

SEQ ID NO: 1013066 - RNA, 19 nt, Artificial Sequence
  Description of Artificial Sequence: Synthetic oligonucleotide
  Sense strand starting at position 1240 of SEQ ID NO: 914557
ggguauccuguagagaagu

SEQ ID NO: 1013067 - RNA, 19 nt, Artificial Sequence
  Description of Artificial Sequence: Synthetic oligonucleotide
  Antisense strand to SEQ ID NO: 1013066
acuucucuacaggauaccc

SEQ ID NO: 1013068 - RNA, 19 nt, Artificial Sequence
  Description of Artificial Sequence: Synthetic oligonucleotide
  Sense strand starting at position 1242 of SEQ ID NO: 914557
guauccuguagagaaguua

SEQ ID NO: 1013069 - RNA, 19 nt, Artificial Sequence
  Description of Artificial Sequence: Synthetic oligonucleotide
  Antisense strand to SEQ ID NO: 1013068
uaacuucucuacaggauac

SEQ ID NO: 1013070 - RNA, 19 nt, Artificial Sequence
  Description of Artificial Sequence: Synthetic oligonucleotide
  Sense strand starting at position 1438 of SEQ ID NO: 914557
ggagaaguuuccaggaggu

SEQ ID NO: 1013071 - RNA, 19 nt, Artificial Sequence
  Description of Artificial Sequence: Synthetic oligonucleotide
  Antisense strand to SEQ ID NO: 1013070
accuccuggaaacuucucc

SEQ ID NO: 1013072 - RNA, 19 nt, Artificial Sequence
  Description of Artificial Sequence: Synthetic oligonucleotide
  Sense strand starting at position 1489 of SEQ ID NO: 914557
gagacucaccucugagagu

SEQ ID NO: 1013073 - RNA, 19 nt, Artificial Sequence
  Description of Artificial Sequence: Synthetic oligonucleotide
  Antisense strand to SEQ ID NO: 1013072
acucucagaggugagucuc

SEQ ID NO: 1013074 - RNA, 19 nt, Artificial Sequence
  Description of Artificial Sequence: Synthetic oligonucleotide
  Sense strand starting at position 1500 of SEQ ID NO: 914557
cugagaguccagugucaaa

SEQ ID NO: 1013075 - RNA, 19 nt, Artificial Sequence
  Description of Artificial Sequence: Synthetic oligonucleotide
  Antisense strand to SEQ ID NO: 1013074
uuugacacuggacucucag

SEQ ID NO: 1013076 - RNA, 19 nt, Artificial Sequence
  Description of Artificial Sequence: Synthetic oligonucleotide
  Sense strand starting at position 1570 of SEQ ID NO: 914557
ggaaguagacgucgggaaa

SEQ ID NO: 1013077 - RNA, 19 nt, Artificial Sequence
  Description of Artificial Sequence: Synthetic oligonucleotide
  Antisense strand to SEQ ID NO: 1013076
uuucccgacgucuacuucc

SEQ ID NO: 1013078 - RNA, 19 nt, Artificial Sequence
  Description of Artificial Sequence: Synthetic oligonucleotide
  Sense strand starting at position 1602 of SEQ ID NO: 914557
acaggugcucuccgaagaa

SEQ ID NO: 1013079 - RNA, 19 nt, Artificial Sequence
  Description of Artificial Sequence: Synthetic oligonucleotide
  Antisense strand to SEQ ID NO: 1013078
uucuucggagagcaccugu

SEQ ID NO: 1013080 - RNA, 19 nt, Artificial Sequence
  Description of Artificial Sequence: Synthetic oligonucleotide
  Sense strand starting at position 1611 of SEQ ID NO: 914557
cuccgaagaacuggucaaa

SEQ ID NO: 1013081 - RNA, 19 nt, Artificial Sequence
  Description of Artificial Sequence: Synthetic oligonucleotide
  Antisense strand to SEQ ID NO: 1013080
uuugaccaguucuucggag

SEQ ID NO: 1013082 - RNA, 19 nt, Artificial Sequence
  Description of Artificial Sequence: Synthetic oligonucleotide
  Sense strand starting at position 1786 of SEQ ID NO: 914557
aagcuucuggaauggugau

SEQ ID NO: 1013083 - RNA, 19 nt, Artificial Sequence
  Description of Artificial Sequence: Synthetic oligonucleotide
  Antisense strand to SEQ ID NO: 1013082
aucaccauuccagaagcuu

SEQ ID NO: 1013084 - RNA, 19 nt, Artificial Sequence
  Description of Artificial Sequence: Synthetic oligonucleotide
  Sense strand starting at position 1843 of SEQ ID NO: 914557
ggagacuugugauccggga

SEQ ID NO: 1013085 - RNA, 19 nt, Artificial Sequence
  Description of Artificial Sequence: Synthetic oligonucleotide
  Antisense strand to SEQ ID NO: 1013084
ucccggaucacaagucucc

SEQ ID NO: 1013086 - RNA, 19 nt, Artificial Sequence
  Description of Artificial Sequence: Synthetic oligonucleotide
  Sense strand starting at position 1845 of SEQ ID NO: 914557
agacuugugauccgggauu

SEQ ID NO: 1013087 - RNA, 19 nt, Artificial Sequence
  Description of Artificial Sequence: Synthetic oligonucleotide
  Antisense strand to SEQ ID NO: 1013086
aaucccggaucacaagucu

SEQ ID NO: 1013088 - RNA, 19 nt, Artificial Sequence
  Description of Artificial Sequence: Synthetic oligonucleotide
  Sense strand starting at position 1881 of SEQ ID NO: 914557
cccaguacucacugagcua

SEQ ID NO: 1013089 - RNA, 19 nt, Artificial Sequence
  Description of Artificial Sequence: Synthetic oligonucleotide
  Antisense strand to SEQ ID NO: 1013088
uagcucagugaguacuggg

SEQ ID NO: 1013090 - RNA, 19 nt, Artificial Sequence
  Description of Artificial Sequence: Synthetic oligonucleotide
  Sense strand starting at position 1884 of SEQ ID NO: 914557
aguacucacugagcuaaga

SEQ ID NO: 1013091 - RNA, 19 nt, Artificial Sequence
  Description of Artificial Sequence: Synthetic oligonucleotide
  Antisense strand to SEQ ID NO: 1013090
ucuuagcucagugaguacu

SEQ ID NO: 1013092 - RNA, 19 nt, Artificial Sequence
  Description of Artificial Sequence: Synthetic oligonucleotide
  Sense strand starting at position 2151 of SEQ ID NO: 914557
acuggaaucuuccuaggcu

SEQ ID NO: 1013093 - RNA, 19 nt, Artificial Sequence
  Description of Artificial Sequence: Synthetic oligonucleotide
  Antisense strand to SEQ ID NO: 1013092
agccuaggaagauuccagu

SEQ ID NO: 1013094 - RNA, 19 nt, Artificial Sequence
  Description of Artificial Sequence: Synthetic oligonucleotide
  Sense strand starting at position 2180 of SEQ ID NO: 914557
gacauuaacucuuugugag

SEQ ID NO: 1013095 - RNA, 19 nt, Artificial Sequence
  Description of Artificial Sequence: Synthetic oligonucleotide
  Antisense strand to SEQ ID NO: 1013094
cucacaaagaguuaauguc

SEQ ID NO: 1013096 - RNA, 19 nt, Artificial Sequence
  Description of Artificial Sequence: Synthetic oligonucleotide
  Sense strand starting at position 2181 of SEQ ID NO: 914557
acauuaacucuuugugagu

SEQ ID NO: 1013097 - RNA, 19 nt, Artificial Sequence
  Description of Artificial Sequence: Synthetic oligonucleotide
  Antisense strand to SEQ ID NO: 1013096
acucacaaagaguuaaugu

SEQ ID NO: 1013098 - RNA, 19 nt, Artificial Sequence
  Description of Artificial Sequence: Synthetic oligonucleotide
  Sense strand starting at position 2190 of SEQ ID NO: 914557
cuuugugaguccuuggaag

SEQ ID NO: 1013099 - RNA, 19 nt, Artificial Sequence
  Description of Artificial Sequence: Synthetic oligonucleotide
  Antisense strand to SEQ ID NO: 1013098
cuuccaaggacucacaaag

SEQ ID NO: 1013100 - RNA, 19 nt, Artificial Sequence
  Description of Artificial Sequence: Synthetic oligonucleotide
  Sense strand starting at position 2192 of SEQ ID NO: 914557
uugugaguccuuggaagag

SEQ ID NO: 1013101 - RNA, 19 nt, Artificial Sequence
  Description of Artificial Sequence: Synthetic oligonucleotide
  Antisense strand to SEQ ID NO: 1013100
cucuuccaaggacucacaa

SEQ ID NO: 1013102 - RNA, 19 nt, Artificial Sequence
  Description of Artificial Sequence: Synthetic oligonucleotide
  Sense strand starting at position 2204 of SEQ ID NO: 914557
ggaagagagcagugauggu

SEQ ID NO: 1013103 - RNA, 19 nt, Artificial Sequence
  Description of Artificial Sequence: Synthetic oligonucleotide
  Antisense strand to SEQ ID NO: 1013102
accaucacugcucucuucc

SEQ ID NO: 1013104 - RNA, 19 nt, Artificial Sequence
  Description of Artificial Sequence: Synthetic oligonucleotide
  Sense strand starting at position 2214 of SEQ ID NO: 914557
agugauggucaacauguca

SEQ ID NO: 1013105 - RNA, 19 nt, Artificial Sequence
  Description of Artificial Sequence: Synthetic oligonucleotide
  Antisense strand to SEQ ID NO: 1013104
ugacauguugaccaucacu

SEQ ID NO: 1013106 - RNA, 19 nt, Artificial Sequence
  Description of Artificial Sequence: Synthetic oligonucleotide
  Sense strand starting at position 2283 of SEQ ID NO: 914557
ucccacaucugggcagaaa

SEQ ID NO: 1013107 - RNA, 19 nt, Artificial Sequence
  Description of Artificial Sequence: Synthetic oligonucleotide
  Antisense strand to SEQ ID NO: 1013106
uuucugcccagauguggga

SEQ ID NO: 1013108 - RNA, 19 nt, Artificial Sequence
  Description of Artificial Sequence: Synthetic oligonucleotide
  Sense strand starting at position 2368 of SEQ ID NO: 914557
cauuaaauccaggagugcu

SEQ ID NO: 1013109 - RNA, 19 nt, Artificial Sequence
  Description of Artificial Sequence: Synthetic oligonucleotide
  Antisense strand to SEQ ID NO: 1013108
agcacuccuggauuuaaug

SEQ ID NO: 1013110 - RNA, 19 nt, Artificial Sequence
  Description of Artificial Sequence: Synthetic oligonucleotide
  Sense strand starting at position 2376 of SEQ ID NO: 914557
ccaggagugcuuuaggaau

SEQ ID NO: 1013111 - RNA, 19 nt, Artificial Sequence
  Description of Artificial Sequence: Synthetic oligonucleotide
  Antisense strand to SEQ ID NO: 1013110
auuccuaaagcacuccugg

SEQ ID NO: 1013112 - RNA, 19 nt, Artificial Sequence
  Description of Artificial Sequence: Synthetic oligonucleotide
  Sense strand starting at position 2442 of SEQ ID NO: 914557
acgugcaaaccguuuguga

SEQ ID NO: 1013113 - RNA, 19 nt, Artificial Sequence
  Description of Artificial Sequence: Synthetic oligonucleotide
  Antisense strand to SEQ ID NO: 1013112
ucacaaacgguuugcacgu

SEQ ID NO: 1013114 - RNA, 19 nt, Artificial Sequence
  Description of Artificial Sequence: Synthetic oligonucleotide
  Sense strand starting at position 3093 of SEQ ID NO: 914557
ggugcuugcagugcugaua

SEQ ID NO: 1013115 - RNA, 19 nt, Artificial Sequence
  Description of Artificial Sequence: Synthetic oligonucleotide
  Antisense strand to SEQ ID NO: 1013114
uaucagcacugcaagcacc

SEQ ID NO: 1013116 - RNA, 19 nt, Artificial Sequence
  Description of Artificial Sequence: Synthetic oligonucleotide
  Sense strand starting at position 238 of SEQ ID NO: 914558
acagaaguauuagcaaguu

SEQ ID NO: 1013117 - RNA, 19 nt, Artificial Sequence
  Description of Artificial Sequence: Synthetic oligonucleotide
  Antisense strand to SEQ ID NO: 1013116
aacuugcuaauacuucugu

SEQ ID NO: 1013118 - RNA, 19 nt, Artificial Sequence
  Description of Artificial Sequence: Synthetic oligonucleotide
  Sense strand starting at position 361 of SEQ ID NO: 914558
ugacaaugagcuuaaaugu

SEQ ID NO: 1013119 - RNA, 19 nt, Artificial Sequence
  Description of Artificial Sequence: Synthetic oligonucleotide
  Antisense strand to SEQ ID NO: 1013118
acauuuaagcucauuguca

SEQ ID NO: 1013120 - RNA, 19 nt, Artificial Sequence
  Description of Artificial Sequence: Synthetic oligonucleotide
  Sense strand starting at position 680 of SEQ ID NO: 914558
aggaguuggcacugaagaa

SEQ ID NO: 1013121 - RNA, 19 nt, Artificial Sequence
  Description of Artificial Sequence: Synthetic oligonucleotide
  Antisense strand to SEQ ID NO: 1013120
uucuucagugccaacuccu

SEQ ID NO: 1013122 - RNA, 19 nt, Artificial Sequence
  Description of Artificial Sequence: Synthetic oligonucleotide
  Sense strand starting at position 931 of SEQ ID NO: 914558
gagagugucugcccaagau

SEQ ID NO: 1013123 - RNA, 19 nt, Artificial Sequence
  Description of Artificial Sequence: Synthetic oligonucleotide
  Antisense strand to SEQ ID NO: 1013122
aucuugggcagacacucuc

SEQ ID NO: 1013124 - RNA, 19 nt, Artificial Sequence
  Description of Artificial Sequence: Synthetic oligonucleotide
  Sense strand starting at position 935 of SEQ ID NO: 914558
gugucugcccaagauauca

SEQ ID NO: 1013125 - RNA, 19 nt, Artificial Sequence
  Description of Artificial Sequence: Synthetic oligonucleotide
  Antisense strand to SEQ ID NO: 1013124
ugauaucuugggcagacac

SEQ ID NO: 1013126 - RNA, 19 nt, Artificial Sequence
  Description of Artificial Sequence: Synthetic oligonucleotide
  Sense strand starting at position 1015 of SEQ ID NO: 914558
ccagaaacuuggcuauccu

SEQ ID NO: 1013127 - RNA, 19 nt, Artificial Sequence
  Description of Artificial Sequence: Synthetic oligonucleotide
  Antisense strand to SEQ ID NO: 1013126
aggauagccaaguuucugg

SEQ ID NO: 1013128 - RNA, 19 nt, Artificial Sequence
  Description of Artificial Sequence: Synthetic oligonucleotide
  Sense strand starting at position 1048 of SEQ ID NO: 914558
aauugucacguccauggaa

SEQ ID NO: 1013129 - RNA, 19 nt, Artificial Sequence
  Description of Artificial Sequence: Synthetic oligonucleotide
  Antisense strand to SEQ ID NO: 1013128
uuccauggacgugacaauu

SEQ ID NO: 1013130 - RNA, 19 nt, Artificial Sequence
  Description of Artificial Sequence: Synthetic oligonucleotide
  Sense strand starting at position 1127 of SEQ ID NO: 914558
acuauaaucguacaucuga

SEQ ID NO: 1013131 - RNA, 19 nt, Artificial Sequence
  Description of Artificial Sequence: Synthetic oligonucleotide
  Antisense strand to SEQ ID NO: 1013130
ucagauguacgauuauagu

SEQ ID NO: 1013132 - RNA, 19 nt, Artificial Sequence
  Description of Artificial Sequence: Synthetic oligonucleotide
  Sense strand starting at position 1237 of SEQ ID NO: 914558
agucuauuagucguagcuu

SEQ ID NO: 1013133 - RNA, 19 nt, Artificial Sequence
  Description of Artificial Sequence: Synthetic oligonucleotide
  Antisense strand to SEQ ID NO: 1013132
aagcuacgacuaauagacu

SEQ ID NO: 1013134 - RNA, 19 nt, Artificial Sequence
  Description of Artificial Sequence: Synthetic oligonucleotide
  Sense strand starting at position 1388 of SEQ ID NO: 914558
guacaauugcuugaagucu

SEQ ID NO: 1013135 - RNA, 19 nt, Artificial Sequence
  Description of Artificial Sequence: Synthetic oligonucleotide
  Antisense strand to SEQ ID NO: 1013134
agacuucaagcaauuguac

SEQ ID NO: 1013136 - RNA, 19 nt, Artificial Sequence
  Description of Artificial Sequence: Synthetic oligonucleotide
  Sense strand starting at position 2011 of SEQ ID NO: 914558
gcuaacugggcucaucuau

SEQ ID NO: 1013137 - RNA, 19 nt, Artificial Sequence
  Description of Artificial Sequence: Synthetic oligonucleotide
  Antisense strand to SEQ ID NO: 1013136
auagaugagcccaguuagc

SEQ ID NO: 1013138 - RNA, 19 nt, Artificial Sequence
  Description of Artificial Sequence: Synthetic oligonucleotide
  Sense strand starting at position 2110 of SEQ ID NO: 914558
uugugcuauccagcugcua

SEQ ID NO: 1013139 - RNA, 19 nt, Artificial Sequence
  Description of Artificial Sequence: Synthetic oligonucleotide
  Antisense strand to SEQ ID NO: 1013138
uagcagcuggauagcacaa

SEQ ID NO: 1013140 - RNA, 19 nt, Artificial Sequence
  Description of Artificial Sequence: Synthetic oligonucleotide
  Sense strand starting at position 2111 of SEQ ID NO: 914558
ugugcuauccagcugcuau

SEQ ID NO: 1013141 - RNA, 19 nt, Artificial Sequence
  Description of Artificial Sequence: Synthetic oligonucleotide
  Antisense strand to SEQ ID NO: 1013140
auagcagcuggauagcaca

SEQ ID NO: 1013142 - RNA, 19 nt, Artificial Sequence
  Description of Artificial Sequence: Synthetic oligonucleotide
  Sense strand starting at position 2140 of SEQ ID NO: 914558
ucuccuggaccauguuuaa

SEQ ID NO: 1013143 - RNA, 19 nt, Artificial Sequence
  Description of Artificial Sequence: Synthetic oligonucleotide
  Antisense strand to SEQ ID NO: 1013142
uuaaacaugguccaggaga

SEQ ID NO: 1013144 - RNA, 19 nt, Artificial Sequence
  Description of Artificial Sequence: Synthetic oligonucleotide
  Sense strand starting at position 2246 of SEQ ID NO: 914558
cucucugaagcuuaaucga

SEQ ID NO: 1013145 - RNA, 19 nt, Artificial Sequence
  Description of Artificial Sequence: Synthetic oligonucleotide
  Antisense strand to SEQ ID NO: 1013144
ucgauuaagcuucagagag

SEQ ID NO: 1013146 - RNA, 19 nt, Artificial Sequence
  Description of Artificial Sequence: Synthetic oligonucleotide
  Sense strand starting at position 2283 of SEQ ID NO: 914558
acauaugaauggcucauua

SEQ ID NO: 1013147 - RNA, 19 nt, Artificial Sequence
  Description of Artificial Sequence: Synthetic oligonucleotide
  Antisense strand to SEQ ID NO: 1013146
uaaugagccauucauaugu

SEQ ID NO: 1013148 - RNA, 19 nt, Artificial Sequence
  Description of Artificial Sequence: Synthetic oligonucleotide
  Sense strand starting at position 2287 of SEQ ID NO: 914558
augaauggcucauuagcau

SEQ ID NO: 1013149 - RNA, 19 nt, Artificial Sequence
  Description of Artificial Sequence: Synthetic oligonucleotide
  Antisense strand to SEQ ID NO: 1013148
augcuaaugagccauucau

SEQ ID NO: 1013150 - RNA, 19 nt, Artificial Sequence
  Description of Artificial Sequence: Synthetic oligonucleotide
  Sense strand starting at position 2374 of SEQ ID NO: 914558
ggacucuuuaaacgagugu

SEQ ID NO: 1013151 - RNA, 19 nt, Artificial Sequence
  Description of Artificial Sequence: Synthetic oligonucleotide
  Antisense strand to SEQ ID NO: 1013150
acacucguuuaaagagucc

SEQ ID NO: 1013152 - RNA, 19 nt, Artificial Sequence
  Description of Artificial Sequence: Synthetic oligonucleotide
  Sense strand starting at position 2378 of SEQ ID NO: 914558
ucuuuaaacgaguguccaa

SEQ ID NO: 1013153 - RNA, 19 nt, Artificial Sequence
  Description of Artificial Sequence: Synthetic oligonucleotide
  Antisense strand to SEQ ID NO: 1013152
uuggacacucguuuaaaga

SEQ ID NO: 1013154 - RNA, 19 nt, Artificial Sequence
  Description of Artificial Sequence: Synthetic oligonucleotide
  Sense strand starting at position 2398 of SEQ ID NO: 914558
ggguguugccaugauaagc

SEQ ID NO: 1013155 - RNA, 19 nt, Artificial Sequence
  Description of Artificial Sequence: Synthetic oligonucleotide
  Antisense strand to SEQ ID NO: 1013154
gcuuaucauggcaacaccc

SEQ ID NO: 1013156 - RNA, 19 nt, Artificial Sequence
  Description of Artificial Sequence: Synthetic oligonucleotide
  Sense strand starting at position 2416 of SEQ ID NO: 914558
ccaggaggguucuuucuga

SEQ ID NO: 1013157 - RNA, 19 nt, Artificial Sequence
  Description of Artificial Sequence: Synthetic oligonucleotide
  Antisense strand to SEQ ID NO: 1013156
ucagaaagaacccuccugg

SEQ ID NO: 1013158 - RNA, 19 nt, Artificial Sequence
  Description of Artificial Sequence: Synthetic oligonucleotide
  Sense strand starting at position 2430 of SEQ ID NO: 914558
ucugaaauccaggguagau

SEQ ID NO: 1013159 - RNA, 19 nt, Artificial Sequence
  Description of Artificial Sequence: Synthetic oligonucleotide
  Antisense strand to SEQ ID NO: 1013158
aucuacccuggauuucaga

SEQ ID NO: 1013160 - RNA, 19 nt, Artificial Sequence
  Description of Artificial Sequence: Synthetic oligonucleotide
  Sense strand starting at position 2443 of SEQ ID NO: 914558
guagauacacucugucauu

SEQ ID NO: 1013161 - RNA, 19 nt, Artificial Sequence
  Description of Artificial Sequence: Synthetic oligonucleotide
  Antisense strand to SEQ ID NO: 1013160
aaugacagaguguaucuac

SEQ ID NO: 1013162 - RNA, 19 nt, Artificial Sequence
  Description of Artificial Sequence: Synthetic oligonucleotide
  Sense strand starting at position 2455 of SEQ ID NO: 914558
ugucauucccagcaccaua

SEQ ID NO: 1013163 - RNA, 19 nt, Artificial Sequence
  Description of Artificial Sequence: Synthetic oligonucleotide
  Antisense strand to SEQ ID NO: 1013162
uauggugcugggaaugaca

SEQ ID NO: 1013164 - RNA, 19 nt, Artificial Sequence
  Description of Artificial Sequence: Synthetic oligonucleotide
  Sense strand starting at position 2489 of SEQ ID NO: 914558
agguaauggaugugucauu

SEQ ID NO: 1013165 - RNA, 19 nt, Artificial Sequence
  Description of Artificial Sequence: Synthetic oligonucleotide
  Antisense strand to SEQ ID NO: 1013164
aaugacacauccauuaccu

SEQ ID NO: 1013166 - RNA, 19 nt, Artificial Sequence
  Description of Artificial Sequence: Synthetic oligonucleotide
  Sense strand starting at position 2494 of SEQ ID NO: 914558
auggaugugucauugagau

SEQ ID NO: 1013167 - RNA, 19 nt, Artificial Sequence
  Description of Artificial Sequence: Synthetic oligonucleotide
  Antisense strand to SEQ ID NO: 1013166
aucucaaugacacauccau

SEQ ID NO: 1013168 - RNA, 19 nt, Artificial Sequence
  Description of Artificial Sequence: Synthetic oligonucleotide
  Sense strand starting at position 2549 of SEQ ID NO: 914558
gcagacaucagaggaaugu

SEQ ID NO: 1013169 - RNA, 19 nt, Artificial Sequence
  Description of Artificial Sequence: Synthetic oligonucleotide
  Antisense strand to SEQ ID NO: 1013168
acauuccucugaugucugc

SEQ ID NO: 1013170 - RNA, 19 nt, Artificial Sequence
  Description of Artificial Sequence: Synthetic oligonucleotide
  Sense strand starting at position 2646 of SEQ ID NO: 914558
ggcugagaugcugaacauu

SEQ ID NO: 1013171 - RNA, 19 nt, Artificial Sequence
  Description of Artificial Sequence: Synthetic oligonucleotide
  Antisense strand to SEQ ID NO: 1013170
aauguucagcaucucagcc

SEQ ID NO: 1013172 - RNA, 19 nt, Artificial Sequence
  Description of Artificial Sequence: Synthetic oligonucleotide
  Sense strand starting at position 2679 of SEQ ID NO: 914558
ugauauuuguucuaaagag

SEQ ID NO: 1013173 - RNA, 19 nt, Artificial Sequence
  Description of Artificial Sequence: Synthetic oligonucleotide
  Antisense strand to SEQ ID NO: 1013172
cucuuuagaacaaauauca

SEQ ID NO: 1013174 - RNA, 19 nt, Artificial Sequence
  Description of Artificial Sequence: Synthetic oligonucleotide
  Sense strand starting at position 2725 of SEQ ID NO: 914558
gauuauaaacacugguaug

SEQ ID NO: 1013175 - RNA, 19 nt, Artificial Sequence
  Description of Artificial Sequence: Synthetic oligonucleotide
  Antisense strand to SEQ ID NO: 1013174
cauaccaguguuuauaauc

SEQ ID NO: 1013176 - RNA, 19 nt, Artificial Sequence
  Description of Artificial Sequence: Synthetic oligonucleotide
  Sense strand starting at position 2784 of SEQ ID NO: 914558
cagaaugaaucgucagcau

SEQ ID NO: 1013177 - RNA, 19 nt, Artificial Sequence
  Description of Artificial Sequence: Synthetic oligonucleotide
  Antisense strand to SEQ ID NO: 1013176
augcugacgauucauucug

SEQ ID NO: 1013178 - RNA, 19 nt, Artificial Sequence
  Description of Artificial Sequence: Synthetic oligonucleotide
  Sense strand starting at position 2826 of SEQ ID NO: 914558
cugaaagucaccgauagca

SEQ ID NO: 1013179 - RNA, 19 nt, Artificial Sequence
  Description of Artificial Sequence: Synthetic oligonucleotide
  Antisense strand to SEQ ID NO: 1013178
ugcuaucggugacuuucag

SEQ ID NO: 1013180 - RNA, 19 nt, Artificial Sequence
  Description of Artificial Sequence: Synthetic oligonucleotide
  Sense strand starting at position 2828 of SEQ ID NO: 914558
gaaagucaccgauagcaaa

SEQ ID NO: 1013181 - RNA, 19 nt, Artificial Sequence
  Description of Artificial Sequence: Synthetic oligonucleotide
  Antisense strand to SEQ ID NO: 1013180
uuugcuaucggugacuuuc

SEQ ID NO: 1013182 - RNA, 19 nt, Artificial Sequence
  Description of Artificial Sequence: Synthetic oligonucleotide
  Sense strand starting at position 2879 of SEQ ID NO: 914558
agcauacugcaauagagua

SEQ ID NO: 1013183 - RNA, 19 nt, Artificial Sequence
  Description of Artificial Sequence: Synthetic oligonucleotide
  Antisense strand to SEQ ID NO: 1013182
uacucuauugcaguaugcu

SEQ ID NO: 1013184 - RNA, 19 nt, Artificial Sequence
  Description of Artificial Sequence: Synthetic oligonucleotide
  Sense strand starting at position 3059 of SEQ ID NO: 914558
caaacagucuuggugucaa

SEQ ID NO: 1013185 - RNA, 19 nt, Artificial Sequence
  Description of Artificial Sequence: Synthetic oligonucleotide
  Antisense strand to SEQ ID NO: 1013184
uugacaccaagacuguuug

SEQ ID NO: 1013186 - RNA, 19 nt, Artificial Sequence
  Description of Artificial Sequence: Synthetic oligonucleotide
  Sense strand starting at position 3095 of SEQ ID NO: 914558
ugcugaacuggugacuuua

SEQ ID NO: 1013187 - RNA, 19 nt, Artificial Sequence
  Description of Artificial Sequence: Synthetic oligonucleotide
  Antisense strand to SEQ ID NO: 1013186
uaaagucaccaguucagca

SEQ ID NO: 1013188 - RNA, 19 nt, Artificial Sequence
  Description of Artificial Sequence: Synthetic oligonucleotide
  Sense strand starting at position 3667 of SEQ ID NO: 914558
ugguccaagucccuauuau

SEQ ID NO: 1013189 - RNA, 19 nt, Artificial Sequence
  Description of Artificial Sequence: Synthetic oligonucleotide
  Antisense strand to SEQ ID NO: 1013188
auaauagggacuuggacca

SEQ ID NO: 1013190 - RNA, 19 nt, Artificial Sequence
  Description of Artificial Sequence: Synthetic oligonucleotide
  Sense strand starting at position 3668 of SEQ ID NO: 914558
gguccaagucccuauuauu

SEQ ID NO: 1013191 - RNA, 19 nt, Artificial Sequence
  Description of Artificial Sequence: Synthetic oligonucleotide
  Antisense strand to SEQ ID NO: 1013190
aauaauagggacuuggacc

SEQ ID NO: 1013192 - RNA, 19 nt, Artificial Sequence
  Description of Artificial Sequence: Synthetic oligonucleotide
  Sense strand starting at position 3864 of SEQ ID NO: 914558
uguuguaggagaugggaau

SEQ ID NO: 1013193 - RNA, 19 nt, Artificial Sequence
  Description of Artificial Sequence: Synthetic oligonucleotide
  Antisense strand to SEQ ID NO: 1013192
auucccaucuccuacaaca

SEQ ID NO: 1013194 - RNA, 19 nt, Artificial Sequence
  Description of Artificial Sequence: Synthetic oligonucleotide
  Sense strand starting at position 3921 of SEQ ID NO: 914558
ugauacuuacacuguguuu

SEQ ID NO: 1013195 - RNA, 19 nt, Artificial Sequence
  Description of Artificial Sequence: Synthetic oligonucleotide
  Antisense strand to SEQ ID NO: 1013194
aaacacaguguaaguauca

SEQ ID NO: 1013196 - RNA, 19 nt, Artificial Sequence
  Description of Artificial Sequence: Synthetic oligonucleotide
  Sense strand starting at position 261 of SEQ ID NO: 914559
ggugcaauuucucuccucu

SEQ ID NO: 1013197 - RNA, 19 nt, Artificial Sequence
  Description of Artificial Sequence: Synthetic oligonucleotide
  Antisense strand to SEQ ID NO: 1013196
agaggagagaaauugcacc

SEQ ID NO: 1013198 - RNA, 19 nt, Artificial Sequence
  Description of Artificial Sequence: Synthetic oligonucleotide
  Sense strand starting at position 319 of SEQ ID NO: 914559
agggaagauauagguguua

SEQ ID NO: 1013199 - RNA, 19 nt, Artificial Sequence
  Description of Artificial Sequence: Synthetic oligonucleotide
  Antisense strand to SEQ ID NO: 1013198
uaacaccuauaucuucccu

SEQ ID NO: 1013200 - RNA, 19 nt, Artificial Sequence
  Description of Artificial Sequence: Synthetic oligonucleotide
  Sense strand starting at position 321 of SEQ ID NO: 914559
ggaagauauagguguuauu

SEQ ID NO: 1013201 - RNA, 19 nt, Artificial Sequence
  Description of Artificial Sequence: Synthetic oligonucleotide
  Antisense strand to SEQ ID NO: 1013200
aauaacaccuauaucuucc

SEQ ID NO: 1013202 - RNA, 19 nt, Artificial Sequence
  Description of Artificial Sequence: Synthetic oligonucleotide
  Sense strand starting at position 354 of SEQ ID NO: 914559
gaugaagaacuuuguuuga

SEQ ID NO: 1013203 - RNA, 19 nt, Artificial Sequence
  Description of Artificial Sequence: Synthetic oligonucleotide
  Antisense strand to SEQ ID NO: 1013202
ucaaacaaaguucuucauc

SEQ ID NO: 1013204 - RNA, 19 nt, Artificial Sequence
  Description of Artificial Sequence: Synthetic oligonucleotide
  Sense strand starting at position 356 of SEQ ID NO: 914559
ugaagaacuuuguuugaga

SEQ ID NO: 1013205 - RNA, 19 nt, Artificial Sequence
  Description of Artificial Sequence: Synthetic oligonucleotide
  Antisense strand to SEQ ID NO: 1013204
ucucaaacaaaguucuuca

SEQ ID NO: 1013206 - RNA, 19 nt, Artificial Sequence
  Description of Artificial Sequence: Synthetic oligonucleotide
  Sense strand starting at position 424 of SEQ ID NO: 914559
uucucuguuccagagccaa

SEQ ID NO: 1013207 - RNA, 19 nt, Artificial Sequence
  Description of Artificial Sequence: Synthetic oligonucleotide
  Antisense strand to SEQ ID NO: 1013206
uuggcucuggaacagagaa

SEQ ID NO: 1013208 - RNA, 19 nt, Artificial Sequence
  Description of Artificial Sequence: Synthetic oligonucleotide
  Sense strand starting at position 436 of SEQ ID NO: 914559
gagccaaugcucugaugga

SEQ ID NO: 1013209 - RNA, 19 nt, Artificial Sequence
  Description of Artificial Sequence: Synthetic oligonucleotide
  Antisense strand to SEQ ID NO: 1013208
uccaucagagcauuggcuc

SEQ ID NO: 1013210 - RNA, 19 nt, Artificial Sequence
  Description of Artificial Sequence: Synthetic oligonucleotide
  Sense strand starting at position 466 of SEQ ID NO: 914559
guagaauugcuuuagucag

SEQ ID NO: 1013211 - RNA, 19 nt, Artificial Sequence
  Description of Artificial Sequence: Synthetic oligonucleotide
  Antisense strand to SEQ ID NO: 1013210
cugacuaaagcaauucuac

SEQ ID NO: 1013212 - RNA, 19 nt, Artificial Sequence
  Description of Artificial Sequence: Synthetic oligonucleotide
  Sense strand starting at position 468 of SEQ ID NO: 914559
agaauugcuuuagucagaa

SEQ ID NO: 1013213 - RNA, 19 nt, Artificial Sequence
  Description of Artificial Sequence: Synthetic oligonucleotide
  Antisense strand to SEQ ID NO: 1013212
uucugacuaaagcaauucu

SEQ ID NO: 1013214 - RNA, 19 nt, Artificial Sequence
  Description of Artificial Sequence: Synthetic oligonucleotide
  Sense strand starting at position 500 of SEQ ID NO: 914559
gcauuauguaguugggaga

SEQ ID NO: 1013215 - RNA, 19 nt, Artificial Sequence
  Description of Artificial Sequence: Synthetic oligonucleotide
  Antisense strand to SEQ ID NO: 1013214
ucucccaacuacauaaugc

SEQ ID NO: 1013216 - RNA, 19 nt, Artificial Sequence
  Description of Artificial Sequence: Synthetic oligonucleotide
  Sense strand starting at position 568 of SEQ ID NO: 914559
uuuaucuugcacugagaga

SEQ ID NO: 1013217 - RNA, 19 nt, Artificial Sequence
  Description of Artificial Sequence: Synthetic oligonucleotide
  Antisense strand to SEQ ID NO: 1013216
ucucucagugcaagauaaa

SEQ ID NO: 1013218 - RNA, 19 nt, Artificial Sequence
  Description of Artificial Sequence: Synthetic oligonucleotide
  Sense strand starting at position 716 of SEQ ID NO: 914559
ccagcaaaucgacagaagu

SEQ ID NO: 1013219 - RNA, 19 nt, Artificial Sequence
  Description of Artificial Sequence: Synthetic oligonucleotide
  Antisense strand to SEQ ID NO: 1013218
acuucugucgauuugcugg

SEQ ID NO: 1013220 - RNA, 19 nt, Artificial Sequence
  Description of Artificial Sequence: Synthetic oligonucleotide
  Sense strand starting at position 747 of SEQ ID NO: 914559
agagguucagaguggauca

SEQ ID NO: 1013221 - RNA, 19 nt, Artificial Sequence
  Description of Artificial Sequence: Synthetic oligonucleotide
  Antisense strand to SEQ ID NO: 1013220
ugauccacucugaaccucu

SEQ ID NO: 1013222 - RNA, 19 nt, Artificial Sequence
  Description of Artificial Sequence: Synthetic oligonucleotide
  Sense strand starting at position 757 of SEQ ID NO: 914559
aguggaucagugggauugu

SEQ ID NO: 1013223 - RNA, 19 nt, Artificial Sequence
  Description of Artificial Sequence: Synthetic oligonucleotide
  Antisense strand to SEQ ID NO: 1013222
acaaucccacugauccacu

SEQ ID NO: 1013224 - RNA, 19 nt, Artificial Sequence
  Description of Artificial Sequence: Synthetic oligonucleotide
  Sense strand starting at position 797 of SEQ ID NO: 914559
cuguguagucuuuaugacu

SEQ ID NO: 1013225 - RNA, 19 nt, Artificial Sequence
  Description of Artificial Sequence: Synthetic oligonucleotide
  Antisense strand to SEQ ID NO: 1013224
agucauaaagacuacacag

SEQ ID NO: 1013226 - RNA, 19 nt, Artificial Sequence
  Description of Artificial Sequence: Synthetic oligonucleotide
  Sense strand starting at position 900 of SEQ ID NO: 914559
agauguauugccuagacuu

SEQ ID NO: 1013227 - RNA, 19 nt, Artificial Sequence
  Description of Artificial Sequence: Synthetic oligonucleotide
  Antisense strand to SEQ ID NO: 1013226
aagucuaggcaauacaucu

SEQ ID NO: 1013228 - RNA, 19 nt, Artificial Sequence
  Description of Artificial Sequence: Synthetic oligonucleotide
  Sense strand starting at position 1342 of SEQ ID NO: 914559
cuaaccuuuccagguagga

SEQ ID NO: 1013229 - RNA, 19 nt, Artificial Sequence
  Description of Artificial Sequence: Synthetic oligonucleotide
  Antisense strand to SEQ ID NO: 1013228
uccuaccuggaaagguuag

SEQ ID NO: 1013230 - RNA, 19 nt, Artificial Sequence
  Description of Artificial Sequence: Synthetic oligonucleotide
  Sense strand starting at position 1351 of SEQ ID NO: 914559
ccagguaggaugugauacu

SEQ ID NO: 1013231 - RNA, 19 nt, Artificial Sequence
  Description of Artificial Sequence: Synthetic oligonucleotide
  Antisense strand to SEQ ID NO: 1013230
aguaucacauccuaccugg

SEQ ID NO: 1013232 - RNA, 19 nt, Artificial Sequence
  Description of Artificial Sequence: Synthetic oligonucleotide
  Sense strand starting at position 1733 of SEQ ID NO: 914559
uggcuuucccaauaaguuu

SEQ ID NO: 1013233 - RNA, 19 nt, Artificial Sequence
  Description of Artificial Sequence: Synthetic oligonucleotide
  Antisense strand to SEQ ID NO: 1013232
aaacuuauugggaaagcca

SEQ ID NO: 1013234 - RNA, 19 nt, Artificial Sequence
  Description of Artificial Sequence: Synthetic oligonucleotide
  Sense strand starting at position 1745 of SEQ ID NO: 914559
uaaguuugugcugugucua

SEQ ID NO: 1013235 - RNA, 19 nt, Artificial Sequence
  Description of Artificial Sequence: Synthetic oligonucleotide
  Antisense strand to SEQ ID NO: 1013234
uagacacagcacaaacuua

SEQ ID NO: 1013236 - RNA, 19 nt, Artificial Sequence
  Description of Artificial Sequence: Synthetic oligonucleotide
  Sense strand starting at position 1757 of SEQ ID NO: 914559
gugucuauaguguaauaac

SEQ ID NO: 1013237 - RNA, 19 nt, Artificial Sequence
  Description of Artificial Sequence: Synthetic oligonucleotide
  Antisense strand to SEQ ID NO: 1013236
guuauuacacuauagacac

SEQ ID NO: 1013238 - RNA, 19 nt, Artificial Sequence
  Description of Artificial Sequence: Synthetic oligonucleotide
  Sense strand starting at position 1766 of SEQ ID NO: 914559
guguaauaacacuggauug

SEQ ID NO: 1013239 - RNA, 19 nt, Artificial Sequence
  Description of Artificial Sequence: Synthetic oligonucleotide
  Antisense strand to SEQ ID NO: 1013238
caauccaguguuauuacac

SEQ ID NO: 1013240 - RNA, 19 nt, Artificial Sequence
  Description of Artificial Sequence: Synthetic oligonucleotide
  Sense strand starting at position 1797 of SEQ ID NO: 914559
auggguuucuagucuuaac

SEQ ID NO: 1013241 - RNA, 19 nt, Artificial Sequence
  Description of Artificial Sequence: Synthetic oligonucleotide
  Antisense strand to SEQ ID NO: 1013240
guuaagacuagaaacccau

SEQ ID NO: 1013242 - RNA, 19 nt, Artificial Sequence
  Description of Artificial Sequence: Synthetic oligonucleotide
  Sense strand starting at position 1863 of SEQ ID NO: 914559
cuaguuccuuacuuacaga

SEQ ID NO: 1013243 - RNA, 19 nt, Artificial Sequence
  Description of Artificial Sequence: Synthetic oligonucleotide
  Antisense strand to SEQ ID NO: 1013242
ucuguaaguaaggaacuag

SEQ ID NO: 1013244 - RNA, 19 nt, Artificial Sequence
  Description of Artificial Sequence: Synthetic oligonucleotide
  Sense strand starting at position 1886 of SEQ ID NO: 914559
ucgugugaggcagaugauu

SEQ ID NO: 1013245 - RNA, 19 nt, Artificial Sequence
  Description of Artificial Sequence: Synthetic oligonucleotide
  Antisense strand to SEQ ID NO: 1013244
aaucaucugccucacacga

SEQ ID NO: 1013246 - RNA, 19 nt, Artificial Sequence
  Description of Artificial Sequence: Synthetic oligonucleotide
  Sense strand starting at position 1891 of SEQ ID NO: 914559
ugaggcagaugauuccuaa

SEQ ID NO: 1013247 - RNA, 19 nt, Artificial Sequence
  Description of Artificial Sequence: Synthetic oligonucleotide
  Antisense strand to SEQ ID NO: 1013246
uuaggaaucaucugccuca

SEQ ID NO: 1013248 - RNA, 19 nt, Artificial Sequence
  Description of Artificial Sequence: Synthetic oligonucleotide
  Sense strand starting at position 1894 of SEQ ID NO: 914559
ggcagaugauuccuaaggu

SEQ ID NO: 1013249 - RNA, 19 nt, Artificial Sequence
  Description of Artificial Sequence: Synthetic oligonucleotide
  Antisense strand to SEQ ID NO: 1013248
accuuaggaaucaucugcc

SEQ ID NO: 1013250 - RNA, 19 nt, Artificial Sequence
  Description of Artificial Sequence: Synthetic oligonucleotide
  Sense strand starting at position 2306 of SEQ ID NO: 914559
aggguaaacuuucuacauu

SEQ ID NO: 1013251 - RNA, 19 nt, Artificial Sequence
  Description of Artificial Sequence: Synthetic oligonucleotide
  Antisense strand to SEQ ID NO: 1013250
aauguagaaaguuuacccu

SEQ ID NO: 1013252 - RNA, 19 nt, Artificial Sequence
  Description of Artificial Sequence: Synthetic oligonucleotide
  Sense strand starting at position 2373 of SEQ ID NO: 914559
ggguauuagaaaugguaca

SEQ ID NO: 1013253 - RNA, 19 nt, Artificial Sequence
  Description of Artificial Sequence: Synthetic oligonucleotide
  Antisense strand to SEQ ID NO: 1013252
uguaccauuucuaauaccc

SEQ ID NO: 1013254 - RNA, 19 nt, Artificial Sequence
  Description of Artificial Sequence: Synthetic oligonucleotide
  Sense strand starting at position 2378 of SEQ ID NO: 914559
uuagaaaugguacacggua

SEQ ID NO: 1013255 - RNA, 19 nt, Artificial Sequence
  Description of Artificial Sequence: Synthetic oligonucleotide
  Antisense strand to SEQ ID NO: 1013254
uaccguguaccauuucuaa

SEQ ID NO: 1013256 - RNA, 19 nt, Artificial Sequence
  Description of Artificial Sequence: Synthetic oligonucleotide
  Sense strand starting at position 2380 of SEQ ID NO: 914559
agaaaugguacacgguauu

SEQ ID NO: 1013257 - RNA, 19 nt, Artificial Sequence
  Description of Artificial Sequence: Synthetic oligonucleotide
  Antisense strand to SEQ ID NO: 1013256
aauaccguguaccauuucu

SEQ ID NO: 1013258 - RNA, 19 nt, Artificial Sequence
  Description of Artificial Sequence: Synthetic oligonucleotide
  Sense strand starting at position 2638 of SEQ ID NO: 914559
gaugcuugcaugucgaguu

SEQ ID NO: 1013259 - RNA, 19 nt, Artificial Sequence
  Description of Artificial Sequence: Synthetic oligonucleotide
  Antisense strand to SEQ ID NO: 1013258
aacucgacaugcaagcauc

SEQ ID NO: 1013260 - RNA, 19 nt, Artificial Sequence
  Description of Artificial Sequence: Synthetic oligonucleotide
  Sense strand starting at position 2676 of SEQ ID NO: 914559
gaaugcauucuacaaagug

SEQ ID NO: 1013261 - RNA, 19 nt, Artificial Sequence
  Description of Artificial Sequence: Synthetic oligonucleotide
  Antisense strand to SEQ ID NO: 1013260
cacuuuguagaaugcauuc

SEQ ID NO: 1013262 - RNA, 19 nt, Artificial Sequence
  Description of Artificial Sequence: Synthetic oligonucleotide
  Sense strand starting at position 3337 of SEQ ID NO: 914559
ucccaaagucuauaguuga

SEQ ID NO: 1013263 - RNA, 19 nt, Artificial Sequence
  Description of Artificial Sequence: Synthetic oligonucleotide
  Antisense strand to SEQ ID NO: 1013262
ucaacuauagacuuuggga

SEQ ID NO: 1013264 - RNA, 19 nt, Artificial Sequence
  Description of Artificial Sequence: Synthetic oligonucleotide
  Sense strand starting at position 3347 of SEQ ID NO: 914559
uauaguugacaucagaguu

SEQ ID NO: 1013265 - RNA, 19 nt, Artificial Sequence
  Description of Artificial Sequence: Synthetic oligonucleotide
  Antisense strand to SEQ ID NO: 1013264
aacucugaugucaacuaua

SEQ ID NO: 1013266 - RNA, 19 nt, Artificial Sequence
  Description of Artificial Sequence: Synthetic oligonucleotide
  Sense strand starting at position 3707 of SEQ ID NO: 914559
acaguuuaucuauguauuc

SEQ ID NO: 1013267 - RNA, 19 nt, Artificial Sequence
  Description of Artificial Sequence: Synthetic oligonucleotide
  Antisense strand to SEQ ID NO: 1013266
gaauacauagauaaacugu

SEQ ID NO: 1013268 - RNA, 19 nt, Artificial Sequence
  Description of Artificial Sequence: Synthetic oligonucleotide
  Sense strand starting at position 3816 of SEQ ID NO: 914559
auaguucuugugcagacau

SEQ ID NO: 1013269 - RNA, 19 nt, Artificial Sequence
  Description of Artificial Sequence: Synthetic oligonucleotide
  Antisense strand to SEQ ID NO: 1013268
augucugcacaagaacuau

SEQ ID NO: 1013270 - RNA, 19 nt, Artificial Sequence
  Description of Artificial Sequence: Synthetic oligonucleotide
  Sense strand starting at position 3818 of SEQ ID NO: 914559
aguucuugugcagacauua

SEQ ID NO: 1013271 - RNA, 19 nt, Artificial Sequence
  Description of Artificial Sequence: Synthetic oligonucleotide
  Antisense strand to SEQ ID NO: 1013270
uaaugucugcacaagaacu

SEQ ID NO: 1013272 - RNA, 19 nt, Artificial Sequence
  Description of Artificial Sequence: Synthetic oligonucleotide
  Sense strand starting at position 3857 of SEQ ID NO: 914559
auaguuugauugcuggauu

SEQ ID NO: 1013273 - RNA, 19 nt, Artificial Sequence
  Description of Artificial Sequence: Synthetic oligonucleotide
  Antisense strand to SEQ ID NO: 1013272
aauccagcaaucaaacuau

SEQ ID NO: 1013274 - RNA, 19 nt, Artificial Sequence
  Description of Artificial Sequence: Synthetic oligonucleotide
  Sense strand starting at position 3860 of SEQ ID NO: 914559
guuugauugcuggauuaua

SEQ ID NO: 1013275 - RNA, 19 nt, Artificial Sequence
  Description of Artificial Sequence: Synthetic oligonucleotide
  Antisense strand to SEQ ID NO: 1013274
uauaauccagcaaucaaac

SEQ ID NO: 1013276 - RNA, 19 nt, Artificial Sequence
  Description of Artificial Sequence: Synthetic oligonucleotide
  Sense strand starting at position 33 of SEQ ID NO: 914560
gaggaaucuuuauaggcug

SEQ ID NO: 1013277 - RNA, 19 nt, Artificial Sequence
  Description of Artificial Sequence: Synthetic oligonucleotide
  Antisense strand to SEQ ID NO: 1013276
cagccuauaaagauuccuc

SEQ ID NO: 1013278 - RNA, 19 nt, Artificial Sequence
  Description of Artificial Sequence: Synthetic oligonucleotide
  Sense strand starting at position 36 of SEQ ID NO: 914560
gaaucuuuauaggcuggga

SEQ ID NO: 1013279 - RNA, 19 nt, Artificial Sequence
  Description of Artificial Sequence: Synthetic oligonucleotide
  Antisense strand to SEQ ID NO: 1013278
ucccagccuauaaagauuc

SEQ ID NO: 1013280 - RNA, 19 nt, Artificial Sequence
  Description of Artificial Sequence: Synthetic oligonucleotide
  Sense strand starting at position 71 of SEQ ID NO: 914560
gaggacacugccugauuga

SEQ ID NO: 1013281 - RNA, 19 nt, Artificial Sequence
  Description of Artificial Sequence: Synthetic oligonucleotide
  Antisense strand to SEQ ID NO: 1013280
ucaaucaggcaguguccuc

SEQ ID NO: 1013282 - RNA, 19 nt, Artificial Sequence
  Description of Artificial Sequence: Synthetic oligonucleotide
  Sense strand starting at position 141 of SEQ ID NO: 914560
acagacuccuccucagagu

SEQ ID NO: 1013283 - RNA, 19 nt, Artificial Sequence
  Description of Artificial Sequence: Synthetic oligonucleotide
  Antisense strand to SEQ ID NO: 1013282
acucugaggaggagucugu

SEQ ID NO: 1013284 - RNA, 19 nt, Artificial Sequence
  Description of Artificial Sequence: Synthetic oligonucleotide
  Sense strand starting at position 227 of SEQ ID NO: 914560
ccugaccucugagaauauu

SEQ ID NO: 1013285 - RNA, 19 nt, Artificial Sequence
  Description of Artificial Sequence: Synthetic oligonucleotide
  Antisense strand to SEQ ID NO: 1013284
aauauucucagaggucagg

SEQ ID NO: 1013286 - RNA, 19 nt, Artificial Sequence
  Description of Artificial Sequence: Synthetic oligonucleotide
  Sense strand starting at position 274 of SEQ ID NO: 914560
uaagguuuguuccucuaug

SEQ ID NO: 1013287 - RNA, 19 nt, Artificial Sequence
  Description of Artificial Sequence: Synthetic oligonucleotide
  Antisense strand to SEQ ID NO: 1013286
cauagaggaacaaaccuua

SEQ ID NO: 1013288 - RNA, 19 nt, Artificial Sequence
  Description of Artificial Sequence: Synthetic oligonucleotide
  Sense strand starting at position 672 of SEQ ID NO: 914560
gcuucuguggagggaauau

SEQ ID NO: 1013289 - RNA, 19 nt, Artificial Sequence
  Description of Artificial Sequence: Synthetic oligonucleotide
  Antisense strand to SEQ ID NO: 1013288
auauucccuccacagaagc

SEQ ID NO: 1013290 - RNA, 19 nt, Artificial Sequence
  Description of Artificial Sequence: Synthetic oligonucleotide
  Sense strand starting at position 902 of SEQ ID NO: 914560
gaggcugacucauccagaa

SEQ ID NO: 1013291 - RNA, 19 nt, Artificial Sequence
  Description of Artificial Sequence: Synthetic oligonucleotide
  Antisense strand to SEQ ID NO: 1013290
uucuggaugagucagccuc

SEQ ID NO: 1013292 - RNA, 19 nt, Artificial Sequence
  Description of Artificial Sequence: Synthetic oligonucleotide
  Sense strand starting at position 935 of SEQ ID NO: 914560
gccagacaucuagacaucu

SEQ ID NO: 1013293 - RNA, 19 nt, Artificial Sequence
  Description of Artificial Sequence: Synthetic oligonucleotide
  Antisense strand to SEQ ID NO: 1013292
agaugucuagaugucuggc

SEQ ID NO: 1013294 - RNA, 19 nt, Artificial Sequence
  Description of Artificial Sequence: Synthetic oligonucleotide
  Sense strand starting at position 1227 of SEQ ID NO: 914560
cuugauauauucuccuguu

SEQ ID NO: 1013295 - RNA, 19 nt, Artificial Sequence
  Description of Artificial Sequence: Synthetic oligonucleotide
  Antisense strand to SEQ ID NO: 1013294
aacaggagaauauaucaag

SEQ ID NO: 1013296 - RNA, 19 nt, Artificial Sequence
  Description of Artificial Sequence: Synthetic oligonucleotide
  Sense strand starting at position 1228 of SEQ ID NO: 914560
uugauauauucuccuguug

SEQ ID NO: 1013297 - RNA, 19 nt, Artificial Sequence
  Description of Artificial Sequence: Synthetic oligonucleotide
  Antisense strand to SEQ ID NO: 1013296
caacaggagaauauaucaa

SEQ ID NO: 1013298 - RNA, 19 nt, Artificial Sequence
  Description of Artificial Sequence: Synthetic oligonucleotide
  Sense strand starting at position 1380 of SEQ ID NO: 914560
agccuuggcagacaucaga

SEQ ID NO: 1013299 - RNA, 19 nt, Artificial Sequence
  Description of Artificial Sequence: Synthetic oligonucleotide
  Antisense strand to SEQ ID NO: 1013298
ucugaugucugccaaggcu

SEQ ID NO: 1013300 - RNA, 19 nt, Artificial Sequence
  Description of Artificial Sequence: Synthetic oligonucleotide
  Sense strand starting at position 1504 of SEQ ID NO: 914560
agugcaauacaggguuuaa

SEQ ID NO: 1013301 - RNA, 19 nt, Artificial Sequence
  Description of Artificial Sequence: Synthetic oligonucleotide
  Antisense strand to SEQ ID NO: 1013300
uuaaacccuguauugcacu

SEQ ID NO: 1013302 - RNA, 19 nt, Artificial Sequence
  Description of Artificial Sequence: Synthetic oligonucleotide
  Sense strand starting at position 1533 of SEQ ID NO: 914560
ccuugaaauuuagaugguu

SEQ ID NO: 1013303 - RNA, 19 nt, Artificial Sequence
  Description of Artificial Sequence: Synthetic oligonucleotide
  Antisense strand to SEQ ID NO: 1013302
aaccaucuaaauuucaagg

SEQ ID NO: 1013304 - RNA, 19 nt, Artificial Sequence
  Description of Artificial Sequence: Synthetic oligonucleotide
  Sense strand starting at position 2300 of SEQ ID NO: 914560
accauuuccuagcugugua

SEQ ID NO: 1013305 - RNA, 19 nt, Artificial Sequence
  Description of Artificial Sequence: Synthetic oligonucleotide
  Antisense strand to SEQ ID NO: 1013304
uacacagcuaggaaauggu

SEQ ID NO: 1013306 - RNA, 19 nt, Artificial Sequence
  Description of Artificial Sequence: Synthetic oligonucleotide
  Sense strand starting at position 2312 of SEQ ID NO: 914560
cuguguaaccucggagaag

SEQ ID NO: 1013307 - RNA, 19 nt, Artificial Sequence
  Description of Artificial Sequence: Synthetic oligonucleotide
  Antisense strand to SEQ ID NO: 1013306
cuucuccgagguuacacag

SEQ ID NO: 1013308 - RNA, 19 nt, Artificial Sequence
  Description of Artificial Sequence: Synthetic oligonucleotide
  Sense strand starting at position 2373 of SEQ ID NO: 914560
ggguguugugaggauucag

SEQ ID NO: 1013309 - RNA, 19 nt, Artificial Sequence
  Description of Artificial Sequence: Synthetic oligonucleotide
  Antisense strand to SEQ ID NO: 1013308
cugaauccucacaacaccc

SEQ ID NO: 1013310 - RNA, 19 nt, Artificial Sequence
  Description of Artificial Sequence: Synthetic oligonucleotide
  Sense strand starting at position 2394 of SEQ ID NO: 914560
agcugaaacagguaaaguu

SEQ ID NO: 1013311 - RNA, 19 nt, Artificial Sequence
  Description of Artificial Sequence: Synthetic oligonucleotide
  Antisense strand to SEQ ID NO: 1013310
aacuuuaccuguuucagcu

SEQ ID NO: 1013312 - RNA, 19 nt, Artificial Sequence
  Description of Artificial Sequence: Synthetic oligonucleotide
  Sense strand starting at position 2402 of SEQ ID NO: 914560
cagguaaaguucuuagaag

SEQ ID NO: 1013313 - RNA, 19 nt, Artificial Sequence
  Description of Artificial Sequence: Synthetic oligonucleotide
  Antisense strand to SEQ ID NO: 1013312
cuucuaagaacuuuaccug

SEQ ID NO: 1013314 - RNA, 19 nt, Artificial Sequence
  Description of Artificial Sequence: Synthetic oligonucleotide
  Sense strand starting at position 2421 of SEQ ID NO: 914560
aggucuggugcuggauaaa

SEQ ID NO: 1013315 - RNA, 19 nt, Artificial Sequence
  Description of Artificial Sequence: Synthetic oligonucleotide
  Antisense strand to SEQ ID NO: 1013314
uuuauccagcaccagaccu

SEQ ID NO: 1013316 - RNA, 19 nt, Artificial Sequence
  Description of Artificial Sequence: Synthetic oligonucleotide
  Sense strand starting at position 2597 of SEQ ID NO: 914560
aagucagugaaucgugauc

SEQ ID NO: 1013317 - RNA, 19 nt, Artificial Sequence
  Description of Artificial Sequence: Synthetic oligonucleotide
  Antisense strand to SEQ ID NO: 1013316
gaucacgauucacugacuu

SEQ ID NO: 1013318 - RNA, 19 nt, Artificial Sequence
  Description of Artificial Sequence: Synthetic oligonucleotide
  Sense strand starting at position 2647 of SEQ ID NO: 914560
gagcuagacgcugacucaa

SEQ ID NO: 1013319 - RNA, 19 nt, Artificial Sequence
  Description of Artificial Sequence: Synthetic oligonucleotide
  Antisense strand to SEQ ID NO: 1013318
uugagucagcgucuagcuc

SEQ ID NO: 1013320 - RNA, 19 nt, Artificial Sequence
  Description of Artificial Sequence: Synthetic oligonucleotide
  Sense strand starting at position 3061 of SEQ ID NO: 914560
ggaaauaaauggugacacu

SEQ ID NO: 1013321 - RNA, 19 nt, Artificial Sequence
  Description of Artificial Sequence: Synthetic oligonucleotide
  Antisense strand to SEQ ID NO: 1013320
agugucaccauuuauuucc

SEQ ID NO: 1013322 - RNA, 19 nt, Artificial Sequence
  Description of Artificial Sequence: Synthetic oligonucleotide
  Sense strand starting at position 3092 of SEQ ID NO: 914560
cugacagucuaagucaaau

SEQ ID NO: 1013323 - RNA, 19 nt, Artificial Sequence
  Description of Artificial Sequence: Synthetic oligonucleotide
  Antisense strand to SEQ ID NO: 1013322
auuugacuuagacugucag

SEQ ID NO: 1013324 - RNA, 19 nt, Artificial Sequence
  Description of Artificial Sequence: Synthetic oligonucleotide
  Sense strand starting at position 3102 of SEQ ID NO: 914560
aagucaaaucuguggucuu

SEQ ID NO: 1013325 - RNA, 19 nt, Artificial Sequence
  Description of Artificial Sequence: Synthetic oligonucleotide
  Antisense strand to SEQ ID NO: 1013324
aagaccacagauuugacuu

SEQ ID NO: 1013326 - RNA, 19 nt, Artificial Sequence
  Description of Artificial Sequence: Synthetic oligonucleotide
  Sense strand starting at position 3166 of SEQ ID NO: 914560
gugucagucaugucagcuc

SEQ ID NO: 1013327 - RNA, 19 nt, Artificial Sequence
  Description of Artificial Sequence: Synthetic oligonucleotide
  Antisense strand to SEQ ID NO: 1013326
gagcugacaugacugacac

SEQ ID NO: 1013328 - RNA, 19 nt, Artificial Sequence
  Description of Artificial Sequence: Synthetic oligonucleotide
  Sense strand starting at position 3270 of SEQ ID NO: 914560
ucuccuaaguuuguucuga

SEQ ID NO: 1013329 - RNA, 19 nt, Artificial Sequence
  Description of Artificial Sequence: Synthetic oligonucleotide
  Antisense strand to SEQ ID NO: 1013328
ucagaacaaacuuaggaga

SEQ ID NO: 1013330 - RNA, 19 nt, Artificial Sequence
  Description of Artificial Sequence: Synthetic oligonucleotide
  Sense strand starting at position 3271 of SEQ ID NO: 914560
cuccuaaguuuguucugau

SEQ ID NO: 1013331 - RNA, 19 nt, Artificial Sequence
  Description of Artificial Sequence: Synthetic oligonucleotide
  Antisense strand to SEQ ID NO: 1013330
aucagaacaaacuuaggag

SEQ ID NO: 1013332 - RNA, 19 nt, Artificial Sequence
  Description of Artificial Sequence: Synthetic oligonucleotide
  Sense strand starting at position 3272 of SEQ ID NO: 914560
uccuaaguuuguucugaua

SEQ ID NO: 1013333 - RNA, 19 nt, Artificial Sequence
  Description of Artificial Sequence: Synthetic oligonucleotide
  Antisense strand to SEQ ID NO: 1013332
uaucagaacaaacuuagga

SEQ ID NO: 1013334 - RNA, 19 nt, Artificial Sequence
  Description of Artificial Sequence: Synthetic oligonucleotide
  Sense strand starting at position 3286 of SEQ ID NO: 914560
ugauauugauguuucgaau

SEQ ID NO: 1013335 - RNA, 19 nt, Artificial Sequence
  Description of Artificial Sequence: Synthetic oligonucleotide
  Antisense strand to SEQ ID NO: 1013334
auucgaaacaucaauauca

SEQ ID NO: 1013336 - RNA, 19 nt, Artificial Sequence
  Description of Artificial Sequence: Synthetic oligonucleotide
  Sense strand starting at position 3539 of SEQ ID NO: 914560
cgggcaaacgugggaauaa

SEQ ID NO: 1013337 - RNA, 19 nt, Artificial Sequence
  Description of Artificial Sequence: Synthetic oligonucleotide
  Antisense strand to SEQ ID NO: 1013336
uuauucccacguuugcccg

SEQ ID NO: 1013338 - RNA, 19 nt, Artificial Sequence
  Description of Artificial Sequence: Synthetic oligonucleotide
  Sense strand starting at position 3684 of SEQ ID NO: 914560
ggagggugauugucgggua

SEQ ID NO: 1013339 - RNA, 19 nt, Artificial Sequence
  Description of Artificial Sequence: Synthetic oligonucleotide
  Antisense strand to SEQ ID NO: 1013338
uacccgacaaucacccucc

SEQ ID NO: 1013340 - RNA, 19 nt, Artificial Sequence
  Description of Artificial Sequence: Synthetic oligonucleotide
  Sense strand starting at position 3689 of SEQ ID NO: 914560
gugauugucggguauguca

SEQ ID NO: 1013341 - RNA, 19 nt, Artificial Sequence
  Description of Artificial Sequence: Synthetic oligonucleotide
  Antisense strand to SEQ ID NO: 1013340
ugacauacccgacaaucac

SEQ ID NO: 1013342 - RNA, 19 nt, Artificial Sequence
  Description of Artificial Sequence: Synthetic oligonucleotide
  Sense strand starting at position 3698 of SEQ ID NO: 914560
ggguaugucagguaauugu

SEQ ID NO: 1013343 - RNA, 19 nt, Artificial Sequence
  Description of Artificial Sequence: Synthetic oligonucleotide
  Antisense strand to SEQ ID NO: 1013342
acaauuaccugacauaccc

SEQ ID NO: 1013344 - RNA, 19 nt, Artificial Sequence
  Description of Artificial Sequence: Synthetic oligonucleotide
  Sense strand starting at position 3707 of SEQ ID NO: 914560
agguaauugucggucagca

SEQ ID NO: 1013345 - RNA, 19 nt, Artificial Sequence
  Description of Artificial Sequence: Synthetic oligonucleotide
  Antisense strand to SEQ ID NO: 1013344
ugcugaccgacaauuaccu

SEQ ID NO: 1013346 - RNA, 19 nt, Artificial Sequence
  Description of Artificial Sequence: Synthetic oligonucleotide
  Sense strand starting at position 3709 of SEQ ID NO: 914560
guaauugucggucagcacu

SEQ ID NO: 1013347 - RNA, 19 nt, Artificial Sequence
  Description of Artificial Sequence: Synthetic oligonucleotide
  Antisense strand to SEQ ID NO: 1013346
agugcugaccgacaauuac

SEQ ID NO: 1013348 - RNA, 19 nt, Artificial Sequence
  Description of Artificial Sequence: Synthetic oligonucleotide
  Sense strand starting at position 3817 of SEQ ID NO: 914560
gaguaaggcccucagcaaa

SEQ ID NO: 1013349 - RNA, 19 nt, Artificial Sequence
  Description of Artificial Sequence: Synthetic oligonucleotide
  Antisense strand to SEQ ID NO: 1013348
uuugcugagggccuuacuc

SEQ ID NO: 1013350 - RNA, 19 nt, Artificial Sequence
  Description of Artificial Sequence: Synthetic oligonucleotide
  Sense strand starting at position 3854 of SEQ ID NO: 914560
gugggaguuugcccacauc

SEQ ID NO: 1013351 - RNA, 19 nt, Artificial Sequence
  Description of Artificial Sequence: Synthetic oligonucleotide
  Antisense strand to SEQ ID NO: 1013350
gaugugggcaaacucccac

SEQ ID NO: 1013352 - RNA, 19 nt, Artificial Sequence
  Description of Artificial Sequence: Synthetic oligonucleotide
  Sense strand starting at position 3888 of SEQ ID NO: 914560
acagguggcuguuugauca

SEQ ID NO: 1013353 - RNA, 19 nt, Artificial Sequence
  Description of Artificial Sequence: Synthetic oligonucleotide
  Antisense strand to SEQ ID NO: 1013352
ugaucaaacagccaccugu

SEQ ID NO: 1013354 - RNA, 19 nt, Artificial Sequence
  Description of Artificial Sequence: Synthetic oligonucleotide
  Sense strand starting at position 3892 of SEQ ID NO: 914560
guggcuguuugaucauaua

SEQ ID NO: 1013355 - RNA, 19 nt, Artificial Sequence
  Description of Artificial Sequence: Synthetic oligonucleotide
  Antisense strand to SEQ ID NO: 1013354
uauaugaucaaacagccac

SEQ ID NO: 1013356 - RNA, 19 nt, Artificial Sequence
  Description of Artificial Sequence: Synthetic oligonucleotide
  Sense strand starting at position 247 of SEQ ID NO: 914561
acucuagugugagugacaa

SEQ ID NO: 1013357 - RNA, 19 nt, Artificial Sequence
  Description of Artificial Sequence: Synthetic oligonucleotide
  Antisense strand to SEQ ID NO: 1013356
uugucacucacacuagagu

SEQ ID NO: 1013358 - RNA, 19 nt, Artificial Sequence
  Description of Artificial Sequence: Synthetic oligonucleotide
  Sense strand starting at position 327 of SEQ ID NO: 914561
guugauuccaggcgaagag

SEQ ID NO: 1013359 - RNA, 19 nt, Artificial Sequence
  Description of Artificial Sequence: Synthetic oligonucleotide
  Antisense strand to SEQ ID NO: 1013358
cucuucgccuggaaucaac

SEQ ID NO: 1013360 - RNA, 19 nt, Artificial Sequence
  Description of Artificial Sequence: Synthetic oligonucleotide
  Sense strand starting at position 342 of SEQ ID NO: 914561
agaguuguccuacaggugu

SEQ ID NO: 1013361 - RNA, 19 nt, Artificial Sequence
  Description of Artificial Sequence: Synthetic oligonucleotide
  Antisense strand to SEQ ID NO: 1013360
acaccuguaggacaacucu

SEQ ID NO: 1013362 - RNA, 19 nt, Artificial Sequence
  Description of Artificial Sequence: Synthetic oligonucleotide
  Sense strand starting at position 489 of SEQ ID NO: 914561
ucaagaggucaugguaaca

SEQ ID NO: 1013363 - RNA, 19 nt, Artificial Sequence
  Description of Artificial Sequence: Synthetic oligonucleotide
  Antisense strand to SEQ ID NO: 1013362
uguuaccaugaccucuuga

SEQ ID NO: 1013364 - RNA, 19 nt, Artificial Sequence
  Description of Artificial Sequence: Synthetic oligonucleotide
  Sense strand starting at position 501 of SEQ ID NO: 914561
gguaacauuuccgugucuu

SEQ ID NO: 1013365 - RNA, 19 nt, Artificial Sequence
  Description of Artificial Sequence: Synthetic oligonucleotide
  Antisense strand to SEQ ID NO: 1013364
aagacacggaaauguuacc

SEQ ID NO: 1013366 - RNA, 19 nt, Artificial Sequence
  Description of Artificial Sequence: Synthetic oligonucleotide
  Sense strand starting at position 502 of SEQ ID NO: 914561
guaacauuuccgugucuuu

SEQ ID NO: 1013367 - RNA, 19 nt, Artificial Sequence
  Description of Artificial Sequence: Synthetic oligonucleotide
  Antisense strand to SEQ ID NO: 1013366
aaagacacggaaauguuac

SEQ ID NO: 1013368 - RNA, 19 nt, Artificial Sequence
  Description of Artificial Sequence: Synthetic oligonucleotide
  Sense strand starting at position 505 of SEQ ID NO: 914561
acauuuccgugucuuugua

SEQ ID NO: 1013369 - RNA, 19 nt, Artificial Sequence
  Description of Artificial Sequence: Synthetic oligonucleotide
  Antisense strand to SEQ ID NO: 1013368
uacaaagacacggaaaugu

SEQ ID NO: 1013370 - RNA, 19 nt, Artificial Sequence
  Description of Artificial Sequence: Synthetic oligonucleotide
  Sense strand starting at position 507 of SEQ ID NO: 914561
auuuccgugucuuuguaau

SEQ ID NO: 1013371 - RNA, 19 nt, Artificial Sequence
  Description of Artificial Sequence: Synthetic oligonucleotide
  Antisense strand to SEQ ID NO: 1013370
auuacaaagacacggaaau

SEQ ID NO: 1013372 - RNA, 19 nt, Artificial Sequence
  Description of Artificial Sequence: Synthetic oligonucleotide
  Sense strand starting at position 509 of SEQ ID NO: 914561
uuccgugucuuuguaauuu

SEQ ID NO: 1013373 - RNA, 19 nt, Artificial Sequence
  Description of Artificial Sequence: Synthetic oligonucleotide
  Antisense strand to SEQ ID NO: 1013372
aaauuacaaagacacggaa

SEQ ID NO: 1013374 - RNA, 19 nt, Artificial Sequence
  Description of Artificial Sequence: Synthetic oligonucleotide
  Sense strand starting at position 675 of SEQ ID NO: 914561
gcaugcuaacacuauguaa

SEQ ID NO: 1013375 - RNA, 19 nt, Artificial Sequence
  Description of Artificial Sequence: Synthetic oligonucleotide
  Antisense strand to SEQ ID NO: 1013374
uuacauaguguuagcaugc

SEQ ID NO: 1013376 - RNA, 19 nt, Artificial Sequence
  Description of Artificial Sequence: Synthetic oligonucleotide
  Sense strand starting at position 724 of SEQ ID NO: 914561
aaaccaguccucgggcaaa

SEQ ID NO: 1013377 - RNA, 19 nt, Artificial Sequence
  Description of Artificial Sequence: Synthetic oligonucleotide
  Antisense strand to SEQ ID NO: 1013376
uuugcccgaggacugguuu

SEQ ID NO: 1013378 - RNA, 19 nt, Artificial Sequence
  Description of Artificial Sequence: Synthetic oligonucleotide
  Sense strand starting at position 785 of SEQ ID NO: 914561
agucuuacagacuaugcaa

SEQ ID NO: 1013379 - RNA, 19 nt, Artificial Sequence
  Description of Artificial Sequence: Synthetic oligonucleotide
  Antisense strand to SEQ ID NO: 1013378
uugcauagucuguaagacu

SEQ ID NO: 1013380 - RNA, 19 nt, Artificial Sequence
  Description of Artificial Sequence: Synthetic oligonucleotide
  Sense strand starting at position 903 of SEQ ID NO: 914561
uugcuauggcaaugggaaa

SEQ ID NO: 1013381 - RNA, 19 nt, Artificial Sequence
  Description of Artificial Sequence: Synthetic oligonucleotide
  Antisense strand to SEQ ID NO: 1013380
uuucccauugccauagcaa

SEQ ID NO: 1013382 - RNA, 19 nt, Artificial Sequence
  Description of Artificial Sequence: Synthetic oligonucleotide
  Sense strand starting at position 904 of SEQ ID NO: 914561
ugcuauggcaaugggaaau

SEQ ID NO: 1013383 - RNA, 19 nt, Artificial Sequence
  Description of Artificial Sequence: Synthetic oligonucleotide
  Antisense strand to SEQ ID NO: 1013382
auuucccauugccauagca

SEQ ID NO: 1013384 - RNA, 19 nt, Artificial Sequence
  Description of Artificial Sequence: Synthetic oligonucleotide
  Sense strand starting at position 1235 of SEQ ID NO: 914561
auguuuauguagcuggaaa

SEQ ID NO: 1013385 - RNA, 19 nt, Artificial Sequence
  Description of Artificial Sequence: Synthetic oligonucleotide
  Antisense strand to SEQ ID NO: 1013384
uuuccagcuacauaaacau

SEQ ID NO: 1013386 - RNA, 19 nt, Artificial Sequence
  Description of Artificial Sequence: Synthetic oligonucleotide
  Sense strand starting at position 1369 of SEQ ID NO: 914561
agauuagcuuugucucaaa

SEQ ID NO: 1013387 - RNA, 19 nt, Artificial Sequence
  Description of Artificial Sequence: Synthetic oligonucleotide
  Antisense strand to SEQ ID NO: 1013386
uuugagacaaagcuaaucu

SEQ ID NO: 1013388 - RNA, 19 nt, Artificial Sequence
  Description of Artificial Sequence: Synthetic oligonucleotide
  Sense strand starting at position 1539 of SEQ ID NO: 914561
ggaguagucccaugaaucu

SEQ ID NO: 1013389 - RNA, 19 nt, Artificial Sequence
  Description of Artificial Sequence: Synthetic oligonucleotide
  Antisense strand to SEQ ID NO: 1013388
agauucaugggacuacucc

SEQ ID NO: 1013390 - RNA, 19 nt, Artificial Sequence
  Description of Artificial Sequence: Synthetic oligonucleotide
  Sense strand starting at position 1577 of SEQ ID NO: 914561
accgcuauugucuaaauca

SEQ ID NO: 1013391 - RNA, 19 nt, Artificial Sequence
  Description of Artificial Sequence: Synthetic oligonucleotide
  Antisense strand to SEQ ID NO: 1013390
ugauuuagacaauagcggu

SEQ ID NO: 1013392 - RNA, 19 nt, Artificial Sequence
  Description of Artificial Sequence: Synthetic oligonucleotide
  Sense strand starting at position 1593 of SEQ ID NO: 914561
ucaaguauuuacucguauu

SEQ ID NO: 1013393 - RNA, 19 nt, Artificial Sequence
  Description of Artificial Sequence: Synthetic oligonucleotide
  Antisense strand to SEQ ID NO: 1013392
aauacgaguaaauacuuga

SEQ ID NO: 1013394 - RNA, 19 nt, Artificial Sequence
  Description of Artificial Sequence: Synthetic oligonucleotide
  Sense strand starting at position 1731 of SEQ ID NO: 914561
cgaacaugucuggagcagu

SEQ ID NO: 1013395 - RNA, 19 nt, Artificial Sequence
  Description of Artificial Sequence: Synthetic oligonucleotide
  Antisense strand to SEQ ID NO: 1013394
acugcuccagacauguucg

SEQ ID NO: 1013396 - RNA, 19 nt, Artificial Sequence
  Description of Artificial Sequence: Synthetic oligonucleotide
  Sense strand starting at position 2027 of SEQ ID NO: 914561
guggcuuccgcauuaacuu

SEQ ID NO: 1013397 - RNA, 19 nt, Artificial Sequence
  Description of Artificial Sequence: Synthetic oligonucleotide
  Antisense strand to SEQ ID NO: 1013396
aaguuaaugcggaagccac

SEQ ID NO: 1013398 - RNA, 19 nt, Artificial Sequence
  Description of Artificial Sequence: Synthetic oligonucleotide
  Sense strand starting at position 2062 of SEQ ID NO: 914561
ggcuaauuucgcgacucug

SEQ ID NO: 1013399 - RNA, 19 nt, Artificial Sequence
  Description of Artificial Sequence: Synthetic oligonucleotide
  Antisense strand to SEQ ID NO: 1013398
cagagucgcgaaauuagcc

SEQ ID NO: 1013400 - RNA, 19 nt, Artificial Sequence
  Description of Artificial Sequence: Synthetic oligonucleotide
  Sense strand starting at position 2079 of SEQ ID NO: 914561
ugguuauuccgagcgugca

SEQ ID NO: 1013401 - RNA, 19 nt, Artificial Sequence
  Description of Artificial Sequence: Synthetic oligonucleotide
  Antisense strand to SEQ ID NO: 1013400
ugcacgcucggaauaacca

SEQ ID NO: 1013402 - RNA, 19 nt, Artificial Sequence
  Description of Artificial Sequence: Synthetic oligonucleotide
  Sense strand starting at position 2281 of SEQ ID NO: 914561
cugauugcaggucagcaau

SEQ ID NO: 1013403 - RNA, 19 nt, Artificial Sequence
  Description of Artificial Sequence: Synthetic oligonucleotide
  Antisense strand to SEQ ID NO: 1013402
auugcugaccugcaaucag

SEQ ID NO: 1013404 - RNA, 19 nt, Artificial Sequence
  Description of Artificial Sequence: Synthetic oligonucleotide
  Sense strand starting at position 2333 of SEQ ID NO: 914561
uaaggacuccguggagguu

SEQ ID NO: 1013405 - RNA, 19 nt, Artificial Sequence
  Description of Artificial Sequence: Synthetic oligonucleotide
  Antisense strand to SEQ ID NO: 1013404
aaccuccacggaguccuua

SEQ ID NO: 1013406 - RNA, 19 nt, Artificial Sequence
  Description of Artificial Sequence: Synthetic oligonucleotide
  Sense strand starting at position 2435 of SEQ ID NO: 914561
ucgacucuuguguagaaag

SEQ ID NO: 1013407 - RNA, 19 nt, Artificial Sequence
  Description of Artificial Sequence: Synthetic oligonucleotide
  Antisense strand to SEQ ID NO: 1013406
cuuucuacacaagagucga

SEQ ID NO: 1013408 - RNA, 19 nt, Artificial Sequence
  Description of Artificial Sequence: Synthetic oligonucleotide
  Sense strand starting at position 2437 of SEQ ID NO: 914561
gacucuuguguagaaagcu

SEQ ID NO: 1013409 - RNA, 19 nt, Artificial Sequence
  Description of Artificial Sequence: Synthetic oligonucleotide
  Antisense strand to SEQ ID NO: 1013408
agcuuucuacacaagaguc

SEQ ID NO: 1013410 - RNA, 19 nt, Artificial Sequence
  Description of Artificial Sequence: Synthetic oligonucleotide
  Sense strand starting at position 2459 of SEQ ID NO: 914561
aagucugagaccuggguuu

SEQ ID NO: 1013411 - RNA, 19 nt, Artificial Sequence
  Description of Artificial Sequence: Synthetic oligonucleotide
  Antisense strand to SEQ ID NO: 1013410
aaacccaggucucagacuu

SEQ ID NO: 1013412 - RNA, 19 nt, Artificial Sequence
  Description of Artificial Sequence: Synthetic oligonucleotide
  Sense strand starting at position 2499 of SEQ ID NO: 914561
guuccuugacugcaaagua

SEQ ID NO: 1013413 - RNA, 19 nt, Artificial Sequence
  Description of Artificial Sequence: Synthetic oligonucleotide
  Antisense strand to SEQ ID NO: 1013412
uacuuugcagucaaggaac

SEQ ID NO: 1013414 - RNA, 19 nt, Artificial Sequence
  Description of Artificial Sequence: Synthetic oligonucleotide
  Sense strand starting at position 2516 of SEQ ID NO: 914561
uagguauaauuguuuguag

SEQ ID NO: 1013415 - RNA, 19 nt, Artificial Sequence
  Description of Artificial Sequence: Synthetic oligonucleotide
  Antisense strand to SEQ ID NO: 1013414
cuacaaacaauuauaccua

SEQ ID NO: 1013416 - RNA, 19 nt, Artificial Sequence
  Description of Artificial Sequence: Synthetic oligonucleotide
  Sense strand starting at position 2594 of SEQ ID NO: 914561
agcuuucuggccuauagau

SEQ ID NO: 1013417 - RNA, 19 nt, Artificial Sequence
  Description of Artificial Sequence: Synthetic oligonucleotide
  Antisense strand to SEQ ID NO: 1013416
aucuauaggccagaaagcu

SEQ ID NO: 1013418 - RNA, 19 nt, Artificial Sequence
  Description of Artificial Sequence: Synthetic oligonucleotide
  Sense strand starting at position 2600 of SEQ ID NO: 914561
cuggccuauagaugggaau

SEQ ID NO: 1013419 - RNA, 19 nt, Artificial Sequence
  Description of Artificial Sequence: Synthetic oligonucleotide
  Antisense strand to SEQ ID NO: 1013418
auucccaucuauaggccag

SEQ ID NO: 1013420 - RNA, 19 nt, Artificial Sequence
  Description of Artificial Sequence: Synthetic oligonucleotide
  Sense strand starting at position 2601 of SEQ ID NO: 914561
uggccuauagaugggaaua

SEQ ID NO: 1013421 - RNA, 19 nt, Artificial Sequence
  Description of Artificial Sequence: Synthetic oligonucleotide
  Antisense strand to SEQ ID NO: 1013420
uauucccaucuauaggcca

SEQ ID NO: 1013422 - RNA, 19 nt, Artificial Sequence
  Description of Artificial Sequence: Synthetic oligonucleotide
  Sense strand starting at position 2665 of SEQ ID NO: 914561
agaacaguaccuggcauua

SEQ ID NO: 1013423 - RNA, 19 nt, Artificial Sequence
  Description of Artificial Sequence: Synthetic oligonucleotide
  Antisense strand to SEQ ID NO: 1013422
uaaugccagguacuguucu

SEQ ID NO: 1013424 - RNA, 19 nt, Artificial Sequence
  Description of Artificial Sequence: Synthetic oligonucleotide
  Sense strand starting at position 2670 of SEQ ID NO: 914561
aguaccuggcauuaagauu

SEQ ID NO: 1013425 - RNA, 19 nt, Artificial Sequence
  Description of Artificial Sequence: Synthetic oligonucleotide
  Antisense strand to SEQ ID NO: 1013424
aaucuuaaugccagguacu

SEQ ID NO: 1013426 - RNA, 19 nt, Artificial Sequence
  Description of Artificial Sequence: Synthetic oligonucleotide
  Sense strand starting at position 3349 of SEQ ID NO: 914561
ccauuuaagcgucaucguu

SEQ ID NO: 1013427 - RNA, 19 nt, Artificial Sequence
  Description of Artificial Sequence: Synthetic oligonucleotide
  Antisense strand to SEQ ID NO: 1013426
aacgaugacgcuuaaaugg

SEQ ID NO: 1013428 - RNA, 19 nt, Artificial Sequence
  Description of Artificial Sequence: Synthetic oligonucleotide
  Sense strand starting at position 3351 of SEQ ID NO: 914561
auuuaagcgucaucguuag

SEQ ID NO: 1013429 - RNA, 19 nt, Artificial Sequence
  Description of Artificial Sequence: Synthetic oligonucleotide
  Antisense strand to SEQ ID NO: 1013428
cuaacgaugacgcuuaaau

SEQ ID NO: 1013430 - RNA, 19 nt, Artificial Sequence
  Description of Artificial Sequence: Synthetic oligonucleotide
  Sense strand starting at position 3356 of SEQ ID NO: 914561
agcgucaucguuagauguc

SEQ ID NO: 1013431 - RNA, 19 nt, Artificial Sequence
  Description of Artificial Sequence: Synthetic oligonucleotide
  Antisense strand to SEQ ID NO: 1013430
gacaucuaacgaugacgcu

SEQ ID NO: 1013432 - RNA, 19 nt, Artificial Sequence
  Description of Artificial Sequence: Synthetic oligonucleotide
  Sense strand starting at position 3610 of SEQ ID NO: 914561
uuaucucugcaauggaaua

SEQ ID NO: 1013433 - RNA, 19 nt, Artificial Sequence
  Description of Artificial Sequence: Synthetic oligonucleotide
  Antisense strand to SEQ ID NO: 1013432
uauuccauugcagagauaa

SEQ ID NO: 1013434 - RNA, 19 nt, Artificial Sequence
  Description of Artificial Sequence: Synthetic oligonucleotide
  Sense strand starting at position 3670 of SEQ ID NO: 914561
aggcaaccaccguauuaaa

SEQ ID NO: 1013435 - RNA, 19 nt, Artificial Sequence
  Description of Artificial Sequence: Synthetic oligonucleotide
  Antisense strand to SEQ ID NO: 1013434
uuuaauacggugguugccu

SEQ ID NO: 1013436 - RNA, 19 nt, Artificial Sequence
  Description of Artificial Sequence: Synthetic oligonucleotide
  Sense strand starting at position 238 of SEQ ID NO: 914562
aguucuguuuccuccugaa

SEQ ID NO: 1013437 - RNA, 19 nt, Artificial Sequence
  Description of Artificial Sequence: Synthetic oligonucleotide
  Antisense strand to SEQ ID NO: 1013436
uucaggaggaaacagaacu

SEQ ID NO: 1013438 - RNA, 19 nt, Artificial Sequence
  Description of Artificial Sequence: Synthetic oligonucleotide
  Sense strand starting at position 320 of SEQ ID NO: 914562
aaggaagucuagucuuaaa

SEQ ID NO: 1013439 - RNA, 19 nt, Artificial Sequence
  Description of Artificial Sequence: Synthetic oligonucleotide
  Antisense strand to SEQ ID NO: 1013438
uuuaagacuagacuuccuu

SEQ ID NO: 1013440 - RNA, 19 nt, Artificial Sequence
  Description of Artificial Sequence: Synthetic oligonucleotide
  Sense strand starting at position 519 of SEQ ID NO: 914562
uacugaugaguuggcuaua

SEQ ID NO: 1013441 - RNA, 19 nt, Artificial Sequence
  Description of Artificial Sequence: Synthetic oligonucleotide
  Antisense strand to SEQ ID NO: 1013440
uauagccaacucaucagua

SEQ ID NO: 1013442 - RNA, 19 nt, Artificial Sequence
  Description of Artificial Sequence: Synthetic oligonucleotide
  Sense strand starting at position 520 of SEQ ID NO: 914562
acugaugaguuggcuauau

SEQ ID NO: 1013443 - RNA, 19 nt, Artificial Sequence
  Description of Artificial Sequence: Synthetic oligonucleotide
  Antisense strand to SEQ ID NO: 1013442
auauagccaacucaucagu

SEQ ID NO: 1013444 - RNA, 19 nt, Artificial Sequence
  Description of Artificial Sequence: Synthetic oligonucleotide
  Sense strand starting at position 522 of SEQ ID NO: 914562
ugaugaguuggcuauauaa

SEQ ID NO: 1013445 - RNA, 19 nt, Artificial Sequence
  Description of Artificial Sequence: Synthetic oligonucleotide
  Antisense strand to SEQ ID NO: 1013444
uuauauagccaacucauca

SEQ ID NO: 1013446 - RNA, 19 nt, Artificial Sequence
  Description of Artificial Sequence: Synthetic oligonucleotide
  Sense strand starting at position 524 of SEQ ID NO: 914562
augaguuggcuauauaauu

SEQ ID NO: 1013447 - RNA, 19 nt, Artificial Sequence
  Description of Artificial Sequence: Synthetic oligonucleotide
  Antisense strand to SEQ ID NO: 1013446
aauuauauagccaacucau

SEQ ID NO: 1013448 - RNA, 19 nt, Artificial Sequence
  Description of Artificial Sequence: Synthetic oligonucleotide
  Sense strand starting at position 843 of SEQ ID NO: 914562
ucagguauguugccacuuu

SEQ ID NO: 1013449 - RNA, 19 nt, Artificial Sequence
  Description of Artificial Sequence: Synthetic oligonucleotide
  Antisense strand to SEQ ID NO: 1013448
aaaguggcaacauaccuga

SEQ ID NO: 1013450 - RNA, 19 nt, Artificial Sequence
  Description of Artificial Sequence: Synthetic oligonucleotide
  Sense strand starting at position 914 of SEQ ID NO: 914562
uaaaccaaacguuaucgua

SEQ ID NO: 1013451 - RNA, 19 nt, Artificial Sequence
  Description of Artificial Sequence: Synthetic oligonucleotide
  Antisense strand to SEQ ID NO: 1013450
uacgauaacguuugguuua

SEQ ID NO: 1013452 - RNA, 19 nt, Artificial Sequence
  Description of Artificial Sequence: Synthetic oligonucleotide
  Sense strand starting at position 916 of SEQ ID NO: 914562
aaccaaacguuaucguauu

SEQ ID NO: 1013453 - RNA, 19 nt, Artificial Sequence
  Description of Artificial Sequence: Synthetic oligonucleotide
  Antisense strand to SEQ ID NO: 1013452
aauacgauaacguuugguu

SEQ ID NO: 1013454 - RNA, 19 nt, Artificial Sequence
  Description of Artificial Sequence: Synthetic oligonucleotide
  Sense strand starting at position 922 of SEQ ID NO: 914562
acguuaucguauuugcaga

SEQ ID NO: 1013455 - RNA, 19 nt, Artificial Sequence
  Description of Artificial Sequence: Synthetic oligonucleotide
  Antisense strand to SEQ ID NO: 1013454
ucugcaaauacgauaacgu

SEQ ID NO: 1013456 - RNA, 19 nt, Artificial Sequence
  Description of Artificial Sequence: Synthetic oligonucleotide
  Sense strand starting at position 923 of SEQ ID NO: 914562
cguuaucguauuugcagau

SEQ ID NO: 1013457 - RNA, 19 nt, Artificial Sequence
  Description of Artificial Sequence: Synthetic oligonucleotide
  Antisense strand to SEQ ID NO: 1013456
aucugcaaauacgauaacg

SEQ ID NO: 1013458 - RNA, 19 nt, Artificial Sequence
  Description of Artificial Sequence: Synthetic oligonucleotide
  Sense strand starting at position 924 of SEQ ID NO: 914562
guuaucguauuugcagauu

SEQ ID NO: 1013459 - RNA, 19 nt, Artificial Sequence
  Description of Artificial Sequence: Synthetic oligonucleotide
  Antisense strand to SEQ ID NO: 1013458
aaucugcaaauacgauaac

SEQ ID NO: 1013460 - RNA, 19 nt, Artificial Sequence
  Description of Artificial Sequence: Synthetic oligonucleotide
  Sense strand starting at position 969 of SEQ ID NO: 914562
uaucaaagguaguuuagaa

SEQ ID NO: 1013461 - RNA, 19 nt, Artificial Sequence
  Description of Artificial Sequence: Synthetic oligonucleotide
  Antisense strand to SEQ ID NO: 1013460
uucuaaacuaccuuugaua

SEQ ID NO: 1013462 - RNA, 19 nt, Artificial Sequence
  Description of Artificial Sequence: Synthetic oligonucleotide
  Sense strand starting at position 973 of SEQ ID NO: 914562
aaagguaguuuagaaggaa

SEQ ID NO: 1013463 - RNA, 19 nt, Artificial Sequence
  Description of Artificial Sequence: Synthetic oligonucleotide
  Antisense strand to SEQ ID NO: 1013462
uuccuucuaaacuaccuuu

SEQ ID NO: 1013464 - RNA, 19 nt, Artificial Sequence
  Description of Artificial Sequence: Synthetic oligonucleotide
  Sense strand starting at position 1057 of SEQ ID NO: 914562
cuacaucuagcaggagaau

SEQ ID NO: 1013465 - RNA, 19 nt, Artificial Sequence
  Description of Artificial Sequence: Synthetic oligonucleotide
  Antisense strand to SEQ ID NO: 1013464
auucuccugcuagauguag

SEQ ID NO: 1013466 - RNA, 19 nt, Artificial Sequence
  Description of Artificial Sequence: Synthetic oligonucleotide
  Sense strand starting at position 1259 of SEQ ID NO: 914562
ugaagaaccaucgguauaa

SEQ ID NO: 1013467 - RNA, 19 nt, Artificial Sequence
  Description of Artificial Sequence: Synthetic oligonucleotide
  Antisense strand to SEQ ID NO: 1013466
uuauaccgaugguucuuca

SEQ ID NO: 1013468 - RNA, 19 nt, Artificial Sequence
  Description of Artificial Sequence: Synthetic oligonucleotide
  Sense strand starting at position 1260 of SEQ ID NO: 914562
gaagaaccaucgguauaac

SEQ ID NO: 1013469 - RNA, 19 nt, Artificial Sequence
  Description of Artificial Sequence: Synthetic oligonucleotide
  Antisense strand to SEQ ID NO: 1013468
guuauaccgaugguucuuc

SEQ ID NO: 1013470 - RNA, 19 nt, Artificial Sequence
  Description of Artificial Sequence: Synthetic oligonucleotide
  Sense strand starting at position 1270 of SEQ ID NO: 914562
cgguauaacuggguuccga

SEQ ID NO: 1013471 - RNA, 19 nt, Artificial Sequence
  Description of Artificial Sequence: Synthetic oligonucleotide
  Antisense strand to SEQ ID NO: 1013470
ucggaacccaguuauaccg

SEQ ID NO: 1013472 - RNA, 19 nt, Artificial Sequence
  Description of Artificial Sequence: Synthetic oligonucleotide
  Sense strand starting at position 1367 of SEQ ID NO: 914562
auguuagcuuaauccagaa

SEQ ID NO: 1013473 - RNA, 19 nt, Artificial Sequence
  Description of Artificial Sequence: Synthetic oligonucleotide
  Antisense strand to SEQ ID NO: 1013472
uucuggauuaagcuaacau

SEQ ID NO: 1013474 - RNA, 19 nt, Artificial Sequence
  Description of Artificial Sequence: Synthetic oligonucleotide
  Sense strand starting at position 1479 of SEQ ID NO: 914562
gaccuagaaguuuguuucu

SEQ ID NO: 1013475 - RNA, 19 nt, Artificial Sequence
  Description of Artificial Sequence: Synthetic oligonucleotide
  Antisense strand to SEQ ID NO: 1013474
agaaacaaacuucuagguc

SEQ ID NO: 1013476 - RNA, 19 nt, Artificial Sequence
  Description of Artificial Sequence: Synthetic oligonucleotide
  Sense strand starting at position 1481 of SEQ ID NO: 914562
ccuagaaguuuguuucuag

SEQ ID NO: 1013477 - RNA, 19 nt, Artificial Sequence
  Description of Artificial Sequence: Synthetic oligonucleotide
  Antisense strand to SEQ ID NO: 1013476
cuagaaacaaacuucuagg

SEQ ID NO: 1013478 - RNA, 19 nt, Artificial Sequence
  Description of Artificial Sequence: Synthetic oligonucleotide
  Sense strand starting at position 1550 of SEQ ID NO: 914562
cgccaaaguacugaaagua

SEQ ID NO: 1013479 - RNA, 19 nt, Artificial Sequence
  Description of Artificial Sequence: Synthetic oligonucleotide
  Antisense strand to SEQ ID NO: 1013478
uacuuucaguacuuuggcg

SEQ ID NO: 1013480 - RNA, 19 nt, Artificial Sequence
  Description of Artificial Sequence: Synthetic oligonucleotide
  Sense strand starting at position 2005 of SEQ ID NO: 914562
gugagcuuccaauaggaac

SEQ ID NO: 1013481 - RNA, 19 nt, Artificial Sequence
  Description of Artificial Sequence: Synthetic oligonucleotide
  Antisense strand to SEQ ID NO: 1013480
guuccuauuggaagcucac

SEQ ID NO: 1013482 - RNA, 19 nt, Artificial Sequence
  Description of Artificial Sequence: Synthetic oligonucleotide
  Sense strand starting at position 2164 of SEQ ID NO: 914562
cuguacaaucucugaggaa

SEQ ID NO: 1013483 - RNA, 19 nt, Artificial Sequence
  Description of Artificial Sequence: Synthetic oligonucleotide
  Antisense strand to SEQ ID NO: 1013482
uuccucagagauuguacag

SEQ ID NO: 1013484 - RNA, 19 nt, Artificial Sequence
  Description of Artificial Sequence: Synthetic oligonucleotide
  Sense strand starting at position 2165 of SEQ ID NO: 914562
uguacaaucucugaggaau

SEQ ID NO: 1013485 - RNA, 19 nt, Artificial Sequence
  Description of Artificial Sequence: Synthetic oligonucleotide
  Antisense strand to SEQ ID NO: 1013484
auuccucagagauuguaca

SEQ ID NO: 1013486 - RNA, 19 nt, Artificial Sequence
  Description of Artificial Sequence: Synthetic oligonucleotide
  Sense strand starting at position 2177 of SEQ ID NO: 914562
gaggaauuacugcagagcu

SEQ ID NO: 1013487 - RNA, 19 nt, Artificial Sequence
  Description of Artificial Sequence: Synthetic oligonucleotide
  Antisense strand to SEQ ID NO: 1013486
agcucugcaguaauuccuc

SEQ ID NO: 1013488 - RNA, 19 nt, Artificial Sequence
  Description of Artificial Sequence: Synthetic oligonucleotide
  Sense strand starting at position 2179 of SEQ ID NO: 914562
ggaauuacugcagagcuga

SEQ ID NO: 1013489 - RNA, 19 nt, Artificial Sequence
  Description of Artificial Sequence: Synthetic oligonucleotide
  Antisense strand to SEQ ID NO: 1013488
ucagcucugcaguaauucc

SEQ ID NO: 1013490 - RNA, 19 nt, Artificial Sequence
  Description of Artificial Sequence: Synthetic oligonucleotide
  Sense strand starting at position 2238 of SEQ ID NO: 914562
uuuagaaugguacgccuaa

SEQ ID NO: 1013491 - RNA, 19 nt, Artificial Sequence
  Description of Artificial Sequence: Synthetic oligonucleotide
  Antisense strand to SEQ ID NO: 1013490
uuaggcguaccauucuaaa

SEQ ID NO: 1013492 - RNA, 19 nt, Artificial Sequence
  Description of Artificial Sequence: Synthetic oligonucleotide
  Sense strand starting at position 2256 of SEQ ID NO: 914562
agucucaguucucuuugau

SEQ ID NO: 1013493 - RNA, 19 nt, Artificial Sequence
  Description of Artificial Sequence: Synthetic oligonucleotide
  Antisense strand to SEQ ID NO: 1013492
aucaaagagaacugagacu

SEQ ID NO: 1013494 - RNA, 19 nt, Artificial Sequence
  Description of Artificial Sequence: Synthetic oligonucleotide
  Sense strand starting at position 2259 of SEQ ID NO: 914562
cucaguucucuuugaugau

SEQ ID NO: 1013495 - RNA, 19 nt, Artificial Sequence
  Description of Artificial Sequence: Synthetic oligonucleotide
  Antisense strand to SEQ ID NO: 1013494
aucaucaaagagaacugag

SEQ ID NO: 1013496 - RNA, 19 nt, Artificial Sequence
  Description of Artificial Sequence: Synthetic oligonucleotide
  Sense strand starting at position 2263 of SEQ ID NO: 914562
guucucuuugaugaugagu

SEQ ID NO: 1013497 - RNA, 19 nt, Artificial Sequence
  Description of Artificial Sequence: Synthetic oligonucleotide
  Antisense strand to SEQ ID NO: 1013496
acucaucaucaaagagaac

SEQ ID NO: 1013498 - RNA, 19 nt, Artificial Sequence
  Description of Artificial Sequence: Synthetic oligonucleotide
  Sense strand starting at position 2434 of SEQ ID NO: 914562
acuauauguugacugggau

SEQ ID NO: 1013499 - RNA, 19 nt, Artificial Sequence
  Description of Artificial Sequence: Synthetic oligonucleotide
  Antisense strand to SEQ ID NO: 1013498
aucccagucaacauauagu

SEQ ID NO: 1013500 - RNA, 19 nt, Artificial Sequence
  Description of Artificial Sequence: Synthetic oligonucleotide
  Sense strand starting at position 2435 of SEQ ID NO: 914562
cuauauguugacugggaug

SEQ ID NO: 1013501 - RNA, 19 nt, Artificial Sequence
  Description of Artificial Sequence: Synthetic oligonucleotide
  Antisense strand to SEQ ID NO: 1013500
caucccagucaacauauag

SEQ ID NO: 1013502 - RNA, 19 nt, Artificial Sequence
  Description of Artificial Sequence: Synthetic oligonucleotide
  Sense strand starting at position 2827 of SEQ ID NO: 914562
ugccuagacuuguuaacag

SEQ ID NO: 1013503 - RNA, 19 nt, Artificial Sequence
  Description of Artificial Sequence: Synthetic oligonucleotide
  Antisense strand to SEQ ID NO: 1013502
cuguuaacaagucuaggca

SEQ ID NO: 1013504 - RNA, 19 nt, Artificial Sequence
  Description of Artificial Sequence: Synthetic oligonucleotide
  Sense strand starting at position 2881 of SEQ ID NO: 914562
aauccacugggcuguuaaa

SEQ ID NO: 1013505 - RNA, 19 nt, Artificial Sequence
  Description of Artificial Sequence: Synthetic oligonucleotide
  Antisense strand to SEQ ID NO: 1013504
uuuaacagcccaguggauu

SEQ ID NO: 1013506 - RNA, 19 nt, Artificial Sequence
  Description of Artificial Sequence: Synthetic oligonucleotide
  Sense strand starting at position 2938 of SEQ ID NO: 914562
uaauguggguuuguuggaa

SEQ ID NO: 1013507 - RNA, 19 nt, Artificial Sequence
  Description of Artificial Sequence: Synthetic oligonucleotide
  Antisense strand to SEQ ID NO: 1013506
uuccaacaaacccacauua

SEQ ID NO: 1013508 - RNA, 19 nt, Artificial Sequence
  Description of Artificial Sequence: Synthetic oligonucleotide
  Sense strand starting at position 2982 of SEQ ID NO: 914562
gcaauauauuuagagggaa

SEQ ID NO: 1013509 - RNA, 19 nt, Artificial Sequence
  Description of Artificial Sequence: Synthetic oligonucleotide
  Antisense strand to SEQ ID NO: 1013508
uucccucuaaauauauugc

SEQ ID NO: 1013510 - RNA, 19 nt, Artificial Sequence
  Description of Artificial Sequence: Synthetic oligonucleotide
  Sense strand starting at position 3468 of SEQ ID NO: 914562
acuguuagaccaugaugga

SEQ ID NO: 1013511 - RNA, 19 nt, Artificial Sequence
  Description of Artificial Sequence: Synthetic oligonucleotide
  Antisense strand to SEQ ID NO: 1013510
uccaucauggucuaacagu

SEQ ID NO: 1013512 - RNA, 19 nt, Artificial Sequence
  Description of Artificial Sequence: Synthetic oligonucleotide
  Sense strand starting at position 3535 of SEQ ID NO: 914562
augguuauucccugauuac

SEQ ID NO: 1013513 - RNA, 19 nt, Artificial Sequence
  Description of Artificial Sequence: Synthetic oligonucleotide
  Antisense strand to SEQ ID NO: 1013512
guaaucagggaauaaccau

SEQ ID NO: 1013514 - RNA, 19 nt, Artificial Sequence
  Description of Artificial Sequence: Synthetic oligonucleotide
  Sense strand starting at position 3536 of SEQ ID NO: 914562
ugguuauucccugauuacu

SEQ ID NO: 1013515 - RNA, 19 nt, Artificial Sequence
  Description of Artificial Sequence: Synthetic oligonucleotide
  Antisense strand to SEQ ID NO: 1013514
aguaaucagggaauaacca

SEQ ID NO: 1013516 - RNA, 19 nt, Artificial Sequence
  Description of Artificial Sequence: Synthetic oligonucleotide
  Sense strand starting at position 32 of SEQ ID NO: 914563
aguagagcagcauaucauu

SEQ ID NO: 1013517 - RNA, 19 nt, Artificial Sequence
  Description of Artificial Sequence: Synthetic oligonucleotide
  Antisense strand to SEQ ID NO: 1013516
aaugauaugcugcucuacu

SEQ ID NO: 1013518 - RNA, 19 nt, Artificial Sequence
  Description of Artificial Sequence: Synthetic oligonucleotide
  Sense strand starting at position 137 of SEQ ID NO: 914563
uggcuauuacuauaucuga

SEQ ID NO: 1013519 - RNA, 19 nt, Artificial Sequence
  Description of Artificial Sequence: Synthetic oligonucleotide
  Antisense strand to SEQ ID NO: 1013518
ucagauauaguaauagcca

SEQ ID NO: 1013520 - RNA, 19 nt, Artificial Sequence
  Description of Artificial Sequence: Synthetic oligonucleotide
  Sense strand starting at position 206 of SEQ ID NO: 914563
augaauacugaccgccaaa

SEQ ID NO: 1013521 - RNA, 19 nt, Artificial Sequence
  Description of Artificial Sequence: Synthetic oligonucleotide
  Antisense strand to SEQ ID NO: 1013520
uuuggcggucaguauucau

SEQ ID NO: 1013522 - RNA, 19 nt, Artificial Sequence
  Description of Artificial Sequence: Synthetic oligonucleotide
  Sense strand starting at position 385 of SEQ ID NO: 914563
ucgugaauauaaucaacau

SEQ ID NO: 1013523 - RNA, 19 nt, Artificial Sequence
  Description of Artificial Sequence: Synthetic oligonucleotide
  Antisense strand to SEQ ID NO: 1013522
auguugauuauauucacga

SEQ ID NO: 1013524 - RNA, 19 nt, Artificial Sequence
  Description of Artificial Sequence: Synthetic oligonucleotide
  Sense strand starting at position 450 of SEQ ID NO: 914563
ccauguuaauguuuaagga

SEQ ID NO: 1013525 - RNA, 19 nt, Artificial Sequence
  Description of Artificial Sequence: Synthetic oligonucleotide
  Antisense strand to SEQ ID NO: 1013524
uccuuaaacauuaacaugg

SEQ ID NO: 1013526 - RNA, 19 nt, Artificial Sequence
  Description of Artificial Sequence: Synthetic oligonucleotide
  Sense strand starting at position 469 of SEQ ID NO: 914563
gcacaugacgaauagguua

SEQ ID NO: 1013527 - RNA, 19 nt, Artificial Sequence
  Description of Artificial Sequence: Synthetic oligonucleotide
  Antisense strand to SEQ ID NO: 1013526
uaaccuauucgucaugugc

SEQ ID NO: 1013528 - RNA, 19 nt, Artificial Sequence
  Description of Artificial Sequence: Synthetic oligonucleotide
  Sense strand starting at position 471 of SEQ ID NO: 914563
acaugacgaauagguuaua

SEQ ID NO: 1013529 - RNA, 19 nt, Artificial Sequence
  Description of Artificial Sequence: Synthetic oligonucleotide
  Antisense strand to SEQ ID NO: 1013528
uauaaccuauucgucaugu

SEQ ID NO: 1013530 - RNA, 19 nt, Artificial Sequence
  Description of Artificial Sequence: Synthetic oligonucleotide
  Sense strand starting at position 621 of SEQ ID NO: 914563
ccaaguaaagugcagauaa

SEQ ID NO: 1013531 - RNA, 19 nt, Artificial Sequence
  Description of Artificial Sequence: Synthetic oligonucleotide
  Antisense strand to SEQ ID NO: 1013530
uuaucugcacuuuacuugg

SEQ ID NO: 1013532 - RNA, 19 nt, Artificial Sequence
  Description of Artificial Sequence: Synthetic oligonucleotide
  Sense strand starting at position 651 of SEQ ID NO: 914563
acuauuaugccauaggucu

SEQ ID NO: 1013533 - RNA, 19 nt, Artificial Sequence
  Description of Artificial Sequence: Synthetic oligonucleotide
  Antisense strand to SEQ ID NO: 1013532
agaccuauggcauaauagu

SEQ ID NO: 1013534 - RNA, 19 nt, Artificial Sequence
  Description of Artificial Sequence: Synthetic oligonucleotide
  Sense strand starting at position 664 of SEQ ID NO: 914563
aggucugacuccuugagau

SEQ ID NO: 1013535 - RNA, 19 nt, Artificial Sequence
  Description of Artificial Sequence: Synthetic oligonucleotide
  Antisense strand to SEQ ID NO: 1013534
aucucaaggagucagaccu

SEQ ID NO: 1013536 - RNA, 19 nt, Artificial Sequence
  Description of Artificial Sequence: Synthetic oligonucleotide
  Sense strand starting at position 755 of SEQ ID NO: 914563
acagacaguccugacugua

SEQ ID NO: 1013537 - RNA, 19 nt, Artificial Sequence
  Description of Artificial Sequence: Synthetic oligonucleotide
  Antisense strand to SEQ ID NO: 1013536
uacagucaggacugucugu

SEQ ID NO: 1013538 - RNA, 19 nt, Artificial Sequence
  Description of Artificial Sequence: Synthetic oligonucleotide
  Sense strand starting at position 929 of SEQ ID NO: 914563
agcugagagcuuuacucag

SEQ ID NO: 1013539 - RNA, 19 nt, Artificial Sequence
  Description of Artificial Sequence: Synthetic oligonucleotide
  Antisense strand to SEQ ID NO: 1013538
cugaguaaagcucucagcu

SEQ ID NO: 1013540 - RNA, 19 nt, Artificial Sequence
  Description of Artificial Sequence: Synthetic oligonucleotide
  Sense strand starting at position 1031 of SEQ ID NO: 914563
ugggauaucucguugaagg

SEQ ID NO: 1013541 - RNA, 19 nt, Artificial Sequence
  Description of Artificial Sequence: Synthetic oligonucleotide
  Antisense strand to SEQ ID NO: 1013540
ccuucaacgagauauccca

SEQ ID NO: 1013542 - RNA, 19 nt, Artificial Sequence
  Description of Artificial Sequence: Synthetic oligonucleotide
  Sense strand starting at position 1032 of SEQ ID NO: 914563
gggauaucucguugaagga

SEQ ID NO: 1013543 - RNA, 19 nt, Artificial Sequence
  Description of Artificial Sequence: Synthetic oligonucleotide
  Antisense strand to SEQ ID NO: 1013542
uccuucaacgagauauccc

SEQ ID NO: 1013544 - RNA, 19 nt, Artificial Sequence
  Description of Artificial Sequence: Synthetic oligonucleotide
  Sense strand starting at position 1045 of SEQ ID NO: 914563
gaaggagaguugguguaga

SEQ ID NO: 1013545 - RNA, 19 nt, Artificial Sequence
  Description of Artificial Sequence: Synthetic oligonucleotide
  Antisense strand to SEQ ID NO: 1013544
ucuacaccaacucuccuuc

SEQ ID NO: 1013546 - RNA, 19 nt, Artificial Sequence
  Description of Artificial Sequence: Synthetic oligonucleotide
  Sense strand starting at position 1088 of SEQ ID NO: 914563
cgaguuucuaagggagaag

SEQ ID NO: 1013547 - RNA, 19 nt, Artificial Sequence
  Description of Artificial Sequence: Synthetic oligonucleotide
  Antisense strand to SEQ ID NO: 1013546
cuucucccuuagaaacucg

SEQ ID NO: 1013548 - RNA, 19 nt, Artificial Sequence
  Description of Artificial Sequence: Synthetic oligonucleotide
  Sense strand starting at position 1115 of SEQ ID NO: 914563
uccuauauauucccaggga

SEQ ID NO: 1013549 - RNA, 19 nt, Artificial Sequence
  Description of Artificial Sequence: Synthetic oligonucleotide
  Antisense strand to SEQ ID NO: 1013548
ucccugggaauauauagga

SEQ ID NO: 1013550 - RNA, 19 nt, Artificial Sequence
  Description of Artificial Sequence: Synthetic oligonucleotide
  Sense strand starting at position 1243 of SEQ ID NO: 914563
ccguggguugguuaggaaa

SEQ ID NO: 1013551 - RNA, 19 nt, Artificial Sequence
  Description of Artificial Sequence: Synthetic oligonucleotide
  Antisense strand to SEQ ID NO: 1013550
uuuccuaaccaacccacgg

SEQ ID NO: 1013552 - RNA, 19 nt, Artificial Sequence
  Description of Artificial Sequence: Synthetic oligonucleotide
  Sense strand starting at position 2068 of SEQ ID NO: 914563
uucccaagauuguuaggga

SEQ ID NO: 1013553 - RNA, 19 nt, Artificial Sequence
  Description of Artificial Sequence: Synthetic oligonucleotide
  Antisense strand to SEQ ID NO: 1013552
ucccuaacaaucuugggaa

SEQ ID NO: 1013554 - RNA, 19 nt, Artificial Sequence
  Description of Artificial Sequence: Synthetic oligonucleotide
  Sense strand starting at position 2091 of SEQ ID NO: 914563
ucagucauucguuucgcaa

SEQ ID NO: 1013555 - RNA, 19 nt, Artificial Sequence
  Description of Artificial Sequence: Synthetic oligonucleotide
  Antisense strand to SEQ ID NO: 1013554
uugcgaaacgaaugacuga

SEQ ID NO: 1013556 - RNA, 19 nt, Artificial Sequence
  Description of Artificial Sequence: Synthetic oligonucleotide
  Sense strand starting at position 2092 of SEQ ID NO: 914563
cagucauucguuucgcaac

SEQ ID NO: 1013557 - RNA, 19 nt, Artificial Sequence
  Description of Artificial Sequence: Synthetic oligonucleotide
  Antisense strand to SEQ ID NO: 1013556
guugcgaaacgaaugacug

SEQ ID NO: 1013558 - RNA, 19 nt, Artificial Sequence
  Description of Artificial Sequence: Synthetic oligonucleotide
  Sense strand starting at position 2183 of SEQ ID NO: 914563
acaauuaauucgguaauca

SEQ ID NO: 1013559 - RNA, 19 nt, Artificial Sequence
  Description of Artificial Sequence: Synthetic oligonucleotide
  Antisense strand to SEQ ID NO: 1013558
ugauuaccgaauuaauugu

SEQ ID NO: 1013560 - RNA, 19 nt, Artificial Sequence
  Description of Artificial Sequence: Synthetic oligonucleotide
  Sense strand starting at position 2234 of SEQ ID NO: 914563
cuucgaagcauguaagaag

SEQ ID NO: 1013561 - RNA, 19 nt, Artificial Sequence
  Description of Artificial Sequence: Synthetic oligonucleotide
  Antisense strand to SEQ ID NO: 1013560
cuucuuacaugcuucgaag

SEQ ID NO: 1013562 - RNA, 19 nt, Artificial Sequence
  Description of Artificial Sequence: Synthetic oligonucleotide
  Sense strand starting at position 2734 of SEQ ID NO: 914563
gaucucaguugccugauuu

SEQ ID NO: 1013563 - RNA, 19 nt, Artificial Sequence
  Description of Artificial Sequence: Synthetic oligonucleotide
  Antisense strand to SEQ ID NO: 1013562
aaaucaggcaacugagauc

SEQ ID NO: 1013564 - RNA, 19 nt, Artificial Sequence
  Description of Artificial Sequence: Synthetic oligonucleotide
  Sense strand starting at position 2866 of SEQ ID NO: 914563
ccuuaauuggauuagucau

SEQ ID NO: 1013565 - RNA, 19 nt, Artificial Sequence
  Description of Artificial Sequence: Synthetic oligonucleotide
  Antisense strand to SEQ ID NO: 1013564
augacuaauccaauuaagg

SEQ ID NO: 1013566 - RNA, 19 nt, Artificial Sequence
  Description of Artificial Sequence: Synthetic oligonucleotide
  Sense strand starting at position 2914 of SEQ ID NO: 914563
uagugaauacugcauugga

SEQ ID NO: 1013567 - RNA, 19 nt, Artificial Sequence
  Description of Artificial Sequence: Synthetic oligonucleotide
  Antisense strand to SEQ ID NO: 1013566
uccaaugcaguauucacua

SEQ ID NO: 1013568 - RNA, 19 nt, Artificial Sequence
  Description of Artificial Sequence: Synthetic oligonucleotide
  Sense strand starting at position 3125 of SEQ ID NO: 914563
gagugcuaugauugaauag

SEQ ID NO: 1013569 - RNA, 19 nt, Artificial Sequence
  Description of Artificial Sequence: Synthetic oligonucleotide
  Antisense strand to SEQ ID NO: 1013568
cuauucaaucauagcacuc

SEQ ID NO: 1013570 - RNA, 19 nt, Artificial Sequence
  Description of Artificial Sequence: Synthetic oligonucleotide
  Sense strand starting at position 3126 of SEQ ID NO: 914563
agugcuaugauugaauagu

SEQ ID NO: 1013571 - RNA, 19 nt, Artificial Sequence
  Description of Artificial Sequence: Synthetic oligonucleotide
  Antisense strand to SEQ ID NO: 1013570
acuauucaaucauagcacu

SEQ ID NO: 1013572 - RNA, 19 nt, Artificial Sequence
  Description of Artificial Sequence: Synthetic oligonucleotide
  Sense strand starting at position 3152 of SEQ ID NO: 914563
cucaguuuagagugggauu

SEQ ID NO: 1013573 - RNA, 19 nt, Artificial Sequence
  Description of Artificial Sequence: Synthetic oligonucleotide
  Antisense strand to SEQ ID NO: 1013572
aaucccacucuaaacugag

SEQ ID NO: 1013574 - RNA, 19 nt, Artificial Sequence
  Description of Artificial Sequence: Synthetic oligonucleotide
  Sense strand starting at position 3186 of SEQ ID NO: 914563
uuaaguugcaucugggaaa

SEQ ID NO: 1013575 - RNA, 19 nt, Artificial Sequence
  Description of Artificial Sequence: Synthetic oligonucleotide
  Antisense strand to SEQ ID NO: 1013574
uuucccagaugcaacuuaa

SEQ ID NO: 1013576 - RNA, 19 nt, Artificial Sequence
  Description of Artificial Sequence: Synthetic oligonucleotide
  Sense strand starting at position 3210 of SEQ ID NO: 914563
uaagguuuggcagguaaag

SEQ ID NO: 1013577 - RNA, 19 nt, Artificial Sequence
  Description of Artificial Sequence: Synthetic oligonucleotide
  Antisense strand to SEQ ID NO: 1013576
cuuuaccugccaaaccuua

SEQ ID NO: 1013578 - RNA, 19 nt, Artificial Sequence
  Description of Artificial Sequence: Synthetic oligonucleotide
  Sense strand starting at position 3212 of SEQ ID NO: 914563
agguuuggcagguaaagua

SEQ ID NO: 1013579 - RNA, 19 nt, Artificial Sequence
  Description of Artificial Sequence: Synthetic oligonucleotide
  Antisense strand to SEQ ID NO: 1013578
uacuuuaccugccaaaccu

SEQ ID NO: 1013580 - RNA, 19 nt, Artificial Sequence
  Description of Artificial Sequence: Synthetic oligonucleotide
  Sense strand starting at position 3296 of SEQ ID NO: 914563
aaggucaugugacuagaau

SEQ ID NO: 1013581 - RNA, 19 nt, Artificial Sequence
  Description of Artificial Sequence: Synthetic oligonucleotide
  Antisense strand to SEQ ID NO: 1013580
auucuagucacaugaccuu

SEQ ID NO: 1013582 - RNA, 19 nt, Artificial Sequence
  Description of Artificial Sequence: Synthetic oligonucleotide
  Sense strand starting at position 3302 of SEQ ID NO: 914563
augugacuagaauguagaa

SEQ ID NO: 1013583 - RNA, 19 nt, Artificial Sequence
  Description of Artificial Sequence: Synthetic oligonucleotide
  Antisense strand to SEQ ID NO: 1013582
uucuacauucuagucacau

SEQ ID NO: 1013584 - RNA, 19 nt, Artificial Sequence
  Description of Artificial Sequence: Synthetic oligonucleotide
  Sense strand starting at position 3339 of SEQ ID NO: 914563
augaguugaagcugauaua

SEQ ID NO: 1013585 - RNA, 19 nt, Artificial Sequence
  Description of Artificial Sequence: Synthetic oligonucleotide
  Antisense strand to SEQ ID NO: 1013584
uauaucagcuucaacucau

SEQ ID NO: 1013586 - RNA, 19 nt, Artificial Sequence
  Description of Artificial Sequence: Synthetic oligonucleotide
  Sense strand starting at position 3603 of SEQ ID NO: 914563
ugaagauaugugggagcuu

SEQ ID NO: 1013587 - RNA, 19 nt, Artificial Sequence
  Description of Artificial Sequence: Synthetic oligonucleotide
  Antisense strand to SEQ ID NO: 1013586
aagcucccacauaucuuca

SEQ ID NO: 1013588 - RNA, 19 nt, Artificial Sequence
  Description of Artificial Sequence: Synthetic oligonucleotide
  Sense strand starting at position 3846 of SEQ ID NO: 914563
caugcaaagugauugaaau

SEQ ID NO: 1013589 - RNA, 19 nt, Artificial Sequence
  Description of Artificial Sequence: Synthetic oligonucleotide
  Antisense strand to SEQ ID NO: 1013588
auuucaaucacuuugcaug

SEQ ID NO: 1013590 - RNA, 19 nt, Artificial Sequence
  Description of Artificial Sequence: Synthetic oligonucleotide
  Sense strand starting at position 3847 of SEQ ID NO: 914563
augcaaagugauugaaaug

SEQ ID NO: 1013591 - RNA, 19 nt, Artificial Sequence
  Description of Artificial Sequence: Synthetic oligonucleotide
  Antisense strand to SEQ ID NO: 1013590
cauuucaaucacuuugcau

SEQ ID NO: 1013592 - RNA, 19 nt, Artificial Sequence
  Description of Artificial Sequence: Synthetic oligonucleotide
  Sense strand starting at position 3857 of SEQ ID NO: 914563
auugaaaugcuuuaaguga

SEQ ID NO: 1013593 - RNA, 19 nt, Artificial Sequence
  Description of Artificial Sequence: Synthetic oligonucleotide
  Antisense strand to SEQ ID NO: 1013592
ucacuuaaagcauuucaau

SEQ ID NO: 1013594 - RNA, 19 nt, Artificial Sequence
  Description of Artificial Sequence: Synthetic oligonucleotide
  Sense strand starting at position 3977 of SEQ ID NO: 914563
ggccuaucacaugaguuua

SEQ ID NO: 1013595 - RNA, 19 nt, Artificial Sequence
  Description of Artificial Sequence: Synthetic oligonucleotide
  Antisense strand to SEQ ID NO: 1013594
uaaacucaugugauaggcc

SEQ ID NO: 1013596 - RNA, 19 nt, Artificial Sequence
  Description of Artificial Sequence: Synthetic oligonucleotide
  Sense strand starting at position 106 of SEQ ID NO: 914564
ggguaccuuucuccucaaa

SEQ ID NO: 1013597 - RNA, 19 nt, Artificial Sequence
  Description of Artificial Sequence: Synthetic oligonucleotide
  Antisense strand to SEQ ID NO: 1013596
uuugaggagaaagguaccc

SEQ ID NO: 1013598 - RNA, 19 nt, Artificial Sequence
  Description of Artificial Sequence: Synthetic oligonucleotide
  Sense strand starting at position 179 of SEQ ID NO: 914564
acuagaggucuguauccua

SEQ ID NO: 1013599 - RNA, 19 nt, Artificial Sequence
  Description of Artificial Sequence: Synthetic oligonucleotide
  Antisense strand to SEQ ID NO: 1013598
uaggauacagaccucuagu

SEQ ID NO: 1013600 - RNA, 19 nt, Artificial Sequence
  Description of Artificial Sequence: Synthetic oligonucleotide
  Sense strand starting at position 182 of SEQ ID NO: 914564
agaggucuguauccuauaa

SEQ ID NO: 1013601 - RNA, 19 nt, Artificial Sequence
  Description of Artificial Sequence: Synthetic oligonucleotide
  Antisense strand to SEQ ID NO: 1013600
uuauaggauacagaccucu

SEQ ID NO: 1013602 - RNA, 19 nt, Artificial Sequence
  Description of Artificial Sequence: Synthetic oligonucleotide
  Sense strand starting at position 203 of SEQ ID NO: 914564
ccaauuagugcugauagga

SEQ ID NO: 1013603 - RNA, 19 nt, Artificial Sequence
  Description of Artificial Sequence: Synthetic oligonucleotide
  Antisense strand to SEQ ID NO: 1013602
uccuaucagcacuaauugg

SEQ ID NO: 1013604 - RNA, 19 nt, Artificial Sequence
  Description of Artificial Sequence: Synthetic oligonucleotide
  Sense strand starting at position 216 of SEQ ID NO: 914564
auaggaaugauacguuuaa

SEQ ID NO: 1013605 - RNA, 19 nt, Artificial Sequence
  Description of Artificial Sequence: Synthetic oligonucleotide
  Antisense strand to SEQ ID NO: 1013604
uuaaacguaucauuccuau

SEQ ID NO: 1013606 - RNA, 19 nt, Artificial Sequence
  Description of Artificial Sequence: Synthetic oligonucleotide
  Sense strand starting at position 217 of SEQ ID NO: 914564
uaggaaugauacguuuaac

SEQ ID NO: 1013607 - RNA, 19 nt, Artificial Sequence
  Description of Artificial Sequence: Synthetic oligonucleotide
  Antisense strand to SEQ ID NO: 1013606
guuaaacguaucauuccua

SEQ ID NO: 1013608 - RNA, 19 nt, Artificial Sequence
  Description of Artificial Sequence: Synthetic oligonucleotide
  Sense strand starting at position 220 of SEQ ID NO: 914564
gaaugauacguuuaaccuu

SEQ ID NO: 1013609 - RNA, 19 nt, Artificial Sequence
  Description of Artificial Sequence: Synthetic oligonucleotide
  Antisense strand to SEQ ID NO: 1013608
aagguuaaacguaucauuc

SEQ ID NO: 1013610 - RNA, 19 nt, Artificial Sequence
  Description of Artificial Sequence: Synthetic oligonucleotide
  Sense strand starting at position 333 of SEQ ID NO: 914564
uguguccaucuggagaguu

SEQ ID NO: 1013611 - RNA, 19 nt, Artificial Sequence
  Description of Artificial Sequence: Synthetic oligonucleotide
  Antisense strand to SEQ ID NO: 1013610
aacucuccagauggacaca

SEQ ID NO: 1013612 - RNA, 19 nt, Artificial Sequence
  Description of Artificial Sequence: Synthetic oligonucleotide
  Sense strand starting at position 371 of SEQ ID NO: 914564
cauguuugagaguaaugcu

SEQ ID NO: 1013613 - RNA, 19 nt, Artificial Sequence
  Description of Artificial Sequence: Synthetic oligonucleotide
  Antisense strand to SEQ ID NO: 1013612
agcauuacucucaaacaug

SEQ ID NO: 1013614 - RNA, 19 nt, Artificial Sequence
  Description of Artificial Sequence: Synthetic oligonucleotide
  Sense strand starting at position 379 of SEQ ID NO: 914564
agaguaaugcucugacaug

SEQ ID NO: 1013615 - RNA, 19 nt, Artificial Sequence
  Description of Artificial Sequence: Synthetic oligonucleotide
  Antisense strand to SEQ ID NO: 1013614
caugucagagcauuacucu

SEQ ID NO: 1013616 - RNA, 19 nt, Artificial Sequence
  Description of Artificial Sequence: Synthetic oligonucleotide
  Sense strand starting at position 386 of SEQ ID NO: 914564
ugcucugacaugggagauu

SEQ ID NO: 1013617 - RNA, 19 nt, Artificial Sequence
  Description of Artificial Sequence: Synthetic oligonucleotide
  Antisense strand to SEQ ID NO: 1013616
aaucucccaugucagagca

SEQ ID NO: 1013618 - RNA, 19 nt, Artificial Sequence
  Description of Artificial Sequence: Synthetic oligonucleotide
  Sense strand starting at position 419 of SEQ ID NO: 914564
agugcaaauccugaucucu

SEQ ID NO: 1013619 - RNA, 19 nt, Artificial Sequence
  Description of Artificial Sequence: Synthetic oligonucleotide
  Antisense strand to SEQ ID NO: 1013618
agagaucaggauuugcacu

SEQ ID NO: 1013620 - RNA, 19 nt, Artificial Sequence
  Description of Artificial Sequence: Synthetic oligonucleotide
  Sense strand starting at position 859 of SEQ ID NO: 914564
cuuuguucuguugacaaga

SEQ ID NO: 1013621 - RNA, 19 nt, Artificial Sequence
  Description of Artificial Sequence: Synthetic oligonucleotide
  Antisense strand to SEQ ID NO: 1013620
ucuugucaacagaacaaag

SEQ ID NO: 1013622 - RNA, 19 nt, Artificial Sequence
  Description of Artificial Sequence: Synthetic oligonucleotide
  Sense strand starting at position 909 of SEQ ID NO: 914564
gaagucacaggcuguaaga

SEQ ID NO: 1013623 - RNA, 19 nt, Artificial Sequence
  Description of Artificial Sequence: Synthetic oligonucleotide
  Antisense strand to SEQ ID NO: 1013622
ucuuacagccugugacuuc

SEQ ID NO: 1013624 - RNA, 19 nt, Artificial Sequence
  Description of Artificial Sequence: Synthetic oligonucleotide
  Sense strand starting at position 949 of SEQ ID NO: 914564
ugacucuucuaacuaguga

SEQ ID NO: 1013625 - RNA, 19 nt, Artificial Sequence
  Description of Artificial Sequence: Synthetic oligonucleotide
  Antisense strand to SEQ ID NO: 1013624
ucacuaguuagaagaguca

SEQ ID NO: 1013626 - RNA, 19 nt, Artificial Sequence
  Description of Artificial Sequence: Synthetic oligonucleotide
  Sense strand starting at position 1016 of SEQ ID NO: 914564
guaaccauguuaucugaag

SEQ ID NO: 1013627 - RNA, 19 nt, Artificial Sequence
  Description of Artificial Sequence: Synthetic oligonucleotide
  Antisense strand to SEQ ID NO: 1013626
cuucagauaacaugguuac

SEQ ID NO: 1013628 - RNA, 19 nt, Artificial Sequence
  Description of Artificial Sequence: Synthetic oligonucleotide
  Sense strand starting at position 1022 of SEQ ID NO: 914564
auguuaucugaaggcauau

SEQ ID NO: 1013629 - RNA, 19 nt, Artificial Sequence
  Description of Artificial Sequence: Synthetic oligonucleotide
  Antisense strand to SEQ ID NO: 1013628
auaugccuucagauaacau

SEQ ID NO: 1013630 - RNA, 19 nt, Artificial Sequence
  Description of Artificial Sequence: Synthetic oligonucleotide
  Sense strand starting at position 1184 of SEQ ID NO: 914564
ccuugcaaugcaugaaaca

SEQ ID NO: 1013631 - RNA, 19 nt, Artificial Sequence
  Description of Artificial Sequence: Synthetic oligonucleotide
  Antisense strand to SEQ ID NO: 1013630
uguuucaugcauugcaagg

SEQ ID NO: 1013632 - RNA, 19 nt, Artificial Sequence
  Description of Artificial Sequence: Synthetic oligonucleotide
  Sense strand starting at position 1185 of SEQ ID NO: 914564
cuugcaaugcaugaaacaa

SEQ ID NO: 1013633 - RNA, 19 nt, Artificial Sequence
  Description of Artificial Sequence: Synthetic oligonucleotide
  Antisense strand to SEQ ID NO: 1013632
uuguuucaugcauugcaag

SEQ ID NO: 1013634 - RNA, 19 nt, Artificial Sequence
  Description of Artificial Sequence: Synthetic oligonucleotide
  Sense strand starting at position 1326 of SEQ ID NO: 914564
agucucugagcucaucuau

SEQ ID NO: 1013635 - RNA, 19 nt, Artificial Sequence
  Description of Artificial Sequence: Synthetic oligonucleotide
  Antisense strand to SEQ ID NO: 1013634
auagaugagcucagagacu

SEQ ID NO: 1013636 - RNA, 19 nt, Artificial Sequence
  Description of Artificial Sequence: Synthetic oligonucleotide
  Sense strand starting at position 1483 of SEQ ID NO: 914564
ucuugaucaaaguguugag

SEQ ID NO: 1013637 - RNA, 19 nt, Artificial Sequence
  Description of Artificial Sequence: Synthetic oligonucleotide
  Antisense strand to SEQ ID NO: 1013636
cucaacacuuugaucaaga

SEQ ID NO: 1013638 - RNA, 19 nt, Artificial Sequence
  Description of Artificial Sequence: Synthetic oligonucleotide
  Sense strand starting at position 1596 of SEQ ID NO: 914564
cccgaauccagucaagaug

SEQ ID NO: 1013639 - RNA, 19 nt, Artificial Sequence
  Description of Artificial Sequence: Synthetic oligonucleotide
  Antisense strand to SEQ ID NO: 1013638
caucuugacuggauucggg

SEQ ID NO: 1013640 - RNA, 19 nt, Artificial Sequence
  Description of Artificial Sequence: Synthetic oligonucleotide
  Sense strand starting at position 2359 of SEQ ID NO: 914564
agaucuagcaaguggaguu

SEQ ID NO: 1013641 - RNA, 19 nt, Artificial Sequence
  Description of Artificial Sequence: Synthetic oligonucleotide
  Antisense strand to SEQ ID NO: 1013640
aacuccacuugcuagaucu

SEQ ID NO: 1013642 - RNA, 19 nt, Artificial Sequence
  Description of Artificial Sequence: Synthetic oligonucleotide
  Sense strand starting at position 2576 of SEQ ID NO: 914564
gcuguuugccuguuugcau

SEQ ID NO: 1013643 - RNA, 19 nt, Artificial Sequence
  Description of Artificial Sequence: Synthetic oligonucleotide
  Antisense strand to SEQ ID NO: 1013642
augcaaacaggcaaacagc

SEQ ID NO: 1013644 - RNA, 19 nt, Artificial Sequence
  Description of Artificial Sequence: Synthetic oligonucleotide
  Sense strand starting at position 2678 of SEQ ID NO: 914564
ggcgcucucagagaugaua

SEQ ID NO: 1013645 - RNA, 19 nt, Artificial Sequence
  Description of Artificial Sequence: Synthetic oligonucleotide
  Antisense strand to SEQ ID NO: 1013644
uaucaucucugagagcgcc

SEQ ID NO: 1013646 - RNA, 19 nt, Artificial Sequence
  Description of Artificial Sequence: Synthetic oligonucleotide
  Sense strand starting at position 2797 of SEQ ID NO: 914564
ggagaaggcuggucuuaug

SEQ ID NO: 1013647 - RNA, 19 nt, Artificial Sequence
  Description of Artificial Sequence: Synthetic oligonucleotide
  Antisense strand to SEQ ID NO: 1013646
cauaagaccagccuucucc

SEQ ID NO: 1013648 - RNA, 19 nt, Artificial Sequence
  Description of Artificial Sequence: Synthetic oligonucleotide
  Sense strand starting at position 2847 of SEQ ID NO: 914564
aaauuauuagguggcacua

SEQ ID NO: 1013649 - RNA, 19 nt, Artificial Sequence
  Description of Artificial Sequence: Synthetic oligonucleotide
  Antisense strand to SEQ ID NO: 1013648
uagugccaccuaauaauuu

SEQ ID NO: 1013650 - RNA, 19 nt, Artificial Sequence
  Description of Artificial Sequence: Synthetic oligonucleotide
  Sense strand starting at position 3060 of SEQ ID NO: 914564
cuuugcacuggucacaaau

SEQ ID NO: 1013651 - RNA, 19 nt, Artificial Sequence
  Description of Artificial Sequence: Synthetic oligonucleotide
  Antisense strand to SEQ ID NO: 1013650
auuugugaccagugcaaag

SEQ ID NO: 1013652 - RNA, 19 nt, Artificial Sequence
  Description of Artificial Sequence: Synthetic oligonucleotide
  Sense strand starting at position 3177 of SEQ ID NO: 914564
cagaaaguguccuugagug

SEQ ID NO: 1013653 - RNA, 19 nt, Artificial Sequence
  Description of Artificial Sequence: Synthetic oligonucleotide
  Antisense strand to SEQ ID NO: 1013652
cacucaaggacacuuucug

SEQ ID NO: 1013654 - RNA, 19 nt, Artificial Sequence
  Description of Artificial Sequence: Synthetic oligonucleotide
  Sense strand starting at position 3265 of SEQ ID NO: 914564
ggaguuguccuugaaaguu

SEQ ID NO: 1013655 - RNA, 19 nt, Artificial Sequence
  Description of Artificial Sequence: Synthetic oligonucleotide
  Antisense strand to SEQ ID NO: 1013654
aacuuucaaggacaacucc

SEQ ID NO: 1013656 - RNA, 19 nt, Artificial Sequence
  Description of Artificial Sequence: Synthetic oligonucleotide
  Sense strand starting at position 3398 of SEQ ID NO: 914564
gaaagcugacauuguauaa

SEQ ID NO: 1013657 - RNA, 19 nt, Artificial Sequence
  Description of Artificial Sequence: Synthetic oligonucleotide
  Antisense strand to SEQ ID NO: 1013656
uuauacaaugucagcuuuc

SEQ ID NO: 1013658 - RNA, 19 nt, Artificial Sequence
  Description of Artificial Sequence: Synthetic oligonucleotide
  Sense strand starting at position 3402 of SEQ ID NO: 914564
gcugacauuguauaauuaa

SEQ ID NO: 1013659 - RNA, 19 nt, Artificial Sequence
  Description of Artificial Sequence: Synthetic oligonucleotide
  Antisense strand to SEQ ID NO: 1013658
uuaauuauacaaugucagc

SEQ ID NO: 1013660 - RNA, 19 nt, Artificial Sequence
  Description of Artificial Sequence: Synthetic oligonucleotide
  Sense strand starting at position 3467 of SEQ ID NO: 914564
cuuccugaaucucuaggaa

SEQ ID NO: 1013661 - RNA, 19 nt, Artificial Sequence
  Description of Artificial Sequence: Synthetic oligonucleotide
  Antisense strand to SEQ ID NO: 1013660
uuccuagagauucaggaag

SEQ ID NO: 1013662 - RNA, 19 nt, Artificial Sequence
  Description of Artificial Sequence: Synthetic oligonucleotide
  Sense strand starting at position 3470 of SEQ ID NO: 914564
ccugaaucucuaggaaggu

SEQ ID NO: 1013663 - RNA, 19 nt, Artificial Sequence
  Description of Artificial Sequence: Synthetic oligonucleotide
  Antisense strand to SEQ ID NO: 1013662
accuuccuagagauucagg

SEQ ID NO: 1013664 - RNA, 19 nt, Artificial Sequence
  Description of Artificial Sequence: Synthetic oligonucleotide
  Sense strand starting at position 3515 of SEQ ID NO: 914564
uuuguauuaggucaucaau

SEQ ID NO: 1013665 - RNA, 19 nt, Artificial Sequence
  Description of Artificial Sequence: Synthetic oligonucleotide
  Antisense strand to SEQ ID NO: 1013664
auugaugaccuaauacaaa

SEQ ID NO: 1013666 - RNA, 19 nt, Artificial Sequence
  Description of Artificial Sequence: Synthetic oligonucleotide
  Sense strand starting at position 3517 of SEQ ID NO: 914564
uguauuaggucaucaauau

SEQ ID NO: 1013667 - RNA, 19 nt, Artificial Sequence
  Description of Artificial Sequence: Synthetic oligonucleotide
  Antisense strand to SEQ ID NO: 1013666
auauugaugaccuaauaca

SEQ ID NO: 1013668 - RNA, 19 nt, Artificial Sequence
  Description of Artificial Sequence: Synthetic oligonucleotide
  Sense strand starting at position 3518 of SEQ ID NO: 914564
guauuaggucaucaauauu

SEQ ID NO: 1013669 - RNA, 19 nt, Artificial Sequence
  Description of Artificial Sequence: Synthetic oligonucleotide
  Antisense strand to SEQ ID NO: 1013668
aauauugaugaccuaauac

SEQ ID NO: 1013670 - RNA, 19 nt, Artificial Sequence
  Description of Artificial Sequence: Synthetic oligonucleotide
  Sense strand starting at position 3540 of SEQ ID NO: 914564
gagccaguuuagguggaaa

SEQ ID NO: 1013671 - RNA, 19 nt, Artificial Sequence
  Description of Artificial Sequence: Synthetic oligonucleotide
  Antisense strand to SEQ ID NO: 1013670
uuuccaccuaaacuggcuc

SEQ ID NO: 1013672 - RNA, 19 nt, Artificial Sequence
  Description of Artificial Sequence: Synthetic oligonucleotide
  Sense strand starting at position 3554 of SEQ ID NO: 914564
ggaaauuucuuugaugaau

SEQ ID NO: 1013673 - RNA, 19 nt, Artificial Sequence
  Description of Artificial Sequence: Synthetic oligonucleotide
  Antisense strand to SEQ ID NO: 1013672
auucaucaaagaaauuucc

SEQ ID NO: 1013674 - RNA, 19 nt, Artificial Sequence
  Description of Artificial Sequence: Synthetic oligonucleotide
  Sense strand starting at position 3565 of SEQ ID NO: 914564
ugaugaauguaaucaaagc

SEQ ID NO: 1013675 - RNA, 19 nt, Artificial Sequence
  Description of Artificial Sequence: Synthetic oligonucleotide
  Antisense strand to SEQ ID NO: 1013674
gcuuugauuacauucauca

SEQ ID NO: 1013676 - RNA, 19 nt, Artificial Sequence
  Description of Artificial Sequence: Synthetic oligonucleotide
  Sense strand starting at position 486 of SEQ ID NO: 914565
uugagaguacaaggucaua

SEQ ID NO: 1013677 - RNA, 19 nt, Artificial Sequence
  Description of Artificial Sequence: Synthetic oligonucleotide
  Antisense strand to SEQ ID NO: 1013676
uaugaccuuguacucucaa

SEQ ID NO: 1013678 - RNA, 19 nt, Artificial Sequence
  Description of Artificial Sequence: Synthetic oligonucleotide
  Sense strand starting at position 528 of SEQ ID NO: 914565
gggcgugaucccggaagau

SEQ ID NO: 1013679 - RNA, 19 nt, Artificial Sequence
  Description of Artificial Sequence: Synthetic oligonucleotide
  Antisense strand to SEQ ID NO: 1013678
aucuuccgggaucacgccc

SEQ ID NO: 1013680 - RNA, 19 nt, Artificial Sequence
  Description of Artificial Sequence: Synthetic oligonucleotide
  Sense strand starting at position 529 of SEQ ID NO: 914565
ggcgugaucccggaagaug

SEQ ID NO: 1013681 - RNA, 19 nt, Artificial Sequence
  Description of Artificial Sequence: Synthetic oligonucleotide
  Antisense strand to SEQ ID NO: 1013680
caucuuccgggaucacgcc

SEQ ID NO: 1013682 - RNA, 19 nt, Artificial Sequence
  Description of Artificial Sequence: Synthetic oligonucleotide
  Sense strand starting at position 537 of SEQ ID NO: 914565
cccggaagaugagauuauu

SEQ ID NO: 1013683 - RNA, 19 nt, Artificial Sequence
  Description of Artificial Sequence: Synthetic oligonucleotide
  Antisense strand to SEQ ID NO: 1013682
aauaaucucaucuuccggg

SEQ ID NO: 1013684 - RNA, 19 nt, Artificial Sequence
  Description of Artificial Sequence: Synthetic oligonucleotide
  Sense strand starting at position 543 of SEQ ID NO: 914565
agaugagauuauugccuaa

SEQ ID NO: 1013685 - RNA, 19 nt, Artificial Sequence
  Description of Artificial Sequence: Synthetic oligonucleotide
  Antisense strand to SEQ ID NO: 1013684
uuaggcaauaaucucaucu

SEQ ID NO: 1013686 - RNA, 19 nt, Artificial Sequence
  Description of Artificial Sequence: Synthetic oligonucleotide
  Sense strand starting at position 545 of SEQ ID NO: 914565
augagauuauugccuaaga

SEQ ID NO: 1013687 - RNA, 19 nt, Artificial Sequence
  Description of Artificial Sequence: Synthetic oligonucleotide
  Antisense strand to SEQ ID NO: 1013686
ucuuaggcaauaaucucau

SEQ ID NO: 1013688 - RNA, 19 nt, Artificial Sequence
  Description of Artificial Sequence: Synthetic oligonucleotide
  Sense strand starting at position 546 of SEQ ID NO: 914565
ugagauuauugccuaagag

SEQ ID NO: 1013689 - RNA, 19 nt, Artificial Sequence
  Description of Artificial Sequence: Synthetic oligonucleotide
  Antisense strand to SEQ ID NO: 1013688
cucuuaggcaauaaucuca

SEQ ID NO: 1013690 - RNA, 19 nt, Artificial Sequence
  Description of Artificial Sequence: Synthetic oligonucleotide
  Sense strand starting at position 547 of SEQ ID NO: 914565
gagauuauugccuaagagc

SEQ ID NO: 1013691 - RNA, 19 nt, Artificial Sequence
  Description of Artificial Sequence: Synthetic oligonucleotide
  Antisense strand to SEQ ID NO: 1013690
gcucuuaggcaauaaucuc

SEQ ID NO: 1013692 - RNA, 19 nt, Artificial Sequence
  Description of Artificial Sequence: Synthetic oligonucleotide
  Sense strand starting at position 573 of SEQ ID NO: 914565
cuggaagagcuccagguuu

SEQ ID NO: 1013693 - RNA, 19 nt, Artificial Sequence
  Description of Artificial Sequence: Synthetic oligonucleotide
  Antisense strand to SEQ ID NO: 1013692
aaaccuggagcucuuccag

SEQ ID NO: 1013694 - RNA, 19 nt, Artificial Sequence
  Description of Artificial Sequence: Synthetic oligonucleotide
  Sense strand starting at position 623 of SEQ ID NO: 914565
ccaggaagcagguguaaua

SEQ ID NO: 1013695 - RNA, 19 nt, Artificial Sequence
  Description of Artificial Sequence: Synthetic oligonucleotide
  Antisense strand to SEQ ID NO: 1013694
uauuacaccugcuuccugg

SEQ ID NO: 1013696 - RNA, 19 nt, Artificial Sequence
  Description of Artificial Sequence: Synthetic oligonucleotide
  Sense strand starting at position 640 of SEQ ID NO: 914565
uaguaucagucgcacaaga

SEQ ID NO: 1013697 - RNA, 19 nt, Artificial Sequence
  Description of Artificial Sequence: Synthetic oligonucleotide
  Antisense strand to SEQ ID NO: 1013696
ucuugugcgacugauacua

SEQ ID NO: 1013698 - RNA, 19 nt, Artificial Sequence
  Description of Artificial Sequence: Synthetic oligonucleotide
  Sense strand starting at position 668 of SEQ ID NO: 914565
gggugagggcuuggauuca

SEQ ID NO: 1013699 - RNA, 19 nt, Artificial Sequence
  Description of Artificial Sequence: Synthetic oligonucleotide
  Antisense strand to SEQ ID NO: 1013698
ugaauccaagcccucaccc

SEQ ID NO: 1013700 - RNA, 19 nt, Artificial Sequence
  Description of Artificial Sequence: Synthetic oligonucleotide
  Sense strand starting at position 1305 of SEQ ID NO: 914565
cagcccagggccugugaua

SEQ ID NO: 1013701 - RNA, 19 nt, Artificial Sequence
  Description of Artificial Sequence: Synthetic oligonucleotide
  Antisense strand to SEQ ID NO: 1013700
uaucacaggcccugggcug

SEQ ID NO: 1013702 - RNA, 19 nt, Artificial Sequence
  Description of Artificial Sequence: Synthetic oligonucleotide
  Sense strand starting at position 1420 of SEQ ID NO: 914565
ugaccuaggucuccagcaa

SEQ ID NO: 1013703 - RNA, 19 nt, Artificial Sequence
  Description of Artificial Sequence: Synthetic oligonucleotide
  Antisense strand to SEQ ID NO: 1013702
uugcuggagaccuagguca

SEQ ID NO: 1013704 - RNA, 19 nt, Artificial Sequence
  Description of Artificial Sequence: Synthetic oligonucleotide
  Sense strand starting at position 1530 of SEQ ID NO: 914565
gucugcaguccucaaggua

SEQ ID NO: 1013705 - RNA, 19 nt, Artificial Sequence
  Description of Artificial Sequence: Synthetic oligonucleotide
  Antisense strand to SEQ ID NO: 1013704
uaccuugaggacugcagac

SEQ ID NO: 1013706 - RNA, 19 nt, Artificial Sequence
  Description of Artificial Sequence: Synthetic oligonucleotide
  Sense strand starting at position 1533 of SEQ ID NO: 914565
ugcaguccucaagguacaa

SEQ ID NO: 1013707 - RNA, 19 nt, Artificial Sequence
  Description of Artificial Sequence: Synthetic oligonucleotide
  Antisense strand to SEQ ID NO: 1013706
uuguaccuugaggacugca

SEQ ID NO: 1013708 - RNA, 19 nt, Artificial Sequence
  Description of Artificial Sequence: Synthetic oligonucleotide
  Sense strand starting at position 1907 of SEQ ID NO: 914565
gcgcuuauagccgggauga

SEQ ID NO: 1013709 - RNA, 19 nt, Artificial Sequence
  Description of Artificial Sequence: Synthetic oligonucleotide
  Antisense strand to SEQ ID NO: 1013708
ucaucccggcuauaagcgc

SEQ ID NO: 1013710 - RNA, 19 nt, Artificial Sequence
  Description of Artificial Sequence: Synthetic oligonucleotide
  Sense strand starting at position 2348 of SEQ ID NO: 914565
cuggaagccucuugcaaac

SEQ ID NO: 1013711 - RNA, 19 nt, Artificial Sequence
  Description of Artificial Sequence: Synthetic oligonucleotide
  Antisense strand to SEQ ID NO: 1013710
guuugcaagaggcuuccag

SEQ ID NO: 1013712 - RNA, 19 nt, Artificial Sequence
  Description of Artificial Sequence: Synthetic oligonucleotide
  Sense strand starting at position 2358 of SEQ ID NO: 914565
cuugcaaaccaagguuaaa

SEQ ID NO: 1013713 - RNA, 19 nt, Artificial Sequence
  Description of Artificial Sequence: Synthetic oligonucleotide
  Antisense strand to SEQ ID NO: 1013712
uuuaaccuugguuugcaag

SEQ ID NO: 1013714 - RNA, 19 nt, Artificial Sequence
  Description of Artificial Sequence: Synthetic oligonucleotide
  Sense strand starting at position 2499 of SEQ ID NO: 914565
ggcgcugugcuuagagacu

SEQ ID NO: 1013715 - RNA, 19 nt, Artificial Sequence
  Description of Artificial Sequence: Synthetic oligonucleotide
  Antisense strand to SEQ ID NO: 1013714
agucucuaagcacagcgcc

SEQ ID NO: 1013716 - RNA, 19 nt, Artificial Sequence
  Description of Artificial Sequence: Synthetic oligonucleotide
  Sense strand starting at position 2608 of SEQ ID NO: 914565
ggcaaaguauuccacccua

SEQ ID NO: 1013717 - RNA, 19 nt, Artificial Sequence
  Description of Artificial Sequence: Synthetic oligonucleotide
  Antisense strand to SEQ ID NO: 1013716
uaggguggaauacuuugcc

SEQ ID NO: 1013718 - RNA, 19 nt, Artificial Sequence
  Description of Artificial Sequence: Synthetic oligonucleotide
  Sense strand starting at position 3341 of SEQ ID NO: 914565
aggcgugaguaaucccacu

SEQ ID NO: 1013719 - RNA, 19 nt, Artificial Sequence
  Description of Artificial Sequence: Synthetic oligonucleotide
  Antisense strand to SEQ ID NO: 1013718
agugggauuacucacgccu

SEQ ID NO: 1013720 - RNA, 19 nt, Artificial Sequence
  Description of Artificial Sequence: Synthetic oligonucleotide
  Sense strand starting at position 3508 of SEQ ID NO: 914565
uguaacaucugucucugua

SEQ ID NO: 1013721 - RNA, 19 nt, Artificial Sequence
  Description of Artificial Sequence: Synthetic oligonucleotide
  Antisense strand to SEQ ID NO: 1013720
uacagagacagauguuaca

SEQ ID NO: 1013722 - RNA, 19 nt, Artificial Sequence
  Description of Artificial Sequence: Synthetic oligonucleotide
  Sense strand starting at position 3551 of SEQ ID NO: 914565
uggugacuguugccuauaa

SEQ ID NO: 1013723 - RNA, 19 nt, Artificial Sequence
  Description of Artificial Sequence: Synthetic oligonucleotide
  Antisense strand to SEQ ID NO: 1013722
uuauaggcaacagucacca

SEQ ID NO: 1013724 - RNA, 19 nt, Artificial Sequence
  Description of Artificial Sequence: Synthetic oligonucleotide
  Sense strand starting at position 3552 of SEQ ID NO: 914565
ggugacuguugccuauaau

SEQ ID NO: 1013725 - RNA, 19 nt, Artificial Sequence
  Description of Artificial Sequence: Synthetic oligonucleotide
  Antisense strand to SEQ ID NO: 1013724
auuauaggcaacagucacc

SEQ ID NO: 1013726 - RNA, 19 nt, Artificial Sequence
  Description of Artificial Sequence: Synthetic oligonucleotide
  Sense strand starting at position 3553 of SEQ ID NO: 914565
gugacuguugccuauaauc

SEQ ID NO: 1013727 - RNA, 19 nt, Artificial Sequence
  Description of Artificial Sequence: Synthetic oligonucleotide
  Antisense strand to SEQ ID NO: 1013726
gauuauaggcaacagucac

SEQ ID NO: 1013728 - RNA, 19 nt, Artificial Sequence
  Description of Artificial Sequence: Synthetic oligonucleotide
  Sense strand starting at position 3609 of SEQ ID NO: 914565
agcugaagagcuugagauc

SEQ ID NO: 1013729 - RNA, 19 nt, Artificial Sequence
  Description of Artificial Sequence: Synthetic oligonucleotide
  Antisense strand to SEQ ID NO: 1013728
gaucucaagcucuucagcu

SEQ ID NO: 1013730 - RNA, 19 nt, Artificial Sequence
  Description of Artificial Sequence: Synthetic oligonucleotide
  Sense strand starting at position 3610 of SEQ ID NO: 914565
gcugaagagcuugagauca

SEQ ID NO: 1013731 - RNA, 19 nt, Artificial Sequence
  Description of Artificial Sequence: Synthetic oligonucleotide
  Antisense strand to SEQ ID NO: 1013730
ugaucucaagcucuucagc

SEQ ID NO: 1013732 - RNA, 19 nt, Artificial Sequence
  Description of Artificial Sequence: Synthetic oligonucleotide
  Sense strand starting at position 68 of SEQ ID NO: 914566
ccauguugucaaggacucu

SEQ ID NO: 1013733 - RNA, 19 nt, Artificial Sequence
  Description of Artificial Sequence: Synthetic oligonucleotide
  Antisense strand to SEQ ID NO: 1013732
agaguccuugacaacaugg

SEQ ID NO: 1013734 - RNA, 19 nt, Artificial Sequence
  Description of Artificial Sequence: Synthetic oligonucleotide
  Sense strand starting at position 460 of SEQ ID NO: 914566
uggcuucugagcgggaaga

SEQ ID NO: 1013735 - RNA, 19 nt, Artificial Sequence
  Description of Artificial Sequence: Synthetic oligonucleotide
  Antisense strand to SEQ ID NO: 1013734
ucuucccgcucagaagcca

SEQ ID NO: 1013736 - RNA, 19 nt, Artificial Sequence
  Description of Artificial Sequence: Synthetic oligonucleotide
  Sense strand starting at position 461 of SEQ ID NO: 914566
ggcuucugagcgggaagau

SEQ ID NO: 1013737 - RNA, 19 nt, Artificial Sequence
  Description of Artificial Sequence: Synthetic oligonucleotide
  Antisense strand to SEQ ID NO: 1013736
aucuucccgcucagaagcc

SEQ ID NO: 1013738 - RNA, 19 nt, Artificial Sequence
  Description of Artificial Sequence: Synthetic oligonucleotide
  Sense strand starting at position 462 of SEQ ID NO: 914566
gcuucugagcgggaagaua

SEQ ID NO: 1013739 - RNA, 19 nt, Artificial Sequence
  Description of Artificial Sequence: Synthetic oligonucleotide
  Antisense strand to SEQ ID NO: 1013738
uaucuucccgcucagaagc

SEQ ID NO: 1013740 - RNA, 19 nt, Artificial Sequence
  Description of Artificial Sequence: Synthetic oligonucleotide
  Sense strand starting at position 623 of SEQ ID NO: 914566
aaguccuguucugauagga

SEQ ID NO: 1013741 - RNA, 19 nt, Artificial Sequence
  Description of Artificial Sequence: Synthetic oligonucleotide
  Antisense strand to SEQ ID NO: 1013740
uccuaucagaacaggacuu

SEQ ID NO: 1013742 - RNA, 19 nt, Artificial Sequence
  Description of Artificial Sequence: Synthetic oligonucleotide
  Sense strand starting at position 677 of SEQ ID NO: 914566
ugacucauauguccgguua

SEQ ID NO: 1013743 - RNA, 19 nt, Artificial Sequence
  Description of Artificial Sequence: Synthetic oligonucleotide
  Antisense strand to SEQ ID NO: 1013742
uaaccggacauaugaguca

SEQ ID NO: 1013744 - RNA, 19 nt, Artificial Sequence
  Description of Artificial Sequence: Synthetic oligonucleotide
  Sense strand starting at position 678 of SEQ ID NO: 914566
gacucauauguccgguuau

SEQ ID NO: 1013745 - RNA, 19 nt, Artificial Sequence
  Description of Artificial Sequence: Synthetic oligonucleotide
  Antisense strand to SEQ ID NO: 1013744
auaaccggacauaugaguc

SEQ ID NO: 1013746 - RNA, 19 nt, Artificial Sequence
  Description of Artificial Sequence: Synthetic oligonucleotide
  Sense strand starting at position 691 of SEQ ID NO: 914566
gguuauagguaaugacaaa

SEQ ID NO: 1013747 - RNA, 19 nt, Artificial Sequence
  Description of Artificial Sequence: Synthetic oligonucleotide
  Antisense strand to SEQ ID NO: 1013746
uuugucauuaccuauaacc

SEQ ID NO: 1013748 - RNA, 19 nt, Artificial Sequence
  Description of Artificial Sequence: Synthetic oligonucleotide
  Sense strand starting at position 703 of SEQ ID NO: 914566
ugacaaaguucuugaagau

SEQ ID NO: 1013749 - RNA, 19 nt, Artificial Sequence
  Description of Artificial Sequence: Synthetic oligonucleotide
  Antisense strand to SEQ ID NO: 1013748
aucuucaagaacuuuguca

SEQ ID NO: 1013750 - RNA, 19 nt, Artificial Sequence
  Description of Artificial Sequence: Synthetic oligonucleotide
  Sense strand starting at position 761 of SEQ ID NO: 914566
agucuuuaggcugaccaga

SEQ ID NO: 1013751 - RNA, 19 nt, Artificial Sequence
  Description of Artificial Sequence: Synthetic oligonucleotide
  Antisense strand to SEQ ID NO: 1013750
ucuggucagccuaaagacu

SEQ ID NO: 1013752 - RNA, 19 nt, Artificial Sequence
  Description of Artificial Sequence: Synthetic oligonucleotide
  Sense strand starting at position 908 of SEQ ID NO: 914566
cugaaagucucguuucugu

SEQ ID NO: 1013753 - RNA, 19 nt, Artificial Sequence
  Description of Artificial Sequence: Synthetic oligonucleotide
  Antisense strand to SEQ ID NO: 1013752
acagaaacgagacuuucag

SEQ ID NO: 1013754 - RNA, 19 nt, Artificial Sequence
  Description of Artificial Sequence: Synthetic oligonucleotide
  Sense strand starting at position 921 of SEQ ID NO: 914566
uucuguugucuggaugguu

SEQ ID NO: 1013755 - RNA, 19 nt, Artificial Sequence
  Description of Artificial Sequence: Synthetic oligonucleotide
  Antisense strand to SEQ ID NO: 1013754
aaccauccagacaacagaa

SEQ ID NO: 1013756 - RNA, 19 nt, Artificial Sequence
  Description of Artificial Sequence: Synthetic oligonucleotide
  Sense strand starting at position 1138 of SEQ ID NO: 914566
gcaagaucuggccaagaug

SEQ ID NO: 1013757 - RNA, 19 nt, Artificial Sequence
  Description of Artificial Sequence: Synthetic oligonucleotide
  Antisense strand to SEQ ID NO: 1013756
caucuuggccagaucuugc

SEQ ID NO: 1013758 - RNA, 19 nt, Artificial Sequence
  Description of Artificial Sequence: Synthetic oligonucleotide
  Sense strand starting at position 2050 of SEQ ID NO: 914566
cugcgcguucucuuguuua

SEQ ID NO: 1013759 - RNA, 19 nt, Artificial Sequence
  Description of Artificial Sequence: Synthetic oligonucleotide
  Antisense strand to SEQ ID NO: 1013758
uaaacaagagaacgcgcag

SEQ ID NO: 1013760 - RNA, 19 nt, Artificial Sequence
  Description of Artificial Sequence: Synthetic oligonucleotide
  Sense strand starting at position 2052 of SEQ ID NO: 914566
gcgcguucucuuguuuaca

SEQ ID NO: 1013761 - RNA, 19 nt, Artificial Sequence
  Description of Artificial Sequence: Synthetic oligonucleotide
  Antisense strand to SEQ ID NO: 1013760
uguaaacaagagaacgcgc

SEQ ID NO: 1013762 - RNA, 19 nt, Artificial Sequence
  Description of Artificial Sequence: Synthetic oligonucleotide
  Sense strand starting at position 2122 of SEQ ID NO: 914566
ggcuaaagcuagucacuga

SEQ ID NO: 1013763 - RNA, 19 nt, Artificial Sequence
  Description of Artificial Sequence: Synthetic oligonucleotide
  Antisense strand to SEQ ID NO: 1013762
ucagugacuagcuuuagcc

SEQ ID NO: 1013764 - RNA, 19 nt, Artificial Sequence
  Description of Artificial Sequence: Synthetic oligonucleotide
  Sense strand starting at position 2129 of SEQ ID NO: 914566
gcuagucacugaccucuau

SEQ ID NO: 1013765 - RNA, 19 nt, Artificial Sequence
  Description of Artificial Sequence: Synthetic oligonucleotide
  Antisense strand to SEQ ID NO: 1013764
auagaggucagugacuagc

SEQ ID NO: 1013766 - RNA, 19 nt, Artificial Sequence
  Description of Artificial Sequence: Synthetic oligonucleotide
  Sense strand starting at position 2143 of SEQ ID NO: 914566
ucuaucacgugcuuguuau

SEQ ID NO: 1013767 - RNA, 19 nt, Artificial Sequence
  Description of Artificial Sequence: Synthetic oligonucleotide
  Antisense strand to SEQ ID NO: 1013766
auaacaagcacgugauaga

SEQ ID NO: 1013768 - RNA, 19 nt, Artificial Sequence
  Description of Artificial Sequence: Synthetic oligonucleotide
  Sense strand starting at position 2144 of SEQ ID NO: 914566
cuaucacgugcuuguuaua

SEQ ID NO: 1013769 - RNA, 19 nt, Artificial Sequence
  Description of Artificial Sequence: Synthetic oligonucleotide
  Antisense strand to SEQ ID NO: 1013768
uauaacaagcacgugauag

SEQ ID NO: 1013770 - RNA, 19 nt, Artificial Sequence
  Description of Artificial Sequence: Synthetic oligonucleotide
  Sense strand starting at position 2157 of SEQ ID NO: 914566
guuauauguuaggcaugau

SEQ ID NO: 1013771 - RNA, 19 nt, Artificial Sequence
  Description of Artificial Sequence: Synthetic oligonucleotide
  Antisense strand to SEQ ID NO: 1013770
aucaugccuaacauauaac

SEQ ID NO: 1013772 - RNA, 19 nt, Artificial Sequence
  Description of Artificial Sequence: Synthetic oligonucleotide
  Sense strand starting at position 2160 of SEQ ID NO: 914566
auauguuaggcaugauaug

SEQ ID NO: 1013773 - RNA, 19 nt, Artificial Sequence
  Description of Artificial Sequence: Synthetic oligonucleotide
  Antisense strand to SEQ ID NO: 1013772
cauaucaugccuaacauau

SEQ ID NO: 1013774 - RNA, 19 nt, Artificial Sequence
  Description of Artificial Sequence: Synthetic oligonucleotide
  Sense strand starting at position 2197 of SEQ ID NO: 914566
cguagcaaucucugaagua

SEQ ID NO: 1013775 - RNA, 19 nt, Artificial Sequence
  Description of Artificial Sequence: Synthetic oligonucleotide
  Antisense strand to SEQ ID NO: 1013774
uacuucagagauugcuacg

SEQ ID NO: 1013776 - RNA, 19 nt, Artificial Sequence
  Description of Artificial Sequence: Synthetic oligonucleotide
  Sense strand starting at position 2243 of SEQ ID NO: 914566
aaacgaggcuuggagagau

SEQ ID NO: 1013777 - RNA, 19 nt, Artificial Sequence
  Description of Artificial Sequence: Synthetic oligonucleotide
  Antisense strand to SEQ ID NO: 1013776
aucucuccaagccucguuu

SEQ ID NO: 1013778 - RNA, 19 nt, Artificial Sequence
  Description of Artificial Sequence: Synthetic oligonucleotide
  Sense strand starting at position 2569 of SEQ ID NO: 914566
gagaaauauuaaguggcuu

SEQ ID NO: 1013779 - RNA, 19 nt, Artificial Sequence
  Description of Artificial Sequence: Synthetic oligonucleotide
  Antisense strand to SEQ ID NO: 1013778
aagccacuuaauauuucuc

SEQ ID NO: 1013780 - RNA, 19 nt, Artificial Sequence
  Description of Artificial Sequence: Synthetic oligonucleotide
  Sense strand starting at position 2575 of SEQ ID NO: 914566
uauuaaguggcuugccaaa

SEQ ID NO: 1013781 - RNA, 19 nt, Artificial Sequence
  Description of Artificial Sequence: Synthetic oligonucleotide
  Antisense strand to SEQ ID NO: 1013780
uuuggcaagccacuuaaua

SEQ ID NO: 1013782 - RNA, 19 nt, Artificial Sequence
  Description of Artificial Sequence: Synthetic oligonucleotide
  Sense strand starting at position 2577 of SEQ ID NO: 914566
uuaaguggcuugccaaaua

SEQ ID NO: 1013783 - RNA, 19 nt, Artificial Sequence
  Description of Artificial Sequence: Synthetic oligonucleotide
  Antisense strand to SEQ ID NO: 1013782
uauuuggcaagccacuuaa

SEQ ID NO: 1013784 - RNA, 19 nt, Artificial Sequence
  Description of Artificial Sequence: Synthetic oligonucleotide
  Sense strand starting at position 2589 of SEQ ID NO: 914566
ccaaauaucugguaaggaa

SEQ ID NO: 1013785 - RNA, 19 nt, Artificial Sequence
  Description of Artificial Sequence: Synthetic oligonucleotide
  Antisense strand to SEQ ID NO: 1013784
uuccuuaccagauauuugg

SEQ ID NO: 1013786 - RNA, 19 nt, Artificial Sequence
  Description of Artificial Sequence: Synthetic oligonucleotide
  Sense strand starting at position 2597 of SEQ ID NO: 914566
cugguaaggaauugagcua

SEQ ID NO: 1013787 - RNA, 19 nt, Artificial Sequence
  Description of Artificial Sequence: Synthetic oligonucleotide
  Antisense strand to SEQ ID NO: 1013786
uagcucaauuccuuaccag

SEQ ID NO: 1013788 - RNA, 19 nt, Artificial Sequence
  Description of Artificial Sequence: Synthetic oligonucleotide
  Sense strand starting at position 2797 of SEQ ID NO: 914566
gguugagacugucccuuga

SEQ ID NO: 1013789 - RNA, 19 nt, Artificial Sequence
  Description of Artificial Sequence: Synthetic oligonucleotide
  Antisense strand to SEQ ID NO: 1013788
ucaagggacagucucaacc

SEQ ID NO: 1013790 - RNA, 19 nt, Artificial Sequence
  Description of Artificial Sequence: Synthetic oligonucleotide
  Sense strand starting at position 2799 of SEQ ID NO: 914566
uugagacugucccuugaag

SEQ ID NO: 1013791 - RNA, 19 nt, Artificial Sequence
  Description of Artificial Sequence: Synthetic oligonucleotide
  Antisense strand to SEQ ID NO: 1013790
cuucaagggacagucucaa

SEQ ID NO: 1013792 - RNA, 19 nt, Artificial Sequence
  Description of Artificial Sequence: Synthetic oligonucleotide
  Sense strand starting at position 2801 of SEQ ID NO: 914566
gagacugucccuugaagca

SEQ ID NO: 1013793 - RNA, 19 nt, Artificial Sequence
  Description of Artificial Sequence: Synthetic oligonucleotide
  Antisense strand to SEQ ID NO: 1013792
ugcuucaagggacagucuc

SEQ ID NO: 1013794 - RNA, 19 nt, Artificial Sequence
  Description of Artificial Sequence: Synthetic oligonucleotide
  Sense strand starting at position 2826 of SEQ ID NO: 914566
ugcuguguuccagggucua

SEQ ID NO: 1013795 - RNA, 19 nt, Artificial Sequence
  Description of Artificial Sequence: Synthetic oligonucleotide
  Antisense strand to SEQ ID NO: 1013794
uagacccuggaacacagca

SEQ ID NO: 1013796 - RNA, 19 nt, Artificial Sequence
  Description of Artificial Sequence: Synthetic oligonucleotide
  Sense strand starting at position 2861 of SEQ ID NO: 914566
acagaugcauuacaggaau

SEQ ID NO: 1013797 - RNA, 19 nt, Artificial Sequence
  Description of Artificial Sequence: Synthetic oligonucleotide
  Antisense strand to SEQ ID NO: 1013796
auuccuguaaugcaucugu

SEQ ID NO: 1013798 - RNA, 19 nt, Artificial Sequence
  Description of Artificial Sequence: Synthetic oligonucleotide
  Sense strand starting at position 3316 of SEQ ID NO: 914566
cugguaagacagugagacu

SEQ ID NO: 1013799 - RNA, 19 nt, Artificial Sequence
  Description of Artificial Sequence: Synthetic oligonucleotide
  Antisense strand to SEQ ID NO: 1013798
agucucacugucuuaccag

SEQ ID NO: 1013800 - RNA, 19 nt, Artificial Sequence
  Description of Artificial Sequence: Synthetic oligonucleotide
  Sense strand starting at position 3605 of SEQ ID NO: 914566
ggcauaguuaaaggauuac

SEQ ID NO: 1013801 - RNA, 19 nt, Artificial Sequence
  Description of Artificial Sequence: Synthetic oligonucleotide
  Antisense strand to SEQ ID NO: 1013800
guaauccuuuaacuaugcc

SEQ ID NO: 1013802 - RNA, 19 nt, Artificial Sequence
  Description of Artificial Sequence: Synthetic oligonucleotide
  Sense strand starting at position 3650 of SEQ ID NO: 914566
uuugcaacuuugccaguua

SEQ ID NO: 1013803 - RNA, 19 nt, Artificial Sequence
  Description of Artificial Sequence: Synthetic oligonucleotide
  Antisense strand to SEQ ID NO: 1013802
uaacuggcaaaguugcaaa

SEQ ID NO: 1013804 - RNA, 19 nt, Artificial Sequence
  Description of Artificial Sequence: Synthetic oligonucleotide
  Sense strand starting at position 3681 of SEQ ID NO: 914566
acaucacuaucauggaaug

SEQ ID NO: 1013805 - RNA, 19 nt, Artificial Sequence
  Description of Artificial Sequence: Synthetic oligonucleotide
  Antisense strand to SEQ ID NO: 1013804
cauuccaugauagugaugu

SEQ ID NO: 1013806 - RNA, 19 nt, Artificial Sequence
  Description of Artificial Sequence: Synthetic oligonucleotide
  Sense strand starting at position 3691 of SEQ ID NO: 914566
cauggaauguaagacugau

SEQ ID NO: 1013807 - RNA, 19 nt, Artificial Sequence
  Description of Artificial Sequence: Synthetic oligonucleotide
  Antisense strand to SEQ ID NO: 1013806
aucagucuuacauuccaug

SEQ ID NO: 1013808 - RNA, 19 nt, Artificial Sequence
  Description of Artificial Sequence: Synthetic oligonucleotide
  Sense strand starting at position 3932 of SEQ ID NO: 914566
cagugagacugauugagua

SEQ ID NO: 1013809 - RNA, 19 nt, Artificial Sequence
  Description of Artificial Sequence: Synthetic oligonucleotide
  Antisense strand to SEQ ID NO: 1013808
uacucaaucagucucacug

SEQ ID NO: 1013810 - RNA, 19 nt, Artificial Sequence
  Description of Artificial Sequence: Synthetic oligonucleotide
  Sense strand starting at position 3979 of SEQ ID NO: 914566
ggucuugugucaguuaaac

SEQ ID NO: 1013811 - RNA, 19 nt, Artificial Sequence
  Description of Artificial Sequence: Synthetic oligonucleotide
  Antisense strand to SEQ ID NO: 1013810
guuuaacugacacaagacc

SEQ ID NO: 1013812 - RNA, 19 nt, Artificial Sequence
  Description of Artificial Sequence: Synthetic oligonucleotide
  Sense strand starting at position 185 of SEQ ID NO: 914567
uuuccuucccugggaagua

SEQ ID NO: 1013813 - RNA, 19 nt, Artificial Sequence
  Description of Artificial Sequence: Synthetic oligonucleotide
  Antisense strand to SEQ ID NO: 1013812
uacuucccagggaaggaaa

SEQ ID NO: 1013814 - RNA, 19 nt, Artificial Sequence
  Description of Artificial Sequence: Synthetic oligonucleotide
  Sense strand starting at position 186 of SEQ ID NO: 914567
uuccuucccugggaaguaa

SEQ ID NO: 1013815 - RNA, 19 nt, Artificial Sequence
  Description of Artificial Sequence: Synthetic oligonucleotide
  Antisense strand to SEQ ID NO: 1013814
uuacuucccagggaaggaa

SEQ ID NO: 1013816 - RNA, 19 nt, Artificial Sequence
  Description of Artificial Sequence: Synthetic oligonucleotide
  Sense strand starting at position 398 of SEQ ID NO: 914567
ugagcaugcucuggaccaa

SEQ ID NO: 1013817 - RNA, 19 nt, Artificial Sequence
  Description of Artificial Sequence: Synthetic oligonucleotide
  Antisense strand to SEQ ID NO: 1013816
uugguccagagcaugcuca

SEQ ID NO: 1013818 - RNA, 19 nt, Artificial Sequence
  Description of Artificial Sequence: Synthetic oligonucleotide
  Sense strand starting at position 399 of SEQ ID NO: 914567
gagcaugcucuggaccaaa

SEQ ID NO: 1013819 - RNA, 19 nt, Artificial Sequence
  Description of Artificial Sequence: Synthetic oligonucleotide
  Antisense strand to SEQ ID NO: 1013818
uuugguccagagcaugcuc

SEQ ID NO: 1013820 - RNA, 19 nt, Artificial Sequence
  Description of Artificial Sequence: Synthetic oligonucleotide
  Sense strand starting at position 420 of SEQ ID NO: 914567
ggaguuguccuaggcugac

SEQ ID NO: 1013821 - RNA, 19 nt, Artificial Sequence
  Description of Artificial Sequence: Synthetic oligonucleotide
  Antisense strand to SEQ ID NO: 1013820
gucagccuaggacaacucc

SEQ ID NO: 1013822 - RNA, 19 nt, Artificial Sequence
  Description of Artificial Sequence: Synthetic oligonucleotide
  Sense strand starting at position 664 of SEQ ID NO: 914567
gguggugacucaaggaugu

SEQ ID NO: 1013823 - RNA, 19 nt, Artificial Sequence
  Description of Artificial Sequence: Synthetic oligonucleotide
  Antisense strand to SEQ ID NO: 1013822
acauccuugagucaccacc

SEQ ID NO: 1013824 - RNA, 19 nt, Artificial Sequence
  Description of Artificial Sequence: Synthetic oligonucleotide
  Sense strand starting at position 909 of SEQ ID NO: 914567
uuggguguuugcugaauga

SEQ ID NO: 1013825 - RNA, 19 nt, Artificial Sequence
  Description of Artificial Sequence: Synthetic oligonucleotide
  Antisense strand to SEQ ID NO: 1013824
ucauucagcaaacacccaa

SEQ ID NO: 1013826 - RNA, 19 nt, Artificial Sequence
  Description of Artificial Sequence: Synthetic oligonucleotide
  Sense strand starting at position 913 of SEQ ID NO: 914567
guguuugcugaaugagcaa

SEQ ID NO: 1013827 - RNA, 19 nt, Artificial Sequence
  Description of Artificial Sequence: Synthetic oligonucleotide
  Antisense strand to SEQ ID NO: 1013826
uugcucauucagcaaacac

SEQ ID NO: 1013828 - RNA, 19 nt, Artificial Sequence
  Description of Artificial Sequence: Synthetic oligonucleotide
  Sense strand starting at position 961 of SEQ ID NO: 914567
ccuagaaucgcagggaagu

SEQ ID NO: 1013829 - RNA, 19 nt, Artificial Sequence
  Description of Artificial Sequence: Synthetic oligonucleotide
  Antisense strand to SEQ ID NO: 1013828
acuucccugcgauucuagg

SEQ ID NO: 1013830 - RNA, 19 nt, Artificial Sequence
  Description of Artificial Sequence: Synthetic oligonucleotide
  Sense strand starting at position 1072 of SEQ ID NO: 914567
cacucaugccuucgggaaa

SEQ ID NO: 1013831 - RNA, 19 nt, Artificial Sequence
  Description of Artificial Sequence: Synthetic oligonucleotide
  Antisense strand to SEQ ID NO: 1013830
uuucccgaaggcaugagug

SEQ ID NO: 1013832 - RNA, 19 nt, Artificial Sequence
  Description of Artificial Sequence: Synthetic oligonucleotide
  Sense strand starting at position 1506 of SEQ ID NO: 914567
agauguaugugcccuguga

SEQ ID NO: 1013833 - RNA, 19 nt, Artificial Sequence
  Description of Artificial Sequence: Synthetic oligonucleotide
  Antisense strand to SEQ ID NO: 1013832
ucacagggcacauacaucu

SEQ ID NO: 1013834 - RNA, 19 nt, Artificial Sequence
  Description of Artificial Sequence: Synthetic oligonucleotide
  Sense strand starting at position 1508 of SEQ ID NO: 914567
auguaugugcccugugaua

SEQ ID NO: 1013835 - RNA, 19 nt, Artificial Sequence
  Description of Artificial Sequence: Synthetic oligonucleotide
  Antisense strand to SEQ ID NO: 1013834
uaucacagggcacauacau

SEQ ID NO: 1013836 - RNA, 19 nt, Artificial Sequence
  Description of Artificial Sequence: Synthetic oligonucleotide
  Sense strand starting at position 1836 of SEQ ID NO: 914567
gugggacuggcauagguaa

SEQ ID NO: 1013837 - RNA, 19 nt, Artificial Sequence
  Description of Artificial Sequence: Synthetic oligonucleotide
  Antisense strand to SEQ ID NO: 1013836
uuaccuaugccagucccac

SEQ ID NO: 1013838 - RNA, 19 nt, Artificial Sequence
  Description of Artificial Sequence: Synthetic oligonucleotide
  Sense strand starting at position 2471 of SEQ ID NO: 914567
gaagcucagucagcucaau

SEQ ID NO: 1013839 - RNA, 19 nt, Artificial Sequence
  Description of Artificial Sequence: Synthetic oligonucleotide
  Antisense strand to SEQ ID NO: 1013838
auugagcugacugagcuuc

SEQ ID NO: 1013840 - RNA, 19 nt, Artificial Sequence
  Description of Artificial Sequence: Synthetic oligonucleotide
  Sense strand starting at position 2632 of SEQ ID NO: 914567
guccucgguucccaggaua

SEQ ID NO: 1013841 - RNA, 19 nt, Artificial Sequence
  Description of Artificial Sequence: Synthetic oligonucleotide
  Antisense strand to SEQ ID NO: 1013840
uauccugggaaccgaggac

SEQ ID NO: 1013842 - RNA, 19 nt, Artificial Sequence
  Description of Artificial Sequence: Synthetic oligonucleotide
  Sense strand starting at position 2658 of SEQ ID NO: 914567
gcaugagucaggcucgcua

SEQ ID NO: 1013843 - RNA, 19 nt, Artificial Sequence
  Description of Artificial Sequence: Synthetic oligonucleotide
  Antisense strand to SEQ ID NO: 1013842
uagcgagccugacucaugc

SEQ ID NO: 1013844 - RNA, 19 nt, Artificial Sequence
  Description of Artificial Sequence: Synthetic oligonucleotide
  Sense strand starting at position 2674 of SEQ ID NO: 914567
cuagguguuuguugacuga

SEQ ID NO: 1013845 - RNA, 19 nt, Artificial Sequence
  Description of Artificial Sequence: Synthetic oligonucleotide
  Antisense strand to SEQ ID NO: 1013844
ucagucaacaaacaccuag

SEQ ID NO: 1013846 - RNA, 19 nt, Artificial Sequence
  Description of Artificial Sequence: Synthetic oligonucleotide
  Sense strand starting at position 2677 of SEQ ID NO: 914567
gguguuuguugacugaaca

SEQ ID NO: 1013847 - RNA, 19 nt, Artificial Sequence
  Description of Artificial Sequence: Synthetic oligonucleotide
  Antisense strand to SEQ ID NO: 1013846
uguucagucaacaaacacc

SEQ ID NO: 1013848 - RNA, 19 nt, Artificial Sequence
  Description of Artificial Sequence: Synthetic oligonucleotide
  Sense strand starting at position 2678 of SEQ ID NO: 914567
guguuuguugacugaacaa

SEQ ID NO: 1013849 - RNA, 19 nt, Artificial Sequence
  Description of Artificial Sequence: Synthetic oligonucleotide
  Antisense strand to SEQ ID NO: 1013848
uuguucagucaacaaacac

SEQ ID NO: 1013850 - RNA, 19 nt, Artificial Sequence
  Description of Artificial Sequence: Synthetic oligonucleotide
  Sense strand starting at position 2908 of SEQ ID NO: 914567
ggcugaggccagugggauu

SEQ ID NO: 1013851 - RNA, 19 nt, Artificial Sequence
  Description of Artificial Sequence: Synthetic oligonucleotide
  Antisense strand to SEQ ID NO: 1013850
aaucccacuggccucagcc

SEQ ID NO: 1013852 - RNA, 19 nt, Artificial Sequence
  Description of Artificial Sequence: Synthetic oligonucleotide
  Sense strand starting at position 2988 of SEQ ID NO: 914567
gguccaagauccuguguca

SEQ ID NO: 1013853 - RNA, 19 nt, Artificial Sequence
  Description of Artificial Sequence: Synthetic oligonucleotide
  Antisense strand to SEQ ID NO: 1013852
ugacacaggaucuuggacc

SEQ ID NO: 1013854 - RNA, 19 nt, Artificial Sequence
  Description of Artificial Sequence: Synthetic oligonucleotide
  Sense strand starting at position 3463 of SEQ ID NO: 914567
gccaaagccugacuuguga

SEQ ID NO: 1013855 - RNA, 19 nt, Artificial Sequence
  Description of Artificial Sequence: Synthetic oligonucleotide
  Antisense strand to SEQ ID NO: 1013854
ucacaagucaggcuuuggc

SEQ ID NO: 1013856 - RNA, 19 nt, Artificial Sequence
  Description of Artificial Sequence: Synthetic oligonucleotide
  Sense strand starting at position 3565 of SEQ ID NO: 914567
aggaguucaggcugagaac

SEQ ID NO: 1013857 - RNA, 19 nt, Artificial Sequence
  Description of Artificial Sequence: Synthetic oligonucleotide
  Antisense strand to SEQ ID NO: 1013856
guucucagccugaacuccu

SEQ ID NO: 1013858 - RNA, 19 nt, Artificial Sequence
  Description of Artificial Sequence: Synthetic oligonucleotide
  Sense strand starting at position 3566 of SEQ ID NO: 914567
ggaguucaggcugagaacu

SEQ ID NO: 1013859 - RNA, 19 nt, Artificial Sequence
  Description of Artificial Sequence: Synthetic oligonucleotide
  Antisense strand to SEQ ID NO: 1013858
aguucucagccugaacucc

SEQ ID NO: 1013860 - RNA, 19 nt, Artificial Sequence
  Description of Artificial Sequence: Synthetic oligonucleotide
  Sense strand starting at position 3655 of SEQ ID NO: 914567
cuauaauccugggauuuau

SEQ ID NO: 1013861 - RNA, 19 nt, Artificial Sequence
  Description of Artificial Sequence: Synthetic oligonucleotide
  Antisense strand to SEQ ID NO: 1013860
auaaaucccaggauuauag

SEQ ID NO: 1013862 - RNA, 19 nt, Artificial Sequence
  Description of Artificial Sequence: Synthetic oligonucleotide
  Sense strand starting at position 444 of SEQ ID NO: 914568
cuuccuuguuccuugagua

SEQ ID NO: 1013863 - RNA, 19 nt, Artificial Sequence
  Description of Artificial Sequence: Synthetic oligonucleotide
  Antisense strand to SEQ ID NO: 1013862
uacucaaggaacaaggaag

SEQ ID NO: 1013864 - RNA, 19 nt, Artificial Sequence
  Description of Artificial Sequence: Synthetic oligonucleotide
  Sense strand starting at position 445 of SEQ ID NO: 914568
uuccuuguuccuugaguau

SEQ ID NO: 1013865 - RNA, 19 nt, Artificial Sequence
  Description of Artificial Sequence: Synthetic oligonucleotide
  Antisense strand to SEQ ID NO: 1013864
auacucaaggaacaaggaa

SEQ ID NO: 1013866 - RNA, 19 nt, Artificial Sequence
  Description of Artificial Sequence: Synthetic oligonucleotide
  Sense strand starting at position 457 of SEQ ID NO: 914568
ugaguaucuggcgaauacu

SEQ ID NO: 1013867 - RNA, 19 nt, Artificial Sequence
  Description of Artificial Sequence: Synthetic oligonucleotide
  Antisense strand to SEQ ID NO: 1013866
aguauucgccagauacuca

SEQ ID NO: 1013868 - RNA, 19 nt, Artificial Sequence
  Description of Artificial Sequence: Synthetic oligonucleotide
  Sense strand starting at position 466 of SEQ ID NO: 914568
ggcgaauacuucucuaacc

SEQ ID NO: 1013869 - RNA, 19 nt, Artificial Sequence
  Description of Artificial Sequence: Synthetic oligonucleotide
  Antisense strand to SEQ ID NO: 1013868
gguuagagaaguauucgcc

SEQ ID NO: 1013870 - RNA, 19 nt, Artificial Sequence
  Description of Artificial Sequence: Synthetic oligonucleotide
  Sense strand starting at position 467 of SEQ ID NO: 914568
gcgaauacuucucuaacca

SEQ ID NO: 1013871 - RNA, 19 nt, Artificial Sequence
  Description of Artificial Sequence: Synthetic oligonucleotide
  Antisense strand to SEQ ID NO: 1013870
ugguuagagaaguauucgc

SEQ ID NO: 1013872 - RNA, 19 nt, Artificial Sequence
  Description of Artificial Sequence: Synthetic oligonucleotide
  Sense strand starting at position 534 of SEQ ID NO: 914568
cacggucaaacacgugaau

SEQ ID NO: 1013873 - RNA, 19 nt, Artificial Sequence
  Description of Artificial Sequence: Synthetic oligonucleotide
  Antisense strand to SEQ ID NO: 1013872
auucacguguuugaccgug

SEQ ID NO: 1013874 - RNA, 19 nt, Artificial Sequence
  Description of Artificial Sequence: Synthetic oligonucleotide
  Sense strand starting at position 617 of SEQ ID NO: 914568
cuggaucaugccugaagga

SEQ ID NO: 1013875 - RNA, 19 nt, Artificial Sequence
  Description of Artificial Sequence: Synthetic oligonucleotide
  Antisense strand to SEQ ID NO: 1013874
uccuucaggcaugauccag

SEQ ID NO: 1013876 - RNA, 19 nt, Artificial Sequence
  Description of Artificial Sequence: Synthetic oligonucleotide
  Sense strand starting at position 849 of SEQ ID NO: 914568
ucaggcaucccuuagacua

SEQ ID NO: 1013877 - RNA, 19 nt, Artificial Sequence
  Description of Artificial Sequence: Synthetic oligonucleotide
  Antisense strand to SEQ ID NO: 1013876
uagucuaagggaugccuga

SEQ ID NO: 1013878 - RNA, 19 nt, Artificial Sequence
  Description of Artificial Sequence: Synthetic oligonucleotide
  Sense strand starting at position 860 of SEQ ID NO: 914568
uuagacuauccaggugaug

SEQ ID NO: 1013879 - RNA, 19 nt, Artificial Sequence
  Description of Artificial Sequence: Synthetic oligonucleotide
  Antisense strand to SEQ ID NO: 1013878
caucaccuggauagucuaa

SEQ ID NO: 1013880 - RNA, 19 nt, Artificial Sequence
  Description of Artificial Sequence: Synthetic oligonucleotide
  Sense strand starting at position 871 of SEQ ID NO: 914568
aggugauggaaacguaaca

SEQ ID NO: 1013881 - RNA, 19 nt, Artificial Sequence
  Description of Artificial Sequence: Synthetic oligonucleotide
  Antisense strand to SEQ ID NO: 1013880
uguuacguuuccaucaccu

SEQ ID NO: 1013882 - RNA, 19 nt, Artificial Sequence
  Description of Artificial Sequence: Synthetic oligonucleotide
  Sense strand starting at position 936 of SEQ ID NO: 914568
gagggacgguuccaaauuu

SEQ ID NO: 1013883 - RNA, 19 nt, Artificial Sequence
  Description of Artificial Sequence: Synthetic oligonucleotide
  Antisense strand to SEQ ID NO: 1013882
aaauuuggaaccgucccuc

SEQ ID NO: 1013884 - RNA, 19 nt, Artificial Sequence
  Description of Artificial Sequence: Synthetic oligonucleotide
  Sense strand starting at position 2044 of SEQ ID NO: 914568
cgucuuggcccgcaagagu

SEQ ID NO: 1013885 - RNA, 19 nt, Artificial Sequence
  Description of Artificial Sequence: Synthetic oligonucleotide
  Antisense strand to SEQ ID NO: 1013884
acucuugcgggccaagacg

SEQ ID NO: 1013886 - RNA, 19 nt, Artificial Sequence
  Description of Artificial Sequence: Synthetic oligonucleotide
  Sense strand starting at position 2408 of SEQ ID NO: 914568
aggugagucaagcguuaaa

SEQ ID NO: 1013887 - RNA, 19 nt, Artificial Sequence
  Description of Artificial Sequence: Synthetic oligonucleotide
  Antisense strand to SEQ ID NO: 1013886
uuuaacgcuugacucaccu

SEQ ID NO: 1013888 - RNA, 19 nt, Artificial Sequence
  Description of Artificial Sequence: Synthetic oligonucleotide
  Sense strand starting at position 2411 of SEQ ID NO: 914568
ugagucaagcguuaaacca

SEQ ID NO: 1013889 - RNA, 19 nt, Artificial Sequence
  Description of Artificial Sequence: Synthetic oligonucleotide
  Antisense strand to SEQ ID NO: 1013888
ugguuuaacgcuugacuca

SEQ ID NO: 1013890 - RNA, 19 nt, Artificial Sequence
  Description of Artificial Sequence: Synthetic oligonucleotide
  Sense strand starting at position 2432 of SEQ ID NO: 914568
uggguacucaccugggaaa

SEQ ID NO: 1013891 - RNA, 19 nt, Artificial Sequence
  Description of Artificial Sequence: Synthetic oligonucleotide
  Antisense strand to SEQ ID NO: 1013890
uuucccaggugaguaccca

SEQ ID NO: 1013892 - RNA, 19 nt, Artificial Sequence
  Description of Artificial Sequence: Synthetic oligonucleotide
  Sense strand starting at position 2433 of SEQ ID NO: 914568
ggguacucaccugggaaau

SEQ ID NO: 1013893 - RNA, 19 nt, Artificial Sequence
  Description of Artificial Sequence: Synthetic oligonucleotide
  Antisense strand to SEQ ID NO: 1013892
auuucccaggugaguaccc

SEQ ID NO: 1013894 - RNA, 19 nt, Artificial Sequence
  Description of Artificial Sequence: Synthetic oligonucleotide
  Sense strand starting at position 2434 of SEQ ID NO: 914568
gguacucaccugggaaaug

SEQ ID NO: 1013895 - RNA, 19 nt, Artificial Sequence
  Description of Artificial Sequence: Synthetic oligonucleotide
  Antisense strand to SEQ ID NO: 1013894
cauuucccaggugaguacc

SEQ ID NO: 1013896 - RNA, 19 nt, Artificial Sequence
  Description of Artificial Sequence: Synthetic oligonucleotide
  Sense strand starting at position 2435 of SEQ ID NO: 914568
guacucaccugggaaauga

SEQ ID NO: 1013897 - RNA, 19 nt, Artificial Sequence
  Description of Artificial Sequence: Synthetic oligonucleotide
  Antisense strand to SEQ ID NO: 1013896
ucauuucccaggugaguac

SEQ ID NO: 1013898 - RNA, 19 nt, Artificial Sequence
  Description of Artificial Sequence: Synthetic oligonucleotide
  Sense strand starting at position 2451 of SEQ ID NO: 914568
ugagauaaaugccaagaag

SEQ ID NO: 1013899 - RNA, 19 nt, Artificial Sequence
  Description of Artificial Sequence: Synthetic oligonucleotide
  Antisense strand to SEQ ID NO: 1013898
cuucuuggcauuuaucuca

SEQ ID NO: 1013900 - RNA, 19 nt, Artificial Sequence
  Description of Artificial Sequence: Synthetic oligonucleotide
  Sense strand starting at position 2530 of SEQ ID NO: 914568
gguuucuuugggcgauuca

SEQ ID NO: 1013901 - RNA, 19 nt, Artificial Sequence
  Description of Artificial Sequence: Synthetic oligonucleotide
  Antisense strand to SEQ ID NO: 1013900
ugaaucgcccaaagaaacc

SEQ ID NO: 1013902 - RNA, 19 nt, Artificial Sequence
  Description of Artificial Sequence: Synthetic oligonucleotide
  Sense strand starting at position 2549 of SEQ ID NO: 914568
cauguuagccaagauguga

SEQ ID NO: 1013903 - RNA, 19 nt, Artificial Sequence
  Description of Artificial Sequence: Synthetic oligonucleotide
  Antisense strand to SEQ ID NO: 1013902
ucacaucuuggcuaacaug

SEQ ID NO: 1013904 - RNA, 19 nt, Artificial Sequence
  Description of Artificial Sequence: Synthetic oligonucleotide
  Sense strand starting at position 2779 of SEQ ID NO: 914568
cagcgaagaccucggucuu

SEQ ID NO: 1013905 - RNA, 19 nt, Artificial Sequence
  Description of Artificial Sequence: Synthetic oligonucleotide
  Antisense strand to SEQ ID NO: 1013904
aagaccgaggucuucgcug

SEQ ID NO: 1013906 - RNA, 19 nt, Artificial Sequence
  Description of Artificial Sequence: Synthetic oligonucleotide
  Sense strand starting at position 2780 of SEQ ID NO: 914568
agcgaagaccucggucuuu

SEQ ID NO: 1013907 - RNA, 19 nt, Artificial Sequence
  Description of Artificial Sequence: Synthetic oligonucleotide
  Antisense strand to SEQ ID NO: 1013906
aaagaccgaggucuucgcu

SEQ ID NO: 1013908 - RNA, 19 nt, Artificial Sequence
  Description of Artificial Sequence: Synthetic oligonucleotide
  Sense strand starting at position 2793 of SEQ ID NO: 914568
gucuuuauucugggagaca

SEQ ID NO: 1013909 - RNA, 19 nt, Artificial Sequence
  Description of Artificial Sequence: Synthetic oligonucleotide
  Antisense strand to SEQ ID NO: 1013908
ugucucccagaauaaagac

SEQ ID NO: 1013910 - RNA, 19 nt, Artificial Sequence
  Description of Artificial Sequence: Synthetic oligonucleotide
  Sense strand starting at position 2794 of SEQ ID NO: 914568
ucuuuauucugggagacac

SEQ ID NO: 1013911 - RNA, 19 nt, Artificial Sequence
  Description of Artificial Sequence: Synthetic oligonucleotide
  Antisense strand to SEQ ID NO: 1013910
gugucucccagaauaaaga

SEQ ID NO: 1013912 - RNA, 19 nt, Artificial Sequence
  Description of Artificial Sequence: Synthetic oligonucleotide
  Sense strand starting at position 2811 of SEQ ID NO: 914568
acgggaaguccucggagga

SEQ ID NO: 1013913 - RNA, 19 nt, Artificial Sequence
  Description of Artificial Sequence: Synthetic oligonucleotide
  Antisense strand to SEQ ID NO: 1013912
uccuccgaggacuucccgu

SEQ ID NO: 1013914 - RNA, 19 nt, Artificial Sequence
  Description of Artificial Sequence: Synthetic oligonucleotide
  Sense strand starting at position 2812 of SEQ ID NO: 914568
cgggaaguccucggaggaa

SEQ ID NO: 1013915 - RNA, 19 nt, Artificial Sequence
  Description of Artificial Sequence: Synthetic oligonucleotide
  Antisense strand to SEQ ID NO: 1013914
uuccuccgaggacuucccg

SEQ ID NO: 1013916 - RNA, 19 nt, Artificial Sequence
  Description of Artificial Sequence: Synthetic oligonucleotide
  Sense strand starting at position 2815 of SEQ ID NO: 914568
gaaguccucggaggaaguu

SEQ ID NO: 1013917 - RNA, 19 nt, Artificial Sequence
  Description of Artificial Sequence: Synthetic oligonucleotide
  Antisense strand to SEQ ID NO: 1013916
aacuuccuccgaggacuuc

SEQ ID NO: 1013918 - RNA, 19 nt, Artificial Sequence
  Description of Artificial Sequence: Synthetic oligonucleotide
  Sense strand starting at position 2824 of SEQ ID NO: 914568
ggaggaaguuaagcugaua

SEQ ID NO: 1013919 - RNA, 19 nt, Artificial Sequence
  Description of Artificial Sequence: Synthetic oligonucleotide
  Antisense strand to SEQ ID NO: 1013918
uaucagcuuaacuuccucc

SEQ ID NO: 1013920 - RNA, 19 nt, Artificial Sequence
  Description of Artificial Sequence: Synthetic oligonucleotide
  Sense strand starting at position 2829 of SEQ ID NO: 914568
aaguuaagcugauaagaga

SEQ ID NO: 1013921 - RNA, 19 nt, Artificial Sequence
  Description of Artificial Sequence: Synthetic oligonucleotide
  Antisense strand to SEQ ID NO: 1013920
ucucuuaucagcuuaacuu

SEQ ID NO: 1013922 - RNA, 19 nt, Artificial Sequence
  Description of Artificial Sequence: Synthetic oligonucleotide
  Sense strand starting at position 2980 of SEQ ID NO: 914568
gcccgccaucgcuaaauaa

SEQ ID NO: 1013923 - RNA, 19 nt, Artificial Sequence
  Description of Artificial Sequence: Synthetic oligonucleotide
  Antisense strand to SEQ ID NO: 1013922
uuauuuagcgauggcgggc

SEQ ID NO: 1013924 - RNA, 19 nt, Artificial Sequence
  Description of Artificial Sequence: Synthetic oligonucleotide
  Sense strand starting at position 3014 of SEQ ID NO: 914568
ugaaguuugaauuguaaug

SEQ ID NO: 1013925 - RNA, 19 nt, Artificial Sequence
  Description of Artificial Sequence: Synthetic oligonucleotide
  Antisense strand to SEQ ID NO: 1013924
cauuacaauucaaacuuca

SEQ ID NO: 1013926 - RNA, 19 nt, Artificial Sequence
  Description of Artificial Sequence: Synthetic oligonucleotide
  Sense strand starting at position 3075 of SEQ ID NO: 914568
ccagguagagccuaaugua

SEQ ID NO: 1013927 - RNA, 19 nt, Artificial Sequence
  Description of Artificial Sequence: Synthetic oligonucleotide
  Antisense strand to SEQ ID NO: 1013926
uacauuaggcucuaccugg

SEQ ID NO: 1013928 - RNA, 19 nt, Artificial Sequence
  Description of Artificial Sequence: Synthetic oligonucleotide
  Sense strand starting at position 3163 of SEQ ID NO: 914568
aagcuaaacugucagaugu

SEQ ID NO: 1013929 - RNA, 19 nt, Artificial Sequence
  Description of Artificial Sequence: Synthetic oligonucleotide
  Antisense strand to SEQ ID NO: 1013928
acaucugacaguuuagcuu

SEQ ID NO: 1013930 - RNA, 19 nt, Artificial Sequence
  Description of Artificial Sequence: Synthetic oligonucleotide
  Sense strand starting at position 3169 of SEQ ID NO: 914568
aacugucagaugugaggau

SEQ ID NO: 1013931 - RNA, 19 nt, Artificial Sequence
  Description of Artificial Sequence: Synthetic oligonucleotide
  Antisense strand to SEQ ID NO: 1013930
auccucacaucugacaguu

SEQ ID NO: 1013932 - RNA, 19 nt, Artificial Sequence
  Description of Artificial Sequence: Synthetic oligonucleotide
  Sense strand starting at position 3212 of SEQ ID NO: 914568
ggaaaugucagguguugac

SEQ ID NO: 1013933 - RNA, 19 nt, Artificial Sequence
  Description of Artificial Sequence: Synthetic oligonucleotide
  Antisense strand to SEQ ID NO: 1013932
gucaacaccugacauuucc

SEQ ID NO: 1013934 - RNA, 19 nt, Artificial Sequence
  Description of Artificial Sequence: Synthetic oligonucleotide
  Sense strand starting at position 3577 of SEQ ID NO: 914568
acagaaacccugugucaaa

SEQ ID NO: 1013935 - RNA, 19 nt, Artificial Sequence
  Description of Artificial Sequence: Synthetic oligonucleotide
  Antisense strand to SEQ ID NO: 1013934
uuugacacaggguuucugu

SEQ ID NO: 1013936 - RNA, 19 nt, Artificial Sequence
  Description of Artificial Sequence: Synthetic oligonucleotide
  Sense strand starting at position 3716 of SEQ ID NO: 914568
guuggccaggcuuguaaua

SEQ ID NO: 1013937 - RNA, 19 nt, Artificial Sequence
  Description of Artificial Sequence: Synthetic oligonucleotide
  Antisense strand to SEQ ID NO: 1013936
uauuacaagccuggccaac

SEQ ID NO: 1013938 - RNA, 19 nt, Artificial Sequence
  Description of Artificial Sequence: Synthetic oligonucleotide
  Sense strand starting at position 3867 of SEQ ID NO: 914568
uuguuuaaucuuuagagac

SEQ ID NO: 1013939 - RNA, 19 nt, Artificial Sequence
  Description of Artificial Sequence: Synthetic oligonucleotide
  Antisense strand to SEQ ID NO: 1013938
gucucuaaagauuaaacaa

SEQ ID NO: 1013940 - RNA, 19 nt, Artificial Sequence
  Description of Artificial Sequence: Synthetic oligonucleotide
  Sense strand starting at position 3869 of SEQ ID NO: 914568
guuuaaucuuuagagacag

SEQ ID NO: 1013941 - RNA, 19 nt, Artificial Sequence
  Description of Artificial Sequence: Synthetic oligonucleotide
  Antisense strand to SEQ ID NO: 1013940
cugucucuaaagauuaaac

SEQ ID NO: 1013942 - RNA, 19 nt, Artificial Sequence
  Description of Artificial Sequence: Synthetic oligonucleotide
  Sense strand starting at position 99 of SEQ ID NO: 914569
ugauaaugcuguccuacuc

SEQ ID NO: 1013943 - RNA, 19 nt, Artificial Sequence
  Description of Artificial Sequence: Synthetic oligonucleotide
  Antisense strand to SEQ ID NO: 1013942
gaguaggacagcauuauca

SEQ ID NO: 1013944 - RNA, 19 nt, Artificial Sequence
  Description of Artificial Sequence: Synthetic oligonucleotide
  Sense strand starting at position 273 of SEQ ID NO: 914569
aucaaauaucaguggucua

SEQ ID NO: 1013945 - RNA, 19 nt, Artificial Sequence
  Description of Artificial Sequence: Synthetic oligonucleotide
  Antisense strand to SEQ ID NO: 1013944
uagaccacugauauuugau

SEQ ID NO: 1013946 - RNA, 19 nt, Artificial Sequence
  Description of Artificial Sequence: Synthetic oligonucleotide
  Sense strand starting at position 276 of SEQ ID NO: 914569
aaauaucaguggucuaaag

SEQ ID NO: 1013947 - RNA, 19 nt, Artificial Sequence
  Description of Artificial Sequence: Synthetic oligonucleotide
  Antisense strand to SEQ ID NO: 1013946
cuuuagaccacugauauuu

SEQ ID NO: 1013948 - RNA, 19 nt, Artificial Sequence
  Description of Artificial Sequence: Synthetic oligonucleotide
  Sense strand starting at position 303 of SEQ ID NO: 914569
augguuagguuccuguaua

SEQ ID NO: 1013949 - RNA, 19 nt, Artificial Sequence
  Description of Artificial Sequence: Synthetic oligonucleotide
  Antisense strand to SEQ ID NO: 1013948
uauacaggaaccuaaccau

SEQ ID NO: 1013950 - RNA, 19 nt, Artificial Sequence
  Description of Artificial Sequence: Synthetic oligonucleotide
  Sense strand starting at position 439 of SEQ ID NO: 914569
auauuauguucccugagcu

SEQ ID NO: 1013951 - RNA, 19 nt, Artificial Sequence
  Description of Artificial Sequence: Synthetic oligonucleotide
  Antisense strand to SEQ ID NO: 1013950
agcucagggaacauaauau

SEQ ID NO: 1013952 - RNA, 19 nt, Artificial Sequence
  Description of Artificial Sequence: Synthetic oligonucleotide
  Sense strand starting at position 469 of SEQ ID NO: 914569
ccauuucuguccguacuuu

SEQ ID NO: 1013953 - RNA, 19 nt, Artificial Sequence
  Description of Artificial Sequence: Synthetic oligonucleotide
  Antisense strand to SEQ ID NO: 1013952
aaaguacggacagaaaugg

SEQ ID NO: 1013954 - RNA, 19 nt, Artificial Sequence
  Description of Artificial Sequence: Synthetic oligonucleotide
  Sense strand starting at position 635 of SEQ ID NO: 914569
ugucuuugacaagguaacu

SEQ ID NO: 1013955 - RNA, 19 nt, Artificial Sequence
  Description of Artificial Sequence: Synthetic oligonucleotide
  Antisense strand to SEQ ID NO: 1013954
aguuaccuugucaaagaca

SEQ ID NO: 1013956 - RNA, 19 nt, Artificial Sequence
  Description of Artificial Sequence: Synthetic oligonucleotide
  Sense strand starting at position 728 of SEQ ID NO: 914569
gaaagcaguuuccuaagga

SEQ ID NO: 1013957 - RNA, 19 nt, Artificial Sequence
  Description of Artificial Sequence: Synthetic oligonucleotide
  Antisense strand to SEQ ID NO: 1013956
uccuuaggaaacugcuuuc

SEQ ID NO: 1013958 - RNA, 19 nt, Artificial Sequence
  Description of Artificial Sequence: Synthetic oligonucleotide
  Sense strand starting at position 756 of SEQ ID NO: 914569
acucaagaaugggagaauu

SEQ ID NO: 1013959 - RNA, 19 nt, Artificial Sequence
  Description of Artificial Sequence: Synthetic oligonucleotide
  Antisense strand to SEQ ID NO: 1013958
aauucucccauucuugagu

SEQ ID NO: 1013960 - RNA, 19 nt, Artificial Sequence
  Description of Artificial Sequence: Synthetic oligonucleotide
  Sense strand starting at position 781 of SEQ ID NO: 914569
gaagguguaacacgcagaa

SEQ ID NO: 1013961 - RNA, 19 nt, Artificial Sequence
  Description of Artificial Sequence: Synthetic oligonucleotide
  Antisense strand to SEQ ID NO: 1013960
uucugcguguuacaccuuc

SEQ ID NO: 1013962 - RNA, 19 nt, Artificial Sequence
  Description of Artificial Sequence: Synthetic oligonucleotide
  Sense strand starting at position 832 of SEQ ID NO: 914569
gcuggucugacucggaauu

SEQ ID NO: 1013963 - RNA, 19 nt, Artificial Sequence
  Description of Artificial Sequence: Synthetic oligonucleotide
  Antisense strand to SEQ ID NO: 1013962
aauuccgagucagaccagc

SEQ ID NO: 1013964 - RNA, 19 nt, Artificial Sequence
  Description of Artificial Sequence: Synthetic oligonucleotide
  Sense strand starting at position 891 of SEQ ID NO: 914569
ggucgagucacugaaaccu

SEQ ID NO: 1013965 - RNA, 19 nt, Artificial Sequence
  Description of Artificial Sequence: Synthetic oligonucleotide
  Antisense strand to SEQ ID NO: 1013964
agguuucagugacucgacc

SEQ ID NO: 1013966 - RNA, 19 nt, Artificial Sequence
  Description of Artificial Sequence: Synthetic oligonucleotide
  Sense strand starting at position 943 of SEQ ID NO: 914569
gcgucuuagacauugcuuu

SEQ ID NO: 1013967 - RNA, 19 nt, Artificial Sequence
  Description of Artificial Sequence: Synthetic oligonucleotide
  Antisense strand to SEQ ID NO: 1013966
aaagcaaugucuaagacgc

SEQ ID NO: 1013968 - RNA, 19 nt, Artificial Sequence
  Description of Artificial Sequence: Synthetic oligonucleotide
  Sense strand starting at position 944 of SEQ ID NO: 914569
cgucuuagacauugcuuua

SEQ ID NO: 1013969 - RNA, 19 nt, Artificial Sequence
  Description of Artificial Sequence: Synthetic oligonucleotide
  Antisense strand to SEQ ID NO: 1013968
uaaagcaaugucuaagacg

SEQ ID NO: 1013970 - RNA, 19 nt, Artificial Sequence
  Description of Artificial Sequence: Synthetic oligonucleotide
  Sense strand starting at position 962 of SEQ ID NO: 914569
acaagaaacugagaccuaa

SEQ ID NO: 1013971 - RNA, 19 nt, Artificial Sequence
  Description of Artificial Sequence: Synthetic oligonucleotide
  Antisense strand to SEQ ID NO: 1013970
uuaggucucaguuucuugu

SEQ ID NO: 1013972 - RNA, 19 nt, Artificial Sequence
  Description of Artificial Sequence: Synthetic oligonucleotide
  Sense strand starting at position 1040 of SEQ ID NO: 914569
cagagcuggucccuugaaa

SEQ ID NO: 1013973 - RNA, 19 nt, Artificial Sequence
  Description of Artificial Sequence: Synthetic oligonucleotide
  Antisense strand to SEQ ID NO: 1013972
uuucaagggaccagcucug

SEQ ID NO: 1013974 - RNA, 19 nt, Artificial Sequence
  Description of Artificial Sequence: Synthetic oligonucleotide
  Sense strand starting at position 1987 of SEQ ID NO: 914569
auauguguugacugcacaa

SEQ ID NO: 1013975 - RNA, 19 nt, Artificial Sequence
  Description of Artificial Sequence: Synthetic oligonucleotide
  Antisense strand to SEQ ID NO: 1013974
uugugcagucaacacauau

SEQ ID NO: 1013976 - RNA, 19 nt, Artificial Sequence
  Description of Artificial Sequence: Synthetic oligonucleotide
  Sense strand starting at position 2031 of SEQ ID NO: 914569
ucaggaaugcuuggcacuu

SEQ ID NO: 1013977 - RNA, 19 nt, Artificial Sequence
  Description of Artificial Sequence: Synthetic oligonucleotide
  Antisense strand to SEQ ID NO: 1013976
aagugccaagcauuccuga

SEQ ID NO: 1013978 - RNA, 19 nt, Artificial Sequence
  Description of Artificial Sequence: Synthetic oligonucleotide
  Sense strand starting at position 2032 of SEQ ID NO: 914569
caggaaugcuuggcacuua

SEQ ID NO: 1013979 - RNA, 19 nt, Artificial Sequence
  Description of Artificial Sequence: Synthetic oligonucleotide
  Antisense strand to SEQ ID NO: 1013978
uaagugccaagcauuccug

SEQ ID NO: 1013980 - RNA, 19 nt, Artificial Sequence
  Description of Artificial Sequence: Synthetic oligonucleotide
  Sense strand starting at position 2151 of SEQ ID NO: 914569
aaagauuguuuagagaaug

SEQ ID NO: 1013981 - RNA, 19 nt, Artificial Sequence
  Description of Artificial Sequence: Synthetic oligonucleotide
  Antisense strand to SEQ ID NO: 1013980
cauucucuaaacaaucuuu

SEQ ID NO: 1013982 - RNA, 19 nt, Artificial Sequence
  Description of Artificial Sequence: Synthetic oligonucleotide
  Sense strand starting at position 2194 of SEQ ID NO: 914569
ggcacauuauccuagaaga

SEQ ID NO: 1013983 - RNA, 19 nt, Artificial Sequence
  Description of Artificial Sequence: Synthetic oligonucleotide
  Antisense strand to SEQ ID NO: 1013982
ucuucuaggauaaugugcc

SEQ ID NO: 1013984 - RNA, 19 nt, Artificial Sequence
  Description of Artificial Sequence: Synthetic oligonucleotide
  Sense strand starting at position 2256 of SEQ ID NO: 914569
accacuggccaaugagaua

SEQ ID NO: 1013985 - RNA, 19 nt, Artificial Sequence
  Description of Artificial Sequence: Synthetic oligonucleotide
  Antisense strand to SEQ ID NO: 1013984
uaucucauuggccaguggu

SEQ ID NO: 1013986 - RNA, 19 nt, Artificial Sequence
  Description of Artificial Sequence: Synthetic oligonucleotide
  Sense strand starting at position 2259 of SEQ ID NO: 914569
acuggccaaugagauaaua

SEQ ID NO: 1013987 - RNA, 19 nt, Artificial Sequence
  Description of Artificial Sequence: Synthetic oligonucleotide
  Antisense strand to SEQ ID NO: 1013986
uauuaucucauuggccagu

SEQ ID NO: 1013988 - RNA, 19 nt, Artificial Sequence
  Description of Artificial Sequence: Synthetic oligonucleotide
  Sense strand starting at position 2345 of SEQ ID NO: 914569
cggccauaaugcguagaaa

SEQ ID NO: 1013989 - RNA, 19 nt, Artificial Sequence
  Description of Artificial Sequence: Synthetic oligonucleotide
  Antisense strand to SEQ ID NO: 1013988
uuucuacgcauuauggccg

SEQ ID NO: 1013990 - RNA, 19 nt, Artificial Sequence
  Description of Artificial Sequence: Synthetic oligonucleotide
  Sense strand starting at position 2346 of SEQ ID NO: 914569
ggccauaaugcguagaaau

SEQ ID NO: 1013991 - RNA, 19 nt, Artificial Sequence
  Description of Artificial Sequence: Synthetic oligonucleotide
  Antisense strand to SEQ ID NO: 1013990
auuucuacgcauuauggcc

SEQ ID NO: 1013992 - RNA, 19 nt, Artificial Sequence
  Description of Artificial Sequence: Synthetic oligonucleotide
  Sense strand starting at position 2348 of SEQ ID NO: 914569
ccauaaugcguagaaauaa

SEQ ID NO: 1013993 - RNA, 19 nt, Artificial Sequence
  Description of Artificial Sequence: Synthetic oligonucleotide
  Antisense strand to SEQ ID NO: 1013992
uuauuucuacgcauuaugg

SEQ ID NO: 1013994 - RNA, 19 nt, Artificial Sequence
  Description of Artificial Sequence: Synthetic oligonucleotide
  Sense strand starting at position 2365 of SEQ ID NO: 914569
aaguaagagcucuggacua

SEQ ID NO: 1013995 - RNA, 19 nt, Artificial Sequence
  Description of Artificial Sequence: Synthetic oligonucleotide
  Antisense strand to SEQ ID NO: 1013994
uaguccagagcucuuacuu

SEQ ID NO: 1013996 - RNA, 19 nt, Artificial Sequence
  Description of Artificial Sequence: Synthetic oligonucleotide
  Sense strand starting at position 2424 of SEQ ID NO: 914569
aguuaauacuuguuugagc

SEQ ID NO: 1013997 - RNA, 19 nt, Artificial Sequence
  Description of Artificial Sequence: Synthetic oligonucleotide
  Antisense strand to SEQ ID NO: 1013996
gcucaaacaaguauuaacu

SEQ ID NO: 1013998 - RNA, 19 nt, Artificial Sequence
  Description of Artificial Sequence: Synthetic oligonucleotide
  Sense strand starting at position 2425 of SEQ ID NO: 914569
guuaauacuuguuugagca

SEQ ID NO: 1013999 - RNA, 19 nt, Artificial Sequence
  Description of Artificial Sequence: Synthetic oligonucleotide
  Antisense strand to SEQ ID NO: 1013998
ugcucaaacaaguauuaac

SEQ ID NO: 1014000 - RNA, 19 nt, Artificial Sequence
  Description of Artificial Sequence: Synthetic oligonucleotide
  Sense strand starting at position 2438 of SEQ ID NO: 914569
ugagcacuuguauauacua

SEQ ID NO: 1014001 - RNA, 19 nt, Artificial Sequence
  Description of Artificial Sequence: Synthetic oligonucleotide
  Antisense strand to SEQ ID NO: 1014000
uaguauauacaagugcuca

SEQ ID NO: 1014002 - RNA, 19 nt, Artificial Sequence
  Description of Artificial Sequence: Synthetic oligonucleotide
  Sense strand starting at position 2504 of SEQ ID NO: 914569
uggaguuuauggccuaaua

SEQ ID NO: 1014003 - RNA, 19 nt, Artificial Sequence
  Description of Artificial Sequence: Synthetic oligonucleotide
  Antisense strand to SEQ ID NO: 1014002
uauuaggccauaaacucca

SEQ ID NO: 1014004 - RNA, 19 nt, Artificial Sequence
  Description of Artificial Sequence: Synthetic oligonucleotide
  Sense strand starting at position 2506 of SEQ ID NO: 914569
gaguuuauggccuaauaag

SEQ ID NO: 1014005 - RNA, 19 nt, Artificial Sequence
  Description of Artificial Sequence: Synthetic oligonucleotide
  Antisense strand to SEQ ID NO: 1014004
cuuauuaggccauaaacuc

SEQ ID NO: 1014006 - RNA, 19 nt, Artificial Sequence
  Description of Artificial Sequence: Synthetic oligonucleotide
  Sense strand starting at position 2559 of SEQ ID NO: 914569
auauuacuuagugggaguu

SEQ ID NO: 1014007 - RNA, 19 nt, Artificial Sequence
  Description of Artificial Sequence: Synthetic oligonucleotide
  Antisense strand to SEQ ID NO: 1014006
aacucccacuaaguaauau

SEQ ID NO: 1014008 - RNA, 19 nt, Artificial Sequence
  Description of Artificial Sequence: Synthetic oligonucleotide
  Sense strand starting at position 2565 of SEQ ID NO: 914569
cuuagugggaguugugaua

SEQ ID NO: 1014009 - RNA, 19 nt, Artificial Sequence
  Description of Artificial Sequence: Synthetic oligonucleotide
  Antisense strand to SEQ ID NO: 1014008
uaucacaacucccacuaag

SEQ ID NO: 1014010 - RNA, 19 nt, Artificial Sequence
  Description of Artificial Sequence: Synthetic oligonucleotide
  Sense strand starting at position 2579 of SEQ ID NO: 914569
ugauaaauauugcaaagag

SEQ ID NO: 1014011 - RNA, 19 nt, Artificial Sequence
  Description of Artificial Sequence: Synthetic oligonucleotide
  Antisense strand to SEQ ID NO: 1014010
cucuuugcaauauuuauca

SEQ ID NO: 1014012 - RNA, 19 nt, Artificial Sequence
  Description of Artificial Sequence: Synthetic oligonucleotide
  Sense strand starting at position 2978 of SEQ ID NO: 914569
ggaaacuaguauccuaauc

SEQ ID NO: 1014013 - RNA, 19 nt, Artificial Sequence
  Description of Artificial Sequence: Synthetic oligonucleotide
  Antisense strand to SEQ ID NO: 1014012
gauuaggauacuaguuucc

SEQ ID NO: 1014014 - RNA, 19 nt, Artificial Sequence
  Description of Artificial Sequence: Synthetic oligonucleotide
  Sense strand starting at position 3017 of SEQ ID NO: 914569
uuugcuuaugcuuaacuga

SEQ ID NO: 1014015 - RNA, 19 nt, Artificial Sequence
  Description of Artificial Sequence: Synthetic oligonucleotide
  Antisense strand to SEQ ID NO: 1014014
ucaguuaagcauaagcaaa

SEQ ID NO: 1014016 - RNA, 19 nt, Artificial Sequence
  Description of Artificial Sequence: Synthetic oligonucleotide
  Sense strand starting at position 3107 of SEQ ID NO: 914569
ucacuuguucuggaaacac

SEQ ID NO: 1014017 - RNA, 19 nt, Artificial Sequence
  Description of Artificial Sequence: Synthetic oligonucleotide
  Antisense strand to SEQ ID NO: 1014016
guguuuccagaacaaguga

SEQ ID NO: 1014018 - RNA, 19 nt, Artificial Sequence
  Description of Artificial Sequence: Synthetic oligonucleotide
  Sense strand starting at position 3368 of SEQ ID NO: 914569
uguaauguucuauauugug

SEQ ID NO: 1014019 - RNA, 19 nt, Artificial Sequence
  Description of Artificial Sequence: Synthetic oligonucleotide
  Antisense strand to SEQ ID NO: 1014018
cacaauauagaacauuaca

SEQ ID NO: 1014020 - RNA, 19 nt, Artificial Sequence
  Description of Artificial Sequence: Synthetic oligonucleotide
  Sense strand starting at position 3658 of SEQ ID NO: 914569
ugaagaauuuaggaguaag

SEQ ID NO: 1014021 - RNA, 19 nt, Artificial Sequence
  Description of Artificial Sequence: Synthetic oligonucleotide
  Antisense strand to SEQ ID NO: 1014020
cuuacuccuaaauucuuca

SEQ ID NO: 1014022 - RNA, 19 nt, Artificial Sequence
  Description of Artificial Sequence: Synthetic oligonucleotide
  Sense strand starting at position 101 of SEQ ID NO: 914570
aaggcuuuacagugauuaa

SEQ ID NO: 1014023 - RNA, 19 nt, Artificial Sequence
  Description of Artificial Sequence: Synthetic oligonucleotide
  Antisense strand to SEQ ID NO: 1014022
uuaaucacuguaaagccuu

SEQ ID NO: 1014024 - RNA, 19 nt, Artificial Sequence
  Description of Artificial Sequence: Synthetic oligonucleotide
  Sense strand starting at position 235 of SEQ ID NO: 914570
uuguucuaucuacauauga

SEQ ID NO: 1014025 - RNA, 19 nt, Artificial Sequence
  Description of Artificial Sequence: Synthetic oligonucleotide
  Antisense strand to SEQ ID NO: 1014024
ucauauguagauagaacaa

SEQ ID NO: 1014026 - RNA, 19 nt, Artificial Sequence
  Description of Artificial Sequence: Synthetic oligonucleotide
  Sense strand starting at position 470 of SEQ ID NO: 914570
aggucucugcuugaauacu

SEQ ID NO: 1014027 - RNA, 19 nt, Artificial Sequence
  Description of Artificial Sequence: Synthetic oligonucleotide
  Antisense strand to SEQ ID NO: 1014026
aguauucaagcagagaccu

SEQ ID NO: 1014028 - RNA, 19 nt, Artificial Sequence
  Description of Artificial Sequence: Synthetic oligonucleotide
  Sense strand starting at position 481 of SEQ ID NO: 914570
ugaauacugcuuugaaagu

SEQ ID NO: 1014029 - RNA, 19 nt, Artificial Sequence
  Description of Artificial Sequence: Synthetic oligonucleotide
  Antisense strand to SEQ ID NO: 1014028
acuuucaaagcaguauuca

SEQ ID NO: 1014030 - RNA, 19 nt, Artificial Sequence
  Description of Artificial Sequence: Synthetic oligonucleotide
  Sense strand starting at position 490 of SEQ ID NO: 914570
cuuugaaaguuggcucaaa

SEQ ID NO: 1014031 - RNA, 19 nt, Artificial Sequence
  Description of Artificial Sequence: Synthetic oligonucleotide
  Antisense strand to SEQ ID NO: 1014030
uuugagccaacuuucaaag

SEQ ID NO: 1014032 - RNA, 19 nt, Artificial Sequence
  Description of Artificial Sequence: Synthetic oligonucleotide
  Sense strand starting at position 491 of SEQ ID NO: 914570
uuugaaaguuggcucaaau

SEQ ID NO: 1014033 - RNA, 19 nt, Artificial Sequence
  Description of Artificial Sequence: Synthetic oligonucleotide
  Antisense strand to SEQ ID NO: 1014032
auuugagccaacuuucaaa

SEQ ID NO: 1014034 - RNA, 19 nt, Artificial Sequence
  Description of Artificial Sequence: Synthetic oligonucleotide
  Sense strand starting at position 871 of SEQ ID NO: 914570
uugucaucuguggaaugga

SEQ ID NO: 1014035 - RNA, 19 nt, Artificial Sequence
  Description of Artificial Sequence: Synthetic oligonucleotide
  Antisense strand to SEQ ID NO: 1014034
uccauuccacagaugacaa

SEQ ID NO: 1014036 - RNA, 19 nt, Artificial Sequence
  Description of Artificial Sequence: Synthetic oligonucleotide
  Sense strand starting at position 949 of SEQ ID NO: 914570
acaguacugccaugacuga

SEQ ID NO: 1014037 - RNA, 19 nt, Artificial Sequence
  Description of Artificial Sequence: Synthetic oligonucleotide
  Antisense strand to SEQ ID NO: 1014036
ucagucauggcaguacugu

SEQ ID NO: 1014038 - RNA, 19 nt, Artificial Sequence
  Description of Artificial Sequence: Synthetic oligonucleotide
  Sense strand starting at position 1005 of SEQ ID NO: 914570
cucuguaagguuugcauuu

SEQ ID NO: 1014039 - RNA, 19 nt, Artificial Sequence
  Description of Artificial Sequence: Synthetic oligonucleotide
  Antisense strand to SEQ ID NO: 1014038
aaaugcaaaccuuacagag

SEQ ID NO: 1014040 - RNA, 19 nt, Artificial Sequence
  Description of Artificial Sequence: Synthetic oligonucleotide
  Sense strand starting at position 1302 of SEQ ID NO: 914570
gggacucauuccucaaguu

SEQ ID NO: 1014041 - RNA, 19 nt, Artificial Sequence
  Description of Artificial Sequence: Synthetic oligonucleotide
  Antisense strand to SEQ ID NO: 1014040
aacuugaggaaugaguccc

SEQ ID NO: 1014042 - RNA, 19 nt, Artificial Sequence
  Description of Artificial Sequence: Synthetic oligonucleotide
  Sense strand starting at position 1303 of SEQ ID NO: 914570
ggacucauuccucaaguua

SEQ ID NO: 1014043 - RNA, 19 nt, Artificial Sequence
  Description of Artificial Sequence: Synthetic oligonucleotide
  Antisense strand to SEQ ID NO: 1014042
uaacuugaggaaugagucc

SEQ ID NO: 1014044 - RNA, 19 nt, Artificial Sequence
  Description of Artificial Sequence: Synthetic oligonucleotide
  Sense strand starting at position 1473 of SEQ ID NO: 914570
aggguagagacauguauac

SEQ ID NO: 1014045 - RNA, 19 nt, Artificial Sequence
  Description of Artificial Sequence: Synthetic oligonucleotide
  Antisense strand to SEQ ID NO: 1014044
guauacaugucucuacccu

SEQ ID NO: 1014046 - RNA, 19 nt, Artificial Sequence
  Description of Artificial Sequence: Synthetic oligonucleotide
  Sense strand starting at position 1846 of SEQ ID NO: 914570
cgcgauaagaaagauaauc

SEQ ID NO: 1014047 - RNA, 19 nt, Artificial Sequence
  Description of Artificial Sequence: Synthetic oligonucleotide
  Antisense strand to SEQ ID NO: 1014046
gauuaucuuucuuaucgcg

SEQ ID NO: 1014048 - RNA, 19 nt, Artificial Sequence
  Description of Artificial Sequence: Synthetic oligonucleotide
  Sense strand starting at position 1906 of SEQ ID NO: 914570
gcaggcuccgaagaucaua

SEQ ID NO: 1014049 - RNA, 19 nt, Artificial Sequence
  Description of Artificial Sequence: Synthetic oligonucleotide
  Antisense strand to SEQ ID NO: 1014048
uaugaucuucggagccugc

SEQ ID NO: 1014050 - RNA, 19 nt, Artificial Sequence
  Description of Artificial Sequence: Synthetic oligonucleotide
  Sense strand starting at position 2499 of SEQ ID NO: 914570
guauucguaauguuugcua

SEQ ID NO: 1014051 - RNA, 19 nt, Artificial Sequence
  Description of Artificial Sequence: Synthetic oligonucleotide
  Antisense strand to SEQ ID NO: 1014050
uagcaaacauuacgaauac

SEQ ID NO: 1014052 - RNA, 19 nt, Artificial Sequence
  Description of Artificial Sequence: Synthetic oligonucleotide
  Sense strand starting at position 2564 of SEQ ID NO: 914570
caguauuuacgagagcguu

SEQ ID NO: 1014053 - RNA, 19 nt, Artificial Sequence
  Description of Artificial Sequence: Synthetic oligonucleotide
  Antisense strand to SEQ ID NO: 1014052
aacgcucucguaaauacug

SEQ ID NO: 1014054 - RNA, 19 nt, Artificial Sequence
  Description of Artificial Sequence: Synthetic oligonucleotide
  Sense strand starting at position 2605 of SEQ ID NO: 914570
aggagcacaagauguaauu

SEQ ID NO: 1014055 - RNA, 19 nt, Artificial Sequence
  Description of Artificial Sequence: Synthetic oligonucleotide
  Antisense strand to SEQ ID NO: 1014054
aauuacaucuugugcuccu

SEQ ID NO: 1014056 - RNA, 19 nt, Artificial Sequence
  Description of Artificial Sequence: Synthetic oligonucleotide
  Sense strand starting at position 2622 of SEQ ID NO: 914570
uuauuaagauggcuacuua

SEQ ID NO: 1014057 - RNA, 19 nt, Artificial Sequence
  Description of Artificial Sequence: Synthetic oligonucleotide
  Antisense strand to SEQ ID NO: 1014056
uaaguagccaucuuaauaa

SEQ ID NO: 1014058 - RNA, 19 nt, Artificial Sequence
  Description of Artificial Sequence: Synthetic oligonucleotide
  Sense strand starting at position 2737 of SEQ ID NO: 914570
aauagagaucuugguuguu

SEQ ID NO: 1014059 - RNA, 19 nt, Artificial Sequence
  Description of Artificial Sequence: Synthetic oligonucleotide
  Antisense strand to SEQ ID NO: 1014058
aacaaccaagaucucuauu

SEQ ID NO: 1014060 - RNA, 19 nt, Artificial Sequence
  Description of Artificial Sequence: Synthetic oligonucleotide
  Sense strand starting at position 2740 of SEQ ID NO: 914570
agagaucuugguuguuuag

SEQ ID NO: 1014061 - RNA, 19 nt, Artificial Sequence
  Description of Artificial Sequence: Synthetic oligonucleotide
  Antisense strand to SEQ ID NO: 1014060
cuaaacaaccaagaucucu

SEQ ID NO: 1014062 - RNA, 19 nt, Artificial Sequence
  Description of Artificial Sequence: Synthetic oligonucleotide
  Sense strand starting at position 2764 of SEQ ID NO: 914570
cuugguaucucaucacaua

SEQ ID NO: 1014063 - RNA, 19 nt, Artificial Sequence
  Description of Artificial Sequence: Synthetic oligonucleotide
  Antisense strand to SEQ ID NO: 1014062
uaugugaugagauaccaag

SEQ ID NO: 1014064 - RNA, 19 nt, Artificial Sequence
  Description of Artificial Sequence: Synthetic oligonucleotide
  Sense strand starting at position 2776 of SEQ ID NO: 914570
ucacauagaccuugacgua

SEQ ID NO: 1014065 - RNA, 19 nt, Artificial Sequence
  Description of Artificial Sequence: Synthetic oligonucleotide
  Antisense strand to SEQ ID NO: 1014064
uacgucaaggucuauguga

SEQ ID NO: 1014066 - RNA, 19 nt, Artificial Sequence
  Description of Artificial Sequence: Synthetic oligonucleotide
  Sense strand starting at position 2777 of SEQ ID NO: 914570
cacauagaccuugacguau

SEQ ID NO: 1014067 - RNA, 19 nt, Artificial Sequence
  Description of Artificial Sequence: Synthetic oligonucleotide
  Antisense strand to SEQ ID NO: 1014066
auacgucaaggucuaugug

SEQ ID NO: 1014068 - RNA, 19 nt, Artificial Sequence
  Description of Artificial Sequence: Synthetic oligonucleotide
  Sense strand starting at position 2791 of SEQ ID NO: 914570
cguauaguagcugcucaau

SEQ ID NO: 1014069 - RNA, 19 nt, Artificial Sequence
  Description of Artificial Sequence: Synthetic oligonucleotide
  Antisense strand to SEQ ID NO: 1014068
auugagcagcuacuauacg

SEQ ID NO: 1014070 - RNA, 19 nt, Artificial Sequence
  Description of Artificial Sequence: Synthetic oligonucleotide
  Sense strand starting at position 2794 of SEQ ID NO: 914570
auaguagcugcucaauuaa

SEQ ID NO: 1014071 - RNA, 19 nt, Artificial Sequence
  Description of Artificial Sequence: Synthetic oligonucleotide
  Antisense strand to SEQ ID NO: 1014070
uuaauugagcagcuacuau

SEQ ID NO: 1014072 - RNA, 19 nt, Artificial Sequence
  Description of Artificial Sequence: Synthetic oligonucleotide
  Sense strand starting at position 3039 of SEQ ID NO: 914570
cgcgaucaucaugcuaguu

SEQ ID NO: 1014073 - RNA, 19 nt, Artificial Sequence
  Description of Artificial Sequence: Synthetic oligonucleotide
  Antisense strand to SEQ ID NO: 1014072
aacuagcaugaugaucgcg

SEQ ID NO: 1014074 - RNA, 19 nt, Artificial Sequence
  Description of Artificial Sequence: Synthetic oligonucleotide
  Sense strand starting at position 3207 of SEQ ID NO: 914570
uccuaccuggauuguaauu

SEQ ID NO: 1014075 - RNA, 19 nt, Artificial Sequence
  Description of Artificial Sequence: Synthetic oligonucleotide
  Antisense strand to SEQ ID NO: 1014074
aauuacaauccagguagga

SEQ ID NO: 1014076 - RNA, 19 nt, Artificial Sequence
  Description of Artificial Sequence: Synthetic oligonucleotide
  Sense strand starting at position 3272 of SEQ ID NO: 914570
guugcauauagccaagaga

SEQ ID NO: 1014077 - RNA, 19 nt, Artificial Sequence
  Description of Artificial Sequence: Synthetic oligonucleotide
  Antisense strand to SEQ ID NO: 1014076
ucucuuggcuauaugcaac

SEQ ID NO: 1014078 - RNA, 19 nt, Artificial Sequence
  Description of Artificial Sequence: Synthetic oligonucleotide
  Sense strand starting at position 3280 of SEQ ID NO: 914570
uagccaagagagugaucuu

SEQ ID NO: 1014079 - RNA, 19 nt, Artificial Sequence
  Description of Artificial Sequence: Synthetic oligonucleotide
  Antisense strand to SEQ ID NO: 1014078
aagaucacucucuuggcua

SEQ ID NO: 1014080 - RNA, 19 nt, Artificial Sequence
  Description of Artificial Sequence: Synthetic oligonucleotide
  Sense strand starting at position 3281 of SEQ ID NO: 914570
agccaagagagugaucuuu

SEQ ID NO: 1014081 - RNA, 19 nt, Artificial Sequence
  Description of Artificial Sequence: Synthetic oligonucleotide
  Antisense strand to SEQ ID NO: 1014080
aaagaucacucucuuggcu

SEQ ID NO: 1014082 - RNA, 19 nt, Artificial Sequence
  Description of Artificial Sequence: Synthetic oligonucleotide
  Sense strand starting at position 3366 of SEQ ID NO: 914570
uucuuaaugugaccugaga

SEQ ID NO: 1014083 - RNA, 19 nt, Artificial Sequence
  Description of Artificial Sequence: Synthetic oligonucleotide
  Antisense strand to SEQ ID NO: 1014082
ucucaggucacauuaagaa

SEQ ID NO: 1014084 - RNA, 19 nt, Artificial Sequence
  Description of Artificial Sequence: Synthetic oligonucleotide
  Sense strand starting at position 3495 of SEQ ID NO: 914570
agggcaagauuccuucuau

SEQ ID NO: 1014085 - RNA, 19 nt, Artificial Sequence
  Description of Artificial Sequence: Synthetic oligonucleotide
  Antisense strand to SEQ ID NO: 1014084
auagaaggaaucuugcccu

SEQ ID NO: 1014086 - RNA, 19 nt, Artificial Sequence
  Description of Artificial Sequence: Synthetic oligonucleotide
  Sense strand starting at position 3496 of SEQ ID NO: 914570
gggcaagauuccuucuauu

SEQ ID NO: 1014087 - RNA, 19 nt, Artificial Sequence
  Description of Artificial Sequence: Synthetic oligonucleotide
  Antisense strand to SEQ ID NO: 1014086
aauagaaggaaucuugccc

SEQ ID NO: 1014088 - RNA, 19 nt, Artificial Sequence
  Description of Artificial Sequence: Synthetic oligonucleotide
  Sense strand starting at position 3587 of SEQ ID NO: 914570
agguaucacagugagguuu

SEQ ID NO: 1014089 - RNA, 19 nt, Artificial Sequence
  Description of Artificial Sequence: Synthetic oligonucleotide
  Antisense strand to SEQ ID NO: 1014088
aaaccucacugugauaccu

SEQ ID NO: 1014090 - RNA, 19 nt, Artificial Sequence
  Description of Artificial Sequence: Synthetic oligonucleotide
  Sense strand starting at position 3684 of SEQ ID NO: 914570
accagagucuauucuauuc

SEQ ID NO: 1014091 - RNA, 19 nt, Artificial Sequence
  Description of Artificial Sequence: Synthetic oligonucleotide
  Antisense strand to SEQ ID NO: 1014090
gaauagaauagacucuggu

SEQ ID NO: 1014092 - RNA, 19 nt, Artificial Sequence
  Description of Artificial Sequence: Synthetic oligonucleotide
  Sense strand starting at position 3735 of SEQ ID NO: 914570
augcgaaggucauuaagag

SEQ ID NO: 1014093 - RNA, 19 nt, Artificial Sequence
  Description of Artificial Sequence: Synthetic oligonucleotide
  Antisense strand to SEQ ID NO: 1014092
cucuuaaugaccuucgcau

SEQ ID NO: 1014094 - RNA, 19 nt, Artificial Sequence
  Description of Artificial Sequence: Synthetic oligonucleotide
  Sense strand starting at position 3736 of SEQ ID NO: 914570
ugcgaaggucauuaagaga

SEQ ID NO: 1014095 - RNA, 19 nt, Artificial Sequence
  Description of Artificial Sequence: Synthetic oligonucleotide
  Antisense strand to SEQ ID NO: 1014094
ucucuuaaugaccuucgca

SEQ ID NO: 1014096 - RNA, 19 nt, Artificial Sequence
  Description of Artificial Sequence: Synthetic oligonucleotide
  Sense strand starting at position 3810 of SEQ ID NO: 914570
gcucuauaaccuuaggcaa

SEQ ID NO: 1014097 - RNA, 19 nt, Artificial Sequence
  Description of Artificial Sequence: Synthetic oligonucleotide
  Antisense strand to SEQ ID NO: 1014096
uugccuaagguuauagagc

SEQ ID NO: 1014098 - RNA, 19 nt, Artificial Sequence
  Description of Artificial Sequence: Synthetic oligonucleotide
  Sense strand starting at position 3895 of SEQ ID NO: 914570
uuguaauacuacucuaagg

SEQ ID NO: 1014099 - RNA, 19 nt, Artificial Sequence
  Description of Artificial Sequence: Synthetic oligonucleotide
  Antisense strand to SEQ ID NO: 1014098
ccuuagaguaguauuacaa

SEQ ID NO: 1014100 - RNA, 19 nt, Artificial Sequence
  Description of Artificial Sequence: Synthetic oligonucleotide
  Sense strand starting at position 3931 of SEQ ID NO: 914570
uuguaaagugcuuagaacu

SEQ ID NO: 1014101 - RNA, 19 nt, Artificial Sequence
  Description of Artificial Sequence: Synthetic oligonucleotide
  Antisense strand to SEQ ID NO: 1014100
aguucuaagcacuuuacaa

SEQ ID NO: 1014102 - RNA, 19 nt, Artificial Sequence
  Description of Artificial Sequence: Synthetic oligonucleotide
  Sense strand starting at position 63 of SEQ ID NO: 914571
ggauuugcuucuccagugu

SEQ ID NO: 1014103 - RNA, 19 nt, Artificial Sequence
  Description of Artificial Sequence: Synthetic oligonucleotide
  Antisense strand to SEQ ID NO: 1014102
acacuggagaagcaaaucc

SEQ ID NO: 1014104 - RNA, 19 nt, Artificial Sequence
  Description of Artificial Sequence: Synthetic oligonucleotide
  Sense strand starting at position 222 of SEQ ID NO: 914571
agcucaauaugacuuggaa

SEQ ID NO: 1014105 - RNA, 19 nt, Artificial Sequence
  Description of Artificial Sequence: Synthetic oligonucleotide
  Antisense strand to SEQ ID NO: 1014104
uuccaagucauauugagcu

SEQ ID NO: 1014106 - RNA, 19 nt, Artificial Sequence
  Description of Artificial Sequence: Synthetic oligonucleotide
  Sense strand starting at position 357 of SEQ ID NO: 914571
caggaagaaucaucucugu

SEQ ID NO: 1014107 - RNA, 19 nt, Artificial Sequence
  Description of Artificial Sequence: Synthetic oligonucleotide
  Antisense strand to SEQ ID NO: 1014106
acagagaugauucuuccug

SEQ ID NO: 1014108 - RNA, 19 nt, Artificial Sequence
  Description of Artificial Sequence: Synthetic oligonucleotide
  Sense strand starting at position 879 of SEQ ID NO: 914571
auaauaauucuugguguag

SEQ ID NO: 1014109 - RNA, 19 nt, Artificial Sequence
  Description of Artificial Sequence: Synthetic oligonucleotide
  Antisense strand to SEQ ID NO: 1014108
cuacaccaagaauuauuau

SEQ ID NO: 1014110 - RNA, 19 nt, Artificial Sequence
  Description of Artificial Sequence: Synthetic oligonucleotide
  Sense strand starting at position 883 of SEQ ID NO: 914571
uaauucuugguguaggcaa

SEQ ID NO: 1014111 - RNA, 19 nt, Artificial Sequence
  Description of Artificial Sequence: Synthetic oligonucleotide
  Antisense strand to SEQ ID NO: 1014110
uugccuacaccaagaauua

SEQ ID NO: 1014112 - RNA, 19 nt, Artificial Sequence
  Description of Artificial Sequence: Synthetic oligonucleotide
  Sense strand starting at position 1100 of SEQ ID NO: 914571
ggcuccuucucauuugcau

SEQ ID NO: 1014113 - RNA, 19 nt, Artificial Sequence
  Description of Artificial Sequence: Synthetic oligonucleotide
  Antisense strand to SEQ ID NO: 1014112
augcaaaugagaaggagcc

SEQ ID NO: 1014114 - RNA, 19 nt, Artificial Sequence
  Description of Artificial Sequence: Synthetic oligonucleotide
  Sense strand starting at position 1227 of SEQ ID NO: 914571
uauugaauagauugucaga

SEQ ID NO: 1014115 - RNA, 19 nt, Artificial Sequence
  Description of Artificial Sequence: Synthetic oligonucleotide
  Antisense strand to SEQ ID NO: 1014114
ucugacaaucuauucaaua

SEQ ID NO: 1014116 - RNA, 19 nt, Artificial Sequence
  Description of Artificial Sequence: Synthetic oligonucleotide
  Sense strand starting at position 1229 of SEQ ID NO: 914571
uugaauagauugucagaua

SEQ ID NO: 1014117 - RNA, 19 nt, Artificial Sequence
  Description of Artificial Sequence: Synthetic oligonucleotide
  Antisense strand to SEQ ID NO: 1014116
uaucugacaaucuauucaa

SEQ ID NO: 1014118 - RNA, 19 nt, Artificial Sequence
  Description of Artificial Sequence: Synthetic oligonucleotide
  Sense strand starting at position 1293 of SEQ ID NO: 914571
aucugaaguuuagugagaa

SEQ ID NO: 1014119 - RNA, 19 nt, Artificial Sequence
  Description of Artificial Sequence: Synthetic oligonucleotide
  Antisense strand to SEQ ID NO: 1014118
uucucacuaaacuucagau

SEQ ID NO: 1014120 - RNA, 19 nt, Artificial Sequence
  Description of Artificial Sequence: Synthetic oligonucleotide
  Sense strand starting at position 1379 of SEQ ID NO: 914571
uugguaagagcuuacagua

SEQ ID NO: 1014121 - RNA, 19 nt, Artificial Sequence
  Description of Artificial Sequence: Synthetic oligonucleotide
  Antisense strand to SEQ ID NO: 1014120
uacuguaagcucuuaccaa

SEQ ID NO: 1014122 - RNA, 19 nt, Artificial Sequence
  Description of Artificial Sequence: Synthetic oligonucleotide
  Sense strand starting at position 1581 of SEQ ID NO: 914571
guccgagugauagaaaugu

SEQ ID NO: 1014123 - RNA, 19 nt, Artificial Sequence
  Description of Artificial Sequence: Synthetic oligonucleotide
  Antisense strand to SEQ ID NO: 1014122
acauuucuaucacucggac

SEQ ID NO: 1014124 - RNA, 19 nt, Artificial Sequence
  Description of Artificial Sequence: Synthetic oligonucleotide
  Sense strand starting at position 1597 of SEQ ID NO: 914571
uguaaagaauggguaacuu

SEQ ID NO: 1014125 - RNA, 19 nt, Artificial Sequence
  Description of Artificial Sequence: Synthetic oligonucleotide
  Antisense strand to SEQ ID NO: 1014124
aaguuacccauucuuuaca

SEQ ID NO: 1014126 - RNA, 19 nt, Artificial Sequence
  Description of Artificial Sequence: Synthetic oligonucleotide
  Sense strand starting at position 1756 of SEQ ID NO: 914571
aggugagauucaguacuga

SEQ ID NO: 1014127 - RNA, 19 nt, Artificial Sequence
  Description of Artificial Sequence: Synthetic oligonucleotide
  Antisense strand to SEQ ID NO: 1014126
ucaguacugaaucucaccu

SEQ ID NO: 1014128 - RNA, 19 nt, Artificial Sequence
  Description of Artificial Sequence: Synthetic oligonucleotide
  Sense strand starting at position 1764 of SEQ ID NO: 914571
uucaguacugacgagguaa

SEQ ID NO: 1014129 - RNA, 19 nt, Artificial Sequence
  Description of Artificial Sequence: Synthetic oligonucleotide
  Antisense strand to SEQ ID NO: 1014128
uuaccucgucaguacugaa

SEQ ID NO: 1014130 - RNA, 19 nt, Artificial Sequence
  Description of Artificial Sequence: Synthetic oligonucleotide
  Sense strand starting at position 2191 of SEQ ID NO: 914571
caggauuaauacccguaua

SEQ ID NO: 1014131 - RNA, 19 nt, Artificial Sequence
  Description of Artificial Sequence: Synthetic oligonucleotide
  Antisense strand to SEQ ID NO: 1014130
uauacggguauuaauccug

SEQ ID NO: 1014132 - RNA, 19 nt, Artificial Sequence
  Description of Artificial Sequence: Synthetic oligonucleotide
  Sense strand starting at position 2264 of SEQ ID NO: 914571
aaaucaccggaguaaguua

SEQ ID NO: 1014133 - RNA, 19 nt, Artificial Sequence
  Description of Artificial Sequence: Synthetic oligonucleotide
  Antisense strand to SEQ ID NO: 1014132
uaacuuacuccggugauuu

SEQ ID NO: 1014134 - RNA, 19 nt, Artificial Sequence
  Description of Artificial Sequence: Synthetic oligonucleotide
  Sense strand starting at position 2356 of SEQ ID NO: 914571
uucccugugcuggaggaau

SEQ ID NO: 1014135 - RNA, 19 nt, Artificial Sequence
  Description of Artificial Sequence: Synthetic oligonucleotide
  Antisense strand to SEQ ID NO: 1014134
auuccuccagcacagggaa

SEQ ID NO: 1014136 - RNA, 19 nt, Artificial Sequence
  Description of Artificial Sequence: Synthetic oligonucleotide
  Sense strand starting at position 2419 of SEQ ID NO: 914571
aggacagaauugccuugaa

SEQ ID NO: 1014137 - RNA, 19 nt, Artificial Sequence
  Description of Artificial Sequence: Synthetic oligonucleotide
  Antisense strand to SEQ ID NO: 1014136
uucaaggcaauucuguccu

SEQ ID NO: 1014138 - RNA, 19 nt, Artificial Sequence
  Description of Artificial Sequence: Synthetic oligonucleotide
  Sense strand starting at position 2422 of SEQ ID NO: 914571
acagaauugccuugaagau

SEQ ID NO: 1014139 - RNA, 19 nt, Artificial Sequence
  Description of Artificial Sequence: Synthetic oligonucleotide
  Antisense strand to SEQ ID NO: 1014138
aucuucaaggcaauucugu

SEQ ID NO: 1014140 - RNA, 19 nt, Artificial Sequence
  Description of Artificial Sequence: Synthetic oligonucleotide
  Sense strand starting at position 2509 of SEQ ID NO: 914571
acaauuuacccgugcuuaa

SEQ ID NO: 1014141 - RNA, 19 nt, Artificial Sequence
  Description of Artificial Sequence: Synthetic oligonucleotide
  Antisense strand to SEQ ID NO: 1014140
uuaagcacggguaaauugu

SEQ ID NO: 1014142 - RNA, 19 nt, Artificial Sequence
  Description of Artificial Sequence: Synthetic oligonucleotide
  Sense strand starting at position 2634 of SEQ ID NO: 914571
ugcggagauuucuuuguuu

SEQ ID NO: 1014143 - RNA, 19 nt, Artificial Sequence
  Description of Artificial Sequence: Synthetic oligonucleotide
  Antisense strand to SEQ ID NO: 1014142
aaacaaagaaaucuccgca

SEQ ID NO: 1014144 - RNA, 19 nt, Artificial Sequence
  Description of Artificial Sequence: Synthetic oligonucleotide
  Sense strand starting at position 2718 of SEQ ID NO: 914571
gaugaagugcuuugagaac

SEQ ID NO: 1014145 - RNA, 19 nt, Artificial Sequence
  Description of Artificial Sequence: Synthetic oligonucleotide
  Antisense strand to SEQ ID NO: 1014144
guucucaaagcacuucauc

SEQ ID NO: 1014146 - RNA, 19 nt, Artificial Sequence
  Description of Artificial Sequence: Synthetic oligonucleotide
  Sense strand starting at position 2748 of SEQ ID NO: 914571
agcuuacauuuacaagaag

SEQ ID NO: 1014147 - RNA, 19 nt, Artificial Sequence
  Description of Artificial Sequence: Synthetic oligonucleotide
  Antisense strand to SEQ ID NO: 1014146
cuucuuguaaauguaagcu

SEQ ID NO: 1014148 - RNA, 19 nt, Artificial Sequence
  Description of Artificial Sequence: Synthetic oligonucleotide
  Sense strand starting at position 2832 of SEQ ID NO: 914571
gguugagguaaauacucuu

SEQ ID NO: 1014149 - RNA, 19 nt, Artificial Sequence
  Description of Artificial Sequence: Synthetic oligonucleotide
  Antisense strand to SEQ ID NO: 1014148
aagaguauuuaccucaacc

SEQ ID NO: 1014150 - RNA, 19 nt, Artificial Sequence
  Description of Artificial Sequence: Synthetic oligonucleotide
  Sense strand starting at position 2835 of SEQ ID NO: 914571
ugagguaaauacucuuucu

SEQ ID NO: 1014151 - RNA, 19 nt, Artificial Sequence
  Description of Artificial Sequence: Synthetic oligonucleotide
  Antisense strand to SEQ ID NO: 1014150
agaaagaguauuuaccuca

SEQ ID NO: 1014152 - RNA, 19 nt, Artificial Sequence
  Description of Artificial Sequence: Synthetic oligonucleotide
  Sense strand starting at position 2885 of SEQ ID NO: 914571
gcaagaagcuuuccaagag

SEQ ID NO: 1014153 - RNA, 19 nt, Artificial Sequence
  Description of Artificial Sequence: Synthetic oligonucleotide
  Antisense strand to SEQ ID NO: 1014152
cucuuggaaagcuucuugc

SEQ ID NO: 1014154 - RNA, 19 nt, Artificial Sequence
  Description of Artificial Sequence: Synthetic oligonucleotide
  Sense strand starting at position 2918 of SEQ ID NO: 914571
accauucuaugagucugaa

SEQ ID NO: 1014155 - RNA, 19 nt, Artificial Sequence
  Description of Artificial Sequence: Synthetic oligonucleotide
  Antisense strand to SEQ ID NO: 1014154
uucagacucauagaauggu

SEQ ID NO: 1014156 - RNA, 19 nt, Artificial Sequence
  Description of Artificial Sequence: Synthetic oligonucleotide
  Sense strand starting at position 2921 of SEQ ID NO: 914571
auucuaugagucugaaucu

SEQ ID NO: 1014157 - RNA, 19 nt, Artificial Sequence
  Description of Artificial Sequence: Synthetic oligonucleotide
  Antisense strand to SEQ ID NO: 1014156
agauucagacucauagaau

SEQ ID NO: 1014158 - RNA, 19 nt, Artificial Sequence
  Description of Artificial Sequence: Synthetic oligonucleotide
  Sense strand starting at position 3007 of SEQ ID NO: 914571
acuaaucgaccuuguaaua

SEQ ID NO: 1014159 - RNA, 19 nt, Artificial Sequence
  Description of Artificial Sequence: Synthetic oligonucleotide
  Antisense strand to SEQ ID NO: 1014158
uauuacaaggucgauuagu

SEQ ID NO: 1014160 - RNA, 19 nt, Artificial Sequence
  Description of Artificial Sequence: Synthetic oligonucleotide
  Sense strand starting at position 3206 of SEQ ID NO: 914571
uauagaauggauggcuuau

SEQ ID NO: 1014161 - RNA, 19 nt, Artificial Sequence
  Description of Artificial Sequence: Synthetic oligonucleotide
  Antisense strand to SEQ ID NO: 1014160
auaagccauccauucuaua

SEQ ID NO: 1014162 - RNA, 19 nt, Artificial Sequence
  Description of Artificial Sequence: Synthetic oligonucleotide
  Sense strand starting at position 3208 of SEQ ID NO: 914571
uagaauggauggcuuauaa

SEQ ID NO: 1014163 - RNA, 19 nt, Artificial Sequence
  Description of Artificial Sequence: Synthetic oligonucleotide
  Antisense strand to SEQ ID NO: 1014162
uuauaagccauccauucua

SEQ ID NO: 1014164 - RNA, 19 nt, Artificial Sequence
  Description of Artificial Sequence: Synthetic oligonucleotide
  Sense strand starting at position 3249 of SEQ ID NO: 914571
aguucuggaggcuggauaa

SEQ ID NO: 1014165 - RNA, 19 nt, Artificial Sequence
  Description of Artificial Sequence: Synthetic oligonucleotide
  Antisense strand to SEQ ID NO: 1014164
uuauccagccuccagaacu

SEQ ID NO: 1014166 - RNA, 19 nt, Artificial Sequence
  Description of Artificial Sequence: Synthetic oligonucleotide
  Sense strand starting at position 3494 of SEQ ID NO: 914571
aacaaacauucggucuaga

SEQ ID NO: 1014167 - RNA, 19 nt, Artificial Sequence
  Description of Artificial Sequence: Synthetic oligonucleotide
  Antisense strand to SEQ ID NO: 1014166
ucuagaccgaauguuuguu

SEQ ID NO: 1014168 - RNA, 19 nt, Artificial Sequence
  Description of Artificial Sequence: Synthetic oligonucleotide
  Sense strand starting at position 3497 of SEQ ID NO: 914571
aaacauucggucuagagca

SEQ ID NO: 1014169 - RNA, 19 nt, Artificial Sequence
  Description of Artificial Sequence: Synthetic oligonucleotide
  Antisense strand to SEQ ID NO: 1014168
ugcucuagaccgaauguuu

SEQ ID NO: 1014170 - RNA, 19 nt, Artificial Sequence
  Description of Artificial Sequence: Synthetic oligonucleotide
  Sense strand starting at position 3499 of SEQ ID NO: 914571
acauucggucuagagcaau

SEQ ID NO: 1014171 - RNA, 19 nt, Artificial Sequence
  Description of Artificial Sequence: Synthetic oligonucleotide
  Antisense strand to SEQ ID NO: 1014170
auugcucuagaccgaaugu

SEQ ID NO: 1014172 - RNA, 19 nt, Artificial Sequence
  Description of Artificial Sequence: Synthetic oligonucleotide
  Sense strand starting at position 3591 of SEQ ID NO: 914571
auacuaugugcuuaaagaa

SEQ ID NO: 1014173 - RNA, 19 nt, Artificial Sequence
  Description of Artificial Sequence: Synthetic oligonucleotide
  Antisense strand to SEQ ID NO: 1014172
uucuuuaagcacauaguau

SEQ ID NO: 1014174 - RNA, 19 nt, Artificial Sequence
  Description of Artificial Sequence: Synthetic oligonucleotide
  Sense strand starting at position 3803 of SEQ ID NO: 914571
agucacauggcuuaaucaa

SEQ ID NO: 1014175 - RNA, 19 nt, Artificial Sequence
  Description of Artificial Sequence: Synthetic oligonucleotide
  Antisense strand to SEQ ID NO: 1014174
uugauuaagccaugugacu

SEQ ID NO: 1014176 - RNA, 19 nt, Artificial Sequence
  Description of Artificial Sequence: Synthetic oligonucleotide
  Sense strand starting at position 3925 of SEQ ID NO: 914571
ugacuuuaguauuuguagu

SEQ ID NO: 1014177 - RNA, 19 nt, Artificial Sequence
  Description of Artificial Sequence: Synthetic oligonucleotide
  Antisense strand to SEQ ID NO: 1014176
acuacaaauacuaaaguca

SEQ ID NO: 1014178 - RNA, 19 nt, Artificial Sequence
  Description of Artificial Sequence: Synthetic oligonucleotide
  Sense strand starting at position 3927 of SEQ ID NO: 914571
acuuuaguauuuguaguca

SEQ ID NO: 1014179 - RNA, 19 nt, Artificial Sequence
  Description of Artificial Sequence: Synthetic oligonucleotide
  Antisense strand to SEQ ID NO: 1014178
ugacuacaaauacuaaagu

SEQ ID NO: 1014180 - RNA, 19 nt, Artificial Sequence
  Description of Artificial Sequence: Synthetic oligonucleotide
  Sense strand starting at position 3943 of SEQ ID NO: 914571
ucacaagcaggguaucaua

SEQ ID NO: 1014181 - RNA, 19 nt, Artificial Sequence
  Description of Artificial Sequence: Synthetic oligonucleotide
  Antisense strand to SEQ ID NO: 1014180
uaugauacccugcuuguga

SEQ ID NO: 1014182 - RNA, 19 nt, Artificial Sequence
  Description of Artificial Sequence: Synthetic oligonucleotide
  Sense strand starting at position 86 of SEQ ID NO: 914572
cucuuaagguuucucagaa

SEQ ID NO: 1014183 - RNA, 19 nt, Artificial Sequence
  Description of Artificial Sequence: Synthetic oligonucleotide
  Antisense strand to SEQ ID NO: 1014182
uucugagaaaccuuaagag

SEQ ID NO: 1014184 - RNA, 19 nt, Artificial Sequence
  Description of Artificial Sequence: Synthetic oligonucleotide
  Sense strand starting at position 120 of SEQ ID NO: 914572
gucuccaguugguuacuaa

SEQ ID NO: 1014185 - RNA, 19 nt, Artificial Sequence
  Description of Artificial Sequence: Synthetic oligonucleotide
  Antisense strand to SEQ ID NO: 1014184
uuaguaaccaacuggagac

SEQ ID NO: 1014186 - RNA, 19 nt, Artificial Sequence
  Description of Artificial Sequence: Synthetic oligonucleotide
  Sense strand starting at position 123 of SEQ ID NO: 914572
uccaguugguuacuaagau

SEQ ID NO: 1014187 - RNA, 19 nt, Artificial Sequence
  Description of Artificial Sequence: Synthetic oligonucleotide
  Antisense strand to SEQ ID NO: 1014186
aucuuaguaaccaacugga

SEQ ID NO: 1014188 - RNA, 19 nt, Artificial Sequence
  Description of Artificial Sequence: Synthetic oligonucleotide
  Sense strand starting at position 297 of SEQ ID NO: 914572
uugcccagacucugugauu

SEQ ID NO: 1014189 - RNA, 19 nt, Artificial Sequence
  Description of Artificial Sequence: Synthetic oligonucleotide
  Antisense strand to SEQ ID NO: 1014188
aaucacagagucugggcaa

SEQ ID NO: 1014190 - RNA, 19 nt, Artificial Sequence
  Description of Artificial Sequence: Synthetic oligonucleotide
  Sense strand starting at position 298 of SEQ ID NO: 914572
ugcccagacucugugauua

SEQ ID NO: 1014191 - RNA, 19 nt, Artificial Sequence
  Description of Artificial Sequence: Synthetic oligonucleotide
  Antisense strand to SEQ ID NO: 1014190
uaaucacagagucugggca

SEQ ID NO: 1014192 - RNA, 19 nt, Artificial Sequence
  Description of Artificial Sequence: Synthetic oligonucleotide
  Sense strand starting at position 302 of SEQ ID NO: 914572
cagacucugugauuagacu

SEQ ID NO: 1014193 - RNA, 19 nt, Artificial Sequence
  Description of Artificial Sequence: Synthetic oligonucleotide
  Antisense strand to SEQ ID NO: 1014192
agucuaaucacagagucug

SEQ ID NO: 1014194 - RNA, 19 nt, Artificial Sequence
  Description of Artificial Sequence: Synthetic oligonucleotide
  Sense strand starting at position 309 of SEQ ID NO: 914572
ugugauuagacucagggca

SEQ ID NO: 1014195 - RNA, 19 nt, Artificial Sequence
  Description of Artificial Sequence: Synthetic oligonucleotide
  Antisense strand to SEQ ID NO: 1014194
ugcccugagucuaaucaca

SEQ ID NO: 1014196 - RNA, 19 nt, Artificial Sequence
  Description of Artificial Sequence: Synthetic oligonucleotide
  Sense strand starting at position 404 of SEQ ID NO: 914572
gcuguugccuucuuauuua

SEQ ID NO: 1014197 - RNA, 19 nt, Artificial Sequence
  Description of Artificial Sequence: Synthetic oligonucleotide
  Antisense strand to SEQ ID NO: 1014196
uaaauaagaaggcaacagc

SEQ ID NO: 1014198 - RNA, 19 nt, Artificial Sequence
  Description of Artificial Sequence: Synthetic oligonucleotide
  Sense strand starting at position 485 of SEQ ID NO: 914572
gcagguccugguuagauga

SEQ ID NO: 1014199 - RNA, 19 nt, Artificial Sequence
  Description of Artificial Sequence: Synthetic oligonucleotide
  Antisense strand to SEQ ID NO: 1014198
ucaucuaaccaggaccugc

SEQ ID NO: 1014200 - RNA, 19 nt, Artificial Sequence
  Description of Artificial Sequence: Synthetic oligonucleotide
  Sense strand starting at position 498 of SEQ ID NO: 914572
agaugaaugguccggcucu

SEQ ID NO: 1014201 - RNA, 19 nt, Artificial Sequence
  Description of Artificial Sequence: Synthetic oligonucleotide
  Antisense strand to SEQ ID NO: 1014200
agagccggaccauucaucu

SEQ ID NO: 1014202 - RNA, 19 nt, Artificial Sequence
  Description of Artificial Sequence: Synthetic oligonucleotide
  Sense strand starting at position 636 of SEQ ID NO: 914572
ggcuucucugagcaagucu

SEQ ID NO: 1014203 - RNA, 19 nt, Artificial Sequence
  Description of Artificial Sequence: Synthetic oligonucleotide
  Antisense strand to SEQ ID NO: 1014202
agacuugcucagagaagcc

SEQ ID NO: 1014204 - RNA, 19 nt, Artificial Sequence
  Description of Artificial Sequence: Synthetic oligonucleotide
  Sense strand starting at position 644 of SEQ ID NO: 914572
ugagcaagucugggaacau

SEQ ID NO: 1014205 - RNA, 19 nt, Artificial Sequence
  Description of Artificial Sequence: Synthetic oligonucleotide
  Antisense strand to SEQ ID NO: 1014204
auguucccagacuugcuca

SEQ ID NO: 1014206 - RNA, 19 nt, Artificial Sequence
  Description of Artificial Sequence: Synthetic oligonucleotide
  Sense strand starting at position 731 of SEQ ID NO: 914572
aauaucuuaggguaaguuu

SEQ ID NO: 1014207 - RNA, 19 nt, Artificial Sequence
  Description of Artificial Sequence: Synthetic oligonucleotide
  Antisense strand to SEQ ID NO: 1014206
aaacuuacccuaagauauu

SEQ ID NO: 1014208 - RNA, 19 nt, Artificial Sequence
  Description of Artificial Sequence: Synthetic oligonucleotide
  Sense strand starting at position 775 of SEQ ID NO: 914572
ggguuuggcuccuucauga

SEQ ID NO: 1014209 - RNA, 19 nt, Artificial Sequence
  Description of Artificial Sequence: Synthetic oligonucleotide
  Antisense strand to SEQ ID NO: 1014208
ucaugaaggagccaaaccc

SEQ ID NO: 1014210 - RNA, 19 nt, Artificial Sequence
  Description of Artificial Sequence: Synthetic oligonucleotide
  Sense strand starting at position 791 of SEQ ID NO: 914572
ugaucuaacccagagugca

SEQ ID NO: 1014211 - RNA, 19 nt, Artificial Sequence
  Description of Artificial Sequence: Synthetic oligonucleotide
  Antisense strand to SEQ ID NO: 1014210
ugcacucuggguuagauca

SEQ ID NO: 1014212 - RNA, 19 nt, Artificial Sequence
  Description of Artificial Sequence: Synthetic oligonucleotide
  Sense strand starting at position 850 of SEQ ID NO: 914572
ugaagaaguuuccaagaaa

SEQ ID NO: 1014213 - RNA, 19 nt, Artificial Sequence
  Description of Artificial Sequence: Synthetic oligonucleotide
  Antisense strand to SEQ ID NO: 1014212
uuucuuggaaacuucuuca

SEQ ID NO: 1014214 - RNA, 19 nt, Artificial Sequence
  Description of Artificial Sequence: Synthetic oligonucleotide
  Sense strand starting at position 899 of SEQ ID NO: 914572
caaggaacccuguguuucu

SEQ ID NO: 1014215 - RNA, 19 nt, Artificial Sequence
  Description of Artificial Sequence: Synthetic oligonucleotide
  Antisense strand to SEQ ID NO: 1014214
agaaacacaggguuccuug

SEQ ID NO: 1014216 - RNA, 19 nt, Artificial Sequence
  Description of Artificial Sequence: Synthetic oligonucleotide
  Sense strand starting at position 1020 of SEQ ID NO: 914572
cguagugcuggagaccauu

SEQ ID NO: 1014217 - RNA, 19 nt, Artificial Sequence
  Description of Artificial Sequence: Synthetic oligonucleotide
  Antisense strand to SEQ ID NO: 1014216
aauggucuccagcacuacg

SEQ ID NO: 1014218 - RNA, 19 nt, Artificial Sequence
  Description of Artificial Sequence: Synthetic oligonucleotide
  Sense strand starting at position 1105 of SEQ ID NO: 914572
agacauuugucagauuaac

SEQ ID NO: 1014219 - RNA, 19 nt, Artificial Sequence
  Description of Artificial Sequence: Synthetic oligonucleotide
  Antisense strand to SEQ ID NO: 1014218
guuaaucugacaaaugucu

SEQ ID NO: 1014220 - RNA, 19 nt, Artificial Sequence
  Description of Artificial Sequence: Synthetic oligonucleotide
  Sense strand starting at position 1174 of SEQ ID NO: 914572
gcuaccaucuggucucaca

SEQ ID NO: 1014221 - RNA, 19 nt, Artificial Sequence
  Description of Artificial Sequence: Synthetic oligonucleotide
  Antisense strand to SEQ ID NO: 1014220
ugugagaccagaugguagc

SEQ ID NO: 1014222 - RNA, 19 nt, Artificial Sequence
  Description of Artificial Sequence: Synthetic oligonucleotide
  Sense strand starting at position 1223 of SEQ ID NO: 914572
aauagcuuccagugaguga

SEQ ID NO: 1014223 - RNA, 19 nt, Artificial Sequence
  Description of Artificial Sequence: Synthetic oligonucleotide
  Antisense strand to SEQ ID NO: 1014222
ucacucacuggaagcuauu

SEQ ID NO: 1014224 - RNA, 19 nt, Artificial Sequence
  Description of Artificial Sequence: Synthetic oligonucleotide
  Sense strand starting at position 1224 of SEQ ID NO: 914572
auagcuuccagugagugau

SEQ ID NO: 1014225 - RNA, 19 nt, Artificial Sequence
  Description of Artificial Sequence: Synthetic oligonucleotide
  Antisense strand to SEQ ID NO: 1014224
aucacucacuggaagcuau

SEQ ID NO: 1014226 - RNA, 19 nt, Artificial Sequence
  Description of Artificial Sequence: Synthetic oligonucleotide
  Sense strand starting at position 1314 of SEQ ID NO: 914572
aauguagugcccugaugac

SEQ ID NO: 1014227 - RNA, 19 nt, Artificial Sequence
  Description of Artificial Sequence: Synthetic oligonucleotide
  Antisense strand to SEQ ID NO: 1014226
gucaucagggcacuacauu

SEQ ID NO: 1014228 - RNA, 19 nt, Artificial Sequence
  Description of Artificial Sequence: Synthetic oligonucleotide
  Sense strand starting at position 1390 of SEQ ID NO: 914572
gccuccuuacgguaagaaa

SEQ ID NO: 1014229 - RNA, 19 nt, Artificial Sequence
  Description of Artificial Sequence: Synthetic oligonucleotide
  Antisense strand to SEQ ID NO: 1014228
uuucuuaccguaaggaggc

SEQ ID NO: 1014230 - RNA, 19 nt, Artificial Sequence
  Description of Artificial Sequence: Synthetic oligonucleotide
  Sense strand starting at position 1481 of SEQ ID NO: 914572
gaaguauccuguucccagu

SEQ ID NO: 1014231 - RNA, 19 nt, Artificial Sequence
  Description of Artificial Sequence: Synthetic oligonucleotide
  Antisense strand to SEQ ID NO: 1014230
acugggaacaggauacuuc

SEQ ID NO: 1014232 - RNA, 19 nt, Artificial Sequence
  Description of Artificial Sequence: Synthetic oligonucleotide
  Sense strand starting at position 1544 of SEQ ID NO: 914572
uccagcuuccucuaaagga

SEQ ID NO: 1014233 - RNA, 19 nt, Artificial Sequence
  Description of Artificial Sequence: Synthetic oligonucleotide
  Antisense strand to SEQ ID NO: 1014232
uccuuuagaggaagcugga

SEQ ID NO: 1014234 - RNA, 19 nt, Artificial Sequence
  Description of Artificial Sequence: Synthetic oligonucleotide
  Sense strand starting at position 1554 of SEQ ID NO: 914572
ucuaaaggaugucuccuaa

SEQ ID NO: 1014235 - RNA, 19 nt, Artificial Sequence
  Description of Artificial Sequence: Synthetic oligonucleotide
  Antisense strand to SEQ ID NO: 1014234
uuaggagacauccuuuaga

SEQ ID NO: 1014236 - RNA, 19 nt, Artificial Sequence
  Description of Artificial Sequence: Synthetic oligonucleotide
  Sense strand starting at position 1592 of SEQ ID NO: 914572
cugcuucuuccacagaaug

SEQ ID NO: 1014237 - RNA, 19 nt, Artificial Sequence
  Description of Artificial Sequence: Synthetic oligonucleotide
  Antisense strand to SEQ ID NO: 1014236
cauucuguggaagaagcag

SEQ ID NO: 1014238 - RNA, 19 nt, Artificial Sequence
  Description of Artificial Sequence: Synthetic oligonucleotide
  Sense strand starting at position 2080 of SEQ ID NO: 914572
cuucuuucccggcaauaau

SEQ ID NO: 1014239 - RNA, 19 nt, Artificial Sequence
  Description of Artificial Sequence: Synthetic oligonucleotide
  Antisense strand to SEQ ID NO: 1014238
auuauugccgggaaagaag

SEQ ID NO: 1014240 - RNA, 19 nt, Artificial Sequence
  Description of Artificial Sequence: Synthetic oligonucleotide
  Sense strand starting at position 2089 of SEQ ID NO: 914572
cggcaauaauugucucaac

SEQ ID NO: 1014241 - RNA, 19 nt, Artificial Sequence
  Description of Artificial Sequence: Synthetic oligonucleotide
  Antisense strand to SEQ ID NO: 1014240
guugagacaauuauugccg

SEQ ID NO: 1014242 - RNA, 19 nt, Artificial Sequence
  Description of Artificial Sequence: Synthetic oligonucleotide
  Sense strand starting at position 2090 of SEQ ID NO: 914572
ggcaauaauugucucaacu

SEQ ID NO: 1014243 - RNA, 19 nt, Artificial Sequence
  Description of Artificial Sequence: Synthetic oligonucleotide
  Antisense strand to SEQ ID NO: 1014242
aguugagacaauuauugcc

SEQ ID NO: 1014244 - RNA, 19 nt, Artificial Sequence
  Description of Artificial Sequence: Synthetic oligonucleotide
  Sense strand starting at position 2112 of SEQ ID NO: 914572
gccuaugacuaguuuaaag

SEQ ID NO: 1014245 - RNA, 19 nt, Artificial Sequence
  Description of Artificial Sequence: Synthetic oligonucleotide
  Antisense strand to SEQ ID NO: 1014244
cuuuaaacuagucauaggc

SEQ ID NO: 1014246 - RNA, 19 nt, Artificial Sequence
  Description of Artificial Sequence: Synthetic oligonucleotide
  Sense strand starting at position 2167 of SEQ ID NO: 914572
gggcucacaacuuguaaug

SEQ ID NO: 1014247 - RNA, 19 nt, Artificial Sequence
  Description of Artificial Sequence: Synthetic oligonucleotide
  Antisense strand to SEQ ID NO: 1014246
cauuacaaguugugagccc

SEQ ID NO: 1014248 - RNA, 19 nt, Artificial Sequence
  Description of Artificial Sequence: Synthetic oligonucleotide
  Sense strand starting at position 2345 of SEQ ID NO: 914572
agucccuugacuugggaaa

SEQ ID NO: 1014249 - RNA, 19 nt, Artificial Sequence
  Description of Artificial Sequence: Synthetic oligonucleotide
  Antisense strand to SEQ ID NO: 1014248
uuucccaagucaagggacu

SEQ ID NO: 1014250 - RNA, 19 nt, Artificial Sequence
  Description of Artificial Sequence: Synthetic oligonucleotide
  Sense strand starting at position 2979 of SEQ ID NO: 914572
ggccgcuuccuuuaagaag

SEQ ID NO: 1014251 - RNA, 19 nt, Artificial Sequence
  Description of Artificial Sequence: Synthetic oligonucleotide
  Antisense strand to SEQ ID NO: 1014250
cuucuuaaaggaagcggcc

SEQ ID NO: 1014252 - RNA, 19 nt, Artificial Sequence
  Description of Artificial Sequence: Synthetic oligonucleotide
  Sense strand starting at position 3002 of SEQ ID NO: 914572
uuuguagauguugaucaau

SEQ ID NO: 1014253 - RNA, 19 nt, Artificial Sequence
  Description of Artificial Sequence: Synthetic oligonucleotide
  Antisense strand to SEQ ID NO: 1014252
auugaucaacaucuacaaa

SEQ ID NO: 1014254 - RNA, 19 nt, Artificial Sequence
  Description of Artificial Sequence: Synthetic oligonucleotide
  Sense strand starting at position 3064 of SEQ ID NO: 914572
ggcauuuccucucuugauc

SEQ ID NO: 1014255 - RNA, 19 nt, Artificial Sequence
  Description of Artificial Sequence: Synthetic oligonucleotide
  Antisense strand to SEQ ID NO: 1014254
gaucaagagaggaaaugcc

SEQ ID NO: 1014256 - RNA, 19 nt, Artificial Sequence
  Description of Artificial Sequence: Synthetic oligonucleotide
  Sense strand starting at position 3082 of SEQ ID NO: 914572
ccacaaugaugugagaaag

SEQ ID NO: 1014257 - RNA, 19 nt, Artificial Sequence
  Description of Artificial Sequence: Synthetic oligonucleotide
  Antisense strand to SEQ ID NO: 1014256
cuuucucacaucauugugg

SEQ ID NO: 1014258 - RNA, 19 nt, Artificial Sequence
  Description of Artificial Sequence: Synthetic oligonucleotide
  Sense strand starting at position 3273 of SEQ ID NO: 914572
acaccuugcuuacugaaga

SEQ ID NO: 1014259 - RNA, 19 nt, Artificial Sequence
  Description of Artificial Sequence: Synthetic oligonucleotide
  Antisense strand to SEQ ID NO: 1014258
ucuucaguaagcaaggugu

SEQ ID NO: 1014260 - RNA, 19 nt, Artificial Sequence
  Description of Artificial Sequence: Synthetic oligonucleotide
  Sense strand starting at position 3817 of SEQ ID NO: 914572
gaugcaucauucuuaggau

SEQ ID NO: 1014261 - RNA, 19 nt, Artificial Sequence
  Description of Artificial Sequence: Synthetic oligonucleotide
  Antisense strand to SEQ ID NO: 1014260
auccuaagaaugaugcauc

SEQ ID NO: 1014262 - RNA, 19 nt, Artificial Sequence
  Description of Artificial Sequence: Synthetic oligonucleotide
  Sense strand starting at position 1984 of SEQ ID NO: 914573
ccgcauuccuuagaguggu

SEQ ID NO: 1014263 - RNA, 19 nt, Artificial Sequence
  Description of Artificial Sequence: Synthetic oligonucleotide
  Antisense strand to SEQ ID NO: 1014262
accacucuaaggaaugcgg

SEQ ID NO: 1014264 - RNA, 19 nt, Artificial Sequence
  Description of Artificial Sequence: Synthetic oligonucleotide
  Sense strand starting at position 2028 of SEQ ID NO: 914573
guggcugagcuuuguaagu

SEQ ID NO: 1014265 - RNA, 19 nt, Artificial Sequence
  Description of Artificial Sequence: Synthetic oligonucleotide
  Antisense strand to SEQ ID NO: 1014264
acuuacaaagcucagccac

SEQ ID NO: 1014266 - RNA, 19 nt, Artificial Sequence
  Description of Artificial Sequence: Synthetic oligonucleotide
  Sense strand starting at position 2034 of SEQ ID NO: 914573
gagcuuuguaagugcugga

SEQ ID NO: 1014267 - RNA, 19 nt, Artificial Sequence
  Description of Artificial Sequence: Synthetic oligonucleotide
  Antisense strand to SEQ ID NO: 1014266
uccagcacuuacaaagcuc

SEQ ID NO: 1014268 - RNA, 19 nt, Artificial Sequence
  Description of Artificial Sequence: Synthetic oligonucleotide
  Sense strand starting at position 2176 of SEQ ID NO: 914573
uguuccaguucugagcaga

SEQ ID NO: 1014269 - RNA, 19 nt, Artificial Sequence
  Description of Artificial Sequence: Synthetic oligonucleotide
  Antisense strand to SEQ ID NO: 1014268
ucugcucagaacuggaaca

SEQ ID NO: 1014270 - RNA, 19 nt, Artificial Sequence
  Description of Artificial Sequence: Synthetic oligonucleotide
  Sense strand starting at position 2181 of SEQ ID NO: 914573
caguucugagcagaacagu

SEQ ID NO: 1014271 - RNA, 19 nt, Artificial Sequence
  Description of Artificial Sequence: Synthetic oligonucleotide
  Antisense strand to SEQ ID NO: 1014270
acuguucugcucagaacug

SEQ ID NO: 1014272 - RNA, 19 nt, Artificial Sequence
  Description of Artificial Sequence: Synthetic oligonucleotide
  Sense strand starting at position 2289 of SEQ ID NO: 914573
uccugacugucucuguuau

SEQ ID NO: 1014273 - RNA, 19 nt, Artificial Sequence
  Description of Artificial Sequence: Synthetic oligonucleotide
  Antisense strand to SEQ ID NO: 1014272
auaacagagacagucagga

SEQ ID NO: 1014274 - RNA, 19 nt, Artificial Sequence
  Description of Artificial Sequence: Synthetic oligonucleotide
  Sense strand starting at position 2291 of SEQ ID NO: 914573
cugacugucucuguuauca

SEQ ID NO: 1014275 - RNA, 19 nt, Artificial Sequence
  Description of Artificial Sequence: Synthetic oligonucleotide
  Antisense strand to SEQ ID NO: 1014274
ugauaacagagacagucag

SEQ ID NO: 1014276 - RNA, 19 nt, Artificial Sequence
  Description of Artificial Sequence: Synthetic oligonucleotide
  Sense strand starting at position 2295 of SEQ ID NO: 914573
cugucucuguuaucacuga

SEQ ID NO: 1014277 - RNA, 19 nt, Artificial Sequence
  Description of Artificial Sequence: Synthetic oligonucleotide
  Antisense strand to SEQ ID NO: 1014276
ucagugauaacagagacag

SEQ ID NO: 1014278 - RNA, 19 nt, Artificial Sequence
  Description of Artificial Sequence: Synthetic oligonucleotide
  Sense strand starting at position 2296 of SEQ ID NO: 914573
ugucucuguuaucacugaa

SEQ ID NO: 1014279 - RNA, 19 nt, Artificial Sequence
  Description of Artificial Sequence: Synthetic oligonucleotide
  Antisense strand to SEQ ID NO: 1014278
uucagugauaacagagaca

SEQ ID NO: 1014280 - RNA, 19 nt, Artificial Sequence
  Description of Artificial Sequence: Synthetic oligonucleotide
  Sense strand starting at position 2355 of SEQ ID NO: 914573
ccgcucaagguauguaaua

SEQ ID NO: 1014281 - RNA, 19 nt, Artificial Sequence
  Description of Artificial Sequence: Synthetic oligonucleotide
  Antisense strand to SEQ ID NO: 1014280
uauuacauaccuugagcgg

SEQ ID NO: 1014282 - RNA, 19 nt, Artificial Sequence
  Description of Artificial Sequence: Synthetic oligonucleotide
  Sense strand starting at position 2356 of SEQ ID NO: 914573
cgcucaagguauguaauau

SEQ ID NO: 1014283 - RNA, 19 nt, Artificial Sequence
  Description of Artificial Sequence: Synthetic oligonucleotide
  Antisense strand to SEQ ID NO: 1014282
auauuacauaccuugagcg

SEQ ID NO: 1014284 - RNA, 19 nt, Artificial Sequence
  Description of Artificial Sequence: Synthetic oligonucleotide
  Sense strand starting at position 2387 of SEQ ID NO: 914573
acagaugugucuugcuaaa

SEQ ID NO: 1014285 - RNA, 19 nt, Artificial Sequence
  Description of Artificial Sequence: Synthetic oligonucleotide
  Antisense strand to SEQ ID NO: 1014284
uuuagcaagacacaucugu

SEQ ID NO: 1014286 - RNA, 19 nt, Artificial Sequence
  Description of Artificial Sequence: Synthetic oligonucleotide
  Sense strand starting at position 2389 of SEQ ID NO: 914573
agaugugucuugcuaaaga

SEQ ID NO: 1014287 - RNA, 19 nt, Artificial Sequence
  Description of Artificial Sequence: Synthetic oligonucleotide
  Antisense strand to SEQ ID NO: 1014286
ucuuuagcaagacacaucu

SEQ ID NO: 1014288 - RNA, 19 nt, Artificial Sequence
  Description of Artificial Sequence: Synthetic oligonucleotide
  Sense strand starting at position 2399 of SEQ ID NO: 914573
ugcuaaagaucagguuugu

SEQ ID NO: 1014289 - RNA, 19 nt, Artificial Sequence
  Description of Artificial Sequence: Synthetic oligonucleotide
  Antisense strand to SEQ ID NO: 1014288
acaaaccugaucuuuagca

SEQ ID NO: 1014290 - RNA, 19 nt, Artificial Sequence
  Description of Artificial Sequence: Synthetic oligonucleotide
  Sense strand starting at position 2403 of SEQ ID NO: 914573
aaagaucagguuuguguga

SEQ ID NO: 1014291 - RNA, 19 nt, Artificial Sequence
  Description of Artificial Sequence: Synthetic oligonucleotide
  Antisense strand to SEQ ID NO: 1014290
ucacacaaaccugaucuuu

SEQ ID NO: 1014292 - RNA, 19 nt, Artificial Sequence
  Description of Artificial Sequence: Synthetic oligonucleotide
  Sense strand starting at position 2404 of SEQ ID NO: 914573
aagaucagguuugugugaa

SEQ ID NO: 1014293 - RNA, 19 nt, Artificial Sequence
  Description of Artificial Sequence: Synthetic oligonucleotide
  Antisense strand to SEQ ID NO: 1014292
uucacacaaaccugaucuu

SEQ ID NO: 1014294 - RNA, 19 nt, Artificial Sequence
  Description of Artificial Sequence: Synthetic oligonucleotide
  Sense strand starting at position 2405 of SEQ ID NO: 914573
agaucagguuugugugaac

SEQ ID NO: 1014295 - RNA, 19 nt, Artificial Sequence
  Description of Artificial Sequence: Synthetic oligonucleotide
  Antisense strand to SEQ ID NO: 1014294
guucacacaaaccugaucu

SEQ ID NO: 1014296 - RNA, 19 nt, Artificial Sequence
  Description of Artificial Sequence: Synthetic oligonucleotide
  Sense strand starting at position 2408 of SEQ ID NO: 914573
ucagguuugugugaaccga

SEQ ID NO: 1014297 - RNA, 19 nt, Artificial Sequence
  Description of Artificial Sequence: Synthetic oligonucleotide
  Antisense strand to SEQ ID NO: 1014296
ucgguucacacaaaccuga

SEQ ID NO: 1014298 - RNA, 19 nt, Artificial Sequence
  Description of Artificial Sequence: Synthetic oligonucleotide
  Sense strand starting at position 2412 of SEQ ID NO: 914573
guuugugugaaccgacguu

SEQ ID NO: 1014299 - RNA, 19 nt, Artificial Sequence
  Description of Artificial Sequence: Synthetic oligonucleotide
  Antisense strand to SEQ ID NO: 1014298
aacgucgguucacacaaac

SEQ ID NO: 1014300 - RNA, 19 nt, Artificial Sequence
  Description of Artificial Sequence: Synthetic oligonucleotide
  Sense strand starting at position 2629 of SEQ ID NO: 914573
gagagagccugcuccaagu

SEQ ID NO: 1014301 - RNA, 19 nt, Artificial Sequence
  Description of Artificial Sequence: Synthetic oligonucleotide
  Antisense strand to SEQ ID NO: 1014300
acuuggagcaggcucucuc

SEQ ID NO: 1014302 - RNA, 19 nt, Artificial Sequence
  Description of Artificial Sequence: Synthetic oligonucleotide
  Sense strand starting at position 2661 of SEQ ID NO: 914573
ccgugaugucuccggaagu

SEQ ID NO: 1014303 - RNA, 19 nt, Artificial Sequence
  Description of Artificial Sequence: Synthetic oligonucleotide
  Antisense strand to SEQ ID NO: 1014302
acuuccggagacaucacgg

SEQ ID NO: 1014304 - RNA, 19 nt, Artificial Sequence
  Description of Artificial Sequence: Synthetic oligonucleotide
  Sense strand starting at position 2662 of SEQ ID NO: 914573
cgugaugucuccggaaguu

SEQ ID NO: 1014305 - RNA, 19 nt, Artificial Sequence
  Description of Artificial Sequence: Synthetic oligonucleotide
  Antisense strand to SEQ ID NO: 1014304
aacuuccggagacaucacg

SEQ ID NO: 1014306 - RNA, 19 nt, Artificial Sequence
  Description of Artificial Sequence: Synthetic oligonucleotide
  Sense strand starting at position 3112 of SEQ ID NO: 914573
acuccuaaugcugagcaga

SEQ ID NO: 1014307 - RNA, 19 nt, Artificial Sequence
  Description of Artificial Sequence: Synthetic oligonucleotide
  Antisense strand to SEQ ID NO: 1014306
ucugcucagcauuaggagu

SEQ ID NO: 1014308 - RNA, 19 nt, Artificial Sequence
  Description of Artificial Sequence: Synthetic oligonucleotide
  Sense strand starting at position 3169 of SEQ ID NO: 914573
ggaaugagggucugugaga

SEQ ID NO: 1014309 - RNA, 19 nt, Artificial Sequence
  Description of Artificial Sequence: Synthetic oligonucleotide
  Antisense strand to SEQ ID NO: 1014308
ucucacagacccucauucc

SEQ ID NO: 1014310 - RNA, 19 nt, Artificial Sequence
  Description of Artificial Sequence: Synthetic oligonucleotide
  Sense strand starting at position 3170 of SEQ ID NO: 914573
gaaugagggucugugagaa

SEQ ID NO: 1014311 - RNA, 19 nt, Artificial Sequence
  Description of Artificial Sequence: Synthetic oligonucleotide
  Antisense strand to SEQ ID NO: 1014310
uucucacagacccucauuc

SEQ ID NO: 1014312 - RNA, 19 nt, Artificial Sequence
  Description of Artificial Sequence: Synthetic oligonucleotide
  Sense strand starting at position 3198 of SEQ ID NO: 914573
ggagauacaucagugcaag

SEQ ID NO: 1014313 - RNA, 19 nt, Artificial Sequence
  Description of Artificial Sequence: Synthetic oligonucleotide
  Antisense strand to SEQ ID NO: 1014312
cuugcacugauguaucucc

SEQ ID NO: 1014314 - RNA, 19 nt, Artificial Sequence
  Description of Artificial Sequence: Synthetic oligonucleotide
  Sense strand starting at position 3243 of SEQ ID NO: 914573
gcagcaucccucugccauu

SEQ ID NO: 1014315 - RNA, 19 nt, Artificial Sequence
  Description of Artificial Sequence: Synthetic oligonucleotide
  Antisense strand to SEQ ID NO: 1014314
aauggcagagggaugcugc

SEQ ID NO: 1014316 - RNA, 19 nt, Artificial Sequence
  Description of Artificial Sequence: Synthetic oligonucleotide
  Sense strand starting at position 3402 of SEQ ID NO: 914573
gcaucaauguucuguuuaa

SEQ ID NO: 1014317 - RNA, 19 nt, Artificial Sequence
  Description of Artificial Sequence: Synthetic oligonucleotide
  Antisense strand to SEQ ID NO: 1014316
uuaaacagaacauugaugc

SEQ ID NO: 1014318 - RNA, 19 nt, Artificial Sequence
  Description of Artificial Sequence: Synthetic oligonucleotide
  Sense strand starting at position 3414 of SEQ ID NO: 914573
uguuuaaaguccuuuacug

SEQ ID NO: 1014319 - RNA, 19 nt, Artificial Sequence
  Description of Artificial Sequence: Synthetic oligonucleotide
  Antisense strand to SEQ ID NO: 1014318
caguaaaggacuuuaaaca

SEQ ID NO: 1014320 - RNA, 19 nt, Artificial Sequence
  Description of Artificial Sequence: Synthetic oligonucleotide
  Sense strand starting at position 3822 of SEQ ID NO: 914573
auagcaaagucagcuauaa

SEQ ID NO: 1014321 - RNA, 19 nt, Artificial Sequence
  Description of Artificial Sequence: Synthetic oligonucleotide
  Antisense strand to SEQ ID NO: 1014320
uuauagcugacuuugcuau

SEQ ID NO: 1014322 - RNA, 19 nt, Artificial Sequence
  Description of Artificial Sequence: Synthetic oligonucleotide
  Sense strand starting at position 373 of SEQ ID NO: 914574
augugaacugcacauggua

SEQ ID NO: 1014323 - RNA, 19 nt, Artificial Sequence
  Description of Artificial Sequence: Synthetic oligonucleotide
  Antisense strand to SEQ ID NO: 1014322
uaccaugugcaguucacau

SEQ ID NO: 1014324 - RNA, 19 nt, Artificial Sequence
  Description of Artificial Sequence: Synthetic oligonucleotide
  Sense strand starting at position 482 of SEQ ID NO: 914574
ggacaaagauuacaaagau

SEQ ID NO: 1014325 - RNA, 19 nt, Artificial Sequence
  Description of Artificial Sequence: Synthetic oligonucleotide
  Antisense strand to SEQ ID NO: 1014324
aucuuuguaaucuuugucc

SEQ ID NO: 1014326 - RNA, 19 nt, Artificial Sequence
  Description of Artificial Sequence: Synthetic oligonucleotide
  Sense strand starting at position 812 of SEQ ID NO: 914574
aaagauggaucccggaaga

SEQ ID NO: 1014327 - RNA, 19 nt, Artificial Sequence
  Description of Artificial Sequence: Synthetic oligonucleotide
  Antisense strand to SEQ ID NO: 1014326
ucuuccgggauccaucuuu

SEQ ID NO: 1014328 - RNA, 19 nt, Artificial Sequence
  Description of Artificial Sequence: Synthetic oligonucleotide
  Sense strand starting at position 887 of SEQ ID NO: 914574
guucucuagagcugguuaa

SEQ ID NO: 1014329 - RNA, 19 nt, Artificial Sequence
  Description of Artificial Sequence: Synthetic oligonucleotide
  Antisense strand to SEQ ID NO: 1014328
uuaaccagcucuagagaac

SEQ ID NO: 1014330 - RNA, 19 nt, Artificial Sequence
  Description of Artificial Sequence: Synthetic oligonucleotide
  Sense strand starting at position 888 of SEQ ID NO: 914574
uucucuagagcugguuaaa

SEQ ID NO: 1014331 - RNA, 19 nt, Artificial Sequence
  Description of Artificial Sequence: Synthetic oligonucleotide
  Antisense strand to SEQ ID NO: 1014330
uuuaaccagcucuagagaa

SEQ ID NO: 1014332 - RNA, 19 nt, Artificial Sequence
  Description of Artificial Sequence: Synthetic oligonucleotide
  Sense strand starting at position 1254 of SEQ ID NO: 914574
cgcuaccuauguuugcaaa

SEQ ID NO: 1014333 - RNA, 19 nt, Artificial Sequence
  Description of Artificial Sequence: Synthetic oligonucleotide
  Antisense strand to SEQ ID NO: 1014332
uuugcaaacauagguagcg

SEQ ID NO: 1014334 - RNA, 19 nt, Artificial Sequence
  Description of Artificial Sequence: Synthetic oligonucleotide
  Sense strand starting at position 1255 of SEQ ID NO: 914574
gcuaccuauguuugcaaau

SEQ ID NO: 1014335 - RNA, 19 nt, Artificial Sequence
  Description of Artificial Sequence: Synthetic oligonucleotide
  Antisense strand to SEQ ID NO: 1014334
auuugcaaacauagguagc

SEQ ID NO: 1014336 - RNA, 19 nt, Artificial Sequence
  Description of Artificial Sequence: Synthetic oligonucleotide
  Sense strand starting at position 1277 of SEQ ID NO: 914574
gcuuuauuggaacacguga

SEQ ID NO: 1014337 - RNA, 19 nt, Artificial Sequence
  Description of Artificial Sequence: Synthetic oligonucleotide
  Antisense strand to SEQ ID NO: 1014336
ucacguguuccaauaaagc

SEQ ID NO: 1014338 - RNA, 19 nt, Artificial Sequence
  Description of Artificial Sequence: Synthetic oligonucleotide
  Sense strand starting at position 1288 of SEQ ID NO: 914574
acacgugauccacacuugu

SEQ ID NO: 1014339 - RNA, 19 nt, Artificial Sequence
  Description of Artificial Sequence: Synthetic oligonucleotide
  Antisense strand to SEQ ID NO: 1014338
acaaguguggaucacgugu

SEQ ID NO: 1014340 - RNA, 19 nt, Artificial Sequence
  Description of Artificial Sequence: Synthetic oligonucleotide
  Sense strand starting at position 1318 of SEQ ID NO: 914574
gucuauggcugcucucaca

SEQ ID NO: 1014341 - RNA, 19 nt, Artificial Sequence
  Description of Artificial Sequence: Synthetic oligonucleotide
  Antisense strand to SEQ ID NO: 1014340
ugugagagcagccauagac

SEQ ID NO: 1014342 - RNA, 19 nt, Artificial Sequence
  Description of Artificial Sequence: Synthetic oligonucleotide
  Sense strand starting at position 1424 of SEQ ID NO: 914574
acuccugcccuagaguauu

SEQ ID NO: 1014343 - RNA, 19 nt, Artificial Sequence
  Description of Artificial Sequence: Synthetic oligonucleotide
  Antisense strand to SEQ ID NO: 1014342
aauacucuagggcaggagu

SEQ ID NO: 1014344 - RNA, 19 nt, Artificial Sequence
  Description of Artificial Sequence: Synthetic oligonucleotide
  Sense strand starting at position 1434 of SEQ ID NO: 914574
uagaguauuugugaagcca

SEQ ID NO: 1014345 - RNA, 19 nt, Artificial Sequence
  Description of Artificial Sequence: Synthetic oligonucleotide
  Antisense strand to SEQ ID NO: 1014344
uggcuucacaaauacucua

SEQ ID NO: 1014346 - RNA, 19 nt, Artificial Sequence
  Description of Artificial Sequence: Synthetic oligonucleotide
  Sense strand starting at position 1680 of SEQ ID NO: 914574
cugggugccaguugaacau

SEQ ID NO: 1014347 - RNA, 19 nt, Artificial Sequence
  Description of Artificial Sequence: Synthetic oligonucleotide
  Antisense strand to SEQ ID NO: 1014346
auguucaacuggcacccag

SEQ ID NO: 1014348 - RNA, 19 nt, Artificial Sequence
  Description of Artificial Sequence: Synthetic oligonucleotide
  Sense strand starting at position 1686 of SEQ ID NO: 914574
gccaguugaacauguagau

SEQ ID NO: 1014349 - RNA, 19 nt, Artificial Sequence
  Description of Artificial Sequence: Synthetic oligonucleotide
  Antisense strand to SEQ ID NO: 1014348
aucuacauguucaacuggc

SEQ ID NO: 1014350 - RNA, 19 nt, Artificial Sequence
  Description of Artificial Sequence: Synthetic oligonucleotide
  Sense strand starting at position 1818 of SEQ ID NO: 914574
acaccauucugaucacgca

SEQ ID NO: 1014351 - RNA, 19 nt, Artificial Sequence
  Description of Artificial Sequence: Synthetic oligonucleotide
  Antisense strand to SEQ ID NO: 1014350
ugcgugaucagaauggugu

SEQ ID NO: 1014352 - RNA, 19 nt, Artificial Sequence
  Description of Artificial Sequence: Synthetic oligonucleotide
  Sense strand starting at position 1885 of SEQ ID NO: 914574
caguucucuggcuaaagga

SEQ ID NO: 1014353 - RNA, 19 nt, Artificial Sequence
  Description of Artificial Sequence: Synthetic oligonucleotide
  Antisense strand to SEQ ID NO: 1014352
uccuuuagccagagaacug

SEQ ID NO: 1014354 - RNA, 19 nt, Artificial Sequence
  Description of Artificial Sequence: Synthetic oligonucleotide
  Sense strand starting at position 2345 of SEQ ID NO: 914574
cccauagaguaagcucuau

SEQ ID NO: 1014355 - RNA, 19 nt, Artificial Sequence
  Description of Artificial Sequence: Synthetic oligonucleotide
  Antisense strand to SEQ ID NO: 1014354
auagagcuuacucuauggg

SEQ ID NO: 1014356 - RNA, 19 nt, Artificial Sequence
  Description of Artificial Sequence: Synthetic oligonucleotide
  Sense strand starting at position 2460 of SEQ ID NO: 914574
ugagacuucugcuuucucu

SEQ ID NO: 1014357 - RNA, 19 nt, Artificial Sequence
  Description of Artificial Sequence: Synthetic oligonucleotide
  Antisense strand to SEQ ID NO: 1014356
agagaaagcagaagucuca

SEQ ID NO: 1014358 - RNA, 19 nt, Artificial Sequence
  Description of Artificial Sequence: Synthetic oligonucleotide
  Sense strand starting at position 2519 of SEQ ID NO: 914574
acucaugguccagaaagca

SEQ ID NO: 1014359 - RNA, 19 nt, Artificial Sequence
  Description of Artificial Sequence: Synthetic oligonucleotide
  Antisense strand to SEQ ID NO: 1014358
ugcuuucuggaccaugagu

SEQ ID NO: 1014360 - RNA, 19 nt, Artificial Sequence
  Description of Artificial Sequence: Synthetic oligonucleotide
  Sense strand starting at position 2591 of SEQ ID NO: 914574
ugguuucaggcauggcaaa

SEQ ID NO: 1014361 - RNA, 19 nt, Artificial Sequence
  Description of Artificial Sequence: Synthetic oligonucleotide
  Antisense strand to SEQ ID NO: 1014360
uuugccaugccugaaacca

SEQ ID NO: 1014362 - RNA, 19 nt, Artificial Sequence
  Description of Artificial Sequence: Synthetic oligonucleotide
  Sense strand starting at position 2592 of SEQ ID NO: 914574
gguuucaggcauggcaaau

SEQ ID NO: 1014363 - RNA, 19 nt, Artificial Sequence
  Description of Artificial Sequence: Synthetic oligonucleotide
  Antisense strand to SEQ ID NO: 1014362
auuugccaugccugaaacc

SEQ ID NO: 1014364 - RNA, 19 nt, Artificial Sequence
  Description of Artificial Sequence: Synthetic oligonucleotide
  Sense strand starting at position 2611 of SEQ ID NO: 914574
gcuuaaagcccugagcagu

SEQ ID NO: 1014365 - RNA, 19 nt, Artificial Sequence
  Description of Artificial Sequence: Synthetic oligonucleotide
  Antisense strand to SEQ ID NO: 1014364
acugcucagggcuuuaagc

SEQ ID NO: 1014366 - RNA, 19 nt, Artificial Sequence
  Description of Artificial Sequence: Synthetic oligonucleotide
  Sense strand starting at position 2621 of SEQ ID NO: 914574
cugagcaguugcucuuaaa

SEQ ID NO: 1014367 - RNA, 19 nt, Artificial Sequence
  Description of Artificial Sequence: Synthetic oligonucleotide
  Antisense strand to SEQ ID NO: 1014366
uuuaagagcaacugcucag

SEQ ID NO: 1014368 - RNA, 19 nt, Artificial Sequence
  Description of Artificial Sequence: Synthetic oligonucleotide
  Sense strand starting at position 2631 of SEQ ID NO: 914574
gcucuuaaacgcuagguga

SEQ ID NO: 1014369 - RNA, 19 nt, Artificial Sequence
  Description of Artificial Sequence: Synthetic oligonucleotide
  Antisense strand to SEQ ID NO: 1014368
ucaccuagcguuuaagagc

SEQ ID NO: 1014370 - RNA, 19 nt, Artificial Sequence
  Description of Artificial Sequence: Synthetic oligonucleotide
  Sense strand starting at position 2633 of SEQ ID NO: 914574
ucuuaaacgcuaggugagu

SEQ ID NO: 1014371 - RNA, 19 nt, Artificial Sequence
  Description of Artificial Sequence: Synthetic oligonucleotide
  Antisense strand to SEQ ID NO: 1014370
acucaccuagcguuuaaga

SEQ ID NO: 1014372 - RNA, 19 nt, Artificial Sequence
  Description of Artificial Sequence: Synthetic oligonucleotide
  Sense strand starting at position 2850 of SEQ ID NO: 914574
cccuaaugauaggcucaga

SEQ ID NO: 1014373 - RNA, 19 nt, Artificial Sequence
  Description of Artificial Sequence: Synthetic oligonucleotide
  Antisense strand to SEQ ID NO: 1014372
ucugagccuaucauuaggg

SEQ ID NO: 1014374 - RNA, 19 nt, Artificial Sequence
  Description of Artificial Sequence: Synthetic oligonucleotide
  Sense strand starting at position 2855 of SEQ ID NO: 914574
augauaggcucagagaacu

SEQ ID NO: 1014375 - RNA, 19 nt, Artificial Sequence
  Description of Artificial Sequence: Synthetic oligonucleotide
  Antisense strand to SEQ ID NO: 1014374
aguucucugagccuaucau

SEQ ID NO: 1014376 - RNA, 19 nt, Artificial Sequence
  Description of Artificial Sequence: Synthetic oligonucleotide
  Sense strand starting at position 2882 of SEQ ID NO: 914574
cuccaauuccugcgaaaug

SEQ ID NO: 1014377 - RNA, 19 nt, Artificial Sequence
  Description of Artificial Sequence: Synthetic oligonucleotide
  Antisense strand to SEQ ID NO: 1014376
cauuucgcaggaauuggag

SEQ ID NO: 1014378 - RNA, 19 nt, Artificial Sequence
  Description of Artificial Sequence: Synthetic oligonucleotide
  Sense strand starting at position 2929 of SEQ ID NO: 914574
gcaggacucaccugcaaga

SEQ ID NO: 1014379 - RNA, 19 nt, Artificial Sequence
  Description of Artificial Sequence: Synthetic oligonucleotide
  Antisense strand to SEQ ID NO: 1014378
ucuugcaggugaguccugc

SEQ ID NO: 1014380 - RNA, 19 nt, Artificial Sequence
  Description of Artificial Sequence: Synthetic oligonucleotide
  Sense strand starting at position 3050 of SEQ ID NO: 914574
gaggcauauuauuccguga

SEQ ID NO: 1014381 - RNA, 19 nt, Artificial Sequence
  Description of Artificial Sequence: Synthetic oligonucleotide
  Antisense strand to SEQ ID NO: 1014380
ucacggaauaauaugccuc

SEQ ID NO: 1014382 - RNA, 19 nt, Artificial Sequence
  Description of Artificial Sequence: Synthetic oligonucleotide
  Sense strand starting at position 3053 of SEQ ID NO: 914574
gcauauuauuccgugagga

SEQ ID NO: 1014383 - RNA, 19 nt, Artificial Sequence
  Description of Artificial Sequence: Synthetic oligonucleotide
  Antisense strand to SEQ ID NO: 1014382
uccucacggaauaauaugc

SEQ ID NO: 1014384 - RNA, 19 nt, Artificial Sequence
  Description of Artificial Sequence: Synthetic oligonucleotide
  Sense strand starting at position 3054 of SEQ ID NO: 914574
cauauuauuccgugaggaa

SEQ ID NO: 1014385 - RNA, 19 nt, Artificial Sequence
  Description of Artificial Sequence: Synthetic oligonucleotide
  Antisense strand to SEQ ID NO: 1014384
uuccucacggaauaauaug

SEQ ID NO: 1014386 - RNA, 19 nt, Artificial Sequence
  Description of Artificial Sequence: Synthetic oligonucleotide
  Sense strand starting at position 3058 of SEQ ID NO: 914574
uuauuccgugaggaaacua

SEQ ID NO: 1014387 - RNA, 19 nt, Artificial Sequence
  Description of Artificial Sequence: Synthetic oligonucleotide
  Antisense strand to SEQ ID NO: 1014386
uaguuuccucacggaauaa

SEQ ID NO: 1014388 - RNA, 19 nt, Artificial Sequence
  Description of Artificial Sequence: Synthetic oligonucleotide
  Sense strand starting at position 3085 of SEQ ID NO: 914574
agagauaaguaauuagcau

SEQ ID NO: 1014389 - RNA, 19 nt, Artificial Sequence
  Description of Artificial Sequence: Synthetic oligonucleotide
  Antisense strand to SEQ ID NO: 1014388
augcuaauuacuuaucucu

SEQ ID NO: 1014390 - RNA, 19 nt, Artificial Sequence
  Description of Artificial Sequence: Synthetic oligonucleotide
  Sense strand starting at position 3091 of SEQ ID NO: 914574
aaguaauuagcaugaggac

SEQ ID NO: 1014391 - RNA, 19 nt, Artificial Sequence
  Description of Artificial Sequence: Synthetic oligonucleotide
  Antisense strand to SEQ ID NO: 1014390
guccucaugcuaauuacuu

SEQ ID NO: 1014392 - RNA, 19 nt, Artificial Sequence
  Description of Artificial Sequence: Synthetic oligonucleotide
  Sense strand starting at position 3131 of SEQ ID NO: 914574
uuccaaauccuguguguuu

SEQ ID NO: 1014393 - RNA, 19 nt, Artificial Sequence
  Description of Artificial Sequence: Synthetic oligonucleotide
  Antisense strand to SEQ ID NO: 1014392
aaacacacaggauuuggaa

SEQ ID NO: 1014394 - RNA, 19 nt, Artificial Sequence
  Description of Artificial Sequence: Synthetic oligonucleotide
  Sense strand starting at position 3132 of SEQ ID NO: 914574
uccaaauccuguguguuua

SEQ ID NO: 1014395 - RNA, 19 nt, Artificial Sequence
  Description of Artificial Sequence: Synthetic oligonucleotide
  Antisense strand to SEQ ID NO: 1014394
uaaacacacaggauuugga

SEQ ID NO: 1014396 - RNA, 19 nt, Artificial Sequence
  Description of Artificial Sequence: Synthetic oligonucleotide
  Sense strand starting at position 3506 of SEQ ID NO: 914574
gagcaaugagagcgaaacu

SEQ ID NO: 1014397 - RNA, 19 nt, Artificial Sequence
  Description of Artificial Sequence: Synthetic oligonucleotide
  Antisense strand to SEQ ID NO: 1014396
aguuucgcucucauugcuc

SEQ ID NO: 1014398 - RNA, 19 nt, Artificial Sequence
  Description of Artificial Sequence: Synthetic oligonucleotide
  Sense strand starting at position 3507 of SEQ ID NO: 914574
agcaaugagagcgaaacuu

SEQ ID NO: 1014399 - RNA, 19 nt, Artificial Sequence
  Description of Artificial Sequence: Synthetic oligonucleotide
  Antisense strand to SEQ ID NO: 1014398
aaguuucgcucucauugcu

SEQ ID NO: 1014400 - RNA, 19 nt, Artificial Sequence
  Description of Artificial Sequence: Synthetic oligonucleotide
  Sense strand starting at position 3856 of SEQ ID NO: 914574
auagaauucuuagucauug

SEQ ID NO: 1014401 - RNA, 19 nt, Artificial Sequence
  Description of Artificial Sequence: Synthetic oligonucleotide
  Antisense strand to SEQ ID NO: 1014400
caaugacuaagaauucuau

SEQ ID NO: 1014402 - RNA, 19 nt, Artificial Sequence
  Description of Artificial Sequence: Synthetic oligonucleotide
  Sense strand starting at position 40 of SEQ ID NO: 914575
ggcugugaucccagggugu

SEQ ID NO: 1014403 - RNA, 19 nt, Artificial Sequence
  Description of Artificial Sequence: Synthetic oligonucleotide
  Antisense strand to SEQ ID NO: 1014402
acacccugggaucacagcc

SEQ ID NO: 1014404 - RNA, 19 nt, Artificial Sequence
  Description of Artificial Sequence: Synthetic oligonucleotide
  Sense strand starting at position 97 of SEQ ID NO: 914575
caagcucuucuguaaaggu

SEQ ID NO: 1014405 - RNA, 19 nt, Artificial Sequence
  Description of Artificial Sequence: Synthetic oligonucleotide
  Antisense strand to SEQ ID NO: 1014404
accuuuacagaagagcuug

SEQ ID NO: 1014406 - RNA, 19 nt, Artificial Sequence
  Description of Artificial Sequence: Synthetic oligonucleotide
  Sense strand starting at position 255 of SEQ ID NO: 914575
gacacugaagucugaguuu

SEQ ID NO: 1014407 - RNA, 19 nt, Artificial Sequence
  Description of Artificial Sequence: Synthetic oligonucleotide
  Antisense strand to SEQ ID NO: 1014406
aaacucagacuucaguguc

SEQ ID NO: 1014408 - RNA, 19 nt, Artificial Sequence
  Description of Artificial Sequence: Synthetic oligonucleotide
  Sense strand starting at position 847 of SEQ ID NO: 914575
ggaccagauuuaggauaca

SEQ ID NO: 1014409 - RNA, 19 nt, Artificial Sequence
  Description of Artificial Sequence: Synthetic oligonucleotide
  Antisense strand to SEQ ID NO: 1014408
uguauccuaaaucuggucc

SEQ ID NO: 1014410 - RNA, 19 nt, Artificial Sequence
  Description of Artificial Sequence: Synthetic oligonucleotide
  Sense strand starting at position 1088 of SEQ ID NO: 914575
cccuuagcaccggaauaau

SEQ ID NO: 1014411 - RNA, 19 nt, Artificial Sequence
  Description of Artificial Sequence: Synthetic oligonucleotide
  Antisense strand to SEQ ID NO: 1014410
auuauuccggugcuaaggg

SEQ ID NO: 1014412 - RNA, 19 nt, Artificial Sequence
  Description of Artificial Sequence: Synthetic oligonucleotide
  Sense strand starting at position 1140 of SEQ ID NO: 914575
ggcucagguguccaaagaa

SEQ ID NO: 1014413 - RNA, 19 nt, Artificial Sequence
  Description of Artificial Sequence: Synthetic oligonucleotide
  Antisense strand to SEQ ID NO: 1014412
uucuuuggacaccugagcc

SEQ ID NO: 1014414 - RNA, 19 nt, Artificial Sequence
  Description of Artificial Sequence: Synthetic oligonucleotide
  Sense strand starting at position 1253 of SEQ ID NO: 914575
gcuuucugcguccucugaa

SEQ ID NO: 1014415 - RNA, 19 nt, Artificial Sequence
  Description of Artificial Sequence: Synthetic oligonucleotide
  Antisense strand to SEQ ID NO: 1014414
uucagaggacgcagaaagc

SEQ ID NO: 1014416 - RNA, 19 nt, Artificial Sequence
  Description of Artificial Sequence: Synthetic oligonucleotide
  Sense strand starting at position 1271 of SEQ ID NO: 914575
agagcuuucgugccuuuau

SEQ ID NO: 1014417 - RNA, 19 nt, Artificial Sequence
  Description of Artificial Sequence: Synthetic oligonucleotide
  Antisense strand to SEQ ID NO: 1014416
auaaaggcacgaaagcucu

SEQ ID NO: 1014418 - RNA, 19 nt, Artificial Sequence
  Description of Artificial Sequence: Synthetic oligonucleotide
  Sense strand starting at position 1274 of SEQ ID NO: 914575
gcuuucgugccuuuauaac

SEQ ID NO: 1014419 - RNA, 19 nt, Artificial Sequence
  Description of Artificial Sequence: Synthetic oligonucleotide
  Antisense strand to SEQ ID NO: 1014418
guuauaaaggcacgaaagc

SEQ ID NO: 1014420 - RNA, 19 nt, Artificial Sequence
  Description of Artificial Sequence: Synthetic oligonucleotide
  Sense strand starting at position 1316 of SEQ ID NO: 914575
ggagaaaggugcccacuuu

SEQ ID NO: 1014421 - RNA, 19 nt, Artificial Sequence
  Description of Artificial Sequence: Synthetic oligonucleotide
  Antisense strand to SEQ ID NO: 1014420
aaagugggcaccuuucucc

SEQ ID NO: 1014422 - RNA, 19 nt, Artificial Sequence
  Description of Artificial Sequence: Synthetic oligonucleotide
  Sense strand starting at position 1533 of SEQ ID NO: 914575
guuccuaggagaugcagaa

SEQ ID NO: 1014423 - RNA, 19 nt, Artificial Sequence
  Description of Artificial Sequence: Synthetic oligonucleotide
  Antisense strand to SEQ ID NO: 1014422
uucugcaucuccuaggaac

SEQ ID NO: 1014424 - RNA, 19 nt, Artificial Sequence
  Description of Artificial Sequence: Synthetic oligonucleotide
  Sense strand starting at position 1548 of SEQ ID NO: 914575
agaagacacugcccugaau

SEQ ID NO: 1014425 - RNA, 19 nt, Artificial Sequence
  Description of Artificial Sequence: Synthetic oligonucleotide
  Antisense strand to SEQ ID NO: 1014424
auucagggcagugucuucu

SEQ ID NO: 1014426 - RNA, 19 nt, Artificial Sequence
  Description of Artificial Sequence: Synthetic oligonucleotide
  Sense strand starting at position 2125 of SEQ ID NO: 914575
uuggaguuuggaggugaga

SEQ ID NO: 1014427 - RNA, 19 nt, Artificial Sequence
  Description of Artificial Sequence: Synthetic oligonucleotide
  Antisense strand to SEQ ID NO: 1014426
ucucaccuccaaacuccaa

SEQ ID NO: 1014428 - RNA, 19 nt, Artificial Sequence
  Description of Artificial Sequence: Synthetic oligonucleotide
  Sense strand starting at position 2127 of SEQ ID NO: 914575
ggaguuuggaggugagagu

SEQ ID NO: 1014429 - RNA, 19 nt, Artificial Sequence
  Description of Artificial Sequence: Synthetic oligonucleotide
  Antisense strand to SEQ ID NO: 1014428
acucucaccuccaaacucc

SEQ ID NO: 1014430 - RNA, 19 nt, Artificial Sequence
  Description of Artificial Sequence: Synthetic oligonucleotide
  Sense strand starting at position 2133 of SEQ ID NO: 914575
uggaggugagagugauuga

SEQ ID NO: 1014431 - RNA, 19 nt, Artificial Sequence
  Description of Artificial Sequence: Synthetic oligonucleotide
  Antisense strand to SEQ ID NO: 1014430
ucaaucacucucaccucca

SEQ ID NO: 1014432 - RNA, 19 nt, Artificial Sequence
  Description of Artificial Sequence: Synthetic oligonucleotide
  Sense strand starting at position 2136 of SEQ ID NO: 914575
aggugagagugauugacga

SEQ ID NO: 1014433 - RNA, 19 nt, Artificial Sequence
  Description of Artificial Sequence: Synthetic oligonucleotide
  Antisense strand to SEQ ID NO: 1014432
ucgucaaucacucucaccu

SEQ ID NO: 1014434 - RNA, 19 nt, Artificial Sequence
  Description of Artificial Sequence: Synthetic oligonucleotide
  Sense strand starting at position 2152 of SEQ ID NO: 914575
cgaggaguggguuaaguga

SEQ ID NO: 1014435 - RNA, 19 nt, Artificial Sequence
  Description of Artificial Sequence: Synthetic oligonucleotide
  Antisense strand to SEQ ID NO: 1014434
ucacuuaacccacuccucg

SEQ ID NO: 1014436 - RNA, 19 nt, Artificial Sequence
  Description of Artificial Sequence: Synthetic oligonucleotide
  Sense strand starting at position 2160 of SEQ ID NO: 914575
ggguuaagugaccagaagu

SEQ ID NO: 1014437 - RNA, 19 nt, Artificial Sequence
  Description of Artificial Sequence: Synthetic oligonucleotide
  Antisense strand to SEQ ID NO: 1014436
acuucuggucacuuaaccc

SEQ ID NO: 1014438 - RNA, 19 nt, Artificial Sequence
  Description of Artificial Sequence: Synthetic oligonucleotide
  Sense strand starting at position 2271 of SEQ ID NO: 914575
gaggaauacugcccuaggu

SEQ ID NO: 1014439 - RNA, 19 nt, Artificial Sequence
  Description of Artificial Sequence: Synthetic oligonucleotide
  Antisense strand to SEQ ID NO: 1014438
accuagggcaguauuccuc

SEQ ID NO: 1014440 - RNA, 19 nt, Artificial Sequence
  Description of Artificial Sequence: Synthetic oligonucleotide
  Sense strand starting at position 2273 of SEQ ID NO: 914575
ggaauacugcccuagguac

SEQ ID NO: 1014441 - RNA, 19 nt, Artificial Sequence
  Description of Artificial Sequence: Synthetic oligonucleotide
  Antisense strand to SEQ ID NO: 1014440
guaccuagggcaguauucc

SEQ ID NO: 1014442 - RNA, 19 nt, Artificial Sequence
  Description of Artificial Sequence: Synthetic oligonucleotide
  Sense strand starting at position 2464 of SEQ ID NO: 914575
acggguuuggcgucacagu

SEQ ID NO: 1014443 - RNA, 19 nt, Artificial Sequence
  Description of Artificial Sequence: Synthetic oligonucleotide
  Antisense strand to SEQ ID NO: 1014442
acugugacgccaaacccgu

SEQ ID NO: 1014444 - RNA, 19 nt, Artificial Sequence
  Description of Artificial Sequence: Synthetic oligonucleotide
  Sense strand starting at position 2515 of SEQ ID NO: 914575
gaggaaugccuugagcucu

SEQ ID NO: 1014445 - RNA, 19 nt, Artificial Sequence
  Description of Artificial Sequence: Synthetic oligonucleotide
  Antisense strand to SEQ ID NO: 1014444
agagcucaaggcauuccuc

SEQ ID NO: 1014446 - RNA, 19 nt, Artificial Sequence
  Description of Artificial Sequence: Synthetic oligonucleotide
  Sense strand starting at position 2542 of SEQ ID NO: 914575
uguccuuuccuguagaaua

SEQ ID NO: 1014447 - RNA, 19 nt, Artificial Sequence
  Description of Artificial Sequence: Synthetic oligonucleotide
  Antisense strand to SEQ ID NO: 1014446
uauucuacaggaaaggaca

SEQ ID NO: 1014448 - RNA, 19 nt, Artificial Sequence
  Description of Artificial Sequence: Synthetic oligonucleotide
  Sense strand starting at position 2603 of SEQ ID NO: 914575
aaacgaucuugguugacaa

SEQ ID NO: 1014449 - RNA, 19 nt, Artificial Sequence
  Description of Artificial Sequence: Synthetic oligonucleotide
  Antisense strand to SEQ ID NO: 1014448
uugucaaccaagaucguuu

SEQ ID NO: 1014450 - RNA, 19 nt, Artificial Sequence
  Description of Artificial Sequence: Synthetic oligonucleotide
  Sense strand starting at position 2605 of SEQ ID NO: 914575
acgaucuugguugacaagu

SEQ ID NO: 1014451 - RNA, 19 nt, Artificial Sequence
  Description of Artificial Sequence: Synthetic oligonucleotide
  Antisense strand to SEQ ID NO: 1014450
acuugucaaccaagaucgu

SEQ ID NO: 1014452 - RNA, 19 nt, Artificial Sequence
  Description of Artificial Sequence: Synthetic oligonucleotide
  Sense strand starting at position 2622 of SEQ ID NO: 914575
guuuaucguggugugagua

SEQ ID NO: 1014453 - RNA, 19 nt, Artificial Sequence
  Description of Artificial Sequence: Synthetic oligonucleotide
  Antisense strand to SEQ ID NO: 1014452
uacucacaccacgauaaac

SEQ ID NO: 1014454 - RNA, 19 nt, Artificial Sequence
  Description of Artificial Sequence: Synthetic oligonucleotide
  Sense strand starting at position 2632 of SEQ ID NO: 914575
gugugaguaccuagguagu

SEQ ID NO: 1014455 - RNA, 19 nt, Artificial Sequence
  Description of Artificial Sequence: Synthetic oligonucleotide
  Antisense strand to SEQ ID NO: 1014454
acuaccuagguacucacac

SEQ ID NO: 1014456 - RNA, 19 nt, Artificial Sequence
  Description of Artificial Sequence: Synthetic oligonucleotide
  Sense strand starting at position 2973 of SEQ ID NO: 914575
ugaggaaaccgcgaacaua

SEQ ID NO: 1014457 - RNA, 19 nt, Artificial Sequence
  Description of Artificial Sequence: Synthetic oligonucleotide
  Antisense strand to SEQ ID NO: 1014456
uauguucgcgguuuccuca

SEQ ID NO: 1014458 - RNA, 19 nt, Artificial Sequence
  Description of Artificial Sequence: Synthetic oligonucleotide
  Sense strand starting at position 2983 of SEQ ID NO: 914575
gcgaacauauguccaauaa

SEQ ID NO: 1014459 - RNA, 19 nt, Artificial Sequence
  Description of Artificial Sequence: Synthetic oligonucleotide
  Antisense strand to SEQ ID NO: 1014458
uuauuggacauauguucgc

SEQ ID NO: 1014460 - RNA, 19 nt, Artificial Sequence
  Description of Artificial Sequence: Synthetic oligonucleotide
  Sense strand starting at position 3087 of SEQ ID NO: 914575
gcuacuucucaagaugguu

SEQ ID NO: 1014461 - RNA, 19 nt, Artificial Sequence
  Description of Artificial Sequence: Synthetic oligonucleotide
  Antisense strand to SEQ ID NO: 1014460
aaccaucuugagaaguagc

SEQ ID NO: 1014462 - RNA, 19 nt, Artificial Sequence
  Description of Artificial Sequence: Synthetic oligonucleotide
  Sense strand starting at position 3093 of SEQ ID NO: 914575
ucucaagaugguuguagga

SEQ ID NO: 1014463 - RNA, 19 nt, Artificial Sequence
  Description of Artificial Sequence: Synthetic oligonucleotide
  Antisense strand to SEQ ID NO: 1014462
uccuacaaccaucuugaga

SEQ ID NO: 1014464 - RNA, 19 nt, Artificial Sequence
  Description of Artificial Sequence: Synthetic oligonucleotide
  Sense strand starting at position 3166 of SEQ ID NO: 914575
augcuaauuuaaucgcuaa

SEQ ID NO: 1014465 - RNA, 19 nt, Artificial Sequence
  Description of Artificial Sequence: Synthetic oligonucleotide
  Antisense strand to SEQ ID NO: 1014464
uuagcgauuaaauuagcau

SEQ ID NO: 1014466 - RNA, 19 nt, Artificial Sequence
  Description of Artificial Sequence: Synthetic oligonucleotide
  Sense strand starting at position 3180 of SEQ ID NO: 914575
gcuaacacuccagagcauu

SEQ ID NO: 1014467 - RNA, 19 nt, Artificial Sequence
  Description of Artificial Sequence: Synthetic oligonucleotide
  Antisense strand to SEQ ID NO: 1014466
aaugcucuggaguguuagc

SEQ ID NO: 1014468 - RNA, 19 nt, Artificial Sequence
  Description of Artificial Sequence: Synthetic oligonucleotide
  Sense strand starting at position 3318 of SEQ ID NO: 914575
agauaaagcuuuccaggag

SEQ ID NO: 1014469 - RNA, 19 nt, Artificial Sequence
  Description of Artificial Sequence: Synthetic oligonucleotide
  Antisense strand to SEQ ID NO: 1014468
cuccuggaaagcuuuaucu

SEQ ID NO: 1014470 - RNA, 19 nt, Artificial Sequence
  Description of Artificial Sequence: Synthetic oligonucleotide
  Sense strand starting at position 3407 of SEQ ID NO: 914575
guuaaauacuagucuauca

SEQ ID NO: 1014471 - RNA, 19 nt, Artificial Sequence
  Description of Artificial Sequence: Synthetic oligonucleotide
  Antisense strand to SEQ ID NO: 1014470
ugauagacuaguauuuaac

SEQ ID NO: 1014472 - RNA, 19 nt, Artificial Sequence
  Description of Artificial Sequence: Synthetic oligonucleotide
  Sense strand starting at position 3609 of SEQ ID NO: 914575
ccuugugagguuuaaauaa

SEQ ID NO: 1014473 - RNA, 19 nt, Artificial Sequence
  Description of Artificial Sequence: Synthetic oligonucleotide
  Antisense strand to SEQ ID NO: 1014472
uuauuuaaaccucacaagg

SEQ ID NO: 1014474 - RNA, 19 nt, Artificial Sequence
  Description of Artificial Sequence: Synthetic oligonucleotide
  Sense strand starting at position 3661 of SEQ ID NO: 914575
guaagcaauguauaaggau

SEQ ID NO: 1014475 - RNA, 19 nt, Artificial Sequence
  Description of Artificial Sequence: Synthetic oligonucleotide
  Antisense strand to SEQ ID NO: 1014474
auccuuauacauugcuuac

SEQ ID NO: 1014476 - RNA, 19 nt, Artificial Sequence
  Description of Artificial Sequence: Synthetic oligonucleotide
  Sense strand starting at position 3743 of SEQ ID NO: 914575
acuagauuccuuugguuag

SEQ ID NO: 1014477 - RNA, 19 nt, Artificial Sequence
  Description of Artificial Sequence: Synthetic oligonucleotide
  Antisense strand to SEQ ID NO: 1014476
cuaaccaaaggaaucuagu

SEQ ID NO: 1014478 - RNA, 19 nt, Artificial Sequence
  Description of Artificial Sequence: Synthetic oligonucleotide
  Sense strand starting at position 3764 of SEQ ID NO: 914575
acagcucugcauugagaag

SEQ ID NO: 1014479 - RNA, 19 nt, Artificial Sequence
  Description of Artificial Sequence: Synthetic oligonucleotide
  Antisense strand to SEQ ID NO: 1014478
cuucucaaugcagagcugu

SEQ ID NO: 1014480 - RNA, 19 nt, Artificial Sequence
  Description of Artificial Sequence: Synthetic oligonucleotide
  Sense strand starting at position 3909 of SEQ ID NO: 914575
ucaguaaauguuuauggua

SEQ ID NO: 1014481 - RNA, 19 nt, Artificial Sequence
  Description of Artificial Sequence: Synthetic oligonucleotide
  Antisense strand to SEQ ID NO: 1014480
uaccauaaacauuuacuga

SEQ ID NO: 1014482 - RNA, 19 nt, Artificial Sequence
  Description of Artificial Sequence: Synthetic oligonucleotide
  Sense strand starting at position 125 of SEQ ID NO: 914576
gugggaaaccuguguuucu

SEQ ID NO: 1014483 - RNA, 19 nt, Artificial Sequence
  Description of Artificial Sequence: Synthetic oligonucleotide
  Antisense strand to SEQ ID NO: 1014482
agaaacacagguuucccac

SEQ ID NO: 1014484 - RNA, 19 nt, Artificial Sequence
  Description of Artificial Sequence: Synthetic oligonucleotide
  Sense strand starting at position 128 of SEQ ID NO: 914576
ggaaaccuguguuucuguu

SEQ ID NO: 1014485 - RNA, 19 nt, Artificial Sequence
  Description of Artificial Sequence: Synthetic oligonucleotide
  Antisense strand to SEQ ID NO: 1014484
aacagaaacacagguuucc

SEQ ID NO: 1014486 - RNA, 19 nt, Artificial Sequence
  Description of Artificial Sequence: Synthetic oligonucleotide
  Sense strand starting at position 132 of SEQ ID NO: 914576
accuguguuucuguuaaga

SEQ ID NO: 1014487 - RNA, 19 nt, Artificial Sequence
  Description of Artificial Sequence: Synthetic oligonucleotide
  Antisense strand to SEQ ID NO: 1014486
ucuuaacagaaacacaggu

SEQ ID NO: 1014488 - RNA, 19 nt, Artificial Sequence
  Description of Artificial Sequence: Synthetic oligonucleotide
  Sense strand starting at position 306 of SEQ ID NO: 914576
ucugucagcuuucuagaag

SEQ ID NO: 1014489 - RNA, 19 nt, Artificial Sequence
  Description of Artificial Sequence: Synthetic oligonucleotide
  Antisense strand to SEQ ID NO: 1014488
cuucuagaaagcugacaga

SEQ ID NO: 1014490 - RNA, 19 nt, Artificial Sequence
  Description of Artificial Sequence: Synthetic oligonucleotide
  Sense strand starting at position 309 of SEQ ID NO: 914576
gucagcuuucuagaagccu

SEQ ID NO: 1014491 - RNA, 19 nt, Artificial Sequence
  Description of Artificial Sequence: Synthetic oligonucleotide
  Antisense strand to SEQ ID NO: 1014490
aggcuucuagaaagcugac

SEQ ID NO: 1014492 - RNA, 19 nt, Artificial Sequence
  Description of Artificial Sequence: Synthetic oligonucleotide
  Sense strand starting at position 427 of SEQ ID NO: 914576
ugagaugacugucuggaug

SEQ ID NO: 1014493 - RNA, 19 nt, Artificial Sequence
  Description of Artificial Sequence: Synthetic oligonucleotide
  Antisense strand to SEQ ID NO: 1014492
cauccagacagucaucuca

SEQ ID NO: 1014494 - RNA, 19 nt, Artificial Sequence
  Description of Artificial Sequence: Synthetic oligonucleotide
  Sense strand starting at position 751 of SEQ ID NO: 914576
gagcucugccugcaggaaa

SEQ ID NO: 1014495 - RNA, 19 nt, Artificial Sequence
  Description of Artificial Sequence: Synthetic oligonucleotide
  Antisense strand to SEQ ID NO: 1014494
uuuccugcaggcagagcuc

SEQ ID NO: 1014496 - RNA, 19 nt, Artificial Sequence
  Description of Artificial Sequence: Synthetic oligonucleotide
  Sense strand starting at position 1416 of SEQ ID NO: 914576
ccgucccgacggagauauu

SEQ ID NO: 1014497 - RNA, 19 nt, Artificial Sequence
  Description of Artificial Sequence: Synthetic oligonucleotide
  Antisense strand to SEQ ID NO: 1014496
aauaucuccgucgggacgg

SEQ ID NO: 1014498 - RNA, 19 nt, Artificial Sequence
  Description of Artificial Sequence: Synthetic oligonucleotide
  Sense strand starting at position 1950 of SEQ ID NO: 914576
caaagagcgcgcgaauaua

SEQ ID NO: 1014499 - RNA, 19 nt, Artificial Sequence
  Description of Artificial Sequence: Synthetic oligonucleotide
  Antisense strand to SEQ ID NO: 1014498
uauauucgcgcgcucuuug

SEQ ID NO: 1014500 - RNA, 19 nt, Artificial Sequence
  Description of Artificial Sequence: Synthetic oligonucleotide
  Sense strand starting at position 2203 of SEQ ID NO: 914576
cccggcucgcccuugauua

SEQ ID NO: 1014501 - RNA, 19 nt, Artificial Sequence
  Description of Artificial Sequence: Synthetic oligonucleotide
  Antisense strand to SEQ ID NO: 1014500
uaaucaagggcgagccggg

SEQ ID NO: 1014502 - RNA, 19 nt, Artificial Sequence
  Description of Artificial Sequence: Synthetic oligonucleotide
  Sense strand starting at position 2231 of SEQ ID NO: 914576
gcaaauucuugccucagga

SEQ ID NO: 1014503 - RNA, 19 nt, Artificial Sequence
  Description of Artificial Sequence: Synthetic oligonucleotide
  Antisense strand to SEQ ID NO: 1014502
uccugaggcaagaauuugc

SEQ ID NO: 1014504 - RNA, 19 nt, Artificial Sequence
  Description of Artificial Sequence: Synthetic oligonucleotide
  Sense strand starting at position 2244 of SEQ ID NO: 914576
ucaggaccugugugaaaca

SEQ ID NO: 1014505 - RNA, 19 nt, Artificial Sequence
  Description of Artificial Sequence: Synthetic oligonucleotide
  Antisense strand to SEQ ID NO: 1014504
uguuucacacagguccuga

SEQ ID NO: 1014506 - RNA, 19 nt, Artificial Sequence
  Description of Artificial Sequence: Synthetic oligonucleotide
  Sense strand starting at position 2576 of SEQ ID NO: 914576
ucaauuaggguccauccua

SEQ ID NO: 1014507 - RNA, 19 nt, Artificial Sequence
  Description of Artificial Sequence: Synthetic oligonucleotide
  Antisense strand to SEQ ID NO: 1014506
uaggauggacccuaauuga

SEQ ID NO: 1014508 - RNA, 19 nt, Artificial Sequence
  Description of Artificial Sequence: Synthetic oligonucleotide
  Sense strand starting at position 2644 of SEQ ID NO: 914576
aaggucauauccuuaggua

SEQ ID NO: 1014509 - RNA, 19 nt, Artificial Sequence
  Description of Artificial Sequence: Synthetic oligonucleotide
  Antisense strand to SEQ ID NO: 1014508
uaccuaaggauaugaccuu

SEQ ID NO: 1014510 - RNA, 19 nt, Artificial Sequence
  Description of Artificial Sequence: Synthetic oligonucleotide
  Sense strand starting at position 2645 of SEQ ID NO: 914576
aggucauauccuuagguac

SEQ ID NO: 1014511 - RNA, 19 nt, Artificial Sequence
  Description of Artificial Sequence: Synthetic oligonucleotide
  Antisense strand to SEQ ID NO: 1014510
guaccuaaggauaugaccu

SEQ ID NO: 1014512 - RNA, 19 nt, Artificial Sequence
  Description of Artificial Sequence: Synthetic oligonucleotide
  Sense strand starting at position 2762 of SEQ ID NO: 914576
aaauucuugcugugugaau

SEQ ID NO: 1014513 - RNA, 19 nt, Artificial Sequence
  Description of Artificial Sequence: Synthetic oligonucleotide
  Antisense strand to SEQ ID NO: 1014512
auucacacagcaagaauuu

SEQ ID NO: 1014514 - RNA, 19 nt, Artificial Sequence
  Description of Artificial Sequence: Synthetic oligonucleotide
  Sense strand starting at position 2763 of SEQ ID NO: 914576
aauucuugcugugugaaug

SEQ ID NO: 1014515 - RNA, 19 nt, Artificial Sequence
  Description of Artificial Sequence: Synthetic oligonucleotide
  Antisense strand to SEQ ID NO: 1014514
cauucacacagcaagaauu

SEQ ID NO: 1014516 - RNA, 19 nt, Artificial Sequence
  Description of Artificial Sequence: Synthetic oligonucleotide
  Sense strand starting at position 2764 of SEQ ID NO: 914576
auucuugcugugugaauga

SEQ ID NO: 1014517 - RNA, 19 nt, Artificial Sequence
  Description of Artificial Sequence: Synthetic oligonucleotide
  Antisense strand to SEQ ID NO: 1014516
ucauucacacagcaagaau

SEQ ID NO: 1014518 - RNA, 19 nt, Artificial Sequence
  Description of Artificial Sequence: Synthetic oligonucleotide
  Sense strand starting at position 2769 of SEQ ID NO: 914576
ugcugugugaaugaauaaa

SEQ ID NO: 1014519 - RNA, 19 nt, Artificial Sequence
  Description of Artificial Sequence: Synthetic oligonucleotide
  Antisense strand to SEQ ID NO: 1014518
uuuauucauucacacagca

SEQ ID NO: 1014520 - RNA, 19 nt, Artificial Sequence
  Description of Artificial Sequence: Synthetic oligonucleotide
  Sense strand starting at position 2851 of SEQ ID NO: 914576
uugguuauuauaggcagau

SEQ ID NO: 1014521 - RNA, 19 nt, Artificial Sequence
  Description of Artificial Sequence: Synthetic oligonucleotide
  Antisense strand to SEQ ID NO: 1014520
aucugccuauaauaaccaa

SEQ ID NO: 1014522 - RNA, 19 nt, Artificial Sequence
  Description of Artificial Sequence: Synthetic oligonucleotide
  Sense strand starting at position 2852 of SEQ ID NO: 914576
ugguuauuauaggcagaua

SEQ ID NO: 1014523 - RNA, 19 nt, Artificial Sequence
  Description of Artificial Sequence: Synthetic oligonucleotide
  Antisense strand to SEQ ID NO: 1014522
uaucugccuauaauaacca

SEQ ID NO: 1014524 - RNA, 19 nt, Artificial Sequence
  Description of Artificial Sequence: Synthetic oligonucleotide
  Sense strand starting at position 2853 of SEQ ID NO: 914576
gguuauuauaggcagauau

SEQ ID NO: 1014525 - RNA, 19 nt, Artificial Sequence
  Description of Artificial Sequence: Synthetic oligonucleotide
  Antisense strand to SEQ ID NO: 1014524
auaucugccuauaauaacc

SEQ ID NO: 1014526 - RNA, 19 nt, Artificial Sequence
  Description of Artificial Sequence: Synthetic oligonucleotide
  Sense strand starting at position 2880 of SEQ ID NO: 914576
uugacaaugcgauaagugu

SEQ ID NO: 1014527 - RNA, 19 nt, Artificial Sequence
  Description of Artificial Sequence: Synthetic oligonucleotide
  Antisense strand to SEQ ID NO: 1014526
acacuuaucgcauugucaa

SEQ ID NO: 1014528 - RNA, 19 nt, Artificial Sequence
  Description of Artificial Sequence: Synthetic oligonucleotide
  Sense strand starting at position 3084 of SEQ ID NO: 914576
aucccuucuuugccaguua

SEQ ID NO: 1014529 - RNA, 19 nt, Artificial Sequence
  Description of Artificial Sequence: Synthetic oligonucleotide
  Antisense strand to SEQ ID NO: 1014528
uaacuggcaaagaagggau

SEQ ID NO: 1014530 - RNA, 19 nt, Artificial Sequence
  Description of Artificial Sequence: Synthetic oligonucleotide
  Sense strand starting at position 3124 of SEQ ID NO: 914576
cguaauuuguaacuuauuc

SEQ ID NO: 1014531 - RNA, 19 nt, Artificial Sequence
  Description of Artificial Sequence: Synthetic oligonucleotide
  Antisense strand to SEQ ID NO: 1014530
gaauaaguuacaaauuacg

SEQ ID NO: 1014532 - RNA, 19 nt, Artificial Sequence
  Description of Artificial Sequence: Synthetic oligonucleotide
  Sense strand starting at position 3180 of SEQ ID NO: 914576
ugugguguagucugaugaa

SEQ ID NO: 1014533 - RNA, 19 nt, Artificial Sequence
  Description of Artificial Sequence: Synthetic oligonucleotide
  Antisense strand to SEQ ID NO: 1014532
uucaucagacuacaccaca

SEQ ID NO: 1014534 - RNA, 19 nt, Artificial Sequence
  Description of Artificial Sequence: Synthetic oligonucleotide
  Sense strand starting at position 3207 of SEQ ID NO: 914576
ugaauugcaguauaaccaa

SEQ ID NO: 1014535 - RNA, 19 nt, Artificial Sequence
  Description of Artificial Sequence: Synthetic oligonucleotide
  Antisense strand to SEQ ID NO: 1014534
uugguuauacugcaauuca

SEQ ID NO: 1014536 - RNA, 19 nt, Artificial Sequence
  Description of Artificial Sequence: Synthetic oligonucleotide
  Sense strand starting at position 3248 of SEQ ID NO: 914576
ugccguuaugguuagugau

SEQ ID NO: 1014537 - RNA, 19 nt, Artificial Sequence
  Description of Artificial Sequence: Synthetic oligonucleotide
  Antisense strand to SEQ ID NO: 1014536
aucacuaaccauaacggca

SEQ ID NO: 1014538 - RNA, 19 nt, Artificial Sequence
  Description of Artificial Sequence: Synthetic oligonucleotide
  Sense strand starting at position 3250 of SEQ ID NO: 914576
ccguuaugguuagugauuu

SEQ ID NO: 1014539 - RNA, 19 nt, Artificial Sequence
  Description of Artificial Sequence: Synthetic oligonucleotide
  Antisense strand to SEQ ID NO: 1014538
aaaucacuaaccauaacgg

SEQ ID NO: 1014540 - RNA, 19 nt, Artificial Sequence
  Description of Artificial Sequence: Synthetic oligonucleotide
  Sense strand starting at position 3370 of SEQ ID NO: 914576
ggaauugauuucuguguag

SEQ ID NO: 1014541 - RNA, 19 nt, Artificial Sequence
  Description of Artificial Sequence: Synthetic oligonucleotide
  Antisense strand to SEQ ID NO: 1014540
cuacacagaaaucaauucc

SEQ ID NO: 1014542 - RNA, 19 nt, Artificial Sequence
  Description of Artificial Sequence: Synthetic oligonucleotide
  Sense strand starting at position 3602 of SEQ ID NO: 914576
uaguuacgguaguuuacaa

SEQ ID NO: 1014543 - RNA, 19 nt, Artificial Sequence
  Description of Artificial Sequence: Synthetic oligonucleotide
  Antisense strand to SEQ ID NO: 1014542
uuguaaacuaccguaacua

SEQ ID NO: 1014544 - RNA, 19 nt, Artificial Sequence
  Description of Artificial Sequence: Synthetic oligonucleotide
  Sense strand starting at position 3609 of SEQ ID NO: 914576
gguaguuuacaacaagugu

SEQ ID NO: 1014545 - RNA, 19 nt, Artificial Sequence
  Description of Artificial Sequence: Synthetic oligonucleotide
  Antisense strand to SEQ ID NO: 1014544
acacuuguuguaaacuacc

SEQ ID NO: 1014546 - RNA, 19 nt, Artificial Sequence
  Description of Artificial Sequence: Synthetic oligonucleotide
  Sense strand starting at position 3670 of SEQ ID NO: 914576
auaucacucccuuggagau

SEQ ID NO: 1014547 - RNA, 19 nt, Artificial Sequence
  Description of Artificial Sequence: Synthetic oligonucleotide
  Antisense strand to SEQ ID NO: 1014546
aucuccaagggagugauau

SEQ ID NO: 1014548 - RNA, 19 nt, Artificial Sequence
  Description of Artificial Sequence: Synthetic oligonucleotide
  Sense strand starting at position 3820 of SEQ ID NO: 914576
uguaucaaucauggaaguu

SEQ ID NO: 1014549 - RNA, 19 nt, Artificial Sequence
  Description of Artificial Sequence: Synthetic oligonucleotide
  Antisense strand to SEQ ID NO: 1014548
aacuuccaugauugauaca

SEQ ID NO: 1014550 - RNA, 19 nt, Artificial Sequence
  Description of Artificial Sequence: Synthetic oligonucleotide
  Sense strand starting at position 3884 of SEQ ID NO: 914576
ggcaaaucaugagcuguaa

SEQ ID NO: 1014551 - RNA, 19 nt, Artificial Sequence
  Description of Artificial Sequence: Synthetic oligonucleotide
  Antisense strand to SEQ ID NO: 1014550
uuacagcucaugauuugcc

SEQ ID NO: 1014552 - RNA, 19 nt, Artificial Sequence
  Description of Artificial Sequence: Synthetic oligonucleotide
  Sense strand starting at position 3949 of SEQ ID NO: 914576
uuuccuguuucuguccaua

SEQ ID NO: 1014553 - RNA, 19 nt, Artificial Sequence
  Description of Artificial Sequence: Synthetic oligonucleotide
  Antisense strand to SEQ ID NO: 1014552
uauggacagaaacaggaaa

SEQ ID NO: 1014554 - RNA, 19 nt, Artificial Sequence
  Description of Artificial Sequence: Synthetic oligonucleotide
  Sense strand starting at position 3951 of SEQ ID NO: 914576
uccuguuucuguccauaag

SEQ ID NO: 1014555 - RNA, 19 nt, Artificial Sequence
  Description of Artificial Sequence: Synthetic oligonucleotide
  Antisense strand to SEQ ID NO: 1014554
cuuauggacagaaacagga

SEQ ID NO: 1014556 - RNA, 19 nt, Artificial Sequence
  Description of Artificial Sequence: Synthetic oligonucleotide
  Sense strand starting at position 3952 of SEQ ID NO: 914576
ccuguuucuguccauaagu

SEQ ID NO: 1014557 - RNA, 19 nt, Artificial Sequence
  Description of Artificial Sequence: Synthetic oligonucleotide
  Antisense strand to SEQ ID NO: 1014556
acuuauggacagaaacagg

SEQ ID NO: 1014558 - RNA, 19 nt, Artificial Sequence
  Description of Artificial Sequence: Synthetic oligonucleotide
  Sense strand starting at position 3954 of SEQ ID NO: 914576
uguuucuguccauaaguau

SEQ ID NO: 1014559 - RNA, 19 nt, Artificial Sequence
  Description of Artificial Sequence: Synthetic oligonucleotide
  Antisense strand to SEQ ID NO: 1014558
auacuuauggacagaaaca

SEQ ID NO: 1014560 - RNA, 19 nt, Artificial Sequence
  Description of Artificial Sequence: Synthetic oligonucleotide
  Sense strand starting at position 3957 of SEQ ID NO: 914576
uucuguccauaaguauuau

SEQ ID NO: 1014561 - RNA, 19 nt, Artificial Sequence
  Description of Artificial Sequence: Synthetic oligonucleotide
  Antisense strand to SEQ ID NO: 1014560
auaauacuuauggacagaa

SEQ ID NO: 1014562 - RNA, 19 nt, Artificial Sequence
  Description of Artificial Sequence: Synthetic oligonucleotide
  Sense strand starting at position 1 of SEQ ID NO: 914577
uuucuacucgcucagaaac

SEQ ID NO: 1014563 - RNA, 19 nt, Artificial Sequence
  Description of Artificial Sequence: Synthetic oligonucleotide
  Antisense strand to SEQ ID NO: 1014562
guuucugagcgaguagaaa

SEQ ID NO: 1014564 - RNA, 19 nt, Artificial Sequence
  Description of Artificial Sequence: Synthetic oligonucleotide
  Sense strand starting at position 35 of SEQ ID NO: 914577
cgggaaauuagucgagaca

SEQ ID NO: 1014565 - RNA, 19 nt, Artificial Sequence
  Description of Artificial Sequence: Synthetic oligonucleotide
  Antisense strand to SEQ ID NO: 1014564
ugucucgacuaauuucccg

SEQ ID NO: 1014566 - RNA, 19 nt, Artificial Sequence
  Description of Artificial Sequence: Synthetic oligonucleotide
  Sense strand starting at position 184 of SEQ ID NO: 914577
gagccaagucuuugaggug

SEQ ID NO: 1014567 - RNA, 19 nt, Artificial Sequence
  Description of Artificial Sequence: Synthetic oligonucleotide
  Antisense strand to SEQ ID NO: 1014566
caccucaaagacuuggcuc

SEQ ID NO: 1014568 - RNA, 19 nt, Artificial Sequence
  Description of Artificial Sequence: Synthetic oligonucleotide
  Sense strand starting at position 226 of SEQ ID NO: 914577
gcucaaugacucuggucau

SEQ ID NO: 1014569 - RNA, 19 nt, Artificial Sequence
  Description of Artificial Sequence: Synthetic oligonucleotide
  Antisense strand to SEQ ID NO: 1014568
augaccagagucauugagc

SEQ ID NO: 1014570 - RNA, 19 nt, Artificial Sequence
  Description of Artificial Sequence: Synthetic oligonucleotide
  Sense strand starting at position 229 of SEQ ID NO: 914577
caaugacucuggucauggu

SEQ ID NO: 1014571 - RNA, 19 nt, Artificial Sequence
  Description of Artificial Sequence: Synthetic oligonucleotide
  Antisense strand to SEQ ID NO: 1014570
accaugaccagagucauug

SEQ ID NO: 1014572 - RNA, 19 nt, Artificial Sequence
  Description of Artificial Sequence: Synthetic oligonucleotide
  Sense strand starting at position 260 of SEQ ID NO: 914577
cagggauagccaggaguaa

SEQ ID NO: 1014573 - RNA, 19 nt, Artificial Sequence
  Description of Artificial Sequence: Synthetic oligonucleotide
  Antisense strand to SEQ ID NO: 1014572
uuacuccuggcuaucccug

SEQ ID NO: 1014574 - RNA, 19 nt, Artificial Sequence
  Description of Artificial Sequence: Synthetic oligonucleotide
  Sense strand starting at position 288 of SEQ ID NO: 914577
cuagcuuccuucugagaac

SEQ ID NO: 1014575 - RNA, 19 nt, Artificial Sequence
  Description of Artificial Sequence: Synthetic oligonucleotide
  Antisense strand to SEQ ID NO: 1014574
guucucagaaggaagcuag

SEQ ID NO: 1014576 - RNA, 19 nt, Artificial Sequence
  Description of Artificial Sequence: Synthetic oligonucleotide
  Sense strand starting at position 557 of SEQ ID NO: 914577
ggcaguuucuaagcaauuc

SEQ ID NO: 1014577 - RNA, 19 nt, Artificial Sequence
  Description of Artificial Sequence: Synthetic oligonucleotide
  Antisense strand to SEQ ID NO: 1014576
gaauugcuuagaaacugcc

SEQ ID NO: 1014578 - RNA, 19 nt, Artificial Sequence
  Description of Artificial Sequence: Synthetic oligonucleotide
  Sense strand starting at position 671 of SEQ ID NO: 914577
agcucucgugcauagagau

SEQ ID NO: 1014579 - RNA, 19 nt, Artificial Sequence
  Description of Artificial Sequence: Synthetic oligonucleotide
  Antisense strand to SEQ ID NO: 1014578
aucucuaugcacgagagcu

SEQ ID NO: 1014580 - RNA, 19 nt, Artificial Sequence
  Description of Artificial Sequence: Synthetic oligonucleotide
  Sense strand starting at position 726 of SEQ ID NO: 914577
cgagcuggcuagaguguaa

SEQ ID NO: 1014581 - RNA, 19 nt, Artificial Sequence
  Description of Artificial Sequence: Synthetic oligonucleotide
  Antisense strand to SEQ ID NO: 1014580
uuacacucuagccagcucg

SEQ ID NO: 1014582 - RNA, 19 nt, Artificial Sequence
  Description of Artificial Sequence: Synthetic oligonucleotide
  Sense strand starting at position 739 of SEQ ID NO: 914577
guguaaucucaccaccuga

SEQ ID NO: 1014583 - RNA, 19 nt, Artificial Sequence
  Description of Artificial Sequence: Synthetic oligonucleotide
  Antisense strand to SEQ ID NO: 1014582
ucagguggugagauuacac

SEQ ID NO: 1014584 - RNA, 19 nt, Artificial Sequence
  Description of Artificial Sequence: Synthetic oligonucleotide
  Sense strand starting at position 777 of SEQ ID NO: 914577
uuggccugugcauauaaga

SEQ ID NO: 1014585 - RNA, 19 nt, Artificial Sequence
  Description of Artificial Sequence: Synthetic oligonucleotide
  Antisense strand to SEQ ID NO: 1014584
ucuuauaugcacaggccaa

SEQ ID NO: 1014586 - RNA, 19 nt, Artificial Sequence
  Description of Artificial Sequence: Synthetic oligonucleotide
  Sense strand starting at position 782 of SEQ ID NO: 914577
cugugcauauaagacaaau

SEQ ID NO: 1014587 - RNA, 19 nt, Artificial Sequence
  Description of Artificial Sequence: Synthetic oligonucleotide
  Antisense strand to SEQ ID NO: 1014586
auuugucuuauaugcacag

SEQ ID NO: 1014588 - RNA, 19 nt, Artificial Sequence
  Description of Artificial Sequence: Synthetic oligonucleotide
  Sense strand starting at position 833 of SEQ ID NO: 914577
gcagcacuagcagauuaua

SEQ ID NO: 1014589 - RNA, 19 nt, Artificial Sequence
  Description of Artificial Sequence: Synthetic oligonucleotide
  Antisense strand to SEQ ID NO: 1014588
uauaaucugcuagugcugc

SEQ ID NO: 1014590 - RNA, 19 nt, Artificial Sequence
  Description of Artificial Sequence: Synthetic oligonucleotide
  Sense strand starting at position 836 of SEQ ID NO: 914577
gcacuagcagauuauacaa

SEQ ID NO: 1014591 - RNA, 19 nt, Artificial Sequence
  Description of Artificial Sequence: Synthetic oligonucleotide
  Antisense strand to SEQ ID NO: 1014590
uuguauaaucugcuagugc

SEQ ID NO: 1014592 - RNA, 19 nt, Artificial Sequence
  Description of Artificial Sequence: Synthetic oligonucleotide
  Sense strand starting at position 916 of SEQ ID NO: 914577
agugguguuacagauuaga

SEQ ID NO: 1014593 - RNA, 19 nt, Artificial Sequence
  Description of Artificial Sequence: Synthetic oligonucleotide
  Antisense strand to SEQ ID NO: 1014592
ucuaaucuguaacaccacu

SEQ ID NO: 1014594 - RNA, 19 nt, Artificial Sequence
  Description of Artificial Sequence: Synthetic oligonucleotide
  Sense strand starting at position 1022 of SEQ ID NO: 914577
cagagaaucuaagugaccu

SEQ ID NO: 1014595 - RNA, 19 nt, Artificial Sequence
  Description of Artificial Sequence: Synthetic oligonucleotide
  Antisense strand to SEQ ID NO: 1014594
aggucacuuagauucucug

SEQ ID NO: 1014596 - RNA, 19 nt, Artificial Sequence
  Description of Artificial Sequence: Synthetic oligonucleotide
  Sense strand starting at position 1128 of SEQ ID NO: 914577
ugcacaauacuuuguaguu

SEQ ID NO: 1014597 - RNA, 19 nt, Artificial Sequence
  Description of Artificial Sequence: Synthetic oligonucleotide
  Antisense strand to SEQ ID NO: 1014596
aacuacaaaguauugugca

SEQ ID NO: 1014598 - RNA, 19 nt, Artificial Sequence
  Description of Artificial Sequence: Synthetic oligonucleotide
  Sense strand starting at position 1129 of SEQ ID NO: 914577
gcacaauacuuuguaguuu

SEQ ID NO: 1014599 - RNA, 19 nt, Artificial Sequence
  Description of Artificial Sequence: Synthetic oligonucleotide
  Antisense strand to SEQ ID NO: 1014598
aaacuacaaaguauugugc

SEQ ID NO: 1014600 - RNA, 19 nt, Artificial Sequence
  Description of Artificial Sequence: Synthetic oligonucleotide
  Sense strand starting at position 1137 of SEQ ID NO: 914577
cuuuguaguuucugaauuu

SEQ ID NO: 1014601 - RNA, 19 nt, Artificial Sequence
  Description of Artificial Sequence: Synthetic oligonucleotide
  Antisense strand to SEQ ID NO: 1014600
aaauucagaaacuacaaag

SEQ ID NO: 1014602 - RNA, 19 nt, Artificial Sequence
  Description of Artificial Sequence: Synthetic oligonucleotide
  Sense strand starting at position 1278 of SEQ ID NO: 914577
caaggagccuuccaugaga

SEQ ID NO: 1014603 - RNA, 19 nt, Artificial Sequence
  Description of Artificial Sequence: Synthetic oligonucleotide
  Antisense strand to SEQ ID NO: 1014602
ucucauggaaggcuccuug

SEQ ID NO: 1014604 - RNA, 19 nt, Artificial Sequence
  Description of Artificial Sequence: Synthetic oligonucleotide
  Sense strand starting at position 1280 of SEQ ID NO: 914577
aggagccuuccaugagauu

SEQ ID NO: 1014605 - RNA, 19 nt, Artificial Sequence
  Description of Artificial Sequence: Synthetic oligonucleotide
  Antisense strand to SEQ ID NO: 1014604
aaucucauggaaggcuccu

SEQ ID NO: 1014606 - RNA, 19 nt, Artificial Sequence
  Description of Artificial Sequence: Synthetic oligonucleotide
  Sense strand starting at position 1477 of SEQ ID NO: 914577
gugggaaaccuguguuucu

SEQ ID NO: 1014607 - RNA, 19 nt, Artificial Sequence
  Description of Artificial Sequence: Synthetic oligonucleotide
  Antisense strand to SEQ ID NO: 1014606
agaaacacagguuucccac

SEQ ID NO: 1014608 - RNA, 19 nt, Artificial Sequence
  Description of Artificial Sequence: Synthetic oligonucleotide
  Sense strand starting at position 1480 of SEQ ID NO: 914577
ggaaaccuguguuucuguu

SEQ ID NO: 1014609 - RNA, 19 nt, Artificial Sequence
  Description of Artificial Sequence: Synthetic oligonucleotide
  Antisense strand to SEQ ID NO: 1014608
aacagaaacacagguuucc

SEQ ID NO: 1014610 - RNA, 19 nt, Artificial Sequence
  Description of Artificial Sequence: Synthetic oligonucleotide
  Sense strand starting at position 1484 of SEQ ID NO: 914577
accuguguuucuguuaaga

SEQ ID NO: 1014611 - RNA, 19 nt, Artificial Sequence
  Description of Artificial Sequence: Synthetic oligonucleotide
  Antisense strand to SEQ ID NO: 1014610
ucuuaacagaaacacaggu

SEQ ID NO: 1014612 - RNA, 19 nt, Artificial Sequence
  Description of Artificial Sequence: Synthetic oligonucleotide
  Sense strand starting at position 1486 of SEQ ID NO: 914577
cuguguuucuguuaagaga

SEQ ID NO: 1014613 - RNA, 19 nt, Artificial Sequence
  Description of Artificial Sequence: Synthetic oligonucleotide
  Antisense strand to SEQ ID NO: 1014612
ucucuuaacagaaacacag

SEQ ID NO: 1014614 - RNA, 19 nt, Artificial Sequence
  Description of Artificial Sequence: Synthetic oligonucleotide
  Sense strand starting at position 1658 of SEQ ID NO: 914577
ucugucagcuuucuagaag

SEQ ID NO: 1014615 - RNA, 19 nt, Artificial Sequence
  Description of Artificial Sequence: Synthetic oligonucleotide
  Antisense strand to SEQ ID NO: 1014614
cuucuagaaagcugacaga

SEQ ID NO: 1014616 - RNA, 19 nt, Artificial Sequence
  Description of Artificial Sequence: Synthetic oligonucleotide
  Sense strand starting at position 1661 of SEQ ID NO: 914577
gucagcuuucuagaagccu

SEQ ID NO: 1014617 - RNA, 19 nt, Artificial Sequence
  Description of Artificial Sequence: Synthetic oligonucleotide
  Antisense strand to SEQ ID NO: 1014616
aggcuucuagaaagcugac

SEQ ID NO: 1014618 - RNA, 19 nt, Artificial Sequence
  Description of Artificial Sequence: Synthetic oligonucleotide
  Sense strand starting at position 1779 of SEQ ID NO: 914577
ugagaugacugucuggaug

SEQ ID NO: 1014619 - RNA, 19 nt, Artificial Sequence
  Description of Artificial Sequence: Synthetic oligonucleotide
  Antisense strand to SEQ ID NO: 1014618
cauccagacagucaucuca

SEQ ID NO: 1014620 - RNA, 19 nt, Artificial Sequence
  Description of Artificial Sequence: Synthetic oligonucleotide
  Sense strand starting at position 2103 of SEQ ID NO: 914577
gagcucugccugcaggaaa

SEQ ID NO: 1014621 - RNA, 19 nt, Artificial Sequence
  Description of Artificial Sequence: Synthetic oligonucleotide
  Antisense strand to SEQ ID NO: 1014620
uuuccugcaggcagagcuc

SEQ ID NO: 1014622 - RNA, 19 nt, Artificial Sequence
  Description of Artificial Sequence: Synthetic oligonucleotide
  Sense strand starting at position 2399 of SEQ ID NO: 914577
gugcguagcucuaagaggu

SEQ ID NO: 1014623 - RNA, 19 nt, Artificial Sequence
  Description of Artificial Sequence: Synthetic oligonucleotide
  Antisense strand to SEQ ID NO: 1014622
accucuuagagcuacgcac

SEQ ID NO: 1014624 - RNA, 19 nt, Artificial Sequence
  Description of Artificial Sequence: Synthetic oligonucleotide
  Sense strand starting at position 2768 of SEQ ID NO: 914577
ccgucccgacggagauauu

SEQ ID NO: 1014625 - RNA, 19 nt, Artificial Sequence
  Description of Artificial Sequence: Synthetic oligonucleotide
  Antisense strand to SEQ ID NO: 1014624
aauaucuccgucgggacgg

SEQ ID NO: 1014626 - RNA, 19 nt, Artificial Sequence
  Description of Artificial Sequence: Synthetic oligonucleotide
  Sense strand starting at position 3302 of SEQ ID NO: 914577
caaagagcgcgcgaauaua

SEQ ID NO: 1014627 - RNA, 19 nt, Artificial Sequence
  Description of Artificial Sequence: Synthetic oligonucleotide
  Antisense strand to SEQ ID NO: 1014626
uauauucgcgcgcucuuug

SEQ ID NO: 1014628 - RNA, 19 nt, Artificial Sequence
  Description of Artificial Sequence: Synthetic oligonucleotide
  Sense strand starting at position 3555 of SEQ ID NO: 914577
cccggcucgcccuugauua

SEQ ID NO: 1014629 - RNA, 19 nt, Artificial Sequence
  Description of Artificial Sequence: Synthetic oligonucleotide
  Antisense strand to SEQ ID NO: 1014628
uaaucaagggcgagccggg

SEQ ID NO: 1014630 - RNA, 19 nt, Artificial Sequence
  Description of Artificial Sequence: Synthetic oligonucleotide
  Sense strand starting at position 3583 of SEQ ID NO: 914577
gcaaauucuugccucagga

SEQ ID NO: 1014631 - RNA, 19 nt, Artificial Sequence
  Description of Artificial Sequence: Synthetic oligonucleotide
  Antisense strand to SEQ ID NO: 1014630
uccugaggcaagaauuugc

SEQ ID NO: 1014632 - RNA, 19 nt, Artificial Sequence
  Description of Artificial Sequence: Synthetic oligonucleotide
  Sense strand starting at position 3596 of SEQ ID NO: 914577
ucaggaccugugugaaaca

SEQ ID NO: 1014633 - RNA, 19 nt, Artificial Sequence
  Description of Artificial Sequence: Synthetic oligonucleotide
  Antisense strand to SEQ ID NO: 1014632
uguuucacacagguccuga

SEQ ID NO: 1014634 - RNA, 19 nt, Artificial Sequence
  Description of Artificial Sequence: Synthetic oligonucleotide
  Sense strand starting at position 3703 of SEQ ID NO: 914577
aauuuauugucucgcaggu

SEQ ID NO: 1014635 - RNA, 19 nt, Artificial Sequence
  Description of Artificial Sequence: Synthetic oligonucleotide
  Antisense strand to SEQ ID NO: 1014634
accugcgagacaauaaauu

SEQ ID NO: 1014636 - RNA, 19 nt, Artificial Sequence
  Description of Artificial Sequence: Synthetic oligonucleotide
  Sense strand starting at position 3805 of SEQ ID NO: 914577
cuccuagguuuguaggaga

SEQ ID NO: 1014637 - RNA, 19 nt, Artificial Sequence
  Description of Artificial Sequence: Synthetic oligonucleotide
  Antisense strand to SEQ ID NO: 1014636
ucuccuacaaaccuaggag

SEQ ID NO: 1014638 - RNA, 19 nt, Artificial Sequence
  Description of Artificial Sequence: Synthetic oligonucleotide
  Sense strand starting at position 3879 of SEQ ID NO: 914577
gugugucccuguguccaaa

SEQ ID NO: 1014639 - RNA, 19 nt, Artificial Sequence
  Description of Artificial Sequence: Synthetic oligonucleotide
  Antisense strand to SEQ ID NO: 1014638
uuuggacacagggacacac

SEQ ID NO: 1014640 - RNA, 19 nt, Artificial Sequence
  Description of Artificial Sequence: Synthetic oligonucleotide
  Sense strand starting at position 3928 of SEQ ID NO: 914577
ucaauuaggguccauccua

SEQ ID NO: 1014641 - RNA, 19 nt, Artificial Sequence
  Description of Artificial Sequence: Synthetic oligonucleotide
  Antisense strand to SEQ ID NO: 1014640
uaggauggacccuaauuga

SEQ ID NO: 1014642 - RNA, 19 nt, Artificial Sequence
  Description of Artificial Sequence: Synthetic oligonucleotide
  Sense strand starting at position 32 of SEQ ID NO: 914578
guguaaucucaccaccuga

SEQ ID NO: 1014643 - RNA, 19 nt, Artificial Sequence
  Description of Artificial Sequence: Synthetic oligonucleotide
  Antisense strand to SEQ ID NO: 1014642
ucagguggugagauuacac

SEQ ID NO: 1014644 - RNA, 19 nt, Artificial Sequence
  Description of Artificial Sequence: Synthetic oligonucleotide
  Sense strand starting at position 70 of SEQ ID NO: 914578
uuggccugugcauauaaga

SEQ ID NO: 1014645 - RNA, 19 nt, Artificial Sequence
  Description of Artificial Sequence: Synthetic oligonucleotide
  Antisense strand to SEQ ID NO: 1014644
ucuuauaugcacaggccaa

SEQ ID NO: 1014646 - RNA, 19 nt, Artificial Sequence
  Description of Artificial Sequence: Synthetic oligonucleotide
  Sense strand starting at position 126 of SEQ ID NO: 914578
gcagcacuagcagauuaua

SEQ ID NO: 1014647 - RNA, 19 nt, Artificial Sequence
  Description of Artificial Sequence: Synthetic oligonucleotide
  Antisense strand to SEQ ID NO: 1014646
uauaaucugcuagugcugc

SEQ ID NO: 1014648 - RNA, 19 nt, Artificial Sequence
  Description of Artificial Sequence: Synthetic oligonucleotide
  Sense strand starting at position 129 of SEQ ID NO: 914578
gcacuagcagauuauacaa

SEQ ID NO: 1014649 - RNA, 19 nt, Artificial Sequence
  Description of Artificial Sequence: Synthetic oligonucleotide
  Antisense strand to SEQ ID NO: 1014648
uuguauaaucugcuagugc

SEQ ID NO: 1014650 - RNA, 19 nt, Artificial Sequence
  Description of Artificial Sequence: Synthetic oligonucleotide
  Sense strand starting at position 209 of SEQ ID NO: 914578
agugguguuacagauuaga

SEQ ID NO: 1014651 - RNA, 19 nt, Artificial Sequence
  Description of Artificial Sequence: Synthetic oligonucleotide
  Antisense strand to SEQ ID NO: 1014650
ucuaaucuguaacaccacu

SEQ ID NO: 1014652 - RNA, 19 nt, Artificial Sequence
  Description of Artificial Sequence: Synthetic oligonucleotide
  Sense strand starting at position 315 of SEQ ID NO: 914578
cagagaaucuaagugaccu

SEQ ID NO: 1014653 - RNA, 19 nt, Artificial Sequence
  Description of Artificial Sequence: Synthetic oligonucleotide
  Antisense strand to SEQ ID NO: 1014652
aggucacuuagauucucug

SEQ ID NO: 1014654 - RNA, 19 nt, Artificial Sequence
  Description of Artificial Sequence: Synthetic oligonucleotide
  Sense strand starting at position 421 of SEQ ID NO: 914578
ugcacaauacuuuguaguu

SEQ ID NO: 1014655 - RNA, 19 nt, Artificial Sequence
  Description of Artificial Sequence: Synthetic oligonucleotide
  Antisense strand to SEQ ID NO: 1014654
aacuacaaaguauugugca

SEQ ID NO: 1014656 - RNA, 19 nt, Artificial Sequence
  Description of Artificial Sequence: Synthetic oligonucleotide
  Sense strand starting at position 422 of SEQ ID NO: 914578
gcacaauacuuuguaguuu

SEQ ID NO: 1014657 - RNA, 19 nt, Artificial Sequence
  Description of Artificial Sequence: Synthetic oligonucleotide
  Antisense strand to SEQ ID NO: 1014656
aaacuacaaaguauugugc

SEQ ID NO: 1014658 - RNA, 19 nt, Artificial Sequence
  Description of Artificial Sequence: Synthetic oligonucleotide
  Sense strand starting at position 571 of SEQ ID NO: 914578
caaggagccuuccaugaga

SEQ ID NO: 1014659 - RNA, 19 nt, Artificial Sequence
  Description of Artificial Sequence: Synthetic oligonucleotide
  Antisense strand to SEQ ID NO: 1014658
ucucauggaaggcuccuug

SEQ ID NO: 1014660 - RNA, 19 nt, Artificial Sequence
  Description of Artificial Sequence: Synthetic oligonucleotide
  Sense strand starting at position 573 of SEQ ID NO: 914578
aggagccuuccaugagauu

SEQ ID NO: 1014661 - RNA, 19 nt, Artificial Sequence
  Description of Artificial Sequence: Synthetic oligonucleotide
  Antisense strand to SEQ ID NO: 1014660
aaucucauggaaggcuccu

SEQ ID NO: 1014662 - RNA, 19 nt, Artificial Sequence
  Description of Artificial Sequence: Synthetic oligonucleotide
  Sense strand starting at position 770 of SEQ ID NO: 914578
gugggaaaccuguguuucu

SEQ ID NO: 1014663 - RNA, 19 nt, Artificial Sequence
  Description of Artificial Sequence: Synthetic oligonucleotide
  Antisense strand to SEQ ID NO: 1014662
agaaacacagguuucccac

SEQ ID NO: 1014664 - RNA, 19 nt, Artificial Sequence
  Description of Artificial Sequence: Synthetic oligonucleotide
  Sense strand starting at position 773 of SEQ ID NO: 914578
ggaaaccuguguuucuguu

SEQ ID NO: 1014665 - RNA, 19 nt, Artificial Sequence
  Description of Artificial Sequence: Synthetic oligonucleotide
  Antisense strand to SEQ ID NO: 1014664
aacagaaacacagguuucc

SEQ ID NO: 1014666 - RNA, 19 nt, Artificial Sequence
  Description of Artificial Sequence: Synthetic oligonucleotide
  Sense strand starting at position 777 of SEQ ID NO: 914578
accuguguuucuguuaaga

SEQ ID NO: 1014667 - RNA, 19 nt, Artificial Sequence
  Description of Artificial Sequence: Synthetic oligonucleotide
  Antisense strand to SEQ ID NO: 1014666
ucuuaacagaaacacaggu

SEQ ID NO: 1014668 - RNA, 19 nt, Artificial Sequence
  Description of Artificial Sequence: Synthetic oligonucleotide
  Sense strand starting at position 951 of SEQ ID NO: 914578
ucugucagcuuucuagaag

SEQ ID NO: 1014669 - RNA, 19 nt, Artificial Sequence
  Description of Artificial Sequence: Synthetic oligonucleotide
  Antisense strand to SEQ ID NO: 1014668
cuucuagaaagcugacaga

SEQ ID NO: 1014670 - RNA, 19 nt, Artificial Sequence
  Description of Artificial Sequence: Synthetic oligonucleotide
  Sense strand starting at position 954 of SEQ ID NO: 914578
gucagcuuucuagaagccu

SEQ ID NO: 1014671 - RNA, 19 nt, Artificial Sequence
  Description of Artificial Sequence: Synthetic oligonucleotide
  Antisense strand to SEQ ID NO: 1014670
aggcuucuagaaagcugac

SEQ ID NO: 1014672 - RNA, 19 nt, Artificial Sequence
  Description of Artificial Sequence: Synthetic oligonucleotide
  Sense strand starting at position 1072 of SEQ ID NO: 914578
ugagaugacugucuggaug

SEQ ID NO: 1014673 - RNA, 19 nt, Artificial Sequence
  Description of Artificial Sequence: Synthetic oligonucleotide
  Antisense strand to SEQ ID NO: 1014672
cauccagacagucaucuca

SEQ ID NO: 1014674 - RNA, 19 nt, Artificial Sequence
  Description of Artificial Sequence: Synthetic oligonucleotide
  Sense strand starting at position 1396 of SEQ ID NO: 914578
gagcucugccugcaggaaa

SEQ ID NO: 1014675 - RNA, 19 nt, Artificial Sequence
  Description of Artificial Sequence: Synthetic oligonucleotide
  Antisense strand to SEQ ID NO: 1014674
uuuccugcaggcagagcuc

SEQ ID NO: 1014676 - RNA, 19 nt, Artificial Sequence
  Description of Artificial Sequence: Synthetic oligonucleotide
  Sense strand starting at position 2061 of SEQ ID NO: 914578
ccgucccgacggagauauu

SEQ ID NO: 1014677 - RNA, 19 nt, Artificial Sequence
  Description of Artificial Sequence: Synthetic oligonucleotide
  Antisense strand to SEQ ID NO: 1014676
aauaucuccgucgggacgg

SEQ ID NO: 1014678 - RNA, 19 nt, Artificial Sequence
  Description of Artificial Sequence: Synthetic oligonucleotide
  Sense strand starting at position 2595 of SEQ ID NO: 914578
caaagagcgcgcgaauaua

SEQ ID NO: 1014679 - RNA, 19 nt, Artificial Sequence
  Description of Artificial Sequence: Synthetic oligonucleotide
  Antisense strand to SEQ ID NO: 1014678
uauauucgcgcgcucuuug

SEQ ID NO: 1014680 - RNA, 19 nt, Artificial Sequence
  Description of Artificial Sequence: Synthetic oligonucleotide
  Sense strand starting at position 2848 of SEQ ID NO: 914578
cccggcucgcccuugauua

SEQ ID NO: 1014681 - RNA, 19 nt, Artificial Sequence
  Description of Artificial Sequence: Synthetic oligonucleotide
  Antisense strand to SEQ ID NO: 1014680
uaaucaagggcgagccggg

SEQ ID NO: 1014682 - RNA, 19 nt, Artificial Sequence
  Description of Artificial Sequence: Synthetic oligonucleotide
  Sense strand starting at position 2876 of SEQ ID NO: 914578
gcaaauucuugccucagga

SEQ ID NO: 1014683 - RNA, 19 nt, Artificial Sequence
  Description of Artificial Sequence: Synthetic oligonucleotide
  Antisense strand to SEQ ID NO: 1014682
uccugaggcaagaauuugc

SEQ ID NO: 1014684 - RNA, 19 nt, Artificial Sequence
  Description of Artificial Sequence: Synthetic oligonucleotide
  Sense strand starting at position 2889 of SEQ ID NO: 914578
ucaggaccugugugaaaca

SEQ ID NO: 1014685 - RNA, 19 nt, Artificial Sequence
  Description of Artificial Sequence: Synthetic oligonucleotide
  Antisense strand to SEQ ID NO: 1014684
uguuucacacagguccuga

SEQ ID NO: 1014686 - RNA, 19 nt, Artificial Sequence
  Description of Artificial Sequence: Synthetic oligonucleotide
  Sense strand starting at position 3221 of SEQ ID NO: 914578
ucaauuaggguccauccua

SEQ ID NO: 1014687 - RNA, 19 nt, Artificial Sequence
  Description of Artificial Sequence: Synthetic oligonucleotide
  Antisense strand to SEQ ID NO: 1014686
uaggauggacccuaauuga

SEQ ID NO: 1014688 - RNA, 19 nt, Artificial Sequence
  Description of Artificial Sequence: Synthetic oligonucleotide
  Sense strand starting at position 3289 of SEQ ID NO: 914578
aaggucauauccuuaggua

SEQ ID NO: 1014689 - RNA, 19 nt, Artificial Sequence
  Description of Artificial Sequence: Synthetic oligonucleotide
  Antisense strand to SEQ ID NO: 1014688
uaccuaaggauaugaccuu

SEQ ID NO: 1014690 - RNA, 19 nt, Artificial Sequence
  Description of Artificial Sequence: Synthetic oligonucleotide
  Sense strand starting at position 3290 of SEQ ID NO: 914578
aggucauauccuuagguac

SEQ ID NO: 1014691 - RNA, 19 nt, Artificial Sequence
  Description of Artificial Sequence: Synthetic oligonucleotide
  Antisense strand to SEQ ID NO: 1014690
guaccuaaggauaugaccu

SEQ ID NO: 1014692 - RNA, 19 nt, Artificial Sequence
  Description of Artificial Sequence: Synthetic oligonucleotide
  Sense strand starting at position 3326 of SEQ ID NO: 914578
acauaagaaucagggugaa

SEQ ID NO: 1014693 - RNA, 19 nt, Artificial Sequence
  Description of Artificial Sequence: Synthetic oligonucleotide
  Antisense strand to SEQ ID NO: 1014692
uucacccugauucuuaugu

SEQ ID NO: 1014694 - RNA, 19 nt, Artificial Sequence
  Description of Artificial Sequence: Synthetic oligonucleotide
  Sense strand starting at position 3407 of SEQ ID NO: 914578
aaauucuugcugugugaau

SEQ ID NO: 1014695 - RNA, 19 nt, Artificial Sequence
  Description of Artificial Sequence: Synthetic oligonucleotide
  Antisense strand to SEQ ID NO: 1014694
auucacacagcaagaauuu

SEQ ID NO: 1014696 - RNA, 19 nt, Artificial Sequence
  Description of Artificial Sequence: Synthetic oligonucleotide
  Sense strand starting at position 3408 of SEQ ID NO: 914578
aauucuugcugugugaaug

SEQ ID NO: 1014697 - RNA, 19 nt, Artificial Sequence
  Description of Artificial Sequence: Synthetic oligonucleotide
  Antisense strand to SEQ ID NO: 1014696
cauucacacagcaagaauu

SEQ ID NO: 1014698 - RNA, 19 nt, Artificial Sequence
  Description of Artificial Sequence: Synthetic oligonucleotide
  Sense strand starting at position 3409 of SEQ ID NO: 914578
auucuugcugugugaauga

SEQ ID NO: 1014699 - RNA, 19 nt, Artificial Sequence
  Description of Artificial Sequence: Synthetic oligonucleotide
  Antisense strand to SEQ ID NO: 1014698
ucauucacacagcaagaau

SEQ ID NO: 1014700 - RNA, 19 nt, Artificial Sequence
  Description of Artificial Sequence: Synthetic oligonucleotide
  Sense strand starting at position 3414 of SEQ ID NO: 914578
ugcugugugaaugaauaaa

SEQ ID NO: 1014701 - RNA, 19 nt, Artificial Sequence
  Description of Artificial Sequence: Synthetic oligonucleotide
  Antisense strand to SEQ ID NO: 1014700
uuuauucauucacacagca

SEQ ID NO: 1014702 - RNA, 19 nt, Artificial Sequence
  Description of Artificial Sequence: Synthetic oligonucleotide
  Sense strand starting at position 3496 of SEQ ID NO: 914578
uugguuauuauaggcagau

SEQ ID NO: 1014703 - RNA, 19 nt, Artificial Sequence
  Description of Artificial Sequence: Synthetic oligonucleotide
  Antisense strand to SEQ ID NO: 1014702
aucugccuauaauaaccaa

SEQ ID NO: 1014704 - RNA, 19 nt, Artificial Sequence
  Description of Artificial Sequence: Synthetic oligonucleotide
  Sense strand starting at position 3497 of SEQ ID NO: 914578
ugguuauuauaggcagaua

SEQ ID NO: 1014705 - RNA, 19 nt, Artificial Sequence
  Description of Artificial Sequence: Synthetic oligonucleotide
  Antisense strand to SEQ ID NO: 1014704
uaucugccuauaauaacca

SEQ ID NO: 1014706 - RNA, 19 nt, Artificial Sequence
  Description of Artificial Sequence: Synthetic oligonucleotide
  Sense strand starting at position 3498 of SEQ ID NO: 914578
gguuauuauaggcagauau

SEQ ID NO: 1014707 - RNA, 19 nt, Artificial Sequence
  Description of Artificial Sequence: Synthetic oligonucleotide
  Antisense strand to SEQ ID NO: 1014706
auaucugccuauaauaacc

SEQ ID NO: 1014708 - RNA, 19 nt, Artificial Sequence
  Description of Artificial Sequence: Synthetic oligonucleotide
  Sense strand starting at position 3525 of SEQ ID NO: 914578
uugacaaugcgauaagugu

SEQ ID NO: 1014709 - RNA, 19 nt, Artificial Sequence
  Description of Artificial Sequence: Synthetic oligonucleotide
  Antisense strand to SEQ ID NO: 1014708
acacuuaucgcauugucaa

SEQ ID NO: 1014710 - RNA, 19 nt, Artificial Sequence
  Description of Artificial Sequence: Synthetic oligonucleotide
  Sense strand starting at position 3729 of SEQ ID NO: 914578
aucccuucuuugccaguua

SEQ ID NO: 1014711 - RNA, 19 nt, Artificial Sequence
  Description of Artificial Sequence: Synthetic oligonucleotide
  Antisense strand to SEQ ID NO: 1014710
uaacuggcaaagaagggau

SEQ ID NO: 1014712 - RNA, 19 nt, Artificial Sequence
  Description of Artificial Sequence: Synthetic oligonucleotide
  Sense strand starting at position 3769 of SEQ ID NO: 914578
cguaauuuguaacuuauuc

SEQ ID NO: 1014713 - RNA, 19 nt, Artificial Sequence
  Description of Artificial Sequence: Synthetic oligonucleotide
  Antisense strand to SEQ ID NO: 1014712
gaauaaguuacaaauuacg

SEQ ID NO: 1014714 - RNA, 19 nt, Artificial Sequence
  Description of Artificial Sequence: Synthetic oligonucleotide
  Sense strand starting at position 3825 of SEQ ID NO: 914578
ugugguguagucugaugaa

SEQ ID NO: 1014715 - RNA, 19 nt, Artificial Sequence
  Description of Artificial Sequence: Synthetic oligonucleotide
  Antisense strand to SEQ ID NO: 1014714
uucaucagacuacaccaca

SEQ ID NO: 1014716 - RNA, 19 nt, Artificial Sequence
  Description of Artificial Sequence: Synthetic oligonucleotide
  Sense strand starting at position 3852 of SEQ ID NO: 914578
ugaauugcaguauaaccaa

SEQ ID NO: 1014717 - RNA, 19 nt, Artificial Sequence
  Description of Artificial Sequence: Synthetic oligonucleotide
  Antisense strand to SEQ ID NO: 1014716
uugguuauacugcaauuca

SEQ ID NO: 1014718 - RNA, 19 nt, Artificial Sequence
  Description of Artificial Sequence: Synthetic oligonucleotide
  Sense strand starting at position 3893 of SEQ ID NO: 914578
ugccguuaugguuagugau

SEQ ID NO: 1014719 - RNA, 19 nt, Artificial Sequence
  Description of Artificial Sequence: Synthetic oligonucleotide
  Antisense strand to SEQ ID NO: 1014718
aucacuaaccauaacggca

SEQ ID NO: 1014720 - RNA, 19 nt, Artificial Sequence
  Description of Artificial Sequence: Synthetic oligonucleotide
  Sense strand starting at position 3895 of SEQ ID NO: 914578
ccguuaugguuagugauuu

SEQ ID NO: 1014721 - RNA, 19 nt, Artificial Sequence
  Description of Artificial Sequence: Synthetic oligonucleotide
  Antisense strand to SEQ ID NO: 1014720
aaaucacuaaccauaacgg

SEQ ID NO: 1014722 - RNA, 19 nt, Artificial Sequence
  Description of Artificial Sequence: Synthetic oligonucleotide
  Sense strand starting at position 60 of SEQ ID NO: 914579
agaccugaccucuagucuu

SEQ ID NO: 1014723 - RNA, 19 nt, Artificial Sequence
  Description of Artificial Sequence: Synthetic oligonucleotide
  Antisense strand to SEQ ID NO: 1014722
aagacuagaggucaggucu

SEQ ID NO: 1014724 - RNA, 19 nt, Artificial Sequence
  Description of Artificial Sequence: Synthetic oligonucleotide
  Sense strand starting at position 108 of SEQ ID NO: 914579
uuaugaugcuguguaccaa

SEQ ID NO: 1014725 - RNA, 19 nt, Artificial Sequence
  Description of Artificial Sequence: Synthetic oligonucleotide
  Antisense strand to SEQ ID NO: 1014724
uugguacacagcaucauaa

SEQ ID NO: 1014726 - RNA, 19 nt, Artificial Sequence
  Description of Artificial Sequence: Synthetic oligonucleotide
  Sense strand starting at position 182 of SEQ ID NO: 914579
gggagaauugcagguugga

SEQ ID NO: 1014727 - RNA, 19 nt, Artificial Sequence
  Description of Artificial Sequence: Synthetic oligonucleotide
  Antisense strand to SEQ ID NO: 1014726
uccaaccugcaauucuccc

SEQ ID NO: 1014728 - RNA, 19 nt, Artificial Sequence
  Description of Artificial Sequence: Synthetic oligonucleotide
  Sense strand starting at position 257 of SEQ ID NO: 914579
aacguaaacuauucgugaa

SEQ ID NO: 1014729 - RNA, 19 nt, Artificial Sequence
  Description of Artificial Sequence: Synthetic oligonucleotide
  Antisense strand to SEQ ID NO: 1014728
uucacgaauaguuuacguu

SEQ ID NO: 1014730 - RNA, 19 nt, Artificial Sequence
  Description of Artificial Sequence: Synthetic oligonucleotide
  Sense strand starting at position 258 of SEQ ID NO: 914579
acguaaacuauucgugaac

SEQ ID NO: 1014731 - RNA, 19 nt, Artificial Sequence
  Description of Artificial Sequence: Synthetic oligonucleotide
  Antisense strand to SEQ ID NO: 1014730
guucacgaauaguuuacgu

SEQ ID NO: 1014732 - RNA, 19 nt, Artificial Sequence
  Description of Artificial Sequence: Synthetic oligonucleotide
  Sense strand starting at position 296 of SEQ ID NO: 914579
auuagugacuuucuauucu

SEQ ID NO: 1014733 - RNA, 19 nt, Artificial Sequence
  Description of Artificial Sequence: Synthetic oligonucleotide
  Antisense strand to SEQ ID NO: 1014732
agaauagaaagucacuaau

SEQ ID NO: 1014734 - RNA, 19 nt, Artificial Sequence
  Description of Artificial Sequence: Synthetic oligonucleotide
  Sense strand starting at position 300 of SEQ ID NO: 914579
gugacuuucuauucuagaa

SEQ ID NO: 1014735 - RNA, 19 nt, Artificial Sequence
  Description of Artificial Sequence: Synthetic oligonucleotide
  Antisense strand to SEQ ID NO: 1014734
uucuagaauagaaagucac

SEQ ID NO: 1014736 - RNA, 19 nt, Artificial Sequence
  Description of Artificial Sequence: Synthetic oligonucleotide
  Sense strand starting at position 846 of SEQ ID NO: 914579
ccuguaguugcauauaaau

SEQ ID NO: 1014737 - RNA, 19 nt, Artificial Sequence
  Description of Artificial Sequence: Synthetic oligonucleotide
  Antisense strand to SEQ ID NO: 1014736
auuuauaugcaacuacagg

SEQ ID NO: 1014738 - RNA, 19 nt, Artificial Sequence
  Description of Artificial Sequence: Synthetic oligonucleotide
  Sense strand starting at position 1061 of SEQ ID NO: 914579
uuaaaugagucaccaaguu

SEQ ID NO: 1014739 - RNA, 19 nt, Artificial Sequence
  Description of Artificial Sequence: Synthetic oligonucleotide
  Antisense strand to SEQ ID NO: 1014738
aacuuggugacucauuuaa

SEQ ID NO: 1014740 - RNA, 19 nt, Artificial Sequence
  Description of Artificial Sequence: Synthetic oligonucleotide
  Sense strand starting at position 1662 of SEQ ID NO: 914579
cggagaggucccgacuagu

SEQ ID NO: 1014741 - RNA, 19 nt, Artificial Sequence
  Description of Artificial Sequence: Synthetic oligonucleotide
  Antisense strand to SEQ ID NO: 1014740
acuagucgggaccucuccg

SEQ ID NO: 1014742 - RNA, 19 nt, Artificial Sequence
  Description of Artificial Sequence: Synthetic oligonucleotide
  Sense strand starting at position 1842 of SEQ ID NO: 914579
auagauguugccgauaaau

SEQ ID NO: 1014743 - RNA, 19 nt, Artificial Sequence
  Description of Artificial Sequence: Synthetic oligonucleotide
  Antisense strand to SEQ ID NO: 1014742
auuuaucggcaacaucuau

SEQ ID NO: 1014744 - RNA, 19 nt, Artificial Sequence
  Description of Artificial Sequence: Synthetic oligonucleotide
  Sense strand starting at position 1844 of SEQ ID NO: 914579
agauguugccgauaaaugg

SEQ ID NO: 1014745 - RNA, 19 nt, Artificial Sequence
  Description of Artificial Sequence: Synthetic oligonucleotide
  Antisense strand to SEQ ID NO: 1014744
ccauuuaucggcaacaucu

SEQ ID NO: 1014746 - RNA, 19 nt, Artificial Sequence
  Description of Artificial Sequence: Synthetic oligonucleotide
  Sense strand starting at position 2284 of SEQ ID NO: 914579
gggcauugacgagguguca

SEQ ID NO: 1014747 - RNA, 19 nt, Artificial Sequence
  Description of Artificial Sequence: Synthetic oligonucleotide
  Antisense strand to SEQ ID NO: 1014746
ugacaccucgucaaugccc

SEQ ID NO: 1014748 - RNA, 19 nt, Artificial Sequence
  Description of Artificial Sequence: Synthetic oligonucleotide
  Sense strand starting at position 2347 of SEQ ID NO: 914579
gccagaccuuucuuaaagu

SEQ ID NO: 1014749 - RNA, 19 nt, Artificial Sequence
  Description of Artificial Sequence: Synthetic oligonucleotide
  Antisense strand to SEQ ID NO: 1014748
acuuuaagaaaggucuggc

SEQ ID NO: 1014750 - RNA, 19 nt, Artificial Sequence
  Description of Artificial Sequence: Synthetic oligonucleotide
  Sense strand starting at position 2480 of SEQ ID NO: 914579
uugacccaucaguaguaaa

SEQ ID NO: 1014751 - RNA, 19 nt, Artificial Sequence
  Description of Artificial Sequence: Synthetic oligonucleotide
  Antisense strand to SEQ ID NO: 1014750
uuuacuacugaugggucaa

SEQ ID NO: 1014752 - RNA, 19 nt, Artificial Sequence
  Description of Artificial Sequence: Synthetic oligonucleotide
  Sense strand starting at position 2578 of SEQ ID NO: 914579
ugugaugauugagcaguuu

SEQ ID NO: 1014753 - RNA, 19 nt, Artificial Sequence
  Description of Artificial Sequence: Synthetic oligonucleotide
  Antisense strand to SEQ ID NO: 1014752
aaacugcucaaucaucaca

SEQ ID NO: 1014754 - RNA, 19 nt, Artificial Sequence
  Description of Artificial Sequence: Synthetic oligonucleotide
  Sense strand starting at position 2584 of SEQ ID NO: 914579
gauugagcaguuuauguga

SEQ ID NO: 1014755 - RNA, 19 nt, Artificial Sequence
  Description of Artificial Sequence: Synthetic oligonucleotide
  Antisense strand to SEQ ID NO: 1014754
ucacauaaacugcucaauc

SEQ ID NO: 1014756 - RNA, 19 nt, Artificial Sequence
  Description of Artificial Sequence: Synthetic oligonucleotide
  Sense strand starting at position 2587 of SEQ ID NO: 914579
ugagcaguuuaugugauua

SEQ ID NO: 1014757 - RNA, 19 nt, Artificial Sequence
  Description of Artificial Sequence: Synthetic oligonucleotide
  Antisense strand to SEQ ID NO: 1014756
uaaucacauaaacugcuca

SEQ ID NO: 1014758 - RNA, 19 nt, Artificial Sequence
  Description of Artificial Sequence: Synthetic oligonucleotide
  Sense strand starting at position 2595 of SEQ ID NO: 914579
uuaugugauuaacucaguu

SEQ ID NO: 1014759 - RNA, 19 nt, Artificial Sequence
  Description of Artificial Sequence: Synthetic oligonucleotide
  Antisense strand to SEQ ID NO: 1014758
aacugaguuaaucacauaa

SEQ ID NO: 1014760 - RNA, 19 nt, Artificial Sequence
  Description of Artificial Sequence: Synthetic oligonucleotide
  Sense strand starting at position 2647 of SEQ ID NO: 914579
acugauuacuuauuggcaa

SEQ ID NO: 1014761 - RNA, 19 nt, Artificial Sequence
  Description of Artificial Sequence: Synthetic oligonucleotide
  Antisense strand to SEQ ID NO: 1014760
uugccaauaaguaaucagu

SEQ ID NO: 1014762 - RNA, 19 nt, Artificial Sequence
  Description of Artificial Sequence: Synthetic oligonucleotide
  Sense strand starting at position 2686 of SEQ ID NO: 914579
cuuguucacggagaguauu

SEQ ID NO: 1014763 - RNA, 19 nt, Artificial Sequence
  Description of Artificial Sequence: Synthetic oligonucleotide
  Antisense strand to SEQ ID NO: 1014762
aauacucuccgugaacaag

SEQ ID NO: 1014764 - RNA, 19 nt, Artificial Sequence
  Description of Artificial Sequence: Synthetic oligonucleotide
  Sense strand starting at position 2724 of SEQ ID NO: 914579
cuccacugccuggaauuaa

SEQ ID NO: 1014765 - RNA, 19 nt, Artificial Sequence
  Description of Artificial Sequence: Synthetic oligonucleotide
  Antisense strand to SEQ ID NO: 1014764
uuaauuccaggcaguggag

SEQ ID NO: 1014766 - RNA, 19 nt, Artificial Sequence
  Description of Artificial Sequence: Synthetic oligonucleotide
  Sense strand starting at position 2849 of SEQ ID NO: 914579
cccucuaauugugauuuag

SEQ ID NO: 1014767 - RNA, 19 nt, Artificial Sequence
  Description of Artificial Sequence: Synthetic oligonucleotide
  Antisense strand to SEQ ID NO: 1014766
cuaaaucacaauuagaggg

SEQ ID NO: 1014768 - RNA, 19 nt, Artificial Sequence
  Description of Artificial Sequence: Synthetic oligonucleotide
  Sense strand starting at position 2859 of SEQ ID NO: 914579
gugauuuagcaguggcaug

SEQ ID NO: 1014769 - RNA, 19 nt, Artificial Sequence
  Description of Artificial Sequence: Synthetic oligonucleotide
  Antisense strand to SEQ ID NO: 1014768
caugccacugcuaaaucac

SEQ ID NO: 1014770 - RNA, 19 nt, Artificial Sequence
  Description of Artificial Sequence: Synthetic oligonucleotide
  Sense strand starting at position 2888 of SEQ ID NO: 914579
uccucauuagcuuacgacu

SEQ ID NO: 1014771 - RNA, 19 nt, Artificial Sequence
  Description of Artificial Sequence: Synthetic oligonucleotide
  Antisense strand to SEQ ID NO: 1014770
agucguaagcuaaugagga

SEQ ID NO: 1014772 - RNA, 19 nt, Artificial Sequence
  Description of Artificial Sequence: Synthetic oligonucleotide
  Sense strand starting at position 2950 of SEQ ID NO: 914579
uguccuaagcaauggagau

SEQ ID NO: 1014773 - RNA, 19 nt, Artificial Sequence
  Description of Artificial Sequence: Synthetic oligonucleotide
  Antisense strand to SEQ ID NO: 1014772
aucuccauugcuuaggaca

SEQ ID NO: 1014774 - RNA, 19 nt, Artificial Sequence
  Description of Artificial Sequence: Synthetic oligonucleotide
  Sense strand starting at position 2951 of SEQ ID NO: 914579
guccuaagcaauggagaua

SEQ ID NO: 1014775 - RNA, 19 nt, Artificial Sequence
  Description of Artificial Sequence: Synthetic oligonucleotide
  Antisense strand to SEQ ID NO: 1014774
uaucuccauugcuuaggac

SEQ ID NO: 1014776 - RNA, 19 nt, Artificial Sequence
  Description of Artificial Sequence: Synthetic oligonucleotide
  Sense strand starting at position 3009 of SEQ ID NO: 914579
acauucuuaugagagggaa

SEQ ID NO: 1014777 - RNA, 19 nt, Artificial Sequence
  Description of Artificial Sequence: Synthetic oligonucleotide
  Antisense strand to SEQ ID NO: 1014776
uucccucucauaagaaugu

SEQ ID NO: 1014778 - RNA, 19 nt, Artificial Sequence
  Description of Artificial Sequence: Synthetic oligonucleotide
  Sense strand starting at position 3127 of SEQ ID NO: 914579
aagggcugucaaggaaagu

SEQ ID NO: 1014779 - RNA, 19 nt, Artificial Sequence
  Description of Artificial Sequence: Synthetic oligonucleotide
  Antisense strand to SEQ ID NO: 1014778
acuuuccuugacagcccuu

SEQ ID NO: 1014780 - RNA, 19 nt, Artificial Sequence
  Description of Artificial Sequence: Synthetic oligonucleotide
  Sense strand starting at position 3191 of SEQ ID NO: 914579
guguauuuguuuccuacua

SEQ ID NO: 1014781 - RNA, 19 nt, Artificial Sequence
  Description of Artificial Sequence: Synthetic oligonucleotide
  Antisense strand to SEQ ID NO: 1014780
uaguaggaaacaaauacac

SEQ ID NO: 1014782 - RNA, 19 nt, Artificial Sequence
  Description of Artificial Sequence: Synthetic oligonucleotide
  Sense strand starting at position 3294 of SEQ ID NO: 914579
augagucuuccagggcuga

SEQ ID NO: 1014783 - RNA, 19 nt, Artificial Sequence
  Description of Artificial Sequence: Synthetic oligonucleotide
  Antisense strand to SEQ ID NO: 1014782
ucagcccuggaagacucau

SEQ ID NO: 1014784 - RNA, 19 nt, Artificial Sequence
  Description of Artificial Sequence: Synthetic oligonucleotide
  Sense strand starting at position 3307 of SEQ ID NO: 914579
ggcugacagagagguguua

SEQ ID NO: 1014785 - RNA, 19 nt, Artificial Sequence
  Description of Artificial Sequence: Synthetic oligonucleotide
  Antisense strand to SEQ ID NO: 1014784
uaacaccucucugucagcc

SEQ ID NO: 1014786 - RNA, 19 nt, Artificial Sequence
  Description of Artificial Sequence: Synthetic oligonucleotide
  Sense strand starting at position 3309 of SEQ ID NO: 914579
cugacagagagguguuagu

SEQ ID NO: 1014787 - RNA, 19 nt, Artificial Sequence
  Description of Artificial Sequence: Synthetic oligonucleotide
  Antisense strand to SEQ ID NO: 1014786
acuaacaccucucugucag

SEQ ID NO: 1014788 - RNA, 19 nt, Artificial Sequence
  Description of Artificial Sequence: Synthetic oligonucleotide
  Sense strand starting at position 3441 of SEQ ID NO: 914579
ccauuaaugucaguuugaa

SEQ ID NO: 1014789 - RNA, 19 nt, Artificial Sequence
  Description of Artificial Sequence: Synthetic oligonucleotide
  Antisense strand to SEQ ID NO: 1014788
uucaaacugacauuaaugg

SEQ ID NO: 1014790 - RNA, 19 nt, Artificial Sequence
  Description of Artificial Sequence: Synthetic oligonucleotide
  Sense strand starting at position 3514 of SEQ ID NO: 914579
uuauaaggaucguugugau

SEQ ID NO: 1014791 - RNA, 19 nt, Artificial Sequence
  Description of Artificial Sequence: Synthetic oligonucleotide
  Antisense strand to SEQ ID NO: 1014790
aucacaacgauccuuauaa

SEQ ID NO: 1014792 - RNA, 19 nt, Artificial Sequence
  Description of Artificial Sequence: Synthetic oligonucleotide
  Sense strand starting at position 3521 of SEQ ID NO: 914579
gaucguugugauuauauug

SEQ ID NO: 1014793 - RNA, 19 nt, Artificial Sequence
  Description of Artificial Sequence: Synthetic oligonucleotide
  Antisense strand to SEQ ID NO: 1014792
caauauaaucacaacgauc

SEQ ID NO: 1014794 - RNA, 19 nt, Artificial Sequence
  Description of Artificial Sequence: Synthetic oligonucleotide
  Sense strand starting at position 3645 of SEQ ID NO: 914579
gggauuaguauguggaccu

SEQ ID NO: 1014795 - RNA, 19 nt, Artificial Sequence
  Description of Artificial Sequence: Synthetic oligonucleotide
  Antisense strand to SEQ ID NO: 1014794
agguccacauacuaauccc

SEQ ID NO: 1014796 - RNA, 19 nt, Artificial Sequence
  Description of Artificial Sequence: Synthetic oligonucleotide
  Sense strand starting at position 3700 of SEQ ID NO: 914579
agagaaauuugaggcagau

SEQ ID NO: 1014797 - RNA, 19 nt, Artificial Sequence
  Description of Artificial Sequence: Synthetic oligonucleotide
  Antisense strand to SEQ ID NO: 1014796
aucugccucaaauuucucu

SEQ ID NO: 1014798 - RNA, 19 nt, Artificial Sequence
  Description of Artificial Sequence: Synthetic oligonucleotide
  Sense strand starting at position 3779 of SEQ ID NO: 914579
aaccuuguccucugagagu

SEQ ID NO: 1014799 - RNA, 19 nt, Artificial Sequence
  Description of Artificial Sequence: Synthetic oligonucleotide
  Antisense strand to SEQ ID NO: 1014798
acucucagaggacaagguu

SEQ ID NO: 1014800 - RNA, 19 nt, Artificial Sequence
  Description of Artificial Sequence: Synthetic oligonucleotide
  Sense strand starting at position 3834 of SEQ ID NO: 914579
ugcggaagucagcaaguua

SEQ ID NO: 1014801 - RNA, 19 nt, Artificial Sequence
  Description of Artificial Sequence: Synthetic oligonucleotide
  Antisense strand to SEQ ID NO: 1014800
uaacuugcugacuuccgca

SEQ ID NO: 1014802 - RNA, 19 nt, Artificial Sequence
  Description of Artificial Sequence: Synthetic oligonucleotide
  Sense strand starting at position 18 of SEQ ID NO: 914580
gcgcucagggccucuaauu

SEQ ID NO: 1014803 - RNA, 19 nt, Artificial Sequence
  Description of Artificial Sequence: Synthetic oligonucleotide
  Antisense strand to SEQ ID NO: 1014802
aauuagaggcccugagcgc

SEQ ID NO: 1014804 - RNA, 19 nt, Artificial Sequence
  Description of Artificial Sequence: Synthetic oligonucleotide
  Sense strand starting at position 123 of SEQ ID NO: 914580
uggucucuuuacuugauga

SEQ ID NO: 1014805 - RNA, 19 nt, Artificial Sequence
  Description of Artificial Sequence: Synthetic oligonucleotide
  Antisense strand to SEQ ID NO: 1014804
ucaucaaguaaagagacca

SEQ ID NO: 1014806 - RNA, 19 nt, Artificial Sequence
  Description of Artificial Sequence: Synthetic oligonucleotide
  Sense strand starting at position 124 of SEQ ID NO: 914580
ggucucuuuacuugaugag

SEQ ID NO: 1014807 - RNA, 19 nt, Artificial Sequence
  Description of Artificial Sequence: Synthetic oligonucleotide
  Antisense strand to SEQ ID NO: 1014806
cucaucaaguaaagagacc

SEQ ID NO: 1014808 - RNA, 19 nt, Artificial Sequence
  Description of Artificial Sequence: Synthetic oligonucleotide
  Sense strand starting at position 125 of SEQ ID NO: 914580
gucucuuuacuugaugaga

SEQ ID NO: 1014809 - RNA, 19 nt, Artificial Sequence
  Description of Artificial Sequence: Synthetic oligonucleotide
  Antisense strand to SEQ ID NO: 1014808
ucucaucaaguaaagagac

SEQ ID NO: 1014810 - RNA, 19 nt, Artificial Sequence
  Description of Artificial Sequence: Synthetic oligonucleotide
  Sense strand starting at position 160 of SEQ ID NO: 914580
cagucuuucgcuguuugca

SEQ ID NO: 1014811 - RNA, 19 nt, Artificial Sequence
  Description of Artificial Sequence: Synthetic oligonucleotide
  Antisense strand to SEQ ID NO: 1014810
ugcaaacagcgaaagacug

SEQ ID NO: 1014812 - RNA, 19 nt, Artificial Sequence
  Description of Artificial Sequence: Synthetic oligonucleotide
  Sense strand starting at position 161 of SEQ ID NO: 914580
agucuuucgcuguuugcaa

SEQ ID NO: 1014813 - RNA, 19 nt, Artificial Sequence
  Description of Artificial Sequence: Synthetic oligonucleotide
  Antisense strand to SEQ ID NO: 1014812
uugcaaacagcgaaagacu

SEQ ID NO: 1014814 - RNA, 19 nt, Artificial Sequence
  Description of Artificial Sequence: Synthetic oligonucleotide
  Sense strand starting at position 231 of SEQ ID NO: 914580
gugacaugccuugauuggu

SEQ ID NO: 1014815 - RNA, 19 nt, Artificial Sequence
  Description of Artificial Sequence: Synthetic oligonucleotide
  Antisense strand to SEQ ID NO: 1014814
accaaucaaggcaugucac

SEQ ID NO: 1014816 - RNA, 19 nt, Artificial Sequence
  Description of Artificial Sequence: Synthetic oligonucleotide
  Sense strand starting at position 236 of SEQ ID NO: 914580
augccuugauuggugaagu

SEQ ID NO: 1014817 - RNA, 19 nt, Artificial Sequence
  Description of Artificial Sequence: Synthetic oligonucleotide
  Antisense strand to SEQ ID NO: 1014816
acuucaccaaucaaggcau

SEQ ID NO: 1014818 - RNA, 19 nt, Artificial Sequence
  Description of Artificial Sequence: Synthetic oligonucleotide
  Sense strand starting at position 247 of SEQ ID NO: 914580
ggugaagucaccugcugaa

SEQ ID NO: 1014819 - RNA, 19 nt, Artificial Sequence
  Description of Artificial Sequence: Synthetic oligonucleotide
  Antisense strand to SEQ ID NO: 1014818
uucagcaggugacuucacc

SEQ ID NO: 1014820 - RNA, 19 nt, Artificial Sequence
  Description of Artificial Sequence: Synthetic oligonucleotide
  Sense strand starting at position 324 of SEQ ID NO: 914580
uccgguuauagggaacuca

SEQ ID NO: 1014821 - RNA, 19 nt, Artificial Sequence
  Description of Artificial Sequence: Synthetic oligonucleotide
  Antisense strand to SEQ ID NO: 1014820
ugaguucccuauaaccgga

SEQ ID NO: 1014822 - RNA, 19 nt, Artificial Sequence
  Description of Artificial Sequence: Synthetic oligonucleotide
  Sense strand starting at position 441 of SEQ ID NO: 914580
agcucaacccugugauucu

SEQ ID NO: 1014823 - RNA, 19 nt, Artificial Sequence
  Description of Artificial Sequence: Synthetic oligonucleotide
  Antisense strand to SEQ ID NO: 1014822
agaaucacaggguugagcu

SEQ ID NO: 1014824 - RNA, 19 nt, Artificial Sequence
  Description of Artificial Sequence: Synthetic oligonucleotide
  Sense strand starting at position 448 of SEQ ID NO: 914580
cccugugauucuucuacca

SEQ ID NO: 1014825 - RNA, 19 nt, Artificial Sequence
  Description of Artificial Sequence: Synthetic oligonucleotide
  Antisense strand to SEQ ID NO: 1014824
ugguagaagaaucacaggg

SEQ ID NO: 1014826 - RNA, 19 nt, Artificial Sequence
  Description of Artificial Sequence: Synthetic oligonucleotide
  Sense strand starting at position 518 of SEQ ID NO: 914580
cuguaagacuucucuagga

SEQ ID NO: 1014827 - RNA, 19 nt, Artificial Sequence
  Description of Artificial Sequence: Synthetic oligonucleotide
  Antisense strand to SEQ ID NO: 1014826
uccuagagaagucuuacag

SEQ ID NO: 1014828 - RNA, 19 nt, Artificial Sequence
  Description of Artificial Sequence: Synthetic oligonucleotide
  Sense strand starting at position 547 of SEQ ID NO: 914580
auugcuucucuguaaagua

SEQ ID NO: 1014829 - RNA, 19 nt, Artificial Sequence
  Description of Artificial Sequence: Synthetic oligonucleotide
  Antisense strand to SEQ ID NO: 1014828
uacuuuacagagaagcaau

SEQ ID NO: 1014830 - RNA, 19 nt, Artificial Sequence
  Description of Artificial Sequence: Synthetic oligonucleotide
  Sense strand starting at position 629 of SEQ ID NO: 914580
acacaaucucagcgcagau

SEQ ID NO: 1014831 - RNA, 19 nt, Artificial Sequence
  Description of Artificial Sequence: Synthetic oligonucleotide
  Antisense strand to SEQ ID NO: 1014830
aucugcgcugagauugugu

SEQ ID NO: 1014832 - RNA, 19 nt, Artificial Sequence
  Description of Artificial Sequence: Synthetic oligonucleotide
  Sense strand starting at position 840 of SEQ ID NO: 914580
cccagauacccuggaguga

SEQ ID NO: 1014833 - RNA, 19 nt, Artificial Sequence
  Description of Artificial Sequence: Synthetic oligonucleotide
  Antisense strand to SEQ ID NO: 1014832
ucacuccaggguaucuggg

SEQ ID NO: 1014834 - RNA, 19 nt, Artificial Sequence
  Description of Artificial Sequence: Synthetic oligonucleotide
  Sense strand starting at position 958 of SEQ ID NO: 914580
cuugcuucucaggacauau

SEQ ID NO: 1014835 - RNA, 19 nt, Artificial Sequence
  Description of Artificial Sequence: Synthetic oligonucleotide
  Antisense strand to SEQ ID NO: 1014834
auauguccugagaagcaag

SEQ ID NO: 1014836 - RNA, 19 nt, Artificial Sequence
  Description of Artificial Sequence: Synthetic oligonucleotide
  Sense strand starting at position 1046 of SEQ ID NO: 914580
gaugaaugguucucucuac

SEQ ID NO: 1014837 - RNA, 19 nt, Artificial Sequence
  Description of Artificial Sequence: Synthetic oligonucleotide
  Antisense strand to SEQ ID NO: 1014836
guagagagaaccauucauc

SEQ ID NO: 1014838 - RNA, 19 nt, Artificial Sequence
  Description of Artificial Sequence: Synthetic oligonucleotide
  Sense strand starting at position 1096 of SEQ ID NO: 914580
gucucuaucuggguuacca

SEQ ID NO: 1014839 - RNA, 19 nt, Artificial Sequence
  Description of Artificial Sequence: Synthetic oligonucleotide
  Antisense strand to SEQ ID NO: 1014838
ugguaacccagauagagac

SEQ ID NO: 1014840 - RNA, 19 nt, Artificial Sequence
  Description of Artificial Sequence: Synthetic oligonucleotide
  Sense strand starting at position 1151 of SEQ ID NO: 914580
cuuguuuaugcccauuaua

SEQ ID NO: 1014841 - RNA, 19 nt, Artificial Sequence
  Description of Artificial Sequence: Synthetic oligonucleotide
  Antisense strand to SEQ ID NO: 1014840
uauaaugggcauaaacaag

SEQ ID NO: 1014842 - RNA, 19 nt, Artificial Sequence
  Description of Artificial Sequence: Synthetic oligonucleotide
  Sense strand starting at position 1154 of SEQ ID NO: 914580
guuuaugcccauuauaaag

SEQ ID NO: 1014843 - RNA, 19 nt, Artificial Sequence
  Description of Artificial Sequence: Synthetic oligonucleotide
  Antisense strand to SEQ ID NO: 1014842
cuuuauaaugggcauaaac

SEQ ID NO: 1014844 - RNA, 19 nt, Artificial Sequence
  Description of Artificial Sequence: Synthetic oligonucleotide
  Sense strand starting at position 1390 of SEQ ID NO: 914580
cagucaugccaggaacucu

SEQ ID NO: 1014845 - RNA, 19 nt, Artificial Sequence
  Description of Artificial Sequence: Synthetic oligonucleotide
  Antisense strand to SEQ ID NO: 1014844
agaguuccuggcaugacug

SEQ ID NO: 1014846 - RNA, 19 nt, Artificial Sequence
  Description of Artificial Sequence: Synthetic oligonucleotide
  Sense strand starting at position 1656 of SEQ ID NO: 914580
ggaggcgagucuucugaga

SEQ ID NO: 1014847 - RNA, 19 nt, Artificial Sequence
  Description of Artificial Sequence: Synthetic oligonucleotide
  Antisense strand to SEQ ID NO: 1014846
ucucagaagacucgccucc

SEQ ID NO: 1014848 - RNA, 19 nt, Artificial Sequence
  Description of Artificial Sequence: Synthetic oligonucleotide
  Sense strand starting at position 2437 of SEQ ID NO: 914580
gugacugaacucugcuuga

SEQ ID NO: 1014849 - RNA, 19 nt, Artificial Sequence
  Description of Artificial Sequence: Synthetic oligonucleotide
  Antisense strand to SEQ ID NO: 1014848
ucaagcagaguucagucac

SEQ ID NO: 1014850 - RNA, 19 nt, Artificial Sequence
  Description of Artificial Sequence: Synthetic oligonucleotide
  Sense strand starting at position 2440 of SEQ ID NO: 914580
acugaacucugcuugagaa

SEQ ID NO: 1014851 - RNA, 19 nt, Artificial Sequence
  Description of Artificial Sequence: Synthetic oligonucleotide
  Antisense strand to SEQ ID NO: 1014850
uucucaagcagaguucagu

SEQ ID NO: 1014852 - RNA, 19 nt, Artificial Sequence
  Description of Artificial Sequence: Synthetic oligonucleotide
  Sense strand starting at position 2441 of SEQ ID NO: 914580
cugaacucugcuugagaag

SEQ ID NO: 1014853 - RNA, 19 nt, Artificial Sequence
  Description of Artificial Sequence: Synthetic oligonucleotide
  Antisense strand to SEQ ID NO: 1014852
cuucucaagcagaguucag

SEQ ID NO: 1014854 - RNA, 19 nt, Artificial Sequence
  Description of Artificial Sequence: Synthetic oligonucleotide
  Sense strand starting at position 2442 of SEQ ID NO: 914580
ugaacucugcuugagaagu

SEQ ID NO: 1014855 - RNA, 19 nt, Artificial Sequence
  Description of Artificial Sequence: Synthetic oligonucleotide
  Antisense strand to SEQ ID NO: 1014854
acuucucaagcagaguuca

SEQ ID NO: 1014856 - RNA, 19 nt, Artificial Sequence
  Description of Artificial Sequence: Synthetic oligonucleotide
  Sense strand starting at position 2734 of SEQ ID NO: 914580
uugaauuucugguaaauga

SEQ ID NO: 1014857 - RNA, 19 nt, Artificial Sequence
  Description of Artificial Sequence: Synthetic oligonucleotide
  Antisense strand to SEQ ID NO: 1014856
ucauuuaccagaaauucaa

SEQ ID NO: 1014858 - RNA, 19 nt, Artificial Sequence
  Description of Artificial Sequence: Synthetic oligonucleotide
  Sense strand starting at position 3246 of SEQ ID NO: 914580
acauuuggguuggaaauga

SEQ ID NO: 1014859 - RNA, 19 nt, Artificial Sequence
  Description of Artificial Sequence: Synthetic oligonucleotide
  Antisense strand to SEQ ID NO: 1014858
ucauuuccaacccaaaugu

SEQ ID NO: 1014860 - RNA, 19 nt, Artificial Sequence
  Description of Artificial Sequence: Synthetic oligonucleotide
  Sense strand starting at position 3250 of SEQ ID NO: 914580
uuggguuggaaaugagacu

SEQ ID NO: 1014861 - RNA, 19 nt, Artificial Sequence
  Description of Artificial Sequence: Synthetic oligonucleotide
  Antisense strand to SEQ ID NO: 1014860
agucucauuuccaacccaa

SEQ ID NO: 1014862 - RNA, 19 nt, Artificial Sequence
  Description of Artificial Sequence: Synthetic oligonucleotide
  Sense strand starting at position 3315 of SEQ ID NO: 914580
gaaggaguucuguguuacc

SEQ ID NO: 1014863 - RNA, 19 nt, Artificial Sequence
  Description of Artificial Sequence: Synthetic oligonucleotide
  Antisense strand to SEQ ID NO: 1014862
gguaacacagaacuccuuc

SEQ ID NO: 1014864 - RNA, 19 nt, Artificial Sequence
  Description of Artificial Sequence: Synthetic oligonucleotide
  Sense strand starting at position 3349 of SEQ ID NO: 914580
agcaaacucacguagguaa

SEQ ID NO: 1014865 - RNA, 19 nt, Artificial Sequence
  Description of Artificial Sequence: Synthetic oligonucleotide
  Antisense strand to SEQ ID NO: 1014864
uuaccuacgugaguuugcu

SEQ ID NO: 1014866 - RNA, 19 nt, Artificial Sequence
  Description of Artificial Sequence: Synthetic oligonucleotide
  Sense strand starting at position 3428 of SEQ ID NO: 914580
aguugaauuccucaaggcu

SEQ ID NO: 1014867 - RNA, 19 nt, Artificial Sequence
  Description of Artificial Sequence: Synthetic oligonucleotide
  Antisense strand to SEQ ID NO: 1014866
agccuugaggaauucaacu

SEQ ID NO: 1014868 - RNA, 19 nt, Artificial Sequence
  Description of Artificial Sequence: Synthetic oligonucleotide
  Sense strand starting at position 3490 of SEQ ID NO: 914580
gcaguaucaguuuagggau

SEQ ID NO: 1014869 - RNA, 19 nt, Artificial Sequence
  Description of Artificial Sequence: Synthetic oligonucleotide
  Antisense strand to SEQ ID NO: 1014868
aucccuaaacugauacugc

SEQ ID NO: 1014870 - RNA, 19 nt, Artificial Sequence
  Description of Artificial Sequence: Synthetic oligonucleotide
  Sense strand starting at position 3502 of SEQ ID NO: 914580
uagggaucuucuuucuaga

SEQ ID NO: 1014871 - RNA, 19 nt, Artificial Sequence
  Description of Artificial Sequence: Synthetic oligonucleotide
  Antisense strand to SEQ ID NO: 1014870
ucuagaaagaagaucccua

SEQ ID NO: 1014872 - RNA, 19 nt, Artificial Sequence
  Description of Artificial Sequence: Synthetic oligonucleotide
  Sense strand starting at position 3504 of SEQ ID NO: 914580
gggaucuucuuucuagauc

SEQ ID NO: 1014873 - RNA, 19 nt, Artificial Sequence
  Description of Artificial Sequence: Synthetic oligonucleotide
  Antisense strand to SEQ ID NO: 1014872
gaucuagaaagaagauccc

SEQ ID NO: 1014874 - RNA, 19 nt, Artificial Sequence
  Description of Artificial Sequence: Synthetic oligonucleotide
  Sense strand starting at position 3596 of SEQ ID NO: 914580
agaaucuuauuaguccaga

SEQ ID NO: 1014875 - RNA, 19 nt, Artificial Sequence
  Description of Artificial Sequence: Synthetic oligonucleotide
  Antisense strand to SEQ ID NO: 1014874
ucuggacuaauaagauucu

SEQ ID NO: 1014876 - RNA, 19 nt, Artificial Sequence
  Description of Artificial Sequence: Synthetic oligonucleotide
  Sense strand starting at position 3644 of SEQ ID NO: 914580
ggcagaaagugcuuuguga

SEQ ID NO: 1014877 - RNA, 19 nt, Artificial Sequence
  Description of Artificial Sequence: Synthetic oligonucleotide
  Antisense strand to SEQ ID NO: 1014876
ucacaaagcacuuucugcc

SEQ ID NO: 1014878 - RNA, 19 nt, Artificial Sequence
  Description of Artificial Sequence: Synthetic oligonucleotide
  Sense strand starting at position 3646 of SEQ ID NO: 914580
cagaaagugcuuugugaua

SEQ ID NO: 1014879 - RNA, 19 nt, Artificial Sequence
  Description of Artificial Sequence: Synthetic oligonucleotide
  Antisense strand to SEQ ID NO: 1014878
uaucacaaagcacuuucug

SEQ ID NO: 1014880 - RNA, 19 nt, Artificial Sequence
  Description of Artificial Sequence: Synthetic oligonucleotide
  Sense strand starting at position 3659 of SEQ ID NO: 914580
gugauacaaacaugucagu

SEQ ID NO: 1014881 - RNA, 19 nt, Artificial Sequence
  Description of Artificial Sequence: Synthetic oligonucleotide
  Antisense strand to SEQ ID NO: 1014880
acugacauguuuguaucac

SEQ ID NO: 1014882 - RNA, 19 nt, Artificial Sequence
  Description of Artificial Sequence: Synthetic oligonucleotide
  Sense strand starting at position 128 of SEQ ID NO: 914581
uucugugaccgguacaaug

SEQ ID NO: 1014883 - RNA, 19 nt, Artificial Sequence
  Description of Artificial Sequence: Synthetic oligonucleotide
  Antisense strand to SEQ ID NO: 1014882
cauuguaccggucacagaa

SEQ ID NO: 1014884 - RNA, 19 nt, Artificial Sequence
  Description of Artificial Sequence: Synthetic oligonucleotide
  Sense strand starting at position 137 of SEQ ID NO: 914581
cgguacaaugucuauuaca

SEQ ID NO: 1014885 - RNA, 19 nt, Artificial Sequence
  Description of Artificial Sequence: Synthetic oligonucleotide
  Antisense strand to SEQ ID NO: 1014884
uguaauagacauuguaccg

SEQ ID NO: 1014886 - RNA, 19 nt, Artificial Sequence
  Description of Artificial Sequence: Synthetic oligonucleotide
  Sense strand starting at position 395 of SEQ ID NO: 914581
cugggauccugcuuugaga

SEQ ID NO: 1014887 - RNA, 19 nt, Artificial Sequence
  Description of Artificial Sequence: Synthetic oligonucleotide
  Antisense strand to SEQ ID NO: 1014886
ucucaaagcaggaucccag

SEQ ID NO: 1014888 - RNA, 19 nt, Artificial Sequence
  Description of Artificial Sequence: Synthetic oligonucleotide
  Sense strand starting at position 632 of SEQ ID NO: 914581
gcacccuaguaauuaggga

SEQ ID NO: 1014889 - RNA, 19 nt, Artificial Sequence
  Description of Artificial Sequence: Synthetic oligonucleotide
  Antisense strand to SEQ ID NO: 1014888
ucccuaauuacuagggugc

SEQ ID NO: 1014890 - RNA, 19 nt, Artificial Sequence
  Description of Artificial Sequence: Synthetic oligonucleotide
  Sense strand starting at position 785 of SEQ ID NO: 914581
ccuuuauguccaggaacag

SEQ ID NO: 1014891 - RNA, 19 nt, Artificial Sequence
  Description of Artificial Sequence: Synthetic oligonucleotide
  Antisense strand to SEQ ID NO: 1014890
cuguuccuggacauaaagg

SEQ ID NO: 1014892 - RNA, 19 nt, Artificial Sequence
  Description of Artificial Sequence: Synthetic oligonucleotide
  Sense strand starting at position 989 of SEQ ID NO: 914581
cagagagcucuagggacuu

SEQ ID NO: 1014893 - RNA, 19 nt, Artificial Sequence
  Description of Artificial Sequence: Synthetic oligonucleotide
  Antisense strand to SEQ ID NO: 1014892
aagucccuagagcucucug

SEQ ID NO: 1014894 - RNA, 19 nt, Artificial Sequence
  Description of Artificial Sequence: Synthetic oligonucleotide
  Sense strand starting at position 999 of SEQ ID NO: 914581
uagggacuuguccaaggua

SEQ ID NO: 1014895 - RNA, 19 nt, Artificial Sequence
  Description of Artificial Sequence: Synthetic oligonucleotide
  Antisense strand to SEQ ID NO: 1014894
uaccuuggacaagucccua

SEQ ID NO: 1014896 - RNA, 19 nt, Artificial Sequence
  Description of Artificial Sequence: Synthetic oligonucleotide
  Sense strand starting at position 1110 of SEQ ID NO: 914581
gagucucugcuaugggaaa

SEQ ID NO: 1014897 - RNA, 19 nt, Artificial Sequence
  Description of Artificial Sequence: Synthetic oligonucleotide
  Antisense strand to SEQ ID NO: 1014896
uuucccauagcagagacuc

SEQ ID NO: 1014898 - RNA, 19 nt, Artificial Sequence
  Description of Artificial Sequence: Synthetic oligonucleotide
  Sense strand starting at position 1136 of SEQ ID NO: 914581
uguaaaccacgaugacuuu

SEQ ID NO: 1014899 - RNA, 19 nt, Artificial Sequence
  Description of Artificial Sequence: Synthetic oligonucleotide
  Antisense strand to SEQ ID NO: 1014898
aaagucaucgugguuuaca

SEQ ID NO: 1014900 - RNA, 19 nt, Artificial Sequence
  Description of Artificial Sequence: Synthetic oligonucleotide
  Sense strand starting at position 1444 of SEQ ID NO: 914581
uaagguucccuacggagaa

SEQ ID NO: 1014901 - RNA, 19 nt, Artificial Sequence
  Description of Artificial Sequence: Synthetic oligonucleotide
  Antisense strand to SEQ ID NO: 1014900
uucuccguagggaaccuua

SEQ ID NO: 1014902 - RNA, 19 nt, Artificial Sequence
  Description of Artificial Sequence: Synthetic oligonucleotide
  Sense strand starting at position 1474 of SEQ ID NO: 914581
guguuugagguucgaauuu

SEQ ID NO: 1014903 - RNA, 19 nt, Artificial Sequence
  Description of Artificial Sequence: Synthetic oligonucleotide
  Antisense strand to SEQ ID NO: 1014902
aaauucgaaccucaaacac

SEQ ID NO: 1014904 - RNA, 19 nt, Artificial Sequence
  Description of Artificial Sequence: Synthetic oligonucleotide
  Sense strand starting at position 1508 of SEQ ID NO: 914581
cacuaauaacguugggcaa

SEQ ID NO: 1014905 - RNA, 19 nt, Artificial Sequence
  Description of Artificial Sequence: Synthetic oligonucleotide
  Antisense strand to SEQ ID NO: 1014904
uugcccaacguuauuagug

SEQ ID NO: 1014906 - RNA, 19 nt, Artificial Sequence
  Description of Artificial Sequence: Synthetic oligonucleotide
  Sense strand starting at position 1540 of SEQ ID NO: 914581
cccuuugaagucugaagaa

SEQ ID NO: 1014907 - RNA, 19 nt, Artificial Sequence
  Description of Artificial Sequence: Synthetic oligonucleotide
  Antisense strand to SEQ ID NO: 1014906
uucuucagacuucaaaggg

SEQ ID NO: 1014908 - RNA, 19 nt, Artificial Sequence
  Description of Artificial Sequence: Synthetic oligonucleotide
  Sense strand starting at position 1660 of SEQ ID NO: 914581
aagguucuagucugggaua

SEQ ID NO: 1014909 - RNA, 19 nt, Artificial Sequence
  Description of Artificial Sequence: Synthetic oligonucleotide
  Antisense strand to SEQ ID NO: 1014908
uaucccagacuagaaccuu

SEQ ID NO: 1014910 - RNA, 19 nt, Artificial Sequence
  Description of Artificial Sequence: Synthetic oligonucleotide
  Sense strand starting at position 1662 of SEQ ID NO: 914581
gguucuagucugggauaug

SEQ ID NO: 1014911 - RNA, 19 nt, Artificial Sequence
  Description of Artificial Sequence: Synthetic oligonucleotide
  Antisense strand to SEQ ID NO: 1014910
cauaucccagacuagaacc

SEQ ID NO: 1014912 - RNA, 19 nt, Artificial Sequence
  Description of Artificial Sequence: Synthetic oligonucleotide
  Sense strand starting at position 2155 of SEQ ID NO: 914581
gcuugugucccucuuucua

SEQ ID NO: 1014913 - RNA, 19 nt, Artificial Sequence
  Description of Artificial Sequence: Synthetic oligonucleotide
  Antisense strand to SEQ ID NO: 1014912
uagaaagagggacacaagc

SEQ ID NO: 1014914 - RNA, 19 nt, Artificial Sequence
  Description of Artificial Sequence: Synthetic oligonucleotide
  Sense strand starting at position 2505 of SEQ ID NO: 914581
ucauucggccucgagaaca

SEQ ID NO: 1014915 - RNA, 19 nt, Artificial Sequence
  Description of Artificial Sequence: Synthetic oligonucleotide
  Antisense strand to SEQ ID NO: 1014914
uguucucgaggccgaauga

SEQ ID NO: 1014916 - RNA, 19 nt, Artificial Sequence
  Description of Artificial Sequence: Synthetic oligonucleotide
  Sense strand starting at position 2589 of SEQ ID NO: 914581
gcuuucuguggccaggaaa

SEQ ID NO: 1014917 - RNA, 19 nt, Artificial Sequence
  Description of Artificial Sequence: Synthetic oligonucleotide
  Antisense strand to SEQ ID NO: 1014916
uuuccuggccacagaaagc

SEQ ID NO: 1014918 - RNA, 19 nt, Artificial Sequence
  Description of Artificial Sequence: Synthetic oligonucleotide
  Sense strand starting at position 2687 of SEQ ID NO: 914581
gaggaaugcccgcauuauc

SEQ ID NO: 1014919 - RNA, 19 nt, Artificial Sequence
  Description of Artificial Sequence: Synthetic oligonucleotide
  Antisense strand to SEQ ID NO: 1014918
gauaaugcgggcauuccuc

SEQ ID NO: 1014920 - RNA, 19 nt, Artificial Sequence
  Description of Artificial Sequence: Synthetic oligonucleotide
  Sense strand starting at position 2828 of SEQ ID NO: 914581
cgaugcgcuuggauuguua

SEQ ID NO: 1014921 - RNA, 19 nt, Artificial Sequence
  Description of Artificial Sequence: Synthetic oligonucleotide
  Antisense strand to SEQ ID NO: 1014920
uaacaauccaagcgcaucg

SEQ ID NO: 1014922 - RNA, 19 nt, Artificial Sequence
  Description of Artificial Sequence: Synthetic oligonucleotide
  Sense strand starting at position 2868 of SEQ ID NO: 914581
cgggaagagucaucuuaac

SEQ ID NO: 1014923 - RNA, 19 nt, Artificial Sequence
  Description of Artificial Sequence: Synthetic oligonucleotide
  Antisense strand to SEQ ID NO: 1014922
guuaagaugacucuucccg

SEQ ID NO: 1014924 - RNA, 19 nt, Artificial Sequence
  Description of Artificial Sequence: Synthetic oligonucleotide
  Sense strand starting at position 3077 of SEQ ID NO: 914581
uugacuuggucugucagau

SEQ ID NO: 1014925 - RNA, 19 nt, Artificial Sequence
  Description of Artificial Sequence: Synthetic oligonucleotide
  Antisense strand to SEQ ID NO: 1014924
aucugacagaccaagucaa

SEQ ID NO: 1014926 - RNA, 19 nt, Artificial Sequence
  Description of Artificial Sequence: Synthetic oligonucleotide
  Sense strand starting at position 3231 of SEQ ID NO: 914581
cauugucauuuggaggaca

SEQ ID NO: 1014927 - RNA, 19 nt, Artificial Sequence
  Description of Artificial Sequence: Synthetic oligonucleotide
  Antisense strand to SEQ ID NO: 1014926
uguccuccaaaugacaaug

SEQ ID NO: 1014928 - RNA, 19 nt, Artificial Sequence
  Description of Artificial Sequence: Synthetic oligonucleotide
  Sense strand starting at position 3275 of SEQ ID NO: 914581
uucuuagucugauuaggga

SEQ ID NO: 1014929 - RNA, 19 nt, Artificial Sequence
  Description of Artificial Sequence: Synthetic oligonucleotide
  Antisense strand to SEQ ID NO: 1014928
ucccuaaucagacuaagaa

SEQ ID NO: 1014930 - RNA, 19 nt, Artificial Sequence
  Description of Artificial Sequence: Synthetic oligonucleotide
  Sense strand starting at position 3292 of SEQ ID NO: 914581
gaaguagcuuuguugaaug

SEQ ID NO: 1014931 - RNA, 19 nt, Artificial Sequence
  Description of Artificial Sequence: Synthetic oligonucleotide
  Antisense strand to SEQ ID NO: 1014930
cauucaacaaagcuacuuc

SEQ ID NO: 1014932 - RNA, 19 nt, Artificial Sequence
  Description of Artificial Sequence: Synthetic oligonucleotide
  Sense strand starting at position 3302 of SEQ ID NO: 914581
uguugaaugcaugaacuga

SEQ ID NO: 1014933 - RNA, 19 nt, Artificial Sequence
  Description of Artificial Sequence: Synthetic oligonucleotide
  Antisense strand to SEQ ID NO: 1014932
ucaguucaugcauucaaca

SEQ ID NO: 1014934 - RNA, 19 nt, Artificial Sequence
  Description of Artificial Sequence: Synthetic oligonucleotide
  Sense strand starting at position 3315 of SEQ ID NO: 914581
aacugagacucuuugaggu

SEQ ID NO: 1014935 - RNA, 19 nt, Artificial Sequence
  Description of Artificial Sequence: Synthetic oligonucleotide
  Antisense strand to SEQ ID NO: 1014934
accucaaagagucucaguu

SEQ ID NO: 1014936 - RNA, 19 nt, Artificial Sequence
  Description of Artificial Sequence: Synthetic oligonucleotide
  Sense strand starting at position 3369 of SEQ ID NO: 914581
guuggagaaguaugugaag

SEQ ID NO: 1014937 - RNA, 19 nt, Artificial Sequence
  Description of Artificial Sequence: Synthetic oligonucleotide
  Antisense strand to SEQ ID NO: 1014936
cuucacauacuucuccaac

SEQ ID NO: 1014938 - RNA, 19 nt, Artificial Sequence
  Description of Artificial Sequence: Synthetic oligonucleotide
  Sense strand starting at position 3371 of SEQ ID NO: 914581
uggagaaguaugugaagua

SEQ ID NO: 1014939 - RNA, 19 nt, Artificial Sequence
  Description of Artificial Sequence: Synthetic oligonucleotide
  Antisense strand to SEQ ID NO: 1014938
uacuucacauacuucucca

SEQ ID NO: 1014940 - RNA, 19 nt, Artificial Sequence
  Description of Artificial Sequence: Synthetic oligonucleotide
  Sense strand starting at position 3475 of SEQ ID NO: 914581
agggucuguucuuucagga

SEQ ID NO: 1014941 - RNA, 19 nt, Artificial Sequence
  Description of Artificial Sequence: Synthetic oligonucleotide
  Antisense strand to SEQ ID NO: 1014940
uccugaaagaacagacccu

SEQ ID NO: 1014942 - RNA, 19 nt, Artificial Sequence
  Description of Artificial Sequence: Synthetic oligonucleotide
  Sense strand starting at position 3497 of SEQ ID NO: 914581
uuuacuucggccgaagacu

SEQ ID NO: 1014943 - RNA, 19 nt, Artificial Sequence
  Description of Artificial Sequence: Synthetic oligonucleotide
  Antisense strand to SEQ ID NO: 1014942
agucuucggccgaaguaaa

SEQ ID NO: 1014944 - RNA, 19 nt, Artificial Sequence
  Description of Artificial Sequence: Synthetic oligonucleotide
  Sense strand starting at position 3544 of SEQ ID NO: 914581
auuagagaucuaugugguc

SEQ ID NO: 1014945 - RNA, 19 nt, Artificial Sequence
  Description of Artificial Sequence: Synthetic oligonucleotide
  Antisense strand to SEQ ID NO: 1014944
gaccacauagaucucuaau

SEQ ID NO: 1014946 - RNA, 19 nt, Artificial Sequence
  Description of Artificial Sequence: Synthetic oligonucleotide
  Sense strand starting at position 3586 of SEQ ID NO: 914581
caaagaggugggcauguau

SEQ ID NO: 1014947 - RNA, 19 nt, Artificial Sequence
  Description of Artificial Sequence: Synthetic oligonucleotide
  Antisense strand to SEQ ID NO: 1014946
auacaugcccaccucuuug

SEQ ID NO: 1014948 - RNA, 19 nt, Artificial Sequence
  Description of Artificial Sequence: Synthetic oligonucleotide
  Sense strand starting at position 3594 of SEQ ID NO: 914581
ugggcauguaugggaagau

SEQ ID NO: 1014949 - RNA, 19 nt, Artificial Sequence
  Description of Artificial Sequence: Synthetic oligonucleotide
  Antisense strand to SEQ ID NO: 1014948
aucuucccauacaugccca

SEQ ID NO: 1014950 - RNA, 19 nt, Artificial Sequence
  Description of Artificial Sequence: Synthetic oligonucleotide
  Sense strand starting at position 3607 of SEQ ID NO: 914581
gaagauugcggucauggag

SEQ ID NO: 1014951 - RNA, 19 nt, Artificial Sequence
  Description of Artificial Sequence: Synthetic oligonucleotide
  Antisense strand to SEQ ID NO: 1014950
cuccaugaccgcaaucuuc

SEQ ID NO: 1014952 - RNA, 19 nt, Artificial Sequence
  Description of Artificial Sequence: Synthetic oligonucleotide
  Sense strand starting at position 3884 of SEQ ID NO: 914581
gguggaauaugcuuuagga

SEQ ID NO: 1014953 - RNA, 19 nt, Artificial Sequence
  Description of Artificial Sequence: Synthetic oligonucleotide
  Antisense strand to SEQ ID NO: 1014952
uccuaaagcauauuccacc

SEQ ID NO: 1014954 - RNA, 19 nt, Artificial Sequence
  Description of Artificial Sequence: Synthetic oligonucleotide
  Sense strand starting at position 3922 of SEQ ID NO: 914581
ucucucuuuggauagcaaa

SEQ ID NO: 1014955 - RNA, 19 nt, Artificial Sequence
  Description of Artificial Sequence: Synthetic oligonucleotide
  Antisense strand to SEQ ID NO: 1014954
uuugcuauccaaagagaga

SEQ ID NO: 1014956 - RNA, 19 nt, Artificial Sequence
  Description of Artificial Sequence: Synthetic oligonucleotide
  Sense strand starting at position 3946 of SEQ ID NO: 914581
guauguacucuugaccaag

SEQ ID NO: 1014957 - RNA, 19 nt, Artificial Sequence
  Description of Artificial Sequence: Synthetic oligonucleotide
  Antisense strand to SEQ ID NO: 1014956
cuuggucaagaguacauac

SEQ ID NO: 1014958 - RNA, 19 nt, Artificial Sequence
  Description of Artificial Sequence: Synthetic oligonucleotide
  Sense strand starting at position 3957 of SEQ ID NO: 914581
ugaccaagcuuucuagaag

SEQ ID NO: 1014959 - RNA, 19 nt, Artificial Sequence
  Description of Artificial Sequence: Synthetic oligonucleotide
  Antisense strand to SEQ ID NO: 1014958
cuucuagaaagcuugguca

SEQ ID NO: 1014960 - RNA, 19 nt, Artificial Sequence
  Description of Artificial Sequence: Synthetic oligonucleotide
  Sense strand starting at position 3960 of SEQ ID NO: 914581
ccaagcuuucuagaaguaa

SEQ ID NO: 1014961 - RNA, 19 nt, Artificial Sequence
  Description of Artificial Sequence: Synthetic oligonucleotide
  Antisense strand to SEQ ID NO: 1014960
uuacuucuagaaagcuugg

SEQ ID NO: 1014962 - RNA, 19 nt, Artificial Sequence
  Description of Artificial Sequence: Synthetic oligonucleotide
  Sense strand starting at position 100 of SEQ ID NO: 914582
ugagccauaguuugaauca

SEQ ID NO: 1014963 - RNA, 19 nt, Artificial Sequence
  Description of Artificial Sequence: Synthetic oligonucleotide
  Antisense strand to SEQ ID NO: 1014962
ugauucaaacuauggcuca

SEQ ID NO: 1014964 - RNA, 19 nt, Artificial Sequence
  Description of Artificial Sequence: Synthetic oligonucleotide
  Sense strand starting at position 107 of SEQ ID NO: 914582
uaguuugaaucaucaguga

SEQ ID NO: 1014965 - RNA, 19 nt, Artificial Sequence
  Description of Artificial Sequence: Synthetic oligonucleotide
  Antisense strand to SEQ ID NO: 1014964
ucacugaugauucaaacua

SEQ ID NO: 1014966 - RNA, 19 nt, Artificial Sequence
  Description of Artificial Sequence: Synthetic oligonucleotide
  Sense strand starting at position 110 of SEQ ID NO: 914582
uuugaaucaucagugaggu

SEQ ID NO: 1014967 - RNA, 19 nt, Artificial Sequence
  Description of Artificial Sequence: Synthetic oligonucleotide
  Antisense strand to SEQ ID NO: 1014966
accucacugaugauucaaa

SEQ ID NO: 1014968 - RNA, 19 nt, Artificial Sequence
  Description of Artificial Sequence: Synthetic oligonucleotide
  Sense strand starting at position 111 of SEQ ID NO: 914582
uugaaucaucagugagguu

SEQ ID NO: 1014969 - RNA, 19 nt, Artificial Sequence
  Description of Artificial Sequence: Synthetic oligonucleotide
  Antisense strand to SEQ ID NO: 1014968
aaccucacugaugauucaa

SEQ ID NO: 1014970 - RNA, 19 nt, Artificial Sequence
  Description of Artificial Sequence: Synthetic oligonucleotide
  Sense strand starting at position 287 of SEQ ID NO: 914582
cuggaaauagguugggauu

SEQ ID NO: 1014971 - RNA, 19 nt, Artificial Sequence
  Description of Artificial Sequence: Synthetic oligonucleotide
  Antisense strand to SEQ ID NO: 1014970
aaucccaaccuauuuccag

SEQ ID NO: 1014972 - RNA, 19 nt, Artificial Sequence
  Description of Artificial Sequence: Synthetic oligonucleotide
  Sense strand starting at position 392 of SEQ ID NO: 914582
agcccugaaugagucuuaa

SEQ ID NO: 1014973 - RNA, 19 nt, Artificial Sequence
  Description of Artificial Sequence: Synthetic oligonucleotide
  Antisense strand to SEQ ID NO: 1014972
uuaagacucauucagggcu

SEQ ID NO: 1014974 - RNA, 19 nt, Artificial Sequence
  Description of Artificial Sequence: Synthetic oligonucleotide
  Sense strand starting at position 543 of SEQ ID NO: 914582
ugcacugacucugugggaa

SEQ ID NO: 1014975 - RNA, 19 nt, Artificial Sequence
  Description of Artificial Sequence: Synthetic oligonucleotide
  Antisense strand to SEQ ID NO: 1014974
uucccacagagucagugca

SEQ ID NO: 1014976 - RNA, 19 nt, Artificial Sequence
  Description of Artificial Sequence: Synthetic oligonucleotide
  Sense strand starting at position 690 of SEQ ID NO: 914582
ugcucaauagggcaucaaa

SEQ ID NO: 1014977 - RNA, 19 nt, Artificial Sequence
  Description of Artificial Sequence: Synthetic oligonucleotide
  Antisense strand to SEQ ID NO: 1014976
uuugaugcccuauugagca

SEQ ID NO: 1014978 - RNA, 19 nt, Artificial Sequence
  Description of Artificial Sequence: Synthetic oligonucleotide
  Sense strand starting at position 729 of SEQ ID NO: 914582
auguuauacgccucgcaac

SEQ ID NO: 1014979 - RNA, 19 nt, Artificial Sequence
  Description of Artificial Sequence: Synthetic oligonucleotide
  Antisense strand to SEQ ID NO: 1014978
guugcgaggcguauaacau

SEQ ID NO: 1014980 - RNA, 19 nt, Artificial Sequence
  Description of Artificial Sequence: Synthetic oligonucleotide
  Sense strand starting at position 857 of SEQ ID NO: 914582
cgagaccuaccugggaaau

SEQ ID NO: 1014981 - RNA, 19 nt, Artificial Sequence
  Description of Artificial Sequence: Synthetic oligonucleotide
  Antisense strand to SEQ ID NO: 1014980
auuucccagguaggucucg

SEQ ID NO: 1014982 - RNA, 19 nt, Artificial Sequence
  Description of Artificial Sequence: Synthetic oligonucleotide
  Sense strand starting at position 874 of SEQ ID NO: 914582
auaagaagaucugaugaaa

SEQ ID NO: 1014983 - RNA, 19 nt, Artificial Sequence
  Description of Artificial Sequence: Synthetic oligonucleotide
  Antisense strand to SEQ ID NO: 1014982
uuucaucagaucuucuuau

SEQ ID NO: 1014984 - RNA, 19 nt, Artificial Sequence
  Description of Artificial Sequence: Synthetic oligonucleotide
  Sense strand starting at position 1011 of SEQ ID NO: 914582
gaaagaaucugauuacgua

SEQ ID NO: 1014985 - RNA, 19 nt, Artificial Sequence
  Description of Artificial Sequence: Synthetic oligonucleotide
  Antisense strand to SEQ ID NO: 1014984
uacguaaucagauucuuuc

SEQ ID NO: 1014986 - RNA, 19 nt, Artificial Sequence
  Description of Artificial Sequence: Synthetic oligonucleotide
  Sense strand starting at position 1407 of SEQ ID NO: 914582
gcgugugcucaaguucacu

SEQ ID NO: 1014987 - RNA, 19 nt, Artificial Sequence
  Description of Artificial Sequence: Synthetic oligonucleotide
  Antisense strand to SEQ ID NO: 1014986
agugaacuugagcacacgc

SEQ ID NO: 1014988 - RNA, 19 nt, Artificial Sequence
  Description of Artificial Sequence: Synthetic oligonucleotide
  Sense strand starting at position 1459 of SEQ ID NO: 914582
cccggaauugacuggacua

SEQ ID NO: 1014989 - RNA, 19 nt, Artificial Sequence
  Description of Artificial Sequence: Synthetic oligonucleotide
  Antisense strand to SEQ ID NO: 1014988
uaguccagucaauuccggg

SEQ ID NO: 1014990 - RNA, 19 nt, Artificial Sequence
  Description of Artificial Sequence: Synthetic oligonucleotide
  Sense strand starting at position 1460 of SEQ ID NO: 914582
ccggaauugacuggacuau

SEQ ID NO: 1014991 - RNA, 19 nt, Artificial Sequence
  Description of Artificial Sequence: Synthetic oligonucleotide
  Antisense strand to SEQ ID NO: 1014990
auaguccagucaauuccgg

SEQ ID NO: 1014992 - RNA, 19 nt, Artificial Sequence
  Description of Artificial Sequence: Synthetic oligonucleotide
  Sense strand starting at position 1502 of SEQ ID NO: 914582
cucagaguucgugcguauu

SEQ ID NO: 1014993 - RNA, 19 nt, Artificial Sequence
  Description of Artificial Sequence: Synthetic oligonucleotide
  Antisense strand to SEQ ID NO: 1014992
aauacgcacgaacucugag

SEQ ID NO: 1014994 - RNA, 19 nt, Artificial Sequence
  Description of Artificial Sequence: Synthetic oligonucleotide
  Sense strand starting at position 2090 of SEQ ID NO: 914582
cucucuugggcuuagcaaa

SEQ ID NO: 1014995 - RNA, 19 nt, Artificial Sequence
  Description of Artificial Sequence: Synthetic oligonucleotide
  Antisense strand to SEQ ID NO: 1014994
uuugcuaagcccaagagag

SEQ ID NO: 1014996 - RNA, 19 nt, Artificial Sequence
  Description of Artificial Sequence: Synthetic oligonucleotide
  Sense strand starting at position 2103 of SEQ ID NO: 914582
agcaaacgucuccaaguaa

SEQ ID NO: 1014997 - RNA, 19 nt, Artificial Sequence
  Description of Artificial Sequence: Synthetic oligonucleotide
  Antisense strand to SEQ ID NO: 1014996
uuacuuggagacguuugcu

SEQ ID NO: 1014998 - RNA, 19 nt, Artificial Sequence
  Description of Artificial Sequence: Synthetic oligonucleotide
  Sense strand starting at position 2210 of SEQ ID NO: 914582
aagugacagcucugacaau

SEQ ID NO: 1014999 - RNA, 19 nt, Artificial Sequence
  Description of Artificial Sequence: Synthetic oligonucleotide
  Antisense strand to SEQ ID NO: 1014998
auugucagagcugucacuu

SEQ ID NO: 1015000 - RNA, 19 nt, Artificial Sequence
  Description of Artificial Sequence: Synthetic oligonucleotide
  Sense strand starting at position 2297 of SEQ ID NO: 914582
ggugcaauuuaugauugga

SEQ ID NO: 1015001 - RNA, 19 nt, Artificial Sequence
  Description of Artificial Sequence: Synthetic oligonucleotide
  Antisense strand to SEQ ID NO: 1015000
uccaaucauaaauugcacc

SEQ ID NO: 1015002 - RNA, 19 nt, Artificial Sequence
  Description of Artificial Sequence: Synthetic oligonucleotide
  Sense strand starting at position 2305 of SEQ ID NO: 914582
uuaugauuggauuagucuu

SEQ ID NO: 1015003 - RNA, 19 nt, Artificial Sequence
  Description of Artificial Sequence: Synthetic oligonucleotide
  Antisense strand to SEQ ID NO: 1015002
aagacuaauccaaucauaa

SEQ ID NO: 1015004 - RNA, 19 nt, Artificial Sequence
  Description of Artificial Sequence: Synthetic oligonucleotide
  Sense strand starting at position 2599 of SEQ ID NO: 914582
ucaggcuaucagcaaaguu

SEQ ID NO: 1015005 - RNA, 19 nt, Artificial Sequence
  Description of Artificial Sequence: Synthetic oligonucleotide
  Antisense strand to SEQ ID NO: 1015004
aacuuugcugauagccuga

SEQ ID NO: 1015006 - RNA, 19 nt, Artificial Sequence
  Description of Artificial Sequence: Synthetic oligonucleotide
  Sense strand starting at position 2742 of SEQ ID NO: 914582
gagugaaaucaguguuaga

SEQ ID NO: 1015007 - RNA, 19 nt, Artificial Sequence
  Description of Artificial Sequence: Synthetic oligonucleotide
  Antisense strand to SEQ ID NO: 1015006
ucuaacacugauuucacuc

SEQ ID NO: 1015008 - RNA, 19 nt, Artificial Sequence
  Description of Artificial Sequence: Synthetic oligonucleotide
  Sense strand starting at position 2816 of SEQ ID NO: 914582
auguguguccguaagagug

SEQ ID NO: 1015009 - RNA, 19 nt, Artificial Sequence
  Description of Artificial Sequence: Synthetic oligonucleotide
  Antisense strand to SEQ ID NO: 1015008
cacucuuacggacacacau

SEQ ID NO: 1015010 - RNA, 19 nt, Artificial Sequence
  Description of Artificial Sequence: Synthetic oligonucleotide
  Sense strand starting at position 2849 of SEQ ID NO: 914582
guuauuucauuucgggaga

SEQ ID NO: 1015011 - RNA, 19 nt, Artificial Sequence
  Description of Artificial Sequence: Synthetic oligonucleotide
  Antisense strand to SEQ ID NO: 1015010
ucucccgaaaugaaauaac

SEQ ID NO: 1015012 - RNA, 19 nt, Artificial Sequence
  Description of Artificial Sequence: Synthetic oligonucleotide
  Sense strand starting at position 2860 of SEQ ID NO: 914582
ucgggagacugguugaguu

SEQ ID NO: 1015013 - RNA, 19 nt, Artificial Sequence
  Description of Artificial Sequence: Synthetic oligonucleotide
  Antisense strand to SEQ ID NO: 1015012
aacucaaccagucucccga

SEQ ID NO: 1015014 - RNA, 19 nt, Artificial Sequence
  Description of Artificial Sequence: Synthetic oligonucleotide
  Sense strand starting at position 2861 of SEQ ID NO: 914582
cgggagacugguugaguuu

SEQ ID NO: 1015015 - RNA, 19 nt, Artificial Sequence
  Description of Artificial Sequence: Synthetic oligonucleotide
  Antisense strand to SEQ ID NO: 1015014
aaacucaaccagucucccg

SEQ ID NO: 1015016 - RNA, 19 nt, Artificial Sequence
  Description of Artificial Sequence: Synthetic oligonucleotide
  Sense strand starting at position 2863 of SEQ ID NO: 914582
ggagacugguugaguuuga

SEQ ID NO: 1015017 - RNA, 19 nt, Artificial Sequence
  Description of Artificial Sequence: Synthetic oligonucleotide
  Antisense strand to SEQ ID NO: 1015016
ucaaacucaaccagucucc

SEQ ID NO: 1015018 - RNA, 19 nt, Artificial Sequence
  Description of Artificial Sequence: Synthetic oligonucleotide
  Sense strand starting at position 3133 of SEQ ID NO: 914582
gcucucggcaguuuaaguu

SEQ ID NO: 1015019 - RNA, 19 nt, Artificial Sequence
  Description of Artificial Sequence: Synthetic oligonucleotide
  Antisense strand to SEQ ID NO: 1015018
aacuuaaacugccgagagc

SEQ ID NO: 1015020 - RNA, 19 nt, Artificial Sequence
  Description of Artificial Sequence: Synthetic oligonucleotide
  Sense strand starting at position 3139 of SEQ ID NO: 914582
ggcaguuuaaguugaaacu

SEQ ID NO: 1015021 - RNA, 19 nt, Artificial Sequence
  Description of Artificial Sequence: Synthetic oligonucleotide
  Antisense strand to SEQ ID NO: 1015020
aguuucaacuuaaacugcc

SEQ ID NO: 1015022 - RNA, 19 nt, Artificial Sequence
  Description of Artificial Sequence: Synthetic oligonucleotide
  Sense strand starting at position 3196 of SEQ ID NO: 914582
agacgucgucuggagagaa

SEQ ID NO: 1015023 - RNA, 19 nt, Artificial Sequence
  Description of Artificial Sequence: Synthetic oligonucleotide
  Antisense strand to SEQ ID NO: 1015022
uucucuccagacgacgucu

SEQ ID NO: 1015024 - RNA, 19 nt, Artificial Sequence
  Description of Artificial Sequence: Synthetic oligonucleotide
  Sense strand starting at position 3317 of SEQ ID NO: 914582
ccaagaauguugguccacu

SEQ ID NO: 1015025 - RNA, 19 nt, Artificial Sequence
  Description of Artificial Sequence: Synthetic oligonucleotide
  Antisense strand to SEQ ID NO: 1015024
aguggaccaacauucuugg

SEQ ID NO: 1015026 - RNA, 19 nt, Artificial Sequence
  Description of Artificial Sequence: Synthetic oligonucleotide
  Sense strand starting at position 3318 of SEQ ID NO: 914582
caagaauguugguccacuc

SEQ ID NO: 1015027 - RNA, 19 nt, Artificial Sequence
  Description of Artificial Sequence: Synthetic oligonucleotide
  Antisense strand to SEQ ID NO: 1015026
gaguggaccaacauucuug

SEQ ID NO: 1015028 - RNA, 19 nt, Artificial Sequence
  Description of Artificial Sequence: Synthetic oligonucleotide
  Sense strand starting at position 3325 of SEQ ID NO: 914582
guugguccacuccgggaaa

SEQ ID NO: 1015029 - RNA, 19 nt, Artificial Sequence
  Description of Artificial Sequence: Synthetic oligonucleotide
  Antisense strand to SEQ ID NO: 1015028
uuucccggaguggaccaac

SEQ ID NO: 1015030 - RNA, 19 nt, Artificial Sequence
  Description of Artificial Sequence: Synthetic oligonucleotide
  Sense strand starting at position 3451 of SEQ ID NO: 914582
ucuguucggcgagauaaca

SEQ ID NO: 1015031 - RNA, 19 nt, Artificial Sequence
  Description of Artificial Sequence: Synthetic oligonucleotide
  Antisense strand to SEQ ID NO: 1015030
uguuaucucgccgaacaga

SEQ ID NO: 1015032 - RNA, 19 nt, Artificial Sequence
  Description of Artificial Sequence: Synthetic oligonucleotide
  Sense strand starting at position 3460 of SEQ ID NO: 914582
cgagauaacagauguguua

SEQ ID NO: 1015033 - RNA, 19 nt, Artificial Sequence
  Description of Artificial Sequence: Synthetic oligonucleotide
  Antisense strand to SEQ ID NO: 1015032
uaacacaucuguuaucucg

SEQ ID NO: 1015034 - RNA, 19 nt, Artificial Sequence
  Description of Artificial Sequence: Synthetic oligonucleotide
  Sense strand starting at position 3463 of SEQ ID NO: 914582
gauaacagauguguuaaau

SEQ ID NO: 1015035 - RNA, 19 nt, Artificial Sequence
  Description of Artificial Sequence: Synthetic oligonucleotide
  Antisense strand to SEQ ID NO: 1015034
auuuaacacaucuguuauc

SEQ ID NO: 1015036 - RNA, 19 nt, Artificial Sequence
  Description of Artificial Sequence: Synthetic oligonucleotide
  Sense strand starting at position 3469 of SEQ ID NO: 914582
agauguguuaaauguccca

SEQ ID NO: 1015037 - RNA, 19 nt, Artificial Sequence
  Description of Artificial Sequence: Synthetic oligonucleotide
  Antisense strand to SEQ ID NO: 1015036
ugggacauuuaacacaucu

SEQ ID NO: 1015038 - RNA, 19 nt, Artificial Sequence
  Description of Artificial Sequence: Synthetic oligonucleotide
  Sense strand starting at position 3640 of SEQ ID NO: 914582
agcuuuauuucucucgaug

SEQ ID NO: 1015039 - RNA, 19 nt, Artificial Sequence
  Description of Artificial Sequence: Synthetic oligonucleotide
  Antisense strand to SEQ ID NO: 1015038
caucgagagaaauaaagcu

SEQ ID NO: 1015040 - RNA, 19 nt, Artificial Sequence
  Description of Artificial Sequence: Synthetic oligonucleotide
  Sense strand starting at position 3689 of SEQ ID NO: 914582
cuccaugucgcugcuuuaa

SEQ ID NO: 1015041 - RNA, 19 nt, Artificial Sequence
  Description of Artificial Sequence: Synthetic oligonucleotide
  Antisense strand to SEQ ID NO: 1015040
uuaaagcagcgacauggag

SEQ ID NO: 1015042 - RNA, 19 nt, Artificial Sequence
  Description of Artificial Sequence: Synthetic oligonucleotide
  Sense strand starting at position 12 of SEQ ID NO: 914583
gcuuaaugaucagaaauuu

SEQ ID NO: 1015043 - RNA, 19 nt, Artificial Sequence
  Description of Artificial Sequence: Synthetic oligonucleotide
  Antisense strand to SEQ ID NO: 1015042
aaauuucugaucauuaagc

SEQ ID NO: 1015044 - RNA, 19 nt, Artificial Sequence
  Description of Artificial Sequence: Synthetic oligonucleotide
  Sense strand starting at position 59 of SEQ ID NO: 914583
uugguauaagcagagugua

SEQ ID NO: 1015045 - RNA, 19 nt, Artificial Sequence
  Description of Artificial Sequence: Synthetic oligonucleotide
  Antisense strand to SEQ ID NO: 1015044
uacacucugcuuauaccaa

SEQ ID NO: 1015046 - RNA, 19 nt, Artificial Sequence
  Description of Artificial Sequence: Synthetic oligonucleotide
  Sense strand starting at position 62 of SEQ ID NO: 914583
guauaagcagaguguaaga

SEQ ID NO: 1015047 - RNA, 19 nt, Artificial Sequence
  Description of Artificial Sequence: Synthetic oligonucleotide
  Antisense strand to SEQ ID NO: 1015046
ucuuacacucugcuuauac

SEQ ID NO: 1015048 - RNA, 19 nt, Artificial Sequence
  Description of Artificial Sequence: Synthetic oligonucleotide
  Sense strand starting at position 250 of SEQ ID NO: 914583
ucaauuaaccguggaaaug

SEQ ID NO: 1015049 - RNA, 19 nt, Artificial Sequence
  Description of Artificial Sequence: Synthetic oligonucleotide
  Antisense strand to SEQ ID NO: 1015048
cauuuccacgguuaauuga

SEQ ID NO: 1015050 - RNA, 19 nt, Artificial Sequence
  Description of Artificial Sequence: Synthetic oligonucleotide
  Sense strand starting at position 251 of SEQ ID NO: 914583
caauuaaccguggaaaugu

SEQ ID NO: 1015051 - RNA, 19 nt, Artificial Sequence
  Description of Artificial Sequence: Synthetic oligonucleotide
  Antisense strand to SEQ ID NO: 1015050
acauuuccacgguuaauug

SEQ ID NO: 1015052 - RNA, 19 nt, Artificial Sequence
  Description of Artificial Sequence: Synthetic oligonucleotide
  Sense strand starting at position 260 of SEQ ID NO: 914583
guggaaauguaaguaaggu

SEQ ID NO: 1015053 - RNA, 19 nt, Artificial Sequence
  Description of Artificial Sequence: Synthetic oligonucleotide
  Antisense strand to SEQ ID NO: 1015052
accuuacuuacauuuccac

SEQ ID NO: 1015054 - RNA, 19 nt, Artificial Sequence
  Description of Artificial Sequence: Synthetic oligonucleotide
  Sense strand starting at position 268 of SEQ ID NO: 914583
guaaguaaggucuagauau

SEQ ID NO: 1015055 - RNA, 19 nt, Artificial Sequence
  Description of Artificial Sequence: Synthetic oligonucleotide
  Antisense strand to SEQ ID NO: 1015054
auaucuagaccuuacuuac

SEQ ID NO: 1015056 - RNA, 19 nt, Artificial Sequence
  Description of Artificial Sequence: Synthetic oligonucleotide
  Sense strand starting at position 569 of SEQ ID NO: 914583
guuugagggcuagagaugu

SEQ ID NO: 1015057 - RNA, 19 nt, Artificial Sequence
  Description of Artificial Sequence: Synthetic oligonucleotide
  Antisense strand to SEQ ID NO: 1015056
acaucucuagcccucaaac

SEQ ID NO: 1015058 - RNA, 19 nt, Artificial Sequence
  Description of Artificial Sequence: Synthetic oligonucleotide
  Sense strand starting at position 577 of SEQ ID NO: 914583
gcuagagauguucaaggug

SEQ ID NO: 1015059 - RNA, 19 nt, Artificial Sequence
  Description of Artificial Sequence: Synthetic oligonucleotide
  Antisense strand to SEQ ID NO: 1015058
caccuugaacaucucuagc

SEQ ID NO: 1015060 - RNA, 19 nt, Artificial Sequence
  Description of Artificial Sequence: Synthetic oligonucleotide
  Sense strand starting at position 580 of SEQ ID NO: 914583
agagauguucaagguggca

SEQ ID NO: 1015061 - RNA, 19 nt, Artificial Sequence
  Description of Artificial Sequence: Synthetic oligonucleotide
  Antisense strand to SEQ ID NO: 1015060
ugccaccuugaacaucucu

SEQ ID NO: 1015062 - RNA, 19 nt, Artificial Sequence
  Description of Artificial Sequence: Synthetic oligonucleotide
  Sense strand starting at position 644 of SEQ ID NO: 914583
auuccauugcuuuagguau

SEQ ID NO: 1015063 - RNA, 19 nt, Artificial Sequence
  Description of Artificial Sequence: Synthetic oligonucleotide
  Antisense strand to SEQ ID NO: 1015062
auaccuaaagcaauggaau

SEQ ID NO: 1015064 - RNA, 19 nt, Artificial Sequence
  Description of Artificial Sequence: Synthetic oligonucleotide
  Sense strand starting at position 685 of SEQ ID NO: 914583
guaugaugcagccaggacu

SEQ ID NO: 1015065 - RNA, 19 nt, Artificial Sequence
  Description of Artificial Sequence: Synthetic oligonucleotide
  Antisense strand to SEQ ID NO: 1015064
aguccuggcugcaucauac

SEQ ID NO: 1015066 - RNA, 19 nt, Artificial Sequence
  Description of Artificial Sequence: Synthetic oligonucleotide
  Sense strand starting at position 896 of SEQ ID NO: 914583
ucaaacucagauugguaga

SEQ ID NO: 1015067 - RNA, 19 nt, Artificial Sequence
  Description of Artificial Sequence: Synthetic oligonucleotide
  Antisense strand to SEQ ID NO: 1015066
ucuaccaaucugaguuuga

SEQ ID NO: 1015068 - RNA, 19 nt, Artificial Sequence
  Description of Artificial Sequence: Synthetic oligonucleotide
  Sense strand starting at position 901 of SEQ ID NO: 914583
cucagauugguagaaguuu

SEQ ID NO: 1015069 - RNA, 19 nt, Artificial Sequence
  Description of Artificial Sequence: Synthetic oligonucleotide
  Antisense strand to SEQ ID NO: 1015068
aaacuucuaccaaucugag

SEQ ID NO: 1015070 - RNA, 19 nt, Artificial Sequence
  Description of Artificial Sequence: Synthetic oligonucleotide
  Sense strand starting at position 1241 of SEQ ID NO: 914583
uucuguaagcuugaaagau

SEQ ID NO: 1015071 - RNA, 19 nt, Artificial Sequence
  Description of Artificial Sequence: Synthetic oligonucleotide
  Antisense strand to SEQ ID NO: 1015070
aucuuucaagcuuacagaa

SEQ ID NO: 1015072 - RNA, 19 nt, Artificial Sequence
  Description of Artificial Sequence: Synthetic oligonucleotide
  Sense strand starting at position 1245 of SEQ ID NO: 914583
guaagcuugaaagauagca

SEQ ID NO: 1015073 - RNA, 19 nt, Artificial Sequence
  Description of Artificial Sequence: Synthetic oligonucleotide
  Antisense strand to SEQ ID NO: 1015072
ugcuaucuuucaagcuuac

SEQ ID NO: 1015074 - RNA, 19 nt, Artificial Sequence
  Description of Artificial Sequence: Synthetic oligonucleotide
  Sense strand starting at position 1388 of SEQ ID NO: 914583
uugucucacuggguugaaa

SEQ ID NO: 1015075 - RNA, 19 nt, Artificial Sequence
  Description of Artificial Sequence: Synthetic oligonucleotide
  Antisense strand to SEQ ID NO: 1015074
uuucaacccagugagacaa

SEQ ID NO: 1015076 - RNA, 19 nt, Artificial Sequence
  Description of Artificial Sequence: Synthetic oligonucleotide
  Sense strand starting at position 1390 of SEQ ID NO: 914583
gucucacuggguugaaaug

SEQ ID NO: 1015077 - RNA, 19 nt, Artificial Sequence
  Description of Artificial Sequence: Synthetic oligonucleotide
  Antisense strand to SEQ ID NO: 1015076
cauuucaacccagugagac

SEQ ID NO: 1015078 - RNA, 19 nt, Artificial Sequence
  Description of Artificial Sequence: Synthetic oligonucleotide
  Sense strand starting at position 1406 of SEQ ID NO: 914583
augaaagcgaagugaaaua

SEQ ID NO: 1015079 - RNA, 19 nt, Artificial Sequence
  Description of Artificial Sequence: Synthetic oligonucleotide
  Antisense strand to SEQ ID NO: 1015078
uauuucacuucgcuuucau

SEQ ID NO: 1015080 - RNA, 19 nt, Artificial Sequence
  Description of Artificial Sequence: Synthetic oligonucleotide
  Sense strand starting at position 1411 of SEQ ID NO: 914583
agcgaagugaaauagcaaa

SEQ ID NO: 1015081 - RNA, 19 nt, Artificial Sequence
  Description of Artificial Sequence: Synthetic oligonucleotide
  Antisense strand to SEQ ID NO: 1015080
uuugcuauuucacuucgcu

SEQ ID NO: 1015082 - RNA, 19 nt, Artificial Sequence
  Description of Artificial Sequence: Synthetic oligonucleotide
  Sense strand starting at position 1504 of SEQ ID NO: 914583
cgaauaucuucugcagaaa

SEQ ID NO: 1015083 - RNA, 19 nt, Artificial Sequence
  Description of Artificial Sequence: Synthetic oligonucleotide
  Antisense strand to SEQ ID NO: 1015082
uuucugcagaagauauucg

SEQ ID NO: 1015084 - RNA, 19 nt, Artificial Sequence
  Description of Artificial Sequence: Synthetic oligonucleotide
  Sense strand starting at position 1589 of SEQ ID NO: 914583
uucgaauuagaacauugua

SEQ ID NO: 1015085 - RNA, 19 nt, Artificial Sequence
  Description of Artificial Sequence: Synthetic oligonucleotide
  Antisense strand to SEQ ID NO: 1015084
uacaauguucuaauucgaa

SEQ ID NO: 1015086 - RNA, 19 nt, Artificial Sequence
  Description of Artificial Sequence: Synthetic oligonucleotide
  Sense strand starting at position 1712 of SEQ ID NO: 914583
uugagaguagcucagggua

SEQ ID NO: 1015087 - RNA, 19 nt, Artificial Sequence
  Description of Artificial Sequence: Synthetic oligonucleotide
  Antisense strand to SEQ ID NO: 1015086
uacccugagcuacucucaa

SEQ ID NO: 1015088 - RNA, 19 nt, Artificial Sequence
  Description of Artificial Sequence: Synthetic oligonucleotide
  Sense strand starting at position 1876 of SEQ ID NO: 914583
ugggaacuuacugguagua

SEQ ID NO: 1015089 - RNA, 19 nt, Artificial Sequence
  Description of Artificial Sequence: Synthetic oligonucleotide
  Antisense strand to SEQ ID NO: 1015088
uacuaccaguaaguuccca

SEQ ID NO: 1015090 - RNA, 19 nt, Artificial Sequence
  Description of Artificial Sequence: Synthetic oligonucleotide
  Sense strand starting at position 2094 of SEQ ID NO: 914583
ugaaguuagguaggucuga

SEQ ID NO: 1015091 - RNA, 19 nt, Artificial Sequence
  Description of Artificial Sequence: Synthetic oligonucleotide
  Antisense strand to SEQ ID NO: 1015090
ucagaccuaccuaacuuca

SEQ ID NO: 1015092 - RNA, 19 nt, Artificial Sequence
  Description of Artificial Sequence: Synthetic oligonucleotide
  Sense strand starting at position 2095 of SEQ ID NO: 914583
gaaguuagguaggucugau

SEQ ID NO: 1015093 - RNA, 19 nt, Artificial Sequence
  Description of Artificial Sequence: Synthetic oligonucleotide
  Antisense strand to SEQ ID NO: 1015092
aucagaccuaccuaacuuc

SEQ ID NO: 1015094 - RNA, 19 nt, Artificial Sequence
  Description of Artificial Sequence: Synthetic oligonucleotide
  Sense strand starting at position 2212 of SEQ ID NO: 914583
ggcuguuucguuaagugua

SEQ ID NO: 1015095 - RNA, 19 nt, Artificial Sequence
  Description of Artificial Sequence: Synthetic oligonucleotide
  Antisense strand to SEQ ID NO: 1015094
uacacuuaacgaaacagcc

SEQ ID NO: 1015096 - RNA, 19 nt, Artificial Sequence
  Description of Artificial Sequence: Synthetic oligonucleotide
  Sense strand starting at position 2730 of SEQ ID NO: 914583
guacacuuauaccuggaau

SEQ ID NO: 1015097 - RNA, 19 nt, Artificial Sequence
  Description of Artificial Sequence: Synthetic oligonucleotide
  Antisense strand to SEQ ID NO: 1015096
auuccagguauaaguguac

SEQ ID NO: 1015098 - RNA, 19 nt, Artificial Sequence
  Description of Artificial Sequence: Synthetic oligonucleotide
  Sense strand starting at position 2783 of SEQ ID NO: 914583
ucagguuugcauuauaauc

SEQ ID NO: 1015099 - RNA, 19 nt, Artificial Sequence
  Description of Artificial Sequence: Synthetic oligonucleotide
  Antisense strand to SEQ ID NO: 1015098
gauuauaaugcaaaccuga

SEQ ID NO: 1015100 - RNA, 19 nt, Artificial Sequence
  Description of Artificial Sequence: Synthetic oligonucleotide
  Sense strand starting at position 2864 of SEQ ID NO: 914583
cauggcaaacugugaugaa

SEQ ID NO: 1015101 - RNA, 19 nt, Artificial Sequence
  Description of Artificial Sequence: Synthetic oligonucleotide
  Antisense strand to SEQ ID NO: 1015100
uucaucacaguuugccaug

SEQ ID NO: 1015102 - RNA, 19 nt, Artificial Sequence
  Description of Artificial Sequence: Synthetic oligonucleotide
  Sense strand starting at position 2868 of SEQ ID NO: 914583
gcaaacugugaugaauugu

SEQ ID NO: 1015103 - RNA, 19 nt, Artificial Sequence
  Description of Artificial Sequence: Synthetic oligonucleotide
  Antisense strand to SEQ ID NO: 1015102
acaauucaucacaguuugc

SEQ ID NO: 1015104 - RNA, 19 nt, Artificial Sequence
  Description of Artificial Sequence: Synthetic oligonucleotide
  Sense strand starting at position 2874 of SEQ ID NO: 914583
ugugaugaauugucauuaa

SEQ ID NO: 1015105 - RNA, 19 nt, Artificial Sequence
  Description of Artificial Sequence: Synthetic oligonucleotide
  Antisense strand to SEQ ID NO: 1015104
uuaaugacaauucaucaca

SEQ ID NO: 1015106 - RNA, 19 nt, Artificial Sequence
  Description of Artificial Sequence: Synthetic oligonucleotide
  Sense strand starting at position 3264 of SEQ ID NO: 914583
uuagaaucuugaguccauc

SEQ ID NO: 1015107 - RNA, 19 nt, Artificial Sequence
  Description of Artificial Sequence: Synthetic oligonucleotide
  Antisense strand to SEQ ID NO: 1015106
gauggacucaagauucuaa

SEQ ID NO: 1015108 - RNA, 19 nt, Artificial Sequence
  Description of Artificial Sequence: Synthetic oligonucleotide
  Sense strand starting at position 3278 of SEQ ID NO: 914583
ccaucuuuaucugugagaa

SEQ ID NO: 1015109 - RNA, 19 nt, Artificial Sequence
  Description of Artificial Sequence: Synthetic oligonucleotide
  Antisense strand to SEQ ID NO: 1015108
uucucacagauaaagaugg

SEQ ID NO: 1015110 - RNA, 19 nt, Artificial Sequence
  Description of Artificial Sequence: Synthetic oligonucleotide
  Sense strand starting at position 3412 of SEQ ID NO: 914583
ggcuguugauuacuugaag

SEQ ID NO: 1015111 - RNA, 19 nt, Artificial Sequence
  Description of Artificial Sequence: Synthetic oligonucleotide
  Antisense strand to SEQ ID NO: 1015110
cuucaaguaaucaacagcc

SEQ ID NO: 1015112 - RNA, 19 nt, Artificial Sequence
  Description of Artificial Sequence: Synthetic oligonucleotide
  Sense strand starting at position 3415 of SEQ ID NO: 914583
uguugauuacuugaagugu

SEQ ID NO: 1015113 - RNA, 19 nt, Artificial Sequence
  Description of Artificial Sequence: Synthetic oligonucleotide
  Antisense strand to SEQ ID NO: 1015112
acacuucaaguaaucaaca

SEQ ID NO: 1015114 - RNA, 19 nt, Artificial Sequence
  Description of Artificial Sequence: Synthetic oligonucleotide
  Sense strand starting at position 3577 of SEQ ID NO: 914583
uguccaucugcugauaaac

SEQ ID NO: 1015115 - RNA, 19 nt, Artificial Sequence
  Description of Artificial Sequence: Synthetic oligonucleotide
  Antisense strand to SEQ ID NO: 1015114
guuuaucagcagauggaca

SEQ ID NO: 1015116 - RNA, 19 nt, Artificial Sequence
  Description of Artificial Sequence: Synthetic oligonucleotide
  Sense strand starting at position 3859 of SEQ ID NO: 914583
gcaugcauguauuugcaca

SEQ ID NO: 1015117 - RNA, 19 nt, Artificial Sequence
  Description of Artificial Sequence: Synthetic oligonucleotide
  Antisense strand to SEQ ID NO: 1015116
ugugcaaauacaugcaugc

SEQ ID NO: 1015118 - RNA, 19 nt, Artificial Sequence
  Description of Artificial Sequence: Synthetic oligonucleotide
  Sense strand starting at position 3861 of SEQ ID NO: 914583
augcauguauuugcacaua

SEQ ID NO: 1015119 - RNA, 19 nt, Artificial Sequence
  Description of Artificial Sequence: Synthetic oligonucleotide
  Antisense strand to SEQ ID NO: 1015118
uaugugcaaauacaugcau

SEQ ID NO: 1015120 - RNA, 19 nt, Artificial Sequence
  Description of Artificial Sequence: Synthetic oligonucleotide
  Sense strand starting at position 3921 of SEQ ID NO: 914583
auauguagccggcauuuau

SEQ ID NO: 1015121 - RNA, 19 nt, Artificial Sequence
  Description of Artificial Sequence: Synthetic oligonucleotide
  Antisense strand to SEQ ID NO: 1015120
auaaaugccggcuacauau

SEQ ID NO: 1015122 - RNA, 19 nt, Artificial Sequence
  Description of Artificial Sequence: Synthetic oligonucleotide
  Sense strand starting at position 83 of SEQ ID NO: 914584
uggaauuguaguuaaaguu

SEQ ID NO: 1015123 - RNA, 19 nt, Artificial Sequence
  Description of Artificial Sequence: Synthetic oligonucleotide
  Antisense strand to SEQ ID NO: 1015122
aacuuuaacuacaauucca

SEQ ID NO: 1015124 - RNA, 19 nt, Artificial Sequence
  Description of Artificial Sequence: Synthetic oligonucleotide
  Sense strand starting at position 104 of SEQ ID NO: 914584
uuaguaaagacgugacaug

SEQ ID NO: 1015125 - RNA, 19 nt, Artificial Sequence
  Description of Artificial Sequence: Synthetic oligonucleotide
  Antisense strand to SEQ ID NO: 1015124
caugucacgucuuuacuaa

SEQ ID NO: 1015126 - RNA, 19 nt, Artificial Sequence
  Description of Artificial Sequence: Synthetic oligonucleotide
  Sense strand starting at position 165 of SEQ ID NO: 914584
gcacauuuauguuccagua

SEQ ID NO: 1015127 - RNA, 19 nt, Artificial Sequence
  Description of Artificial Sequence: Synthetic oligonucleotide
  Antisense strand to SEQ ID NO: 1015126
uacuggaacauaaaugugc

SEQ ID NO: 1015128 - RNA, 19 nt, Artificial Sequence
  Description of Artificial Sequence: Synthetic oligonucleotide
  Sense strand starting at position 181 of SEQ ID NO: 914584
guaaguaacaugggugaga

SEQ ID NO: 1015129 - RNA, 19 nt, Artificial Sequence
  Description of Artificial Sequence: Synthetic oligonucleotide
  Antisense strand to SEQ ID NO: 1015128
ucucacccauguuacuuac

SEQ ID NO: 1015130 - RNA, 19 nt, Artificial Sequence
  Description of Artificial Sequence: Synthetic oligonucleotide
  Sense strand starting at position 227 of SEQ ID NO: 914584
gccaguagccuugaaauua

SEQ ID NO: 1015131 - RNA, 19 nt, Artificial Sequence
  Description of Artificial Sequence: Synthetic oligonucleotide
  Antisense strand to SEQ ID NO: 1015130
uaauuucaaggcuacuggc

SEQ ID NO: 1015132 - RNA, 19 nt, Artificial Sequence
  Description of Artificial Sequence: Synthetic oligonucleotide
  Sense strand starting at position 297 of SEQ ID NO: 914584
acauuuaagugagaguuac

SEQ ID NO: 1015133 - RNA, 19 nt, Artificial Sequence
  Description of Artificial Sequence: Synthetic oligonucleotide
  Antisense strand to SEQ ID NO: 1015132
guaacucucacuuaaaugu

SEQ ID NO: 1015134 - RNA, 19 nt, Artificial Sequence
  Description of Artificial Sequence: Synthetic oligonucleotide
  Sense strand starting at position 328 of SEQ ID NO: 914584
augugagaaagcuguaaua

SEQ ID NO: 1015135 - RNA, 19 nt, Artificial Sequence
  Description of Artificial Sequence: Synthetic oligonucleotide
  Antisense strand to SEQ ID NO: 1015134
uauuacagcuuucucacau

SEQ ID NO: 1015136 - RNA, 19 nt, Artificial Sequence
  Description of Artificial Sequence: Synthetic oligonucleotide
  Sense strand starting at position 330 of SEQ ID NO: 914584
gugagaaagcuguaauauu

SEQ ID NO: 1015137 - RNA, 19 nt, Artificial Sequence
  Description of Artificial Sequence: Synthetic oligonucleotide
  Antisense strand to SEQ ID NO: 1015136
aauauuacagcuuucucac

SEQ ID NO: 1015138 - RNA, 19 nt, Artificial Sequence
  Description of Artificial Sequence: Synthetic oligonucleotide
  Sense strand starting at position 416 of SEQ ID NO: 914584
aagggacaucccugguaac

SEQ ID NO: 1015139 - RNA, 19 nt, Artificial Sequence
  Description of Artificial Sequence: Synthetic oligonucleotide
  Antisense strand to SEQ ID NO: 1015138
guuaccagggaugucccuu

SEQ ID NO: 1015140 - RNA, 19 nt, Artificial Sequence
  Description of Artificial Sequence: Synthetic oligonucleotide
  Sense strand starting at position 437 of SEQ ID NO: 914584
ugaggaggcuggcuugaaa

SEQ ID NO: 1015141 - RNA, 19 nt, Artificial Sequence
  Description of Artificial Sequence: Synthetic oligonucleotide
  Antisense strand to SEQ ID NO: 1015140
uuucaagccagccuccuca

SEQ ID NO: 1015142 - RNA, 19 nt, Artificial Sequence
  Description of Artificial Sequence: Synthetic oligonucleotide
  Sense strand starting at position 461 of SEQ ID NO: 914584
gguguucagcuguaaugag

SEQ ID NO: 1015143 - RNA, 19 nt, Artificial Sequence
  Description of Artificial Sequence: Synthetic oligonucleotide
  Antisense strand to SEQ ID NO: 1015142
cucauuacagcugaacacc

SEQ ID NO: 1015144 - RNA, 19 nt, Artificial Sequence
  Description of Artificial Sequence: Synthetic oligonucleotide
  Sense strand starting at position 557 of SEQ ID NO: 914584
gagugagugugacuccaga

SEQ ID NO: 1015145 - RNA, 19 nt, Artificial Sequence
  Description of Artificial Sequence: Synthetic oligonucleotide
  Antisense strand to SEQ ID NO: 1015144
ucuggagucacacucacuc

SEQ ID NO: 1015146 - RNA, 19 nt, Artificial Sequence
  Description of Artificial Sequence: Synthetic oligonucleotide
  Sense strand starting at position 581 of SEQ ID NO: 914584
acuguaauacuagguauac

SEQ ID NO: 1015147 - RNA, 19 nt, Artificial Sequence
  Description of Artificial Sequence: Synthetic oligonucleotide
  Antisense strand to SEQ ID NO: 1015146
guauaccuaguauuacagu

SEQ ID NO: 1015148 - RNA, 19 nt, Artificial Sequence
  Description of Artificial Sequence: Synthetic oligonucleotide
  Sense strand starting at position 582 of SEQ ID NO: 914584
cuguaauacuagguauaca

SEQ ID NO: 1015149 - RNA, 19 nt, Artificial Sequence
  Description of Artificial Sequence: Synthetic oligonucleotide
  Antisense strand to SEQ ID NO: 1015148
uguauaccuaguauuacag

SEQ ID NO: 1015150 - RNA, 19 nt, Artificial Sequence
  Description of Artificial Sequence: Synthetic oligonucleotide
  Sense strand starting at position 694 of SEQ ID NO: 914584
uuaguuggguauucccaau

SEQ ID NO: 1015151 - RNA, 19 nt, Artificial Sequence
  Description of Artificial Sequence: Synthetic oligonucleotide
  Antisense strand to SEQ ID NO: 1015150
auugggaauacccaacuaa

SEQ ID NO: 1015152 - RNA, 19 nt, Artificial Sequence
  Description of Artificial Sequence: Synthetic oligonucleotide
  Sense strand starting at position 895 of SEQ ID NO: 914584
agguucugugguuacucua

SEQ ID NO: 1015153 - RNA, 19 nt, Artificial Sequence
  Description of Artificial Sequence: Synthetic oligonucleotide
  Antisense strand to SEQ ID NO: 1015152
uagaguaaccacagaaccu

SEQ ID NO: 1015154 - RNA, 19 nt, Artificial Sequence
  Description of Artificial Sequence: Synthetic oligonucleotide
  Sense strand starting at position 1312 of SEQ ID NO: 914584
uucuguguuguugagaaac

SEQ ID NO: 1015155 - RNA, 19 nt, Artificial Sequence
  Description of Artificial Sequence: Synthetic oligonucleotide
  Antisense strand to SEQ ID NO: 1015154
guuucucaacaacacagaa

SEQ ID NO: 1015156 - RNA, 19 nt, Artificial Sequence
  Description of Artificial Sequence: Synthetic oligonucleotide
  Sense strand starting at position 1407 of SEQ ID NO: 914584
gucuuaagguaccuuaaga

SEQ ID NO: 1015157 - RNA, 19 nt, Artificial Sequence
  Description of Artificial Sequence: Synthetic oligonucleotide
  Antisense strand to SEQ ID NO: 1015156
ucuuaagguaccuuaagac

SEQ ID NO: 1015158 - RNA, 19 nt, Artificial Sequence
  Description of Artificial Sequence: Synthetic oligonucleotide
  Sense strand starting at position 1460 of SEQ ID NO: 914584
gucucauuugaguguaugu

SEQ ID NO: 1015159 - RNA, 19 nt, Artificial Sequence
  Description of Artificial Sequence: Synthetic oligonucleotide
  Antisense strand to SEQ ID NO: 1015158
acauacacucaaaugagac

SEQ ID NO: 1015160 - RNA, 19 nt, Artificial Sequence
  Description of Artificial Sequence: Synthetic oligonucleotide
  Sense strand starting at position 1594 of SEQ ID NO: 914584
cugaaauggugaccaugua

SEQ ID NO: 1015161 - RNA, 19 nt, Artificial Sequence
  Description of Artificial Sequence: Synthetic oligonucleotide
  Antisense strand to SEQ ID NO: 1015160
uacauggucaccauuucag

SEQ ID NO: 1015162 - RNA, 19 nt, Artificial Sequence
  Description of Artificial Sequence: Synthetic oligonucleotide
  Sense strand starting at position 1627 of SEQ ID NO: 914584
ccuugcagugaacaaauaa

SEQ ID NO: 1015163 - RNA, 19 nt, Artificial Sequence
  Description of Artificial Sequence: Synthetic oligonucleotide
  Antisense strand to SEQ ID NO: 1015162
uuauuuguucacugcaagg

SEQ ID NO: 1015164 - RNA, 19 nt, Artificial Sequence
  Description of Artificial Sequence: Synthetic oligonucleotide
  Sense strand starting at position 1706 of SEQ ID NO: 914584
ucugacuuccaaggaguua

SEQ ID NO: 1015165 - RNA, 19 nt, Artificial Sequence
  Description of Artificial Sequence: Synthetic oligonucleotide
  Antisense strand to SEQ ID NO: 1015164
uaacuccuuggaagucaga

SEQ ID NO: 1015166 - RNA, 19 nt, Artificial Sequence
  Description of Artificial Sequence: Synthetic oligonucleotide
  Sense strand starting at position 1896 of SEQ ID NO: 914584
ucccaucaccauggugauu

SEQ ID NO: 1015167 - RNA, 19 nt, Artificial Sequence
  Description of Artificial Sequence: Synthetic oligonucleotide
  Antisense strand to SEQ ID NO: 1015166
aaucaccauggugauggga

SEQ ID NO: 1015168 - RNA, 19 nt, Artificial Sequence
  Description of Artificial Sequence: Synthetic oligonucleotide
  Sense strand starting at position 2048 of SEQ ID NO: 914584
guccaaagucuagacaucu

SEQ ID NO: 1015169 - RNA, 19 nt, Artificial Sequence
  Description of Artificial Sequence: Synthetic oligonucleotide
  Antisense strand to SEQ ID NO: 1015168
agaugucuagacuuuggac

SEQ ID NO: 1015170 - RNA, 19 nt, Artificial Sequence
  Description of Artificial Sequence: Synthetic oligonucleotide
  Sense strand starting at position 2059 of SEQ ID NO: 914584
agacaucugguauaagcua

SEQ ID NO: 1015171 - RNA, 19 nt, Artificial Sequence
  Description of Artificial Sequence: Synthetic oligonucleotide
  Antisense strand to SEQ ID NO: 1015170
uagcuuauaccagaugucu

SEQ ID NO: 1015172 - RNA, 19 nt, Artificial Sequence
  Description of Artificial Sequence: Synthetic oligonucleotide
  Sense strand starting at position 2070 of SEQ ID NO: 914584
auaagcuauuuguaagaca

SEQ ID NO: 1015173 - RNA, 19 nt, Artificial Sequence
  Description of Artificial Sequence: Synthetic oligonucleotide
  Antisense strand to SEQ ID NO: 1015172
ugucuuacaaauagcuuau

SEQ ID NO: 1015174 - RNA, 19 nt, Artificial Sequence
  Description of Artificial Sequence: Synthetic oligonucleotide
  Sense strand starting at position 2081 of SEQ ID NO: 914584
guaagacaauguguaguau

SEQ ID NO: 1015175 - RNA, 19 nt, Artificial Sequence
  Description of Artificial Sequence: Synthetic oligonucleotide
  Antisense strand to SEQ ID NO: 1015174
auacuacacauugucuuac

SEQ ID NO: 1015176 - RNA, 19 nt, Artificial Sequence
  Description of Artificial Sequence: Synthetic oligonucleotide
  Sense strand starting at position 2082 of SEQ ID NO: 914584
uaagacaauguguaguauu

SEQ ID NO: 1015177 - RNA, 19 nt, Artificial Sequence
  Description of Artificial Sequence: Synthetic oligonucleotide
  Antisense strand to SEQ ID NO: 1015176
aauacuacacauugucuua

SEQ ID NO: 1015178 - RNA, 19 nt, Artificial Sequence
  Description of Artificial Sequence: Synthetic oligonucleotide
  Sense strand starting at position 2120 of SEQ ID NO: 914584
ccugacugucaauauuagu

SEQ ID NO: 1015179 - RNA, 19 nt, Artificial Sequence
  Description of Artificial Sequence: Synthetic oligonucleotide
  Antisense strand to SEQ ID NO: 1015178
acuaauauugacagucagg

SEQ ID NO: 1015180 - RNA, 19 nt, Artificial Sequence
  Description of Artificial Sequence: Synthetic oligonucleotide
  Sense strand starting at position 2125 of SEQ ID NO: 914584
cugucaauauuagucuuga

SEQ ID NO: 1015181 - RNA, 19 nt, Artificial Sequence
  Description of Artificial Sequence: Synthetic oligonucleotide
  Antisense strand to SEQ ID NO: 1015180
ucaagacuaauauugacag

SEQ ID NO: 1015182 - RNA, 19 nt, Artificial Sequence
  Description of Artificial Sequence: Synthetic oligonucleotide
  Sense strand starting at position 2250 of SEQ ID NO: 914584
ugguaaacucaaugcacuu

SEQ ID NO: 1015183 - RNA, 19 nt, Artificial Sequence
  Description of Artificial Sequence: Synthetic oligonucleotide
  Antisense strand to SEQ ID NO: 1015182
aagugcauugaguuuacca

SEQ ID NO: 1015184 - RNA, 19 nt, Artificial Sequence
  Description of Artificial Sequence: Synthetic oligonucleotide
  Sense strand starting at position 2794 of SEQ ID NO: 914584
agcauaggucaaugaaauu

SEQ ID NO: 1015185 - RNA, 19 nt, Artificial Sequence
  Description of Artificial Sequence: Synthetic oligonucleotide
  Antisense strand to SEQ ID NO: 1015184
aauuucauugaccuaugcu

SEQ ID NO: 1015186 - RNA, 19 nt, Artificial Sequence
  Description of Artificial Sequence: Synthetic oligonucleotide
  Sense strand starting at position 2955 of SEQ ID NO: 914584
cgcauacacagugaaagua

SEQ ID NO: 1015187 - RNA, 19 nt, Artificial Sequence
  Description of Artificial Sequence: Synthetic oligonucleotide
  Antisense strand to SEQ ID NO: 1015186
uacuuucacuguguaugcg

SEQ ID NO: 1015188 - RNA, 19 nt, Artificial Sequence
  Description of Artificial Sequence: Synthetic oligonucleotide
  Sense strand starting at position 3092 of SEQ ID NO: 914584
agguguauucaagacguua

SEQ ID NO: 1015189 - RNA, 19 nt, Artificial Sequence
  Description of Artificial Sequence: Synthetic oligonucleotide
  Antisense strand to SEQ ID NO: 1015188
uaacgucuugaauacaccu

SEQ ID NO: 1015190 - RNA, 19 nt, Artificial Sequence
  Description of Artificial Sequence: Synthetic oligonucleotide
  Sense strand starting at position 3103 of SEQ ID NO: 914584
agacguuacauuuguaguc

SEQ ID NO: 1015191 - RNA, 19 nt, Artificial Sequence
  Description of Artificial Sequence: Synthetic oligonucleotide
  Antisense strand to SEQ ID NO: 1015190
gacuacaaauguaacgucu

SEQ ID NO: 1015192 - RNA, 19 nt, Artificial Sequence
  Description of Artificial Sequence: Synthetic oligonucleotide
  Sense strand starting at position 3104 of SEQ ID NO: 914584
gacguuacauuuguaguca

SEQ ID NO: 1015193 - RNA, 19 nt, Artificial Sequence
  Description of Artificial Sequence: Synthetic oligonucleotide
  Antisense strand to SEQ ID NO: 1015192
ugacuacaaauguaacguc

SEQ ID NO: 1015194 - RNA, 19 nt, Artificial Sequence
  Description of Artificial Sequence: Synthetic oligonucleotide
  Sense strand starting at position 3149 of SEQ ID NO: 914584
ggcucaaagaaguguauug

SEQ ID NO: 1015195 - RNA, 19 nt, Artificial Sequence
  Description of Artificial Sequence: Synthetic oligonucleotide
  Antisense strand to SEQ ID NO: 1015194
caauacacuucuuugagcc

SEQ ID NO: 1015196 - RNA, 19 nt, Artificial Sequence
  Description of Artificial Sequence: Synthetic oligonucleotide
  Sense strand starting at position 3206 of SEQ ID NO: 914584
ugcuauauaguuuauacca

SEQ ID NO: 1015197 - RNA, 19 nt, Artificial Sequence
  Description of Artificial Sequence: Synthetic oligonucleotide
  Antisense strand to SEQ ID NO: 1015196
ugguauaaacuauauagca

SEQ ID NO: 1015198 - RNA, 19 nt, Artificial Sequence
  Description of Artificial Sequence: Synthetic oligonucleotide
  Sense strand starting at position 3437 of SEQ ID NO: 914584
auaacaaugcaagauuguu

SEQ ID NO: 1015199 - RNA, 19 nt, Artificial Sequence
  Description of Artificial Sequence: Synthetic oligonucleotide
  Antisense strand to SEQ ID NO: 1015198
aacaaucuugcauuguuau

SEQ ID NO: 1015200 - RNA, 19 nt, Artificial Sequence
  Description of Artificial Sequence: Synthetic oligonucleotide
  Sense strand starting at position 3561 of SEQ ID NO: 914584
cuaaaugcauucguaauaa

SEQ ID NO: 1015201 - RNA, 19 nt, Artificial Sequence
  Description of Artificial Sequence: Synthetic oligonucleotide
  Antisense strand to SEQ ID NO: 1015200
uuauuacgaaugcauuuag

SEQ ID NO: 1015202 - RNA, 19 nt, Artificial Sequence
  Description of Artificial Sequence: Synthetic oligonucleotide
  Sense strand starting at position 60 of SEQ ID NO: 914585
aggagguuguggguagaga

SEQ ID NO: 1015203 - RNA, 19 nt, Artificial Sequence
  Description of Artificial Sequence: Synthetic oligonucleotide
  Antisense strand to SEQ ID NO: 1015202
ucucuacccacaaccuccu

SEQ ID NO: 1015204 - RNA, 19 nt, Artificial Sequence
  Description of Artificial Sequence: Synthetic oligonucleotide
  Sense strand starting at position 163 of SEQ ID NO: 914585
aggucaagaaucugugaag

SEQ ID NO: 1015205 - RNA, 19 nt, Artificial Sequence
  Description of Artificial Sequence: Synthetic oligonucleotide
  Antisense strand to SEQ ID NO: 1015204
cuucacagauucuugaccu

SEQ ID NO: 1015206 - RNA, 19 nt, Artificial Sequence
  Description of Artificial Sequence: Synthetic oligonucleotide
  Sense strand starting at position 224 of SEQ ID NO: 914585
uauccagaucucgaaguuu

SEQ ID NO: 1015207 - RNA, 19 nt, Artificial Sequence
  Description of Artificial Sequence: Synthetic oligonucleotide
  Antisense strand to SEQ ID NO: 1015206
aaacuucgagaucuggaua

SEQ ID NO: 1015208 - RNA, 19 nt, Artificial Sequence
  Description of Artificial Sequence: Synthetic oligonucleotide
  Sense strand starting at position 255 of SEQ ID NO: 914585
aggguauaccugggagauc

SEQ ID NO: 1015209 - RNA, 19 nt, Artificial Sequence
  Description of Artificial Sequence: Synthetic oligonucleotide
  Antisense strand to SEQ ID NO: 1015208
gaucucccagguauacccu

SEQ ID NO: 1015210 - RNA, 19 nt, Artificial Sequence
  Description of Artificial Sequence: Synthetic oligonucleotide
  Sense strand starting at position 264 of SEQ ID NO: 914585
cugggagaucuacguauga

SEQ ID NO: 1015211 - RNA, 19 nt, Artificial Sequence
  Description of Artificial Sequence: Synthetic oligonucleotide
  Antisense strand to SEQ ID NO: 1015210
ucauacguagaucucccag

SEQ ID NO: 1015212 - RNA, 19 nt, Artificial Sequence
  Description of Artificial Sequence: Synthetic oligonucleotide
  Sense strand starting at position 268 of SEQ ID NO: 914585
gagaucuacguaugagaag

SEQ ID NO: 1015213 - RNA, 19 nt, Artificial Sequence
  Description of Artificial Sequence: Synthetic oligonucleotide
  Antisense strand to SEQ ID NO: 1015212
cuucucauacguagaucuc

SEQ ID NO: 1015214 - RNA, 19 nt, Artificial Sequence
  Description of Artificial Sequence: Synthetic oligonucleotide
  Sense strand starting at position 293 of SEQ ID NO: 914585
aggugugagcuugauaagu

SEQ ID NO: 1015215 - RNA, 19 nt, Artificial Sequence
  Description of Artificial Sequence: Synthetic oligonucleotide
  Antisense strand to SEQ ID NO: 1015214
acuuaucaagcucacaccu

SEQ ID NO: 1015216 - RNA, 19 nt, Artificial Sequence
  Description of Artificial Sequence: Synthetic oligonucleotide
  Sense strand starting at position 303 of SEQ ID NO: 914585
uugauaaguuaagcagagu

SEQ ID NO: 1015217 - RNA, 19 nt, Artificial Sequence
  Description of Artificial Sequence: Synthetic oligonucleotide
  Antisense strand to SEQ ID NO: 1015216
acucugcuuaacuuaucaa

SEQ ID NO: 1015218 - RNA, 19 nt, Artificial Sequence
  Description of Artificial Sequence: Synthetic oligonucleotide
  Sense strand starting at position 304 of SEQ ID NO: 914585
ugauaaguuaagcagaguu

SEQ ID NO: 1015219 - RNA, 19 nt, Artificial Sequence
  Description of Artificial Sequence: Synthetic oligonucleotide
  Antisense strand to SEQ ID NO: 1015218
aacucugcuuaacuuauca

SEQ ID NO: 1015220 - RNA, 19 nt, Artificial Sequence
  Description of Artificial Sequence: Synthetic oligonucleotide
  Sense strand starting at position 306 of SEQ ID NO: 914585
auaaguuaagcagaguuua

SEQ ID NO: 1015221 - RNA, 19 nt, Artificial Sequence
  Description of Artificial Sequence: Synthetic oligonucleotide
  Antisense strand to SEQ ID NO: 1015220
uaaacucugcuuaacuuau

SEQ ID NO: 1015222 - RNA, 19 nt, Artificial Sequence
  Description of Artificial Sequence: Synthetic oligonucleotide
  Sense strand starting at position 489 of SEQ ID NO: 914585
cuaauaagaugugcuguga

SEQ ID NO: 1015223 - RNA, 19 nt, Artificial Sequence
  Description of Artificial Sequence: Synthetic oligonucleotide
  Antisense strand to SEQ ID NO: 1015222
ucacagcacaucuuauuag

SEQ ID NO: 1015224 - RNA, 19 nt, Artificial Sequence
  Description of Artificial Sequence: Synthetic oligonucleotide
  Sense strand starting at position 521 of SEQ ID NO: 914585
gcuucugauggauguggau

SEQ ID NO: 1015225 - RNA, 19 nt, Artificial Sequence
  Description of Artificial Sequence: Synthetic oligonucleotide
  Antisense strand to SEQ ID NO: 1015224
auccacauccaucagaagc

SEQ ID NO: 1015226 - RNA, 19 nt, Artificial Sequence
  Description of Artificial Sequence: Synthetic oligonucleotide
  Sense strand starting at position 534 of SEQ ID NO: 914585
guggauugcagugacaaug

SEQ ID NO: 1015227 - RNA, 19 nt, Artificial Sequence
  Description of Artificial Sequence: Synthetic oligonucleotide
  Antisense strand to SEQ ID NO: 1015226
cauugucacugcaauccac

SEQ ID NO: 1015228 - RNA, 19 nt, Artificial Sequence
  Description of Artificial Sequence: Synthetic oligonucleotide
  Sense strand starting at position 544 of SEQ ID NO: 914585
gugacaaugucuccugaga

SEQ ID NO: 1015229 - RNA, 19 nt, Artificial Sequence
  Description of Artificial Sequence: Synthetic oligonucleotide
  Antisense strand to SEQ ID NO: 1015228
ucucaggagacauugucac

SEQ ID NO: 1015230 - RNA, 19 nt, Artificial Sequence
  Description of Artificial Sequence: Synthetic oligonucleotide
  Sense strand starting at position 595 of SEQ ID NO: 914585
guguuucuggagaguguua

SEQ ID NO: 1015231 - RNA, 19 nt, Artificial Sequence
  Description of Artificial Sequence: Synthetic oligonucleotide
  Antisense strand to SEQ ID NO: 1015230
uaacacucuccagaaacac

SEQ ID NO: 1015232 - RNA, 19 nt, Artificial Sequence
  Description of Artificial Sequence: Synthetic oligonucleotide
  Sense strand starting at position 606 of SEQ ID NO: 914585
gaguguuagcaguaacaau

SEQ ID NO: 1015233 - RNA, 19 nt, Artificial Sequence
  Description of Artificial Sequence: Synthetic oligonucleotide
  Antisense strand to SEQ ID NO: 1015232
auuguuacugcuaacacuc

SEQ ID NO: 1015234 - RNA, 19 nt, Artificial Sequence
  Description of Artificial Sequence: Synthetic oligonucleotide
  Sense strand starting at position 652 of SEQ ID NO: 914585
caaugaaccggugggagua

SEQ ID NO: 1015235 - RNA, 19 nt, Artificial Sequence
  Description of Artificial Sequence: Synthetic oligonucleotide
  Antisense strand to SEQ ID NO: 1015234
uacucccaccgguucauug

SEQ ID NO: 1015236 - RNA, 19 nt, Artificial Sequence
  Description of Artificial Sequence: Synthetic oligonucleotide
  Sense strand starting at position 902 of SEQ ID NO: 914585
auggguauuugagaaguug

SEQ ID NO: 1015237 - RNA, 19 nt, Artificial Sequence
  Description of Artificial Sequence: Synthetic oligonucleotide
  Antisense strand to SEQ ID NO: 1015236
caacuucucaaauacccau

SEQ ID NO: 1015238 - RNA, 19 nt, Artificial Sequence
  Description of Artificial Sequence: Synthetic oligonucleotide
  Sense strand starting at position 916 of SEQ ID NO: 914585
aguugacauaagcgacaau

SEQ ID NO: 1015239 - RNA, 19 nt, Artificial Sequence
  Description of Artificial Sequence: Synthetic oligonucleotide
  Antisense strand to SEQ ID NO: 1015238
auugucgcuuaugucaacu

SEQ ID NO: 1015240 - RNA, 19 nt, Artificial Sequence
  Description of Artificial Sequence: Synthetic oligonucleotide
  Sense strand starting at position 917 of SEQ ID NO: 914585
guugacauaagcgacaaua

SEQ ID NO: 1015241 - RNA, 19 nt, Artificial Sequence
  Description of Artificial Sequence: Synthetic oligonucleotide
  Antisense strand to SEQ ID NO: 1015240
uauugucgcuuaugucaac

SEQ ID NO: 1015242 - RNA, 19 nt, Artificial Sequence
  Description of Artificial Sequence: Synthetic oligonucleotide
  Sense strand starting at position 919 of SEQ ID NO: 914585
ugacauaagcgacaauauu

SEQ ID NO: 1015243 - RNA, 19 nt, Artificial Sequence
  Description of Artificial Sequence: Synthetic oligonucleotide
  Antisense strand to SEQ ID NO: 1015242
aauauugucgcuuauguca

SEQ ID NO: 1015244 - RNA, 19 nt, Artificial Sequence
  Description of Artificial Sequence: Synthetic oligonucleotide
  Sense strand starting at position 1069 of SEQ ID NO: 914585
gggauucugagcuggguau

SEQ ID NO: 1015245 - RNA, 19 nt, Artificial Sequence
  Description of Artificial Sequence: Synthetic oligonucleotide
  Antisense strand to SEQ ID NO: 1015244
auacccagcucagaauccc

SEQ ID NO: 1015246 - RNA, 19 nt, Artificial Sequence
  Description of Artificial Sequence: Synthetic oligonucleotide
  Sense strand starting at position 2871 of SEQ ID NO: 914585
gguggucccacucacgaua

SEQ ID NO: 1015247 - RNA, 19 nt, Artificial Sequence
  Description of Artificial Sequence: Synthetic oligonucleotide
  Antisense strand to SEQ ID NO: 1015246
uaucgugagugggaccacc

SEQ ID NO: 1015248 - RNA, 19 nt, Artificial Sequence
  Description of Artificial Sequence: Synthetic oligonucleotide
  Sense strand starting at position 2884 of SEQ ID NO: 914585
acgauauacucccuagaaa

SEQ ID NO: 1015249 - RNA, 19 nt, Artificial Sequence
  Description of Artificial Sequence: Synthetic oligonucleotide
  Antisense strand to SEQ ID NO: 1015248
uuucuagggaguauaucgu

SEQ ID NO: 1015250 - RNA, 19 nt, Artificial Sequence
  Description of Artificial Sequence: Synthetic oligonucleotide
  Sense strand starting at position 3062 of SEQ ID NO: 914585
gcgaguagacugugagaaa

SEQ ID NO: 1015251 - RNA, 19 nt, Artificial Sequence
  Description of Artificial Sequence: Synthetic oligonucleotide
  Antisense strand to SEQ ID NO: 1015250
uuucucacagucuacucgc

SEQ ID NO: 1015252 - RNA, 19 nt, Artificial Sequence
  Description of Artificial Sequence: Synthetic oligonucleotide
  Sense strand starting at position 3126 of SEQ ID NO: 914585
ucaggaacuucuguggaga

SEQ ID NO: 1015253 - RNA, 19 nt, Artificial Sequence
  Description of Artificial Sequence: Synthetic oligonucleotide
  Antisense strand to SEQ ID NO: 1015252
ucuccacagaaguuccuga

SEQ ID NO: 1015254 - RNA, 19 nt, Artificial Sequence
  Description of Artificial Sequence: Synthetic oligonucleotide
  Sense strand starting at position 3308 of SEQ ID NO: 914585
gguucguaugaggagauga

SEQ ID NO: 1015255 - RNA, 19 nt, Artificial Sequence
  Description of Artificial Sequence: Synthetic oligonucleotide
  Antisense strand to SEQ ID NO: 1015254
ucaucuccucauacgaacc

SEQ ID NO: 1015256 - RNA, 19 nt, Artificial Sequence
  Description of Artificial Sequence: Synthetic oligonucleotide
  Sense strand starting at position 3319 of SEQ ID NO: 914585
ggagaugaugacugugacu

SEQ ID NO: 1015257 - RNA, 19 nt, Artificial Sequence
  Description of Artificial Sequence: Synthetic oligonucleotide
  Antisense strand to SEQ ID NO: 1015256
agucacagucaucaucucc

SEQ ID NO: 1015258 - RNA, 19 nt, Artificial Sequence
  Description of Artificial Sequence: Synthetic oligonucleotide
  Sense strand starting at position 3321 of SEQ ID NO: 914585
agaugaugacugugacuug

SEQ ID NO: 1015259 - RNA, 19 nt, Artificial Sequence
  Description of Artificial Sequence: Synthetic oligonucleotide
  Antisense strand to SEQ ID NO: 1015258
caagucacagucaucaucu

SEQ ID NO: 1015260 - RNA, 19 nt, Artificial Sequence
  Description of Artificial Sequence: Synthetic oligonucleotide
  Sense strand starting at position 3369 of SEQ ID NO: 914585
uagguaggucugcaacuua

SEQ ID NO: 1015261 - RNA, 19 nt, Artificial Sequence
  Description of Artificial Sequence: Synthetic oligonucleotide
  Antisense strand to SEQ ID NO: 1015260
uaaguugcagaccuaccua

SEQ ID NO: 1015262 - RNA, 19 nt, Artificial Sequence
  Description of Artificial Sequence: Synthetic oligonucleotide
  Sense strand starting at position 3417 of SEQ ID NO: 914585
uugggagucaucugcaaau

SEQ ID NO: 1015263 - RNA, 19 nt, Artificial Sequence
  Description of Artificial Sequence: Synthetic oligonucleotide
  Antisense strand to SEQ ID NO: 1015262
auuugcagaugacucccaa

SEQ ID NO: 1015264 - RNA, 19 nt, Artificial Sequence
  Description of Artificial Sequence: Synthetic oligonucleotide
  Sense strand starting at position 3437 of SEQ ID NO: 914585
ccguauaagcuugaauaua

SEQ ID NO: 1015265 - RNA, 19 nt, Artificial Sequence
  Description of Artificial Sequence: Synthetic oligonucleotide
  Antisense strand to SEQ ID NO: 1015264
uauauucaagcuuauacgg

SEQ ID NO: 1015266 - RNA, 19 nt, Artificial Sequence
  Description of Artificial Sequence: Synthetic oligonucleotide
  Sense strand starting at position 3447 of SEQ ID NO: 914585
uugaauauagggugaaguu

SEQ ID NO: 1015267 - RNA, 19 nt, Artificial Sequence
  Description of Artificial Sequence: Synthetic oligonucleotide
  Antisense strand to SEQ ID NO: 1015266
aacuucacccuauauucaa

SEQ ID NO: 1015268 - RNA, 19 nt, Artificial Sequence
  Description of Artificial Sequence: Synthetic oligonucleotide
  Sense strand starting at position 3507 of SEQ ID NO: 914585
ggaguaaccuuauauuuga

SEQ ID NO: 1015269 - RNA, 19 nt, Artificial Sequence
  Description of Artificial Sequence: Synthetic oligonucleotide
  Antisense strand to SEQ ID NO: 1015268
ucaaauauaagguuacucc

SEQ ID NO: 1015270 - RNA, 19 nt, Artificial Sequence
  Description of Artificial Sequence: Synthetic oligonucleotide
  Sense strand starting at position 3606 of SEQ ID NO: 914585
ugguauggugacuaagcuu

SEQ ID NO: 1015271 - RNA, 19 nt, Artificial Sequence
  Description of Artificial Sequence: Synthetic oligonucleotide
  Antisense strand to SEQ ID NO: 1015270
aagcuuagucaccauacca

SEQ ID NO: 1015272 - RNA, 19 nt, Artificial Sequence
  Description of Artificial Sequence: Synthetic oligonucleotide
  Sense strand starting at position 3795 of SEQ ID NO: 914585
uaugguaaguguccaauaa

SEQ ID NO: 1015273 - RNA, 19 nt, Artificial Sequence
  Description of Artificial Sequence: Synthetic oligonucleotide
  Antisense strand to SEQ ID NO: 1015272
uuauuggacacuuaccaua

SEQ ID NO: 1015274 - RNA, 19 nt, Artificial Sequence
  Description of Artificial Sequence: Synthetic oligonucleotide
  Sense strand starting at position 3799 of SEQ ID NO: 914585
guaaguguccaauaaaugc

SEQ ID NO: 1015275 - RNA, 19 nt, Artificial Sequence
  Description of Artificial Sequence: Synthetic oligonucleotide
  Antisense strand to SEQ ID NO: 1015274
gcauuuauuggacacuuac

SEQ ID NO: 1015276 - RNA, 19 nt, Artificial Sequence
  Description of Artificial Sequence: Synthetic oligonucleotide
  Sense strand starting at position 3881 of SEQ ID NO: 914585
gauguauuguagucaaaga

SEQ ID NO: 1015277 - RNA, 19 nt, Artificial Sequence
  Description of Artificial Sequence: Synthetic oligonucleotide
  Antisense strand to SEQ ID NO: 1015276
ucuuugacuacaauacauc

SEQ ID NO: 1015278 - RNA, 19 nt, Artificial Sequence
  Description of Artificial Sequence: Synthetic oligonucleotide
  Sense strand starting at position 3927 of SEQ ID NO: 914585
cugguaguaugaccucaua

SEQ ID NO: 1015279 - RNA, 19 nt, Artificial Sequence
  Description of Artificial Sequence: Synthetic oligonucleotide
  Antisense strand to SEQ ID NO: 1015278
uaugaggucauacuaccag

SEQ ID NO: 1015280 - RNA, 19 nt, Artificial Sequence
  Description of Artificial Sequence: Synthetic oligonucleotide
  Sense strand starting at position 3930 of SEQ ID NO: 914585
guaguaugaccucauaauc

SEQ ID NO: 1015281 - RNA, 19 nt, Artificial Sequence
  Description of Artificial Sequence: Synthetic oligonucleotide
  Antisense strand to SEQ ID NO: 1015280
gauuaugaggucauacuac

SEQ ID NO: 1015282 - RNA, 19 nt, Artificial Sequence
  Description of Artificial Sequence: Synthetic oligonucleotide
  Sense strand starting at position 519 of SEQ ID NO: 914586
ggcugaggcagguagaaua

SEQ ID NO: 1015283 - RNA, 19 nt, Artificial Sequence
  Description of Artificial Sequence: Synthetic oligonucleotide
  Antisense strand to SEQ ID NO: 1015282
uauucuaccugccucagcc

SEQ ID NO: 1015284 - RNA, 19 nt, Artificial Sequence
  Description of Artificial Sequence: Synthetic oligonucleotide
  Sense strand starting at position 819 of SEQ ID NO: 914586
ccucacuaguuccuggaau

SEQ ID NO: 1015285 - RNA, 19 nt, Artificial Sequence
  Description of Artificial Sequence: Synthetic oligonucleotide
  Antisense strand to SEQ ID NO: 1015284
auuccaggaacuagugagg

SEQ ID NO: 1015286 - RNA, 19 nt, Artificial Sequence
  Description of Artificial Sequence: Synthetic oligonucleotide
  Sense strand starting at position 905 of SEQ ID NO: 914586
ucugucucgccagaaauau

SEQ ID NO: 1015287 - RNA, 19 nt, Artificial Sequence
  Description of Artificial Sequence: Synthetic oligonucleotide
  Antisense strand to SEQ ID NO: 1015286
auauuucuggcgagacaga

SEQ ID NO: 1015288 - RNA, 19 nt, Artificial Sequence
  Description of Artificial Sequence: Synthetic oligonucleotide
  Sense strand starting at position 916 of SEQ ID NO: 914586
agaaauauuccguaguccu

SEQ ID NO: 1015289 - RNA, 19 nt, Artificial Sequence
  Description of Artificial Sequence: Synthetic oligonucleotide
  Antisense strand to SEQ ID NO: 1015288
aggacuacggaauauuucu

SEQ ID NO: 1015290 - RNA, 19 nt, Artificial Sequence
  Description of Artificial Sequence: Synthetic oligonucleotide
  Sense strand starting at position 919 of SEQ ID NO: 914586
aauauuccguaguccugaa

SEQ ID NO: 1015291 - RNA, 19 nt, Artificial Sequence
  Description of Artificial Sequence: Synthetic oligonucleotide
  Antisense strand to SEQ ID NO: 1015290
uucaggacuacggaauauu

SEQ ID NO: 1015292 - RNA, 19 nt, Artificial Sequence
  Description of Artificial Sequence: Synthetic oligonucleotide
  Sense strand starting at position 923 of SEQ ID NO: 914586
uuccguaguccugaagauc

SEQ ID NO: 1015293 - RNA, 19 nt, Artificial Sequence
  Description of Artificial Sequence: Synthetic oligonucleotide
  Antisense strand to SEQ ID NO: 1015292
gaucuucaggacuacggaa

SEQ ID NO: 1015294 - RNA, 19 nt, Artificial Sequence
  Description of Artificial Sequence: Synthetic oligonucleotide
  Sense strand starting at position 985 of SEQ ID NO: 914586
gugucuggcaugcaugaaa

SEQ ID NO: 1015295 - RNA, 19 nt, Artificial Sequence
  Description of Artificial Sequence: Synthetic oligonucleotide
  Antisense strand to SEQ ID NO: 1015294
uuucaugcaugccagacac

SEQ ID NO: 1015296 - RNA, 19 nt, Artificial Sequence
  Description of Artificial Sequence: Synthetic oligonucleotide
  Sense strand starting at position 1008 of SEQ ID NO: 914586
gugcguagaacugaauuaa

SEQ ID NO: 1015297 - RNA, 19 nt, Artificial Sequence
  Description of Artificial Sequence: Synthetic oligonucleotide
  Antisense strand to SEQ ID NO: 1015296
uuaauucaguucuacgcac

SEQ ID NO: 1015298 - RNA, 19 nt, Artificial Sequence
  Description of Artificial Sequence: Synthetic oligonucleotide
  Sense strand starting at position 1035 of SEQ ID NO: 914586
auauauuguucuccuguua

SEQ ID NO: 1015299 - RNA, 19 nt, Artificial Sequence
  Description of Artificial Sequence: Synthetic oligonucleotide
  Antisense strand to SEQ ID NO: 1015298
uaacaggagaacaauauau

SEQ ID NO: 1015300 - RNA, 19 nt, Artificial Sequence
  Description of Artificial Sequence: Synthetic oligonucleotide
  Sense strand starting at position 1065 of SEQ ID NO: 914586
gcguaaggcagagaucaca

SEQ ID NO: 1015301 - RNA, 19 nt, Artificial Sequence
  Description of Artificial Sequence: Synthetic oligonucleotide
  Antisense strand to SEQ ID NO: 1015300
ugugaucucugccuuacgc

SEQ ID NO: 1015302 - RNA, 19 nt, Artificial Sequence
  Description of Artificial Sequence: Synthetic oligonucleotide
  Sense strand starting at position 1150 of SEQ ID NO: 914586
cuagucccuguauacauaa

SEQ ID NO: 1015303 - RNA, 19 nt, Artificial Sequence
  Description of Artificial Sequence: Synthetic oligonucleotide
  Antisense strand to SEQ ID NO: 1015302
uuauguauacagggacuag

SEQ ID NO: 1015304 - RNA, 19 nt, Artificial Sequence
  Description of Artificial Sequence: Synthetic oligonucleotide
  Sense strand starting at position 1188 of SEQ ID NO: 914586
gggaauguaacaugugauc

SEQ ID NO: 1015305 - RNA, 19 nt, Artificial Sequence
  Description of Artificial Sequence: Synthetic oligonucleotide
  Antisense strand to SEQ ID NO: 1015304
gaucacauguuacauuccc

SEQ ID NO: 1015306 - RNA, 19 nt, Artificial Sequence
  Description of Artificial Sequence: Synthetic oligonucleotide
  Sense strand starting at position 1193 of SEQ ID NO: 914586
uguaacaugugaucuuuaa

SEQ ID NO: 1015307 - RNA, 19 nt, Artificial Sequence
  Description of Artificial Sequence: Synthetic oligonucleotide
  Antisense strand to SEQ ID NO: 1015306
uuaaagaucacauguuaca

SEQ ID NO: 1015308 - RNA, 19 nt, Artificial Sequence
  Description of Artificial Sequence: Synthetic oligonucleotide
  Sense strand starting at position 1197 of SEQ ID NO: 914586
acaugugaucuuuaaucug

SEQ ID NO: 1015309 - RNA, 19 nt, Artificial Sequence
  Description of Artificial Sequence: Synthetic oligonucleotide
  Antisense strand to SEQ ID NO: 1015308
cagauuaaagaucacaugu

SEQ ID NO: 1015310 - RNA, 19 nt, Artificial Sequence
  Description of Artificial Sequence: Synthetic oligonucleotide
  Sense strand starting at position 1200 of SEQ ID NO: 914586
ugugaucuuuaaucugcaa

SEQ ID NO: 1015311 - RNA, 19 nt, Artificial Sequence
  Description of Artificial Sequence: Synthetic oligonucleotide
  Antisense strand to SEQ ID NO: 1015310
uugcagauuaaagaucaca

SEQ ID NO: 1015312 - RNA, 19 nt, Artificial Sequence
  Description of Artificial Sequence: Synthetic oligonucleotide
  Sense strand starting at position 1220 of SEQ ID NO: 914586
gcacucucccaguagauau

SEQ ID NO: 1015313 - RNA, 19 nt, Artificial Sequence
  Description of Artificial Sequence: Synthetic oligonucleotide
  Antisense strand to SEQ ID NO: 1015312
auaucuacugggagagugc

SEQ ID NO: 1015314 - RNA, 19 nt, Artificial Sequence
  Description of Artificial Sequence: Synthetic oligonucleotide
  Sense strand starting at position 1230 of SEQ ID NO: 914586
aguagauauuucuagugga

SEQ ID NO: 1015315 - RNA, 19 nt, Artificial Sequence
  Description of Artificial Sequence: Synthetic oligonucleotide
  Antisense strand to SEQ ID NO: 1015314
uccacuagaaauaucuacu

SEQ ID NO: 1015316 - RNA, 19 nt, Artificial Sequence
  Description of Artificial Sequence: Synthetic oligonucleotide
  Sense strand starting at position 1233 of SEQ ID NO: 914586
agauauuucuaguggagac

SEQ ID NO: 1015317 - RNA, 19 nt, Artificial Sequence
  Description of Artificial Sequence: Synthetic oligonucleotide
  Antisense strand to SEQ ID NO: 1015316
gucuccacuagaaauaucu

SEQ ID NO: 1015318 - RNA, 19 nt, Artificial Sequence
  Description of Artificial Sequence: Synthetic oligonucleotide
  Sense strand starting at position 1259 of SEQ ID NO: 914586
aaauuagagcuagaugugu

SEQ ID NO: 1015319 - RNA, 19 nt, Artificial Sequence
  Description of Artificial Sequence: Synthetic oligonucleotide
  Antisense strand to SEQ ID NO: 1015318
acacaucuagcucuaauuu

SEQ ID NO: 1015320 - RNA, 19 nt, Artificial Sequence
  Description of Artificial Sequence: Synthetic oligonucleotide
  Sense strand starting at position 1359 of SEQ ID NO: 914586
gagugauaaugauugguau

SEQ ID NO: 1015321 - RNA, 19 nt, Artificial Sequence
  Description of Artificial Sequence: Synthetic oligonucleotide
  Antisense strand to SEQ ID NO: 1015320
auaccaaucauuaucacuc

SEQ ID NO: 1015322 - RNA, 19 nt, Artificial Sequence
  Description of Artificial Sequence: Synthetic oligonucleotide
  Sense strand starting at position 1360 of SEQ ID NO: 914586
agugauaaugauugguauu

SEQ ID NO: 1015323 - RNA, 19 nt, Artificial Sequence
  Description of Artificial Sequence: Synthetic oligonucleotide
  Antisense strand to SEQ ID NO: 1015322
aauaccaaucauuaucacu

SEQ ID NO: 1015324 - RNA, 19 nt, Artificial Sequence
  Description of Artificial Sequence: Synthetic oligonucleotide
  Sense strand starting at position 1419 of SEQ ID NO: 914586
cgaugauugguucacugcu

SEQ ID NO: 1015325 - RNA, 19 nt, Artificial Sequence
  Description of Artificial Sequence: Synthetic oligonucleotide
  Antisense strand to SEQ ID NO: 1015324
agcagugaaccaaucaucg

SEQ ID NO: 1015326 - RNA, 19 nt, Artificial Sequence
  Description of Artificial Sequence: Synthetic oligonucleotide
  Sense strand starting at position 2019 of SEQ ID NO: 914586
uggagcccuuguuugaaua

SEQ ID NO: 1015327 - RNA, 19 nt, Artificial Sequence
  Description of Artificial Sequence: Synthetic oligonucleotide
  Antisense strand to SEQ ID NO: 1015326
uauucaaacaagggcucca

SEQ ID NO: 1015328 - RNA, 19 nt, Artificial Sequence
  Description of Artificial Sequence: Synthetic oligonucleotide
  Sense strand starting at position 2118 of SEQ ID NO: 914586
uugauuccuuggucgauuu

SEQ ID NO: 1015329 - RNA, 19 nt, Artificial Sequence
  Description of Artificial Sequence: Synthetic oligonucleotide
  Antisense strand to SEQ ID NO: 1015328
aaaucgaccaaggaaucaa

SEQ ID NO: 1015330 - RNA, 19 nt, Artificial Sequence
  Description of Artificial Sequence: Synthetic oligonucleotide
  Sense strand starting at position 2220 of SEQ ID NO: 914586
uuuguagacucaguacuuu

SEQ ID NO: 1015331 - RNA, 19 nt, Artificial Sequence
  Description of Artificial Sequence: Synthetic oligonucleotide
  Antisense strand to SEQ ID NO: 1015330
aaaguacugagucuacaaa

SEQ ID NO: 1015332 - RNA, 19 nt, Artificial Sequence
  Description of Artificial Sequence: Synthetic oligonucleotide
  Sense strand starting at position 2340 of SEQ ID NO: 914586
cuguauuucugcccugcua

SEQ ID NO: 1015333 - RNA, 19 nt, Artificial Sequence
  Description of Artificial Sequence: Synthetic oligonucleotide
  Antisense strand to SEQ ID NO: 1015332
uagcagggcagaaauacag

SEQ ID NO: 1015334 - RNA, 19 nt, Artificial Sequence
  Description of Artificial Sequence: Synthetic oligonucleotide
  Sense strand starting at position 2351 of SEQ ID NO: 914586
cccugcuacccagggauau

SEQ ID NO: 1015335 - RNA, 19 nt, Artificial Sequence
  Description of Artificial Sequence: Synthetic oligonucleotide
  Antisense strand to SEQ ID NO: 1015334
auaucccuggguagcaggg

SEQ ID NO: 1015336 - RNA, 19 nt, Artificial Sequence
  Description of Artificial Sequence: Synthetic oligonucleotide
  Sense strand starting at position 2364 of SEQ ID NO: 914586
ggauaugauuugcaguaug

SEQ ID NO: 1015337 - RNA, 19 nt, Artificial Sequence
  Description of Artificial Sequence: Synthetic oligonucleotide
  Antisense strand to SEQ ID NO: 1015336
cauacugcaaaucauaucc

SEQ ID NO: 1015338 - RNA, 19 nt, Artificial Sequence
  Description of Artificial Sequence: Synthetic oligonucleotide
  Sense strand starting at position 2474 of SEQ ID NO: 914586
gguuucuuuggugaccauu

SEQ ID NO: 1015339 - RNA, 19 nt, Artificial Sequence
  Description of Artificial Sequence: Synthetic oligonucleotide
  Antisense strand to SEQ ID NO: 1015338
aauggucaccaaagaaacc

SEQ ID NO: 1015340 - RNA, 19 nt, Artificial Sequence
  Description of Artificial Sequence: Synthetic oligonucleotide
  Sense strand starting at position 2485 of SEQ ID NO: 914586
ugaccauuguuucugguua

SEQ ID NO: 1015341 - RNA, 19 nt, Artificial Sequence
  Description of Artificial Sequence: Synthetic oligonucleotide
  Antisense strand to SEQ ID NO: 1015340
uaaccagaaacaaugguca

SEQ ID NO: 1015342 - RNA, 19 nt, Artificial Sequence
  Description of Artificial Sequence: Synthetic oligonucleotide
  Sense strand starting at position 2542 of SEQ ID NO: 914586
uugugaagaguugguacuu

SEQ ID NO: 1015343 - RNA, 19 nt, Artificial Sequence
  Description of Artificial Sequence: Synthetic oligonucleotide
  Antisense strand to SEQ ID NO: 1015342
aaguaccaacucuucacaa

SEQ ID NO: 1015344 - RNA, 19 nt, Artificial Sequence
  Description of Artificial Sequence: Synthetic oligonucleotide
  Sense strand starting at position 2543 of SEQ ID NO: 914586
ugugaagaguugguacuua

SEQ ID NO: 1015345 - RNA, 19 nt, Artificial Sequence
  Description of Artificial Sequence: Synthetic oligonucleotide
  Antisense strand to SEQ ID NO: 1015344
uaaguaccaacucuucaca

SEQ ID NO: 1015346 - RNA, 19 nt, Artificial Sequence
  Description of Artificial Sequence: Synthetic oligonucleotide
  Sense strand starting at position 2547 of SEQ ID NO: 914586
aagaguugguacuuacgga

SEQ ID NO: 1015347 - RNA, 19 nt, Artificial Sequence
  Description of Artificial Sequence: Synthetic oligonucleotide
  Antisense strand to SEQ ID NO: 1015346
uccguaaguaccaacucuu

SEQ ID NO: 1015348 - RNA, 19 nt, Artificial Sequence
  Description of Artificial Sequence: Synthetic oligonucleotide
  Sense strand starting at position 2773 of SEQ ID NO: 914586
gaguauuguagugagccga

SEQ ID NO: 1015349 - RNA, 19 nt, Artificial Sequence
  Description of Artificial Sequence: Synthetic oligonucleotide
  Antisense strand to SEQ ID NO: 1015348
ucggcucacuacaauacuc

SEQ ID NO: 1015350 - RNA, 19 nt, Artificial Sequence
  Description of Artificial Sequence: Synthetic oligonucleotide
  Sense strand starting at position 2853 of SEQ ID NO: 914586
aagaguugguacuuacauc

SEQ ID NO: 1015351 - RNA, 19 nt, Artificial Sequence
  Description of Artificial Sequence: Synthetic oligonucleotide
  Antisense strand to SEQ ID NO: 1015350
gauguaaguaccaacucuu

SEQ ID NO: 1015352 - RNA, 19 nt, Artificial Sequence
  Description of Artificial Sequence: Synthetic oligonucleotide
  Sense strand starting at position 2896 of SEQ ID NO: 914586
uugccagugauuugaguuu

SEQ ID NO: 1015353 - RNA, 19 nt, Artificial Sequence
  Description of Artificial Sequence: Synthetic oligonucleotide
  Antisense strand to SEQ ID NO: 1015352
aaacucaaaucacuggcaa

SEQ ID NO: 1015354 - RNA, 19 nt, Artificial Sequence
  Description of Artificial Sequence: Synthetic oligonucleotide
  Sense strand starting at position 2924 of SEQ ID NO: 914586
gacagaucucaugggugug

SEQ ID NO: 1015355 - RNA, 19 nt, Artificial Sequence
  Description of Artificial Sequence: Synthetic oligonucleotide
  Antisense strand to SEQ ID NO: 1015354
cacacccaugagaucuguc

SEQ ID NO: 1015356 - RNA, 19 nt, Artificial Sequence
  Description of Artificial Sequence: Synthetic oligonucleotide
  Sense strand starting at position 2927 of SEQ ID NO: 914586
agaucucauggguguggga

SEQ ID NO: 1015357 - RNA, 19 nt, Artificial Sequence
  Description of Artificial Sequence: Synthetic oligonucleotide
  Antisense strand to SEQ ID NO: 1015356
ucccacacccaugagaucu

SEQ ID NO: 1015358 - RNA, 19 nt, Artificial Sequence
  Description of Artificial Sequence: Synthetic oligonucleotide
  Sense strand starting at position 3422 of SEQ ID NO: 914586
gugugugaugcagaaagca

SEQ ID NO: 1015359 - RNA, 19 nt, Artificial Sequence
  Description of Artificial Sequence: Synthetic oligonucleotide
  Antisense strand to SEQ ID NO: 1015358
ugcuuucugcaucacacac

SEQ ID NO: 1015360 - RNA, 19 nt, Artificial Sequence
  Description of Artificial Sequence: Synthetic oligonucleotide
  Sense strand starting at position 3758 of SEQ ID NO: 914586
aauugagagccaugaaguc

SEQ ID NO: 1015361 - RNA, 19 nt, Artificial Sequence
  Description of Artificial Sequence: Synthetic oligonucleotide
  Antisense strand to SEQ ID NO: 1015360
gacuucauggcucucaauu

SEQ ID NO: 1015362 - RNA, 19 nt, Artificial Sequence
  Description of Artificial Sequence: Synthetic oligonucleotide
  Sense strand starting at position 15 of SEQ ID NO: 914587
uuaagauggccaugauaua

SEQ ID NO: 1015363 - RNA, 19 nt, Artificial Sequence
  Description of Artificial Sequence: Synthetic oligonucleotide
  Antisense strand to SEQ ID NO: 1015362
uauaucauggccaucuuaa

SEQ ID NO: 1015364 - RNA, 19 nt, Artificial Sequence
  Description of Artificial Sequence: Synthetic oligonucleotide
  Sense strand starting at position 117 of SEQ ID NO: 914587
acaagagguguauguauca

SEQ ID NO: 1015365 - RNA, 19 nt, Artificial Sequence
  Description of Artificial Sequence: Synthetic oligonucleotide
  Antisense strand to SEQ ID NO: 1015364
ugauacauacaccucuugu

SEQ ID NO: 1015366 - RNA, 19 nt, Artificial Sequence
  Description of Artificial Sequence: Synthetic oligonucleotide
  Sense strand starting at position 223 of SEQ ID NO: 914587
agaugcagacuauguaagu

SEQ ID NO: 1015367 - RNA, 19 nt, Artificial Sequence
  Description of Artificial Sequence: Synthetic oligonucleotide
  Antisense strand to SEQ ID NO: 1015366
acuuacauagucugcaucu

SEQ ID NO: 1015368 - RNA, 19 nt, Artificial Sequence
  Description of Artificial Sequence: Synthetic oligonucleotide
  Sense strand starting at position 239 of SEQ ID NO: 914587
agucaucuaccucacaguu

SEQ ID NO: 1015369 - RNA, 19 nt, Artificial Sequence
  Description of Artificial Sequence: Synthetic oligonucleotide
  Antisense strand to SEQ ID NO: 1015368
aacugugagguagaugacu

SEQ ID NO: 1015370 - RNA, 19 nt, Artificial Sequence
  Description of Artificial Sequence: Synthetic oligonucleotide
  Sense strand starting at position 261 of SEQ ID NO: 914587
gcagaucucucuuuaagga

SEQ ID NO: 1015371 - RNA, 19 nt, Artificial Sequence
  Description of Artificial Sequence: Synthetic oligonucleotide
  Antisense strand to SEQ ID NO: 1015370
uccuuaaagagagaucugc

SEQ ID NO: 1015372 - RNA, 19 nt, Artificial Sequence
  Description of Artificial Sequence: Synthetic oligonucleotide
  Sense strand starting at position 357 of SEQ ID NO: 914587
agugccaaccauugaugaa

SEQ ID NO: 1015373 - RNA, 19 nt, Artificial Sequence
  Description of Artificial Sequence: Synthetic oligonucleotide
  Antisense strand to SEQ ID NO: 1015372
uucaucaaugguuggcacu

SEQ ID NO: 1015374 - RNA, 19 nt, Artificial Sequence
  Description of Artificial Sequence: Synthetic oligonucleotide
  Sense strand starting at position 776 of SEQ ID NO: 914587
cugugaugccuccaugaua

SEQ ID NO: 1015375 - RNA, 19 nt, Artificial Sequence
  Description of Artificial Sequence: Synthetic oligonucleotide
  Antisense strand to SEQ ID NO: 1015374
uaucauggaggcaucacag

SEQ ID NO: 1015376 - RNA, 19 nt, Artificial Sequence
  Description of Artificial Sequence: Synthetic oligonucleotide
  Sense strand starting at position 844 of SEQ ID NO: 914587
cuuucuuaccaguaggaca

SEQ ID NO: 1015377 - RNA, 19 nt, Artificial Sequence
  Description of Artificial Sequence: Synthetic oligonucleotide
  Antisense strand to SEQ ID NO: 1015376
uguccuacugguaagaaag

SEQ ID NO: 1015378 - RNA, 19 nt, Artificial Sequence
  Description of Artificial Sequence: Synthetic oligonucleotide
  Sense strand starting at position 1114 of SEQ ID NO: 914587
ccaagacaguugucaagau

SEQ ID NO: 1015379 - RNA, 19 nt, Artificial Sequence
  Description of Artificial Sequence: Synthetic oligonucleotide
  Antisense strand to SEQ ID NO: 1015378
aucuugacaacugucuugg

SEQ ID NO: 1015380 - RNA, 19 nt, Artificial Sequence
  Description of Artificial Sequence: Synthetic oligonucleotide
  Sense strand starting at position 1118 of SEQ ID NO: 914587
gacaguugucaagauuccu

SEQ ID NO: 1015381 - RNA, 19 nt, Artificial Sequence
  Description of Artificial Sequence: Synthetic oligonucleotide
  Antisense strand to SEQ ID NO: 1015380
aggaaucuugacaacuguc

SEQ ID NO: 1015382 - RNA, 19 nt, Artificial Sequence
  Description of Artificial Sequence: Synthetic oligonucleotide
  Sense strand starting at position 1440 of SEQ ID NO: 914587
acagccuagcucgaucaaa

SEQ ID NO: 1015383 - RNA, 19 nt, Artificial Sequence
  Description of Artificial Sequence: Synthetic oligonucleotide
  Antisense strand to SEQ ID NO: 1015382
uuugaucgagcuaggcugu

SEQ ID NO: 1015384 - RNA, 19 nt, Artificial Sequence
  Description of Artificial Sequence: Synthetic oligonucleotide
  Sense strand starting at position 1515 of SEQ ID NO: 914587
ccaguuguccagcaaagga

SEQ ID NO: 1015385 - RNA, 19 nt, Artificial Sequence
  Description of Artificial Sequence: Synthetic oligonucleotide
  Antisense strand to SEQ ID NO: 1015384
uccuuugcuggacaacugg

SEQ ID NO: 1015386 - RNA, 19 nt, Artificial Sequence
  Description of Artificial Sequence: Synthetic oligonucleotide
  Sense strand starting at position 2095 of SEQ ID NO: 914587
ggcaguccgcggaauucuu

SEQ ID NO: 1015387 - RNA, 19 nt, Artificial Sequence
  Description of Artificial Sequence: Synthetic oligonucleotide
  Antisense strand to SEQ ID NO: 1015386
aagaauuccgcggacugcc

SEQ ID NO: 1015388 - RNA, 19 nt, Artificial Sequence
  Description of Artificial Sequence: Synthetic oligonucleotide
  Sense strand starting at position 2257 of SEQ ID NO: 914587
ugagcucuuccacacgaua

SEQ ID NO: 1015389 - RNA, 19 nt, Artificial Sequence
  Description of Artificial Sequence: Synthetic oligonucleotide
  Antisense strand to SEQ ID NO: 1015388
uaucguguggaagagcuca

SEQ ID NO: 1015390 - RNA, 19 nt, Artificial Sequence
  Description of Artificial Sequence: Synthetic oligonucleotide
  Sense strand starting at position 2463 of SEQ ID NO: 914587
gugacugcgacucaguaga

SEQ ID NO: 1015391 - RNA, 19 nt, Artificial Sequence
  Description of Artificial Sequence: Synthetic oligonucleotide
  Antisense strand to SEQ ID NO: 1015390
ucuacugagucgcagucac

SEQ ID NO: 1015392 - RNA, 19 nt, Artificial Sequence
  Description of Artificial Sequence: Synthetic oligonucleotide
  Sense strand starting at position 2465 of SEQ ID NO: 914587
gacugcgacucaguagaga

SEQ ID NO: 1015393 - RNA, 19 nt, Artificial Sequence
  Description of Artificial Sequence: Synthetic oligonucleotide
  Antisense strand to SEQ ID NO: 1015392
ucucuacugagucgcaguc

SEQ ID NO: 1015394 - RNA, 19 nt, Artificial Sequence
  Description of Artificial Sequence: Synthetic oligonucleotide
  Sense strand starting at position 2548 of SEQ ID NO: 914587
cuccacuuagguggaaaua

SEQ ID NO: 1015395 - RNA, 19 nt, Artificial Sequence
  Description of Artificial Sequence: Synthetic oligonucleotide
  Antisense strand to SEQ ID NO: 1015394
uauuuccaccuaaguggag

SEQ ID NO: 1015396 - RNA, 19 nt, Artificial Sequence
  Description of Artificial Sequence: Synthetic oligonucleotide
  Sense strand starting at position 2580 of SEQ ID NO: 914587
augguuauuguauguaaag

SEQ ID NO: 1015397 - RNA, 19 nt, Artificial Sequence
  Description of Artificial Sequence: Synthetic oligonucleotide
  Antisense strand to SEQ ID NO: 1015396
cuuuacauacaauaaccau

SEQ ID NO: 1015398 - RNA, 19 nt, Artificial Sequence
  Description of Artificial Sequence: Synthetic oligonucleotide
  Sense strand starting at position 2581 of SEQ ID NO: 914587
ugguuauuguauguaaaga

SEQ ID NO: 1015399 - RNA, 19 nt, Artificial Sequence
  Description of Artificial Sequence: Synthetic oligonucleotide
  Antisense strand to SEQ ID NO: 1015398
ucuuuacauacaauaacca

SEQ ID NO: 1015400 - RNA, 19 nt, Artificial Sequence
  Description of Artificial Sequence: Synthetic oligonucleotide
  Sense strand starting at position 2582 of SEQ ID NO: 914587
gguuauuguauguaaagac

SEQ ID NO: 1015401 - RNA, 19 nt, Artificial Sequence
  Description of Artificial Sequence: Synthetic oligonucleotide
  Antisense strand to SEQ ID NO: 1015400
gucuuuacauacaauaacc

SEQ ID NO: 1015402 - RNA, 19 nt, Artificial Sequence
  Description of Artificial Sequence: Synthetic oligonucleotide
  Sense strand starting at position 2604 of SEQ ID NO: 914587
guagaaagucguuaguaau

SEQ ID NO: 1015403 - RNA, 19 nt, Artificial Sequence
  Description of Artificial Sequence: Synthetic oligonucleotide
  Antisense strand to SEQ ID NO: 1015402
auuacuaacgacuuucuac

SEQ ID NO: 1015404 - RNA, 19 nt, Artificial Sequence
  Description of Artificial Sequence: Synthetic oligonucleotide
  Sense strand starting at position 2672 of SEQ ID NO: 914587
aaagucuuugaguaauagu

SEQ ID NO: 1015405 - RNA, 19 nt, Artificial Sequence
  Description of Artificial Sequence: Synthetic oligonucleotide
  Antisense strand to SEQ ID NO: 1015404
acuauuacucaaagacuuu

SEQ ID NO: 1015406 - RNA, 19 nt, Artificial Sequence
  Description of Artificial Sequence: Synthetic oligonucleotide
  Sense strand starting at position 2679 of SEQ ID NO: 914587
uugaguaauaguugaagug

SEQ ID NO: 1015407 - RNA, 19 nt, Artificial Sequence
  Description of Artificial Sequence: Synthetic oligonucleotide
  Antisense strand to SEQ ID NO: 1015406
cacuucaacuauuacucaa

SEQ ID NO: 1015408 - RNA, 19 nt, Artificial Sequence
  Description of Artificial Sequence: Synthetic oligonucleotide
  Sense strand starting at position 2736 of SEQ ID NO: 914587
ggucaauccgaauaucaua

SEQ ID NO: 1015409 - RNA, 19 nt, Artificial Sequence
  Description of Artificial Sequence: Synthetic oligonucleotide
  Antisense strand to SEQ ID NO: 1015408
uaugauauucggauugacc

SEQ ID NO: 1015410 - RNA, 19 nt, Artificial Sequence
  Description of Artificial Sequence: Synthetic oligonucleotide
  Sense strand starting at position 3204 of SEQ ID NO: 914587
cagcaauaucuagacguca

SEQ ID NO: 1015411 - RNA, 19 nt, Artificial Sequence
  Description of Artificial Sequence: Synthetic oligonucleotide
  Antisense strand to SEQ ID NO: 1015410
ugacgucuagauauugcug

SEQ ID NO: 1015412 - RNA, 19 nt, Artificial Sequence
  Description of Artificial Sequence: Synthetic oligonucleotide
  Sense strand starting at position 3328 of SEQ ID NO: 914587
ugcaguucuuauuugaauu

SEQ ID NO: 1015413 - RNA, 19 nt, Artificial Sequence
  Description of Artificial Sequence: Synthetic oligonucleotide
  Antisense strand to SEQ ID NO: 1015412
aauucaaauaagaacugca

SEQ ID NO: 1015414 - RNA, 19 nt, Artificial Sequence
  Description of Artificial Sequence: Synthetic oligonucleotide
  Sense strand starting at position 3375 of SEQ ID NO: 914587
gauaacaucucuguggcaa

SEQ ID NO: 1015415 - RNA, 19 nt, Artificial Sequence
  Description of Artificial Sequence: Synthetic oligonucleotide
  Antisense strand to SEQ ID NO: 1015414
uugccacagagauguuauc

SEQ ID NO: 1015416 - RNA, 19 nt, Artificial Sequence
  Description of Artificial Sequence: Synthetic oligonucleotide
  Sense strand starting at position 3383 of SEQ ID NO: 914587
cucuguggcaauuggagau

SEQ ID NO: 1015417 - RNA, 19 nt, Artificial Sequence
  Description of Artificial Sequence: Synthetic oligonucleotide
  Antisense strand to SEQ ID NO: 1015416
aucuccaauugccacagag

SEQ ID NO: 1015418 - RNA, 19 nt, Artificial Sequence
  Description of Artificial Sequence: Synthetic oligonucleotide
  Sense strand starting at position 3387 of SEQ ID NO: 914587
guggcaauuggagauguua

SEQ ID NO: 1015419 - RNA, 19 nt, Artificial Sequence
  Description of Artificial Sequence: Synthetic oligonucleotide
  Antisense strand to SEQ ID NO: 1015418
uaacaucuccaauugccac

SEQ ID NO: 1015420 - RNA, 19 nt, Artificial Sequence
  Description of Artificial Sequence: Synthetic oligonucleotide
  Sense strand starting at position 3389 of SEQ ID NO: 914587
ggcaauuggagauguuaau

SEQ ID NO: 1015421 - RNA, 19 nt, Artificial Sequence
  Description of Artificial Sequence: Synthetic oligonucleotide
  Antisense strand to SEQ ID NO: 1015420
auuaacaucuccaauugcc

SEQ ID NO: 1015422 - RNA, 19 nt, Artificial Sequence
  Description of Artificial Sequence: Synthetic oligonucleotide
  Sense strand starting at position 3413 of SEQ ID NO: 914587
cuggauauuugaugaaauu

SEQ ID NO: 1015423 - RNA, 19 nt, Artificial Sequence
  Description of Artificial Sequence: Synthetic oligonucleotide
  Antisense strand to SEQ ID NO: 1015422
aauuucaucaaauauccag

SEQ ID NO: 1015424 - RNA, 19 nt, Artificial Sequence
  Description of Artificial Sequence: Synthetic oligonucleotide
  Sense strand starting at position 3454 of SEQ ID NO: 914587
auagcaauggcauaucagu

SEQ ID NO: 1015425 - RNA, 19 nt, Artificial Sequence
  Description of Artificial Sequence: Synthetic oligonucleotide
  Antisense strand to SEQ ID NO: 1015424
acugauaugccauugcuau

SEQ ID NO: 1015426 - RNA, 19 nt, Artificial Sequence
  Description of Artificial Sequence: Synthetic oligonucleotide
  Sense strand starting at position 3460 of SEQ ID NO: 914587
auggcauaucagugacacu

SEQ ID NO: 1015427 - RNA, 19 nt, Artificial Sequence
  Description of Artificial Sequence: Synthetic oligonucleotide
  Antisense strand to SEQ ID NO: 1015426
agugucacugauaugccau

SEQ ID NO: 1015428 - RNA, 19 nt, Artificial Sequence
  Description of Artificial Sequence: Synthetic oligonucleotide
  Sense strand starting at position 3554 of SEQ ID NO: 914587
auucuaugucuugauugaa

SEQ ID NO: 1015429 - RNA, 19 nt, Artificial Sequence
  Description of Artificial Sequence: Synthetic oligonucleotide
  Antisense strand to SEQ ID NO: 1015428
uucaaucaagacauagaau

SEQ ID NO: 1015430 - RNA, 19 nt, Artificial Sequence
  Description of Artificial Sequence: Synthetic oligonucleotide
  Sense strand starting at position 3557 of SEQ ID NO: 914587
cuaugucuugauugaagua

SEQ ID NO: 1015431 - RNA, 19 nt, Artificial Sequence
  Description of Artificial Sequence: Synthetic oligonucleotide
  Antisense strand to SEQ ID NO: 1015430
uacuucaaucaagacauag

SEQ ID NO: 1015432 - RNA, 19 nt, Artificial Sequence
  Description of Artificial Sequence: Synthetic oligonucleotide
  Sense strand starting at position 3812 of SEQ ID NO: 914587
aaagaaagaucucagagga

SEQ ID NO: 1015433 - RNA, 19 nt, Artificial Sequence
  Description of Artificial Sequence: Synthetic oligonucleotide
  Antisense strand to SEQ ID NO: 1015432
uccucugagaucuuucuuu

SEQ ID NO: 1015434 - RNA, 19 nt, Artificial Sequence
  Description of Artificial Sequence: Synthetic oligonucleotide
  Sense strand starting at position 3819 of SEQ ID NO: 914587
gaucucagaggaugauguu

SEQ ID NO: 1015435 - RNA, 19 nt, Artificial Sequence
  Description of Artificial Sequence: Synthetic oligonucleotide
  Antisense strand to SEQ ID NO: 1015434
aacaucauccucugagauc

SEQ ID NO: 1015436 - RNA, 19 nt, Artificial Sequence
  Description of Artificial Sequence: Synthetic oligonucleotide
  Sense strand starting at position 3843 of SEQ ID NO: 914587
gguguccuuccacagagua

SEQ ID NO: 1015437 - RNA, 19 nt, Artificial Sequence
  Description of Artificial Sequence: Synthetic oligonucleotide
  Antisense strand to SEQ ID NO: 1015436
uacucuguggaaggacacc

SEQ ID NO: 1015438 - RNA, 19 nt, Artificial Sequence
  Description of Artificial Sequence: Synthetic oligonucleotide
  Sense strand starting at position 3861 of SEQ ID NO: 914587
agaaucagggccugaucaa

SEQ ID NO: 1015439 - RNA, 19 nt, Artificial Sequence
  Description of Artificial Sequence: Synthetic oligonucleotide
  Antisense strand to SEQ ID NO: 1015438
uugaucaggcccugauucu

SEQ ID NO: 1015440 - RNA, 19 nt, Artificial Sequence
  Description of Artificial Sequence: Synthetic oligonucleotide
  Sense strand starting at position 3917 of SEQ ID NO: 914587
ccagcauugcuauagacca

SEQ ID NO: 1015441 - RNA, 19 nt, Artificial Sequence
  Description of Artificial Sequence: Synthetic oligonucleotide
  Antisense strand to SEQ ID NO: 1015440
uggucuauagcaaugcugg

SEQ ID NO: 1015442 - RNA, 19 nt, Artificial Sequence
  Description of Artificial Sequence: Synthetic oligonucleotide
  Sense strand starting at position 4 of SEQ ID NO: 914588
aagcuuggucaagaguaca

SEQ ID NO: 1015443 - RNA, 19 nt, Artificial Sequence
  Description of Artificial Sequence: Synthetic oligonucleotide
  Antisense strand to SEQ ID NO: 1015442
uguacucuugaccaagcuu

SEQ ID NO: 1015444 - RNA, 19 nt, Artificial Sequence
  Description of Artificial Sequence: Synthetic oligonucleotide
  Sense strand starting at position 168 of SEQ ID NO: 914588
aggcuaaaguggagggauu

SEQ ID NO: 1015445 - RNA, 19 nt, Artificial Sequence
  Description of Artificial Sequence: Synthetic oligonucleotide
  Antisense strand to SEQ ID NO: 1015444
aaucccuccacuuuagccu

SEQ ID NO: 1015446 - RNA, 19 nt, Artificial Sequence
  Description of Artificial Sequence: Synthetic oligonucleotide
  Sense strand starting at position 467 of SEQ ID NO: 914588
gaaguaaaguguccugaaa

SEQ ID NO: 1015447 - RNA, 19 nt, Artificial Sequence
  Description of Artificial Sequence: Synthetic oligonucleotide
  Antisense strand to SEQ ID NO: 1015446
uuucaggacacuuuacuuc

SEQ ID NO: 1015448 - RNA, 19 nt, Artificial Sequence
  Description of Artificial Sequence: Synthetic oligonucleotide
  Sense strand starting at position 798 of SEQ ID NO: 914588
aguggcaggcucuaauuga

SEQ ID NO: 1015449 - RNA, 19 nt, Artificial Sequence
  Description of Artificial Sequence: Synthetic oligonucleotide
  Antisense strand to SEQ ID NO: 1015448
ucaauuagagccugccacu

SEQ ID NO: 1015450 - RNA, 19 nt, Artificial Sequence
  Description of Artificial Sequence: Synthetic oligonucleotide
  Sense strand starting at position 823 of SEQ ID NO: 914588
cggagaaaguguucacuuc

SEQ ID NO: 1015451 - RNA, 19 nt, Artificial Sequence
  Description of Artificial Sequence: Synthetic oligonucleotide
  Antisense strand to SEQ ID NO: 1015450
gaagugaacacuuucuccg

SEQ ID NO: 1015452 - RNA, 19 nt, Artificial Sequence
  Description of Artificial Sequence: Synthetic oligonucleotide
  Sense strand starting at position 897 of SEQ ID NO: 914588
gaagaagucccagagcuuu

SEQ ID NO: 1015453 - RNA, 19 nt, Artificial Sequence
  Description of Artificial Sequence: Synthetic oligonucleotide
  Antisense strand to SEQ ID NO: 1015452
aaagcucugggacuucuuc

SEQ ID NO: 1015454 - RNA, 19 nt, Artificial Sequence
  Description of Artificial Sequence: Synthetic oligonucleotide
  Sense strand starting at position 903 of SEQ ID NO: 914588
gucccagagcuuuauauga

SEQ ID NO: 1015455 - RNA, 19 nt, Artificial Sequence
  Description of Artificial Sequence: Synthetic oligonucleotide
  Antisense strand to SEQ ID NO: 1015454
ucauauaaagcucugggac

SEQ ID NO: 1015456 - RNA, 19 nt, Artificial Sequence
  Description of Artificial Sequence: Synthetic oligonucleotide
  Sense strand starting at position 1023 of SEQ ID NO: 914588
ucaugauuaggguguauau

SEQ ID NO: 1015457 - RNA, 19 nt, Artificial Sequence
  Description of Artificial Sequence: Synthetic oligonucleotide
  Antisense strand to SEQ ID NO: 1015456
auauacacccuaaucauga

SEQ ID NO: 1015458 - RNA, 19 nt, Artificial Sequence
  Description of Artificial Sequence: Synthetic oligonucleotide
  Sense strand starting at position 1073 of SEQ ID NO: 914588
cugagaauguggguuaaga

SEQ ID NO: 1015459 - RNA, 19 nt, Artificial Sequence
  Description of Artificial Sequence: Synthetic oligonucleotide
  Antisense strand to SEQ ID NO: 1015458
ucuuaacccacauucucag

SEQ ID NO: 1015460 - RNA, 19 nt, Artificial Sequence
  Description of Artificial Sequence: Synthetic oligonucleotide
  Sense strand starting at position 1089 of SEQ ID NO: 914588
agaugacucuucccggguu

SEQ ID NO: 1015461 - RNA, 19 nt, Artificial Sequence
  Description of Artificial Sequence: Synthetic oligonucleotide
  Antisense strand to SEQ ID NO: 1015460
aacccgggaagagucaucu

SEQ ID NO: 1015462 - RNA, 19 nt, Artificial Sequence
  Description of Artificial Sequence: Synthetic oligonucleotide
  Sense strand starting at position 1253 of SEQ ID NO: 914588
ucucccucugugggauaau

SEQ ID NO: 1015463 - RNA, 19 nt, Artificial Sequence
  Description of Artificial Sequence: Synthetic oligonucleotide
  Antisense strand to SEQ ID NO: 1015462
auuaucccacagagggaga

SEQ ID NO: 1015464 - RNA, 19 nt, Artificial Sequence
  Description of Artificial Sequence: Synthetic oligonucleotide
  Sense strand starting at position 2288 of SEQ ID NO: 914588
gugcauaucccagacuaga

SEQ ID NO: 1015465 - RNA, 19 nt, Artificial Sequence
  Description of Artificial Sequence: Synthetic oligonucleotide
  Antisense strand to SEQ ID NO: 1015464
ucuagucugggauaugcac

SEQ ID NO: 1015466 - RNA, 19 nt, Artificial Sequence
  Description of Artificial Sequence: Synthetic oligonucleotide
  Sense strand starting at position 2686 of SEQ ID NO: 914588
ggaauugguuuaccuaaga

SEQ ID NO: 1015467 - RNA, 19 nt, Artificial Sequence
  Description of Artificial Sequence: Synthetic oligonucleotide
  Antisense strand to SEQ ID NO: 1015466
ucuuagguaaaccaauucc

SEQ ID NO: 1015468 - RNA, 19 nt, Artificial Sequence
  Description of Artificial Sequence: Synthetic oligonucleotide
  Sense strand starting at position 2730 of SEQ ID NO: 914588
gaggcagagcuauguugau

SEQ ID NO: 1015469 - RNA, 19 nt, Artificial Sequence
  Description of Artificial Sequence: Synthetic oligonucleotide
  Antisense strand to SEQ ID NO: 1015468
aucaacauagcucugccuc

SEQ ID NO: 1015470 - RNA, 19 nt, Artificial Sequence
  Description of Artificial Sequence: Synthetic oligonucleotide
  Sense strand starting at position 2739 of SEQ ID NO: 914588
cuauguugauucuuccuau

SEQ ID NO: 1015471 - RNA, 19 nt, Artificial Sequence
  Description of Artificial Sequence: Synthetic oligonucleotide
  Antisense strand to SEQ ID NO: 1015470
auaggaagaaucaacauag

SEQ ID NO: 1015472 - RNA, 19 nt, Artificial Sequence
  Description of Artificial Sequence: Synthetic oligonucleotide
  Sense strand starting at position 2838 of SEQ ID NO: 914588
uugccuuucccauagcaga

SEQ ID NO: 1015473 - RNA, 19 nt, Artificial Sequence
  Description of Artificial Sequence: Synthetic oligonucleotide
  Antisense strand to SEQ ID NO: 1015472
ucugcuaugggaaaggcaa

SEQ ID NO: 1015474 - RNA, 19 nt, Artificial Sequence
  Description of Artificial Sequence: Synthetic oligonucleotide
  Sense strand starting at position 2853 of SEQ ID NO: 914588
cagagacucugccugacuu

SEQ ID NO: 1015475 - RNA, 19 nt, Artificial Sequence
  Description of Artificial Sequence: Synthetic oligonucleotide
  Antisense strand to SEQ ID NO: 1015474
aagucaggcagagucucug

SEQ ID NO: 1015476 - RNA, 19 nt, Artificial Sequence
  Description of Artificial Sequence: Synthetic oligonucleotide
  Sense strand starting at position 2854 of SEQ ID NO: 914588
agagacucugccugacuuu

SEQ ID NO: 1015477 - RNA, 19 nt, Artificial Sequence
  Description of Artificial Sequence: Synthetic oligonucleotide
  Antisense strand to SEQ ID NO: 1015476
aaagucaggcagagucucu

SEQ ID NO: 1015478 - RNA, 19 nt, Artificial Sequence
  Description of Artificial Sequence: Synthetic oligonucleotide
  Sense strand starting at position 2879 of SEQ ID NO: 914588
acugaauuaucaguaguaa

SEQ ID NO: 1015479 - RNA, 19 nt, Artificial Sequence
  Description of Artificial Sequence: Synthetic oligonucleotide
  Antisense strand to SEQ ID NO: 1015478
uuacuacugauaauucagu

SEQ ID NO: 1015480 - RNA, 19 nt, Artificial Sequence
  Description of Artificial Sequence: Synthetic oligonucleotide
  Sense strand starting at position 2917 of SEQ ID NO: 914588
acuagacauugguuuagau

SEQ ID NO: 1015481 - RNA, 19 nt, Artificial Sequence
  Description of Artificial Sequence: Synthetic oligonucleotide
  Antisense strand to SEQ ID NO: 1015480
aucuaaaccaaugucuagu

SEQ ID NO: 1015482 - RNA, 19 nt, Artificial Sequence
  Description of Artificial Sequence: Synthetic oligonucleotide
  Sense strand starting at position 2947 of SEQ ID NO: 914588
ccuguauuaccuuggacaa

SEQ ID NO: 1015483 - RNA, 19 nt, Artificial Sequence
  Description of Artificial Sequence: Synthetic oligonucleotide
  Antisense strand to SEQ ID NO: 1015482
uuguccaagguaauacagg

SEQ ID NO: 1015484 - RNA, 19 nt, Artificial Sequence
  Description of Artificial Sequence: Synthetic oligonucleotide
  Sense strand starting at position 2948 of SEQ ID NO: 914588
cuguauuaccuuggacaag

SEQ ID NO: 1015485 - RNA, 19 nt, Artificial Sequence
  Description of Artificial Sequence: Synthetic oligonucleotide
  Antisense strand to SEQ ID NO: 1015484
cuuguccaagguaauacag

SEQ ID NO: 1015486 - RNA, 19 nt, Artificial Sequence
  Description of Artificial Sequence: Synthetic oligonucleotide
  Sense strand starting at position 2959 of SEQ ID NO: 914588
uggacaagucccuagagcu

SEQ ID NO: 1015487 - RNA, 19 nt, Artificial Sequence
  Description of Artificial Sequence: Synthetic oligonucleotide
  Antisense strand to SEQ ID NO: 1015486
agcucuagggacuugucca

SEQ ID NO: 1015488 - RNA, 19 nt, Artificial Sequence
  Description of Artificial Sequence: Synthetic oligonucleotide
  Sense strand starting at position 2980 of SEQ ID NO: 914588
cugagucuguuucccagaa

SEQ ID NO: 1015489 - RNA, 19 nt, Artificial Sequence
  Description of Artificial Sequence: Synthetic oligonucleotide
  Antisense strand to SEQ ID NO: 1015488
uucugggaaacagacucag

SEQ ID NO: 1015490 - RNA, 19 nt, Artificial Sequence
  Description of Artificial Sequence: Synthetic oligonucleotide
  Sense strand starting at position 2984 of SEQ ID NO: 914588
gucuguuucccagaaguaa

SEQ ID NO: 1015491 - RNA, 19 nt, Artificial Sequence
  Description of Artificial Sequence: Synthetic oligonucleotide
  Antisense strand to SEQ ID NO: 1015490
uuacuucugggaaacagac

SEQ ID NO: 1015492 - RNA, 19 nt, Artificial Sequence
  Description of Artificial Sequence: Synthetic oligonucleotide
  Sense strand starting at position 3071 of SEQ ID NO: 914588
gcgugugacgagcuuuguu

SEQ ID NO: 1015493 - RNA, 19 nt, Artificial Sequence
  Description of Artificial Sequence: Synthetic oligonucleotide
  Antisense strand to SEQ ID NO: 1015492
aacaaagcucgucacacgc

SEQ ID NO: 1015494 - RNA, 19 nt, Artificial Sequence
  Description of Artificial Sequence: Synthetic oligonucleotide
  Sense strand starting at position 3137 of SEQ ID NO: 914588
ggaucacuguccuuuagug

SEQ ID NO: 1015495 - RNA, 19 nt, Artificial Sequence
  Description of Artificial Sequence: Synthetic oligonucleotide
  Antisense strand to SEQ ID NO: 1015494
cacuaaaggacagugaucc

SEQ ID NO: 1015496 - RNA, 19 nt, Artificial Sequence
  Description of Artificial Sequence: Synthetic oligonucleotide
  Sense strand starting at position 3139 of SEQ ID NO: 914588
aucacuguccuuuagugau

SEQ ID NO: 1015497 - RNA, 19 nt, Artificial Sequence
  Description of Artificial Sequence: Synthetic oligonucleotide
  Antisense strand to SEQ ID NO: 1015496
aucacuaaaggacagugau

SEQ ID NO: 1015498 - RNA, 19 nt, Artificial Sequence
  Description of Artificial Sequence: Synthetic oligonucleotide
  Sense strand starting at position 3141 of SEQ ID NO: 914588
cacuguccuuuagugauga

SEQ ID NO: 1015499 - RNA, 19 nt, Artificial Sequence
  Description of Artificial Sequence: Synthetic oligonucleotide
  Antisense strand to SEQ ID NO: 1015498
ucaucacuaaaggacagug

SEQ ID NO: 1015500 - RNA, 19 nt, Artificial Sequence
  Description of Artificial Sequence: Synthetic oligonucleotide
  Sense strand starting at position 3143 of SEQ ID NO: 914588
cuguccuuuagugaugaag

SEQ ID NO: 1015501 - RNA, 19 nt, Artificial Sequence
  Description of Artificial Sequence: Synthetic oligonucleotide
  Antisense strand to SEQ ID NO: 1015500
cuucaucacuaaaggacag

SEQ ID NO: 1015502 - RNA, 19 nt, Artificial Sequence
  Description of Artificial Sequence: Synthetic oligonucleotide
  Sense strand starting at position 3193 of SEQ ID NO: 914588
ugugcuugacauggauuga

SEQ ID NO: 1015503 - RNA, 19 nt, Artificial Sequence
  Description of Artificial Sequence: Synthetic oligonucleotide
  Antisense strand to SEQ ID NO: 1015502
ucaauccaugucaagcaca

SEQ ID NO: 1015504 - RNA, 19 nt, Artificial Sequence
  Description of Artificial Sequence: Synthetic oligonucleotide
  Sense strand starting at position 3194 of SEQ ID NO: 914588
gugcuugacauggauugau

SEQ ID NO: 1015505 - RNA, 19 nt, Artificial Sequence
  Description of Artificial Sequence: Synthetic oligonucleotide
  Antisense strand to SEQ ID NO: 1015504
aucaauccaugucaagcac

SEQ ID NO: 1015506 - RNA, 19 nt, Artificial Sequence
  Description of Artificial Sequence: Synthetic oligonucleotide
  Sense strand starting at position 3203 of SEQ ID NO: 914588
auggauugaucugucuucu

SEQ ID NO: 1015507 - RNA, 19 nt, Artificial Sequence
  Description of Artificial Sequence: Synthetic oligonucleotide
  Antisense strand to SEQ ID NO: 1015506
agaagacagaucaauccau

SEQ ID NO: 1015508 - RNA, 19 nt, Artificial Sequence
  Description of Artificial Sequence: Synthetic oligonucleotide
  Sense strand starting at position 3282 of SEQ ID NO: 914588
uguacuagaguuuggacuu

SEQ ID NO: 1015509 - RNA, 19 nt, Artificial Sequence
  Description of Artificial Sequence: Synthetic oligonucleotide
  Antisense strand to SEQ ID NO: 1015508
aaguccaaacucuaguaca

SEQ ID NO: 1015510 - RNA, 19 nt, Artificial Sequence
  Description of Artificial Sequence: Synthetic oligonucleotide
  Sense strand starting at position 3346 of SEQ ID NO: 914588
cgugauugugccagucgac

SEQ ID NO: 1015511 - RNA, 19 nt, Artificial Sequence
  Description of Artificial Sequence: Synthetic oligonucleotide
  Antisense strand to SEQ ID NO: 1015510
gucgacuggcacaaucacg

SEQ ID NO: 1015512 - RNA, 19 nt, Artificial Sequence
  Description of Artificial Sequence: Synthetic oligonucleotide
  Sense strand starting at position 3605 of SEQ ID NO: 914588
uugacugagagaugcuauu

SEQ ID NO: 1015513 - RNA, 19 nt, Artificial Sequence
  Description of Artificial Sequence: Synthetic oligonucleotide
  Antisense strand to SEQ ID NO: 1015512
aauagcaucucucagucaa

SEQ ID NO: 1015514 - RNA, 19 nt, Artificial Sequence
  Description of Artificial Sequence: Synthetic oligonucleotide
  Sense strand starting at position 3806 of SEQ ID NO: 914588
uuaccugcucuguaauaga

SEQ ID NO: 1015515 - RNA, 19 nt, Artificial Sequence
  Description of Artificial Sequence: Synthetic oligonucleotide
  Antisense strand to SEQ ID NO: 1015514
ucuauuacagagcagguaa

SEQ ID NO: 1015516 - RNA, 19 nt, Artificial Sequence
  Description of Artificial Sequence: Synthetic oligonucleotide
  Sense strand starting at position 3822 of SEQ ID NO: 914588
agacauuguaccggucaca

SEQ ID NO: 1015517 - RNA, 19 nt, Artificial Sequence
  Description of Artificial Sequence: Synthetic oligonucleotide
  Antisense strand to SEQ ID NO: 1015516
ugugaccgguacaaugucu

SEQ ID NO: 1015518 - RNA, 19 nt, Artificial Sequence
  Description of Artificial Sequence: Synthetic oligonucleotide
  Sense strand starting at position 3825 of SEQ ID NO: 914588
cauuguaccggucacagaa

SEQ ID NO: 1015519 - RNA, 19 nt, Artificial Sequence
  Description of Artificial Sequence: Synthetic oligonucleotide
  Antisense strand to SEQ ID NO: 1015518
uucugugaccgguacaaug

SEQ ID NO: 1015520 - RNA, 19 nt, Artificial Sequence
  Description of Artificial Sequence: Synthetic oligonucleotide
  Sense strand starting at position 3983 of SEQ ID NO: 914588
ccuugaacauaucuggauu

SEQ ID NO: 1015521 - RNA, 19 nt, Artificial Sequence
  Description of Artificial Sequence: Synthetic oligonucleotide
  Antisense strand to SEQ ID NO: 1015520
aauccagauauguucaagg

SEQ ID NO: 1015522 - RNA, 19 nt, Artificial Sequence
  Description of Artificial Sequence: Synthetic oligonucleotide
  Sense strand starting at position 97 of SEQ ID NO: 914589
agaaaugaauuagguugaa

SEQ ID NO: 1015523 - RNA, 19 nt, Artificial Sequence
  Description of Artificial Sequence: Synthetic oligonucleotide
  Antisense strand to SEQ ID NO: 1015522
uucaaccuaauucauuucu

SEQ ID NO: 1015524 - RNA, 19 nt, Artificial Sequence
  Description of Artificial Sequence: Synthetic oligonucleotide
  Sense strand starting at position 121 of SEQ ID NO: 914589
acccaaguucuggguaaac

SEQ ID NO: 1015525 - RNA, 19 nt, Artificial Sequence
  Description of Artificial Sequence: Synthetic oligonucleotide
  Antisense strand to SEQ ID NO: 1015524
guuuacccagaacuugggu

SEQ ID NO: 1015526 - RNA, 19 nt, Artificial Sequence
  Description of Artificial Sequence: Synthetic oligonucleotide
  Sense strand starting at position 123 of SEQ ID NO: 914589
ccaaguucuggguaaacug

SEQ ID NO: 1015527 - RNA, 19 nt, Artificial Sequence
  Description of Artificial Sequence: Synthetic oligonucleotide
  Antisense strand to SEQ ID NO: 1015526
caguuuacccagaacuugg

SEQ ID NO: 1015528 - RNA, 19 nt, Artificial Sequence
  Description of Artificial Sequence: Synthetic oligonucleotide
  Sense strand starting at position 246 of SEQ ID NO: 914589
cgaauaaucuuggaaagca

SEQ ID NO: 1015529 - RNA, 19 nt, Artificial Sequence
  Description of Artificial Sequence: Synthetic oligonucleotide
  Antisense strand to SEQ ID NO: 1015528
ugcuuuccaagauuauucg

SEQ ID NO: 1015530 - RNA, 19 nt, Artificial Sequence
  Description of Artificial Sequence: Synthetic oligonucleotide
  Sense strand starting at position 287 of SEQ ID NO: 914589
cugggaccuuuacaacaua

SEQ ID NO: 1015531 - RNA, 19 nt, Artificial Sequence
  Description of Artificial Sequence: Synthetic oligonucleotide
  Antisense strand to SEQ ID NO: 1015530
uauguuguaaaggucccag

SEQ ID NO: 1015532 - RNA, 19 nt, Artificial Sequence
  Description of Artificial Sequence: Synthetic oligonucleotide
  Sense strand starting at position 395 of SEQ ID NO: 914589
ucaucuaauuugggagcau

SEQ ID NO: 1015533 - RNA, 19 nt, Artificial Sequence
  Description of Artificial Sequence: Synthetic oligonucleotide
  Antisense strand to SEQ ID NO: 1015532
augcucccaaauuagauga

SEQ ID NO: 1015534 - RNA, 19 nt, Artificial Sequence
  Description of Artificial Sequence: Synthetic oligonucleotide
  Sense strand starting at position 406 of SEQ ID NO: 914589
gggagcaugcaauaguaaa

SEQ ID NO: 1015535 - RNA, 19 nt, Artificial Sequence
  Description of Artificial Sequence: Synthetic oligonucleotide
  Antisense strand to SEQ ID NO: 1015534
uuuacuauugcaugcuccc

SEQ ID NO: 1015536 - RNA, 19 nt, Artificial Sequence
  Description of Artificial Sequence: Synthetic oligonucleotide
  Sense strand starting at position 431 of SEQ ID NO: 914589
cguguaaacccuugaggac

SEQ ID NO: 1015537 - RNA, 19 nt, Artificial Sequence
  Description of Artificial Sequence: Synthetic oligonucleotide
  Antisense strand to SEQ ID NO: 1015536
guccucaaggguuuacacg

SEQ ID NO: 1015538 - RNA, 19 nt, Artificial Sequence
  Description of Artificial Sequence: Synthetic oligonucleotide
  Sense strand starting at position 432 of SEQ ID NO: 914589
guguaaacccuugaggacu

SEQ ID NO: 1015539 - RNA, 19 nt, Artificial Sequence
  Description of Artificial Sequence: Synthetic oligonucleotide
  Antisense strand to SEQ ID NO: 1015538
aguccucaaggguuuacac

SEQ ID NO: 1015540 - RNA, 19 nt, Artificial Sequence
  Description of Artificial Sequence: Synthetic oligonucleotide
  Sense strand starting at position 636 of SEQ ID NO: 914589
cuccaaucucacgaaaggu

SEQ ID NO: 1015541 - RNA, 19 nt, Artificial Sequence
  Description of Artificial Sequence: Synthetic oligonucleotide
  Antisense strand to SEQ ID NO: 1015540
accuuucgugagauuggag

SEQ ID NO: 1015542 - RNA, 19 nt, Artificial Sequence
  Description of Artificial Sequence: Synthetic oligonucleotide
  Sense strand starting at position 687 of SEQ ID NO: 914589
uuucauucggcacgguuaa

SEQ ID NO: 1015543 - RNA, 19 nt, Artificial Sequence
  Description of Artificial Sequence: Synthetic oligonucleotide
  Antisense strand to SEQ ID NO: 1015542
uuaaccgugccgaaugaaa

SEQ ID NO: 1015544 - RNA, 19 nt, Artificial Sequence
  Description of Artificial Sequence: Synthetic oligonucleotide
  Sense strand starting at position 688 of SEQ ID NO: 914589
uucauucggcacgguuaau

SEQ ID NO: 1015545 - RNA, 19 nt, Artificial Sequence
  Description of Artificial Sequence: Synthetic oligonucleotide
  Antisense strand to SEQ ID NO: 1015544
auuaaccgugccgaaugaa

SEQ ID NO: 1015546 - RNA, 19 nt, Artificial Sequence
  Description of Artificial Sequence: Synthetic oligonucleotide
  Sense strand starting at position 698 of SEQ ID NO: 914589
acgguuaaucucugucuca

SEQ ID NO: 1015547 - RNA, 19 nt, Artificial Sequence
  Description of Artificial Sequence: Synthetic oligonucleotide
  Antisense strand to SEQ ID NO: 1015546
ugagacagagauuaaccgu

SEQ ID NO: 1015548 - RNA, 19 nt, Artificial Sequence
  Description of Artificial Sequence: Synthetic oligonucleotide
  Sense strand starting at position 699 of SEQ ID NO: 914589
cgguuaaucucugucucau

SEQ ID NO: 1015549 - RNA, 19 nt, Artificial Sequence
  Description of Artificial Sequence: Synthetic oligonucleotide
  Antisense strand to SEQ ID NO: 1015548
augagacagagauuaaccg

SEQ ID NO: 1015550 - RNA, 19 nt, Artificial Sequence
  Description of Artificial Sequence: Synthetic oligonucleotide
  Sense strand starting at position 701 of SEQ ID NO: 914589
guuaaucucugucucauca

SEQ ID NO: 1015551 - RNA, 19 nt, Artificial Sequence
  Description of Artificial Sequence: Synthetic oligonucleotide
  Antisense strand to SEQ ID NO: 1015550
ugaugagacagagauuaac

SEQ ID NO: 1015552 - RNA, 19 nt, Artificial Sequence
  Description of Artificial Sequence: Synthetic oligonucleotide
  Sense strand starting at position 737 of SEQ ID NO: 914589
augucuguguggucucaac

SEQ ID NO: 1015553 - RNA, 19 nt, Artificial Sequence
  Description of Artificial Sequence: Synthetic oligonucleotide
  Antisense strand to SEQ ID NO: 1015552
guugagaccacacagacau

SEQ ID NO: 1015554 - RNA, 19 nt, Artificial Sequence
  Description of Artificial Sequence: Synthetic oligonucleotide
  Sense strand starting at position 815 of SEQ ID NO: 914589
aacaguaagucugaaguga

SEQ ID NO: 1015555 - RNA, 19 nt, Artificial Sequence
  Description of Artificial Sequence: Synthetic oligonucleotide
  Antisense strand to SEQ ID NO: 1015554
ucacuucagacuuacuguu

SEQ ID NO: 1015556 - RNA, 19 nt, Artificial Sequence
  Description of Artificial Sequence: Synthetic oligonucleotide
  Sense strand starting at position 819 of SEQ ID NO: 914589
guaagucugaagugaaagu

SEQ ID NO: 1015557 - RNA, 19 nt, Artificial Sequence
  Description of Artificial Sequence: Synthetic oligonucleotide
  Antisense strand to SEQ ID NO: 1015556
acuuucacuucagacuuac

SEQ ID NO: 1015558 - RNA, 19 nt, Artificial Sequence
  Description of Artificial Sequence: Synthetic oligonucleotide
  Sense strand starting at position 901 of SEQ ID NO: 914589
gcagaacucuucccaguuu

SEQ ID NO: 1015559 - RNA, 19 nt, Artificial Sequence
  Description of Artificial Sequence: Synthetic oligonucleotide
  Antisense strand to SEQ ID NO: 1015558
aaacugggaagaguucugc

SEQ ID NO: 1015560 - RNA, 19 nt, Artificial Sequence
  Description of Artificial Sequence: Synthetic oligonucleotide
  Sense strand starting at position 1002 of SEQ ID NO: 914589
ggcagaagucaccguuuag

SEQ ID NO: 1015561 - RNA, 19 nt, Artificial Sequence
  Description of Artificial Sequence: Synthetic oligonucleotide
  Antisense strand to SEQ ID NO: 1015560
cuaaacggugacuucugcc

SEQ ID NO: 1015562 - RNA, 19 nt, Artificial Sequence
  Description of Artificial Sequence: Synthetic oligonucleotide
  Sense strand starting at position 1006 of SEQ ID NO: 914589
gaagucaccguuuaggaaa

SEQ ID NO: 1015563 - RNA, 19 nt, Artificial Sequence
  Description of Artificial Sequence: Synthetic oligonucleotide
  Antisense strand to SEQ ID NO: 1015562
uuuccuaaacggugacuuc

SEQ ID NO: 1015564 - RNA, 19 nt, Artificial Sequence
  Description of Artificial Sequence: Synthetic oligonucleotide
  Sense strand starting at position 1043 of SEQ ID NO: 914589
uggaaaugcucuuaacuag

SEQ ID NO: 1015565 - RNA, 19 nt, Artificial Sequence
  Description of Artificial Sequence: Synthetic oligonucleotide
  Antisense strand to SEQ ID NO: 1015564
cuaguuaagagcauuucca

SEQ ID NO: 1015566 - RNA, 19 nt, Artificial Sequence
  Description of Artificial Sequence: Synthetic oligonucleotide
  Sense strand starting at position 1050 of SEQ ID NO: 914589
gcucuuaacuagguuacuu

SEQ ID NO: 1015567 - RNA, 19 nt, Artificial Sequence
  Description of Artificial Sequence: Synthetic oligonucleotide
  Antisense strand to SEQ ID NO: 1015566
aaguaaccuaguuaagagc

SEQ ID NO: 1015568 - RNA, 19 nt, Artificial Sequence
  Description of Artificial Sequence: Synthetic oligonucleotide
  Sense strand starting at position 1123 of SEQ ID NO: 914589
aacuguauuugaggaccca

SEQ ID NO: 1015569 - RNA, 19 nt, Artificial Sequence
  Description of Artificial Sequence: Synthetic oligonucleotide
  Antisense strand to SEQ ID NO: 1015568
uggguccucaaauacaguu

SEQ ID NO: 1015570 - RNA, 19 nt, Artificial Sequence
  Description of Artificial Sequence: Synthetic oligonucleotide
  Sense strand starting at position 1266 of SEQ ID NO: 914589
caguaaaccucagagaaug

SEQ ID NO: 1015571 - RNA, 19 nt, Artificial Sequence
  Description of Artificial Sequence: Synthetic oligonucleotide
  Antisense strand to SEQ ID NO: 1015570
cauucucugagguuuacug

SEQ ID NO: 1015572 - RNA, 19 nt, Artificial Sequence
  Description of Artificial Sequence: Synthetic oligonucleotide
  Sense strand starting at position 1280 of SEQ ID NO: 914589
gaaugagcuuucuaaggag

SEQ ID NO: 1015573 - RNA, 19 nt, Artificial Sequence
  Description of Artificial Sequence: Synthetic oligonucleotide
  Antisense strand to SEQ ID NO: 1015572
cuccuuagaaagcucauuc

SEQ ID NO: 1015574 - RNA, 19 nt, Artificial Sequence
  Description of Artificial Sequence: Synthetic oligonucleotide
  Sense strand starting at position 1341 of SEQ ID NO: 914589
agcuaacaagcgugacuau

SEQ ID NO: 1015575 - RNA, 19 nt, Artificial Sequence
  Description of Artificial Sequence: Synthetic oligonucleotide
  Antisense strand to SEQ ID NO: 1015574
auagucacgcuuguuagcu

SEQ ID NO: 1015576 - RNA, 19 nt, Artificial Sequence
  Description of Artificial Sequence: Synthetic oligonucleotide
  Sense strand starting at position 1344 of SEQ ID NO: 914589
uaacaagcgugacuaugaa

SEQ ID NO: 1015577 - RNA, 19 nt, Artificial Sequence
  Description of Artificial Sequence: Synthetic oligonucleotide
  Antisense strand to SEQ ID NO: 1015576
uucauagucacgcuuguua

SEQ ID NO: 1015578 - RNA, 19 nt, Artificial Sequence
  Description of Artificial Sequence: Synthetic oligonucleotide
  Sense strand starting at position 1405 of SEQ ID NO: 914589
ccguccuaacugugcaaga

SEQ ID NO: 1015579 - RNA, 19 nt, Artificial Sequence
  Description of Artificial Sequence: Synthetic oligonucleotide
  Antisense strand to SEQ ID NO: 1015578
ucuugcacaguuaggacgg

SEQ ID NO: 1015580 - RNA, 19 nt, Artificial Sequence
  Description of Artificial Sequence: Synthetic oligonucleotide
  Sense strand starting at position 1406 of SEQ ID NO: 914589
cguccuaacugugcaagaa

SEQ ID NO: 1015581 - RNA, 19 nt, Artificial Sequence
  Description of Artificial Sequence: Synthetic oligonucleotide
  Antisense strand to SEQ ID NO: 1015580
uucuugcacaguuaggacg

SEQ ID NO: 1015582 - RNA, 19 nt, Artificial Sequence
  Description of Artificial Sequence: Synthetic oligonucleotide
  Sense strand starting at position 1407 of SEQ ID NO: 914589
guccuaacugugcaagaac

SEQ ID NO: 1015583 - RNA, 19 nt, Artificial Sequence
  Description of Artificial Sequence: Synthetic oligonucleotide
  Antisense strand to SEQ ID NO: 1015582
guucuugcacaguuaggac

SEQ ID NO: 1015584 - RNA, 19 nt, Artificial Sequence
  Description of Artificial Sequence: Synthetic oligonucleotide
  Sense strand starting at position 1445 of SEQ ID NO: 914589
cugacaaguccgugugucu

SEQ ID NO: 1015585 - RNA, 19 nt, Artificial Sequence
  Description of Artificial Sequence: Synthetic oligonucleotide
  Antisense strand to SEQ ID NO: 1015584
agacacacggacuugucag

SEQ ID NO: 1015586 - RNA, 19 nt, Artificial Sequence
  Description of Artificial Sequence: Synthetic oligonucleotide
  Sense strand starting at position 2607 of SEQ ID NO: 914589
gcuagugccuuuccuaagu

SEQ ID NO: 1015587 - RNA, 19 nt, Artificial Sequence
  Description of Artificial Sequence: Synthetic oligonucleotide
  Antisense strand to SEQ ID NO: 1015586
acuuaggaaaggcacuagc

SEQ ID NO: 1015588 - RNA, 19 nt, Artificial Sequence
  Description of Artificial Sequence: Synthetic oligonucleotide
  Sense strand starting at position 2612 of SEQ ID NO: 914589
ugccuuuccuaaguuagaa

SEQ ID NO: 1015589 - RNA, 19 nt, Artificial Sequence
  Description of Artificial Sequence: Synthetic oligonucleotide
  Antisense strand to SEQ ID NO: 1015588
uucuaacuuaggaaaggca

SEQ ID NO: 1015590 - RNA, 19 nt, Artificial Sequence
  Description of Artificial Sequence: Synthetic oligonucleotide
  Sense strand starting at position 2693 of SEQ ID NO: 914589
caagcugcuucucugugaa

SEQ ID NO: 1015591 - RNA, 19 nt, Artificial Sequence
  Description of Artificial Sequence: Synthetic oligonucleotide
  Antisense strand to SEQ ID NO: 1015590
uucacagagaagcagcuug

SEQ ID NO: 1015592 - RNA, 19 nt, Artificial Sequence
  Description of Artificial Sequence: Synthetic oligonucleotide
  Sense strand starting at position 2701 of SEQ ID NO: 914589
uucucugugaagggagaau

SEQ ID NO: 1015593 - RNA, 19 nt, Artificial Sequence
  Description of Artificial Sequence: Synthetic oligonucleotide
  Antisense strand to SEQ ID NO: 1015592
auucucccuucacagagaa

SEQ ID NO: 1015594 - RNA, 19 nt, Artificial Sequence
  Description of Artificial Sequence: Synthetic oligonucleotide
  Sense strand starting at position 3194 of SEQ ID NO: 914589
gcuggacuuccuggacauc

SEQ ID NO: 1015595 - RNA, 19 nt, Artificial Sequence
  Description of Artificial Sequence: Synthetic oligonucleotide
  Antisense strand to SEQ ID NO: 1015594
gauguccaggaaguccagc

SEQ ID NO: 1015596 - RNA, 19 nt, Artificial Sequence
  Description of Artificial Sequence: Synthetic oligonucleotide
  Sense strand starting at position 3260 of SEQ ID NO: 914589
ccgcaacacucagcuaauu

SEQ ID NO: 1015597 - RNA, 19 nt, Artificial Sequence
  Description of Artificial Sequence: Synthetic oligonucleotide
  Antisense strand to SEQ ID NO: 1015596
aauuagcugaguguugcgg

SEQ ID NO: 1015598 - RNA, 19 nt, Artificial Sequence
  Description of Artificial Sequence: Synthetic oligonucleotide
  Sense strand starting at position 3848 of SEQ ID NO: 914589
aguccaagucuugaagguu

SEQ ID NO: 1015599 - RNA, 19 nt, Artificial Sequence
  Description of Artificial Sequence: Synthetic oligonucleotide
  Antisense strand to SEQ ID NO: 1015598
aaccuucaagacuuggacu

SEQ ID NO: 1015600 - RNA, 19 nt, Artificial Sequence
  Description of Artificial Sequence: Synthetic oligonucleotide
  Sense strand starting at position 3920 of SEQ ID NO: 914589
acccuaguuucugcgaaga

SEQ ID NO: 1015601 - RNA, 19 nt, Artificial Sequence
  Description of Artificial Sequence: Synthetic oligonucleotide
  Antisense strand to SEQ ID NO: 1015600
ucuucgcagaaacuagggu

SEQ ID NO: 1015602 - RNA, 19 nt, Artificial Sequence
  Description of Artificial Sequence: Synthetic oligonucleotide
  Sense strand starting at position 2026 of SEQ ID NO: 914590
ugccuacucccauggauac

SEQ ID NO: 1015603 - RNA, 19 nt, Artificial Sequence
  Description of Artificial Sequence: Synthetic oligonucleotide
  Antisense strand to SEQ ID NO: 1015602
guauccaugggaguaggca

SEQ ID NO: 1015604 - RNA, 19 nt, Artificial Sequence
  Description of Artificial Sequence: Synthetic oligonucleotide
  Sense strand starting at position 2027 of SEQ ID NO: 914590
gccuacucccauggauaca

SEQ ID NO: 1015605 - RNA, 19 nt, Artificial Sequence
  Description of Artificial Sequence: Synthetic oligonucleotide
  Antisense strand to SEQ ID NO: 1015604
uguauccaugggaguaggc

SEQ ID NO: 1015606 - RNA, 19 nt, Artificial Sequence
  Description of Artificial Sequence: Synthetic oligonucleotide
  Sense strand starting at position 2141 of SEQ ID NO: 914590
acaggaucuuauccuguca

SEQ ID NO: 1015607 - RNA, 19 nt, Artificial Sequence
  Description of Artificial Sequence: Synthetic oligonucleotide
  Antisense strand to SEQ ID NO: 1015606
ugacaggauaagauccugu

SEQ ID NO: 1015608 - RNA, 19 nt, Artificial Sequence
  Description of Artificial Sequence: Synthetic oligonucleotide
  Sense strand starting at position 2472 of SEQ ID NO: 914590
agaguuguauucuuuguac

SEQ ID NO: 1015609 - RNA, 19 nt, Artificial Sequence
  Description of Artificial Sequence: Synthetic oligonucleotide
  Antisense strand to SEQ ID NO: 1015608
guacaaagaauacaacucu

SEQ ID NO: 1015610 - RNA, 19 nt, Artificial Sequence
  Description of Artificial Sequence: Synthetic oligonucleotide
  Sense strand starting at position 2475 of SEQ ID NO: 914590
guuguauucuuuguacuuu

SEQ ID NO: 1015611 - RNA, 19 nt, Artificial Sequence
  Description of Artificial Sequence: Synthetic oligonucleotide
  Antisense strand to SEQ ID NO: 1015610
aaaguacaaagaauacaac

SEQ ID NO: 1015612 - RNA, 19 nt, Artificial Sequence
  Description of Artificial Sequence: Synthetic oligonucleotide
  Sense strand starting at position 2515 of SEQ ID NO: 914590
ggauuuguuucuuacaugg

SEQ ID NO: 1015613 - RNA, 19 nt, Artificial Sequence
  Description of Artificial Sequence: Synthetic oligonucleotide
  Antisense strand to SEQ ID NO: 1015612
ccauguaagaaacaaaucc

SEQ ID NO: 1015614 - RNA, 19 nt, Artificial Sequence
  Description of Artificial Sequence: Synthetic oligonucleotide
  Sense strand starting at position 2517 of SEQ ID NO: 914590
auuuguuucuuacauggca

SEQ ID NO: 1015615 - RNA, 19 nt, Artificial Sequence
  Description of Artificial Sequence: Synthetic oligonucleotide
  Antisense strand to SEQ ID NO: 1015614
ugccauguaagaaacaaau

SEQ ID NO: 1015616 - RNA, 19 nt, Artificial Sequence
  Description of Artificial Sequence: Synthetic oligonucleotide
  Sense strand starting at position 2537 of SEQ ID NO: 914590
guaccauucuaugugcaua

SEQ ID NO: 1015617 - RNA, 19 nt, Artificial Sequence
  Description of Artificial Sequence: Synthetic oligonucleotide
  Antisense strand to SEQ ID NO: 1015616
uaugcacauagaaugguac

SEQ ID NO: 1015618 - RNA, 19 nt, Artificial Sequence
  Description of Artificial Sequence: Synthetic oligonucleotide
  Sense strand starting at position 2540 of SEQ ID NO: 914590
ccauucuaugugcauagua

SEQ ID NO: 1015619 - RNA, 19 nt, Artificial Sequence
  Description of Artificial Sequence: Synthetic oligonucleotide
  Antisense strand to SEQ ID NO: 1015618
uacuaugcacauagaaugg

SEQ ID NO: 1015620 - RNA, 19 nt, Artificial Sequence
  Description of Artificial Sequence: Synthetic oligonucleotide
  Sense strand starting at position 2545 of SEQ ID NO: 914590
cuaugugcauaguaggaaa

SEQ ID NO: 1015621 - RNA, 19 nt, Artificial Sequence
  Description of Artificial Sequence: Synthetic oligonucleotide
  Antisense strand to SEQ ID NO: 1015620
uuuccuacuaugcacauag

SEQ ID NO: 1015622 - RNA, 19 nt, Artificial Sequence
  Description of Artificial Sequence: Synthetic oligonucleotide
  Sense strand starting at position 2590 of SEQ ID NO: 914590
agcucacauuucuggaaag

SEQ ID NO: 1015623 - RNA, 19 nt, Artificial Sequence
  Description of Artificial Sequence: Synthetic oligonucleotide
  Antisense strand to SEQ ID NO: 1015622
cuuuccagaaaugugagcu

SEQ ID NO: 1015624 - RNA, 19 nt, Artificial Sequence
  Description of Artificial Sequence: Synthetic oligonucleotide
  Sense strand starting at position 2619 of SEQ ID NO: 914590
gugaauggguaaucacaau

SEQ ID NO: 1015625 - RNA, 19 nt, Artificial Sequence
  Description of Artificial Sequence: Synthetic oligonucleotide
  Antisense strand to SEQ ID NO: 1015624
auugugauuacccauucac

SEQ ID NO: 1015626 - RNA, 19 nt, Artificial Sequence
  Description of Artificial Sequence: Synthetic oligonucleotide
  Sense strand starting at position 2730 of SEQ ID NO: 914590
gcuggauguugaaggauga

SEQ ID NO: 1015627 - RNA, 19 nt, Artificial Sequence
  Description of Artificial Sequence: Synthetic oligonucleotide
  Antisense strand to SEQ ID NO: 1015626
ucauccuucaacauccagc

SEQ ID NO: 1015628 - RNA, 19 nt, Artificial Sequence
  Description of Artificial Sequence: Synthetic oligonucleotide
  Sense strand starting at position 2747 of SEQ ID NO: 914590
gagcaucuuccaggugcaa

SEQ ID NO: 1015629 - RNA, 19 nt, Artificial Sequence
  Description of Artificial Sequence: Synthetic oligonucleotide
  Antisense strand to SEQ ID NO: 1015628
uugcaccuggaagaugcuc

SEQ ID NO: 1015630 - RNA, 19 nt, Artificial Sequence
  Description of Artificial Sequence: Synthetic oligonucleotide
  Sense strand starting at position 2749 of SEQ ID NO: 914590
gcaucuuccaggugcaaag

SEQ ID NO: 1015631 - RNA, 19 nt, Artificial Sequence
  Description of Artificial Sequence: Synthetic oligonucleotide
  Antisense strand to SEQ ID NO: 1015630
cuuugcaccuggaagaugc

SEQ ID NO: 1015632 - RNA, 19 nt, Artificial Sequence
  Description of Artificial Sequence: Synthetic oligonucleotide
  Sense strand starting at position 2759 of SEQ ID NO: 914590
ggugcaaaguggucucacu

SEQ ID NO: 1015633 - RNA, 19 nt, Artificial Sequence
  Description of Artificial Sequence: Synthetic oligonucleotide
  Antisense strand to SEQ ID NO: 1015632
agugagaccacuuugcacc

SEQ ID NO: 1015634 - RNA, 19 nt, Artificial Sequence
  Description of Artificial Sequence: Synthetic oligonucleotide
  Sense strand starting at position 2825 of SEQ ID NO: 914590
ggcuguuauuucuagagaa

SEQ ID NO: 1015635 - RNA, 19 nt, Artificial Sequence
  Description of Artificial Sequence: Synthetic oligonucleotide
  Antisense strand to SEQ ID NO: 1015634
uucucuagaaauaacagcc

SEQ ID NO: 1015636 - RNA, 19 nt, Artificial Sequence
  Description of Artificial Sequence: Synthetic oligonucleotide
  Sense strand starting at position 2873 of SEQ ID NO: 914590
uguacaugacuuugaauac

SEQ ID NO: 1015637 - RNA, 19 nt, Artificial Sequence
  Description of Artificial Sequence: Synthetic oligonucleotide
  Antisense strand to SEQ ID NO: 1015636
guauucaaagucauguaca

SEQ ID NO: 1015638 - RNA, 19 nt, Artificial Sequence
  Description of Artificial Sequence: Synthetic oligonucleotide
  Sense strand starting at position 2917 of SEQ ID NO: 914590
aguugagccaauugaugaa

SEQ ID NO: 1015639 - RNA, 19 nt, Artificial Sequence
  Description of Artificial Sequence: Synthetic oligonucleotide
  Antisense strand to SEQ ID NO: 1015638
uucaucaauuggcucaacu

SEQ ID NO: 1015640 - RNA, 19 nt, Artificial Sequence
  Description of Artificial Sequence: Synthetic oligonucleotide
  Sense strand starting at position 2933 of SEQ ID NO: 914590
gaagucauaugugaaucua

SEQ ID NO: 1015641 - RNA, 19 nt, Artificial Sequence
  Description of Artificial Sequence: Synthetic oligonucleotide
  Antisense strand to SEQ ID NO: 1015640
uagauucacauaugacuuc

SEQ ID NO: 1015642 - RNA, 19 nt, Artificial Sequence
  Description of Artificial Sequence: Synthetic oligonucleotide
  Sense strand starting at position 2941 of SEQ ID NO: 914590
augugaaucuacggaguuu

SEQ ID NO: 1015643 - RNA, 19 nt, Artificial Sequence
  Description of Artificial Sequence: Synthetic oligonucleotide
  Antisense strand to SEQ ID NO: 1015642
aaacuccguagauucacau

SEQ ID NO: 1015644 - RNA, 19 nt, Artificial Sequence
  Description of Artificial Sequence: Synthetic oligonucleotide
  Sense strand starting at position 2942 of SEQ ID NO: 914590
ugugaaucuacggaguuua

SEQ ID NO: 1015645 - RNA, 19 nt, Artificial Sequence
  Description of Artificial Sequence: Synthetic oligonucleotide
  Antisense strand to SEQ ID NO: 1015644
uaaacuccguagauucaca

SEQ ID NO: 1015646 - RNA, 19 nt, Artificial Sequence
  Description of Artificial Sequence: Synthetic oligonucleotide
  Sense strand starting at position 2947 of SEQ ID NO: 914590
aucuacggaguuuaaauau

SEQ ID NO: 1015647 - RNA, 19 nt, Artificial Sequence
  Description of Artificial Sequence: Synthetic oligonucleotide
  Antisense strand to SEQ ID NO: 1015646
auauuuaaacuccguagau

SEQ ID NO: 1015648 - RNA, 19 nt, Artificial Sequence
  Description of Artificial Sequence: Synthetic oligonucleotide
  Sense strand starting at position 3058 of SEQ ID NO: 914590
ugaagcagguguuugugau

SEQ ID NO: 1015649 - RNA, 19 nt, Artificial Sequence
  Description of Artificial Sequence: Synthetic oligonucleotide
  Antisense strand to SEQ ID NO: 1015648
aucacaaacaccugcuuca

SEQ ID NO: 1015650 - RNA, 19 nt, Artificial Sequence
  Description of Artificial Sequence: Synthetic oligonucleotide
  Sense strand starting at position 3059 of SEQ ID NO: 914590
gaagcagguguuugugauu

SEQ ID NO: 1015651 - RNA, 19 nt, Artificial Sequence
  Description of Artificial Sequence: Synthetic oligonucleotide
  Antisense strand to SEQ ID NO: 1015650
aaucacaaacaccugcuuc

SEQ ID NO: 1015652 - RNA, 19 nt, Artificial Sequence
  Description of Artificial Sequence: Synthetic oligonucleotide
  Sense strand starting at position 3099 of SEQ ID NO: 914590
ggaagaggcuucuugcaac

SEQ ID NO: 1015653 - RNA, 19 nt, Artificial Sequence
  Description of Artificial Sequence: Synthetic oligonucleotide
  Antisense strand to SEQ ID NO: 1015652
guugcaagaagccucuucc

SEQ ID NO: 1015654 - RNA, 19 nt, Artificial Sequence
  Description of Artificial Sequence: Synthetic oligonucleotide
  Sense strand starting at position 3102 of SEQ ID NO: 914590
agaggcuucuugcaacaca

SEQ ID NO: 1015655 - RNA, 19 nt, Artificial Sequence
  Description of Artificial Sequence: Synthetic oligonucleotide
  Antisense strand to SEQ ID NO: 1015654
uguguugcaagaagccucu

SEQ ID NO: 1015656 - RNA, 19 nt, Artificial Sequence
  Description of Artificial Sequence: Synthetic oligonucleotide
  Sense strand starting at position 3179 of SEQ ID NO: 914590
ggagcuguugcuagagugu

SEQ ID NO: 1015657 - RNA, 19 nt, Artificial Sequence
  Description of Artificial Sequence: Synthetic oligonucleotide
  Antisense strand to SEQ ID NO: 1015656
acacucuagcaacagcucc

SEQ ID NO: 1015658 - RNA, 19 nt, Artificial Sequence
  Description of Artificial Sequence: Synthetic oligonucleotide
  Sense strand starting at position 3218 of SEQ ID NO: 914590
gccaaagcaguagagaaua

SEQ ID NO: 1015659 - RNA, 19 nt, Artificial Sequence
  Description of Artificial Sequence: Synthetic oligonucleotide
  Antisense strand to SEQ ID NO: 1015658
uauucucuacugcuuuggc

SEQ ID NO: 1015660 - RNA, 19 nt, Artificial Sequence
  Description of Artificial Sequence: Synthetic oligonucleotide
  Sense strand starting at position 3234 of SEQ ID NO: 914590
auaaacauguuucuugagu

SEQ ID NO: 1015661 - RNA, 19 nt, Artificial Sequence
  Description of Artificial Sequence: Synthetic oligonucleotide
  Antisense strand to SEQ ID NO: 1015660
acucaagaaacauguuuau

SEQ ID NO: 1015662 - RNA, 19 nt, Artificial Sequence
  Description of Artificial Sequence: Synthetic oligonucleotide
  Sense strand starting at position 3300 of SEQ ID NO: 914590
aguggaauguguggauaac

SEQ ID NO: 1015663 - RNA, 19 nt, Artificial Sequence
  Description of Artificial Sequence: Synthetic oligonucleotide
  Antisense strand to SEQ ID NO: 1015662
guuauccacacauuccacu

SEQ ID NO: 1015664 - RNA, 19 nt, Artificial Sequence
  Description of Artificial Sequence: Synthetic oligonucleotide
  Sense strand starting at position 3301 of SEQ ID NO: 914590
guggaauguguggauaaca

SEQ ID NO: 1015665 - RNA, 19 nt, Artificial Sequence
  Description of Artificial Sequence: Synthetic oligonucleotide
  Antisense strand to SEQ ID NO: 1015664
uguuauccacacauuccac

SEQ ID NO: 1015666 - RNA, 19 nt, Artificial Sequence
  Description of Artificial Sequence: Synthetic oligonucleotide
  Sense strand starting at position 3389 of SEQ ID NO: 914590
agaugaaccuuugagguga

SEQ ID NO: 1015667 - RNA, 19 nt, Artificial Sequence
  Description of Artificial Sequence: Synthetic oligonucleotide
  Antisense strand to SEQ ID NO: 1015666
ucaccucaaagguucaucu

SEQ ID NO: 1015668 - RNA, 19 nt, Artificial Sequence
  Description of Artificial Sequence: Synthetic oligonucleotide
  Sense strand starting at position 3414 of SEQ ID NO: 914590
ugacaucaguucuguagga

SEQ ID NO: 1015669 - RNA, 19 nt, Artificial Sequence
  Description of Artificial Sequence: Synthetic oligonucleotide
  Antisense strand to SEQ ID NO: 1015668
uccuacagaacugauguca

SEQ ID NO: 1015670 - RNA, 19 nt, Artificial Sequence
  Description of Artificial Sequence: Synthetic oligonucleotide
  Sense strand starting at position 3415 of SEQ ID NO: 914590
gacaucaguucuguaggaa

SEQ ID NO: 1015671 - RNA, 19 nt, Artificial Sequence
  Description of Artificial Sequence: Synthetic oligonucleotide
  Antisense strand to SEQ ID NO: 1015670
uuccuacagaacugauguc

SEQ ID NO: 1015672 - RNA, 19 nt, Artificial Sequence
  Description of Artificial Sequence: Synthetic oligonucleotide
  Sense strand starting at position 3541 of SEQ ID NO: 914590
caaggcugucauggugaaa

SEQ ID NO: 1015673 - RNA, 19 nt, Artificial Sequence
  Description of Artificial Sequence: Synthetic oligonucleotide
  Antisense strand to SEQ ID NO: 1015672
uuucaccaugacagccuug

SEQ ID NO: 1015674 - RNA, 19 nt, Artificial Sequence
  Description of Artificial Sequence: Synthetic oligonucleotide
  Sense strand starting at position 3570 of SEQ ID NO: 914590
ggcaaaugaugauugggua

SEQ ID NO: 1015675 - RNA, 19 nt, Artificial Sequence
  Description of Artificial Sequence: Synthetic oligonucleotide
  Antisense strand to SEQ ID NO: 1015674
uacccaaucaucauuugcc

SEQ ID NO: 1015676 - RNA, 19 nt, Artificial Sequence
  Description of Artificial Sequence: Synthetic oligonucleotide
  Sense strand starting at position 3573 of SEQ ID NO: 914590
aaaugaugauuggguagaa

SEQ ID NO: 1015677 - RNA, 19 nt, Artificial Sequence
  Description of Artificial Sequence: Synthetic oligonucleotide
  Antisense strand to SEQ ID NO: 1015676
uucuacccaaucaucauuu

SEQ ID NO: 1015678 - RNA, 19 nt, Artificial Sequence
  Description of Artificial Sequence: Synthetic oligonucleotide
  Sense strand starting at position 3585 of SEQ ID NO: 914590
gguagaaauccuugcaugc

SEQ ID NO: 1015679 - RNA, 19 nt, Artificial Sequence
  Description of Artificial Sequence: Synthetic oligonucleotide
  Antisense strand to SEQ ID NO: 1015678
gcaugcaaggauuucuacc

SEQ ID NO: 1015680 - RNA, 19 nt, Artificial Sequence
  Description of Artificial Sequence: Synthetic oligonucleotide
  Sense strand starting at position 3983 of SEQ ID NO: 914590
agguguaccuacuuaugaa

SEQ ID NO: 1015681 - RNA, 19 nt, Artificial Sequence
  Description of Artificial Sequence: Synthetic oligonucleotide
  Antisense strand to SEQ ID NO: 1015680
uucauaaguagguacaccu

SEQ ID NO: 1015682 - RNA, 19 nt, Artificial Sequence
  Description of Artificial Sequence: Synthetic oligonucleotide
  Sense strand starting at position 191 of SEQ ID NO: 914591
aucuuaguacgauacaguu

SEQ ID NO: 1015683 - RNA, 19 nt, Artificial Sequence
  Description of Artificial Sequence: Synthetic oligonucleotide
  Antisense strand to SEQ ID NO: 1015682
aacuguaucguacuaagau

SEQ ID NO: 1015684 - RNA, 19 nt, Artificial Sequence
  Description of Artificial Sequence: Synthetic oligonucleotide
  Sense strand starting at position 217 of SEQ ID NO: 914591
ugauaucauuuaugagaca

SEQ ID NO: 1015685 - RNA, 19 nt, Artificial Sequence
  Description of Artificial Sequence: Synthetic oligonucleotide
  Antisense strand to SEQ ID NO: 1015684
ugucucauaaaugauauca

SEQ ID NO: 1015686 - RNA, 19 nt, Artificial Sequence
  Description of Artificial Sequence: Synthetic oligonucleotide
  Sense strand starting at position 231 of SEQ ID NO: 914591
agacauuuauuacagggau

SEQ ID NO: 1015687 - RNA, 19 nt, Artificial Sequence
  Description of Artificial Sequence: Synthetic oligonucleotide
  Antisense strand to SEQ ID NO: 1015686
aucccuguaauaaaugucu

SEQ ID NO: 1015688 - RNA, 19 nt, Artificial Sequence
  Description of Artificial Sequence: Synthetic oligonucleotide
  Sense strand starting at position 256 of SEQ ID NO: 914591
ggucacaucucaguaaaug

SEQ ID NO: 1015689 - RNA, 19 nt, Artificial Sequence
  Description of Artificial Sequence: Synthetic oligonucleotide
  Antisense strand to SEQ ID NO: 1015688
cauuuacugagaugugacc

SEQ ID NO: 1015690 - RNA, 19 nt, Artificial Sequence
  Description of Artificial Sequence: Synthetic oligonucleotide
  Sense strand starting at position 301 of SEQ ID NO: 914591
accagauaccuaggaguca

SEQ ID NO: 1015691 - RNA, 19 nt, Artificial Sequence
  Description of Artificial Sequence: Synthetic oligonucleotide
  Antisense strand to SEQ ID NO: 1015690
ugacuccuagguaucuggu

SEQ ID NO: 1015692 - RNA, 19 nt, Artificial Sequence
  Description of Artificial Sequence: Synthetic oligonucleotide
  Sense strand starting at position 557 of SEQ ID NO: 914591
cuauacuggucuuuccuua

SEQ ID NO: 1015693 - RNA, 19 nt, Artificial Sequence
  Description of Artificial Sequence: Synthetic oligonucleotide
  Antisense strand to SEQ ID NO: 1015692
uaaggaaagaccaguauag

SEQ ID NO: 1015694 - RNA, 19 nt, Artificial Sequence
  Description of Artificial Sequence: Synthetic oligonucleotide
  Sense strand starting at position 562 of SEQ ID NO: 914591
cuggucuuuccuuagauuc

SEQ ID NO: 1015695 - RNA, 19 nt, Artificial Sequence
  Description of Artificial Sequence: Synthetic oligonucleotide
  Antisense strand to SEQ ID NO: 1015694
gaaucuaaggaaagaccag

SEQ ID NO: 1015696 - RNA, 19 nt, Artificial Sequence
  Description of Artificial Sequence: Synthetic oligonucleotide
  Sense strand starting at position 703 of SEQ ID NO: 914591
aguaucaacuccuuggaaa

SEQ ID NO: 1015697 - RNA, 19 nt, Artificial Sequence
  Description of Artificial Sequence: Synthetic oligonucleotide
  Antisense strand to SEQ ID NO: 1015696
uuuccaaggaguugauacu

SEQ ID NO: 1015698 - RNA, 19 nt, Artificial Sequence
  Description of Artificial Sequence: Synthetic oligonucleotide
  Sense strand starting at position 704 of SEQ ID NO: 914591
guaucaacuccuuggaaag

SEQ ID NO: 1015699 - RNA, 19 nt, Artificial Sequence
  Description of Artificial Sequence: Synthetic oligonucleotide
  Antisense strand to SEQ ID NO: 1015698
cuuuccaaggaguugauac

SEQ ID NO: 1015700 - RNA, 19 nt, Artificial Sequence
  Description of Artificial Sequence: Synthetic oligonucleotide
  Sense strand starting at position 715 of SEQ ID NO: 914591
uuggaaaggucuucuuaga

SEQ ID NO: 1015701 - RNA, 19 nt, Artificial Sequence
  Description of Artificial Sequence: Synthetic oligonucleotide
  Antisense strand to SEQ ID NO: 1015700
ucuaagaagaccuuuccaa

SEQ ID NO: 1015702 - RNA, 19 nt, Artificial Sequence
  Description of Artificial Sequence: Synthetic oligonucleotide
  Sense strand starting at position 723 of SEQ ID NO: 914591
gucuucuuagaccagucua

SEQ ID NO: 1015703 - RNA, 19 nt, Artificial Sequence
  Description of Artificial Sequence: Synthetic oligonucleotide
  Antisense strand to SEQ ID NO: 1015702
uagacuggucuaagaagac

SEQ ID NO: 1015704 - RNA, 19 nt, Artificial Sequence
  Description of Artificial Sequence: Synthetic oligonucleotide
  Sense strand starting at position 847 of SEQ ID NO: 914591
auucuuggcacagacgaaa

SEQ ID NO: 1015705 - RNA, 19 nt, Artificial Sequence
  Description of Artificial Sequence: Synthetic oligonucleotide
  Antisense strand to SEQ ID NO: 1015704
uuucgucugugccaagaau

SEQ ID NO: 1015706 - RNA, 19 nt, Artificial Sequence
  Description of Artificial Sequence: Synthetic oligonucleotide
  Sense strand starting at position 961 of SEQ ID NO: 914591
uuugcaaacugacuaagaa

SEQ ID NO: 1015707 - RNA, 19 nt, Artificial Sequence
  Description of Artificial Sequence: Synthetic oligonucleotide
  Antisense strand to SEQ ID NO: 1015706
uucuuagucaguuugcaaa

SEQ ID NO: 1015708 - RNA, 19 nt, Artificial Sequence
  Description of Artificial Sequence: Synthetic oligonucleotide
  Sense strand starting at position 1117 of SEQ ID NO: 914591
uaggaaagagucuguaagu

SEQ ID NO: 1015709 - RNA, 19 nt, Artificial Sequence
  Description of Artificial Sequence: Synthetic oligonucleotide
  Antisense strand to SEQ ID NO: 1015708
acuuacagacucuuuccua

SEQ ID NO: 1015710 - RNA, 19 nt, Artificial Sequence
  Description of Artificial Sequence: Synthetic oligonucleotide
  Sense strand starting at position 1118 of SEQ ID NO: 914591
aggaaagagucuguaaguc

SEQ ID NO: 1015711 - RNA, 19 nt, Artificial Sequence
  Description of Artificial Sequence: Synthetic oligonucleotide
  Antisense strand to SEQ ID NO: 1015710
gacuuacagacucuuuccu

SEQ ID NO: 1015712 - RNA, 19 nt, Artificial Sequence
  Description of Artificial Sequence: Synthetic oligonucleotide
  Sense strand starting at position 1141 of SEQ ID NO: 914591
uaaagaguuugggcuuaaa

SEQ ID NO: 1015713 - RNA, 19 nt, Artificial Sequence
  Description of Artificial Sequence: Synthetic oligonucleotide
  Antisense strand to SEQ ID NO: 1015712
uuuaagcccaaacucuuua

SEQ ID NO: 1015714 - RNA, 19 nt, Artificial Sequence
  Description of Artificial Sequence: Synthetic oligonucleotide
  Sense strand starting at position 1144 of SEQ ID NO: 914591
agaguuugggcuuaaaccu

SEQ ID NO: 1015715 - RNA, 19 nt, Artificial Sequence
  Description of Artificial Sequence: Synthetic oligonucleotide
  Antisense strand to SEQ ID NO: 1015714
agguuuaagcccaaacucu

SEQ ID NO: 1015716 - RNA, 19 nt, Artificial Sequence
  Description of Artificial Sequence: Synthetic oligonucleotide
  Sense strand starting at position 1200 of SEQ ID NO: 914591
gagugccucggucaaauau

SEQ ID NO: 1015717 - RNA, 19 nt, Artificial Sequence
  Description of Artificial Sequence: Synthetic oligonucleotide
  Antisense strand to SEQ ID NO: 1015716
auauuugaccgaggcacuc

SEQ ID NO: 1015718 - RNA, 19 nt, Artificial Sequence
  Description of Artificial Sequence: Synthetic oligonucleotide
  Sense strand starting at position 1458 of SEQ ID NO: 914591
aagcacauggcucaguuaa

SEQ ID NO: 1015719 - RNA, 19 nt, Artificial Sequence
  Description of Artificial Sequence: Synthetic oligonucleotide
  Antisense strand to SEQ ID NO: 1015718
uuaacugagccaugugcuu

SEQ ID NO: 1015720 - RNA, 19 nt, Artificial Sequence
  Description of Artificial Sequence: Synthetic oligonucleotide
  Sense strand starting at position 1660 of SEQ ID NO: 914591
auaaacguucguuagguga

SEQ ID NO: 1015721 - RNA, 19 nt, Artificial Sequence
  Description of Artificial Sequence: Synthetic oligonucleotide
  Antisense strand to SEQ ID NO: 1015720
ucaccuaacgaacguuuau

SEQ ID NO: 1015722 - RNA, 19 nt, Artificial Sequence
  Description of Artificial Sequence: Synthetic oligonucleotide
  Sense strand starting at position 2045 of SEQ ID NO: 914591
ggagcuuagcgaggaaauc

SEQ ID NO: 1015723 - RNA, 19 nt, Artificial Sequence
  Description of Artificial Sequence: Synthetic oligonucleotide
  Antisense strand to SEQ ID NO: 1015722
gauuuccucgcuaagcucc

SEQ ID NO: 1015724 - RNA, 19 nt, Artificial Sequence
  Description of Artificial Sequence: Synthetic oligonucleotide
  Sense strand starting at position 2474 of SEQ ID NO: 914591
gggcgaccuguguaaugga

SEQ ID NO: 1015725 - RNA, 19 nt, Artificial Sequence
  Description of Artificial Sequence: Synthetic oligonucleotide
  Antisense strand to SEQ ID NO: 1015724
uccauuacacaggucgccc

SEQ ID NO: 1015726 - RNA, 19 nt, Artificial Sequence
  Description of Artificial Sequence: Synthetic oligonucleotide
  Sense strand starting at position 2492 of SEQ ID NO: 914591
auggguugugcgagcaaca

SEQ ID NO: 1015727 - RNA, 19 nt, Artificial Sequence
  Description of Artificial Sequence: Synthetic oligonucleotide
  Antisense strand to SEQ ID NO: 1015726
uguugcucgcacaacccau

SEQ ID NO: 1015728 - RNA, 19 nt, Artificial Sequence
  Description of Artificial Sequence: Synthetic oligonucleotide
  Sense strand starting at position 2630 of SEQ ID NO: 914591
cucacugcugagugaucua

SEQ ID NO: 1015729 - RNA, 19 nt, Artificial Sequence
  Description of Artificial Sequence: Synthetic oligonucleotide
  Antisense strand to SEQ ID NO: 1015728
uagaucacucagcagugag

SEQ ID NO: 1015730 - RNA, 19 nt, Artificial Sequence
  Description of Artificial Sequence: Synthetic oligonucleotide
  Sense strand starting at position 2710 of SEQ ID NO: 914591
auauacgacgcacaagauu

SEQ ID NO: 1015731 - RNA, 19 nt, Artificial Sequence
  Description of Artificial Sequence: Synthetic oligonucleotide
  Antisense strand to SEQ ID NO: 1015730
aaucuugugcgucguauau

SEQ ID NO: 1015732 - RNA, 19 nt, Artificial Sequence
  Description of Artificial Sequence: Synthetic oligonucleotide
  Sense strand starting at position 2721 of SEQ ID NO: 914591
acaagauugcugugacgau

SEQ ID NO: 1015733 - RNA, 19 nt, Artificial Sequence
  Description of Artificial Sequence: Synthetic oligonucleotide
  Antisense strand to SEQ ID NO: 1015732
aucgucacagcaaucuugu

SEQ ID NO: 1015734 - RNA, 19 nt, Artificial Sequence
  Description of Artificial Sequence: Synthetic oligonucleotide
  Sense strand starting at position 2735 of SEQ ID NO: 914591
acgauuuaguuagaggaga

SEQ ID NO: 1015735 - RNA, 19 nt, Artificial Sequence
  Description of Artificial Sequence: Synthetic oligonucleotide
  Antisense strand to SEQ ID NO: 1015734
ucuccucuaacuaaaucgu

SEQ ID NO: 1015736 - RNA, 19 nt, Artificial Sequence
  Description of Artificial Sequence: Synthetic oligonucleotide
  Sense strand starting at position 2806 of SEQ ID NO: 914591
auaaauugucaugguagcu

SEQ ID NO: 1015737 - RNA, 19 nt, Artificial Sequence
  Description of Artificial Sequence: Synthetic oligonucleotide
  Antisense strand to SEQ ID NO: 1015736
agcuaccaugacaauuuau

SEQ ID NO: 1015738 - RNA, 19 nt, Artificial Sequence
  Description of Artificial Sequence: Synthetic oligonucleotide
  Sense strand starting at position 2819 of SEQ ID NO: 914591
guagcuguuauugccguua

SEQ ID NO: 1015739 - RNA, 19 nt, Artificial Sequence
  Description of Artificial Sequence: Synthetic oligonucleotide
  Antisense strand to SEQ ID NO: 1015738
uaacggcaauaacagcuac

SEQ ID NO: 1015740 - RNA, 19 nt, Artificial Sequence
  Description of Artificial Sequence: Synthetic oligonucleotide
  Sense strand starting at position 2823 of SEQ ID NO: 914591
cuguuauugccguuacgua

SEQ ID NO: 1015741 - RNA, 19 nt, Artificial Sequence
  Description of Artificial Sequence: Synthetic oligonucleotide
  Antisense strand to SEQ ID NO: 1015740
uacguaacggcaauaacag

SEQ ID NO: 1015742 - RNA, 19 nt, Artificial Sequence
  Description of Artificial Sequence: Synthetic oligonucleotide
  Sense strand starting at position 2835 of SEQ ID NO: 914591
uuacguaggauuugcggaa

SEQ ID NO: 1015743 - RNA, 19 nt, Artificial Sequence
  Description of Artificial Sequence: Synthetic oligonucleotide
  Antisense strand to SEQ ID NO: 1015742
uuccgcaaauccuacguaa

SEQ ID NO: 1015744 - RNA, 19 nt, Artificial Sequence
  Description of Artificial Sequence: Synthetic oligonucleotide
  Sense strand starting at position 2893 of SEQ ID NO: 914591
ggguuugguggugaugaua

SEQ ID NO: 1015745 - RNA, 19 nt, Artificial Sequence
  Description of Artificial Sequence: Synthetic oligonucleotide
  Antisense strand to SEQ ID NO: 1015744
uaucaucaccaccaaaccc

SEQ ID NO: 1015746 - RNA, 19 nt, Artificial Sequence
  Description of Artificial Sequence: Synthetic oligonucleotide
  Sense strand starting at position 2955 of SEQ ID NO: 914591
gggcgcuauagauaaagca

SEQ ID NO: 1015747 - RNA, 19 nt, Artificial Sequence
  Description of Artificial Sequence: Synthetic oligonucleotide
  Antisense strand to SEQ ID NO: 1015746
ugcuuuaucuauagcgccc

SEQ ID NO: 1015748 - RNA, 19 nt, Artificial Sequence
  Description of Artificial Sequence: Synthetic oligonucleotide
  Sense strand starting at position 3007 of SEQ ID NO: 914591
gcaugauaagggcagacuu

SEQ ID NO: 1015749 - RNA, 19 nt, Artificial Sequence
  Description of Artificial Sequence: Synthetic oligonucleotide
  Antisense strand to SEQ ID NO: 1015748
aagucugcccuuaucaugc

SEQ ID NO: 1015750 - RNA, 19 nt, Artificial Sequence
  Description of Artificial Sequence: Synthetic oligonucleotide
  Sense strand starting at position 3038 of SEQ ID NO: 914591
caaugaaggugagugcuaa

SEQ ID NO: 1015751 - RNA, 19 nt, Artificial Sequence
  Description of Artificial Sequence: Synthetic oligonucleotide
  Antisense strand to SEQ ID NO: 1015750
uuagcacucaccuucauug

SEQ ID NO: 1015752 - RNA, 19 nt, Artificial Sequence
  Description of Artificial Sequence: Synthetic oligonucleotide
  Sense strand starting at position 3419 of SEQ ID NO: 914591
ggcuguagccaagaacuau

SEQ ID NO: 1015753 - RNA, 19 nt, Artificial Sequence
  Description of Artificial Sequence: Synthetic oligonucleotide
  Antisense strand to SEQ ID NO: 1015752
auaguucuuggcuacagcc

SEQ ID NO: 1015754 - RNA, 19 nt, Artificial Sequence
  Description of Artificial Sequence: Synthetic oligonucleotide
  Sense strand starting at position 3586 of SEQ ID NO: 914591
uggcuaacaucuuccagaa

SEQ ID NO: 1015755 - RNA, 19 nt, Artificial Sequence
  Description of Artificial Sequence: Synthetic oligonucleotide
  Antisense strand to SEQ ID NO: 1015754
uucuggaagauguuagcca

SEQ ID NO: 1015756 - RNA, 19 nt, Artificial Sequence
  Description of Artificial Sequence: Synthetic oligonucleotide
  Sense strand starting at position 3698 of SEQ ID NO: 914591
ucuguaauuggacacgaca

SEQ ID NO: 1015757 - RNA, 19 nt, Artificial Sequence
  Description of Artificial Sequence: Synthetic oligonucleotide
  Antisense strand to SEQ ID NO: 1015756
ugucguguccaauuacaga

SEQ ID NO: 1015758 - RNA, 19 nt, Artificial Sequence
  Description of Artificial Sequence: Synthetic oligonucleotide
  Sense strand starting at position 3700 of SEQ ID NO: 914591
uguaauuggacacgacagu

SEQ ID NO: 1015759 - RNA, 19 nt, Artificial Sequence
  Description of Artificial Sequence: Synthetic oligonucleotide
  Antisense strand to SEQ ID NO: 1015758
acugucguguccaauuaca

SEQ ID NO: 1015760 - RNA, 19 nt, Artificial Sequence
  Description of Artificial Sequence: Synthetic oligonucleotide
  Sense strand starting at position 3951 of SEQ ID NO: 914591
guagcccuauuauuaagaa

SEQ ID NO: 1015761 - RNA, 19 nt, Artificial Sequence
  Description of Artificial Sequence: Synthetic oligonucleotide
  Antisense strand to SEQ ID NO: 1015760
uucuuaauaauagggcuac

SEQ ID NO: 1015762 - RNA, 19 nt, Artificial Sequence
  Description of Artificial Sequence: Synthetic oligonucleotide
  Sense strand starting at position 21 of SEQ ID NO: 914592
gugugaccgacuggauaua

SEQ ID NO: 1015763 - RNA, 19 nt, Artificial Sequence
  Description of Artificial Sequence: Synthetic oligonucleotide
  Antisense strand to SEQ ID NO: 1015762
uauauccagucggucacac

SEQ ID NO: 1015764 - RNA, 19 nt, Artificial Sequence
  Description of Artificial Sequence: Synthetic oligonucleotide
  Sense strand starting at position 137 of SEQ ID NO: 914592
ccaacucauguccauguau

SEQ ID NO: 1015765 - RNA, 19 nt, Artificial Sequence
  Description of Artificial Sequence: Synthetic oligonucleotide
  Antisense strand to SEQ ID NO: 1015764
auacauggacaugaguugg

SEQ ID NO: 1015766 - RNA, 19 nt, Artificial Sequence
  Description of Artificial Sequence: Synthetic oligonucleotide
  Sense strand starting at position 169 of SEQ ID NO: 914592
ggaugaauguuaccuuaca

SEQ ID NO: 1015767 - RNA, 19 nt, Artificial Sequence
  Description of Artificial Sequence: Synthetic oligonucleotide
  Antisense strand to SEQ ID NO: 1015766
uguaagguaacauucaucc

SEQ ID NO: 1015768 - RNA, 19 nt, Artificial Sequence
  Description of Artificial Sequence: Synthetic oligonucleotide
  Sense strand starting at position 277 of SEQ ID NO: 914592
ucguaagcgcccuuauaac

SEQ ID NO: 1015769 - RNA, 19 nt, Artificial Sequence
  Description of Artificial Sequence: Synthetic oligonucleotide
  Antisense strand to SEQ ID NO: 1015768
guuauaagggcgcuuacga

SEQ ID NO: 1015770 - RNA, 19 nt, Artificial Sequence
  Description of Artificial Sequence: Synthetic oligonucleotide
  Sense strand starting at position 478 of SEQ ID NO: 914592
acguauggccuccagaacu

SEQ ID NO: 1015771 - RNA, 19 nt, Artificial Sequence
  Description of Artificial Sequence: Synthetic oligonucleotide
  Antisense strand to SEQ ID NO: 1015770
aguucuggaggccauacgu

SEQ ID NO: 1015772 - RNA, 19 nt, Artificial Sequence
  Description of Artificial Sequence: Synthetic oligonucleotide
  Sense strand starting at position 501 of SEQ ID NO: 914592
caagguaaaucucuguugu

SEQ ID NO: 1015773 - RNA, 19 nt, Artificial Sequence
  Description of Artificial Sequence: Synthetic oligonucleotide
  Antisense strand to SEQ ID NO: 1015772
acaacagagauuuaccuug

SEQ ID NO: 1015774 - RNA, 19 nt, Artificial Sequence
  Description of Artificial Sequence: Synthetic oligonucleotide
  Sense strand starting at position 502 of SEQ ID NO: 914592
aagguaaaucucuguuguu

SEQ ID NO: 1015775 - RNA, 19 nt, Artificial Sequence
  Description of Artificial Sequence: Synthetic oligonucleotide
  Antisense strand to SEQ ID NO: 1015774
aacaacagagauuuaccuu

SEQ ID NO: 1015776 - RNA, 19 nt, Artificial Sequence
  Description of Artificial Sequence: Synthetic oligonucleotide
  Sense strand starting at position 841 of SEQ ID NO: 914592
ucuguuaaaucccugauug

SEQ ID NO: 1015777 - RNA, 19 nt, Artificial Sequence
  Description of Artificial Sequence: Synthetic oligonucleotide
  Antisense strand to SEQ ID NO: 1015776
caaucagggauuuaacaga

SEQ ID NO: 1015778 - RNA, 19 nt, Artificial Sequence
  Description of Artificial Sequence: Synthetic oligonucleotide
  Sense strand starting at position 842 of SEQ ID NO: 914592
cuguuaaaucccugauugu

SEQ ID NO: 1015779 - RNA, 19 nt, Artificial Sequence
  Description of Artificial Sequence: Synthetic oligonucleotide
  Antisense strand to SEQ ID NO: 1015778
acaaucagggauuuaacag

SEQ ID NO: 1015780 - RNA, 19 nt, Artificial Sequence
  Description of Artificial Sequence: Synthetic oligonucleotide
  Sense strand starting at position 843 of SEQ ID NO: 914592
uguuaaaucccugauugua

SEQ ID NO: 1015781 - RNA, 19 nt, Artificial Sequence
  Description of Artificial Sequence: Synthetic oligonucleotide
  Antisense strand to SEQ ID NO: 1015780
uacaaucagggauuuaaca

SEQ ID NO: 1015782 - RNA, 19 nt, Artificial Sequence
  Description of Artificial Sequence: Synthetic oligonucleotide
  Sense strand starting at position 853 of SEQ ID NO: 914592
cugauuguacugcacuaga

SEQ ID NO: 1015783 - RNA, 19 nt, Artificial Sequence
  Description of Artificial Sequence: Synthetic oligonucleotide
  Antisense strand to SEQ ID NO: 1015782
ucuagugcaguacaaucag

SEQ ID NO: 1015784 - RNA, 19 nt, Artificial Sequence
  Description of Artificial Sequence: Synthetic oligonucleotide
  Sense strand starting at position 884 of SEQ ID NO: 914592
agcugaaagauguggguga

SEQ ID NO: 1015785 - RNA, 19 nt, Artificial Sequence
  Description of Artificial Sequence: Synthetic oligonucleotide
  Antisense strand to SEQ ID NO: 1015784
ucacccacaucuuucagcu

SEQ ID NO: 1015786 - RNA, 19 nt, Artificial Sequence
  Description of Artificial Sequence: Synthetic oligonucleotide
  Sense strand starting at position 987 of SEQ ID NO: 914592
aggucaaagugaucauuac

SEQ ID NO: 1015787 - RNA, 19 nt, Artificial Sequence
  Description of Artificial Sequence: Synthetic oligonucleotide
  Antisense strand to SEQ ID NO: 1015786
guaaugaucacuuugaccu

SEQ ID NO: 1015788 - RNA, 19 nt, Artificial Sequence
  Description of Artificial Sequence: Synthetic oligonucleotide
  Sense strand starting at position 1005 of SEQ ID NO: 914592
cagguauacucaucuggga

SEQ ID NO: 1015789 - RNA, 19 nt, Artificial Sequence
  Description of Artificial Sequence: Synthetic oligonucleotide
  Antisense strand to SEQ ID NO: 1015788
ucccagaugaguauaccug

SEQ ID NO: 1015790 - RNA, 19 nt, Artificial Sequence
  Description of Artificial Sequence: Synthetic oligonucleotide
  Sense strand starting at position 1007 of SEQ ID NO: 914592
gguauacucaucugggaac

SEQ ID NO: 1015791 - RNA, 19 nt, Artificial Sequence
  Description of Artificial Sequence: Synthetic oligonucleotide
  Antisense strand to SEQ ID NO: 1015790
guucccagaugaguauacc

SEQ ID NO: 1015792 - RNA, 19 nt, Artificial Sequence
  Description of Artificial Sequence: Synthetic oligonucleotide
  Sense strand starting at position 1150 of SEQ ID NO: 914592
gaugauguugagggaugca

SEQ ID NO: 1015793 - RNA, 19 nt, Artificial Sequence
  Description of Artificial Sequence: Synthetic oligonucleotide
  Antisense strand to SEQ ID NO: 1015792
ugcaucccucaacaucauc

SEQ ID NO: 1015794 - RNA, 19 nt, Artificial Sequence
  Description of Artificial Sequence: Synthetic oligonucleotide
  Sense strand starting at position 1187 of SEQ ID NO: 914592
aagcaaaggcuuugggauu

SEQ ID NO: 1015795 - RNA, 19 nt, Artificial Sequence
  Description of Artificial Sequence: Synthetic oligonucleotide
  Antisense strand to SEQ ID NO: 1015794
aaucccaaagccuuugcuu

SEQ ID NO: 1015796 - RNA, 19 nt, Artificial Sequence
  Description of Artificial Sequence: Synthetic oligonucleotide
  Sense strand starting at position 1240 of SEQ ID NO: 914592
accuacuaagcgugaaaga

SEQ ID NO: 1015797 - RNA, 19 nt, Artificial Sequence
  Description of Artificial Sequence: Synthetic oligonucleotide
  Antisense strand to SEQ ID NO: 1015796
ucuuucacgcuuaguaggu

SEQ ID NO: 1015798 - RNA, 19 nt, Artificial Sequence
  Description of Artificial Sequence: Synthetic oligonucleotide
  Sense strand starting at position 1241 of SEQ ID NO: 914592
ccuacuaagcgugaaagau

SEQ ID NO: 1015799 - RNA, 19 nt, Artificial Sequence
  Description of Artificial Sequence: Synthetic oligonucleotide
  Antisense strand to SEQ ID NO: 1015798
aucuuucacgcuuaguagg

SEQ ID NO: 1015800 - RNA, 19 nt, Artificial Sequence
  Description of Artificial Sequence: Synthetic oligonucleotide
  Sense strand starting at position 1249 of SEQ ID NO: 914592
gcgugaaagauucggacaa

SEQ ID NO: 1015801 - RNA, 19 nt, Artificial Sequence
  Description of Artificial Sequence: Synthetic oligonucleotide
  Antisense strand to SEQ ID NO: 1015800
uuguccgaaucuuucacgc

SEQ ID NO: 1015802 - RNA, 19 nt, Artificial Sequence
  Description of Artificial Sequence: Synthetic oligonucleotide
  Sense strand starting at position 1385 of SEQ ID NO: 914592
gugucauuauuaccacuau

SEQ ID NO: 1015803 - RNA, 19 nt, Artificial Sequence
  Description of Artificial Sequence: Synthetic oligonucleotide
  Antisense strand to SEQ ID NO: 1015802
auagugguaauaaugacac

SEQ ID NO: 1015804 - RNA, 19 nt, Artificial Sequence
  Description of Artificial Sequence: Synthetic oligonucleotide
  Sense strand starting at position 1397 of SEQ ID NO: 914592
ccacuauugucaucaguau

SEQ ID NO: 1015805 - RNA, 19 nt, Artificial Sequence
  Description of Artificial Sequence: Synthetic oligonucleotide
  Antisense strand to SEQ ID NO: 1015804
auacugaugacaauagugg

SEQ ID NO: 1015806 - RNA, 19 nt, Artificial Sequence
  Description of Artificial Sequence: Synthetic oligonucleotide
  Sense strand starting at position 1424 of SEQ ID NO: 914592
ugaauaugacuguagcuau

SEQ ID NO: 1015807 - RNA, 19 nt, Artificial Sequence
  Description of Artificial Sequence: Synthetic oligonucleotide
  Antisense strand to SEQ ID NO: 1015806
auagcuacagucauauuca

SEQ ID NO: 1015808 - RNA, 19 nt, Artificial Sequence
  Description of Artificial Sequence: Synthetic oligonucleotide
  Sense strand starting at position 1555 of SEQ ID NO: 914592
cccggcgugaccucucauu

SEQ ID NO: 1015809 - RNA, 19 nt, Artificial Sequence
  Description of Artificial Sequence: Synthetic oligonucleotide
  Antisense strand to SEQ ID NO: 1015808
aaugagaggucacgccggg

SEQ ID NO: 1015810 - RNA, 19 nt, Artificial Sequence
  Description of Artificial Sequence: Synthetic oligonucleotide
  Sense strand starting at position 2016 of SEQ ID NO: 914592
cgccaaugacgucaggaaa

SEQ ID NO: 1015811 - RNA, 19 nt, Artificial Sequence
  Description of Artificial Sequence: Synthetic oligonucleotide
  Antisense strand to SEQ ID NO: 1015810
uuuccugacgucauuggcg

SEQ ID NO: 1015812 - RNA, 19 nt, Artificial Sequence
  Description of Artificial Sequence: Synthetic oligonucleotide
  Sense strand starting at position 2167 of SEQ ID NO: 914592
cgcacuguuguuguuacua

SEQ ID NO: 1015813 - RNA, 19 nt, Artificial Sequence
  Description of Artificial Sequence: Synthetic oligonucleotide
  Antisense strand to SEQ ID NO: 1015812
uaguaacaacaacagugcg

SEQ ID NO: 1015814 - RNA, 19 nt, Artificial Sequence
  Description of Artificial Sequence: Synthetic oligonucleotide
  Sense strand starting at position 2259 of SEQ ID NO: 914592
ugaguauguguguaaacac

SEQ ID NO: 1015815 - RNA, 19 nt, Artificial Sequence
  Description of Artificial Sequence: Synthetic oligonucleotide
  Antisense strand to SEQ ID NO: 1015814
guguuuacacacauacuca

SEQ ID NO: 1015816 - RNA, 19 nt, Artificial Sequence
  Description of Artificial Sequence: Synthetic oligonucleotide
  Sense strand starting at position 2353 of SEQ ID NO: 914592
guaaacagcuaguuaguga

SEQ ID NO: 1015817 - RNA, 19 nt, Artificial Sequence
  Description of Artificial Sequence: Synthetic oligonucleotide
  Antisense strand to SEQ ID NO: 1015816
ucacuaacuagcuguuuac

SEQ ID NO: 1015818 - RNA, 19 nt, Artificial Sequence
  Description of Artificial Sequence: Synthetic oligonucleotide
  Sense strand starting at position 2393 of SEQ ID NO: 914592
gguuguacuuccucaggaa

SEQ ID NO: 1015819 - RNA, 19 nt, Artificial Sequence
  Description of Artificial Sequence: Synthetic oligonucleotide
  Antisense strand to SEQ ID NO: 1015818
uuccugaggaaguacaacc

SEQ ID NO: 1015820 - RNA, 19 nt, Artificial Sequence
  Description of Artificial Sequence: Synthetic oligonucleotide
  Sense strand starting at position 2992 of SEQ ID NO: 914592
gugggagagcuuagcugua

SEQ ID NO: 1015821 - RNA, 19 nt, Artificial Sequence
  Description of Artificial Sequence: Synthetic oligonucleotide
  Antisense strand to SEQ ID NO: 1015820
uacagcuaagcucucccac

SEQ ID NO: 1015822 - RNA, 19 nt, Artificial Sequence
  Description of Artificial Sequence: Synthetic oligonucleotide
  Sense strand starting at position 2997 of SEQ ID NO: 914592
agagcuuagcuguagcaaa

SEQ ID NO: 1015823 - RNA, 19 nt, Artificial Sequence
  Description of Artificial Sequence: Synthetic oligonucleotide
  Antisense strand to SEQ ID NO: 1015822
uuugcuacagcuaagcucu

SEQ ID NO: 1015824 - RNA, 19 nt, Artificial Sequence
  Description of Artificial Sequence: Synthetic oligonucleotide
  Sense strand starting at position 3004 of SEQ ID NO: 914592
agcuguagcaaaggagauu

SEQ ID NO: 1015825 - RNA, 19 nt, Artificial Sequence
  Description of Artificial Sequence: Synthetic oligonucleotide
  Antisense strand to SEQ ID NO: 1015824
aaucuccuuugcuacagcu

SEQ ID NO: 1015826 - RNA, 19 nt, Artificial Sequence
  Description of Artificial Sequence: Synthetic oligonucleotide
  Sense strand starting at position 3192 of SEQ ID NO: 914592
gaacacuagaugugguaga

SEQ ID NO: 1015827 - RNA, 19 nt, Artificial Sequence
  Description of Artificial Sequence: Synthetic oligonucleotide
  Antisense strand to SEQ ID NO: 1015826
ucuaccacaucuaguguuc

SEQ ID NO: 1015828 - RNA, 19 nt, Artificial Sequence
  Description of Artificial Sequence: Synthetic oligonucleotide
  Sense strand starting at position 3197 of SEQ ID NO: 914592
cuagaugugguagacagua

SEQ ID NO: 1015829 - RNA, 19 nt, Artificial Sequence
  Description of Artificial Sequence: Synthetic oligonucleotide
  Antisense strand to SEQ ID NO: 1015828
uacugucuaccacaucuag

SEQ ID NO: 1015830 - RNA, 19 nt, Artificial Sequence
  Description of Artificial Sequence: Synthetic oligonucleotide
  Sense strand starting at position 3659 of SEQ ID NO: 914592
acuguuuaaucagugcaga

SEQ ID NO: 1015831 - RNA, 19 nt, Artificial Sequence
  Description of Artificial Sequence: Synthetic oligonucleotide
  Antisense strand to SEQ ID NO: 1015830
ucugcacugauuaaacagu

SEQ ID NO: 1015832 - RNA, 19 nt, Artificial Sequence
  Description of Artificial Sequence: Synthetic oligonucleotide
  Sense strand starting at position 3662 of SEQ ID NO: 914592
guuuaaucagugcagaguu

SEQ ID NO: 1015833 - RNA, 19 nt, Artificial Sequence
  Description of Artificial Sequence: Synthetic oligonucleotide
  Antisense strand to SEQ ID NO: 1015832
aacucugcacugauuaaac

SEQ ID NO: 1015834 - RNA, 19 nt, Artificial Sequence
  Description of Artificial Sequence: Synthetic oligonucleotide
  Sense strand starting at position 3677 of SEQ ID NO: 914592
aguuccaguuugguaagau

SEQ ID NO: 1015835 - RNA, 19 nt, Artificial Sequence
  Description of Artificial Sequence: Synthetic oligonucleotide
  Antisense strand to SEQ ID NO: 1015834
aucuuaccaaacuggaacu

SEQ ID NO: 1015836 - RNA, 19 nt, Artificial Sequence
  Description of Artificial Sequence: Synthetic oligonucleotide
  Sense strand starting at position 3699 of SEQ ID NO: 914592
aagaguucugcagauuggu

SEQ ID NO: 1015837 - RNA, 19 nt, Artificial Sequence
  Description of Artificial Sequence: Synthetic oligonucleotide
  Antisense strand to SEQ ID NO: 1015836
accaaucugcagaacucuu

SEQ ID NO: 1015838 - RNA, 19 nt, Artificial Sequence
  Description of Artificial Sequence: Synthetic oligonucleotide
  Sense strand starting at position 3840 of SEQ ID NO: 914592
cgauaaggcccucagcuau

SEQ ID NO: 1015839 - RNA, 19 nt, Artificial Sequence
  Description of Artificial Sequence: Synthetic oligonucleotide
  Antisense strand to SEQ ID NO: 1015838
auagcugagggccuuaucg

SEQ ID NO: 1015840 - RNA, 19 nt, Artificial Sequence
  Description of Artificial Sequence: Synthetic oligonucleotide
  Sense strand starting at position 3881 of SEQ ID NO: 914592
guaggagucaggcauauau

SEQ ID NO: 1015841 - RNA, 19 nt, Artificial Sequence
  Description of Artificial Sequence: Synthetic oligonucleotide
  Antisense strand to SEQ ID NO: 1015840
auauaugccugacuccuac

SEQ ID NO: 1015842 - RNA, 19 nt, Artificial Sequence
  Description of Artificial Sequence: Synthetic oligonucleotide
  Sense strand starting at position 320 of SEQ ID NO: 914593
acaucaagcuuccugaaug

SEQ ID NO: 1015843 - RNA, 19 nt, Artificial Sequence
  Description of Artificial Sequence: Synthetic oligonucleotide
  Antisense strand to SEQ ID NO: 1015842
cauucaggaagcuugaugu

SEQ ID NO: 1015844 - RNA, 19 nt, Artificial Sequence
  Description of Artificial Sequence: Synthetic oligonucleotide
  Sense strand starting at position 432 of SEQ ID NO: 914593
augauauagcacugaggau

SEQ ID NO: 1015845 - RNA, 19 nt, Artificial Sequence
  Description of Artificial Sequence: Synthetic oligonucleotide
  Antisense strand to SEQ ID NO: 1015844
auccucagugcuauaucau

SEQ ID NO: 1015846 - RNA, 19 nt, Artificial Sequence
  Description of Artificial Sequence: Synthetic oligonucleotide
  Sense strand starting at position 441 of SEQ ID NO: 914593
cacugaggauucguucuuu

SEQ ID NO: 1015847 - RNA, 19 nt, Artificial Sequence
  Description of Artificial Sequence: Synthetic oligonucleotide
  Antisense strand to SEQ ID NO: 1015846
aaagaacgaauccucagug

SEQ ID NO: 1015848 - RNA, 19 nt, Artificial Sequence
  Description of Artificial Sequence: Synthetic oligonucleotide
  Sense strand starting at position 445 of SEQ ID NO: 914593
gaggauucguucuuuauga

SEQ ID NO: 1015849 - RNA, 19 nt, Artificial Sequence
  Description of Artificial Sequence: Synthetic oligonucleotide
  Antisense strand to SEQ ID NO: 1015848
ucauaaagaacgaauccuc

SEQ ID NO: 1015850 - RNA, 19 nt, Artificial Sequence
  Description of Artificial Sequence: Synthetic oligonucleotide
  Sense strand starting at position 446 of SEQ ID NO: 914593
aggauucguucuuuaugag

SEQ ID NO: 1015851 - RNA, 19 nt, Artificial Sequence
  Description of Artificial Sequence: Synthetic oligonucleotide
  Antisense strand to SEQ ID NO: 1015850
cucauaaagaacgaauccu

SEQ ID NO: 1015852 - RNA, 19 nt, Artificial Sequence
  Description of Artificial Sequence: Synthetic oligonucleotide
  Sense strand starting at position 541 of SEQ ID NO: 914593
auccuugacagauggaagu

SEQ ID NO: 1015853 - RNA, 19 nt, Artificial Sequence
  Description of Artificial Sequence: Synthetic oligonucleotide
  Antisense strand to SEQ ID NO: 1015852
acuuccaucugucaaggau

SEQ ID NO: 1015854 - RNA, 19 nt, Artificial Sequence
  Description of Artificial Sequence: Synthetic oligonucleotide
  Sense strand starting at position 621 of SEQ ID NO: 914593
aauuuagugugucuccuga

SEQ ID NO: 1015855 - RNA, 19 nt, Artificial Sequence
  Description of Artificial Sequence: Synthetic oligonucleotide
  Antisense strand to SEQ ID NO: 1015854
ucaggagacacacuaaauu

SEQ ID NO: 1015856 - RNA, 19 nt, Artificial Sequence
  Description of Artificial Sequence: Synthetic oligonucleotide
  Sense strand starting at position 631 of SEQ ID NO: 914593
gucuccugauagucacuau

SEQ ID NO: 1015857 - RNA, 19 nt, Artificial Sequence
  Description of Artificial Sequence: Synthetic oligonucleotide
  Antisense strand to SEQ ID NO: 1015856
auagugacuaucaggagac

SEQ ID NO: 1015858 - RNA, 19 nt, Artificial Sequence
  Description of Artificial Sequence: Synthetic oligonucleotide
  Sense strand starting at position 910 of SEQ ID NO: 914593
gucuacuggcaagaagagu

SEQ ID NO: 1015859 - RNA, 19 nt, Artificial Sequence
  Description of Artificial Sequence: Synthetic oligonucleotide
  Antisense strand to SEQ ID NO: 1015858
acucuucuugccaguagac

SEQ ID NO: 1015860 - RNA, 19 nt, Artificial Sequence
  Description of Artificial Sequence: Synthetic oligonucleotide
  Sense strand starting at position 924 of SEQ ID NO: 914593
agagucauuucauggagga

SEQ ID NO: 1015861 - RNA, 19 nt, Artificial Sequence
  Description of Artificial Sequence: Synthetic oligonucleotide
  Antisense strand to SEQ ID NO: 1015860
uccuccaugaaaugacucu

SEQ ID NO: 1015862 - RNA, 19 nt, Artificial Sequence
  Description of Artificial Sequence: Synthetic oligonucleotide
  Sense strand starting at position 963 of SEQ ID NO: 914593
gguaauggagagugcugaa

SEQ ID NO: 1015863 - RNA, 19 nt, Artificial Sequence
  Description of Artificial Sequence: Synthetic oligonucleotide
  Antisense strand to SEQ ID NO: 1015862
uucagcacucuccauuacc

SEQ ID NO: 1015864 - RNA, 19 nt, Artificial Sequence
  Description of Artificial Sequence: Synthetic oligonucleotide
  Sense strand starting at position 970 of SEQ ID NO: 914593
gagagugcugaaugucaca

SEQ ID NO: 1015865 - RNA, 19 nt, Artificial Sequence
  Description of Artificial Sequence: Synthetic oligonucleotide
  Antisense strand to SEQ ID NO: 1015864
ugugacauucagcacucuc

SEQ ID NO: 1015866 - RNA, 19 nt, Artificial Sequence
  Description of Artificial Sequence: Synthetic oligonucleotide
  Sense strand starting at position 1308 of SEQ ID NO: 914593
uuggguuuccuguaugagu

SEQ ID NO: 1015867 - RNA, 19 nt, Artificial Sequence
  Description of Artificial Sequence: Synthetic oligonucleotide
  Antisense strand to SEQ ID NO: 1015866
acucauacaggaaacccaa

SEQ ID NO: 1015868 - RNA, 19 nt, Artificial Sequence
  Description of Artificial Sequence: Synthetic oligonucleotide
  Sense strand starting at position 1310 of SEQ ID NO: 914593
ggguuuccuguaugaguua

SEQ ID NO: 1015869 - RNA, 19 nt, Artificial Sequence
  Description of Artificial Sequence: Synthetic oligonucleotide
  Antisense strand to SEQ ID NO: 1015868
uaacucauacaggaaaccc

SEQ ID NO: 1015870 - RNA, 19 nt, Artificial Sequence
  Description of Artificial Sequence: Synthetic oligonucleotide
  Sense strand starting at position 1317 of SEQ ID NO: 914593
cuguaugaguuacccuaaa

SEQ ID NO: 1015871 - RNA, 19 nt, Artificial Sequence
  Description of Artificial Sequence: Synthetic oligonucleotide
  Antisense strand to SEQ ID NO: 1015870
uuuaggguaacucauacag

SEQ ID NO: 1015872 - RNA, 19 nt, Artificial Sequence
  Description of Artificial Sequence: Synthetic oligonucleotide
  Sense strand starting at position 1376 of SEQ ID NO: 914593
uuccuaggccucuaguuua

SEQ ID NO: 1015873 - RNA, 19 nt, Artificial Sequence
  Description of Artificial Sequence: Synthetic oligonucleotide
  Antisense strand to SEQ ID NO: 1015872
uaaacuagaggccuaggaa

SEQ ID NO: 1015874 - RNA, 19 nt, Artificial Sequence
  Description of Artificial Sequence: Synthetic oligonucleotide
  Sense strand starting at position 1381 of SEQ ID NO: 914593
aggccucuaguuuagaguu

SEQ ID NO: 1015875 - RNA, 19 nt, Artificial Sequence
  Description of Artificial Sequence: Synthetic oligonucleotide
  Antisense strand to SEQ ID NO: 1015874
aacucuaaacuagaggccu

SEQ ID NO: 1015876 - RNA, 19 nt, Artificial Sequence
  Description of Artificial Sequence: Synthetic oligonucleotide
  Sense strand starting at position 1478 of SEQ ID NO: 914593
ugaggcuuaaugggcaaau

SEQ ID NO: 1015877 - RNA, 19 nt, Artificial Sequence
  Description of Artificial Sequence: Synthetic oligonucleotide
  Antisense strand to SEQ ID NO: 1015876
auuugcccauuaagccuca

SEQ ID NO: 1015878 - RNA, 19 nt, Artificial Sequence
  Description of Artificial Sequence: Synthetic oligonucleotide
  Sense strand starting at position 2249 of SEQ ID NO: 914593
cuggaaauuuccgccucca

SEQ ID NO: 1015879 - RNA, 19 nt, Artificial Sequence
  Description of Artificial Sequence: Synthetic oligonucleotide
  Antisense strand to SEQ ID NO: 1015878
uggaggcggaaauuuccag

SEQ ID NO: 1015880 - RNA, 19 nt, Artificial Sequence
  Description of Artificial Sequence: Synthetic oligonucleotide
  Sense strand starting at position 2280 of SEQ ID NO: 914593
ucagaaagguuagcgaauu

SEQ ID NO: 1015881 - RNA, 19 nt, Artificial Sequence
  Description of Artificial Sequence: Synthetic oligonucleotide
  Antisense strand to SEQ ID NO: 1015880
aauucgcuaaccuuucuga

SEQ ID NO: 1015882 - RNA, 19 nt, Artificial Sequence
  Description of Artificial Sequence: Synthetic oligonucleotide
  Sense strand starting at position 2290 of SEQ ID NO: 914593
uagcgaauugguuagcaaa

SEQ ID NO: 1015883 - RNA, 19 nt, Artificial Sequence
  Description of Artificial Sequence: Synthetic oligonucleotide
  Antisense strand to SEQ ID NO: 1015882
uuugcuaaccaauucgcua

SEQ ID NO: 1015884 - RNA, 19 nt, Artificial Sequence
  Description of Artificial Sequence: Synthetic oligonucleotide
  Sense strand starting at position 2326 of SEQ ID NO: 914593
ugaauuugauaugacgaau

SEQ ID NO: 1015885 - RNA, 19 nt, Artificial Sequence
  Description of Artificial Sequence: Synthetic oligonucleotide
  Antisense strand to SEQ ID NO: 1015884
auucgucauaucaaauuca

SEQ ID NO: 1015886 - RNA, 19 nt, Artificial Sequence
  Description of Artificial Sequence: Synthetic oligonucleotide
  Sense strand starting at position 2407 of SEQ ID NO: 914593
gcccuagauaccugugaug

SEQ ID NO: 1015887 - RNA, 19 nt, Artificial Sequence
  Description of Artificial Sequence: Synthetic oligonucleotide
  Antisense strand to SEQ ID NO: 1015886
caucacagguaucuagggc

SEQ ID NO: 1015888 - RNA, 19 nt, Artificial Sequence
  Description of Artificial Sequence: Synthetic oligonucleotide
  Sense strand starting at position 2409 of SEQ ID NO: 914593
ccuagauaccugugauguu

SEQ ID NO: 1015889 - RNA, 19 nt, Artificial Sequence
  Description of Artificial Sequence: Synthetic oligonucleotide
  Antisense strand to SEQ ID NO: 1015888
aacaucacagguaucuagg

SEQ ID NO: 1015890 - RNA, 19 nt, Artificial Sequence
  Description of Artificial Sequence: Synthetic oligonucleotide
  Sense strand starting at position 2454 of SEQ ID NO: 914593
ucugaaauguggucucuug

SEQ ID NO: 1015891 - RNA, 19 nt, Artificial Sequence
  Description of Artificial Sequence: Synthetic oligonucleotide
  Antisense strand to SEQ ID NO: 1015890
caagagaccacauuucaga

SEQ ID NO: 1015892 - RNA, 19 nt, Artificial Sequence
  Description of Artificial Sequence: Synthetic oligonucleotide
  Sense strand starting at position 2505 of SEQ ID NO: 914593
guccuacaugcguuugcau

SEQ ID NO: 1015893 - RNA, 19 nt, Artificial Sequence
  Description of Artificial Sequence: Synthetic oligonucleotide
  Antisense strand to SEQ ID NO: 1015892
augcaaacgcauguaggac

SEQ ID NO: 1015894 - RNA, 19 nt, Artificial Sequence
  Description of Artificial Sequence: Synthetic oligonucleotide
  Sense strand starting at position 2519 of SEQ ID NO: 914593
ugcauaauccgguauagau

SEQ ID NO: 1015895 - RNA, 19 nt, Artificial Sequence
  Description of Artificial Sequence: Synthetic oligonucleotide
  Antisense strand to SEQ ID NO: 1015894
aucuauaccggauuaugca

SEQ ID NO: 1015896 - RNA, 19 nt, Artificial Sequence
  Description of Artificial Sequence: Synthetic oligonucleotide
  Sense strand starting at position 2528 of SEQ ID NO: 914593
cgguauagaucccuggauc

SEQ ID NO: 1015897 - RNA, 19 nt, Artificial Sequence
  Description of Artificial Sequence: Synthetic oligonucleotide
  Antisense strand to SEQ ID NO: 1015896
gauccagggaucuauaccg

SEQ ID NO: 1015898 - RNA, 19 nt, Artificial Sequence
  Description of Artificial Sequence: Synthetic oligonucleotide
  Sense strand starting at position 2904 of SEQ ID NO: 914593
uucguauaaggauagcaga

SEQ ID NO: 1015899 - RNA, 19 nt, Artificial Sequence
  Description of Artificial Sequence: Synthetic oligonucleotide
  Antisense strand to SEQ ID NO: 1015898
ucugcuauccuuauacgaa

SEQ ID NO: 1015900 - RNA, 19 nt, Artificial Sequence
  Description of Artificial Sequence: Synthetic oligonucleotide
  Sense strand starting at position 3221 of SEQ ID NO: 914593
gguuacuuucuggguucca

SEQ ID NO: 1015901 - RNA, 19 nt, Artificial Sequence
  Description of Artificial Sequence: Synthetic oligonucleotide
  Antisense strand to SEQ ID NO: 1015900
uggaacccagaaaguaacc

SEQ ID NO: 1015902 - RNA, 19 nt, Artificial Sequence
  Description of Artificial Sequence: Synthetic oligonucleotide
  Sense strand starting at position 3326 of SEQ ID NO: 914593
aaagcauugccguauggaa

SEQ ID NO: 1015903 - RNA, 19 nt, Artificial Sequence
  Description of Artificial Sequence: Synthetic oligonucleotide
  Antisense strand to SEQ ID NO: 1015902
uuccauacggcaaugcuuu

SEQ ID NO: 1015904 - RNA, 19 nt, Artificial Sequence
  Description of Artificial Sequence: Synthetic oligonucleotide
  Sense strand starting at position 3354 of SEQ ID NO: 914593
cgcuuaagaccauguauuu

SEQ ID NO: 1015905 - RNA, 19 nt, Artificial Sequence
  Description of Artificial Sequence: Synthetic oligonucleotide
  Antisense strand to SEQ ID NO: 1015904
aaauacauggucuuaagcg

SEQ ID NO: 1015906 - RNA, 19 nt, Artificial Sequence
  Description of Artificial Sequence: Synthetic oligonucleotide
  Sense strand starting at position 3393 of SEQ ID NO: 914593
ucuggagcucucgguggaa

SEQ ID NO: 1015907 - RNA, 19 nt, Artificial Sequence
  Description of Artificial Sequence: Synthetic oligonucleotide
  Antisense strand to SEQ ID NO: 1015906
uuccaccgagagcuccaga

SEQ ID NO: 1015908 - RNA, 19 nt, Artificial Sequence
  Description of Artificial Sequence: Synthetic oligonucleotide
  Sense strand starting at position 3396 of SEQ ID NO: 914593
ggagcucucgguggaaacu

SEQ ID NO: 1015909 - RNA, 19 nt, Artificial Sequence
  Description of Artificial Sequence: Synthetic oligonucleotide
  Antisense strand to SEQ ID NO: 1015908
aguuuccaccgagagcucc

SEQ ID NO: 1015910 - RNA, 19 nt, Artificial Sequence
  Description of Artificial Sequence: Synthetic oligonucleotide
  Sense strand starting at position 3418 of SEQ ID NO: 914593
cgcaguagggucgucuuua

SEQ ID NO: 1015911 - RNA, 19 nt, Artificial Sequence
  Description of Artificial Sequence: Synthetic oligonucleotide
  Antisense strand to SEQ ID NO: 1015910
uaaagacgacccuacugcg

SEQ ID NO: 1015912 - RNA, 19 nt, Artificial Sequence
  Description of Artificial Sequence: Synthetic oligonucleotide
  Sense strand starting at position 3465 of SEQ ID NO: 914593
acuuguacuguggaguaca

SEQ ID NO: 1015913 - RNA, 19 nt, Artificial Sequence
  Description of Artificial Sequence: Synthetic oligonucleotide
  Antisense strand to SEQ ID NO: 1015912
uguacuccacaguacaagu

SEQ ID NO: 1015914 - RNA, 19 nt, Artificial Sequence
  Description of Artificial Sequence: Synthetic oligonucleotide
  Sense strand starting at position 3503 of SEQ ID NO: 914593
cuuagaauugggugcucau

SEQ ID NO: 1015915 - RNA, 19 nt, Artificial Sequence
  Description of Artificial Sequence: Synthetic oligonucleotide
  Antisense strand to SEQ ID NO: 1015914
augagcacccaauucuaag

SEQ ID NO: 1015916 - RNA, 19 nt, Artificial Sequence
  Description of Artificial Sequence: Synthetic oligonucleotide
  Sense strand starting at position 3506 of SEQ ID NO: 914593
agaauugggugcucauaaa

SEQ ID NO: 1015917 - RNA, 19 nt, Artificial Sequence
  Description of Artificial Sequence: Synthetic oligonucleotide
  Antisense strand to SEQ ID NO: 1015916
uuuaugagcacccaauucu

SEQ ID NO: 1015918 - RNA, 19 nt, Artificial Sequence
  Description of Artificial Sequence: Synthetic oligonucleotide
  Sense strand starting at position 3642 of SEQ ID NO: 914593
cugcuaauccuuuggacag

SEQ ID NO: 1015919 - RNA, 19 nt, Artificial Sequence
  Description of Artificial Sequence: Synthetic oligonucleotide
  Antisense strand to SEQ ID NO: 1015918
cuguccaaaggauuagcag

SEQ ID NO: 1015920 - RNA, 19 nt, Artificial Sequence
  Description of Artificial Sequence: Synthetic oligonucleotide
  Sense strand starting at position 3725 of SEQ ID NO: 914593
acccacugguuccugagau

SEQ ID NO: 1015921 - RNA, 19 nt, Artificial Sequence
  Description of Artificial Sequence: Synthetic oligonucleotide
  Antisense strand to SEQ ID NO: 1015920
aucucaggaaccagugggu

SEQ ID NO: 1015922 - RNA, 19 nt, Artificial Sequence
  Description of Artificial Sequence: Synthetic oligonucleotide
  Sense strand starting at position 432 of SEQ ID NO: 914594
cccguuacauuucuuauau

SEQ ID NO: 1015923 - RNA, 19 nt, Artificial Sequence
  Description of Artificial Sequence: Synthetic oligonucleotide
  Antisense strand to SEQ ID NO: 1015922
auauaagaaauguaacggg

SEQ ID NO: 1015924 - RNA, 19 nt, Artificial Sequence
  Description of Artificial Sequence: Synthetic oligonucleotide
  Sense strand starting at position 471 of SEQ ID NO: 914594
ugcugauucuuucugccau

SEQ ID NO: 1015925 - RNA, 19 nt, Artificial Sequence
  Description of Artificial Sequence: Synthetic oligonucleotide
  Antisense strand to SEQ ID NO: 1015924
auggcagaaagaaucagca

SEQ ID NO: 1015926 - RNA, 19 nt, Artificial Sequence
  Description of Artificial Sequence: Synthetic oligonucleotide
  Sense strand starting at position 647 of SEQ ID NO: 914594
cugaccucuuaagcagaua

SEQ ID NO: 1015927 - RNA, 19 nt, Artificial Sequence
  Description of Artificial Sequence: Synthetic oligonucleotide
  Antisense strand to SEQ ID NO: 1015926
uaucugcuuaagaggucag

SEQ ID NO: 1015928 - RNA, 19 nt, Artificial Sequence
  Description of Artificial Sequence: Synthetic oligonucleotide
  Sense strand starting at position 672 of SEQ ID NO: 914594
acagcuacuuuccuguauu

SEQ ID NO: 1015929 - RNA, 19 nt, Artificial Sequence
  Description of Artificial Sequence: Synthetic oligonucleotide
  Antisense strand to SEQ ID NO: 1015928
aauacaggaaaguagcugu

SEQ ID NO: 1015930 - RNA, 19 nt, Artificial Sequence
  Description of Artificial Sequence: Synthetic oligonucleotide
  Sense strand starting at position 675 of SEQ ID NO: 914594
gcuacuuuccuguauugac

SEQ ID NO: 1015931 - RNA, 19 nt, Artificial Sequence
  Description of Artificial Sequence: Synthetic oligonucleotide
  Antisense strand to SEQ ID NO: 1015930
gucaauacaggaaaguagc

SEQ ID NO: 1015932 - RNA, 19 nt, Artificial Sequence
  Description of Artificial Sequence: Synthetic oligonucleotide
  Sense strand starting at position 697 of SEQ ID NO: 914594
uuuauauuaugaucagcga

SEQ ID NO: 1015933 - RNA, 19 nt, Artificial Sequence
  Description of Artificial Sequence: Synthetic oligonucleotide
  Antisense strand to SEQ ID NO: 1015932
ucgcugaucauaauauaaa

SEQ ID NO: 1015934 - RNA, 19 nt, Artificial Sequence
  Description of Artificial Sequence: Synthetic oligonucleotide
  Sense strand starting at position 698 of SEQ ID NO: 914594
uuauauuaugaucagcgau

SEQ ID NO: 1015935 - RNA, 19 nt, Artificial Sequence
  Description of Artificial Sequence: Synthetic oligonucleotide
  Antisense strand to SEQ ID NO: 1015934
aucgcugaucauaauauaa

SEQ ID NO: 1015936 - RNA, 19 nt, Artificial Sequence
  Description of Artificial Sequence: Synthetic oligonucleotide
  Sense strand starting at position 700 of SEQ ID NO: 914594
auauuaugaucagcgauau

SEQ ID NO: 1015937 - RNA, 19 nt, Artificial Sequence
  Description of Artificial Sequence: Synthetic oligonucleotide
  Antisense strand to SEQ ID NO: 1015936
auaucgcugaucauaauau

SEQ ID NO: 1015938 - RNA, 19 nt, Artificial Sequence
  Description of Artificial Sequence: Synthetic oligonucleotide
  Sense strand starting at position 701 of SEQ ID NO: 914594
uauuaugaucagcgauauc

SEQ ID NO: 1015939 - RNA, 19 nt, Artificial Sequence
  Description of Artificial Sequence: Synthetic oligonucleotide
  Antisense strand to SEQ ID NO: 1015938
gauaucgcugaucauaaua

SEQ ID NO: 1015940 - RNA, 19 nt, Artificial Sequence
  Description of Artificial Sequence: Synthetic oligonucleotide
  Sense strand starting at position 728 of SEQ ID NO: 914594
cacagagacuuagcuguuu

SEQ ID NO: 1015941 - RNA, 19 nt, Artificial Sequence
  Description of Artificial Sequence: Synthetic oligonucleotide
  Antisense strand to SEQ ID NO: 1015940
aaacagcuaagucucugug

SEQ ID NO: 1015942 - RNA, 19 nt, Artificial Sequence
  Description of Artificial Sequence: Synthetic oligonucleotide
  Sense strand starting at position 733 of SEQ ID NO: 914594
agacuuagcuguuugcaga

SEQ ID NO: 1015943 - RNA, 19 nt, Artificial Sequence
  Description of Artificial Sequence: Synthetic oligonucleotide
  Antisense strand to SEQ ID NO: 1015942
ucugcaaacagcuaagucu

SEQ ID NO: 1015944 - RNA, 19 nt, Artificial Sequence
  Description of Artificial Sequence: Synthetic oligonucleotide
  Sense strand starting at position 790 of SEQ ID NO: 914594
acgauaucaucauuacugu

SEQ ID NO: 1015945 - RNA, 19 nt, Artificial Sequence
  Description of Artificial Sequence: Synthetic oligonucleotide
  Antisense strand to SEQ ID NO: 1015944
acaguaaugaugauaucgu

SEQ ID NO: 1015946 - RNA, 19 nt, Artificial Sequence
  Description of Artificial Sequence: Synthetic oligonucleotide
  Sense strand starting at position 850 of SEQ ID NO: 914594
augagacuaugugauaacu

SEQ ID NO: 1015947 - RNA, 19 nt, Artificial Sequence
  Description of Artificial Sequence: Synthetic oligonucleotide
  Antisense strand to SEQ ID NO: 1015946
aguuaucacauagucucau

SEQ ID NO: 1015948 - RNA, 19 nt, Artificial Sequence
  Description of Artificial Sequence: Synthetic oligonucleotide
  Sense strand starting at position 1059 of SEQ ID NO: 914594
cacagaucguaguuagcaa

SEQ ID NO: 1015949 - RNA, 19 nt, Artificial Sequence
  Description of Artificial Sequence: Synthetic oligonucleotide
  Antisense strand to SEQ ID NO: 1015948
uugcuaacuacgaucugug

SEQ ID NO: 1015950 - RNA, 19 nt, Artificial Sequence
  Description of Artificial Sequence: Synthetic oligonucleotide
  Sense strand starting at position 1060 of SEQ ID NO: 914594
acagaucguaguuagcaau

SEQ ID NO: 1015951 - RNA, 19 nt, Artificial Sequence
  Description of Artificial Sequence: Synthetic oligonucleotide
  Antisense strand to SEQ ID NO: 1015950
auugcuaacuacgaucugu

SEQ ID NO: 1015952 - RNA, 19 nt, Artificial Sequence
  Description of Artificial Sequence: Synthetic oligonucleotide
  Sense strand starting at position 1067 of SEQ ID NO: 914594
guaguuagcaauugacagu

SEQ ID NO: 1015953 - RNA, 19 nt, Artificial Sequence
  Description of Artificial Sequence: Synthetic oligonucleotide
  Antisense strand to SEQ ID NO: 1015952
acugucaauugcuaacuac

SEQ ID NO: 1015954 - RNA, 19 nt, Artificial Sequence
  Description of Artificial Sequence: Synthetic oligonucleotide
  Sense strand starting at position 1152 of SEQ ID NO: 914594
cuagcuuugccugcaaguu

SEQ ID NO: 1015955 - RNA, 19 nt, Artificial Sequence
  Description of Artificial Sequence: Synthetic oligonucleotide
  Antisense strand to SEQ ID NO: 1015954
aacuugcaggcaaagcuag

SEQ ID NO: 1015956 - RNA, 19 nt, Artificial Sequence
  Description of Artificial Sequence: Synthetic oligonucleotide
  Sense strand starting at position 1361 of SEQ ID NO: 914594
aucuuaucugcgcaauaug

SEQ ID NO: 1015957 - RNA, 19 nt, Artificial Sequence
  Description of Artificial Sequence: Synthetic oligonucleotide
  Antisense strand to SEQ ID NO: 1015956
cauauugcgcagauaagau

SEQ ID NO: 1015958 - RNA, 19 nt, Artificial Sequence
  Description of Artificial Sequence: Synthetic oligonucleotide
  Sense strand starting at position 1501 of SEQ ID NO: 914594
ucuuguuauugacccgcaa

SEQ ID NO: 1015959 - RNA, 19 nt, Artificial Sequence
  Description of Artificial Sequence: Synthetic oligonucleotide
  Antisense strand to SEQ ID NO: 1015958
uugcgggucaauaacaaga

SEQ ID NO: 1015960 - RNA, 19 nt, Artificial Sequence
  Description of Artificial Sequence: Synthetic oligonucleotide
  Sense strand starting at position 1671 of SEQ ID NO: 914594
ccucaucuucgauaaagcu

SEQ ID NO: 1015961 - RNA, 19 nt, Artificial Sequence
  Description of Artificial Sequence: Synthetic oligonucleotide
  Antisense strand to SEQ ID NO: 1015960
agcuuuaucgaagaugagg

SEQ ID NO: 1015962 - RNA, 19 nt, Artificial Sequence
  Description of Artificial Sequence: Synthetic oligonucleotide
  Sense strand starting at position 1680 of SEQ ID NO: 914594
cgauaaagcuacuccgagu

SEQ ID NO: 1015963 - RNA, 19 nt, Artificial Sequence
  Description of Artificial Sequence: Synthetic oligonucleotide
  Antisense strand to SEQ ID NO: 1015962
acucggaguagcuuuaucg

SEQ ID NO: 1015964 - RNA, 19 nt, Artificial Sequence
  Description of Artificial Sequence: Synthetic oligonucleotide
  Sense strand starting at position 2008 of SEQ ID NO: 914594
gcuccuuccuccucggaaa

SEQ ID NO: 1015965 - RNA, 19 nt, Artificial Sequence
  Description of Artificial Sequence: Synthetic oligonucleotide
  Antisense strand to SEQ ID NO: 1015964
uuuccgaggaggaaggagc

SEQ ID NO: 1015966 - RNA, 19 nt, Artificial Sequence
  Description of Artificial Sequence: Synthetic oligonucleotide
  Sense strand starting at position 2394 of SEQ ID NO: 914594
cgcgaaagcuuccugagga

SEQ ID NO: 1015967 - RNA, 19 nt, Artificial Sequence
  Description of Artificial Sequence: Synthetic oligonucleotide
  Antisense strand to SEQ ID NO: 1015966
uccucaggaagcuuucgcg

SEQ ID NO: 1015968 - RNA, 19 nt, Artificial Sequence
  Description of Artificial Sequence: Synthetic oligonucleotide
  Sense strand starting at position 2508 of SEQ ID NO: 914594
ccgcgacgugauugagaaa

SEQ ID NO: 1015969 - RNA, 19 nt, Artificial Sequence
  Description of Artificial Sequence: Synthetic oligonucleotide
  Antisense strand to SEQ ID NO: 1015968
uuucucaaucacgucgcgg

SEQ ID NO: 1015970 - RNA, 19 nt, Artificial Sequence
  Description of Artificial Sequence: Synthetic oligonucleotide
  Sense strand starting at position 2509 of SEQ ID NO: 914594
cgcgacgugauugagaaau

SEQ ID NO: 1015971 - RNA, 19 nt, Artificial Sequence
  Description of Artificial Sequence: Synthetic oligonucleotide
  Antisense strand to SEQ ID NO: 1015970
auuucucaaucacgucgcg

SEQ ID NO: 1015972 - RNA, 19 nt, Artificial Sequence
  Description of Artificial Sequence: Synthetic oligonucleotide
  Sense strand starting at position 2521 of SEQ ID NO: 914594
gagaaaugguggcuggcaa

SEQ ID NO: 1015973 - RNA, 19 nt, Artificial Sequence
  Description of Artificial Sequence: Synthetic oligonucleotide
  Antisense strand to SEQ ID NO: 1015972
uugccagccaccauuucuc

SEQ ID NO: 1015974 - RNA, 19 nt, Artificial Sequence
  Description of Artificial Sequence: Synthetic oligonucleotide
  Sense strand starting at position 3332 of SEQ ID NO: 914594
gggauuacuccggagagca

SEQ ID NO: 1015975 - RNA, 19 nt, Artificial Sequence
  Description of Artificial Sequence: Synthetic oligonucleotide
  Antisense strand to SEQ ID NO: 1015974
ugcucuccggaguaauccc

SEQ ID NO: 1015976 - RNA, 19 nt, Artificial Sequence
  Description of Artificial Sequence: Synthetic oligonucleotide
  Sense strand starting at position 3556 of SEQ ID NO: 914594
gcuagugaagcgucaguua

SEQ ID NO: 1015977 - RNA, 19 nt, Artificial Sequence
  Description of Artificial Sequence: Synthetic oligonucleotide
  Antisense strand to SEQ ID NO: 1015976
uaacugacgcuucacuagc

SEQ ID NO: 1015978 - RNA, 19 nt, Artificial Sequence
  Description of Artificial Sequence: Synthetic oligonucleotide
  Sense strand starting at position 3559 of SEQ ID NO: 914594
agugaagcgucaguuauaa

SEQ ID NO: 1015979 - RNA, 19 nt, Artificial Sequence
  Description of Artificial Sequence: Synthetic oligonucleotide
  Antisense strand to SEQ ID NO: 1015978
uuauaacugacgcuucacu

SEQ ID NO: 1015980 - RNA, 19 nt, Artificial Sequence
  Description of Artificial Sequence: Synthetic oligonucleotide
  Sense strand starting at position 3561 of SEQ ID NO: 914594
ugaagcgucaguuauaaua

SEQ ID NO: 1015981 - RNA, 19 nt, Artificial Sequence
  Description of Artificial Sequence: Synthetic oligonucleotide
  Antisense strand to SEQ ID NO: 1015980
uauuauaacugacgcuuca

SEQ ID NO: 1015982 - RNA, 19 nt, Artificial Sequence
  Description of Artificial Sequence: Synthetic oligonucleotide
  Sense strand starting at position 3635 of SEQ ID NO: 914594
gccugacccucacuaugaa

SEQ ID NO: 1015983 - RNA, 19 nt, Artificial Sequence
  Description of Artificial Sequence: Synthetic oligonucleotide
  Antisense strand to SEQ ID NO: 1015982
uucauagugagggucaggc

SEQ ID NO: 1015984 - RNA, 19 nt, Artificial Sequence
  Description of Artificial Sequence: Synthetic oligonucleotide
  Sense strand starting at position 3638 of SEQ ID NO: 914594
ugacccucacuaugaagau

SEQ ID NO: 1015985 - RNA, 19 nt, Artificial Sequence
  Description of Artificial Sequence: Synthetic oligonucleotide
  Antisense strand to SEQ ID NO: 1015984
aucuucauagugaggguca

SEQ ID NO: 1015986 - RNA, 19 nt, Artificial Sequence
  Description of Artificial Sequence: Synthetic oligonucleotide
  Sense strand starting at position 3686 of SEQ ID NO: 914594
gaucccaaugucuguguuu

SEQ ID NO: 1015987 - RNA, 19 nt, Artificial Sequence
  Description of Artificial Sequence: Synthetic oligonucleotide
  Antisense strand to SEQ ID NO: 1015986
aaacacagacauugggauc

SEQ ID NO: 1015988 - RNA, 19 nt, Artificial Sequence
  Description of Artificial Sequence: Synthetic oligonucleotide
  Sense strand starting at position 3687 of SEQ ID NO: 914594
aucccaaugucuguguuua

SEQ ID NO: 1015989 - RNA, 19 nt, Artificial Sequence
  Description of Artificial Sequence: Synthetic oligonucleotide
  Antisense strand to SEQ ID NO: 1015988
uaaacacagacauugggau

SEQ ID NO: 1015990 - RNA, 19 nt, Artificial Sequence
  Description of Artificial Sequence: Synthetic oligonucleotide
  Sense strand starting at position 3688 of SEQ ID NO: 914594
ucccaaugucuguguuuau

SEQ ID NO: 1015991 - RNA, 19 nt, Artificial Sequence
  Description of Artificial Sequence: Synthetic oligonucleotide
  Antisense strand to SEQ ID NO: 1015990
auaaacacagacauuggga

SEQ ID NO: 1015992 - RNA, 19 nt, Artificial Sequence
  Description of Artificial Sequence: Synthetic oligonucleotide
  Sense strand starting at position 3689 of SEQ ID NO: 914594
cccaaugucuguguuuauc

SEQ ID NO: 1015993 - RNA, 19 nt, Artificial Sequence
  Description of Artificial Sequence: Synthetic oligonucleotide
  Antisense strand to SEQ ID NO: 1015992
gauaaacacagacauuggg

SEQ ID NO: 1015994 - RNA, 19 nt, Artificial Sequence
  Description of Artificial Sequence: Synthetic oligonucleotide
  Sense strand starting at position 3697 of SEQ ID NO: 914594
cuguguuuauccuugacag

SEQ ID NO: 1015995 - RNA, 19 nt, Artificial Sequence
  Description of Artificial Sequence: Synthetic oligonucleotide
  Antisense strand to SEQ ID NO: 1015994
cugucaaggauaaacacag

SEQ ID NO: 1015996 - RNA, 19 nt, Artificial Sequence
  Description of Artificial Sequence: Synthetic oligonucleotide
  Sense strand starting at position 3698 of SEQ ID NO: 914594
uguguuuauccuugacaga

SEQ ID NO: 1015997 - RNA, 19 nt, Artificial Sequence
  Description of Artificial Sequence: Synthetic oligonucleotide
  Antisense strand to SEQ ID NO: 1015996
ucugucaaggauaaacaca

SEQ ID NO: 1015998 - RNA, 19 nt, Artificial Sequence
  Description of Artificial Sequence: Synthetic oligonucleotide
  Sense strand starting at position 3699 of SEQ ID NO: 914594
guguuuauccuugacagaa

SEQ ID NO: 1015999 - RNA, 19 nt, Artificial Sequence
  Description of Artificial Sequence: Synthetic oligonucleotide
  Antisense strand to SEQ ID NO: 1015998
uucugucaaggauaaacac

SEQ ID NO: 1016000 - RNA, 19 nt, Artificial Sequence
  Description of Artificial Sequence: Synthetic oligonucleotide
  Sense strand starting at position 3981 of SEQ ID NO: 914594
acaccaaucgcguaagaag

SEQ ID NO: 1016001 - RNA, 19 nt, Artificial Sequence
  Description of Artificial Sequence: Synthetic oligonucleotide
  Antisense strand to SEQ ID NO: 1016000
cuucuuacgcgauuggugu

SEQ ID NO: 1016002 - RNA, 19 nt, Artificial Sequence
  Description of Artificial Sequence: Synthetic oligonucleotide
  Sense strand starting at position 117 of SEQ ID NO: 914595
cccguuacauuucuuauau

SEQ ID NO: 1016003 - RNA, 19 nt, Artificial Sequence
  Description of Artificial Sequence: Synthetic oligonucleotide
  Antisense strand to SEQ ID NO: 1016002
auauaagaaauguaacggg

SEQ ID NO: 1016004 - RNA, 19 nt, Artificial Sequence
  Description of Artificial Sequence: Synthetic oligonucleotide
  Sense strand starting at position 332 of SEQ ID NO: 914595
cugaccucuuaagcagaua

SEQ ID NO: 1016005 - RNA, 19 nt, Artificial Sequence
  Description of Artificial Sequence: Synthetic oligonucleotide
  Antisense strand to SEQ ID NO: 1016004
uaucugcuuaagaggucag

SEQ ID NO: 1016006 - RNA, 19 nt, Artificial Sequence
  Description of Artificial Sequence: Synthetic oligonucleotide
  Sense strand starting at position 357 of SEQ ID NO: 914595
acagcuacuuuccuguauu

SEQ ID NO: 1016007 - RNA, 19 nt, Artificial Sequence
  Description of Artificial Sequence: Synthetic oligonucleotide
  Antisense strand to SEQ ID NO: 1016006
aauacaggaaaguagcugu

SEQ ID NO: 1016008 - RNA, 19 nt, Artificial Sequence
  Description of Artificial Sequence: Synthetic oligonucleotide
  Sense strand starting at position 360 of SEQ ID NO: 914595
gcuacuuuccuguauugac

SEQ ID NO: 1016009 - RNA, 19 nt, Artificial Sequence
  Description of Artificial Sequence: Synthetic oligonucleotide
  Antisense strand to SEQ ID NO: 1016008
gucaauacaggaaaguagc

SEQ ID NO: 1016010 - RNA, 19 nt, Artificial Sequence
  Description of Artificial Sequence: Synthetic oligonucleotide
  Sense strand starting at position 382 of SEQ ID NO: 914595
uuuauauuaugaucagcga

SEQ ID NO: 1016011 - RNA, 19 nt, Artificial Sequence
  Description of Artificial Sequence: Synthetic oligonucleotide
  Antisense strand to SEQ ID NO: 1016010
ucgcugaucauaauauaaa

SEQ ID NO: 1016012 - RNA, 19 nt, Artificial Sequence
  Description of Artificial Sequence: Synthetic oligonucleotide
  Sense strand starting at position 383 of SEQ ID NO: 914595
uuauauuaugaucagcgau

SEQ ID NO: 1016013 - RNA, 19 nt, Artificial Sequence
  Description of Artificial Sequence: Synthetic oligonucleotide
  Antisense strand to SEQ ID NO: 1016012
aucgcugaucauaauauaa

SEQ ID NO: 1016014 - RNA, 19 nt, Artificial Sequence
  Description of Artificial Sequence: Synthetic oligonucleotide
  Sense strand starting at position 385 of SEQ ID NO: 914595
auauuaugaucagcgauau

SEQ ID NO: 1016015 - RNA, 19 nt, Artificial Sequence
  Description of Artificial Sequence: Synthetic oligonucleotide
  Antisense strand to SEQ ID NO: 1016014
auaucgcugaucauaauau

SEQ ID NO: 1016016 - RNA, 19 nt, Artificial Sequence
  Description of Artificial Sequence: Synthetic oligonucleotide
  Sense strand starting at position 386 of SEQ ID NO: 914595
uauuaugaucagcgauauc

SEQ ID NO: 1016017 - RNA, 19 nt, Artificial Sequence
  Description of Artificial Sequence: Synthetic oligonucleotide
  Antisense strand to SEQ ID NO: 1016016
gauaucgcugaucauaaua

SEQ ID NO: 1016018 - RNA, 19 nt, Artificial Sequence
  Description of Artificial Sequence: Synthetic oligonucleotide
  Sense strand starting at position 413 of SEQ ID NO: 914595
cacagagacuuagcuguuu

SEQ ID NO: 1016019 - RNA, 19 nt, Artificial Sequence
  Description of Artificial Sequence: Synthetic oligonucleotide
  Antisense strand to SEQ ID NO: 1016018
aaacagcuaagucucugug

SEQ ID NO: 1016020 - RNA, 19 nt, Artificial Sequence
  Description of Artificial Sequence: Synthetic oligonucleotide
  Sense strand starting at position 418 of SEQ ID NO: 914595
agacuuagcuguuugcaga

SEQ ID NO: 1016021 - RNA, 19 nt, Artificial Sequence
  Description of Artificial Sequence: Synthetic oligonucleotide
  Antisense strand to SEQ ID NO: 1016020
ucugcaaacagcuaagucu

SEQ ID NO: 1016022 - RNA, 19 nt, Artificial Sequence
  Description of Artificial Sequence: Synthetic oligonucleotide
  Sense strand starting at position 475 of SEQ ID NO: 914595
acgauaucaucauuacugu

SEQ ID NO: 1016023 - RNA, 19 nt, Artificial Sequence
  Description of Artificial Sequence: Synthetic oligonucleotide
  Antisense strand to SEQ ID NO: 1016022
acaguaaugaugauaucgu

SEQ ID NO: 1016024 - RNA, 19 nt, Artificial Sequence
  Description of Artificial Sequence: Synthetic oligonucleotide
  Sense strand starting at position 744 of SEQ ID NO: 914595
cacagaucguaguuagcaa

SEQ ID NO: 1016025 - RNA, 19 nt, Artificial Sequence
  Description of Artificial Sequence: Synthetic oligonucleotide
  Antisense strand to SEQ ID NO: 1016024
uugcuaacuacgaucugug

SEQ ID NO: 1016026 - RNA, 19 nt, Artificial Sequence
  Description of Artificial Sequence: Synthetic oligonucleotide
  Sense strand starting at position 745 of SEQ ID NO: 914595
acagaucguaguuagcaau

SEQ ID NO: 1016027 - RNA, 19 nt, Artificial Sequence
  Description of Artificial Sequence: Synthetic oligonucleotide
  Antisense strand to SEQ ID NO: 1016026
auugcuaacuacgaucugu

SEQ ID NO: 1016028 - RNA, 19 nt, Artificial Sequence
  Description of Artificial Sequence: Synthetic oligonucleotide
  Sense strand starting at position 752 of SEQ ID NO: 914595
guaguuagcaauugacagu

SEQ ID NO: 1016029 - RNA, 19 nt, Artificial Sequence
  Description of Artificial Sequence: Synthetic oligonucleotide
  Antisense strand to SEQ ID NO: 1016028
acugucaauugcuaacuac

SEQ ID NO: 1016030 - RNA, 19 nt, Artificial Sequence
  Description of Artificial Sequence: Synthetic oligonucleotide
  Sense strand starting at position 837 of SEQ ID NO: 914595
cuagcuuugccugcaaguu

SEQ ID NO: 1016031 - RNA, 19 nt, Artificial Sequence
  Description of Artificial Sequence: Synthetic oligonucleotide
  Antisense strand to SEQ ID NO: 1016030
aacuugcaggcaaagcuag

SEQ ID NO: 1016032 - RNA, 19 nt, Artificial Sequence
  Description of Artificial Sequence: Synthetic oligonucleotide
  Sense strand starting at position 1046 of SEQ ID NO: 914595
aucuuaucugcgcaauaug

SEQ ID NO: 1016033 - RNA, 19 nt, Artificial Sequence
  Description of Artificial Sequence: Synthetic oligonucleotide
  Antisense strand to SEQ ID NO: 1016032
cauauugcgcagauaagau

SEQ ID NO: 1016034 - RNA, 19 nt, Artificial Sequence
  Description of Artificial Sequence: Synthetic oligonucleotide
  Sense strand starting at position 1356 of SEQ ID NO: 914595
ccucaucuucgauaaagcu

SEQ ID NO: 1016035 - RNA, 19 nt, Artificial Sequence
  Description of Artificial Sequence: Synthetic oligonucleotide
  Antisense strand to SEQ ID NO: 1016034
agcuuuaucgaagaugagg

SEQ ID NO: 1016036 - RNA, 19 nt, Artificial Sequence
  Description of Artificial Sequence: Synthetic oligonucleotide
  Sense strand starting at position 1365 of SEQ ID NO: 914595
cgauaaagcuacuccgagu

SEQ ID NO: 1016037 - RNA, 19 nt, Artificial Sequence
  Description of Artificial Sequence: Synthetic oligonucleotide
  Antisense strand to SEQ ID NO: 1016036
acucggaguagcuuuaucg

SEQ ID NO: 1016038 - RNA, 19 nt, Artificial Sequence
  Description of Artificial Sequence: Synthetic oligonucleotide
  Sense strand starting at position 1693 of SEQ ID NO: 914595
gcuccuuccuccucggaaa

SEQ ID NO: 1016039 - RNA, 19 nt, Artificial Sequence
  Description of Artificial Sequence: Synthetic oligonucleotide
  Antisense strand to SEQ ID NO: 1016038
uuuccgaggaggaaggagc

SEQ ID NO: 1016040 - RNA, 19 nt, Artificial Sequence
  Description of Artificial Sequence: Synthetic oligonucleotide
  Sense strand starting at position 2194 of SEQ ID NO: 914595
cgcgacgugauugagaaau

SEQ ID NO: 1016041 - RNA, 19 nt, Artificial Sequence
  Description of Artificial Sequence: Synthetic oligonucleotide
  Antisense strand to SEQ ID NO: 1016040
auuucucaaucacgucgcg

SEQ ID NO: 1016042 - RNA, 19 nt, Artificial Sequence
  Description of Artificial Sequence: Synthetic oligonucleotide
  Sense strand starting at position 2206 of SEQ ID NO: 914595
gagaaaugguggcuggcaa

SEQ ID NO: 1016043 - RNA, 19 nt, Artificial Sequence
  Description of Artificial Sequence: Synthetic oligonucleotide
  Antisense strand to SEQ ID NO: 1016042
uugccagccaccauuucuc

SEQ ID NO: 1016044 - RNA, 19 nt, Artificial Sequence
  Description of Artificial Sequence: Synthetic oligonucleotide
  Sense strand starting at position 3017 of SEQ ID NO: 914595
gggauuacuccggagagca

SEQ ID NO: 1016045 - RNA, 19 nt, Artificial Sequence
  Description of Artificial Sequence: Synthetic oligonucleotide
  Antisense strand to SEQ ID NO: 1016044
ugcucuccggaguaauccc

SEQ ID NO: 1016046 - RNA, 19 nt, Artificial Sequence
  Description of Artificial Sequence: Synthetic oligonucleotide
  Sense strand starting at position 3241 of SEQ ID NO: 914595
gcuagugaagcgucaguua

SEQ ID NO: 1016047 - RNA, 19 nt, Artificial Sequence
  Description of Artificial Sequence: Synthetic oligonucleotide
  Antisense strand to SEQ ID NO: 1016046
uaacugacgcuucacuagc

SEQ ID NO: 1016048 - RNA, 19 nt, Artificial Sequence
  Description of Artificial Sequence: Synthetic oligonucleotide
  Sense strand starting at position 3244 of SEQ ID NO: 914595
agugaagcgucaguuauaa

SEQ ID NO: 1016049 - RNA, 19 nt, Artificial Sequence
  Description of Artificial Sequence: Synthetic oligonucleotide
  Antisense strand to SEQ ID NO: 1016048
uuauaacugacgcuucacu

SEQ ID NO: 1016050 - RNA, 19 nt, Artificial Sequence
  Description of Artificial Sequence: Synthetic oligonucleotide
  Sense strand starting at position 3246 of SEQ ID NO: 914595
ugaagcgucaguuauaaua

SEQ ID NO: 1016051 - RNA, 19 nt, Artificial Sequence
  Description of Artificial Sequence: Synthetic oligonucleotide
  Antisense strand to SEQ ID NO: 1016050
uauuauaacugacgcuuca

SEQ ID NO: 1016052 - RNA, 19 nt, Artificial Sequence
  Description of Artificial Sequence: Synthetic oligonucleotide
  Sense strand starting at position 3320 of SEQ ID NO: 914595
gccugacccucacuaugaa

SEQ ID NO: 1016053 - RNA, 19 nt, Artificial Sequence
  Description of Artificial Sequence: Synthetic oligonucleotide
  Antisense strand to SEQ ID NO: 1016052
uucauagugagggucaggc

SEQ ID NO: 1016054 - RNA, 19 nt, Artificial Sequence
  Description of Artificial Sequence: Synthetic oligonucleotide
  Sense strand starting at position 3323 of SEQ ID NO: 914595
ugacccucacuaugaagau

SEQ ID NO: 1016055 - RNA, 19 nt, Artificial Sequence
  Description of Artificial Sequence: Synthetic oligonucleotide
  Antisense strand to SEQ ID NO: 1016054
aucuucauagugaggguca

SEQ ID NO: 1016056 - RNA, 19 nt, Artificial Sequence
  Description of Artificial Sequence: Synthetic oligonucleotide
  Sense strand starting at position 3372 of SEQ ID NO: 914595
aucccaaugucuguguuua

SEQ ID NO: 1016057 - RNA, 19 nt, Artificial Sequence
  Description of Artificial Sequence: Synthetic oligonucleotide
  Antisense strand to SEQ ID NO: 1016056
uaaacacagacauugggau

SEQ ID NO: 1016058 - RNA, 19 nt, Artificial Sequence
  Description of Artificial Sequence: Synthetic oligonucleotide
  Sense strand starting at position 3382 of SEQ ID NO: 914595
cuguguuuauccuugacag

SEQ ID NO: 1016059 - RNA, 19 nt, Artificial Sequence
  Description of Artificial Sequence: Synthetic oligonucleotide
  Antisense strand to SEQ ID NO: 1016058
cugucaaggauaaacacag

SEQ ID NO: 1016060 - RNA, 19 nt, Artificial Sequence
  Description of Artificial Sequence: Synthetic oligonucleotide
  Sense strand starting at position 3383 of SEQ ID NO: 914595
uguguuuauccuugacaga

SEQ ID NO: 1016061 - RNA, 19 nt, Artificial Sequence
  Description of Artificial Sequence: Synthetic oligonucleotide
  Antisense strand to SEQ ID NO: 1016060
ucugucaaggauaaacaca

SEQ ID NO: 1016062 - RNA, 19 nt, Artificial Sequence
  Description of Artificial Sequence: Synthetic oligonucleotide
  Sense strand starting at position 3384 of SEQ ID NO: 914595
guguuuauccuugacagaa

SEQ ID NO: 1016063 - RNA, 19 nt, Artificial Sequence
  Description of Artificial Sequence: Synthetic oligonucleotide
  Antisense strand to SEQ ID NO: 1016062
uucugucaaggauaaacac

SEQ ID NO: 1016064 - RNA, 19 nt, Artificial Sequence
  Description of Artificial Sequence: Synthetic oligonucleotide
  Sense strand starting at position 3666 of SEQ ID NO: 914595
acaccaaucgcguaagaag

SEQ ID NO: 1016065 - RNA, 19 nt, Artificial Sequence
  Description of Artificial Sequence: Synthetic oligonucleotide
  Antisense strand to SEQ ID NO: 1016064
cuucuuacgcgauuggugu

SEQ ID NO: 1016066 - RNA, 19 nt, Artificial Sequence
  Description of Artificial Sequence: Synthetic oligonucleotide
  Sense strand starting at position 3813 of SEQ ID NO: 914595
guuaaaucaagugaugggu

SEQ ID NO: 1016067 - RNA, 19 nt, Artificial Sequence
  Description of Artificial Sequence: Synthetic oligonucleotide
  Antisense strand to SEQ ID NO: 1016066
acccaucacuugauuuaac

SEQ ID NO: 1016068 - RNA, 19 nt, Artificial Sequence
  Description of Artificial Sequence: Synthetic oligonucleotide
  Sense strand starting at position 3846 of SEQ ID NO: 914595
gccagcucugaguaaauag

SEQ ID NO: 1016069 - RNA, 19 nt, Artificial Sequence
  Description of Artificial Sequence: Synthetic oligonucleotide
  Antisense strand to SEQ ID NO: 1016068
cuauuuacucagagcuggc

SEQ ID NO: 1016070 - RNA, 19 nt, Artificial Sequence
  Description of Artificial Sequence: Synthetic oligonucleotide
  Sense strand starting at position 3871 of SEQ ID NO: 914595
cucauuugguggucguuau

SEQ ID NO: 1016071 - RNA, 19 nt, Artificial Sequence
  Description of Artificial Sequence: Synthetic oligonucleotide
  Antisense strand to SEQ ID NO: 1016070
auaacgaccaccaaaugag

SEQ ID NO: 1016072 - RNA, 19 nt, Artificial Sequence
  Description of Artificial Sequence: Synthetic oligonucleotide
  Sense strand starting at position 3872 of SEQ ID NO: 914595
ucauuugguggucguuauu

SEQ ID NO: 1016073 - RNA, 19 nt, Artificial Sequence
  Description of Artificial Sequence: Synthetic oligonucleotide
  Antisense strand to SEQ ID NO: 1016072
aauaacgaccaccaaauga

SEQ ID NO: 1016074 - RNA, 19 nt, Artificial Sequence
  Description of Artificial Sequence: Synthetic oligonucleotide
  Sense strand starting at position 3878 of SEQ ID NO: 914595
gguggucguuauuucuaca

SEQ ID NO: 1016075 - RNA, 19 nt, Artificial Sequence
  Description of Artificial Sequence: Synthetic oligonucleotide
  Antisense strand to SEQ ID NO: 1016074
uguagaaauaacgaccacc

SEQ ID NO: 1016076 - RNA, 19 nt, Artificial Sequence
  Description of Artificial Sequence: Synthetic oligonucleotide
  Sense strand starting at position 3923 of SEQ ID NO: 914595
agugaagacuauucuuaag

SEQ ID NO: 1016077 - RNA, 19 nt, Artificial Sequence
  Description of Artificial Sequence: Synthetic oligonucleotide
  Antisense strand to SEQ ID NO: 1016076
cuuaagaauagucuucacu

SEQ ID NO: 1016078 - RNA, 19 nt, Artificial Sequence
  Description of Artificial Sequence: Synthetic oligonucleotide
  Sense strand starting at position 3925 of SEQ ID NO: 914595
ugaagacuauucuuaaggu

SEQ ID NO: 1016079 - RNA, 19 nt, Artificial Sequence
  Description of Artificial Sequence: Synthetic oligonucleotide
  Antisense strand to SEQ ID NO: 1016078
accuuaagaauagucuuca

SEQ ID NO: 1016080 - RNA, 19 nt, Artificial Sequence
  Description of Artificial Sequence: Synthetic oligonucleotide
  Sense strand starting at position 3947 of SEQ ID NO: 914595
aaagaagguucggcuuaca

SEQ ID NO: 1016081 - RNA, 19 nt, Artificial Sequence
  Description of Artificial Sequence: Synthetic oligonucleotide
  Antisense strand to SEQ ID NO: 1016080
uguaagccgaaccuucuuu

SEQ ID NO: 1016082 - RNA, 19 nt, Artificial Sequence
  Description of Artificial Sequence: Synthetic oligonucleotide
  Sense strand starting at position 1589 of SEQ ID NO: 914596
gccgaaucaguccgaauag

SEQ ID NO: 1016083 - RNA, 19 nt, Artificial Sequence
  Description of Artificial Sequence: Synthetic oligonucleotide
  Antisense strand to SEQ ID NO: 1016082
cuauucggacugauucggc

SEQ ID NO: 1016084 - RNA, 19 nt, Artificial Sequence
  Description of Artificial Sequence: Synthetic oligonucleotide
  Sense strand starting at position 1736 of SEQ ID NO: 914596
ggcgcaauucugccucuca

SEQ ID NO: 1016085 - RNA, 19 nt, Artificial Sequence
  Description of Artificial Sequence: Synthetic oligonucleotide
  Antisense strand to SEQ ID NO: 1016084
ugagaggcagaauugcgcc

SEQ ID NO: 1016086 - RNA, 19 nt, Artificial Sequence
  Description of Artificial Sequence: Synthetic oligonucleotide
  Sense strand starting at position 2139 of SEQ ID NO: 914596
cggcguuucccugugguga

SEQ ID NO: 1016087 - RNA, 19 nt, Artificial Sequence
  Description of Artificial Sequence: Synthetic oligonucleotide
  Antisense strand to SEQ ID NO: 1016086
ucaccacagggaaacgccg

SEQ ID NO: 1016088 - RNA, 19 nt, Artificial Sequence
  Description of Artificial Sequence: Synthetic oligonucleotide
  Sense strand starting at position 2141 of SEQ ID NO: 914596
gcguuucccuguggugaca

SEQ ID NO: 1016089 - RNA, 19 nt, Artificial Sequence
  Description of Artificial Sequence: Synthetic oligonucleotide
  Antisense strand to SEQ ID NO: 1016088
ugucaccacagggaaacgc

SEQ ID NO: 1016090 - RNA, 19 nt, Artificial Sequence
  Description of Artificial Sequence: Synthetic oligonucleotide
  Sense strand starting at position 2143 of SEQ ID NO: 914596
guuucccuguggugacaau

SEQ ID NO: 1016091 - RNA, 19 nt, Artificial Sequence
  Description of Artificial Sequence: Synthetic oligonucleotide
  Antisense strand to SEQ ID NO: 1016090
auugucaccacagggaaac

SEQ ID NO: 1016092 - RNA, 19 nt, Artificial Sequence
  Description of Artificial Sequence: Synthetic oligonucleotide
  Sense strand starting at position 2430 of SEQ ID NO: 914596
uuggaacucucgccaaaga

SEQ ID NO: 1016093 - RNA, 19 nt, Artificial Sequence
  Description of Artificial Sequence: Synthetic oligonucleotide
  Antisense strand to SEQ ID NO: 1016092
ucuuuggcgagaguuccaa

SEQ ID NO: 1016094 - RNA, 19 nt, Artificial Sequence
  Description of Artificial Sequence: Synthetic oligonucleotide
  Sense strand starting at position 2431 of SEQ ID NO: 914596
uggaacucucgccaaagaa

SEQ ID NO: 1016095 - RNA, 19 nt, Artificial Sequence
  Description of Artificial Sequence: Synthetic oligonucleotide
  Antisense strand to SEQ ID NO: 1016094
uucuuuggcgagaguucca

SEQ ID NO: 1016096 - RNA, 19 nt, Artificial Sequence
  Description of Artificial Sequence: Synthetic oligonucleotide
  Sense strand starting at position 2471 of SEQ ID NO: 914596
agccguccugccugagaga

SEQ ID NO: 1016097 - RNA, 19 nt, Artificial Sequence
  Description of Artificial Sequence: Synthetic oligonucleotide
  Antisense strand to SEQ ID NO: 1016096
ucucucaggcaggacggcu

SEQ ID NO: 1016098 - RNA, 19 nt, Artificial Sequence
  Description of Artificial Sequence: Synthetic oligonucleotide
  Sense strand starting at position 2615 of SEQ ID NO: 914596
ucgugcguguucucuagua

SEQ ID NO: 1016099 - RNA, 19 nt, Artificial Sequence
  Description of Artificial Sequence: Synthetic oligonucleotide
  Antisense strand to SEQ ID NO: 1016098
uacuagagaacacgcacga

SEQ ID NO: 1016100 - RNA, 19 nt, Artificial Sequence
  Description of Artificial Sequence: Synthetic oligonucleotide
  Sense strand starting at position 2617 of SEQ ID NO: 914596
gugcguguucucuaguaau

SEQ ID NO: 1016101 - RNA, 19 nt, Artificial Sequence
  Description of Artificial Sequence: Synthetic oligonucleotide
  Antisense strand to SEQ ID NO: 1016100
auuacuagagaacacgcac

SEQ ID NO: 1016102 - RNA, 19 nt, Artificial Sequence
  Description of Artificial Sequence: Synthetic oligonucleotide
  Sense strand starting at position 2619 of SEQ ID NO: 914596
gcguguucucuaguaauua

SEQ ID NO: 1016103 - RNA, 19 nt, Artificial Sequence
  Description of Artificial Sequence: Synthetic oligonucleotide
  Antisense strand to SEQ ID NO: 1016102
uaauuacuagagaacacgc

SEQ ID NO: 1016104 - RNA, 19 nt, Artificial Sequence
  Description of Artificial Sequence: Synthetic oligonucleotide
  Sense strand starting at position 2620 of SEQ ID NO: 914596
cguguucucuaguaauuag

SEQ ID NO: 1016105 - RNA, 19 nt, Artificial Sequence
  Description of Artificial Sequence: Synthetic oligonucleotide
  Antisense strand to SEQ ID NO: 1016104
cuaauuacuagagaacacg

SEQ ID NO: 1016106 - RNA, 19 nt, Artificial Sequence
  Description of Artificial Sequence: Synthetic oligonucleotide
  Sense strand starting at position 2627 of SEQ ID NO: 914596
ucuaguaauuaggugcauu

SEQ ID NO: 1016107 - RNA, 19 nt, Artificial Sequence
  Description of Artificial Sequence: Synthetic oligonucleotide
  Antisense strand to SEQ ID NO: 1016106
aaugcaccuaauuacuaga

SEQ ID NO: 1016108 - RNA, 19 nt, Artificial Sequence
  Description of Artificial Sequence: Synthetic oligonucleotide
  Sense strand starting at position 2628 of SEQ ID NO: 914596
cuaguaauuaggugcauug

SEQ ID NO: 1016109 - RNA, 19 nt, Artificial Sequence
  Description of Artificial Sequence: Synthetic oligonucleotide
  Antisense strand to SEQ ID NO: 1016108
caaugcaccuaauuacuag

SEQ ID NO: 1016110 - RNA, 19 nt, Artificial Sequence
  Description of Artificial Sequence: Synthetic oligonucleotide
  Sense strand starting at position 2763 of SEQ ID NO: 914596
gccuguaagccugacaguu

SEQ ID NO: 1016111 - RNA, 19 nt, Artificial Sequence
  Description of Artificial Sequence: Synthetic oligonucleotide
  Antisense strand to SEQ ID NO: 1016110
aacugucaggcuuacaggc

SEQ ID NO: 1016112 - RNA, 19 nt, Artificial Sequence
  Description of Artificial Sequence: Synthetic oligonucleotide
  Sense strand starting at position 3587 of SEQ ID NO: 914596
auguuuaacuucugccuga

SEQ ID NO: 1016113 - RNA, 19 nt, Artificial Sequence
  Description of Artificial Sequence: Synthetic oligonucleotide
  Antisense strand to SEQ ID NO: 1016112
ucaggcagaaguuaaacau

SEQ ID NO: 1016114 - RNA, 19 nt, Artificial Sequence
  Description of Artificial Sequence: Synthetic oligonucleotide
  Sense strand starting at position 3609 of SEQ ID NO: 914596
agcuauucguagccacauu

SEQ ID NO: 1016115 - RNA, 19 nt, Artificial Sequence
  Description of Artificial Sequence: Synthetic oligonucleotide
  Antisense strand to SEQ ID NO: 1016114
aauguggcuacgaauagcu

SEQ ID NO: 1016116 - RNA, 19 nt, Artificial Sequence
  Description of Artificial Sequence: Synthetic oligonucleotide
  Sense strand starting at position 3617 of SEQ ID NO: 914596
guagccacauugugauuau

SEQ ID NO: 1016117 - RNA, 19 nt, Artificial Sequence
  Description of Artificial Sequence: Synthetic oligonucleotide
  Antisense strand to SEQ ID NO: 1016116
auaaucacaauguggcuac

SEQ ID NO: 1016118 - RNA, 19 nt, Artificial Sequence
  Description of Artificial Sequence: Synthetic oligonucleotide
  Sense strand starting at position 3620 of SEQ ID NO: 914596
gccacauugugauuauagu

SEQ ID NO: 1016119 - RNA, 19 nt, Artificial Sequence
  Description of Artificial Sequence: Synthetic oligonucleotide
  Antisense strand to SEQ ID NO: 1016118
acuauaaucacaauguggc

SEQ ID NO: 1016120 - RNA, 19 nt, Artificial Sequence
  Description of Artificial Sequence: Synthetic oligonucleotide
  Sense strand starting at position 3621 of SEQ ID NO: 914596
ccacauugugauuauagua

SEQ ID NO: 1016121 - RNA, 19 nt, Artificial Sequence
  Description of Artificial Sequence: Synthetic oligonucleotide
  Antisense strand to SEQ ID NO: 1016120
uacuauaaucacaaugugg

SEQ ID NO: 1016122 - RNA, 19 nt, Artificial Sequence
  Description of Artificial Sequence: Synthetic oligonucleotide
  Sense strand starting at position 3626 of SEQ ID NO: 914596
uugugauuauaguaaguca

SEQ ID NO: 1016123 - RNA, 19 nt, Artificial Sequence
  Description of Artificial Sequence: Synthetic oligonucleotide
  Antisense strand to SEQ ID NO: 1016122
ugacuuacuauaaucacaa

SEQ ID NO: 1016124 - RNA, 19 nt, Artificial Sequence
  Description of Artificial Sequence: Synthetic oligonucleotide
  Sense strand starting at position 3634 of SEQ ID NO: 914596
auaguaagucacugacaaa

SEQ ID NO: 1016125 - RNA, 19 nt, Artificial Sequence
  Description of Artificial Sequence: Synthetic oligonucleotide
  Antisense strand to SEQ ID NO: 1016124
uuugucagugacuuacuau

SEQ ID NO: 1016126 - RNA, 19 nt, Artificial Sequence
  Description of Artificial Sequence: Synthetic oligonucleotide
  Sense strand starting at position 3673 of SEQ ID NO: 914596
aggcuacguucggucagaa

SEQ ID NO: 1016127 - RNA, 19 nt, Artificial Sequence
  Description of Artificial Sequence: Synthetic oligonucleotide
  Antisense strand to SEQ ID NO: 1016126
uucugaccgaacguagccu

SEQ ID NO: 1016128 - RNA, 19 nt, Artificial Sequence
  Description of Artificial Sequence: Synthetic oligonucleotide
  Sense strand starting at position 3702 of SEQ ID NO: 914596
caggucuggaauuguuaga

SEQ ID NO: 1016129 - RNA, 19 nt, Artificial Sequence
  Description of Artificial Sequence: Synthetic oligonucleotide
  Antisense strand to SEQ ID NO: 1016128
ucuaacaauuccagaccug

SEQ ID NO: 1016130 - RNA, 19 nt, Artificial Sequence
  Description of Artificial Sequence: Synthetic oligonucleotide
  Sense strand starting at position 3720 of SEQ ID NO: 914596
aacagcguaucugguuaua

SEQ ID NO: 1016131 - RNA, 19 nt, Artificial Sequence
  Description of Artificial Sequence: Synthetic oligonucleotide
  Antisense strand to SEQ ID NO: 1016130
uauaaccagauacgcuguu

SEQ ID NO: 1016132 - RNA, 19 nt, Artificial Sequence
  Description of Artificial Sequence: Synthetic oligonucleotide
  Sense strand starting at position 3851 of SEQ ID NO: 914596
ggaaguguuuaagaagcca

SEQ ID NO: 1016133 - RNA, 19 nt, Artificial Sequence
  Description of Artificial Sequence: Synthetic oligonucleotide
  Antisense strand to SEQ ID NO: 1016132
uggcuucuuaaacacuucc

SEQ ID NO: 1016134 - RNA, 19 nt, Artificial Sequence
  Description of Artificial Sequence: Synthetic oligonucleotide
  Sense strand starting at position 3903 of SEQ ID NO: 914596
cccaauuaaugcgaaauca

SEQ ID NO: 1016135 - RNA, 19 nt, Artificial Sequence
  Description of Artificial Sequence: Synthetic oligonucleotide
  Antisense strand to SEQ ID NO: 1016134
ugauuucgcauuaauuggg

SEQ ID NO: 1016136 - RNA, 19 nt, Artificial Sequence
  Description of Artificial Sequence: Synthetic oligonucleotide
  Sense strand starting at position 3911 of SEQ ID NO: 914596
augcgaaaucaucacagau

SEQ ID NO: 1016137 - RNA, 19 nt, Artificial Sequence
  Description of Artificial Sequence: Synthetic oligonucleotide
  Antisense strand to SEQ ID NO: 1016136
aucugugaugauuucgcau

SEQ ID NO: 1016138 - RNA, 19 nt, Artificial Sequence
  Description of Artificial Sequence: Synthetic oligonucleotide
  Sense strand starting at position 3913 of SEQ ID NO: 914596
gcgaaaucaucacagauaa

SEQ ID NO: 1016139 - RNA, 19 nt, Artificial Sequence
  Description of Artificial Sequence: Synthetic oligonucleotide
  Antisense strand to SEQ ID NO: 1016138
uuaucugugaugauuucgc

SEQ ID NO: 1016140 - RNA, 19 nt, Artificial Sequence
  Description of Artificial Sequence: Synthetic oligonucleotide
  Sense strand starting at position 3923 of SEQ ID NO: 914596
cacagauaaugacagguau

SEQ ID NO: 1016141 - RNA, 19 nt, Artificial Sequence
  Description of Artificial Sequence: Synthetic oligonucleotide
  Antisense strand to SEQ ID NO: 1016140
auaccugucauuaucugug

SEQ ID NO: 1016142 - RNA, 19 nt, Artificial Sequence
  Description of Artificial Sequence: Synthetic oligonucleotide
  Sense strand starting at position 3973 of SEQ ID NO: 914596
aagaacagaucggguuuaa

SEQ ID NO: 1016143 - RNA, 19 nt, Artificial Sequence
  Description of Artificial Sequence: Synthetic oligonucleotide
  Antisense strand to SEQ ID NO: 1016142
uuaaacccgaucuguucuu

SEQ ID NO: 1016144 - RNA, 19 nt, Artificial Sequence
  Description of Artificial Sequence: Synthetic oligonucleotide
  Sense strand starting at position 271 of SEQ ID NO: 914597
ccagcuauuugcuuuagga

SEQ ID NO: 1016145 - RNA, 19 nt, Artificial Sequence
  Description of Artificial Sequence: Synthetic oligonucleotide
  Antisense strand to SEQ ID NO: 1016144
uccuaaagcaaauagcugg

SEQ ID NO: 1016146 - RNA, 19 nt, Artificial Sequence
  Description of Artificial Sequence: Synthetic oligonucleotide
  Sense strand starting at position 275 of SEQ ID NO: 914597
cuauuugcuuuaggaacaa

SEQ ID NO: 1016147 - RNA, 19 nt, Artificial Sequence
  Description of Artificial Sequence: Synthetic oligonucleotide
  Antisense strand to SEQ ID NO: 1016146
uuguuccuaaagcaaauag

SEQ ID NO: 1016148 - RNA, 19 nt, Artificial Sequence
  Description of Artificial Sequence: Synthetic oligonucleotide
  Sense strand starting at position 323 of SEQ ID NO: 914597
ugucuugucuagucgcuua

SEQ ID NO: 1016149 - RNA, 19 nt, Artificial Sequence
  Description of Artificial Sequence: Synthetic oligonucleotide
  Antisense strand to SEQ ID NO: 1016148
uaagcgacuagacaagaca

SEQ ID NO: 1016150 - RNA, 19 nt, Artificial Sequence
  Description of Artificial Sequence: Synthetic oligonucleotide
  Sense strand starting at position 328 of SEQ ID NO: 914597
ugucuagucgcuuaccuua

SEQ ID NO: 1016151 - RNA, 19 nt, Artificial Sequence
  Description of Artificial Sequence: Synthetic oligonucleotide
  Antisense strand to SEQ ID NO: 1016150
uaagguaagcgacuagaca

SEQ ID NO: 1016152 - RNA, 19 nt, Artificial Sequence
  Description of Artificial Sequence: Synthetic oligonucleotide
  Sense strand starting at position 330 of SEQ ID NO: 914597
ucuagucgcuuaccuuaaa

SEQ ID NO: 1016153 - RNA, 19 nt, Artificial Sequence
  Description of Artificial Sequence: Synthetic oligonucleotide
  Antisense strand to SEQ ID NO: 1016152
uuuaagguaagcgacuaga

SEQ ID NO: 1016154 - RNA, 19 nt, Artificial Sequence
  Description of Artificial Sequence: Synthetic oligonucleotide
  Sense strand starting at position 333 of SEQ ID NO: 914597
agucgcuuaccuuaaagau

SEQ ID NO: 1016155 - RNA, 19 nt, Artificial Sequence
  Description of Artificial Sequence: Synthetic oligonucleotide
  Antisense strand to SEQ ID NO: 1016154
aucuuuaagguaagcgacu

SEQ ID NO: 1016156 - RNA, 19 nt, Artificial Sequence
  Description of Artificial Sequence: Synthetic oligonucleotide
  Sense strand starting at position 342 of SEQ ID NO: 914597
ccuuaaagaugaggaaaua

SEQ ID NO: 1016157 - RNA, 19 nt, Artificial Sequence
  Description of Artificial Sequence: Synthetic oligonucleotide
  Antisense strand to SEQ ID NO: 1016156
uauuuccucaucuuuaagg

SEQ ID NO: 1016158 - RNA, 19 nt, Artificial Sequence
  Description of Artificial Sequence: Synthetic oligonucleotide
  Sense strand starting at position 414 of SEQ ID NO: 914597
agaugauagggauggcacu

SEQ ID NO: 1016159 - RNA, 19 nt, Artificial Sequence
  Description of Artificial Sequence: Synthetic oligonucleotide
  Antisense strand to SEQ ID NO: 1016158
agugccaucccuaucaucu

SEQ ID NO: 1016160 - RNA, 19 nt, Artificial Sequence
  Description of Artificial Sequence: Synthetic oligonucleotide
  Sense strand starting at position 427 of SEQ ID NO: 914597
ggcacuaaggcuugguauu

SEQ ID NO: 1016161 - RNA, 19 nt, Artificial Sequence
  Description of Artificial Sequence: Synthetic oligonucleotide
  Antisense strand to SEQ ID NO: 1016160
aauaccaagccuuagugcc

SEQ ID NO: 1016162 - RNA, 19 nt, Artificial Sequence
  Description of Artificial Sequence: Synthetic oligonucleotide
  Sense strand starting at position 693 of SEQ ID NO: 914597
uugauugagugacaaugaa

SEQ ID NO: 1016163 - RNA, 19 nt, Artificial Sequence
  Description of Artificial Sequence: Synthetic oligonucleotide
  Antisense strand to SEQ ID NO: 1016162
uucauugucacucaaucaa

SEQ ID NO: 1016164 - RNA, 19 nt, Artificial Sequence
  Description of Artificial Sequence: Synthetic oligonucleotide
  Sense strand starting at position 1022 of SEQ ID NO: 914597
ggugggauguauuagggaa

SEQ ID NO: 1016165 - RNA, 19 nt, Artificial Sequence
  Description of Artificial Sequence: Synthetic oligonucleotide
  Antisense strand to SEQ ID NO: 1016164
uucccuaauacaucccacc

SEQ ID NO: 1016166 - RNA, 19 nt, Artificial Sequence
  Description of Artificial Sequence: Synthetic oligonucleotide
  Sense strand starting at position 1024 of SEQ ID NO: 914597
ugggauguauuagggaaag

SEQ ID NO: 1016167 - RNA, 19 nt, Artificial Sequence
  Description of Artificial Sequence: Synthetic oligonucleotide
  Antisense strand to SEQ ID NO: 1016166
cuuucccuaauacauccca

SEQ ID NO: 1016168 - RNA, 19 nt, Artificial Sequence
  Description of Artificial Sequence: Synthetic oligonucleotide
  Sense strand starting at position 1305 of SEQ ID NO: 914597
ugugauuaauguuugcaug

SEQ ID NO: 1016169 - RNA, 19 nt, Artificial Sequence
  Description of Artificial Sequence: Synthetic oligonucleotide
  Antisense strand to SEQ ID NO: 1016168
caugcaaacauuaaucaca

SEQ ID NO: 1016170 - RNA, 19 nt, Artificial Sequence
  Description of Artificial Sequence: Synthetic oligonucleotide
  Sense strand starting at position 1461 of SEQ ID NO: 914597
cccagugaccaacaguauu

SEQ ID NO: 1016171 - RNA, 19 nt, Artificial Sequence
  Description of Artificial Sequence: Synthetic oligonucleotide
  Antisense strand to SEQ ID NO: 1016170
aauacuguuggucacuggg

SEQ ID NO: 1016172 - RNA, 19 nt, Artificial Sequence
  Description of Artificial Sequence: Synthetic oligonucleotide
  Sense strand starting at position 1584 of SEQ ID NO: 914597
uuaugccaguucuuaggaa

SEQ ID NO: 1016173 - RNA, 19 nt, Artificial Sequence
  Description of Artificial Sequence: Synthetic oligonucleotide
  Antisense strand to SEQ ID NO: 1016172
uuccuaagaacuggcauaa

SEQ ID NO: 1016174 - RNA, 19 nt, Artificial Sequence
  Description of Artificial Sequence: Synthetic oligonucleotide
  Sense strand starting at position 1585 of SEQ ID NO: 914597
uaugccaguucuuaggaaa

SEQ ID NO: 1016175 - RNA, 19 nt, Artificial Sequence
  Description of Artificial Sequence: Synthetic oligonucleotide
  Antisense strand to SEQ ID NO: 1016174
uuuccuaagaacuggcaua

SEQ ID NO: 1016176 - RNA, 19 nt, Artificial Sequence
  Description of Artificial Sequence: Synthetic oligonucleotide
  Sense strand starting at position 1604 of SEQ ID NO: 914597
acuaacuguugcugaagga

SEQ ID NO: 1016177 - RNA, 19 nt, Artificial Sequence
  Description of Artificial Sequence: Synthetic oligonucleotide
  Antisense strand to SEQ ID NO: 1016176
uccuucagcaacaguuagu

SEQ ID NO: 1016178 - RNA, 19 nt, Artificial Sequence
  Description of Artificial Sequence: Synthetic oligonucleotide
  Sense strand starting at position 1605 of SEQ ID NO: 914597
cuaacuguugcugaaggaa

SEQ ID NO: 1016179 - RNA, 19 nt, Artificial Sequence
  Description of Artificial Sequence: Synthetic oligonucleotide
  Antisense strand to SEQ ID NO: 1016178
uuccuucagcaacaguuag

SEQ ID NO: 1016180 - RNA, 19 nt, Artificial Sequence
  Description of Artificial Sequence: Synthetic oligonucleotide
  Sense strand starting at position 1858 of SEQ ID NO: 914597
gguuauaggugauggugau

SEQ ID NO: 1016181 - RNA, 19 nt, Artificial Sequence
  Description of Artificial Sequence: Synthetic oligonucleotide
  Antisense strand to SEQ ID NO: 1016180
aucaccaucaccuauaacc

SEQ ID NO: 1016182 - RNA, 19 nt, Artificial Sequence
  Description of Artificial Sequence: Synthetic oligonucleotide
  Sense strand starting at position 1859 of SEQ ID NO: 914597
guuauaggugauggugauu

SEQ ID NO: 1016183 - RNA, 19 nt, Artificial Sequence
  Description of Artificial Sequence: Synthetic oligonucleotide
  Antisense strand to SEQ ID NO: 1016182
aaucaccaucaccuauaac

SEQ ID NO: 1016184 - RNA, 19 nt, Artificial Sequence
  Description of Artificial Sequence: Synthetic oligonucleotide
  Sense strand starting at position 2097 of SEQ ID NO: 914597
uaauaagagucuuugugua

SEQ ID NO: 1016185 - RNA, 19 nt, Artificial Sequence
  Description of Artificial Sequence: Synthetic oligonucleotide
  Antisense strand to SEQ ID NO: 1016184
uacacaaagacucuuauua

SEQ ID NO: 1016186 - RNA, 19 nt, Artificial Sequence
  Description of Artificial Sequence: Synthetic oligonucleotide
  Sense strand starting at position 2102 of SEQ ID NO: 914597
agagucuuuguguaccuca

SEQ ID NO: 1016187 - RNA, 19 nt, Artificial Sequence
  Description of Artificial Sequence: Synthetic oligonucleotide
  Antisense strand to SEQ ID NO: 1016186
ugagguacacaaagacucu

SEQ ID NO: 1016188 - RNA, 19 nt, Artificial Sequence
  Description of Artificial Sequence: Synthetic oligonucleotide
  Sense strand starting at position 2105 of SEQ ID NO: 914597
gucuuuguguaccucauua

SEQ ID NO: 1016189 - RNA, 19 nt, Artificial Sequence
  Description of Artificial Sequence: Synthetic oligonucleotide
  Antisense strand to SEQ ID NO: 1016188
uaaugagguacacaaagac

SEQ ID NO: 1016190 - RNA, 19 nt, Artificial Sequence
  Description of Artificial Sequence: Synthetic oligonucleotide
  Sense strand starting at position 2109 of SEQ ID NO: 914597
uuguguaccucauuaggca

SEQ ID NO: 1016191 - RNA, 19 nt, Artificial Sequence
  Description of Artificial Sequence: Synthetic oligonucleotide
  Antisense strand to SEQ ID NO: 1016190
ugccuaaugagguacacaa

SEQ ID NO: 1016192 - RNA, 19 nt, Artificial Sequence
  Description of Artificial Sequence: Synthetic oligonucleotide
  Sense strand starting at position 2110 of SEQ ID NO: 914597
uguguaccucauuaggcau

SEQ ID NO: 1016193 - RNA, 19 nt, Artificial Sequence
  Description of Artificial Sequence: Synthetic oligonucleotide
  Antisense strand to SEQ ID NO: 1016192
augccuaaugagguacaca

SEQ ID NO: 1016194 - RNA, 19 nt, Artificial Sequence
  Description of Artificial Sequence: Synthetic oligonucleotide
  Sense strand starting at position 2113 of SEQ ID NO: 914597
guaccucauuaggcauauu

SEQ ID NO: 1016195 - RNA, 19 nt, Artificial Sequence
  Description of Artificial Sequence: Synthetic oligonucleotide
  Antisense strand to SEQ ID NO: 1016194
aauaugccuaaugagguac

SEQ ID NO: 1016196 - RNA, 19 nt, Artificial Sequence
  Description of Artificial Sequence: Synthetic oligonucleotide
  Sense strand starting at position 2137 of SEQ ID NO: 914597
auagacguguucuaugcau

SEQ ID NO: 1016197 - RNA, 19 nt, Artificial Sequence
  Description of Artificial Sequence: Synthetic oligonucleotide
  Antisense strand to SEQ ID NO: 1016196
augcauagaacacgucuau

SEQ ID NO: 1016198 - RNA, 19 nt, Artificial Sequence
  Description of Artificial Sequence: Synthetic oligonucleotide
  Sense strand starting at position 2141 of SEQ ID NO: 914597
acguguucuaugcaugcaa

SEQ ID NO: 1016199 - RNA, 19 nt, Artificial Sequence
  Description of Artificial Sequence: Synthetic oligonucleotide
  Antisense strand to SEQ ID NO: 1016198
uugcaugcauagaacacgu

SEQ ID NO: 1016200 - RNA, 19 nt, Artificial Sequence
  Description of Artificial Sequence: Synthetic oligonucleotide
  Sense strand starting at position 2411 of SEQ ID NO: 914597
uugcccugcuaagaauuaa

SEQ ID NO: 1016201 - RNA, 19 nt, Artificial Sequence
  Description of Artificial Sequence: Synthetic oligonucleotide
  Antisense strand to SEQ ID NO: 1016200
uuaauucuuagcagggcaa

SEQ ID NO: 1016202 - RNA, 19 nt, Artificial Sequence
  Description of Artificial Sequence: Synthetic oligonucleotide
  Sense strand starting at position 2435 of SEQ ID NO: 914597
ccacuuucuccuggucuga

SEQ ID NO: 1016203 - RNA, 19 nt, Artificial Sequence
  Description of Artificial Sequence: Synthetic oligonucleotide
  Antisense strand to SEQ ID NO: 1016202
ucagaccaggagaaagugg

SEQ ID NO: 1016204 - RNA, 19 nt, Artificial Sequence
  Description of Artificial Sequence: Synthetic oligonucleotide
  Sense strand starting at position 2437 of SEQ ID NO: 914597
acuuucuccuggucugaaa

SEQ ID NO: 1016205 - RNA, 19 nt, Artificial Sequence
  Description of Artificial Sequence: Synthetic oligonucleotide
  Antisense strand to SEQ ID NO: 1016204
uuucagaccaggagaaagu

SEQ ID NO: 1016206 - RNA, 19 nt, Artificial Sequence
  Description of Artificial Sequence: Synthetic oligonucleotide
  Sense strand starting at position 2439 of SEQ ID NO: 914597
uuucuccuggucugaaagu

SEQ ID NO: 1016207 - RNA, 19 nt, Artificial Sequence
  Description of Artificial Sequence: Synthetic oligonucleotide
  Antisense strand to SEQ ID NO: 1016206
acuuucagaccaggagaaa

SEQ ID NO: 1016208 - RNA, 19 nt, Artificial Sequence
  Description of Artificial Sequence: Synthetic oligonucleotide
  Sense strand starting at position 2548 of SEQ ID NO: 914597
cuugcuugcuaggacaaga

SEQ ID NO: 1016209 - RNA, 19 nt, Artificial Sequence
  Description of Artificial Sequence: Synthetic oligonucleotide
  Antisense strand to SEQ ID NO: 1016208
ucuuguccuagcaagcaag

SEQ ID NO: 1016210 - RNA, 19 nt, Artificial Sequence
  Description of Artificial Sequence: Synthetic oligonucleotide
  Sense strand starting at position 2685 of SEQ ID NO: 914597
ggauuuggauucuagaucu

SEQ ID NO: 1016211 - RNA, 19 nt, Artificial Sequence
  Description of Artificial Sequence: Synthetic oligonucleotide
  Antisense strand to SEQ ID NO: 1016210
agaucuagaauccaaaucc

SEQ ID NO: 1016212 - RNA, 19 nt, Artificial Sequence
  Description of Artificial Sequence: Synthetic oligonucleotide
  Sense strand starting at position 2767 of SEQ ID NO: 914597
cuugauagcgucuauaaag

SEQ ID NO: 1016213 - RNA, 19 nt, Artificial Sequence
  Description of Artificial Sequence: Synthetic oligonucleotide
  Antisense strand to SEQ ID NO: 1016212
cuuuauagacgcuaucaag

SEQ ID NO: 1016214 - RNA, 19 nt, Artificial Sequence
  Description of Artificial Sequence: Synthetic oligonucleotide
  Sense strand starting at position 2776 of SEQ ID NO: 914597
gucuauaaaggucgagauc

SEQ ID NO: 1016215 - RNA, 19 nt, Artificial Sequence
  Description of Artificial Sequence: Synthetic oligonucleotide
  Antisense strand to SEQ ID NO: 1016214
gaucucgaccuuuauagac

SEQ ID NO: 1016216 - RNA, 19 nt, Artificial Sequence
  Description of Artificial Sequence: Synthetic oligonucleotide
  Sense strand starting at position 2777 of SEQ ID NO: 914597
ucuauaaaggucgagaucu

SEQ ID NO: 1016217 - RNA, 19 nt, Artificial Sequence
  Description of Artificial Sequence: Synthetic oligonucleotide
  Antisense strand to SEQ ID NO: 1016216
agaucucgaccuuuauaga

SEQ ID NO: 1016218 - RNA, 19 nt, Artificial Sequence
  Description of Artificial Sequence: Synthetic oligonucleotide
  Sense strand starting at position 2779 of SEQ ID NO: 914597
uauaaaggucgagaucugu

SEQ ID NO: 1016219 - RNA, 19 nt, Artificial Sequence
  Description of Artificial Sequence: Synthetic oligonucleotide
  Antisense strand to SEQ ID NO: 1016218
acagaucucgaccuuuaua

SEQ ID NO: 1016220 - RNA, 19 nt, Artificial Sequence
  Description of Artificial Sequence: Synthetic oligonucleotide
  Sense strand starting at position 2787 of SEQ ID NO: 914597
ucgagaucuguuggaucua

SEQ ID NO: 1016221 - RNA, 19 nt, Artificial Sequence
  Description of Artificial Sequence: Synthetic oligonucleotide
  Antisense strand to SEQ ID NO: 1016220
uagauccaacagaucucga

SEQ ID NO: 1016222 - RNA, 19 nt, Artificial Sequence
  Description of Artificial Sequence: Synthetic oligonucleotide
  Sense strand starting at position 2788 of SEQ ID NO: 914597
cgagaucuguuggaucuag

SEQ ID NO: 1016223 - RNA, 19 nt, Artificial Sequence
  Description of Artificial Sequence: Synthetic oligonucleotide
  Antisense strand to SEQ ID NO: 1016222
cuagauccaacagaucucg

SEQ ID NO: 1016224 - RNA, 19 nt, Artificial Sequence
  Description of Artificial Sequence: Synthetic oligonucleotide
  Sense strand starting at position 581 of SEQ ID NO: 914598
acugucuugucaucguuga

SEQ ID NO: 1016225 - RNA, 19 nt, Artificial Sequence
  Description of Artificial Sequence: Synthetic oligonucleotide
  Antisense strand to SEQ ID NO: 1016224
ucaacgaugacaagacagu

SEQ ID NO: 1016226 - RNA, 19 nt, Artificial Sequence
  Description of Artificial Sequence: Synthetic oligonucleotide
  Sense strand starting at position 582 of SEQ ID NO: 914598
cugucuugucaucguugaa

SEQ ID NO: 1016227 - RNA, 19 nt, Artificial Sequence
  Description of Artificial Sequence: Synthetic oligonucleotide
  Antisense strand to SEQ ID NO: 1016226
uucaacgaugacaagacag

SEQ ID NO: 1016228 - RNA, 19 nt, Artificial Sequence
  Description of Artificial Sequence: Synthetic oligonucleotide
  Sense strand starting at position 591 of SEQ ID NO: 914598
caucguugaagccgaguaa

SEQ ID NO: 1016229 - RNA, 19 nt, Artificial Sequence
  Description of Artificial Sequence: Synthetic oligonucleotide
  Antisense strand to SEQ ID NO: 1016228
uuacucggcuucaacgaug

SEQ ID NO: 1016230 - RNA, 19 nt, Artificial Sequence
  Description of Artificial Sequence: Synthetic oligonucleotide
  Sense strand starting at position 595 of SEQ ID NO: 914598
guugaagccgaguaagauu

SEQ ID NO: 1016231 - RNA, 19 nt, Artificial Sequence
  Description of Artificial Sequence: Synthetic oligonucleotide
  Antisense strand to SEQ ID NO: 1016230
aaucuuacucggcuucaac

SEQ ID NO: 1016232 - RNA, 19 nt, Artificial Sequence
  Description of Artificial Sequence: Synthetic oligonucleotide
  Sense strand starting at position 603 of SEQ ID NO: 914598
cgaguaagauuagucaaca

SEQ ID NO: 1016233 - RNA, 19 nt, Artificial Sequence
  Description of Artificial Sequence: Synthetic oligonucleotide
  Antisense strand to SEQ ID NO: 1016232
uguugacuaaucuuacucg

SEQ ID NO: 1016234 - RNA, 19 nt, Artificial Sequence
  Description of Artificial Sequence: Synthetic oligonucleotide
  Sense strand starting at position 604 of SEQ ID NO: 914598
gaguaagauuagucaacag

SEQ ID NO: 1016235 - RNA, 19 nt, Artificial Sequence
  Description of Artificial Sequence: Synthetic oligonucleotide
  Antisense strand to SEQ ID NO: 1016234
cuguugacuaaucuuacuc

SEQ ID NO: 1016236 - RNA, 19 nt, Artificial Sequence
  Description of Artificial Sequence: Synthetic oligonucleotide
  Sense strand starting at position 619 of SEQ ID NO: 914598
acaggauaaucacuuucga

SEQ ID NO: 1016237 - RNA, 19 nt, Artificial Sequence
  Description of Artificial Sequence: Synthetic oligonucleotide
  Antisense strand to SEQ ID NO: 1016236
ucgaaagugauuauccugu

SEQ ID NO: 1016238 - RNA, 19 nt, Artificial Sequence
  Description of Artificial Sequence: Synthetic oligonucleotide
  Sense strand starting at position 918 of SEQ ID NO: 914598
ugacuugaaacgcaucaga

SEQ ID NO: 1016239 - RNA, 19 nt, Artificial Sequence
  Description of Artificial Sequence: Synthetic oligonucleotide
  Antisense strand to SEQ ID NO: 1016238
ucugaugcguuucaaguca

SEQ ID NO: 1016240 - RNA, 19 nt, Artificial Sequence
  Description of Artificial Sequence: Synthetic oligonucleotide
  Sense strand starting at position 985 of SEQ ID NO: 914598
acgccucuguccucauaaa

SEQ ID NO: 1016241 - RNA, 19 nt, Artificial Sequence
  Description of Artificial Sequence: Synthetic oligonucleotide
  Antisense strand to SEQ ID NO: 1016240
uuuaugaggacagaggcgu

SEQ ID NO: 1016242 - RNA, 19 nt, Artificial Sequence
  Description of Artificial Sequence: Synthetic oligonucleotide
  Sense strand starting at position 1065 of SEQ ID NO: 914598
gggaguuccuacucuucuu

SEQ ID NO: 1016243 - RNA, 19 nt, Artificial Sequence
  Description of Artificial Sequence: Synthetic oligonucleotide
  Antisense strand to SEQ ID NO: 1016242
aagaagaguaggaacuccc

SEQ ID NO: 1016244 - RNA, 19 nt, Artificial Sequence
  Description of Artificial Sequence: Synthetic oligonucleotide
  Sense strand starting at position 1197 of SEQ ID NO: 914598
aucacaagcuucuugggaa

SEQ ID NO: 1016245 - RNA, 19 nt, Artificial Sequence
  Description of Artificial Sequence: Synthetic oligonucleotide
  Antisense strand to SEQ ID NO: 1016244
uucccaagaagcuugugau

SEQ ID NO: 1016246 - RNA, 19 nt, Artificial Sequence
  Description of Artificial Sequence: Synthetic oligonucleotide
  Sense strand starting at position 1198 of SEQ ID NO: 914598
ucacaagcuucuugggaag

SEQ ID NO: 1016247 - RNA, 19 nt, Artificial Sequence
  Description of Artificial Sequence: Synthetic oligonucleotide
  Antisense strand to SEQ ID NO: 1016246
cuucccaagaagcuuguga

SEQ ID NO: 1016248 - RNA, 19 nt, Artificial Sequence
  Description of Artificial Sequence: Synthetic oligonucleotide
  Sense strand starting at position 1321 of SEQ ID NO: 914598
aggacaagcuuuccuuuau

SEQ ID NO: 1016249 - RNA, 19 nt, Artificial Sequence
  Description of Artificial Sequence: Synthetic oligonucleotide
  Antisense strand to SEQ ID NO: 1016248
auaaaggaaagcuuguccu

SEQ ID NO: 1016250 - RNA, 19 nt, Artificial Sequence
  Description of Artificial Sequence: Synthetic oligonucleotide
  Sense strand starting at position 1322 of SEQ ID NO: 914598
ggacaagcuuuccuuuauu

SEQ ID NO: 1016251 - RNA, 19 nt, Artificial Sequence
  Description of Artificial Sequence: Synthetic oligonucleotide
  Antisense strand to SEQ ID NO: 1016250
aauaaaggaaagcuugucc

SEQ ID NO: 1016252 - RNA, 19 nt, Artificial Sequence
  Description of Artificial Sequence: Synthetic oligonucleotide
  Sense strand starting at position 1391 of SEQ ID NO: 914598
ucuuucuggucgccgaaga

SEQ ID NO: 1016253 - RNA, 19 nt, Artificial Sequence
  Description of Artificial Sequence: Synthetic oligonucleotide
  Antisense strand to SEQ ID NO: 1016252
ucuucggcgaccagaaaga

SEQ ID NO: 1016254 - RNA, 19 nt, Artificial Sequence
  Description of Artificial Sequence: Synthetic oligonucleotide
  Sense strand starting at position 2348 of SEQ ID NO: 914598
gcggccuugccaugaggau

SEQ ID NO: 1016255 - RNA, 19 nt, Artificial Sequence
  Description of Artificial Sequence: Synthetic oligonucleotide
  Antisense strand to SEQ ID NO: 1016254
auccucauggcaaggccgc

SEQ ID NO: 1016256 - RNA, 19 nt, Artificial Sequence
  Description of Artificial Sequence: Synthetic oligonucleotide
  Sense strand starting at position 2536 of SEQ ID NO: 914598
ggacuuauccaagguuacg

SEQ ID NO: 1016257 - RNA, 19 nt, Artificial Sequence
  Description of Artificial Sequence: Synthetic oligonucleotide
  Antisense strand to SEQ ID NO: 1016256
cguaaccuuggauaagucc

SEQ ID NO: 1016258 - RNA, 19 nt, Artificial Sequence
  Description of Artificial Sequence: Synthetic oligonucleotide
  Sense strand starting at position 2545 of SEQ ID NO: 914598
caagguuacgcugagucua

SEQ ID NO: 1016259 - RNA, 19 nt, Artificial Sequence
  Description of Artificial Sequence: Synthetic oligonucleotide
  Antisense strand to SEQ ID NO: 1016258
uagacucagcguaaccuug

SEQ ID NO: 1016260 - RNA, 19 nt, Artificial Sequence
  Description of Artificial Sequence: Synthetic oligonucleotide
  Sense strand starting at position 2550 of SEQ ID NO: 914598
uuacgcugagucuaagaga

SEQ ID NO: 1016261 - RNA, 19 nt, Artificial Sequence
  Description of Artificial Sequence: Synthetic oligonucleotide
  Antisense strand to SEQ ID NO: 1016260
ucucuuagacucagcguaa

SEQ ID NO: 1016262 - RNA, 19 nt, Artificial Sequence
  Description of Artificial Sequence: Synthetic oligonucleotide
  Sense strand starting at position 2553 of SEQ ID NO: 914598
cgcugagucuaagagacau

SEQ ID NO: 1016263 - RNA, 19 nt, Artificial Sequence
  Description of Artificial Sequence: Synthetic oligonucleotide
  Antisense strand to SEQ ID NO: 1016262
augucucuuagacucagcg

SEQ ID NO: 1016264 - RNA, 19 nt, Artificial Sequence
  Description of Artificial Sequence: Synthetic oligonucleotide
  Sense strand starting at position 2568 of SEQ ID NO: 914598
acauaagccuggucuggaa

SEQ ID NO: 1016265 - RNA, 19 nt, Artificial Sequence
  Description of Artificial Sequence: Synthetic oligonucleotide
  Antisense strand to SEQ ID NO: 1016264
uuccagaccaggcuuaugu

SEQ ID NO: 1016266 - RNA, 19 nt, Artificial Sequence
  Description of Artificial Sequence: Synthetic oligonucleotide
  Sense strand starting at position 2795 of SEQ ID NO: 914598
ccuauugguccuuguccua

SEQ ID NO: 1016267 - RNA, 19 nt, Artificial Sequence
  Description of Artificial Sequence: Synthetic oligonucleotide
  Antisense strand to SEQ ID NO: 1016266
uaggacaaggaccaauagg

SEQ ID NO: 1016268 - RNA, 19 nt, Artificial Sequence
  Description of Artificial Sequence: Synthetic oligonucleotide
  Sense strand starting at position 2849 of SEQ ID NO: 914598
agaugugucuuuguuggaa

SEQ ID NO: 1016269 - RNA, 19 nt, Artificial Sequence
  Description of Artificial Sequence: Synthetic oligonucleotide
  Antisense strand to SEQ ID NO: 1016268
uuccaacaaagacacaucu

SEQ ID NO: 1016270 - RNA, 19 nt, Artificial Sequence
  Description of Artificial Sequence: Synthetic oligonucleotide
  Sense strand starting at position 2852 of SEQ ID NO: 914598
ugugucuuuguuggaaacu

SEQ ID NO: 1016271 - RNA, 19 nt, Artificial Sequence
  Description of Artificial Sequence: Synthetic oligonucleotide
  Antisense strand to SEQ ID NO: 1016270
aguuuccaacaaagacaca

SEQ ID NO: 1016272 - RNA, 19 nt, Artificial Sequence
  Description of Artificial Sequence: Synthetic oligonucleotide
  Sense strand starting at position 2853 of SEQ ID NO: 914598
gugucuuuguuggaaacug

SEQ ID NO: 1016273 - RNA, 19 nt, Artificial Sequence
  Description of Artificial Sequence: Synthetic oligonucleotide
  Antisense strand to SEQ ID NO: 1016272
caguuuccaacaaagacac

SEQ ID NO: 1016274 - RNA, 19 nt, Artificial Sequence
  Description of Artificial Sequence: Synthetic oligonucleotide
  Sense strand starting at position 2897 of SEQ ID NO: 914598
cagguauaguggucacuag

SEQ ID NO: 1016275 - RNA, 19 nt, Artificial Sequence
  Description of Artificial Sequence: Synthetic oligonucleotide
  Antisense strand to SEQ ID NO: 1016274
cuagugaccacuauaccug

SEQ ID NO: 1016276 - RNA, 19 nt, Artificial Sequence
  Description of Artificial Sequence: Synthetic oligonucleotide
  Sense strand starting at position 2975 of SEQ ID NO: 914598
ugagcaaguuaaucucuaa

SEQ ID NO: 1016277 - RNA, 19 nt, Artificial Sequence
  Description of Artificial Sequence: Synthetic oligonucleotide
  Antisense strand to SEQ ID NO: 1016276
uuagagauuaacuugcuca

SEQ ID NO: 1016278 - RNA, 19 nt, Artificial Sequence
  Description of Artificial Sequence: Synthetic oligonucleotide
  Sense strand starting at position 2978 of SEQ ID NO: 914598
gcaaguuaaucucuaagug

SEQ ID NO: 1016279 - RNA, 19 nt, Artificial Sequence
  Description of Artificial Sequence: Synthetic oligonucleotide
  Antisense strand to SEQ ID NO: 1016278
cacuuagagauuaacuugc

SEQ ID NO: 1016280 - RNA, 19 nt, Artificial Sequence
  Description of Artificial Sequence: Synthetic oligonucleotide
  Sense strand starting at position 3056 of SEQ ID NO: 914598
ugagaauacugccuggaac

SEQ ID NO: 1016281 - RNA, 19 nt, Artificial Sequence
  Description of Artificial Sequence: Synthetic oligonucleotide
  Antisense strand to SEQ ID NO: 1016280
guuccaggcaguauucuca

SEQ ID NO: 1016282 - RNA, 19 nt, Artificial Sequence
  Description of Artificial Sequence: Synthetic oligonucleotide
  Sense strand starting at position 3057 of SEQ ID NO: 914598
gagaauacugccuggaaca

SEQ ID NO: 1016283 - RNA, 19 nt, Artificial Sequence
  Description of Artificial Sequence: Synthetic oligonucleotide
  Antisense strand to SEQ ID NO: 1016282
uguuccaggcaguauucuc

SEQ ID NO: 1016284 - RNA, 19 nt, Artificial Sequence
  Description of Artificial Sequence: Synthetic oligonucleotide
  Sense strand starting at position 3403 of SEQ ID NO: 914598
uuauuauuguuccagaagg

SEQ ID NO: 1016285 - RNA, 19 nt, Artificial Sequence
  Description of Artificial Sequence: Synthetic oligonucleotide
  Antisense strand to SEQ ID NO: 1016284
ccuucuggaacaauaauaa

SEQ ID NO: 1016286 - RNA, 19 nt, Artificial Sequence
  Description of Artificial Sequence: Synthetic oligonucleotide
  Sense strand starting at position 3408 of SEQ ID NO: 914598
auuguuccagaaggaagua

SEQ ID NO: 1016287 - RNA, 19 nt, Artificial Sequence
  Description of Artificial Sequence: Synthetic oligonucleotide
  Antisense strand to SEQ ID NO: 1016286
uacuuccuucuggaacaau

SEQ ID NO: 1016288 - RNA, 19 nt, Artificial Sequence
  Description of Artificial Sequence: Synthetic oligonucleotide
  Sense strand starting at position 3433 of SEQ ID NO: 914598
cgguuuguucugggaggcu

SEQ ID NO: 1016289 - RNA, 19 nt, Artificial Sequence
  Description of Artificial Sequence: Synthetic oligonucleotide
  Antisense strand to SEQ ID NO: 1016288
agccucccagaacaaaccg

SEQ ID NO: 1016290 - RNA, 19 nt, Artificial Sequence
  Description of Artificial Sequence: Synthetic oligonucleotide
  Sense strand starting at position 3452 of SEQ ID NO: 914598
gccacuaagagcuguagaa

SEQ ID NO: 1016291 - RNA, 19 nt, Artificial Sequence
  Description of Artificial Sequence: Synthetic oligonucleotide
  Antisense strand to SEQ ID NO: 1016290
uucuacagcucuuaguggc

SEQ ID NO: 1016292 - RNA, 19 nt, Artificial Sequence
  Description of Artificial Sequence: Synthetic oligonucleotide
  Sense strand starting at position 3520 of SEQ ID NO: 914598
cuggguacuucucucaaau

SEQ ID NO: 1016293 - RNA, 19 nt, Artificial Sequence
  Description of Artificial Sequence: Synthetic oligonucleotide
  Antisense strand to SEQ ID NO: 1016292
auuugagagaaguacccag

SEQ ID NO: 1016294 - RNA, 19 nt, Artificial Sequence
  Description of Artificial Sequence: Synthetic oligonucleotide
  Sense strand starting at position 3522 of SEQ ID NO: 914598
ggguacuucucucaaauau

SEQ ID NO: 1016295 - RNA, 19 nt, Artificial Sequence
  Description of Artificial Sequence: Synthetic oligonucleotide
  Antisense strand to SEQ ID NO: 1016294
auauuugagagaaguaccc

SEQ ID NO: 1016296 - RNA, 19 nt, Artificial Sequence
  Description of Artificial Sequence: Synthetic oligonucleotide
  Sense strand starting at position 3554 of SEQ ID NO: 914598
gagguuuaccuagagguua

SEQ ID NO: 1016297 - RNA, 19 nt, Artificial Sequence
  Description of Artificial Sequence: Synthetic oligonucleotide
  Antisense strand to SEQ ID NO: 1016296
uaaccucuagguaaaccuc

SEQ ID NO: 1016298 - RNA, 19 nt, Artificial Sequence
  Description of Artificial Sequence: Synthetic oligonucleotide
  Sense strand starting at position 3556 of SEQ ID NO: 914598
gguuuaccuagagguuaua

SEQ ID NO: 1016299 - RNA, 19 nt, Artificial Sequence
  Description of Artificial Sequence: Synthetic oligonucleotide
  Antisense strand to SEQ ID NO: 1016298
uauaaccucuagguaaacc

SEQ ID NO: 1016300 - RNA, 19 nt, Artificial Sequence
  Description of Artificial Sequence: Synthetic oligonucleotide
  Sense strand starting at position 3568 of SEQ ID NO: 914598
gguuauagccauugucucu

SEQ ID NO: 1016301 - RNA, 19 nt, Artificial Sequence
  Description of Artificial Sequence: Synthetic oligonucleotide
  Antisense strand to SEQ ID NO: 1016300
agagacaauggcuauaacc

SEQ ID NO: 1016302 - RNA, 19 nt, Artificial Sequence
  Description of Artificial Sequence: Synthetic oligonucleotide
  Sense strand starting at position 3577 of SEQ ID NO: 914598
cauugucucucggagccau

SEQ ID NO: 1016303 - RNA, 19 nt, Artificial Sequence
  Description of Artificial Sequence: Synthetic oligonucleotide
  Antisense strand to SEQ ID NO: 1016302
auggcuccgagagacaaug

SEQ ID NO: 1016304 - RNA, 19 nt, Artificial Sequence
  Description of Artificial Sequence: Synthetic oligonucleotide
  Sense strand starting at position 13 of SEQ ID NO: 914599
uugacauacuggcugaaga

SEQ ID NO: 1016305 - RNA, 19 nt, Artificial Sequence
  Description of Artificial Sequence: Synthetic oligonucleotide
  Antisense strand to SEQ ID NO: 1016304
ucuucagccaguaugucaa

SEQ ID NO: 1016306 - RNA, 19 nt, Artificial Sequence
  Description of Artificial Sequence: Synthetic oligonucleotide
  Sense strand starting at position 61 of SEQ ID NO: 914599
aaaucaggucccuggucau

SEQ ID NO: 1016307 - RNA, 19 nt, Artificial Sequence
  Description of Artificial Sequence: Synthetic oligonucleotide
  Antisense strand to SEQ ID NO: 1016306
augaccagggaccugauuu

SEQ ID NO: 1016308 - RNA, 19 nt, Artificial Sequence
  Description of Artificial Sequence: Synthetic oligonucleotide
  Sense strand starting at position 88 of SEQ ID NO: 914599
cuuuaagguaagugagagu

SEQ ID NO: 1016309 - RNA, 19 nt, Artificial Sequence
  Description of Artificial Sequence: Synthetic oligonucleotide
  Antisense strand to SEQ ID NO: 1016308
acucucacuuaccuuaaag

SEQ ID NO: 1016310 - RNA, 19 nt, Artificial Sequence
  Description of Artificial Sequence: Synthetic oligonucleotide
  Sense strand starting at position 95 of SEQ ID NO: 914599
guaagugagaguuacuaau

SEQ ID NO: 1016311 - RNA, 19 nt, Artificial Sequence
  Description of Artificial Sequence: Synthetic oligonucleotide
  Antisense strand to SEQ ID NO: 1016310
auuaguaacucucacuuac

SEQ ID NO: 1016312 - RNA, 19 nt, Artificial Sequence
  Description of Artificial Sequence: Synthetic oligonucleotide
  Sense strand starting at position 102 of SEQ ID NO: 914599
agaguuacuaaucggugga

SEQ ID NO: 1016313 - RNA, 19 nt, Artificial Sequence
  Description of Artificial Sequence: Synthetic oligonucleotide
  Antisense strand to SEQ ID NO: 1016312
uccaccgauuaguaacucu

SEQ ID NO: 1016314 - RNA, 19 nt, Artificial Sequence
  Description of Artificial Sequence: Synthetic oligonucleotide
  Sense strand starting at position 104 of SEQ ID NO: 914599
aguuacuaaucgguggaga

SEQ ID NO: 1016315 - RNA, 19 nt, Artificial Sequence
  Description of Artificial Sequence: Synthetic oligonucleotide
  Antisense strand to SEQ ID NO: 1016314
ucuccaccgauuaguaacu

SEQ ID NO: 1016316 - RNA, 19 nt, Artificial Sequence
  Description of Artificial Sequence: Synthetic oligonucleotide
  Sense strand starting at position 105 of SEQ ID NO: 914599
guuacuaaucgguggagaa

SEQ ID NO: 1016317 - RNA, 19 nt, Artificial Sequence
  Description of Artificial Sequence: Synthetic oligonucleotide
  Antisense strand to SEQ ID NO: 1016316
uucuccaccgauuaguaac

SEQ ID NO: 1016318 - RNA, 19 nt, Artificial Sequence
  Description of Artificial Sequence: Synthetic oligonucleotide
  Sense strand starting at position 106 of SEQ ID NO: 914599
uuacuaaucgguggagaaa

SEQ ID NO: 1016319 - RNA, 19 nt, Artificial Sequence
  Description of Artificial Sequence: Synthetic oligonucleotide
  Antisense strand to SEQ ID NO: 1016318
uuucuccaccgauuaguaa

SEQ ID NO: 1016320 - RNA, 19 nt, Artificial Sequence
  Description of Artificial Sequence: Synthetic oligonucleotide
  Sense strand starting at position 199 of SEQ ID NO: 914599
ccuugcucacuggaacuau

SEQ ID NO: 1016321 - RNA, 19 nt, Artificial Sequence
  Description of Artificial Sequence: Synthetic oligonucleotide
  Antisense strand to SEQ ID NO: 1016320
auaguuccagugagcaagg

SEQ ID NO: 1016322 - RNA, 19 nt, Artificial Sequence
  Description of Artificial Sequence: Synthetic oligonucleotide
  Sense strand starting at position 343 of SEQ ID NO: 914599
aggacaguguuccuuugau

SEQ ID NO: 1016323 - RNA, 19 nt, Artificial Sequence
  Description of Artificial Sequence: Synthetic oligonucleotide
  Antisense strand to SEQ ID NO: 1016322
aucaaaggaacacuguccu

SEQ ID NO: 1016324 - RNA, 19 nt, Artificial Sequence
  Description of Artificial Sequence: Synthetic oligonucleotide
  Sense strand starting at position 390 of SEQ ID NO: 914599
cuuagagaguuaucuacuu

SEQ ID NO: 1016325 - RNA, 19 nt, Artificial Sequence
  Description of Artificial Sequence: Synthetic oligonucleotide
  Antisense strand to SEQ ID NO: 1016324
aaguagauaacucucuaag

SEQ ID NO: 1016326 - RNA, 19 nt, Artificial Sequence
  Description of Artificial Sequence: Synthetic oligonucleotide
  Sense strand starting at position 458 of SEQ ID NO: 914599
ugcccaaagcuccagaauu

SEQ ID NO: 1016327 - RNA, 19 nt, Artificial Sequence
  Description of Artificial Sequence: Synthetic oligonucleotide
  Antisense strand to SEQ ID NO: 1016326
aauucuggagcuuugggca

SEQ ID NO: 1016328 - RNA, 19 nt, Artificial Sequence
  Description of Artificial Sequence: Synthetic oligonucleotide
  Sense strand starting at position 675 of SEQ ID NO: 914599
ccacuaugugcuuaccuga

SEQ ID NO: 1016329 - RNA, 19 nt, Artificial Sequence
  Description of Artificial Sequence: Synthetic oligonucleotide
  Antisense strand to SEQ ID NO: 1016328
ucagguaagcacauagugg

SEQ ID NO: 1016330 - RNA, 19 nt, Artificial Sequence
  Description of Artificial Sequence: Synthetic oligonucleotide
  Sense strand starting at position 801 of SEQ ID NO: 914599
aaaugagcauuagugagua

SEQ ID NO: 1016331 - RNA, 19 nt, Artificial Sequence
  Description of Artificial Sequence: Synthetic oligonucleotide
  Antisense strand to SEQ ID NO: 1016330
uacucacuaaugcucauuu

SEQ ID NO: 1016332 - RNA, 19 nt, Artificial Sequence
  Description of Artificial Sequence: Synthetic oligonucleotide
  Sense strand starting at position 806 of SEQ ID NO: 914599
agcauuagugaguaaguca

SEQ ID NO: 1016333 - RNA, 19 nt, Artificial Sequence
  Description of Artificial Sequence: Synthetic oligonucleotide
  Antisense strand to SEQ ID NO: 1016332
ugacuuacucacuaaugcu

SEQ ID NO: 1016334 - RNA, 19 nt, Artificial Sequence
  Description of Artificial Sequence: Synthetic oligonucleotide
  Sense strand starting at position 1007 of SEQ ID NO: 914599
aggguuaucugaguaucuu

SEQ ID NO: 1016335 - RNA, 19 nt, Artificial Sequence
  Description of Artificial Sequence: Synthetic oligonucleotide
  Antisense strand to SEQ ID NO: 1016334
aagauacucagauaacccu

SEQ ID NO: 1016336 - RNA, 19 nt, Artificial Sequence
  Description of Artificial Sequence: Synthetic oligonucleotide
  Sense strand starting at position 1008 of SEQ ID NO: 914599
ggguuaucugaguaucuua

SEQ ID NO: 1016337 - RNA, 19 nt, Artificial Sequence
  Description of Artificial Sequence: Synthetic oligonucleotide
  Antisense strand to SEQ ID NO: 1016336
uaagauacucagauaaccc

SEQ ID NO: 1016338 - RNA, 19 nt, Artificial Sequence
  Description of Artificial Sequence: Synthetic oligonucleotide
  Sense strand starting at position 1022 of SEQ ID NO: 914599
ucuuaacaguuaucugagu

SEQ ID NO: 1016339 - RNA, 19 nt, Artificial Sequence
  Description of Artificial Sequence: Synthetic oligonucleotide
  Antisense strand to SEQ ID NO: 1016338
acucagauaacuguuaaga

SEQ ID NO: 1016340 - RNA, 19 nt, Artificial Sequence
  Description of Artificial Sequence: Synthetic oligonucleotide
  Sense strand starting at position 1044 of SEQ ID NO: 914599
cccuauuaacuggguugua

SEQ ID NO: 1016341 - RNA, 19 nt, Artificial Sequence
  Description of Artificial Sequence: Synthetic oligonucleotide
  Antisense strand to SEQ ID NO: 1016340
uacaacccaguuaauaggg

SEQ ID NO: 1016342 - RNA, 19 nt, Artificial Sequence
  Description of Artificial Sequence: Synthetic oligonucleotide
  Sense strand starting at position 1047 of SEQ ID NO: 914599
uauuaacuggguuguagau

SEQ ID NO: 1016343 - RNA, 19 nt, Artificial Sequence
  Description of Artificial Sequence: Synthetic oligonucleotide
  Antisense strand to SEQ ID NO: 1016342
aucuacaacccaguuaaua

SEQ ID NO: 1016344 - RNA, 19 nt, Artificial Sequence
  Description of Artificial Sequence: Synthetic oligonucleotide
  Sense strand starting at position 1085 of SEQ ID NO: 914599
agaagugauauccgauucu

SEQ ID NO: 1016345 - RNA, 19 nt, Artificial Sequence
  Description of Artificial Sequence: Synthetic oligonucleotide
  Antisense strand to SEQ ID NO: 1016344
agaaucggauaucacuucu

SEQ ID NO: 1016346 - RNA, 19 nt, Artificial Sequence
  Description of Artificial Sequence: Synthetic oligonucleotide
  Sense strand starting at position 2192 of SEQ ID NO: 914599
guagauuaacucgggacca

SEQ ID NO: 1016347 - RNA, 19 nt, Artificial Sequence
  Description of Artificial Sequence: Synthetic oligonucleotide
  Antisense strand to SEQ ID NO: 1016346
uggucccgaguuaaucuac

SEQ ID NO: 1016348 - RNA, 19 nt, Artificial Sequence
  Description of Artificial Sequence: Synthetic oligonucleotide
  Sense strand starting at position 2801 of SEQ ID NO: 914599
gagagcaaugucuagaggu

SEQ ID NO: 1016349 - RNA, 19 nt, Artificial Sequence
  Description of Artificial Sequence: Synthetic oligonucleotide
  Antisense strand to SEQ ID NO: 1016348
accucuagacauugcucuc

SEQ ID NO: 1016350 - RNA, 19 nt, Artificial Sequence
  Description of Artificial Sequence: Synthetic oligonucleotide
  Sense strand starting at position 2803 of SEQ ID NO: 914599
gagcaaugucuagagguca

SEQ ID NO: 1016351 - RNA, 19 nt, Artificial Sequence
  Description of Artificial Sequence: Synthetic oligonucleotide
  Antisense strand to SEQ ID NO: 1016350
ugaccucuagacauugcuc

SEQ ID NO: 1016352 - RNA, 19 nt, Artificial Sequence
  Description of Artificial Sequence: Synthetic oligonucleotide
  Sense strand starting at position 2955 of SEQ ID NO: 914599
gggcuauuaaugggacaca

SEQ ID NO: 1016353 - RNA, 19 nt, Artificial Sequence
  Description of Artificial Sequence: Synthetic oligonucleotide
  Antisense strand to SEQ ID NO: 1016352
ugugucccauuaauagccc

SEQ ID NO: 1016354 - RNA, 19 nt, Artificial Sequence
  Description of Artificial Sequence: Synthetic oligonucleotide
  Sense strand starting at position 2967 of SEQ ID NO: 914599
ggacacaucuuaguuacuu

SEQ ID NO: 1016355 - RNA, 19 nt, Artificial Sequence
  Description of Artificial Sequence: Synthetic oligonucleotide
  Antisense strand to SEQ ID NO: 1016354
aaguaacuaagaugugucc

SEQ ID NO: 1016356 - RNA, 19 nt, Artificial Sequence
  Description of Artificial Sequence: Synthetic oligonucleotide
  Sense strand starting at position 3015 of SEQ ID NO: 914599
gcuggauaccucugaaagg

SEQ ID NO: 1016357 - RNA, 19 nt, Artificial Sequence
  Description of Artificial Sequence: Synthetic oligonucleotide
  Antisense strand to SEQ ID NO: 1016356
ccuuucagagguauccagc

SEQ ID NO: 1016358 - RNA, 19 nt, Artificial Sequence
  Description of Artificial Sequence: Synthetic oligonucleotide
  Sense strand starting at position 3030 of SEQ ID NO: 914599
aaggaugaguggucuuaga

SEQ ID NO: 1016359 - RNA, 19 nt, Artificial Sequence
  Description of Artificial Sequence: Synthetic oligonucleotide
  Antisense strand to SEQ ID NO: 1016358
ucuaagaccacucauccuu

SEQ ID NO: 1016360 - RNA, 19 nt, Artificial Sequence
  Description of Artificial Sequence: Synthetic oligonucleotide
  Sense strand starting at position 3135 of SEQ ID NO: 914599
uaugacgucuucuuagaag

SEQ ID NO: 1016361 - RNA, 19 nt, Artificial Sequence
  Description of Artificial Sequence: Synthetic oligonucleotide
  Antisense strand to SEQ ID NO: 1016360
cuucuaagaagacgucaua

SEQ ID NO: 1016362 - RNA, 19 nt, Artificial Sequence
  Description of Artificial Sequence: Synthetic oligonucleotide
  Sense strand starting at position 3141 of SEQ ID NO: 914599
gucuucuuagaaggaggau

SEQ ID NO: 1016363 - RNA, 19 nt, Artificial Sequence
  Description of Artificial Sequence: Synthetic oligonucleotide
  Antisense strand to SEQ ID NO: 1016362
auccuccuucuaagaagac

SEQ ID NO: 1016364 - RNA, 19 nt, Artificial Sequence
  Description of Artificial Sequence: Synthetic oligonucleotide
  Sense strand starting at position 3154 of SEQ ID NO: 914599
gaggaugcuugugugauuu

SEQ ID NO: 1016365 - RNA, 19 nt, Artificial Sequence
  Description of Artificial Sequence: Synthetic oligonucleotide
  Antisense strand to SEQ ID NO: 1016364
aaaucacacaagcauccuc

SEQ ID NO: 1016366 - RNA, 19 nt, Artificial Sequence
  Description of Artificial Sequence: Synthetic oligonucleotide
  Sense strand starting at position 3158 of SEQ ID NO: 914599
augcuugugugauuuaggu

SEQ ID NO: 1016367 - RNA, 19 nt, Artificial Sequence
  Description of Artificial Sequence: Synthetic oligonucleotide
  Antisense strand to SEQ ID NO: 1016366
accuaaaucacacaagcau

SEQ ID NO: 1016368 - RNA, 19 nt, Artificial Sequence
  Description of Artificial Sequence: Synthetic oligonucleotide
  Sense strand starting at position 3160 of SEQ ID NO: 914599
gcuugugugauuuaggugu

SEQ ID NO: 1016369 - RNA, 19 nt, Artificial Sequence
  Description of Artificial Sequence: Synthetic oligonucleotide
  Antisense strand to SEQ ID NO: 1016368
acaccuaaaucacacaagc

SEQ ID NO: 1016370 - RNA, 19 nt, Artificial Sequence
  Description of Artificial Sequence: Synthetic oligonucleotide
  Sense strand starting at position 3176 of SEQ ID NO: 914599
uguaaauuagaaugguguu

SEQ ID NO: 1016371 - RNA, 19 nt, Artificial Sequence
  Description of Artificial Sequence: Synthetic oligonucleotide
  Antisense strand to SEQ ID NO: 1016370
aacaccauucuaauuuaca

SEQ ID NO: 1016372 - RNA, 19 nt, Artificial Sequence
  Description of Artificial Sequence: Synthetic oligonucleotide
  Sense strand starting at position 3177 of SEQ ID NO: 914599
guaaauuagaaugguguuu

SEQ ID NO: 1016373 - RNA, 19 nt, Artificial Sequence
  Description of Artificial Sequence: Synthetic oligonucleotide
  Antisense strand to SEQ ID NO: 1016372
aaacaccauucuaauuuac

SEQ ID NO: 1016374 - RNA, 19 nt, Artificial Sequence
  Description of Artificial Sequence: Synthetic oligonucleotide
  Sense strand starting at position 3182 of SEQ ID NO: 914599
uuagaaugguguuuaagug

SEQ ID NO: 1016375 - RNA, 19 nt, Artificial Sequence
  Description of Artificial Sequence: Synthetic oligonucleotide
  Antisense strand to SEQ ID NO: 1016374
cacuuaaacaccauucuaa

SEQ ID NO: 1016376 - RNA, 19 nt, Artificial Sequence
  Description of Artificial Sequence: Synthetic oligonucleotide
  Sense strand starting at position 3227 of SEQ ID NO: 914599
agagcuucuacaugggauu

SEQ ID NO: 1016377 - RNA, 19 nt, Artificial Sequence
  Description of Artificial Sequence: Synthetic oligonucleotide
  Antisense strand to SEQ ID NO: 1016376
aaucccauguagaagcucu

SEQ ID NO: 1016378 - RNA, 19 nt, Artificial Sequence
  Description of Artificial Sequence: Synthetic oligonucleotide
  Sense strand starting at position 3702 of SEQ ID NO: 914599
uuuacuucuguuuaaggau

SEQ ID NO: 1016379 - RNA, 19 nt, Artificial Sequence
  Description of Artificial Sequence: Synthetic oligonucleotide
  Antisense strand to SEQ ID NO: 1016378
auccuuaaacagaaguaaa

SEQ ID NO: 1016380 - RNA, 19 nt, Artificial Sequence
  Description of Artificial Sequence: Synthetic oligonucleotide
  Sense strand starting at position 3926 of SEQ ID NO: 914599
uggugaccucagugaccau

SEQ ID NO: 1016381 - RNA, 19 nt, Artificial Sequence
  Description of Artificial Sequence: Synthetic oligonucleotide
  Antisense strand to SEQ ID NO: 1016380
auggucacugaggucacca

SEQ ID NO: 1016382 - RNA, 19 nt, Artificial Sequence
  Description of Artificial Sequence: Synthetic oligonucleotide
  Sense strand starting at position 3982 of SEQ ID NO: 914599
cagguuaugcaauaauugu

SEQ ID NO: 1016383 - RNA, 19 nt, Artificial Sequence
  Description of Artificial Sequence: Synthetic oligonucleotide
  Antisense strand to SEQ ID NO: 1016382
acaauuauugcauaaccug

SEQ ID NO: 1016384 - RNA, 19 nt, Artificial Sequence
  Description of Artificial Sequence: Synthetic oligonucleotide
  Sense strand starting at position 41 of SEQ ID NO: 914600
gcauuagaggcgucaugcu

SEQ ID NO: 1016385 - RNA, 19 nt, Artificial Sequence
  Description of Artificial Sequence: Synthetic oligonucleotide
  Antisense strand to SEQ ID NO: 1016384
agcaugacgccucuaaugc

SEQ ID NO: 1016386 - RNA, 19 nt, Artificial Sequence
  Description of Artificial Sequence: Synthetic oligonucleotide
  Sense strand starting at position 127 of SEQ ID NO: 914600
uuacaauaucuacgagaau

SEQ ID NO: 1016387 - RNA, 19 nt, Artificial Sequence
  Description of Artificial Sequence: Synthetic oligonucleotide
  Antisense strand to SEQ ID NO: 1016386
auucucguagauauuguaa

SEQ ID NO: 1016388 - RNA, 19 nt, Artificial Sequence
  Description of Artificial Sequence: Synthetic oligonucleotide
  Sense strand starting at position 136 of SEQ ID NO: 914600
cuacgagaauuaucagcaa

SEQ ID NO: 1016389 - RNA, 19 nt, Artificial Sequence
  Description of Artificial Sequence: Synthetic oligonucleotide
  Antisense strand to SEQ ID NO: 1016388
uugcugauaauucucguag

SEQ ID NO: 1016390 - RNA, 19 nt, Artificial Sequence
  Description of Artificial Sequence: Synthetic oligonucleotide
  Sense strand starting at position 331 of SEQ ID NO: 914600
uugacauacuggcugaaga

SEQ ID NO: 1016391 - RNA, 19 nt, Artificial Sequence
  Description of Artificial Sequence: Synthetic oligonucleotide
  Antisense strand to SEQ ID NO: 1016390
ucuucagccaguaugucaa

SEQ ID NO: 1016392 - RNA, 19 nt, Artificial Sequence
  Description of Artificial Sequence: Synthetic oligonucleotide
  Sense strand starting at position 379 of SEQ ID NO: 914600
aaaucaggucccuggucau

SEQ ID NO: 1016393 - RNA, 19 nt, Artificial Sequence
  Description of Artificial Sequence: Synthetic oligonucleotide
  Antisense strand to SEQ ID NO: 1016392
augaccagggaccugauuu

SEQ ID NO: 1016394 - RNA, 19 nt, Artificial Sequence
  Description of Artificial Sequence: Synthetic oligonucleotide
  Sense strand starting at position 406 of SEQ ID NO: 914600
cuuuaagguaagugagagu

SEQ ID NO: 1016395 - RNA, 19 nt, Artificial Sequence
  Description of Artificial Sequence: Synthetic oligonucleotide
  Antisense strand to SEQ ID NO: 1016394
acucucacuuaccuuaaag

SEQ ID NO: 1016396 - RNA, 19 nt, Artificial Sequence
  Description of Artificial Sequence: Synthetic oligonucleotide
  Sense strand starting at position 413 of SEQ ID NO: 914600
guaagugagaguuacuaau

SEQ ID NO: 1016397 - RNA, 19 nt, Artificial Sequence
  Description of Artificial Sequence: Synthetic oligonucleotide
  Antisense strand to SEQ ID NO: 1016396
auuaguaacucucacuuac

SEQ ID NO: 1016398 - RNA, 19 nt, Artificial Sequence
  Description of Artificial Sequence: Synthetic oligonucleotide
  Sense strand starting at position 420 of SEQ ID NO: 914600
agaguuacuaaucggugga

SEQ ID NO: 1016399 - RNA, 19 nt, Artificial Sequence
  Description of Artificial Sequence: Synthetic oligonucleotide
  Antisense strand to SEQ ID NO: 1016398
uccaccgauuaguaacucu

SEQ ID NO: 1016400 - RNA, 19 nt, Artificial Sequence
  Description of Artificial Sequence: Synthetic oligonucleotide
  Sense strand starting at position 422 of SEQ ID NO: 914600
aguuacuaaucgguggaga

SEQ ID NO: 1016401 - RNA, 19 nt, Artificial Sequence
  Description of Artificial Sequence: Synthetic oligonucleotide
  Antisense strand to SEQ ID NO: 1016400
ucuccaccgauuaguaacu

SEQ ID NO: 1016402 - RNA, 19 nt, Artificial Sequence
  Description of Artificial Sequence: Synthetic oligonucleotide
  Sense strand starting at position 423 of SEQ ID NO: 914600
guuacuaaucgguggagaa

SEQ ID NO: 1016403 - RNA, 19 nt, Artificial Sequence
  Description of Artificial Sequence: Synthetic oligonucleotide
  Antisense strand to SEQ ID NO: 1016402
uucuccaccgauuaguaac

SEQ ID NO: 1016404 - RNA, 19 nt, Artificial Sequence
  Description of Artificial Sequence: Synthetic oligonucleotide
  Sense strand starting at position 424 of SEQ ID NO: 914600
uuacuaaucgguggagaaa

SEQ ID NO: 1016405 - RNA, 19 nt, Artificial Sequence
  Description of Artificial Sequence: Synthetic oligonucleotide
  Antisense strand to SEQ ID NO: 1016404
uuucuccaccgauuaguaa

SEQ ID NO: 1016406 - RNA, 19 nt, Artificial Sequence
  Description of Artificial Sequence: Synthetic oligonucleotide
  Sense strand starting at position 517 of SEQ ID NO: 914600
ccuugcucacuggaacuau

SEQ ID NO: 1016407 - RNA, 19 nt, Artificial Sequence
  Description of Artificial Sequence: Synthetic oligonucleotide
  Antisense strand to SEQ ID NO: 1016406
auaguuccagugagcaagg

SEQ ID NO: 1016408 - RNA, 19 nt, Artificial Sequence
  Description of Artificial Sequence: Synthetic oligonucleotide
  Sense strand starting at position 661 of SEQ ID NO: 914600
aggacaguguuccuuugau

SEQ ID NO: 1016409 - RNA, 19 nt, Artificial Sequence
  Description of Artificial Sequence: Synthetic oligonucleotide
  Antisense strand to SEQ ID NO: 1016408
aucaaaggaacacuguccu

SEQ ID NO: 1016410 - RNA, 19 nt, Artificial Sequence
  Description of Artificial Sequence: Synthetic oligonucleotide
  Sense strand starting at position 708 of SEQ ID NO: 914600
cuuagagaguuaucuacuu

SEQ ID NO: 1016411 - RNA, 19 nt, Artificial Sequence
  Description of Artificial Sequence: Synthetic oligonucleotide
  Antisense strand to SEQ ID NO: 1016410
aaguagauaacucucuaag

SEQ ID NO: 1016412 - RNA, 19 nt, Artificial Sequence
  Description of Artificial Sequence: Synthetic oligonucleotide
  Sense strand starting at position 776 of SEQ ID NO: 914600
ugcccaaagcuccagaauu

SEQ ID NO: 1016413 - RNA, 19 nt, Artificial Sequence
  Description of Artificial Sequence: Synthetic oligonucleotide
  Antisense strand to SEQ ID NO: 1016412
aauucuggagcuuugggca

SEQ ID NO: 1016414 - RNA, 19 nt, Artificial Sequence
  Description of Artificial Sequence: Synthetic oligonucleotide
  Sense strand starting at position 993 of SEQ ID NO: 914600
ccacuaugugcuuaccuga

SEQ ID NO: 1016415 - RNA, 19 nt, Artificial Sequence
  Description of Artificial Sequence: Synthetic oligonucleotide
  Antisense strand to SEQ ID NO: 1016414
ucagguaagcacauagugg

SEQ ID NO: 1016416 - RNA, 19 nt, Artificial Sequence
  Description of Artificial Sequence: Synthetic oligonucleotide
  Sense strand starting at position 1119 of SEQ ID NO: 914600
aaaugagcauuagugagua

SEQ ID NO: 1016417 - RNA, 19 nt, Artificial Sequence
  Description of Artificial Sequence: Synthetic oligonucleotide
  Antisense strand to SEQ ID NO: 1016416
uacucacuaaugcucauuu

SEQ ID NO: 1016418 - RNA, 19 nt, Artificial Sequence
  Description of Artificial Sequence: Synthetic oligonucleotide
  Sense strand starting at position 1124 of SEQ ID NO: 914600
agcauuagugaguaaguca

SEQ ID NO: 1016419 - RNA, 19 nt, Artificial Sequence
  Description of Artificial Sequence: Synthetic oligonucleotide
  Antisense strand to SEQ ID NO: 1016418
ugacuuacucacuaaugcu

SEQ ID NO: 1016420 - RNA, 19 nt, Artificial Sequence
  Description of Artificial Sequence: Synthetic oligonucleotide
  Sense strand starting at position 1325 of SEQ ID NO: 914600
aggguuaucugaguaucuu

SEQ ID NO: 1016421 - RNA, 19 nt, Artificial Sequence
  Description of Artificial Sequence: Synthetic oligonucleotide
  Antisense strand to SEQ ID NO: 1016420
aagauacucagauaacccu

SEQ ID NO: 1016422 - RNA, 19 nt, Artificial Sequence
  Description of Artificial Sequence: Synthetic oligonucleotide
  Sense strand starting at position 1326 of SEQ ID NO: 914600
ggguuaucugaguaucuua

SEQ ID NO: 1016423 - RNA, 19 nt, Artificial Sequence
  Description of Artificial Sequence: Synthetic oligonucleotide
  Antisense strand to SEQ ID NO: 1016422
uaagauacucagauaaccc

SEQ ID NO: 1016424 - RNA, 19 nt, Artificial Sequence
  Description of Artificial Sequence: Synthetic oligonucleotide
  Sense strand starting at position 1340 of SEQ ID NO: 914600
ucuuaacaguuaucugagu

SEQ ID NO: 1016425 - RNA, 19 nt, Artificial Sequence
  Description of Artificial Sequence: Synthetic oligonucleotide
  Antisense strand to SEQ ID NO: 1016424
acucagauaacuguuaaga

SEQ ID NO: 1016426 - RNA, 19 nt, Artificial Sequence
  Description of Artificial Sequence: Synthetic oligonucleotide
  Sense strand starting at position 1362 of SEQ ID NO: 914600
cccuauuaacuggguugua

SEQ ID NO: 1016427 - RNA, 19 nt, Artificial Sequence
  Description of Artificial Sequence: Synthetic oligonucleotide
  Antisense strand to SEQ ID NO: 1016426
uacaacccaguuaauaggg

SEQ ID NO: 1016428 - RNA, 19 nt, Artificial Sequence
  Description of Artificial Sequence: Synthetic oligonucleotide
  Sense strand starting at position 1365 of SEQ ID NO: 914600
uauuaacuggguuguagau

SEQ ID NO: 1016429 - RNA, 19 nt, Artificial Sequence
  Description of Artificial Sequence: Synthetic oligonucleotide
  Antisense strand to SEQ ID NO: 1016428
aucuacaacccaguuaaua

SEQ ID NO: 1016430 - RNA, 19 nt, Artificial Sequence
  Description of Artificial Sequence: Synthetic oligonucleotide
  Sense strand starting at position 1403 of SEQ ID NO: 914600
agaagugauauccgauucu

SEQ ID NO: 1016431 - RNA, 19 nt, Artificial Sequence
  Description of Artificial Sequence: Synthetic oligonucleotide
  Antisense strand to SEQ ID NO: 1016430
agaaucggauaucacuucu

SEQ ID NO: 1016432 - RNA, 19 nt, Artificial Sequence
  Description of Artificial Sequence: Synthetic oligonucleotide
  Sense strand starting at position 2510 of SEQ ID NO: 914600
guagauuaacucgggacca

SEQ ID NO: 1016433 - RNA, 19 nt, Artificial Sequence
  Description of Artificial Sequence: Synthetic oligonucleotide
  Antisense strand to SEQ ID NO: 1016432
uggucccgaguuaaucuac

SEQ ID NO: 1016434 - RNA, 19 nt, Artificial Sequence
  Description of Artificial Sequence: Synthetic oligonucleotide
  Sense strand starting at position 3119 of SEQ ID NO: 914600
gagagcaaugucuagaggu

SEQ ID NO: 1016435 - RNA, 19 nt, Artificial Sequence
  Description of Artificial Sequence: Synthetic oligonucleotide
  Antisense strand to SEQ ID NO: 1016434
accucuagacauugcucuc

SEQ ID NO: 1016436 - RNA, 19 nt, Artificial Sequence
  Description of Artificial Sequence: Synthetic oligonucleotide
  Sense strand starting at position 3121 of SEQ ID NO: 914600
gagcaaugucuagagguca

SEQ ID NO: 1016437 - RNA, 19 nt, Artificial Sequence
  Description of Artificial Sequence: Synthetic oligonucleotide
  Antisense strand to SEQ ID NO: 1016436
ugaccucuagacauugcuc

SEQ ID NO: 1016438 - RNA, 19 nt, Artificial Sequence
  Description of Artificial Sequence: Synthetic oligonucleotide
  Sense strand starting at position 3273 of SEQ ID NO: 914600
gggcuauuaaugggacaca

SEQ ID NO: 1016439 - RNA, 19 nt, Artificial Sequence
  Description of Artificial Sequence: Synthetic oligonucleotide
  Antisense strand to SEQ ID NO: 1016438
ugugucccauuaauagccc

SEQ ID NO: 1016440 - RNA, 19 nt, Artificial Sequence
  Description of Artificial Sequence: Synthetic oligonucleotide
  Sense strand starting at position 3285 of SEQ ID NO: 914600
ggacacaucuuaguuacuu

SEQ ID NO: 1016441 - RNA, 19 nt, Artificial Sequence
  Description of Artificial Sequence: Synthetic oligonucleotide
  Antisense strand to SEQ ID NO: 1016440
aaguaacuaagaugugucc

SEQ ID NO: 1016442 - RNA, 19 nt, Artificial Sequence
  Description of Artificial Sequence: Synthetic oligonucleotide
  Sense strand starting at position 3333 of SEQ ID NO: 914600
gcuggauaccucugaaagg

SEQ ID NO: 1016443 - RNA, 19 nt, Artificial Sequence
  Description of Artificial Sequence: Synthetic oligonucleotide
  Antisense strand to SEQ ID NO: 1016442
ccuuucagagguauccagc

SEQ ID NO: 1016444 - RNA, 19 nt, Artificial Sequence
  Description of Artificial Sequence: Synthetic oligonucleotide
  Sense strand starting at position 3348 of SEQ ID NO: 914600
aaggaugaguggucuuaga

SEQ ID NO: 1016445 - RNA, 19 nt, Artificial Sequence
  Description of Artificial Sequence: Synthetic oligonucleotide
  Antisense strand to SEQ ID NO: 1016444
ucuaagaccacucauccuu

SEQ ID NO: 1016446 - RNA, 19 nt, Artificial Sequence
  Description of Artificial Sequence: Synthetic oligonucleotide
  Sense strand starting at position 3453 of SEQ ID NO: 914600
uaugacgucuucuuagaag

SEQ ID NO: 1016447 - RNA, 19 nt, Artificial Sequence
  Description of Artificial Sequence: Synthetic oligonucleotide
  Antisense strand to SEQ ID NO: 1016446
cuucuaagaagacgucaua

SEQ ID NO: 1016448 - RNA, 19 nt, Artificial Sequence
  Description of Artificial Sequence: Synthetic oligonucleotide
  Sense strand starting at position 3459 of SEQ ID NO: 914600
gucuucuuagaaggaggau

SEQ ID NO: 1016449 - RNA, 19 nt, Artificial Sequence
  Description of Artificial Sequence: Synthetic oligonucleotide
  Antisense strand to SEQ ID NO: 1016448
auccuccuucuaagaagac

SEQ ID NO: 1016450 - RNA, 19 nt, Artificial Sequence
  Description of Artificial Sequence: Synthetic oligonucleotide
  Sense strand starting at position 3472 of SEQ ID NO: 914600
gaggaugcuugugugauuu

SEQ ID NO: 1016451 - RNA, 19 nt, Artificial Sequence
  Description of Artificial Sequence: Synthetic oligonucleotide
  Antisense strand to SEQ ID NO: 1016450
aaaucacacaagcauccuc

SEQ ID NO: 1016452 - RNA, 19 nt, Artificial Sequence
  Description of Artificial Sequence: Synthetic oligonucleotide
  Sense strand starting at position 3476 of SEQ ID NO: 914600
augcuugugugauuuaggu

SEQ ID NO: 1016453 - RNA, 19 nt, Artificial Sequence
  Description of Artificial Sequence: Synthetic oligonucleotide
  Antisense strand to SEQ ID NO: 1016452
accuaaaucacacaagcau

SEQ ID NO: 1016454 - RNA, 19 nt, Artificial Sequence
  Description of Artificial Sequence: Synthetic oligonucleotide
  Sense strand starting at position 3478 of SEQ ID NO: 914600
gcuugugugauuuaggugu

SEQ ID NO: 1016455 - RNA, 19 nt, Artificial Sequence
  Description of Artificial Sequence: Synthetic oligonucleotide
  Antisense strand to SEQ ID NO: 1016454
acaccuaaaucacacaagc

SEQ ID NO: 1016456 - RNA, 19 nt, Artificial Sequence
  Description of Artificial Sequence: Synthetic oligonucleotide
  Sense strand starting at position 3494 of SEQ ID NO: 914600
uguaaauuagaaugguguu

SEQ ID NO: 1016457 - RNA, 19 nt, Artificial Sequence
  Description of Artificial Sequence: Synthetic oligonucleotide
  Antisense strand to SEQ ID NO: 1016456
aacaccauucuaauuuaca

SEQ ID NO: 1016458 - RNA, 19 nt, Artificial Sequence
  Description of Artificial Sequence: Synthetic oligonucleotide
  Sense strand starting at position 3495 of SEQ ID NO: 914600
guaaauuagaaugguguuu

SEQ ID NO: 1016459 - RNA, 19 nt, Artificial Sequence
  Description of Artificial Sequence: Synthetic oligonucleotide
  Antisense strand to SEQ ID NO: 1016458
aaacaccauucuaauuuac

SEQ ID NO: 1016460 - RNA, 19 nt, Artificial Sequence
  Description of Artificial Sequence: Synthetic oligonucleotide
  Sense strand starting at position 3500 of SEQ ID NO: 914600
uuagaaugguguuuaagug

SEQ ID NO: 1016461 - RNA, 19 nt, Artificial Sequence
  Description of Artificial Sequence: Synthetic oligonucleotide
  Antisense strand to SEQ ID NO: 1016460
cacuuaaacaccauucuaa

SEQ ID NO: 1016462 - RNA, 19 nt, Artificial Sequence
  Description of Artificial Sequence: Synthetic oligonucleotide
  Sense strand starting at position 3545 of SEQ ID NO: 914600
agagcuucuacaugggauu

SEQ ID NO: 1016463 - RNA, 19 nt, Artificial Sequence
  Description of Artificial Sequence: Synthetic oligonucleotide
  Antisense strand to SEQ ID NO: 1016462
aaucccauguagaagcucu

SEQ ID NO: 1016464 - RNA, 19 nt, Artificial Sequence
  Description of Artificial Sequence: Synthetic oligonucleotide
  Sense strand starting at position 11 of SEQ ID NO: 914601
gaguacaaguucuccuaag

SEQ ID NO: 1016465 - RNA, 19 nt, Artificial Sequence
  Description of Artificial Sequence: Synthetic oligonucleotide
  Antisense strand to SEQ ID NO: 1016464
cuuaggagaacuuguacuc

SEQ ID NO: 1016466 - RNA, 19 nt, Artificial Sequence
  Description of Artificial Sequence: Synthetic oligonucleotide
  Sense strand starting at position 291 of SEQ ID NO: 914601
ggcuacuggcuggauacau

SEQ ID NO: 1016467 - RNA, 19 nt, Artificial Sequence
  Description of Artificial Sequence: Synthetic oligonucleotide
  Antisense strand to SEQ ID NO: 1016466
auguauccagccaguagcc

SEQ ID NO: 1016468 - RNA, 19 nt, Artificial Sequence
  Description of Artificial Sequence: Synthetic oligonucleotide
  Sense strand starting at position 395 of SEQ ID NO: 914601
ggcagauaaccacagcgau

SEQ ID NO: 1016469 - RNA, 19 nt, Artificial Sequence
  Description of Artificial Sequence: Synthetic oligonucleotide
  Antisense strand to SEQ ID NO: 1016468
aucgcugugguuaucugcc

SEQ ID NO: 1016470 - RNA, 19 nt, Artificial Sequence
  Description of Artificial Sequence: Synthetic oligonucleotide
  Sense strand starting at position 398 of SEQ ID NO: 914601
agauaaccacagcgauaau

SEQ ID NO: 1016471 - RNA, 19 nt, Artificial Sequence
  Description of Artificial Sequence: Synthetic oligonucleotide
  Antisense strand to SEQ ID NO: 1016470
auuaucgcugugguuaucu

SEQ ID NO: 1016472 - RNA, 19 nt, Artificial Sequence
  Description of Artificial Sequence: Synthetic oligonucleotide
  Sense strand starting at position 447 of SEQ ID NO: 914601
acaguuaaagugugguaca

SEQ ID NO: 1016473 - RNA, 19 nt, Artificial Sequence
  Description of Artificial Sequence: Synthetic oligonucleotide
  Antisense strand to SEQ ID NO: 1016472
uguaccacacuuuaacugu

SEQ ID NO: 1016474 - RNA, 19 nt, Artificial Sequence
  Description of Artificial Sequence: Synthetic oligonucleotide
  Sense strand starting at position 488 of SEQ ID NO: 914601
ccacuaggacauuguaagu

SEQ ID NO: 1016475 - RNA, 19 nt, Artificial Sequence
  Description of Artificial Sequence: Synthetic oligonucleotide
  Antisense strand to SEQ ID NO: 1016474
acuuacaauguccuagugg

SEQ ID NO: 1016476 - RNA, 19 nt, Artificial Sequence
  Description of Artificial Sequence: Synthetic oligonucleotide
  Sense strand starting at position 494 of SEQ ID NO: 914601
ggacauuguaagugauucu

SEQ ID NO: 1016477 - RNA, 19 nt, Artificial Sequence
  Description of Artificial Sequence: Synthetic oligonucleotide
  Antisense strand to SEQ ID NO: 1016476
agaaucacuuacaaugucc

SEQ ID NO: 1016478 - RNA, 19 nt, Artificial Sequence
  Description of Artificial Sequence: Synthetic oligonucleotide
  Sense strand starting at position 497 of SEQ ID NO: 914601
cauuguaagugauucugau

SEQ ID NO: 1016479 - RNA, 19 nt, Artificial Sequence
  Description of Artificial Sequence: Synthetic oligonucleotide
  Antisense strand to SEQ ID NO: 1016478
aucagaaucacuuacaaug

SEQ ID NO: 1016480 - RNA, 19 nt, Artificial Sequence
  Description of Artificial Sequence: Synthetic oligonucleotide
  Sense strand starting at position 503 of SEQ ID NO: 914601
aagugauucugauuaacag

SEQ ID NO: 1016481 - RNA, 19 nt, Artificial Sequence
  Description of Artificial Sequence: Synthetic oligonucleotide
  Antisense strand to SEQ ID NO: 1016480
cuguuaaucagaaucacuu

SEQ ID NO: 1016482 - RNA, 19 nt, Artificial Sequence
  Description of Artificial Sequence: Synthetic oligonucleotide
  Sense strand starting at position 524 of SEQ ID NO: 914601
gggaaaccucgauguuaca

SEQ ID NO: 1016483 - RNA, 19 nt, Artificial Sequence
  Description of Artificial Sequence: Synthetic oligonucleotide
  Antisense strand to SEQ ID NO: 1016482
uguaacaucgagguuuccc

SEQ ID NO: 1016484 - RNA, 19 nt, Artificial Sequence
  Description of Artificial Sequence: Synthetic oligonucleotide
  Sense strand starting at position 578 of SEQ ID NO: 914601
acagcauguccucaauugu

SEQ ID NO: 1016485 - RNA, 19 nt, Artificial Sequence
  Description of Artificial Sequence: Synthetic oligonucleotide
  Antisense strand to SEQ ID NO: 1016484
acaauugaggacaugcugu

SEQ ID NO: 1016486 - RNA, 19 nt, Artificial Sequence
  Description of Artificial Sequence: Synthetic oligonucleotide
  Sense strand starting at position 601 of SEQ ID NO: 914601
augcaauguguauaaagaa

SEQ ID NO: 1016487 - RNA, 19 nt, Artificial Sequence
  Description of Artificial Sequence: Synthetic oligonucleotide
  Antisense strand to SEQ ID NO: 1016486
uucuuuauacacauugcau

SEQ ID NO: 1016488 - RNA, 19 nt, Artificial Sequence
  Description of Artificial Sequence: Synthetic oligonucleotide
  Sense strand starting at position 655 of SEQ ID NO: 914601
gguaucuuuggauagucga

SEQ ID NO: 1016489 - RNA, 19 nt, Artificial Sequence
  Description of Artificial Sequence: Synthetic oligonucleotide
  Antisense strand to SEQ ID NO: 1016488
ucgacuauccaaagauacc

SEQ ID NO: 1016490 - RNA, 19 nt, Artificial Sequence
  Description of Artificial Sequence: Synthetic oligonucleotide
  Sense strand starting at position 764 of SEQ ID NO: 914601
gaccguuaguuacuaaaga

SEQ ID NO: 1016491 - RNA, 19 nt, Artificial Sequence
  Description of Artificial Sequence: Synthetic oligonucleotide
  Antisense strand to SEQ ID NO: 1016490
ucuuuaguaacuaacgguc

SEQ ID NO: 1016492 - RNA, 19 nt, Artificial Sequence
  Description of Artificial Sequence: Synthetic oligonucleotide
  Sense strand starting at position 792 of SEQ ID NO: 914601
gucagagaggcucagcaaa

SEQ ID NO: 1016493 - RNA, 19 nt, Artificial Sequence
  Description of Artificial Sequence: Synthetic oligonucleotide
  Antisense strand to SEQ ID NO: 1016492
uuugcugagccucucugac

SEQ ID NO: 1016494 - RNA, 19 nt, Artificial Sequence
  Description of Artificial Sequence: Synthetic oligonucleotide
  Sense strand starting at position 879 of SEQ ID NO: 914601
gaugacuucccagggucua

SEQ ID NO: 1016495 - RNA, 19 nt, Artificial Sequence
  Description of Artificial Sequence: Synthetic oligonucleotide
  Antisense strand to SEQ ID NO: 1016494
uagacccugggaagucauc

SEQ ID NO: 1016496 - RNA, 19 nt, Artificial Sequence
  Description of Artificial Sequence: Synthetic oligonucleotide
  Sense strand starting at position 1091 of SEQ ID NO: 914601
ucaguucuaccuuggagga

SEQ ID NO: 1016497 - RNA, 19 nt, Artificial Sequence
  Description of Artificial Sequence: Synthetic oligonucleotide
  Antisense strand to SEQ ID NO: 1016496
uccuccaagguagaacuga

SEQ ID NO: 1016498 - RNA, 19 nt, Artificial Sequence
  Description of Artificial Sequence: Synthetic oligonucleotide
  Sense strand starting at position 1386 of SEQ ID NO: 914601
ggaggaguucucgaauauc

SEQ ID NO: 1016499 - RNA, 19 nt, Artificial Sequence
  Description of Artificial Sequence: Synthetic oligonucleotide
  Antisense strand to SEQ ID NO: 1016498
gauauucgagaacuccucc

SEQ ID NO: 1016500 - RNA, 19 nt, Artificial Sequence
  Description of Artificial Sequence: Synthetic oligonucleotide
  Sense strand starting at position 1389 of SEQ ID NO: 914601
ggaguucucgaauaucccu

SEQ ID NO: 1016501 - RNA, 19 nt, Artificial Sequence
  Description of Artificial Sequence: Synthetic oligonucleotide
  Antisense strand to SEQ ID NO: 1016500
agggauauucgagaacucc

SEQ ID NO: 1016502 - RNA, 19 nt, Artificial Sequence
  Description of Artificial Sequence: Synthetic oligonucleotide
  Sense strand starting at position 1413 of SEQ ID NO: 914601
cuaagaaugguggguggua

SEQ ID NO: 1016503 - RNA, 19 nt, Artificial Sequence
  Description of Artificial Sequence: Synthetic oligonucleotide
  Antisense strand to SEQ ID NO: 1016502
uaccacccaccauucuuag

SEQ ID NO: 1016504 - RNA, 19 nt, Artificial Sequence
  Description of Artificial Sequence: Synthetic oligonucleotide
  Sense strand starting at position 1473 of SEQ ID NO: 914601
gguggaaagcgauguaaca

SEQ ID NO: 1016505 - RNA, 19 nt, Artificial Sequence
  Description of Artificial Sequence: Synthetic oligonucleotide
  Antisense strand to SEQ ID NO: 1016504
uguuacaucgcuuuccacc

SEQ ID NO: 1016506 - RNA, 19 nt, Artificial Sequence
  Description of Artificial Sequence: Synthetic oligonucleotide
  Sense strand starting at position 2317 of SEQ ID NO: 914601
ggccuuuacucuuuaggag

SEQ ID NO: 1016507 - RNA, 19 nt, Artificial Sequence
  Description of Artificial Sequence: Synthetic oligonucleotide
  Antisense strand to SEQ ID NO: 1016506
cuccuaaagaguaaaggcc

SEQ ID NO: 1016508 - RNA, 19 nt, Artificial Sequence
  Description of Artificial Sequence: Synthetic oligonucleotide
  Sense strand starting at position 2671 of SEQ ID NO: 914601
gugcacuucccagagaggu

SEQ ID NO: 1016509 - RNA, 19 nt, Artificial Sequence
  Description of Artificial Sequence: Synthetic oligonucleotide
  Antisense strand to SEQ ID NO: 1016508
accucucugggaagugcac

SEQ ID NO: 1016510 - RNA, 19 nt, Artificial Sequence
  Description of Artificial Sequence: Synthetic oligonucleotide
  Sense strand starting at position 2875 of SEQ ID NO: 914601
cagaaugguuugcccauua

SEQ ID NO: 1016511 - RNA, 19 nt, Artificial Sequence
  Description of Artificial Sequence: Synthetic oligonucleotide
  Antisense strand to SEQ ID NO: 1016510
uaaugggcaaaccauucug

SEQ ID NO: 1016512 - RNA, 19 nt, Artificial Sequence
  Description of Artificial Sequence: Synthetic oligonucleotide
  Sense strand starting at position 2880 of SEQ ID NO: 914601
ugguuugcccauuaaugaa

SEQ ID NO: 1016513 - RNA, 19 nt, Artificial Sequence
  Description of Artificial Sequence: Synthetic oligonucleotide
  Antisense strand to SEQ ID NO: 1016512
uucauuaaugggcaaacca

SEQ ID NO: 1016514 - RNA, 19 nt, Artificial Sequence
  Description of Artificial Sequence: Synthetic oligonucleotide
  Sense strand starting at position 2941 of SEQ ID NO: 914601
auaggcauaaaguguuaga

SEQ ID NO: 1016515 - RNA, 19 nt, Artificial Sequence
  Description of Artificial Sequence: Synthetic oligonucleotide
  Antisense strand to SEQ ID NO: 1016514
ucuaacacuuuaugccuau

SEQ ID NO: 1016516 - RNA, 19 nt, Artificial Sequence
  Description of Artificial Sequence: Synthetic oligonucleotide
  Sense strand starting at position 3048 of SEQ ID NO: 914601
gggugcuugaacugagaga

SEQ ID NO: 1016517 - RNA, 19 nt, Artificial Sequence
  Description of Artificial Sequence: Synthetic oligonucleotide
  Antisense strand to SEQ ID NO: 1016516
ucucucaguucaagcaccc

SEQ ID NO: 1016518 - RNA, 19 nt, Artificial Sequence
  Description of Artificial Sequence: Synthetic oligonucleotide
  Sense strand starting at position 3075 of SEQ ID NO: 914601
agugccacucuugagauau

SEQ ID NO: 1016519 - RNA, 19 nt, Artificial Sequence
  Description of Artificial Sequence: Synthetic oligonucleotide
  Antisense strand to SEQ ID NO: 1016518
auaucucaagaguggcacu

SEQ ID NO: 1016520 - RNA, 19 nt, Artificial Sequence
  Description of Artificial Sequence: Synthetic oligonucleotide
  Sense strand starting at position 3113 of SEQ ID NO: 914601
gggagagcuuuaguaggga

SEQ ID NO: 1016521 - RNA, 19 nt, Artificial Sequence
  Description of Artificial Sequence: Synthetic oligonucleotide
  Antisense strand to SEQ ID NO: 1016520
ucccuacuaaagcucuccc

SEQ ID NO: 1016522 - RNA, 19 nt, Artificial Sequence
  Description of Artificial Sequence: Synthetic oligonucleotide
  Sense strand starting at position 3116 of SEQ ID NO: 914601
agagcuuuaguagggaaau

SEQ ID NO: 1016523 - RNA, 19 nt, Artificial Sequence
  Description of Artificial Sequence: Synthetic oligonucleotide
  Antisense strand to SEQ ID NO: 1016522
auuucccuacuaaagcucu

SEQ ID NO: 1016524 - RNA, 19 nt, Artificial Sequence
  Description of Artificial Sequence: Synthetic oligonucleotide
  Sense strand starting at position 3162 of SEQ ID NO: 914601
uuagccaugguaugggaaa

SEQ ID NO: 1016525 - RNA, 19 nt, Artificial Sequence
  Description of Artificial Sequence: Synthetic oligonucleotide
  Antisense strand to SEQ ID NO: 1016524
uuucccauaccauggcuaa

SEQ ID NO: 1016526 - RNA, 19 nt, Artificial Sequence
  Description of Artificial Sequence: Synthetic oligonucleotide
  Sense strand starting at position 3293 of SEQ ID NO: 914601
aggccugaucuagggaaga

SEQ ID NO: 1016527 - RNA, 19 nt, Artificial Sequence
  Description of Artificial Sequence: Synthetic oligonucleotide
  Antisense strand to SEQ ID NO: 1016526
ucuucccuagaucaggccu

SEQ ID NO: 1016528 - RNA, 19 nt, Artificial Sequence
  Description of Artificial Sequence: Synthetic oligonucleotide
  Sense strand starting at position 3386 of SEQ ID NO: 914601
acaagcaugucagugauaa

SEQ ID NO: 1016529 - RNA, 19 nt, Artificial Sequence
  Description of Artificial Sequence: Synthetic oligonucleotide
  Antisense strand to SEQ ID NO: 1016528
uuaucacugacaugcuugu

SEQ ID NO: 1016530 - RNA, 19 nt, Artificial Sequence
  Description of Artificial Sequence: Synthetic oligonucleotide
  Sense strand starting at position 3387 of SEQ ID NO: 914601
caagcaugucagugauaag

SEQ ID NO: 1016531 - RNA, 19 nt, Artificial Sequence
  Description of Artificial Sequence: Synthetic oligonucleotide
  Antisense strand to SEQ ID NO: 1016530
cuuaucacugacaugcuug

SEQ ID NO: 1016532 - RNA, 19 nt, Artificial Sequence
  Description of Artificial Sequence: Synthetic oligonucleotide
  Sense strand starting at position 3462 of SEQ ID NO: 914601
agaggaauucccugccuuu

SEQ ID NO: 1016533 - RNA, 19 nt, Artificial Sequence
  Description of Artificial Sequence: Synthetic oligonucleotide
  Antisense strand to SEQ ID NO: 1016532
aaaggcagggaauuccucu

SEQ ID NO: 1016534 - RNA, 19 nt, Artificial Sequence
  Description of Artificial Sequence: Synthetic oligonucleotide
  Sense strand starting at position 3477 of SEQ ID NO: 914601
cuuuguggucuuuaucaug

SEQ ID NO: 1016535 - RNA, 19 nt, Artificial Sequence
  Description of Artificial Sequence: Synthetic oligonucleotide
  Antisense strand to SEQ ID NO: 1016534
caugauaaagaccacaaag

SEQ ID NO: 1016536 - RNA, 19 nt, Artificial Sequence
  Description of Artificial Sequence: Synthetic oligonucleotide
  Sense strand starting at position 3559 of SEQ ID NO: 914601
ucuggugcaaccuagagau

SEQ ID NO: 1016537 - RNA, 19 nt, Artificial Sequence
  Description of Artificial Sequence: Synthetic oligonucleotide
  Antisense strand to SEQ ID NO: 1016536
aucucuagguugcaccaga

SEQ ID NO: 1016538 - RNA, 19 nt, Artificial Sequence
  Description of Artificial Sequence: Synthetic oligonucleotide
  Sense strand starting at position 3563 of SEQ ID NO: 914601
gugcaaccuagagaugcuu

SEQ ID NO: 1016539 - RNA, 19 nt, Artificial Sequence
  Description of Artificial Sequence: Synthetic oligonucleotide
  Antisense strand to SEQ ID NO: 1016538
aagcaucucuagguugcac

SEQ ID NO: 1016540 - RNA, 19 nt, Artificial Sequence
  Description of Artificial Sequence: Synthetic oligonucleotide
  Sense strand starting at position 3646 of SEQ ID NO: 914601
gcccgaauuggccaagagu

SEQ ID NO: 1016541 - RNA, 19 nt, Artificial Sequence
  Description of Artificial Sequence: Synthetic oligonucleotide
  Antisense strand to SEQ ID NO: 1016540
acucuuggccaauucgggc

SEQ ID NO: 1016542 - RNA, 19 nt, Artificial Sequence
  Description of Artificial Sequence: Synthetic oligonucleotide
  Sense strand starting at position 3649 of SEQ ID NO: 914601
cgaauuggccaagaguaga

SEQ ID NO: 1016543 - RNA, 19 nt, Artificial Sequence
  Description of Artificial Sequence: Synthetic oligonucleotide
  Antisense strand to SEQ ID NO: 1016542
ucuacucuuggccaauucg

SEQ ID NO: 1016544 - RNA, 19 nt, Artificial Sequence
  Description of Artificial Sequence: Synthetic oligonucleotide
  Sense strand starting at position 89 of SEQ ID NO: 914602
uccacaucuguccaggagu

SEQ ID NO: 1016545 - RNA, 19 nt, Artificial Sequence
  Description of Artificial Sequence: Synthetic oligonucleotide
  Antisense strand to SEQ ID NO: 1016544
acuccuggacagaugugga

SEQ ID NO: 1016546 - RNA, 19 nt, Artificial Sequence
  Description of Artificial Sequence: Synthetic oligonucleotide
  Sense strand starting at position 160 of SEQ ID NO: 914602
ccggcagugcugugugacu

SEQ ID NO: 1016547 - RNA, 19 nt, Artificial Sequence
  Description of Artificial Sequence: Synthetic oligonucleotide
  Antisense strand to SEQ ID NO: 1016546
agucacacagcacugccgg

SEQ ID NO: 1016548 - RNA, 19 nt, Artificial Sequence
  Description of Artificial Sequence: Synthetic oligonucleotide
  Sense strand starting at position 238 of SEQ ID NO: 914602
aguggcugagcugacaauu

SEQ ID NO: 1016549 - RNA, 19 nt, Artificial Sequence
  Description of Artificial Sequence: Synthetic oligonucleotide
  Antisense strand to SEQ ID NO: 1016548
aauugucagcucagccacu

SEQ ID NO: 1016550 - RNA, 19 nt, Artificial Sequence
  Description of Artificial Sequence: Synthetic oligonucleotide
  Sense strand starting at position 316 of SEQ ID NO: 914602
gccugaguuuccuguuccu

SEQ ID NO: 1016551 - RNA, 19 nt, Artificial Sequence
  Description of Artificial Sequence: Synthetic oligonucleotide
  Antisense strand to SEQ ID NO: 1016550
aggaacaggaaacucaggc

SEQ ID NO: 1016552 - RNA, 19 nt, Artificial Sequence
  Description of Artificial Sequence: Synthetic oligonucleotide
  Sense strand starting at position 330 of SEQ ID NO: 914602
uuccucuggucuccauaga

SEQ ID NO: 1016553 - RNA, 19 nt, Artificial Sequence
  Description of Artificial Sequence: Synthetic oligonucleotide
  Antisense strand to SEQ ID NO: 1016552
ucuauggagaccagaggaa

SEQ ID NO: 1016554 - RNA, 19 nt, Artificial Sequence
  Description of Artificial Sequence: Synthetic oligonucleotide
  Sense strand starting at position 331 of SEQ ID NO: 914602
uccucuggucuccauagaa

SEQ ID NO: 1016555 - RNA, 19 nt, Artificial Sequence
  Description of Artificial Sequence: Synthetic oligonucleotide
  Antisense strand to SEQ ID NO: 1016554
uucuauggagaccagagga

SEQ ID NO: 1016556 - RNA, 19 nt, Artificial Sequence
  Description of Artificial Sequence: Synthetic oligonucleotide
  Sense strand starting at position 456 of SEQ ID NO: 914602
cgcagcucugcgugacagu

SEQ ID NO: 1016557 - RNA, 19 nt, Artificial Sequence
  Description of Artificial Sequence: Synthetic oligonucleotide
  Antisense strand to SEQ ID NO: 1016556
acugucacgcagagcugcg

SEQ ID NO: 1016558 - RNA, 19 nt, Artificial Sequence
  Description of Artificial Sequence: Synthetic oligonucleotide
  Sense strand starting at position 465 of SEQ ID NO: 914602
gcgugacagugucuucuca

SEQ ID NO: 1016559 - RNA, 19 nt, Artificial Sequence
  Description of Artificial Sequence: Synthetic oligonucleotide
  Antisense strand to SEQ ID NO: 1016558
ugagaagacacugucacgc

SEQ ID NO: 1016560 - RNA, 19 nt, Artificial Sequence
  Description of Artificial Sequence: Synthetic oligonucleotide
  Sense strand starting at position 994 of SEQ ID NO: 914602
gguucagaagauuggccua

SEQ ID NO: 1016561 - RNA, 19 nt, Artificial Sequence
  Description of Artificial Sequence: Synthetic oligonucleotide
  Antisense strand to SEQ ID NO: 1016560
uaggccaaucuucugaacc

SEQ ID NO: 1016562 - RNA, 19 nt, Artificial Sequence
  Description of Artificial Sequence: Synthetic oligonucleotide
  Sense strand starting at position 997 of SEQ ID NO: 914602
ucagaagauuggccuaaag

SEQ ID NO: 1016563 - RNA, 19 nt, Artificial Sequence
  Description of Artificial Sequence: Synthetic oligonucleotide
  Antisense strand to SEQ ID NO: 1016562
cuuuaggccaaucuucuga

SEQ ID NO: 1016564 - RNA, 19 nt, Artificial Sequence
  Description of Artificial Sequence: Synthetic oligonucleotide
  Sense strand starting at position 1038 of SEQ ID NO: 914602
gagagagugccuggugaua

SEQ ID NO: 1016565 - RNA, 19 nt, Artificial Sequence
  Description of Artificial Sequence: Synthetic oligonucleotide
  Antisense strand to SEQ ID NO: 1016564
uaucaccaggcacucucuc

SEQ ID NO: 1016566 - RNA, 19 nt, Artificial Sequence
  Description of Artificial Sequence: Synthetic oligonucleotide
  Sense strand starting at position 1047 of SEQ ID NO: 914602
ccuggugauaccuggcaga

SEQ ID NO: 1016567 - RNA, 19 nt, Artificial Sequence
  Description of Artificial Sequence: Synthetic oligonucleotide
  Antisense strand to SEQ ID NO: 1016566
ucugccagguaucaccagg

SEQ ID NO: 1016568 - RNA, 19 nt, Artificial Sequence
  Description of Artificial Sequence: Synthetic oligonucleotide
  Sense strand starting at position 1099 of SEQ ID NO: 914602
gacaccagagcaugugauu

SEQ ID NO: 1016569 - RNA, 19 nt, Artificial Sequence
  Description of Artificial Sequence: Synthetic oligonucleotide
  Antisense strand to SEQ ID NO: 1016568
aaucacaugcucugguguc

SEQ ID NO: 1016570 - RNA, 19 nt, Artificial Sequence
  Description of Artificial Sequence: Synthetic oligonucleotide
  Sense strand starting at position 1105 of SEQ ID NO: 914602
agagcaugugauugugcua

SEQ ID NO: 1016571 - RNA, 19 nt, Artificial Sequence
  Description of Artificial Sequence: Synthetic oligonucleotide
  Antisense strand to SEQ ID NO: 1016570
uagcacaaucacaugcucu

SEQ ID NO: 1016572 - RNA, 19 nt, Artificial Sequence
  Description of Artificial Sequence: Synthetic oligonucleotide
  Sense strand starting at position 1226 of SEQ ID NO: 914602
acaggugucaccuggguau

SEQ ID NO: 1016573 - RNA, 19 nt, Artificial Sequence
  Description of Artificial Sequence: Synthetic oligonucleotide
  Antisense strand to SEQ ID NO: 1016572
auacccaggugacaccugu

SEQ ID NO: 1016574 - RNA, 19 nt, Artificial Sequence
  Description of Artificial Sequence: Synthetic oligonucleotide
  Sense strand starting at position 1245 of SEQ ID NO: 914602
cugcucgugccaugaggaa

SEQ ID NO: 1016575 - RNA, 19 nt, Artificial Sequence
  Description of Artificial Sequence: Synthetic oligonucleotide
  Antisense strand to SEQ ID NO: 1016574
uuccucauggcacgagcag

SEQ ID NO: 1016576 - RNA, 19 nt, Artificial Sequence
  Description of Artificial Sequence: Synthetic oligonucleotide
  Sense strand starting at position 1296 of SEQ ID NO: 914602
cugaguugcucucacagga

SEQ ID NO: 1016577 - RNA, 19 nt, Artificial Sequence
  Description of Artificial Sequence: Synthetic oligonucleotide
  Antisense strand to SEQ ID NO: 1016576
uccugugagagcaacucag

SEQ ID NO: 1016578 - RNA, 19 nt, Artificial Sequence
  Description of Artificial Sequence: Synthetic oligonucleotide
  Sense strand starting at position 1369 of SEQ ID NO: 914602
ccgccuucugcuccgugaa

SEQ ID NO: 1016579 - RNA, 19 nt, Artificial Sequence
  Description of Artificial Sequence: Synthetic oligonucleotide
  Antisense strand to SEQ ID NO: 1016578
uucacggagcagaaggcgg

SEQ ID NO: 1016580 - RNA, 19 nt, Artificial Sequence
  Description of Artificial Sequence: Synthetic oligonucleotide
  Sense strand starting at position 2051 of SEQ ID NO: 914602
gccugagacagccguuaug

SEQ ID NO: 1016581 - RNA, 19 nt, Artificial Sequence
  Description of Artificial Sequence: Synthetic oligonucleotide
  Antisense strand to SEQ ID NO: 1016580
cauaacggcugucucaggc

SEQ ID NO: 1016582 - RNA, 19 nt, Artificial Sequence
  Description of Artificial Sequence: Synthetic oligonucleotide
  Sense strand starting at position 2054 of SEQ ID NO: 914602
ugagacagccguuaugaaa

SEQ ID NO: 1016583 - RNA, 19 nt, Artificial Sequence
  Description of Artificial Sequence: Synthetic oligonucleotide
  Antisense strand to SEQ ID NO: 1016582
uuucauaacggcugucuca

SEQ ID NO: 1016584 - RNA, 19 nt, Artificial Sequence
  Description of Artificial Sequence: Synthetic oligonucleotide
  Sense strand starting at position 2444 of SEQ ID NO: 914602
aaauaaguaucuguggagu

SEQ ID NO: 1016585 - RNA, 19 nt, Artificial Sequence
  Description of Artificial Sequence: Synthetic oligonucleotide
  Antisense strand to SEQ ID NO: 1016584
acuccacagauacuuauuu

SEQ ID NO: 1016586 - RNA, 19 nt, Artificial Sequence
  Description of Artificial Sequence: Synthetic oligonucleotide
  Sense strand starting at position 2446 of SEQ ID NO: 914602
auaaguaucuguggagugu

SEQ ID NO: 1016587 - RNA, 19 nt, Artificial Sequence
  Description of Artificial Sequence: Synthetic oligonucleotide
  Antisense strand to SEQ ID NO: 1016586
acacuccacagauacuuau

SEQ ID NO: 1016588 - RNA, 19 nt, Artificial Sequence
  Description of Artificial Sequence: Synthetic oligonucleotide
  Sense strand starting at position 2447 of SEQ ID NO: 914602
uaaguaucuguggaguguu

SEQ ID NO: 1016589 - RNA, 19 nt, Artificial Sequence
  Description of Artificial Sequence: Synthetic oligonucleotide
  Antisense strand to SEQ ID NO: 1016588
aacacuccacagauacuua

SEQ ID NO: 1016590 - RNA, 19 nt, Artificial Sequence
  Description of Artificial Sequence: Synthetic oligonucleotide
  Sense strand starting at position 2450 of SEQ ID NO: 914602
guaucuguggaguguuuca

SEQ ID NO: 1016591 - RNA, 19 nt, Artificial Sequence
  Description of Artificial Sequence: Synthetic oligonucleotide
  Antisense strand to SEQ ID NO: 1016590
ugaaacacuccacagauac

SEQ ID NO: 1016592 - RNA, 19 nt, Artificial Sequence
  Description of Artificial Sequence: Synthetic oligonucleotide
  Sense strand starting at position 2533 of SEQ ID NO: 914602
gcacuacugucccacugaa

SEQ ID NO: 1016593 - RNA, 19 nt, Artificial Sequence
  Description of Artificial Sequence: Synthetic oligonucleotide
  Antisense strand to SEQ ID NO: 1016592
uucagugggacaguagugc

SEQ ID NO: 1016594 - RNA, 19 nt, Artificial Sequence
  Description of Artificial Sequence: Synthetic oligonucleotide
  Sense strand starting at position 2670 of SEQ ID NO: 914602
acaccagucuguguuauau

SEQ ID NO: 1016595 - RNA, 19 nt, Artificial Sequence
  Description of Artificial Sequence: Synthetic oligonucleotide
  Antisense strand to SEQ ID NO: 1016594
auauaacacagacuggugu

SEQ ID NO: 1016596 - RNA, 19 nt, Artificial Sequence
  Description of Artificial Sequence: Synthetic oligonucleotide
  Sense strand starting at position 2672 of SEQ ID NO: 914602
accagucuguguuauaugu

SEQ ID NO: 1016597 - RNA, 19 nt, Artificial Sequence
  Description of Artificial Sequence: Synthetic oligonucleotide
  Antisense strand to SEQ ID NO: 1016596
acauauaacacagacuggu

SEQ ID NO: 1016598 - RNA, 19 nt, Artificial Sequence
  Description of Artificial Sequence: Synthetic oligonucleotide
  Sense strand starting at position 2674 of SEQ ID NO: 914602
cagucuguguuauauguau

SEQ ID NO: 1016599 - RNA, 19 nt, Artificial Sequence
  Description of Artificial Sequence: Synthetic oligonucleotide
  Antisense strand to SEQ ID NO: 1016598
auacauauaacacagacug

SEQ ID NO: 1016600 - RNA, 19 nt, Artificial Sequence
  Description of Artificial Sequence: Synthetic oligonucleotide
  Sense strand starting at position 2681 of SEQ ID NO: 914602
uguuauauguauccugacu

SEQ ID NO: 1016601 - RNA, 19 nt, Artificial Sequence
  Description of Artificial Sequence: Synthetic oligonucleotide
  Antisense strand to SEQ ID NO: 1016600
agucaggauacauauaaca

SEQ ID NO: 1016602 - RNA, 19 nt, Artificial Sequence
  Description of Artificial Sequence: Synthetic oligonucleotide
  Sense strand starting at position 2686 of SEQ ID NO: 914602
uauguauccugacuggaau

SEQ ID NO: 1016603 - RNA, 19 nt, Artificial Sequence
  Description of Artificial Sequence: Synthetic oligonucleotide
  Antisense strand to SEQ ID NO: 1016602
auuccagucaggauacaua

SEQ ID NO: 1016604 - RNA, 19 nt, Artificial Sequence
  Description of Artificial Sequence: Synthetic oligonucleotide
  Sense strand starting at position 2687 of SEQ ID NO: 914602
auguauccugacuggaaug

SEQ ID NO: 1016605 - RNA, 19 nt, Artificial Sequence
  Description of Artificial Sequence: Synthetic oligonucleotide
  Antisense strand to SEQ ID NO: 1016604
cauuccagucaggauacau

SEQ ID NO: 1016606 - RNA, 19 nt, Artificial Sequence
  Description of Artificial Sequence: Synthetic oligonucleotide
  Sense strand starting at position 2892 of SEQ ID NO: 914602
agaugauucuccuggccca

SEQ ID NO: 1016607 - RNA, 19 nt, Artificial Sequence
  Description of Artificial Sequence: Synthetic oligonucleotide
  Antisense strand to SEQ ID NO: 1016606
ugggccaggagaaucaucu

SEQ ID NO: 1016608 - RNA, 19 nt, Artificial Sequence
  Description of Artificial Sequence: Synthetic oligonucleotide
  Sense strand starting at position 3270 of SEQ ID NO: 914602
uguaucauaucagauguua

SEQ ID NO: 1016609 - RNA, 19 nt, Artificial Sequence
  Description of Artificial Sequence: Synthetic oligonucleotide
  Antisense strand to SEQ ID NO: 1016608
uaacaucugauaugauaca

SEQ ID NO: 1016610 - RNA, 19 nt, Artificial Sequence
  Description of Artificial Sequence: Synthetic oligonucleotide
  Sense strand starting at position 3300 of SEQ ID NO: 914602
uguuuaagauacuuacuag

SEQ ID NO: 1016611 - RNA, 19 nt, Artificial Sequence
  Description of Artificial Sequence: Synthetic oligonucleotide
  Antisense strand to SEQ ID NO: 1016610
cuaguaaguaucuuaaaca

SEQ ID NO: 1016612 - RNA, 19 nt, Artificial Sequence
  Description of Artificial Sequence: Synthetic oligonucleotide
  Sense strand starting at position 3331 of SEQ ID NO: 914602
agcccauuacguuaauaua

SEQ ID NO: 1016613 - RNA, 19 nt, Artificial Sequence
  Description of Artificial Sequence: Synthetic oligonucleotide
  Antisense strand to SEQ ID NO: 1016612
uauauuaacguaaugggcu

SEQ ID NO: 1016614 - RNA, 19 nt, Artificial Sequence
  Description of Artificial Sequence: Synthetic oligonucleotide
  Sense strand starting at position 3454 of SEQ ID NO: 914602
gcuggauucuccugucuau

SEQ ID NO: 1016615 - RNA, 19 nt, Artificial Sequence
  Description of Artificial Sequence: Synthetic oligonucleotide
  Antisense strand to SEQ ID NO: 1016614
auagacaggagaauccagc

SEQ ID NO: 1016616 - RNA, 19 nt, Artificial Sequence
  Description of Artificial Sequence: Synthetic oligonucleotide
  Sense strand starting at position 3538 of SEQ ID NO: 914602
acagacauguaguuacaaa

SEQ ID NO: 1016617 - RNA, 19 nt, Artificial Sequence
  Description of Artificial Sequence: Synthetic oligonucleotide
  Antisense strand to SEQ ID NO: 1016616
uuuguaacuacaugucugu

SEQ ID NO: 1016618 - RNA, 19 nt, Artificial Sequence
  Description of Artificial Sequence: Synthetic oligonucleotide
  Sense strand starting at position 3574 of SEQ ID NO: 914602
acagccuuuccagguaauu

SEQ ID NO: 1016619 - RNA, 19 nt, Artificial Sequence
  Description of Artificial Sequence: Synthetic oligonucleotide
  Antisense strand to SEQ ID NO: 1016618
aauuaccuggaaaggcugu

SEQ ID NO: 1016620 - RNA, 19 nt, Artificial Sequence
  Description of Artificial Sequence: Synthetic oligonucleotide
  Sense strand starting at position 3579 of SEQ ID NO: 914602
cuuuccagguaauuauaga

SEQ ID NO: 1016621 - RNA, 19 nt, Artificial Sequence
  Description of Artificial Sequence: Synthetic oligonucleotide
  Antisense strand to SEQ ID NO: 1016620
ucuauaauuaccuggaaag

SEQ ID NO: 1016622 - RNA, 19 nt, Artificial Sequence
  Description of Artificial Sequence: Synthetic oligonucleotide
  Sense strand starting at position 3629 of SEQ ID NO: 914602
augacaguuucucaaaggu

SEQ ID NO: 1016623 - RNA, 19 nt, Artificial Sequence
  Description of Artificial Sequence: Synthetic oligonucleotide
  Antisense strand to SEQ ID NO: 1016622
accuuugagaaacugucau

SEQ ID NO: 1016624 - RNA, 19 nt, Artificial Sequence
  Description of Artificial Sequence: Synthetic oligonucleotide
  Sense strand starting at position 78 of SEQ ID NO: 914603
cugugaauacuggaggcua

SEQ ID NO: 1016625 - RNA, 19 nt, Artificial Sequence
  Description of Artificial Sequence: Synthetic oligonucleotide
  Antisense strand to SEQ ID NO: 1016624
uagccuccaguauucacag

SEQ ID NO: 1016626 - RNA, 19 nt, Artificial Sequence
  Description of Artificial Sequence: Synthetic oligonucleotide
  Sense strand starting at position 80 of SEQ ID NO: 914603
gugaauacuggaggcuaca

SEQ ID NO: 1016627 - RNA, 19 nt, Artificial Sequence
  Description of Artificial Sequence: Synthetic oligonucleotide
  Antisense strand to SEQ ID NO: 1016626
uguagccuccaguauucac

SEQ ID NO: 1016628 - RNA, 19 nt, Artificial Sequence
  Description of Artificial Sequence: Synthetic oligonucleotide
  Sense strand starting at position 112 of SEQ ID NO: 914603
gguguaaacugcuccaucu

SEQ ID NO: 1016629 - RNA, 19 nt, Artificial Sequence
  Description of Artificial Sequence: Synthetic oligonucleotide
  Antisense strand to SEQ ID NO: 1016628
agauggagcaguuuacacc

SEQ ID NO: 1016630 - RNA, 19 nt, Artificial Sequence
  Description of Artificial Sequence: Synthetic oligonucleotide
  Sense strand starting at position 195 of SEQ ID NO: 914603
cauugaagccugcguggua

SEQ ID NO: 1016631 - RNA, 19 nt, Artificial Sequence
  Description of Artificial Sequence: Synthetic oligonucleotide
  Antisense strand to SEQ ID NO: 1016630
uaccacgcaggcuucaaug

SEQ ID NO: 1016632 - RNA, 19 nt, Artificial Sequence
  Description of Artificial Sequence: Synthetic oligonucleotide
  Sense strand starting at position 233 of SEQ ID NO: 914603
uccaucugccaguguaaga

SEQ ID NO: 1016633 - RNA, 19 nt, Artificial Sequence
  Description of Artificial Sequence: Synthetic oligonucleotide
  Antisense strand to SEQ ID NO: 1016632
ucuuacacuggcagaugga

SEQ ID NO: 1016634 - RNA, 19 nt, Artificial Sequence
  Description of Artificial Sequence: Synthetic oligonucleotide
  Sense strand starting at position 260 of SEQ ID NO: 914603
cugugcaugugcucagaga

SEQ ID NO: 1016635 - RNA, 19 nt, Artificial Sequence
  Description of Artificial Sequence: Synthetic oligonucleotide
  Antisense strand to SEQ ID NO: 1016634
ucucugagcacaugcacag

SEQ ID NO: 1016636 - RNA, 19 nt, Artificial Sequence
  Description of Artificial Sequence: Synthetic oligonucleotide
  Sense strand starting at position 381 of SEQ ID NO: 914603
ccauguuauugguggguaa

SEQ ID NO: 1016637 - RNA, 19 nt, Artificial Sequence
  Description of Artificial Sequence: Synthetic oligonucleotide
  Antisense strand to SEQ ID NO: 1016636
uuacccaccaauaacaugg

SEQ ID NO: 1016638 - RNA, 19 nt, Artificial Sequence
  Description of Artificial Sequence: Synthetic oligonucleotide
  Sense strand starting at position 382 of SEQ ID NO: 914603
cauguuauugguggguaaa

SEQ ID NO: 1016639 - RNA, 19 nt, Artificial Sequence
  Description of Artificial Sequence: Synthetic oligonucleotide
  Antisense strand to SEQ ID NO: 1016638
uuuacccaccaauaacaug

SEQ ID NO: 1016640 - RNA, 19 nt, Artificial Sequence
  Description of Artificial Sequence: Synthetic oligonucleotide
  Sense strand starting at position 383 of SEQ ID NO: 914603
auguuauugguggguaaag

SEQ ID NO: 1016641 - RNA, 19 nt, Artificial Sequence
  Description of Artificial Sequence: Synthetic oligonucleotide
  Antisense strand to SEQ ID NO: 1016640
cuuuacccaccaauaacau

SEQ ID NO: 1016642 - RNA, 19 nt, Artificial Sequence
  Description of Artificial Sequence: Synthetic oligonucleotide
  Sense strand starting at position 384 of SEQ ID NO: 914603
uguuauugguggguaaagu

SEQ ID NO: 1016643 - RNA, 19 nt, Artificial Sequence
  Description of Artificial Sequence: Synthetic oligonucleotide
  Antisense strand to SEQ ID NO: 1016642
acuuuacccaccaauaaca

SEQ ID NO: 1016644 - RNA, 19 nt, Artificial Sequence
  Description of Artificial Sequence: Synthetic oligonucleotide
  Sense strand starting at position 385 of SEQ ID NO: 914603
guuauugguggguaaaguc

SEQ ID NO: 1016645 - RNA, 19 nt, Artificial Sequence
  Description of Artificial Sequence: Synthetic oligonucleotide
  Antisense strand to SEQ ID NO: 1016644
gacuuuacccaccaauaac

SEQ ID NO: 1016646 - RNA, 19 nt, Artificial Sequence
  Description of Artificial Sequence: Synthetic oligonucleotide
  Sense strand starting at position 395 of SEQ ID NO: 914603
gguaaagucuacccaggga

SEQ ID NO: 1016647 - RNA, 19 nt, Artificial Sequence
  Description of Artificial Sequence: Synthetic oligonucleotide
  Antisense strand to SEQ ID NO: 1016646
ucccuggguagacuuuacc

SEQ ID NO: 1016648 - RNA, 19 nt, Artificial Sequence
  Description of Artificial Sequence: Synthetic oligonucleotide
  Sense strand starting at position 446 of SEQ ID NO: 914603
ggugaaugccaccaagucu

SEQ ID NO: 1016649 - RNA, 19 nt, Artificial Sequence
  Description of Artificial Sequence: Synthetic oligonucleotide
  Antisense strand to SEQ ID NO: 1016648
agacuugguggcauucacc

SEQ ID NO: 1016650 - RNA, 19 nt, Artificial Sequence
  Description of Artificial Sequence: Synthetic oligonucleotide
  Sense strand starting at position 502 of SEQ ID NO: 914603
gacuccaaguggucagagu

SEQ ID NO: 1016651 - RNA, 19 nt, Artificial Sequence
  Description of Artificial Sequence: Synthetic oligonucleotide
  Antisense strand to SEQ ID NO: 1016650
acucugaccacuuggaguc

SEQ ID NO: 1016652 - RNA, 19 nt, Artificial Sequence
  Description of Artificial Sequence: Synthetic oligonucleotide
  Sense strand starting at position 503 of SEQ ID NO: 914603
acuccaaguggucagaguu

SEQ ID NO: 1016653 - RNA, 19 nt, Artificial Sequence
  Description of Artificial Sequence: Synthetic oligonucleotide
  Antisense strand to SEQ ID NO: 1016652
aacucugaccacuuggagu

SEQ ID NO: 1016654 - RNA, 19 nt, Artificial Sequence
  Description of Artificial Sequence: Synthetic oligonucleotide
  Sense strand starting at position 721 of SEQ ID NO: 914603
ugcacucagucuuuccaca

SEQ ID NO: 1016655 - RNA, 19 nt, Artificial Sequence
  Description of Artificial Sequence: Synthetic oligonucleotide
  Antisense strand to SEQ ID NO: 1016654
uguggaaagacugagugca

SEQ ID NO: 1016656 - RNA, 19 nt, Artificial Sequence
  Description of Artificial Sequence: Synthetic oligonucleotide
  Sense strand starting at position 768 of SEQ ID NO: 914603
uggucaaagcucugucaca

SEQ ID NO: 1016657 - RNA, 19 nt, Artificial Sequence
  Description of Artificial Sequence: Synthetic oligonucleotide
  Antisense strand to SEQ ID NO: 1016656
ugugacagagcuuugacca

SEQ ID NO: 1016658 - RNA, 19 nt, Artificial Sequence
  Description of Artificial Sequence: Synthetic oligonucleotide
  Sense strand starting at position 769 of SEQ ID NO: 914603
ggucaaagcucugucacag

SEQ ID NO: 1016659 - RNA, 19 nt, Artificial Sequence
  Description of Artificial Sequence: Synthetic oligonucleotide
  Antisense strand to SEQ ID NO: 1016658
cugugacagagcuuugacc

SEQ ID NO: 1016660 - RNA, 19 nt, Artificial Sequence
  Description of Artificial Sequence: Synthetic oligonucleotide
  Sense strand starting at position 787 of SEQ ID NO: 914603
ggcacaagauggugacauu

SEQ ID NO: 1016661 - RNA, 19 nt, Artificial Sequence
  Description of Artificial Sequence: Synthetic oligonucleotide
  Antisense strand to SEQ ID NO: 1016660
aaugucaccaucuugugcc

SEQ ID NO: 1016662 - RNA, 19 nt, Artificial Sequence
  Description of Artificial Sequence: Synthetic oligonucleotide
  Sense strand starting at position 910 of SEQ ID NO: 914603
gagacaugcugccugccua

SEQ ID NO: 1016663 - RNA, 19 nt, Artificial Sequence
  Description of Artificial Sequence: Synthetic oligonucleotide
  Antisense strand to SEQ ID NO: 1016662
uaggcaggcagcaugucuc

SEQ ID NO: 1016664 - RNA, 19 nt, Artificial Sequence
  Description of Artificial Sequence: Synthetic oligonucleotide
  Sense strand starting at position 945 of SEQ ID NO: 914603
gggucucucugcuaauuaa

SEQ ID NO: 1016665 - RNA, 19 nt, Artificial Sequence
  Description of Artificial Sequence: Synthetic oligonucleotide
  Antisense strand to SEQ ID NO: 1016664
uuaauuagcagagagaccc

SEQ ID NO: 1016666 - RNA, 19 nt, Artificial Sequence
  Description of Artificial Sequence: Synthetic oligonucleotide
  Sense strand starting at position 955 of SEQ ID NO: 914603
gcuaauuaagagcaaggua

SEQ ID NO: 1016667 - RNA, 19 nt, Artificial Sequence
  Description of Artificial Sequence: Synthetic oligonucleotide
  Antisense strand to SEQ ID NO: 1016666
uaccuugcucuuaauuagc

SEQ ID NO: 1016668 - RNA, 19 nt, Artificial Sequence
  Description of Artificial Sequence: Synthetic oligonucleotide
  Sense strand starting at position 1004 of SEQ ID NO: 914603
ggagaagcuuaacauguua

SEQ ID NO: 1016669 - RNA, 19 nt, Artificial Sequence
  Description of Artificial Sequence: Synthetic oligonucleotide
  Antisense strand to SEQ ID NO: 1016668
uaacauguuaagcuucucc

SEQ ID NO: 1016670 - RNA, 19 nt, Artificial Sequence
  Description of Artificial Sequence: Synthetic oligonucleotide
  Sense strand starting at position 1094 of SEQ ID NO: 914603
gcagaugccacgcagugau

SEQ ID NO: 1016671 - RNA, 19 nt, Artificial Sequence
  Description of Artificial Sequence: Synthetic oligonucleotide
  Antisense strand to SEQ ID NO: 1016670
aucacugcguggcaucugc

SEQ ID NO: 1016672 - RNA, 19 nt, Artificial Sequence
  Description of Artificial Sequence: Synthetic oligonucleotide
  Sense strand starting at position 1118 of SEQ ID NO: 914603
gcaaccuggucccacgaaa

SEQ ID NO: 1016673 - RNA, 19 nt, Artificial Sequence
  Description of Artificial Sequence: Synthetic oligonucleotide
  Antisense strand to SEQ ID NO: 1016672
uuucgugggaccagguugc

SEQ ID NO: 1016674 - RNA, 19 nt, Artificial Sequence
  Description of Artificial Sequence: Synthetic oligonucleotide
  Sense strand starting at position 1191 of SEQ ID NO: 914603
ccuguucuaucagugccaa

SEQ ID NO: 1016675 - RNA, 19 nt, Artificial Sequence
  Description of Artificial Sequence: Synthetic oligonucleotide
  Antisense strand to SEQ ID NO: 1016674
uuggcacugauagaacagg

SEQ ID NO: 1016676 - RNA, 19 nt, Artificial Sequence
  Description of Artificial Sequence: Synthetic oligonucleotide
  Sense strand starting at position 2488 of SEQ ID NO: 914603
ugaccaaagucacuuaaug

SEQ ID NO: 1016677 - RNA, 19 nt, Artificial Sequence
  Description of Artificial Sequence: Synthetic oligonucleotide
  Antisense strand to SEQ ID NO: 1016676
cauuaagugacuuugguca

SEQ ID NO: 1016678 - RNA, 19 nt, Artificial Sequence
  Description of Artificial Sequence: Synthetic oligonucleotide
  Sense strand starting at position 2552 of SEQ ID NO: 914603
gucauccuuccacagcuau

SEQ ID NO: 1016679 - RNA, 19 nt, Artificial Sequence
  Description of Artificial Sequence: Synthetic oligonucleotide
  Antisense strand to SEQ ID NO: 1016678
auagcuguggaaggaugac

SEQ ID NO: 1016680 - RNA, 19 nt, Artificial Sequence
  Description of Artificial Sequence: Synthetic oligonucleotide
  Sense strand starting at position 2649 of SEQ ID NO: 914603
ucucauaugcuacgggaau

SEQ ID NO: 1016681 - RNA, 19 nt, Artificial Sequence
  Description of Artificial Sequence: Synthetic oligonucleotide
  Antisense strand to SEQ ID NO: 1016680
auucccguagcauaugaga

SEQ ID NO: 1016682 - RNA, 19 nt, Artificial Sequence
  Description of Artificial Sequence: Synthetic oligonucleotide
  Sense strand starting at position 2651 of SEQ ID NO: 914603
ucauaugcuacgggaauca

SEQ ID NO: 1016683 - RNA, 19 nt, Artificial Sequence
  Description of Artificial Sequence: Synthetic oligonucleotide
  Antisense strand to SEQ ID NO: 1016682
ugauucccguagcauauga

SEQ ID NO: 1016684 - RNA, 19 nt, Artificial Sequence
  Description of Artificial Sequence: Synthetic oligonucleotide
  Sense strand starting at position 3187 of SEQ ID NO: 914603
gccuuagucagccgcaaau

SEQ ID NO: 1016685 - RNA, 19 nt, Artificial Sequence
  Description of Artificial Sequence: Synthetic oligonucleotide
  Antisense strand to SEQ ID NO: 1016684
auuugcggcugacuaaggc

SEQ ID NO: 1016686 - RNA, 19 nt, Artificial Sequence
  Description of Artificial Sequence: Synthetic oligonucleotide
  Sense strand starting at position 3219 of SEQ ID NO: 914603
ggcugugaccugcggacaa

SEQ ID NO: 1016687 - RNA, 19 nt, Artificial Sequence
  Description of Artificial Sequence: Synthetic oligonucleotide
  Antisense strand to SEQ ID NO: 1016686
uuguccgcaggucacagcc

SEQ ID NO: 1016688 - RNA, 19 nt, Artificial Sequence
  Description of Artificial Sequence: Synthetic oligonucleotide
  Sense strand starting at position 3229 of SEQ ID NO: 914603
ugcggacaagccugugauu

SEQ ID NO: 1016689 - RNA, 19 nt, Artificial Sequence
  Description of Artificial Sequence: Synthetic oligonucleotide
  Antisense strand to SEQ ID NO: 1016688
aaucacaggcuuguccgca

SEQ ID NO: 1016690 - RNA, 19 nt, Artificial Sequence
  Description of Artificial Sequence: Synthetic oligonucleotide
  Sense strand starting at position 3391 of SEQ ID NO: 914603
ccaaguaugccugacaacu

SEQ ID NO: 1016691 - RNA, 19 nt, Artificial Sequence
  Description of Artificial Sequence: Synthetic oligonucleotide
  Antisense strand to SEQ ID NO: 1016690
aguugucaggcauacuugg

SEQ ID NO: 1016692 - RNA, 19 nt, Artificial Sequence
  Description of Artificial Sequence: Synthetic oligonucleotide
  Sense strand starting at position 3439 of SEQ ID NO: 914603
gaaguuucccaauggcucu

SEQ ID NO: 1016693 - RNA, 19 nt, Artificial Sequence
  Description of Artificial Sequence: Synthetic oligonucleotide
  Antisense strand to SEQ ID NO: 1016692
agagccauugggaaacuuc

SEQ ID NO: 1016694 - RNA, 19 nt, Artificial Sequence
  Description of Artificial Sequence: Synthetic oligonucleotide
  Sense strand starting at position 3459 of SEQ ID NO: 914603
acuccaagcucugagagaa

SEQ ID NO: 1016695 - RNA, 19 nt, Artificial Sequence
  Description of Artificial Sequence: Synthetic oligonucleotide
  Antisense strand to SEQ ID NO: 1016694
uucucucagagcuuggagu

SEQ ID NO: 1016696 - RNA, 19 nt, Artificial Sequence
  Description of Artificial Sequence: Synthetic oligonucleotide
  Sense strand starting at position 3524 of SEQ ID NO: 914603
gcagcugggucagaaaucu

SEQ ID NO: 1016697 - RNA, 19 nt, Artificial Sequence
  Description of Artificial Sequence: Synthetic oligonucleotide
  Antisense strand to SEQ ID NO: 1016696
agauuucugacccagcugc

SEQ ID NO: 1016698 - RNA, 19 nt, Artificial Sequence
  Description of Artificial Sequence: Synthetic oligonucleotide
  Sense strand starting at position 3532 of SEQ ID NO: 914603
gucagaaaucuccagcauc

SEQ ID NO: 1016699 - RNA, 19 nt, Artificial Sequence
  Description of Artificial Sequence: Synthetic oligonucleotide
  Antisense strand to SEQ ID NO: 1016698
gaugcuggagauuucugac

SEQ ID NO: 1016700 - RNA, 19 nt, Artificial Sequence
  Description of Artificial Sequence: Synthetic oligonucleotide
  Sense strand starting at position 3706 of SEQ ID NO: 914603
ugcagagugcuggaugaca

SEQ ID NO: 1016701 - RNA, 19 nt, Artificial Sequence
  Description of Artificial Sequence: Synthetic oligonucleotide
  Antisense strand to SEQ ID NO: 1016700
ugucauccagcacucugca

SEQ ID NO: 1016702 - RNA, 19 nt, Artificial Sequence
  Description of Artificial Sequence: Synthetic oligonucleotide
  Sense strand starting at position 3708 of SEQ ID NO: 914603
cagagugcuggaugacaga

SEQ ID NO: 1016703 - RNA, 19 nt, Artificial Sequence
  Description of Artificial Sequence: Synthetic oligonucleotide
  Antisense strand to SEQ ID NO: 1016702
ucugucauccagcacucug

SEQ ID NO: 1016704 - RNA, 19 nt, Artificial Sequence
  Description of Artificial Sequence: Synthetic oligonucleotide
  Sense strand starting at position 40 of SEQ ID NO: 914604
ugacauuuaucccaggagu

SEQ ID NO: 1016705 - RNA, 19 nt, Artificial Sequence
  Description of Artificial Sequence: Synthetic oligonucleotide
  Antisense strand to SEQ ID NO: 1016704
acuccugggauaaauguca

SEQ ID NO: 1016706 - RNA, 19 nt, Artificial Sequence
  Description of Artificial Sequence: Synthetic oligonucleotide
  Sense strand starting at position 168 of SEQ ID NO: 914604
cgugguguucuggaagaac

SEQ ID NO: 1016707 - RNA, 19 nt, Artificial Sequence
  Description of Artificial Sequence: Synthetic oligonucleotide
  Antisense strand to SEQ ID NO: 1016706
guucuuccagaacaccacg

SEQ ID NO: 1016708 - RNA, 19 nt, Artificial Sequence
  Description of Artificial Sequence: Synthetic oligonucleotide
  Sense strand starting at position 176 of SEQ ID NO: 914604
ucuggaagaacuugguaau

SEQ ID NO: 1016709 - RNA, 19 nt, Artificial Sequence
  Description of Artificial Sequence: Synthetic oligonucleotide
  Antisense strand to SEQ ID NO: 1016708
auuaccaaguucuuccaga

SEQ ID NO: 1016710 - RNA, 19 nt, Artificial Sequence
  Description of Artificial Sequence: Synthetic oligonucleotide
  Sense strand starting at position 201 of SEQ ID NO: 914604
cgguguacccacgauuucu

SEQ ID NO: 1016711 - RNA, 19 nt, Artificial Sequence
  Description of Artificial Sequence: Synthetic oligonucleotide
  Antisense strand to SEQ ID NO: 1016710
agaaaucguggguacaccg

SEQ ID NO: 1016712 - RNA, 19 nt, Artificial Sequence
  Description of Artificial Sequence: Synthetic oligonucleotide
  Sense strand starting at position 207 of SEQ ID NO: 914604
acccacgauuucuaguaua

SEQ ID NO: 1016713 - RNA, 19 nt, Artificial Sequence
  Description of Artificial Sequence: Synthetic oligonucleotide
  Antisense strand to SEQ ID NO: 1016712
uauacuagaaaucgugggu

SEQ ID NO: 1016714 - RNA, 19 nt, Artificial Sequence
  Description of Artificial Sequence: Synthetic oligonucleotide
  Sense strand starting at position 268 of SEQ ID NO: 914604
ucccauuugcucugagcau

SEQ ID NO: 1016715 - RNA, 19 nt, Artificial Sequence
  Description of Artificial Sequence: Synthetic oligonucleotide
  Antisense strand to SEQ ID NO: 1016714
augcucagagcaaauggga

SEQ ID NO: 1016716 - RNA, 19 nt, Artificial Sequence
  Description of Artificial Sequence: Synthetic oligonucleotide
  Sense strand starting at position 283 of SEQ ID NO: 914604
gcaucuugcuucuuggaaa

SEQ ID NO: 1016717 - RNA, 19 nt, Artificial Sequence
  Description of Artificial Sequence: Synthetic oligonucleotide
  Antisense strand to SEQ ID NO: 1016716
uuuccaagaagcaagaugc

SEQ ID NO: 1016718 - RNA, 19 nt, Artificial Sequence
  Description of Artificial Sequence: Synthetic oligonucleotide
  Sense strand starting at position 408 of SEQ ID NO: 914604
uaugaaacgucuucccaga

SEQ ID NO: 1016719 - RNA, 19 nt, Artificial Sequence
  Description of Artificial Sequence: Synthetic oligonucleotide
  Antisense strand to SEQ ID NO: 1016718
ucugggaagacguuucaua

SEQ ID NO: 1016720 - RNA, 19 nt, Artificial Sequence
  Description of Artificial Sequence: Synthetic oligonucleotide
  Sense strand starting at position 410 of SEQ ID NO: 914604
ugaaacgucuucccagaag

SEQ ID NO: 1016721 - RNA, 19 nt, Artificial Sequence
  Description of Artificial Sequence: Synthetic oligonucleotide
  Antisense strand to SEQ ID NO: 1016720
cuucugggaagacguuuca

SEQ ID NO: 1016722 - RNA, 19 nt, Artificial Sequence
  Description of Artificial Sequence: Synthetic oligonucleotide
  Sense strand starting at position 491 of SEQ ID NO: 914604
gggaacuuguccucuccaa

SEQ ID NO: 1016723 - RNA, 19 nt, Artificial Sequence
  Description of Artificial Sequence: Synthetic oligonucleotide
  Antisense strand to SEQ ID NO: 1016722
uuggagaggacaaguuccc

SEQ ID NO: 1016724 - RNA, 19 nt, Artificial Sequence
  Description of Artificial Sequence: Synthetic oligonucleotide
  Sense strand starting at position 616 of SEQ ID NO: 914604
gaggcugugguuugggaga

SEQ ID NO: 1016725 - RNA, 19 nt, Artificial Sequence
  Description of Artificial Sequence: Synthetic oligonucleotide
  Antisense strand to SEQ ID NO: 1016724
ucucccaaaccacagccuc

SEQ ID NO: 1016726 - RNA, 19 nt, Artificial Sequence
  Description of Artificial Sequence: Synthetic oligonucleotide
  Sense strand starting at position 672 of SEQ ID NO: 914604
cuccaaccucuguguaacu

SEQ ID NO: 1016727 - RNA, 19 nt, Artificial Sequence
  Description of Artificial Sequence: Synthetic oligonucleotide
  Antisense strand to SEQ ID NO: 1016726
aguuacacagagguuggag

SEQ ID NO: 1016728 - RNA, 19 nt, Artificial Sequence
  Description of Artificial Sequence: Synthetic oligonucleotide
  Sense strand starting at position 1124 of SEQ ID NO: 914604
cagauagagguuuguaaga

SEQ ID NO: 1016729 - RNA, 19 nt, Artificial Sequence
  Description of Artificial Sequence: Synthetic oligonucleotide
  Antisense strand to SEQ ID NO: 1016728
ucuuacaaaccucuaucug

SEQ ID NO: 1016730 - RNA, 19 nt, Artificial Sequence
  Description of Artificial Sequence: Synthetic oligonucleotide
  Sense strand starting at position 1135 of SEQ ID NO: 914604
uuguaagaacaaugucaug

SEQ ID NO: 1016731 - RNA, 19 nt, Artificial Sequence
  Description of Artificial Sequence: Synthetic oligonucleotide
  Antisense strand to SEQ ID NO: 1016730
caugacauuguucuuacaa

SEQ ID NO: 1016732 - RNA, 19 nt, Artificial Sequence
  Description of Artificial Sequence: Synthetic oligonucleotide
  Sense strand starting at position 1141 of SEQ ID NO: 914604
gaacaaugucauggcucuu

SEQ ID NO: 1016733 - RNA, 19 nt, Artificial Sequence
  Description of Artificial Sequence: Synthetic oligonucleotide
  Antisense strand to SEQ ID NO: 1016732
aagagccaugacauuguuc

SEQ ID NO: 1016734 - RNA, 19 nt, Artificial Sequence
  Description of Artificial Sequence: Synthetic oligonucleotide
  Sense strand starting at position 1198 of SEQ ID NO: 914604
cugcauauuggaugaauac

SEQ ID NO: 1016735 - RNA, 19 nt, Artificial Sequence
  Description of Artificial Sequence: Synthetic oligonucleotide
  Antisense strand to SEQ ID NO: 1016734
guauucauccaauaugcag

SEQ ID NO: 1016736 - RNA, 19 nt, Artificial Sequence
  Description of Artificial Sequence: Synthetic oligonucleotide
  Sense strand starting at position 1295 of SEQ ID NO: 914604
ggcagucaucucuaaacuc

SEQ ID NO: 1016737 - RNA, 19 nt, Artificial Sequence
  Description of Artificial Sequence: Synthetic oligonucleotide
  Antisense strand to SEQ ID NO: 1016736
gaguuuagagaugacugcc

SEQ ID NO: 1016738 - RNA, 19 nt, Artificial Sequence
  Description of Artificial Sequence: Synthetic oligonucleotide
  Sense strand starting at position 1339 of SEQ ID NO: 914604
acaauaaacguuugugcaa

SEQ ID NO: 1016739 - RNA, 19 nt, Artificial Sequence
  Description of Artificial Sequence: Synthetic oligonucleotide
  Antisense strand to SEQ ID NO: 1016738
uugcacaaacguuuauugu

SEQ ID NO: 1016740 - RNA, 19 nt, Artificial Sequence
  Description of Artificial Sequence: Synthetic oligonucleotide
  Sense strand starting at position 2330 of SEQ ID NO: 914604
ggugacaugagccaacauu

SEQ ID NO: 1016741 - RNA, 19 nt, Artificial Sequence
  Description of Artificial Sequence: Synthetic oligonucleotide
  Antisense strand to SEQ ID NO: 1016740
aauguuggcucaugucacc

SEQ ID NO: 1016742 - RNA, 19 nt, Artificial Sequence
  Description of Artificial Sequence: Synthetic oligonucleotide
  Sense strand starting at position 2487 of SEQ ID NO: 914604
ucuggaucgugccuagaga

SEQ ID NO: 1016743 - RNA, 19 nt, Artificial Sequence
  Description of Artificial Sequence: Synthetic oligonucleotide
  Antisense strand to SEQ ID NO: 1016742
ucucuaggcacgauccaga

SEQ ID NO: 1016744 - RNA, 19 nt, Artificial Sequence
  Description of Artificial Sequence: Synthetic oligonucleotide
  Sense strand starting at position 2576 of SEQ ID NO: 914604
gggccagggucucuuagau

SEQ ID NO: 1016745 - RNA, 19 nt, Artificial Sequence
  Description of Artificial Sequence: Synthetic oligonucleotide
  Antisense strand to SEQ ID NO: 1016744
aucuaagagacccuggccc

SEQ ID NO: 1016746 - RNA, 19 nt, Artificial Sequence
  Description of Artificial Sequence: Synthetic oligonucleotide
  Sense strand starting at position 2580 of SEQ ID NO: 914604
cagggucucuuagauuuaa

SEQ ID NO: 1016747 - RNA, 19 nt, Artificial Sequence
  Description of Artificial Sequence: Synthetic oligonucleotide
  Antisense strand to SEQ ID NO: 1016746
uuaaaucuaagagacccug

SEQ ID NO: 1016748 - RNA, 19 nt, Artificial Sequence
  Description of Artificial Sequence: Synthetic oligonucleotide
  Sense strand starting at position 2752 of SEQ ID NO: 914604
ugcaguguuccucagguga

SEQ ID NO: 1016749 - RNA, 19 nt, Artificial Sequence
  Description of Artificial Sequence: Synthetic oligonucleotide
  Antisense strand to SEQ ID NO: 1016748
ucaccugaggaacacugca

SEQ ID NO: 1016750 - RNA, 19 nt, Artificial Sequence
  Description of Artificial Sequence: Synthetic oligonucleotide
  Sense strand starting at position 2800 of SEQ ID NO: 914604
ggugaacuucucugaugga

SEQ ID NO: 1016751 - RNA, 19 nt, Artificial Sequence
  Description of Artificial Sequence: Synthetic oligonucleotide
  Antisense strand to SEQ ID NO: 1016750
uccaucagagaaguucacc

SEQ ID NO: 1016752 - RNA, 19 nt, Artificial Sequence
  Description of Artificial Sequence: Synthetic oligonucleotide
  Sense strand starting at position 2868 of SEQ ID NO: 914604
cucuucucccgugguauuu

SEQ ID NO: 1016753 - RNA, 19 nt, Artificial Sequence
  Description of Artificial Sequence: Synthetic oligonucleotide
  Antisense strand to SEQ ID NO: 1016752
aaauaccacgggagaagag

SEQ ID NO: 1016754 - RNA, 19 nt, Artificial Sequence
  Description of Artificial Sequence: Synthetic oligonucleotide
  Sense strand starting at position 2989 of SEQ ID NO: 914604
cuccuuauucugggaacuu

SEQ ID NO: 1016755 - RNA, 19 nt, Artificial Sequence
  Description of Artificial Sequence: Synthetic oligonucleotide
  Antisense strand to SEQ ID NO: 1016754
aaguucccagaauaaggag

SEQ ID NO: 1016756 - RNA, 19 nt, Artificial Sequence
  Description of Artificial Sequence: Synthetic oligonucleotide
  Sense strand starting at position 3089 of SEQ ID NO: 914604
uucugaggcuuugcuuaaa

SEQ ID NO: 1016757 - RNA, 19 nt, Artificial Sequence
  Description of Artificial Sequence: Synthetic oligonucleotide
  Antisense strand to SEQ ID NO: 1016756
uuuaagcaaagccucagaa

SEQ ID NO: 1016758 - RNA, 19 nt, Artificial Sequence
  Description of Artificial Sequence: Synthetic oligonucleotide
  Sense strand starting at position 3120 of SEQ ID NO: 914604
caggaagucuccuuggaug

SEQ ID NO: 1016759 - RNA, 19 nt, Artificial Sequence
  Description of Artificial Sequence: Synthetic oligonucleotide
  Antisense strand to SEQ ID NO: 1016758
cauccaaggagacuuccug

SEQ ID NO: 1016760 - RNA, 19 nt, Artificial Sequence
  Description of Artificial Sequence: Synthetic oligonucleotide
  Sense strand starting at position 3187 of SEQ ID NO: 914604
gccucagaugucuaaucua

SEQ ID NO: 1016761 - RNA, 19 nt, Artificial Sequence
  Description of Artificial Sequence: Synthetic oligonucleotide
  Antisense strand to SEQ ID NO: 1016760
uagauuagacaucugaggc

SEQ ID NO: 1016762 - RNA, 19 nt, Artificial Sequence
  Description of Artificial Sequence: Synthetic oligonucleotide
  Sense strand starting at position 3190 of SEQ ID NO: 914604
ucagaugucuaaucuaguc

SEQ ID NO: 1016763 - RNA, 19 nt, Artificial Sequence
  Description of Artificial Sequence: Synthetic oligonucleotide
  Antisense strand to SEQ ID NO: 1016762
gacuagauuagacaucuga

SEQ ID NO: 1016764 - RNA, 19 nt, Artificial Sequence
  Description of Artificial Sequence: Synthetic oligonucleotide
  Sense strand starting at position 3226 of SEQ ID NO: 914604
ugaaguugugacuaugagu

SEQ ID NO: 1016765 - RNA, 19 nt, Artificial Sequence
  Description of Artificial Sequence: Synthetic oligonucleotide
  Antisense strand to SEQ ID NO: 1016764
acucauagucacaacuuca

SEQ ID NO: 1016766 - RNA, 19 nt, Artificial Sequence
  Description of Artificial Sequence: Synthetic oligonucleotide
  Sense strand starting at position 3234 of SEQ ID NO: 914604
ugacuaugagugugggaag

SEQ ID NO: 1016767 - RNA, 19 nt, Artificial Sequence
  Description of Artificial Sequence: Synthetic oligonucleotide
  Antisense strand to SEQ ID NO: 1016766
cuucccacacucauaguca

SEQ ID NO: 1016768 - RNA, 19 nt, Artificial Sequence
  Description of Artificial Sequence: Synthetic oligonucleotide
  Sense strand starting at position 3296 of SEQ ID NO: 914604
gggagacagcugugucaua

SEQ ID NO: 1016769 - RNA, 19 nt, Artificial Sequence
  Description of Artificial Sequence: Synthetic oligonucleotide
  Antisense strand to SEQ ID NO: 1016768
uaugacacagcugucuccc

SEQ ID NO: 1016770 - RNA, 19 nt, Artificial Sequence
  Description of Artificial Sequence: Synthetic oligonucleotide
  Sense strand starting at position 3373 of SEQ ID NO: 914604
cccuguccugccuauggaa

SEQ ID NO: 1016771 - RNA, 19 nt, Artificial Sequence
  Description of Artificial Sequence: Synthetic oligonucleotide
  Antisense strand to SEQ ID NO: 1016770
uuccauaggcaggacaggg

SEQ ID NO: 1016772 - RNA, 19 nt, Artificial Sequence
  Description of Artificial Sequence: Synthetic oligonucleotide
  Sense strand starting at position 3375 of SEQ ID NO: 914604
cuguccugccuauggaaga

SEQ ID NO: 1016773 - RNA, 19 nt, Artificial Sequence
  Description of Artificial Sequence: Synthetic oligonucleotide
  Antisense strand to SEQ ID NO: 1016772
ucuuccauaggcaggacag

SEQ ID NO: 1016774 - RNA, 19 nt, Artificial Sequence
  Description of Artificial Sequence: Synthetic oligonucleotide
  Sense strand starting at position 3382 of SEQ ID NO: 914604
gccuauggaagagguguua

SEQ ID NO: 1016775 - RNA, 19 nt, Artificial Sequence
  Description of Artificial Sequence: Synthetic oligonucleotide
  Antisense strand to SEQ ID NO: 1016774
uaacaccucuuccauaggc

SEQ ID NO: 1016776 - RNA, 19 nt, Artificial Sequence
  Description of Artificial Sequence: Synthetic oligonucleotide
  Sense strand starting at position 3541 of SEQ ID NO: 914604
ucauuugauccucgccaca

SEQ ID NO: 1016777 - RNA, 19 nt, Artificial Sequence
  Description of Artificial Sequence: Synthetic oligonucleotide
  Antisense strand to SEQ ID NO: 1016776
uguggcgaggaucaaauga

SEQ ID NO: 1016778 - RNA, 19 nt, Artificial Sequence
  Description of Artificial Sequence: Synthetic oligonucleotide
  Sense strand starting at position 3563 of SEQ ID NO: 914604
cuggguggcagauauuauc

SEQ ID NO: 1016779 - RNA, 19 nt, Artificial Sequence
  Description of Artificial Sequence: Synthetic oligonucleotide
  Antisense strand to SEQ ID NO: 1016778
gauaauaucugccacccag

SEQ ID NO: 1016780 - RNA, 19 nt, Artificial Sequence
  Description of Artificial Sequence: Synthetic oligonucleotide
  Sense strand starting at position 3685 of SEQ ID NO: 914604
ggcuucuggccucagaacu

SEQ ID NO: 1016781 - RNA, 19 nt, Artificial Sequence
  Description of Artificial Sequence: Synthetic oligonucleotide
  Antisense strand to SEQ ID NO: 1016780
aguucugaggccagaagcc

SEQ ID NO: 1016782 - RNA, 19 nt, Artificial Sequence
  Description of Artificial Sequence: Synthetic oligonucleotide
  Sense strand starting at position 3770 of SEQ ID NO: 914604
cgcucuaaucuggaagcuu

SEQ ID NO: 1016783 - RNA, 19 nt, Artificial Sequence
  Description of Artificial Sequence: Synthetic oligonucleotide
  Antisense strand to SEQ ID NO: 1016782
aagcuuccagauuagagcg

SEQ ID NO: 1016784 - RNA, 19 nt, Artificial Sequence
  Description of Artificial Sequence: Synthetic oligonucleotide
  Sense strand starting at position 349 of SEQ ID NO: 914605
ugaccaaagucacuuaaug

SEQ ID NO: 1016785 - RNA, 19 nt, Artificial Sequence
  Description of Artificial Sequence: Synthetic oligonucleotide
  Antisense strand to SEQ ID NO: 1016784
cauuaagugacuuugguca

SEQ ID NO: 1016786 - RNA, 19 nt, Artificial Sequence
  Description of Artificial Sequence: Synthetic oligonucleotide
  Sense strand starting at position 413 of SEQ ID NO: 914605
gucauccuuccacagcuau

SEQ ID NO: 1016787 - RNA, 19 nt, Artificial Sequence
  Description of Artificial Sequence: Synthetic oligonucleotide
  Antisense strand to SEQ ID NO: 1016786
auagcuguggaaggaugac

SEQ ID NO: 1016788 - RNA, 19 nt, Artificial Sequence
  Description of Artificial Sequence: Synthetic oligonucleotide
  Sense strand starting at position 510 of SEQ ID NO: 914605
ucucauaugcuacgggaau

SEQ ID NO: 1016789 - RNA, 19 nt, Artificial Sequence
  Description of Artificial Sequence: Synthetic oligonucleotide
  Antisense strand to SEQ ID NO: 1016788
auucccguagcauaugaga

SEQ ID NO: 1016790 - RNA, 19 nt, Artificial Sequence
  Description of Artificial Sequence: Synthetic oligonucleotide
  Sense strand starting at position 512 of SEQ ID NO: 914605
ucauaugcuacgggaauca

SEQ ID NO: 1016791 - RNA, 19 nt, Artificial Sequence
  Description of Artificial Sequence: Synthetic oligonucleotide
  Antisense strand to SEQ ID NO: 1016790
ugauucccguagcauauga

SEQ ID NO: 1016792 - RNA, 19 nt, Artificial Sequence
  Description of Artificial Sequence: Synthetic oligonucleotide
  Sense strand starting at position 1252 of SEQ ID NO: 914605
ccaaguaugccugacaacu

SEQ ID NO: 1016793 - RNA, 19 nt, Artificial Sequence
  Description of Artificial Sequence: Synthetic oligonucleotide
  Antisense strand to SEQ ID NO: 1016792
aguugucaggcauacuugg

SEQ ID NO: 1016794 - RNA, 19 nt, Artificial Sequence
  Description of Artificial Sequence: Synthetic oligonucleotide
  Sense strand starting at position 1300 of SEQ ID NO: 914605
gaaguuucccaauggcucu

SEQ ID NO: 1016795 - RNA, 19 nt, Artificial Sequence
  Description of Artificial Sequence: Synthetic oligonucleotide
  Antisense strand to SEQ ID NO: 1016794
agagccauugggaaacuuc

SEQ ID NO: 1016796 - RNA, 19 nt, Artificial Sequence
  Description of Artificial Sequence: Synthetic oligonucleotide
  Sense strand starting at position 1393 of SEQ ID NO: 914605
gucagaaaucuccagcauc

SEQ ID NO: 1016797 - RNA, 19 nt, Artificial Sequence
  Description of Artificial Sequence: Synthetic oligonucleotide
  Antisense strand to SEQ ID NO: 1016796
gaugcuggagauuucugac

SEQ ID NO: 1016798 - RNA, 19 nt, Artificial Sequence
  Description of Artificial Sequence: Synthetic oligonucleotide
  Sense strand starting at position 1567 of SEQ ID NO: 914605
ugcagagugcuggaugaca

SEQ ID NO: 1016799 - RNA, 19 nt, Artificial Sequence
  Description of Artificial Sequence: Synthetic oligonucleotide
  Antisense strand to SEQ ID NO: 1016798
ugucauccagcacucugca

SEQ ID NO: 1016800 - RNA, 19 nt, Artificial Sequence
  Description of Artificial Sequence: Synthetic oligonucleotide
  Sense strand starting at position 1569 of SEQ ID NO: 914605
cagagugcuggaugacaga

SEQ ID NO: 1016801 - RNA, 19 nt, Artificial Sequence
  Description of Artificial Sequence: Synthetic oligonucleotide
  Antisense strand to SEQ ID NO: 1016800
ucugucauccagcacucug

SEQ ID NO: 1016802 - RNA, 19 nt, Artificial Sequence
  Description of Artificial Sequence: Synthetic oligonucleotide
  Sense strand starting at position 2167 of SEQ ID NO: 914605
ggucucccgcuuuaugaca

SEQ ID NO: 1016803 - RNA, 19 nt, Artificial Sequence
  Description of Artificial Sequence: Synthetic oligonucleotide
  Antisense strand to SEQ ID NO: 1016802
ugucauaaagcgggagacc

SEQ ID NO: 1016804 - RNA, 19 nt, Artificial Sequence
  Description of Artificial Sequence: Synthetic oligonucleotide
  Sense strand starting at position 2396 of SEQ ID NO: 914605
cucggaguccucuaaauaa

SEQ ID NO: 1016805 - RNA, 19 nt, Artificial Sequence
  Description of Artificial Sequence: Synthetic oligonucleotide
  Antisense strand to SEQ ID NO: 1016804
uuauuuagaggacuccgag

SEQ ID NO: 1016806 - RNA, 19 nt, Artificial Sequence
  Description of Artificial Sequence: Synthetic oligonucleotide
  Sense strand starting at position 2455 of SEQ ID NO: 914605
auacaugugccagggagau

SEQ ID NO: 1016807 - RNA, 19 nt, Artificial Sequence
  Description of Artificial Sequence: Synthetic oligonucleotide
  Antisense strand to SEQ ID NO: 1016806
aucucccuggcacauguau

SEQ ID NO: 1016808 - RNA, 19 nt, Artificial Sequence
  Description of Artificial Sequence: Synthetic oligonucleotide
  Sense strand starting at position 2495 of SEQ ID NO: 914605
aucuguaaaguggaguaau

SEQ ID NO: 1016809 - RNA, 19 nt, Artificial Sequence
  Description of Artificial Sequence: Synthetic oligonucleotide
  Antisense strand to SEQ ID NO: 1016808
auuacuccacuuuacagau

SEQ ID NO: 1016810 - RNA, 19 nt, Artificial Sequence
  Description of Artificial Sequence: Synthetic oligonucleotide
  Sense strand starting at position 2506 of SEQ ID NO: 914605
ggaguaauaggccaggcau

SEQ ID NO: 1016811 - RNA, 19 nt, Artificial Sequence
  Description of Artificial Sequence: Synthetic oligonucleotide
  Antisense strand to SEQ ID NO: 1016810
augccuggccuauuacucc

SEQ ID NO: 1016812 - RNA, 19 nt, Artificial Sequence
  Description of Artificial Sequence: Synthetic oligonucleotide
  Sense strand starting at position 2815 of SEQ ID NO: 914605
aauugagcucaugguguua

SEQ ID NO: 1016813 - RNA, 19 nt, Artificial Sequence
  Description of Artificial Sequence: Synthetic oligonucleotide
  Antisense strand to SEQ ID NO: 1016812
uaacaccaugagcucaauu

SEQ ID NO: 1016814 - RNA, 19 nt, Artificial Sequence
  Description of Artificial Sequence: Synthetic oligonucleotide
  Sense strand starting at position 2824 of SEQ ID NO: 914605
caugguguuaucugaggaa

SEQ ID NO: 1016815 - RNA, 19 nt, Artificial Sequence
  Description of Artificial Sequence: Synthetic oligonucleotide
  Antisense strand to SEQ ID NO: 1016814
uuccucagauaacaccaug

SEQ ID NO: 1016816 - RNA, 19 nt, Artificial Sequence
  Description of Artificial Sequence: Synthetic oligonucleotide
  Sense strand starting at position 2854 of SEQ ID NO: 914605
uaggaagguugacaaauua

SEQ ID NO: 1016817 - RNA, 19 nt, Artificial Sequence
  Description of Artificial Sequence: Synthetic oligonucleotide
  Antisense strand to SEQ ID NO: 1016816
uaauuugucaaccuuccua

SEQ ID NO: 1016818 - RNA, 19 nt, Artificial Sequence
  Description of Artificial Sequence: Synthetic oligonucleotide
  Sense strand starting at position 2916 of SEQ ID NO: 914605
caccguaucggagaacaua

SEQ ID NO: 1016819 - RNA, 19 nt, Artificial Sequence
  Description of Artificial Sequence: Synthetic oligonucleotide
  Antisense strand to SEQ ID NO: 1016818
uauguucuccgauacggug

SEQ ID NO: 1016820 - RNA, 19 nt, Artificial Sequence
  Description of Artificial Sequence: Synthetic oligonucleotide
  Sense strand starting at position 2924 of SEQ ID NO: 914605
cggagaacauagcucuaaa

SEQ ID NO: 1016821 - RNA, 19 nt, Artificial Sequence
  Description of Artificial Sequence: Synthetic oligonucleotide
  Antisense strand to SEQ ID NO: 1016820
uuuagagcuauguucuccg

SEQ ID NO: 1016822 - RNA, 19 nt, Artificial Sequence
  Description of Artificial Sequence: Synthetic oligonucleotide
  Sense strand starting at position 2954 of SEQ ID NO: 914605
agggcucuguccucacaga

SEQ ID NO: 1016823 - RNA, 19 nt, Artificial Sequence
  Description of Artificial Sequence: Synthetic oligonucleotide
  Antisense strand to SEQ ID NO: 1016822
ucugugaggacagagcccu

SEQ ID NO: 1016824 - RNA, 19 nt, Artificial Sequence
  Description of Artificial Sequence: Synthetic oligonucleotide
  Sense strand starting at position 3353 of SEQ ID NO: 914605
gagugaugagagugacuua

SEQ ID NO: 1016825 - RNA, 19 nt, Artificial Sequence
  Description of Artificial Sequence: Synthetic oligonucleotide
  Antisense strand to SEQ ID NO: 1016824
uaagucacucucaucacuc

SEQ ID NO: 1016826 - RNA, 19 nt, Artificial Sequence
  Description of Artificial Sequence: Synthetic oligonucleotide
  Sense strand starting at position 3409 of SEQ ID NO: 914605
ggugauauuugagagcaga

SEQ ID NO: 1016827 - RNA, 19 nt, Artificial Sequence
  Description of Artificial Sequence: Synthetic oligonucleotide
  Antisense strand to SEQ ID NO: 1016826
ucugcucucaaauaucacc

SEQ ID NO: 1016828 - RNA, 19 nt, Artificial Sequence
  Description of Artificial Sequence: Synthetic oligonucleotide
  Sense strand starting at position 3440 of SEQ ID NO: 914605
gggagcgugagcuauguga

SEQ ID NO: 1016829 - RNA, 19 nt, Artificial Sequence
  Description of Artificial Sequence: Synthetic oligonucleotide
  Antisense strand to SEQ ID NO: 1016828
ucacauagcucacgcuccc

SEQ ID NO: 1016830 - RNA, 19 nt, Artificial Sequence
  Description of Artificial Sequence: Synthetic oligonucleotide
  Sense strand starting at position 3447 of SEQ ID NO: 914605
ugagcuaugugacuuaccu

SEQ ID NO: 1016831 - RNA, 19 nt, Artificial Sequence
  Description of Artificial Sequence: Synthetic oligonucleotide
  Antisense strand to SEQ ID NO: 1016830
agguaagucacauagcuca

SEQ ID NO: 1016832 - RNA, 19 nt, Artificial Sequence
  Description of Artificial Sequence: Synthetic oligonucleotide
  Sense strand starting at position 3453 of SEQ ID NO: 914605
augugacuuaccugggaga

SEQ ID NO: 1016833 - RNA, 19 nt, Artificial Sequence
  Description of Artificial Sequence: Synthetic oligonucleotide
  Antisense strand to SEQ ID NO: 1016832
ucucccagguaagucacau

SEQ ID NO: 1016834 - RNA, 19 nt, Artificial Sequence
  Description of Artificial Sequence: Synthetic oligonucleotide
  Sense strand starting at position 3454 of SEQ ID NO: 914605
ugugacuuaccugggagaa

SEQ ID NO: 1016835 - RNA, 19 nt, Artificial Sequence
  Description of Artificial Sequence: Synthetic oligonucleotide
  Antisense strand to SEQ ID NO: 1016834
uucucccagguaagucaca

SEQ ID NO: 1016836 - RNA, 19 nt, Artificial Sequence
  Description of Artificial Sequence: Synthetic oligonucleotide
  Sense strand starting at position 3455 of SEQ ID NO: 914605
gugacuuaccugggagaau

SEQ ID NO: 1016837 - RNA, 19 nt, Artificial Sequence
  Description of Artificial Sequence: Synthetic oligonucleotide
  Antisense strand to SEQ ID NO: 1016836
auucucccagguaagucac

SEQ ID NO: 1016838 - RNA, 19 nt, Artificial Sequence
  Description of Artificial Sequence: Synthetic oligonucleotide
  Sense strand starting at position 3456 of SEQ ID NO: 914605
ugacuuaccugggagaaua

SEQ ID NO: 1016839 - RNA, 19 nt, Artificial Sequence
  Description of Artificial Sequence: Synthetic oligonucleotide
  Antisense strand to SEQ ID NO: 1016838
uauucucccagguaaguca

SEQ ID NO: 1016840 - RNA, 19 nt, Artificial Sequence
  Description of Artificial Sequence: Synthetic oligonucleotide
  Sense strand starting at position 3471 of SEQ ID NO: 914605
aauagcauucuagguggaa

SEQ ID NO: 1016841 - RNA, 19 nt, Artificial Sequence
  Description of Artificial Sequence: Synthetic oligonucleotide
  Antisense strand to SEQ ID NO: 1016840
uuccaccuagaaugcuauu

SEQ ID NO: 1016842 - RNA, 19 nt, Artificial Sequence
  Description of Artificial Sequence: Synthetic oligonucleotide
  Sense strand starting at position 3472 of SEQ ID NO: 914605
auagcauucuagguggaag

SEQ ID NO: 1016843 - RNA, 19 nt, Artificial Sequence
  Description of Artificial Sequence: Synthetic oligonucleotide
  Antisense strand to SEQ ID NO: 1016842
cuuccaccuagaaugcuau

SEQ ID NO: 1016844 - RNA, 19 nt, Artificial Sequence
  Description of Artificial Sequence: Synthetic oligonucleotide
  Sense strand starting at position 3473 of SEQ ID NO: 914605
uagcauucuagguggaagu

SEQ ID NO: 1016845 - RNA, 19 nt, Artificial Sequence
  Description of Artificial Sequence: Synthetic oligonucleotide
  Antisense strand to SEQ ID NO: 1016844
acuuccaccuagaaugcua

SEQ ID NO: 1016846 - RNA, 19 nt, Artificial Sequence
  Description of Artificial Sequence: Synthetic oligonucleotide
  Sense strand starting at position 3474 of SEQ ID NO: 914605
agcauucuagguggaagua

SEQ ID NO: 1016847 - RNA, 19 nt, Artificial Sequence
  Description of Artificial Sequence: Synthetic oligonucleotide
  Antisense strand to SEQ ID NO: 1016846
uacuuccaccuagaaugcu

SEQ ID NO: 1016848 - RNA, 19 nt, Artificial Sequence
  Description of Artificial Sequence: Synthetic oligonucleotide
  Sense strand starting at position 3625 of SEQ ID NO: 914605
gcuggaguucaaggccauu

SEQ ID NO: 1016849 - RNA, 19 nt, Artificial Sequence
  Description of Artificial Sequence: Synthetic oligonucleotide
  Antisense strand to SEQ ID NO: 1016848
aauggccuugaacuccagc

SEQ ID NO: 1016850 - RNA, 19 nt, Artificial Sequence
  Description of Artificial Sequence: Synthetic oligonucleotide
  Sense strand starting at position 3758 of SEQ ID NO: 914605
cuaguucuuuaguuguaua

SEQ ID NO: 1016851 - RNA, 19 nt, Artificial Sequence
  Description of Artificial Sequence: Synthetic oligonucleotide
  Antisense strand to SEQ ID NO: 1016850
uauacaacuaaagaacuag

SEQ ID NO: 1016852 - RNA, 19 nt, Artificial Sequence
  Description of Artificial Sequence: Synthetic oligonucleotide
  Sense strand starting at position 3763 of SEQ ID NO: 914605
ucuuuaguuguauaugugu

SEQ ID NO: 1016853 - RNA, 19 nt, Artificial Sequence
  Description of Artificial Sequence: Synthetic oligonucleotide
  Antisense strand to SEQ ID NO: 1016852
acacauauacaacuaaaga

SEQ ID NO: 1016854 - RNA, 19 nt, Artificial Sequence
  Description of Artificial Sequence: Synthetic oligonucleotide
  Sense strand starting at position 3788 of SEQ ID NO: 914605
cugugaauuucuugaggac

SEQ ID NO: 1016855 - RNA, 19 nt, Artificial Sequence
  Description of Artificial Sequence: Synthetic oligonucleotide
  Antisense strand to SEQ ID NO: 1016854
guccucaagaaauucacag

SEQ ID NO: 1016856 - RNA, 19 nt, Artificial Sequence
  Description of Artificial Sequence: Synthetic oligonucleotide
  Sense strand starting at position 3791 of SEQ ID NO: 914605
ugaauuucuugaggacaga

SEQ ID NO: 1016857 - RNA, 19 nt, Artificial Sequence
  Description of Artificial Sequence: Synthetic oligonucleotide
  Antisense strand to SEQ ID NO: 1016856
ucuguccucaagaaauuca

SEQ ID NO: 1016858 - RNA, 19 nt, Artificial Sequence
  Description of Artificial Sequence: Synthetic oligonucleotide
  Sense strand starting at position 3903 of SEQ ID NO: 914605
accuuugugucccucauga

SEQ ID NO: 1016859 - RNA, 19 nt, Artificial Sequence
  Description of Artificial Sequence: Synthetic oligonucleotide
  Antisense strand to SEQ ID NO: 1016858
ucaugagggacacaaaggu

SEQ ID NO: 1016860 - RNA, 19 nt, Artificial Sequence
  Description of Artificial Sequence: Synthetic oligonucleotide
  Sense strand starting at position 3905 of SEQ ID NO: 914605
cuuugugucccucaugaug

SEQ ID NO: 1016861 - RNA, 19 nt, Artificial Sequence
  Description of Artificial Sequence: Synthetic oligonucleotide
  Antisense strand to SEQ ID NO: 1016860
caucaugagggacacaaag

SEQ ID NO: 1016862 - RNA, 19 nt, Artificial Sequence
  Description of Artificial Sequence: Synthetic oligonucleotide
  Sense strand starting at position 3954 of SEQ ID NO: 914605
uuaauaaaugcaugcuaug

SEQ ID NO: 1016863 - RNA, 19 nt, Artificial Sequence
  Description of Artificial Sequence: Synthetic oligonucleotide
  Antisense strand to SEQ ID NO: 1016862
cauagcaugcauuuauuaa

SEQ ID NO: 1016864 - RNA, 19 nt, Artificial Sequence
  Description of Artificial Sequence: Synthetic oligonucleotide
  Sense strand starting at position 44 of SEQ ID NO: 914606
ggaaauuacuuagaaacaa

SEQ ID NO: 1016865 - RNA, 19 nt, Artificial Sequence
  Description of Artificial Sequence: Synthetic oligonucleotide
  Antisense strand to SEQ ID NO: 1016864
uuguuucuaaguaauuucc

SEQ ID NO: 1016866 - RNA, 19 nt, Artificial Sequence
  Description of Artificial Sequence: Synthetic oligonucleotide
  Sense strand starting at position 104 of SEQ ID NO: 914606
aaguguuugcugcuggcaa

SEQ ID NO: 1016867 - RNA, 19 nt, Artificial Sequence
  Description of Artificial Sequence: Synthetic oligonucleotide
  Antisense strand to SEQ ID NO: 1016866
uugccagcagcaaacacuu

SEQ ID NO: 1016868 - RNA, 19 nt, Artificial Sequence
  Description of Artificial Sequence: Synthetic oligonucleotide
  Sense strand starting at position 139 of SEQ ID NO: 914606
ugggaugugguagagagua

SEQ ID NO: 1016869 - RNA, 19 nt, Artificial Sequence
  Description of Artificial Sequence: Synthetic oligonucleotide
  Antisense strand to SEQ ID NO: 1016868
uacucucuaccacauccca

SEQ ID NO: 1016870 - RNA, 19 nt, Artificial Sequence
  Description of Artificial Sequence: Synthetic oligonucleotide
  Sense strand starting at position 141 of SEQ ID NO: 914606
ggaugugguagagaguauu

SEQ ID NO: 1016871 - RNA, 19 nt, Artificial Sequence
  Description of Artificial Sequence: Synthetic oligonucleotide
  Antisense strand to SEQ ID NO: 1016870
aauacucucuaccacaucc

SEQ ID NO: 1016872 - RNA, 19 nt, Artificial Sequence
  Description of Artificial Sequence: Synthetic oligonucleotide
  Sense strand starting at position 193 of SEQ ID NO: 914606
aaaugugugcaugaauuac

SEQ ID NO: 1016873 - RNA, 19 nt, Artificial Sequence
  Description of Artificial Sequence: Synthetic oligonucleotide
  Antisense strand to SEQ ID NO: 1016872
guaauucaugcacacauuu

SEQ ID NO: 1016874 - RNA, 19 nt, Artificial Sequence
  Description of Artificial Sequence: Synthetic oligonucleotide
  Sense strand starting at position 199 of SEQ ID NO: 914606
gugcaugaauuacuuuaau

SEQ ID NO: 1016875 - RNA, 19 nt, Artificial Sequence
  Description of Artificial Sequence: Synthetic oligonucleotide
  Antisense strand to SEQ ID NO: 1016874
auuaaaguaauucaugcac

SEQ ID NO: 1016876 - RNA, 19 nt, Artificial Sequence
  Description of Artificial Sequence: Synthetic oligonucleotide
  Sense strand starting at position 262 of SEQ ID NO: 914606
uuccuuaugcagugugaga

SEQ ID NO: 1016877 - RNA, 19 nt, Artificial Sequence
  Description of Artificial Sequence: Synthetic oligonucleotide
  Antisense strand to SEQ ID NO: 1016876
ucucacacugcauaaggaa

SEQ ID NO: 1016878 - RNA, 19 nt, Artificial Sequence
  Description of Artificial Sequence: Synthetic oligonucleotide
  Sense strand starting at position 350 of SEQ ID NO: 914606
gacgaagaguucuugauag

SEQ ID NO: 1016879 - RNA, 19 nt, Artificial Sequence
  Description of Artificial Sequence: Synthetic oligonucleotide
  Antisense strand to SEQ ID NO: 1016878
cuaucaagaacucuucguc

SEQ ID NO: 1016880 - RNA, 19 nt, Artificial Sequence
  Description of Artificial Sequence: Synthetic oligonucleotide
  Sense strand starting at position 423 of SEQ ID NO: 914606
gccagucacucuccuuaua

SEQ ID NO: 1016881 - RNA, 19 nt, Artificial Sequence
  Description of Artificial Sequence: Synthetic oligonucleotide
  Antisense strand to SEQ ID NO: 1016880
uauaaggagagugacuggc

SEQ ID NO: 1016882 - RNA, 19 nt, Artificial Sequence
  Description of Artificial Sequence: Synthetic oligonucleotide
  Sense strand starting at position 496 of SEQ ID NO: 914606
uagugagucugaucucaag

SEQ ID NO: 1016883 - RNA, 19 nt, Artificial Sequence
  Description of Artificial Sequence: Synthetic oligonucleotide
  Antisense strand to SEQ ID NO: 1016882
cuugagaucagacucacua

SEQ ID NO: 1016884 - RNA, 19 nt, Artificial Sequence
  Description of Artificial Sequence: Synthetic oligonucleotide
  Sense strand starting at position 563 of SEQ ID NO: 914606
ccaggcucucaucaaggua

SEQ ID NO: 1016885 - RNA, 19 nt, Artificial Sequence
  Description of Artificial Sequence: Synthetic oligonucleotide
  Antisense strand to SEQ ID NO: 1016884
uaccuugaugagagccugg

SEQ ID NO: 1016886 - RNA, 19 nt, Artificial Sequence
  Description of Artificial Sequence: Synthetic oligonucleotide
  Sense strand starting at position 566 of SEQ ID NO: 914606
ggcucucaucaagguaaga

SEQ ID NO: 1016887 - RNA, 19 nt, Artificial Sequence
  Description of Artificial Sequence: Synthetic oligonucleotide
  Antisense strand to SEQ ID NO: 1016886
ucuuaccuugaugagagcc

SEQ ID NO: 1016888 - RNA, 19 nt, Artificial Sequence
  Description of Artificial Sequence: Synthetic oligonucleotide
  Sense strand starting at position 703 of SEQ ID NO: 914606
caggaaggcuaaguagaau

SEQ ID NO: 1016889 - RNA, 19 nt, Artificial Sequence
  Description of Artificial Sequence: Synthetic oligonucleotide
  Antisense strand to SEQ ID NO: 1016888
auucuacuuagccuuccug

SEQ ID NO: 1016890 - RNA, 19 nt, Artificial Sequence
  Description of Artificial Sequence: Synthetic oligonucleotide
  Sense strand starting at position 765 of SEQ ID NO: 914606
gggacaaugccugguacca

SEQ ID NO: 1016891 - RNA, 19 nt, Artificial Sequence
  Description of Artificial Sequence: Synthetic oligonucleotide
  Antisense strand to SEQ ID NO: 1016890
ugguaccaggcauuguccc

SEQ ID NO: 1016892 - RNA, 19 nt, Artificial Sequence
  Description of Artificial Sequence: Synthetic oligonucleotide
  Sense strand starting at position 951 of SEQ ID NO: 914606
gcucuuuagccacaagcau

SEQ ID NO: 1016893 - RNA, 19 nt, Artificial Sequence
  Description of Artificial Sequence: Synthetic oligonucleotide
  Antisense strand to SEQ ID NO: 1016892
augcuuguggcuaaagagc

SEQ ID NO: 1016894 - RNA, 19 nt, Artificial Sequence
  Description of Artificial Sequence: Synthetic oligonucleotide
  Sense strand starting at position 967 of SEQ ID NO: 914606
cauugaguugugcaauaaa

SEQ ID NO: 1016895 - RNA, 19 nt, Artificial Sequence
  Description of Artificial Sequence: Synthetic oligonucleotide
  Antisense strand to SEQ ID NO: 1016894
uuuauugcacaacucaaug

SEQ ID NO: 1016896 - RNA, 19 nt, Artificial Sequence
  Description of Artificial Sequence: Synthetic oligonucleotide
  Sense strand starting at position 970 of SEQ ID NO: 914606
ugaguugugcaauaaacau

SEQ ID NO: 1016897 - RNA, 19 nt, Artificial Sequence
  Description of Artificial Sequence: Synthetic oligonucleotide
  Antisense strand to SEQ ID NO: 1016896
auguuuauugcacaacuca

SEQ ID NO: 1016898 - RNA, 19 nt, Artificial Sequence
  Description of Artificial Sequence: Synthetic oligonucleotide
  Sense strand starting at position 1102 of SEQ ID NO: 914606
ggaccagucugucuguacu

SEQ ID NO: 1016899 - RNA, 19 nt, Artificial Sequence
  Description of Artificial Sequence: Synthetic oligonucleotide
  Antisense strand to SEQ ID NO: 1016898
aguacagacagacuggucc

SEQ ID NO: 1016900 - RNA, 19 nt, Artificial Sequence
  Description of Artificial Sequence: Synthetic oligonucleotide
  Sense strand starting at position 1153 of SEQ ID NO: 914606
gauccagggcacugagaua

SEQ ID NO: 1016901 - RNA, 19 nt, Artificial Sequence
  Description of Artificial Sequence: Synthetic oligonucleotide
  Antisense strand to SEQ ID NO: 1016900
uaucucagugcccuggauc

SEQ ID NO: 1016902 - RNA, 19 nt, Artificial Sequence
  Description of Artificial Sequence: Synthetic oligonucleotide
  Sense strand starting at position 1253 of SEQ ID NO: 914606
agacaccugugcuccaaau

SEQ ID NO: 1016903 - RNA, 19 nt, Artificial Sequence
  Description of Artificial Sequence: Synthetic oligonucleotide
  Antisense strand to SEQ ID NO: 1016902
auuuggagcacaggugucu

SEQ ID NO: 1016904 - RNA, 19 nt, Artificial Sequence
  Description of Artificial Sequence: Synthetic oligonucleotide
  Sense strand starting at position 1295 of SEQ ID NO: 914606
gcuaaaguccugcaaggaa

SEQ ID NO: 1016905 - RNA, 19 nt, Artificial Sequence
  Description of Artificial Sequence: Synthetic oligonucleotide
  Antisense strand to SEQ ID NO: 1016904
uuccuugcaggacuuuagc

SEQ ID NO: 1016906 - RNA, 19 nt, Artificial Sequence
  Description of Artificial Sequence: Synthetic oligonucleotide
  Sense strand starting at position 1482 of SEQ ID NO: 914606
cuggcucagcacugacaaa

SEQ ID NO: 1016907 - RNA, 19 nt, Artificial Sequence
  Description of Artificial Sequence: Synthetic oligonucleotide
  Antisense strand to SEQ ID NO: 1016906
uuugucagugcugagccag

SEQ ID NO: 1016908 - RNA, 19 nt, Artificial Sequence
  Description of Artificial Sequence: Synthetic oligonucleotide
  Sense strand starting at position 1982 of SEQ ID NO: 914606
ccggaugaugucagcgauu

SEQ ID NO: 1016909 - RNA, 19 nt, Artificial Sequence
  Description of Artificial Sequence: Synthetic oligonucleotide
  Antisense strand to SEQ ID NO: 1016908
aaucgcugacaucauccgg

SEQ ID NO: 1016910 - RNA, 19 nt, Artificial Sequence
  Description of Artificial Sequence: Synthetic oligonucleotide
  Sense strand starting at position 2272 of SEQ ID NO: 914606
ggcucaucaccuggaucau

SEQ ID NO: 1016911 - RNA, 19 nt, Artificial Sequence
  Description of Artificial Sequence: Synthetic oligonucleotide
  Antisense strand to SEQ ID NO: 1016910
augauccaggugaugagcc

SEQ ID NO: 1016912 - RNA, 19 nt, Artificial Sequence
  Description of Artificial Sequence: Synthetic oligonucleotide
  Sense strand starting at position 2392 of SEQ ID NO: 914606
gacacaguucuugguccua

SEQ ID NO: 1016913 - RNA, 19 nt, Artificial Sequence
  Description of Artificial Sequence: Synthetic oligonucleotide
  Antisense strand to SEQ ID NO: 1016912
uaggaccaagaacuguguc

SEQ ID NO: 1016914 - RNA, 19 nt, Artificial Sequence
  Description of Artificial Sequence: Synthetic oligonucleotide
  Sense strand starting at position 2428 of SEQ ID NO: 914606
cgaagaggauccuccauaa

SEQ ID NO: 1016915 - RNA, 19 nt, Artificial Sequence
  Description of Artificial Sequence: Synthetic oligonucleotide
  Antisense strand to SEQ ID NO: 1016914
uuauggaggauccucuucg

SEQ ID NO: 1016916 - RNA, 19 nt, Artificial Sequence
  Description of Artificial Sequence: Synthetic oligonucleotide
  Sense strand starting at position 2911 of SEQ ID NO: 914606
ucccucuguguuuauauau

SEQ ID NO: 1016917 - RNA, 19 nt, Artificial Sequence
  Description of Artificial Sequence: Synthetic oligonucleotide
  Antisense strand to SEQ ID NO: 1016916
auauauaaacacagaggga

SEQ ID NO: 1016918 - RNA, 19 nt, Artificial Sequence
  Description of Artificial Sequence: Synthetic oligonucleotide
  Sense strand starting at position 2998 of SEQ ID NO: 914606
ccaaauacuucgguaucca

SEQ ID NO: 1016919 - RNA, 19 nt, Artificial Sequence
  Description of Artificial Sequence: Synthetic oligonucleotide
  Antisense strand to SEQ ID NO: 1016918
uggauaccgaaguauuugg

SEQ ID NO: 1016920 - RNA, 19 nt, Artificial Sequence
  Description of Artificial Sequence: Synthetic oligonucleotide
  Sense strand starting at position 3468 of SEQ ID NO: 914606
ggaucuaaucagggagcca

SEQ ID NO: 1016921 - RNA, 19 nt, Artificial Sequence
  Description of Artificial Sequence: Synthetic oligonucleotide
  Antisense strand to SEQ ID NO: 1016920
uggcucccugauuagaucc

SEQ ID NO: 1016922 - RNA, 19 nt, Artificial Sequence
  Description of Artificial Sequence: Synthetic oligonucleotide
  Sense strand starting at position 3552 of SEQ ID NO: 914606
uuguuagaaggcugucaac

SEQ ID NO: 1016923 - RNA, 19 nt, Artificial Sequence
  Description of Artificial Sequence: Synthetic oligonucleotide
  Antisense strand to SEQ ID NO: 1016922
guugacagccuucuaacaa

SEQ ID NO: 1016924 - RNA, 19 nt, Artificial Sequence
  Description of Artificial Sequence: Synthetic oligonucleotide
  Sense strand starting at position 3561 of SEQ ID NO: 914606
ggcugucaaccugaaauaa

SEQ ID NO: 1016925 - RNA, 19 nt, Artificial Sequence
  Description of Artificial Sequence: Synthetic oligonucleotide
  Antisense strand to SEQ ID NO: 1016924
uuauuucagguugacagcc

SEQ ID NO: 1016926 - RNA, 19 nt, Artificial Sequence
  Description of Artificial Sequence: Synthetic oligonucleotide
  Sense strand starting at position 3580 of SEQ ID NO: 914606
ccaaacaggucagaauuua

SEQ ID NO: 1016927 - RNA, 19 nt, Artificial Sequence
  Description of Artificial Sequence: Synthetic oligonucleotide
  Antisense strand to SEQ ID NO: 1016926
uaaauucugaccuguuugg

SEQ ID NO: 1016928 - RNA, 19 nt, Artificial Sequence
  Description of Artificial Sequence: Synthetic oligonucleotide
  Sense strand starting at position 3687 of SEQ ID NO: 914606
aacuguagauguuugggau

SEQ ID NO: 1016929 - RNA, 19 nt, Artificial Sequence
  Description of Artificial Sequence: Synthetic oligonucleotide
  Antisense strand to SEQ ID NO: 1016928
aucccaaacaucuacaguu

SEQ ID NO: 1016930 - RNA, 19 nt, Artificial Sequence
  Description of Artificial Sequence: Synthetic oligonucleotide
  Sense strand starting at position 3700 of SEQ ID NO: 914606
ugggaucauuuauguagac

SEQ ID NO: 1016931 - RNA, 19 nt, Artificial Sequence
  Description of Artificial Sequence: Synthetic oligonucleotide
  Antisense strand to SEQ ID NO: 1016930
gucuacauaaaugauccca

SEQ ID NO: 1016932 - RNA, 19 nt, Artificial Sequence
  Description of Artificial Sequence: Synthetic oligonucleotide
  Sense strand starting at position 3767 of SEQ ID NO: 914606
guuauaaucugaccagcug

SEQ ID NO: 1016933 - RNA, 19 nt, Artificial Sequence
  Description of Artificial Sequence: Synthetic oligonucleotide
  Antisense strand to SEQ ID NO: 1016932
cagcuggucagauuauaac

SEQ ID NO: 1016934 - RNA, 19 nt, Artificial Sequence
  Description of Artificial Sequence: Synthetic oligonucleotide
  Sense strand starting at position 3833 of SEQ ID NO: 914606
gauguaggagucuggucua

SEQ ID NO: 1016935 - RNA, 19 nt, Artificial Sequence
  Description of Artificial Sequence: Synthetic oligonucleotide
  Antisense strand to SEQ ID NO: 1016934
uagaccagacuccuacauc

SEQ ID NO: 1016936 - RNA, 19 nt, Artificial Sequence
  Description of Artificial Sequence: Synthetic oligonucleotide
  Sense strand starting at position 3836 of SEQ ID NO: 914606
guaggagucuggucuaagu

SEQ ID NO: 1016937 - RNA, 19 nt, Artificial Sequence
  Description of Artificial Sequence: Synthetic oligonucleotide
  Antisense strand to SEQ ID NO: 1016936
acuuagaccagacuccuac

SEQ ID NO: 1016938 - RNA, 19 nt, Artificial Sequence
  Description of Artificial Sequence: Synthetic oligonucleotide
  Sense strand starting at position 3838 of SEQ ID NO: 914606
aggagucuggucuaaguac

SEQ ID NO: 1016939 - RNA, 19 nt, Artificial Sequence
  Description of Artificial Sequence: Synthetic oligonucleotide
  Antisense strand to SEQ ID NO: 1016938
guacuuagaccagacuccu

SEQ ID NO: 1016940 - RNA, 19 nt, Artificial Sequence
  Description of Artificial Sequence: Synthetic oligonucleotide
  Sense strand starting at position 3846 of SEQ ID NO: 914606
ggucuaaguacgggauaau

SEQ ID NO: 1016941 - RNA, 19 nt, Artificial Sequence
  Description of Artificial Sequence: Synthetic oligonucleotide
  Antisense strand to SEQ ID NO: 1016940
auuaucccguacuuagacc

SEQ ID NO: 1016942 - RNA, 19 nt, Artificial Sequence
  Description of Artificial Sequence: Synthetic oligonucleotide
  Sense strand starting at position 3847 of SEQ ID NO: 914606
gucuaaguacgggauaaua

SEQ ID NO: 1016943 - RNA, 19 nt, Artificial Sequence
  Description of Artificial Sequence: Synthetic oligonucleotide
  Antisense strand to SEQ ID NO: 1016942
uauuaucccguacuuagac

SEQ ID NO: 1016944 - RNA, 19 nt, Artificial Sequence
  Description of Artificial Sequence: Synthetic oligonucleotide
  Sense strand starting at position 121 of SEQ ID NO: 914607
uggugaaugagucagacuu

SEQ ID NO: 1016945 - RNA, 19 nt, Artificial Sequence
  Description of Artificial Sequence: Synthetic oligonucleotide
  Antisense strand to SEQ ID NO: 1016944
aagucugacucauucacca

SEQ ID NO: 1016946 - RNA, 19 nt, Artificial Sequence
  Description of Artificial Sequence: Synthetic oligonucleotide
  Sense strand starting at position 131 of SEQ ID NO: 914607
gucagacuuacgcagcuaa

SEQ ID NO: 1016947 - RNA, 19 nt, Artificial Sequence
  Description of Artificial Sequence: Synthetic oligonucleotide
  Antisense strand to SEQ ID NO: 1016946
uuagcugcguaagucugac

SEQ ID NO: 1016948 - RNA, 19 nt, Artificial Sequence
  Description of Artificial Sequence: Synthetic oligonucleotide
  Sense strand starting at position 350 of SEQ ID NO: 914607
uucagugaagguugugaca

SEQ ID NO: 1016949 - RNA, 19 nt, Artificial Sequence
  Description of Artificial Sequence: Synthetic oligonucleotide
  Antisense strand to SEQ ID NO: 1016948
ugucacaaccuucacugaa

SEQ ID NO: 1016950 - RNA, 19 nt, Artificial Sequence
  Description of Artificial Sequence: Synthetic oligonucleotide
  Sense strand starting at position 408 of SEQ ID NO: 914607
gacagcauuucugcaguuu

SEQ ID NO: 1016951 - RNA, 19 nt, Artificial Sequence
  Description of Artificial Sequence: Synthetic oligonucleotide
  Antisense strand to SEQ ID NO: 1016950
aaacugcagaaaugcuguc

SEQ ID NO: 1016952 - RNA, 19 nt, Artificial Sequence
  Description of Artificial Sequence: Synthetic oligonucleotide
  Sense strand starting at position 499 of SEQ ID NO: 914607
agagcuucuuaauuagaaa

SEQ ID NO: 1016953 - RNA, 19 nt, Artificial Sequence
  Description of Artificial Sequence: Synthetic oligonucleotide
  Antisense strand to SEQ ID NO: 1016952
uuucuaauuaagaagcucu

SEQ ID NO: 1016954 - RNA, 19 nt, Artificial Sequence
  Description of Artificial Sequence: Synthetic oligonucleotide
  Sense strand starting at position 541 of SEQ ID NO: 914607
agugcagcuggagaaauaa

SEQ ID NO: 1016955 - RNA, 19 nt, Artificial Sequence
  Description of Artificial Sequence: Synthetic oligonucleotide
  Antisense strand to SEQ ID NO: 1016954
uuauuucuccagcugcacu

SEQ ID NO: 1016956 - RNA, 19 nt, Artificial Sequence
  Description of Artificial Sequence: Synthetic oligonucleotide
  Sense strand starting at position 583 of SEQ ID NO: 914607
aaugguuauuucuggagaa

SEQ ID NO: 1016957 - RNA, 19 nt, Artificial Sequence
  Description of Artificial Sequence: Synthetic oligonucleotide
  Antisense strand to SEQ ID NO: 1016956
uucuccagaaauaaccauu

SEQ ID NO: 1016958 - RNA, 19 nt, Artificial Sequence
  Description of Artificial Sequence: Synthetic oligonucleotide
  Sense strand starting at position 584 of SEQ ID NO: 914607
augguuauuucuggagaaa

SEQ ID NO: 1016959 - RNA, 19 nt, Artificial Sequence
  Description of Artificial Sequence: Synthetic oligonucleotide
  Antisense strand to SEQ ID NO: 1016958
uuucuccagaaauaaccau

SEQ ID NO: 1016960 - RNA, 19 nt, Artificial Sequence
  Description of Artificial Sequence: Synthetic oligonucleotide
  Sense strand starting at position 655 of SEQ ID NO: 914607
gcucauauuuaagaagaca

SEQ ID NO: 1016961 - RNA, 19 nt, Artificial Sequence
  Description of Artificial Sequence: Synthetic oligonucleotide
  Antisense strand to SEQ ID NO: 1016960
ugucuucuuaaauaugagc

SEQ ID NO: 1016962 - RNA, 19 nt, Artificial Sequence
  Description of Artificial Sequence: Synthetic oligonucleotide
  Sense strand starting at position 810 of SEQ ID NO: 914607
ccuggaugcugggcuaaga

SEQ ID NO: 1016963 - RNA, 19 nt, Artificial Sequence
  Description of Artificial Sequence: Synthetic oligonucleotide
  Antisense strand to SEQ ID NO: 1016962
ucuuagcccagcauccagg

SEQ ID NO: 1016964 - RNA, 19 nt, Artificial Sequence
  Description of Artificial Sequence: Synthetic oligonucleotide
  Sense strand starting at position 862 of SEQ ID NO: 914607
agacguauggagcaaaucu

SEQ ID NO: 1016965 - RNA, 19 nt, Artificial Sequence
  Description of Artificial Sequence: Synthetic oligonucleotide
  Antisense strand to SEQ ID NO: 1016964
agauuugcuccauacgucu

SEQ ID NO: 1016966 - RNA, 19 nt, Artificial Sequence
  Description of Artificial Sequence: Synthetic oligonucleotide
  Sense strand starting at position 1113 of SEQ ID NO: 914607
ccauguccuugauugcaga

SEQ ID NO: 1016967 - RNA, 19 nt, Artificial Sequence
  Description of Artificial Sequence: Synthetic oligonucleotide
  Antisense strand to SEQ ID NO: 1016966
ucugcaaucaaggacaugg

SEQ ID NO: 1016968 - RNA, 19 nt, Artificial Sequence
  Description of Artificial Sequence: Synthetic oligonucleotide
  Sense strand starting at position 1262 of SEQ ID NO: 914607
ugguuagcuccugauauag

SEQ ID NO: 1016969 - RNA, 19 nt, Artificial Sequence
  Description of Artificial Sequence: Synthetic oligonucleotide
  Antisense strand to SEQ ID NO: 1016968
cuauaucaggagcuaacca

SEQ ID NO: 1016970 - RNA, 19 nt, Artificial Sequence
  Description of Artificial Sequence: Synthetic oligonucleotide
  Sense strand starting at position 1273 of SEQ ID NO: 914607
ugauauagaugagcacuuu

SEQ ID NO: 1016971 - RNA, 19 nt, Artificial Sequence
  Description of Artificial Sequence: Synthetic oligonucleotide
  Antisense strand to SEQ ID NO: 1016970
aaagugcucaucuauauca

SEQ ID NO: 1016972 - RNA, 19 nt, Artificial Sequence
  Description of Artificial Sequence: Synthetic oligonucleotide
  Sense strand starting at position 1293 of SEQ ID NO: 914607
gccaaauauccagggauuc

SEQ ID NO: 1016973 - RNA, 19 nt, Artificial Sequence
  Description of Artificial Sequence: Synthetic oligonucleotide
  Antisense strand to SEQ ID NO: 1016972
gaaucccuggauauuuggc

SEQ ID NO: 1016974 - RNA, 19 nt, Artificial Sequence
  Description of Artificial Sequence: Synthetic oligonucleotide
  Sense strand starting at position 1371 of SEQ ID NO: 914607
ggaggugauuucugaauuu

SEQ ID NO: 1016975 - RNA, 19 nt, Artificial Sequence
  Description of Artificial Sequence: Synthetic oligonucleotide
  Antisense strand to SEQ ID NO: 1016974
aaauucagaaaucaccucc

SEQ ID NO: 1016976 - RNA, 19 nt, Artificial Sequence
  Description of Artificial Sequence: Synthetic oligonucleotide
  Sense strand starting at position 1632 of SEQ ID NO: 914607
gcaggacaguuaccucauu

SEQ ID NO: 1016977 - RNA, 19 nt, Artificial Sequence
  Description of Artificial Sequence: Synthetic oligonucleotide
  Antisense strand to SEQ ID NO: 1016976
aaugagguaacuguccugc

SEQ ID NO: 1016978 - RNA, 19 nt, Artificial Sequence
  Description of Artificial Sequence: Synthetic oligonucleotide
  Sense strand starting at position 2136 of SEQ ID NO: 914607
ggcaaacgugcugcuguau

SEQ ID NO: 1016979 - RNA, 19 nt, Artificial Sequence
  Description of Artificial Sequence: Synthetic oligonucleotide
  Antisense strand to SEQ ID NO: 1016978
auacagcagcacguuugcc

SEQ ID NO: 1016980 - RNA, 19 nt, Artificial Sequence
  Description of Artificial Sequence: Synthetic oligonucleotide
  Sense strand starting at position 2570 of SEQ ID NO: 914607
uuaguuauugaugguauca

SEQ ID NO: 1016981 - RNA, 19 nt, Artificial Sequence
  Description of Artificial Sequence: Synthetic oligonucleotide
  Antisense strand to SEQ ID NO: 1016980
ugauaccaucaauaacuaa

SEQ ID NO: 1016982 - RNA, 19 nt, Artificial Sequence
  Description of Artificial Sequence: Synthetic oligonucleotide
  Sense strand starting at position 2597 of SEQ ID NO: 914607
ucaauagaacagugcuaaa

SEQ ID NO: 1016983 - RNA, 19 nt, Artificial Sequence
  Description of Artificial Sequence: Synthetic oligonucleotide
  Antisense strand to SEQ ID NO: 1016982
uuuagcacuguucuauuga

SEQ ID NO: 1016984 - RNA, 19 nt, Artificial Sequence
  Description of Artificial Sequence: Synthetic oligonucleotide
  Sense strand starting at position 2851 of SEQ ID NO: 914607
agucauagccuugauuauu

SEQ ID NO: 1016985 - RNA, 19 nt, Artificial Sequence
  Description of Artificial Sequence: Synthetic oligonucleotide
  Antisense strand to SEQ ID NO: 1016984
aauaaucaaggcuaugacu

SEQ ID NO: 1016986 - RNA, 19 nt, Artificial Sequence
  Description of Artificial Sequence: Synthetic oligonucleotide
  Sense strand starting at position 3125 of SEQ ID NO: 914607
auuaguaccuuagccagaa

SEQ ID NO: 1016987 - RNA, 19 nt, Artificial Sequence
  Description of Artificial Sequence: Synthetic oligonucleotide
  Antisense strand to SEQ ID NO: 1016986
uucuggcuaagguacuaau

SEQ ID NO: 1016988 - RNA, 19 nt, Artificial Sequence
  Description of Artificial Sequence: Synthetic oligonucleotide
  Sense strand starting at position 3126 of SEQ ID NO: 914607
uuaguaccuuagccagaaa

SEQ ID NO: 1016989 - RNA, 19 nt, Artificial Sequence
  Description of Artificial Sequence: Synthetic oligonucleotide
  Antisense strand to SEQ ID NO: 1016988
uuucuggcuaagguacuaa

SEQ ID NO: 1016990 - RNA, 19 nt, Artificial Sequence
  Description of Artificial Sequence: Synthetic oligonucleotide
  Sense strand starting at position 3226 of SEQ ID NO: 914607
agcaauaucuugucugaau

SEQ ID NO: 1016991 - RNA, 19 nt, Artificial Sequence
  Description of Artificial Sequence: Synthetic oligonucleotide
  Antisense strand to SEQ ID NO: 1016990
auucagacaagauauugcu

SEQ ID NO: 1016992 - RNA, 19 nt, Artificial Sequence
  Description of Artificial Sequence: Synthetic oligonucleotide
  Sense strand starting at position 3227 of SEQ ID NO: 914607
gcaauaucuugucugaaug

SEQ ID NO: 1016993 - RNA, 19 nt, Artificial Sequence
  Description of Artificial Sequence: Synthetic oligonucleotide
  Antisense strand to SEQ ID NO: 1016992
cauucagacaagauauugc

SEQ ID NO: 1016994 - RNA, 19 nt, Artificial Sequence
  Description of Artificial Sequence: Synthetic oligonucleotide
  Sense strand starting at position 3531 of SEQ ID NO: 914607
gucacuaacccaugucaau

SEQ ID NO: 1016995 - RNA, 19 nt, Artificial Sequence
  Description of Artificial Sequence: Synthetic oligonucleotide
  Antisense strand to SEQ ID NO: 1016994
auugacauggguuagugac

SEQ ID NO: 1016996 - RNA, 19 nt, Artificial Sequence
  Description of Artificial Sequence: Synthetic oligonucleotide
  Sense strand starting at position 3575 of SEQ ID NO: 914607
gcaugaaauuuccaacagc

SEQ ID NO: 1016997 - RNA, 19 nt, Artificial Sequence
  Description of Artificial Sequence: Synthetic oligonucleotide
  Antisense strand to SEQ ID NO: 1016996
gcuguuggaaauuucaugc

SEQ ID NO: 1016998 - RNA, 19 nt, Artificial Sequence
  Description of Artificial Sequence: Synthetic oligonucleotide
  Sense strand starting at position 3612 of SEQ ID NO: 914607
caucuacgugcauaaugau

SEQ ID NO: 1016999 - RNA, 19 nt, Artificial Sequence
  Description of Artificial Sequence: Synthetic oligonucleotide
  Antisense strand to SEQ ID NO: 1016998
aucauuaugcacguagaug

SEQ ID NO: 1017000 - RNA, 19 nt, Artificial Sequence
  Description of Artificial Sequence: Synthetic oligonucleotide
  Sense strand starting at position 3667 of SEQ ID NO: 914607
agaggauccugauugguug

SEQ ID NO: 1017001 - RNA, 19 nt, Artificial Sequence
  Description of Artificial Sequence: Synthetic oligonucleotide
  Antisense strand to SEQ ID NO: 1017000
caaccaaucaggauccucu

SEQ ID NO: 1017002 - RNA, 19 nt, Artificial Sequence
  Description of Artificial Sequence: Synthetic oligonucleotide
  Sense strand starting at position 3668 of SEQ ID NO: 914607
gaggauccugauugguuga

SEQ ID NO: 1017003 - RNA, 19 nt, Artificial Sequence
  Description of Artificial Sequence: Synthetic oligonucleotide
  Antisense strand to SEQ ID NO: 1017002
ucaaccaaucaggauccuc

SEQ ID NO: 1017004 - RNA, 19 nt, Artificial Sequence
  Description of Artificial Sequence: Synthetic oligonucleotide
  Sense strand starting at position 3670 of SEQ ID NO: 914607
ggauccugauugguugaga

SEQ ID NO: 1017005 - RNA, 19 nt, Artificial Sequence
  Description of Artificial Sequence: Synthetic oligonucleotide
  Antisense strand to SEQ ID NO: 1017004
ucucaaccaaucaggaucc

SEQ ID NO: 1017006 - RNA, 19 nt, Artificial Sequence
  Description of Artificial Sequence: Synthetic oligonucleotide
  Sense strand starting at position 3671 of SEQ ID NO: 914607
gauccugauugguugagag

SEQ ID NO: 1017007 - RNA, 19 nt, Artificial Sequence
  Description of Artificial Sequence: Synthetic oligonucleotide
  Antisense strand to SEQ ID NO: 1017006
cucucaaccaaucaggauc

SEQ ID NO: 1017008 - RNA, 19 nt, Artificial Sequence
  Description of Artificial Sequence: Synthetic oligonucleotide
  Sense strand starting at position 3736 of SEQ ID NO: 914607
ggagauccugcugacaguu

SEQ ID NO: 1017009 - RNA, 19 nt, Artificial Sequence
  Description of Artificial Sequence: Synthetic oligonucleotide
  Antisense strand to SEQ ID NO: 1017008
aacugucagcaggaucucc

SEQ ID NO: 1017010 - RNA, 19 nt, Artificial Sequence
  Description of Artificial Sequence: Synthetic oligonucleotide
  Sense strand starting at position 3748 of SEQ ID NO: 914607
gacaguuaucuaugccaga

SEQ ID NO: 1017011 - RNA, 19 nt, Artificial Sequence
  Description of Artificial Sequence: Synthetic oligonucleotide
  Antisense strand to SEQ ID NO: 1017010
ucuggcauagauaacuguc

SEQ ID NO: 1017012 - RNA, 19 nt, Artificial Sequence
  Description of Artificial Sequence: Synthetic oligonucleotide
  Sense strand starting at position 3749 of SEQ ID NO: 914607
acaguuaucuaugccagag

SEQ ID NO: 1017013 - RNA, 19 nt, Artificial Sequence
  Description of Artificial Sequence: Synthetic oligonucleotide
  Antisense strand to SEQ ID NO: 1017012
cucuggcauagauaacugu

SEQ ID NO: 1017014 - RNA, 19 nt, Artificial Sequence
  Description of Artificial Sequence: Synthetic oligonucleotide
  Sense strand starting at position 3753 of SEQ ID NO: 914607
uuaucuaugccagagguca

SEQ ID NO: 1017015 - RNA, 19 nt, Artificial Sequence
  Description of Artificial Sequence: Synthetic oligonucleotide
  Antisense strand to SEQ ID NO: 1017014
ugaccucuggcauagauaa

SEQ ID NO: 1017016 - RNA, 19 nt, Artificial Sequence
  Description of Artificial Sequence: Synthetic oligonucleotide
  Sense strand starting at position 3783 of SEQ ID NO: 914607
acaagucuuugaucaaagu

SEQ ID NO: 1017017 - RNA, 19 nt, Artificial Sequence
  Description of Artificial Sequence: Synthetic oligonucleotide
  Antisense strand to SEQ ID NO: 1017016
acuuugaucaaagacuugu

SEQ ID NO: 1017018 - RNA, 19 nt, Artificial Sequence
  Description of Artificial Sequence: Synthetic oligonucleotide
  Sense strand starting at position 3812 of SEQ ID NO: 914607
agcucaguguuucuggaaa

SEQ ID NO: 1017019 - RNA, 19 nt, Artificial Sequence
  Description of Artificial Sequence: Synthetic oligonucleotide
  Antisense strand to SEQ ID NO: 1017018
uuuccagaaacacugagcu

SEQ ID NO: 1017020 - RNA, 19 nt, Artificial Sequence
  Description of Artificial Sequence: Synthetic oligonucleotide
  Sense strand starting at position 3891 of SEQ ID NO: 914607
uggcccaagucccuuauau

SEQ ID NO: 1017021 - RNA, 19 nt, Artificial Sequence
  Description of Artificial Sequence: Synthetic oligonucleotide
  Antisense strand to SEQ ID NO: 1017020
auauaagggacuugggcca

SEQ ID NO: 1017022 - RNA, 19 nt, Artificial Sequence
  Description of Artificial Sequence: Synthetic oligonucleotide
  Sense strand starting at position 3953 of SEQ ID NO: 914607
ucagcaagucaguauggaa

SEQ ID NO: 1017023 - RNA, 19 nt, Artificial Sequence
  Description of Artificial Sequence: Synthetic oligonucleotide
  Antisense strand to SEQ ID NO: 1017022
uuccauacugacuugcuga

SEQ ID NO: 1017024 - RNA, 19 nt, Artificial Sequence
  Description of Artificial Sequence: Synthetic oligonucleotide
  Sense strand starting at position 236 of SEQ ID NO: 914608
cggcauguauaauccaaag

SEQ ID NO: 1017025 - RNA, 19 nt, Artificial Sequence
  Description of Artificial Sequence: Synthetic oligonucleotide
  Antisense strand to SEQ ID NO: 1017024
cuuuggauuauacaugccg

SEQ ID NO: 1017026 - RNA, 19 nt, Artificial Sequence
  Description of Artificial Sequence: Synthetic oligonucleotide
  Sense strand starting at position 254 of SEQ ID NO: 914608
gacagaaauuuguauauag

SEQ ID NO: 1017027 - RNA, 19 nt, Artificial Sequence
  Description of Artificial Sequence: Synthetic oligonucleotide
  Antisense strand to SEQ ID NO: 1017026
cuauauacaaauuucuguc

SEQ ID NO: 1017028 - RNA, 19 nt, Artificial Sequence
  Description of Artificial Sequence: Synthetic oligonucleotide
  Sense strand starting at position 272 of SEQ ID NO: 914608
gcacuuuaagcuuacgaag

SEQ ID NO: 1017029 - RNA, 19 nt, Artificial Sequence
  Description of Artificial Sequence: Synthetic oligonucleotide
  Antisense strand to SEQ ID NO: 1017028
cuucguaagcuuaaagugc

SEQ ID NO: 1017030 - RNA, 19 nt, Artificial Sequence
  Description of Artificial Sequence: Synthetic oligonucleotide
  Sense strand starting at position 312 of SEQ ID NO: 914608
auuugaccuuugcaguaaa

SEQ ID NO: 1017031 - RNA, 19 nt, Artificial Sequence
  Description of Artificial Sequence: Synthetic oligonucleotide
  Antisense strand to SEQ ID NO: 1017030
uuuacugcaaaggucaaau

SEQ ID NO: 1017032 - RNA, 19 nt, Artificial Sequence
  Description of Artificial Sequence: Synthetic oligonucleotide
  Sense strand starting at position 315 of SEQ ID NO: 914608
ugaccuuugcaguaaauaa

SEQ ID NO: 1017033 - RNA, 19 nt, Artificial Sequence
  Description of Artificial Sequence: Synthetic oligonucleotide
  Antisense strand to SEQ ID NO: 1017032
uuauuuacugcaaagguca

SEQ ID NO: 1017034 - RNA, 19 nt, Artificial Sequence
  Description of Artificial Sequence: Synthetic oligonucleotide
  Sense strand starting at position 322 of SEQ ID NO: 914608
ugcaguaaauaaucuuuga

SEQ ID NO: 1017035 - RNA, 19 nt, Artificial Sequence
  Description of Artificial Sequence: Synthetic oligonucleotide
  Antisense strand to SEQ ID NO: 1017034
ucaaagauuauuuacugca

SEQ ID NO: 1017036 - RNA, 19 nt, Artificial Sequence
  Description of Artificial Sequence: Synthetic oligonucleotide
  Sense strand starting at position 656 of SEQ ID NO: 914608
cgcgccucgccaguauuau

SEQ ID NO: 1017037 - RNA, 19 nt, Artificial Sequence
  Description of Artificial Sequence: Synthetic oligonucleotide
  Antisense strand to SEQ ID NO: 1017036
auaauacuggcgaggcgcg

SEQ ID NO: 1017038 - RNA, 19 nt, Artificial Sequence
  Description of Artificial Sequence: Synthetic oligonucleotide
  Sense strand starting at position 666 of SEQ ID NO: 914608
caguauuaucccggccuga

SEQ ID NO: 1017039 - RNA, 19 nt, Artificial Sequence
  Description of Artificial Sequence: Synthetic oligonucleotide
  Antisense strand to SEQ ID NO: 1017038
ucaggccgggauaauacug

SEQ ID NO: 1017040 - RNA, 19 nt, Artificial Sequence
  Description of Artificial Sequence: Synthetic oligonucleotide
  Sense strand starting at position 958 of SEQ ID NO: 914608
uucugaaucugccugcauu

SEQ ID NO: 1017041 - RNA, 19 nt, Artificial Sequence
  Description of Artificial Sequence: Synthetic oligonucleotide
  Antisense strand to SEQ ID NO: 1017040
aaugcaggcagauucagaa

SEQ ID NO: 1017042 - RNA, 19 nt, Artificial Sequence
  Description of Artificial Sequence: Synthetic oligonucleotide
  Sense strand starting at position 973 of SEQ ID NO: 914608
cauugagucuuugccagac

SEQ ID NO: 1017043 - RNA, 19 nt, Artificial Sequence
  Description of Artificial Sequence: Synthetic oligonucleotide
  Antisense strand to SEQ ID NO: 1017042
gucuggcaaagacucaaug

SEQ ID NO: 1017044 - RNA, 19 nt, Artificial Sequence
  Description of Artificial Sequence: Synthetic oligonucleotide
  Sense strand starting at position 977 of SEQ ID NO: 914608
gagucuuugccagacaacg

SEQ ID NO: 1017045 - RNA, 19 nt, Artificial Sequence
  Description of Artificial Sequence: Synthetic oligonucleotide
  Antisense strand to SEQ ID NO: 1017044
cguugucuggcaaagacuc

SEQ ID NO: 1017046 - RNA, 19 nt, Artificial Sequence
  Description of Artificial Sequence: Synthetic oligonucleotide
  Sense strand starting at position 1006 of SEQ ID NO: 914608
aagugauaaugguaaugau

SEQ ID NO: 1017047 - RNA, 19 nt, Artificial Sequence
  Description of Artificial Sequence: Synthetic oligonucleotide
  Antisense strand to SEQ ID NO: 1017046
aucauuaccauuaucacuu

SEQ ID NO: 1017048 - RNA, 19 nt, Artificial Sequence
  Description of Artificial Sequence: Synthetic oligonucleotide
  Sense strand starting at position 1062 of SEQ ID NO: 914608
ugucgcaagugcuuuaaau

SEQ ID NO: 1017049 - RNA, 19 nt, Artificial Sequence
  Description of Artificial Sequence: Synthetic oligonucleotide
  Antisense strand to SEQ ID NO: 1017048
auuuaaagcacuugcgaca

SEQ ID NO: 1017050 - RNA, 19 nt, Artificial Sequence
  Description of Artificial Sequence: Synthetic oligonucleotide
  Sense strand starting at position 1063 of SEQ ID NO: 914608
gucgcaagugcuuuaaauu

SEQ ID NO: 1017051 - RNA, 19 nt, Artificial Sequence
  Description of Artificial Sequence: Synthetic oligonucleotide
  Antisense strand to SEQ ID NO: 1017050
aauuuaaagcacuugcgac

SEQ ID NO: 1017052 - RNA, 19 nt, Artificial Sequence
  Description of Artificial Sequence: Synthetic oligonucleotide
  Sense strand starting at position 1064 of SEQ ID NO: 914608
ucgcaagugcuuuaaauuc

SEQ ID NO: 1017053 - RNA, 19 nt, Artificial Sequence
  Description of Artificial Sequence: Synthetic oligonucleotide
  Antisense strand to SEQ ID NO: 1017052
gaauuuaaagcacuugcga

SEQ ID NO: 1017054 - RNA, 19 nt, Artificial Sequence
  Description of Artificial Sequence: Synthetic oligonucleotide
  Sense strand starting at position 1159 of SEQ ID NO: 914608
uggagugcuuuggcgagau

SEQ ID NO: 1017055 - RNA, 19 nt, Artificial Sequence
  Description of Artificial Sequence: Synthetic oligonucleotide
  Antisense strand to SEQ ID NO: 1017054
aucucgccaaagcacucca

SEQ ID NO: 1017056 - RNA, 19 nt, Artificial Sequence
  Description of Artificial Sequence: Synthetic oligonucleotide
  Sense strand starting at position 1161 of SEQ ID NO: 914608
gagugcuuuggcgagaucu

SEQ ID NO: 1017057 - RNA, 19 nt, Artificial Sequence
  Description of Artificial Sequence: Synthetic oligonucleotide
  Antisense strand to SEQ ID NO: 1017056
agaucucgccaaagcacuc

SEQ ID NO: 1017058 - RNA, 19 nt, Artificial Sequence
  Description of Artificial Sequence: Synthetic oligonucleotide
  Sense strand starting at position 1567 of SEQ ID NO: 914608
cucucuaagcucugaaagu

SEQ ID NO: 1017059 - RNA, 19 nt, Artificial Sequence
  Description of Artificial Sequence: Synthetic oligonucleotide
  Antisense strand to SEQ ID NO: 1017058
acuuucagagcuuagagag

SEQ ID NO: 1017060 - RNA, 19 nt, Artificial Sequence
  Description of Artificial Sequence: Synthetic oligonucleotide
  Sense strand starting at position 1601 of SEQ ID NO: 914608
gcacacuaagaauguacaa

SEQ ID NO: 1017061 - RNA, 19 nt, Artificial Sequence
  Description of Artificial Sequence: Synthetic oligonucleotide
  Antisense strand to SEQ ID NO: 1017060
uuguacauucuuagugugc

SEQ ID NO: 1017062 - RNA, 19 nt, Artificial Sequence
  Description of Artificial Sequence: Synthetic oligonucleotide
  Sense strand starting at position 1628 of SEQ ID NO: 914608
gcgguuuggucuuugaaau

SEQ ID NO: 1017063 - RNA, 19 nt, Artificial Sequence
  Description of Artificial Sequence: Synthetic oligonucleotide
  Antisense strand to SEQ ID NO: 1017062
auuucaaagaccaaaccgc

SEQ ID NO: 1017064 - RNA, 19 nt, Artificial Sequence
  Description of Artificial Sequence: Synthetic oligonucleotide
  Sense strand starting at position 1629 of SEQ ID NO: 914608
cgguuuggucuuugaaauu

SEQ ID NO: 1017065 - RNA, 19 nt, Artificial Sequence
  Description of Artificial Sequence: Synthetic oligonucleotide
  Antisense strand to SEQ ID NO: 1017064
aauuucaaagaccaaaccg

SEQ ID NO: 1017066 - RNA, 19 nt, Artificial Sequence
  Description of Artificial Sequence: Synthetic oligonucleotide
  Sense strand starting at position 1693 of SEQ ID NO: 914608
ccaguuucgauguggauga

SEQ ID NO: 1017067 - RNA, 19 nt, Artificial Sequence
  Description of Artificial Sequence: Synthetic oligonucleotide
  Antisense strand to SEQ ID NO: 1017066
ucauccacaucgaaacugg

SEQ ID NO: 1017068 - RNA, 19 nt, Artificial Sequence
  Description of Artificial Sequence: Synthetic oligonucleotide
  Sense strand starting at position 1697 of SEQ ID NO: 914608
uuucgauguggaugaucaa

SEQ ID NO: 1017069 - RNA, 19 nt, Artificial Sequence
  Description of Artificial Sequence: Synthetic oligonucleotide
  Antisense strand to SEQ ID NO: 1017068
uugaucauccacaucgaaa

SEQ ID NO: 1017070 - RNA, 19 nt, Artificial Sequence
  Description of Artificial Sequence: Synthetic oligonucleotide
  Sense strand starting at position 1700 of SEQ ID NO: 914608
cgauguggaugaucaacuu

SEQ ID NO: 1017071 - RNA, 19 nt, Artificial Sequence
  Description of Artificial Sequence: Synthetic oligonucleotide
  Antisense strand to SEQ ID NO: 1017070
aaguugaucauccacaucg

SEQ ID NO: 1017072 - RNA, 19 nt, Artificial Sequence
  Description of Artificial Sequence: Synthetic oligonucleotide
  Sense strand starting at position 1707 of SEQ ID NO: 914608
gaugaucaacuuggguaau

SEQ ID NO: 1017073 - RNA, 19 nt, Artificial Sequence
  Description of Artificial Sequence: Synthetic oligonucleotide
  Antisense strand to SEQ ID NO: 1017072
auuacccaaguugaucauc

SEQ ID NO: 1017074 - RNA, 19 nt, Artificial Sequence
  Description of Artificial Sequence: Synthetic oligonucleotide
  Sense strand starting at position 1708 of SEQ ID NO: 914608
augaucaacuuggguaaua

SEQ ID NO: 1017075 - RNA, 19 nt, Artificial Sequence
  Description of Artificial Sequence: Synthetic oligonucleotide
  Antisense strand to SEQ ID NO: 1017074
uauuacccaaguugaucau

SEQ ID NO: 1017076 - RNA, 19 nt, Artificial Sequence
  Description of Artificial Sequence: Synthetic oligonucleotide
  Sense strand starting at position 1709 of SEQ ID NO: 914608
ugaucaacuuggguaauau

SEQ ID NO: 1017077 - RNA, 19 nt, Artificial Sequence
  Description of Artificial Sequence: Synthetic oligonucleotide
  Antisense strand to SEQ ID NO: 1017076
auauuacccaaguugauca

SEQ ID NO: 1017078 - RNA, 19 nt, Artificial Sequence
  Description of Artificial Sequence: Synthetic oligonucleotide
  Sense strand starting at position 3274 of SEQ ID NO: 914608
cgcuuugcuccuuugagca

SEQ ID NO: 1017079 - RNA, 19 nt, Artificial Sequence
  Description of Artificial Sequence: Synthetic oligonucleotide
  Antisense strand to SEQ ID NO: 1017078
ugcucaaaggagcaaagcg

SEQ ID NO: 1017080 - RNA, 19 nt, Artificial Sequence
  Description of Artificial Sequence: Synthetic oligonucleotide
  Sense strand starting at position 3322 of SEQ ID NO: 914608
cagcaaauucuacagguga

SEQ ID NO: 1017081 - RNA, 19 nt, Artificial Sequence
  Description of Artificial Sequence: Synthetic oligonucleotide
  Antisense strand to SEQ ID NO: 1017080
ucaccuguagaauuugcug

SEQ ID NO: 1017082 - RNA, 19 nt, Artificial Sequence
  Description of Artificial Sequence: Synthetic oligonucleotide
  Sense strand starting at position 3337 of SEQ ID NO: 914608
gugacugaaaugugucugu

SEQ ID NO: 1017083 - RNA, 19 nt, Artificial Sequence
  Description of Artificial Sequence: Synthetic oligonucleotide
  Antisense strand to SEQ ID NO: 1017082
acagacacauuucagucac

SEQ ID NO: 1017084 - RNA, 19 nt, Artificial Sequence
  Description of Artificial Sequence: Synthetic oligonucleotide
  Sense strand starting at position 3341 of SEQ ID NO: 914608
cugaaaugugucuguugca

SEQ ID NO: 1017085 - RNA, 19 nt, Artificial Sequence
  Description of Artificial Sequence: Synthetic oligonucleotide
  Antisense strand to SEQ ID NO: 1017084
ugcaacagacacauuucag

SEQ ID NO: 1017086 - RNA, 19 nt, Artificial Sequence
  Description of Artificial Sequence: Synthetic oligonucleotide
  Sense strand starting at position 3342 of SEQ ID NO: 914608
ugaaaugugucuguugcag

SEQ ID NO: 1017087 - RNA, 19 nt, Artificial Sequence
  Description of Artificial Sequence: Synthetic oligonucleotide
  Antisense strand to SEQ ID NO: 1017086
cugcaacagacacauuuca

SEQ ID NO: 1017088 - RNA, 19 nt, Artificial Sequence
  Description of Artificial Sequence: Synthetic oligonucleotide
  Sense strand starting at position 3348 of SEQ ID NO: 914608
gugucuguugcagugcaaa

SEQ ID NO: 1017089 - RNA, 19 nt, Artificial Sequence
  Description of Artificial Sequence: Synthetic oligonucleotide
  Antisense strand to SEQ ID NO: 1017088
uuugcacugcaacagacac

SEQ ID NO: 1017090 - RNA, 19 nt, Artificial Sequence
  Description of Artificial Sequence: Synthetic oligonucleotide
  Sense strand starting at position 3410 of SEQ ID NO: 914608
gggacagagaccugucauu

SEQ ID NO: 1017091 - RNA, 19 nt, Artificial Sequence
  Description of Artificial Sequence: Synthetic oligonucleotide
  Antisense strand to SEQ ID NO: 1017090
aaugacaggucucuguccc

SEQ ID NO: 1017092 - RNA, 19 nt, Artificial Sequence
  Description of Artificial Sequence: Synthetic oligonucleotide
  Sense strand starting at position 3415 of SEQ ID NO: 914608
agagaccugucauuaccuu

SEQ ID NO: 1017093 - RNA, 19 nt, Artificial Sequence
  Description of Artificial Sequence: Synthetic oligonucleotide
  Antisense strand to SEQ ID NO: 1017092
aagguaaugacaggucucu

SEQ ID NO: 1017094 - RNA, 19 nt, Artificial Sequence
  Description of Artificial Sequence: Synthetic oligonucleotide
  Sense strand starting at position 3422 of SEQ ID NO: 914608
ugucauuaccuuugggaga

SEQ ID NO: 1017095 - RNA, 19 nt, Artificial Sequence
  Description of Artificial Sequence: Synthetic oligonucleotide
  Antisense strand to SEQ ID NO: 1017094
ucucccaaagguaaugaca

SEQ ID NO: 1017096 - RNA, 19 nt, Artificial Sequence
  Description of Artificial Sequence: Synthetic oligonucleotide
  Sense strand starting at position 3792 of SEQ ID NO: 914608
ugaguaagcuguuuccucu

SEQ ID NO: 1017097 - RNA, 19 nt, Artificial Sequence
  Description of Artificial Sequence: Synthetic oligonucleotide
  Antisense strand to SEQ ID NO: 1017096
agaggaaacagcuuacuca

SEQ ID NO: 1017098 - RNA, 19 nt, Artificial Sequence
  Description of Artificial Sequence: Synthetic oligonucleotide
  Sense strand starting at position 3798 of SEQ ID NO: 914608
agcuguuuccucuaccuca

SEQ ID NO: 1017099 - RNA, 19 nt, Artificial Sequence
  Description of Artificial Sequence: Synthetic oligonucleotide
  Antisense strand to SEQ ID NO: 1017098
ugagguagaggaaacagcu

SEQ ID NO: 1017100 - RNA, 19 nt, Artificial Sequence
  Description of Artificial Sequence: Synthetic oligonucleotide
  Sense strand starting at position 3882 of SEQ ID NO: 914608
gugggaagugcucagcuau

SEQ ID NO: 1017101 - RNA, 19 nt, Artificial Sequence
  Description of Artificial Sequence: Synthetic oligonucleotide
  Antisense strand to SEQ ID NO: 1017100
auagcugagcacuucccac

SEQ ID NO: 1017102 - RNA, 19 nt, Artificial Sequence
  Description of Artificial Sequence: Synthetic oligonucleotide
  Sense strand starting at position 3888 of SEQ ID NO: 914608
agugcucagcuauaccaau

SEQ ID NO: 1017103 - RNA, 19 nt, Artificial Sequence
  Description of Artificial Sequence: Synthetic oligonucleotide
  Antisense strand to SEQ ID NO: 1017102
auugguauagcugagcacu

SEQ ID NO: 1017104 - RNA, 19 nt, Artificial Sequence
  Description of Artificial Sequence: Synthetic oligonucleotide
  Sense strand starting at position 269 of SEQ ID NO: 914609
aguggcaagaagugauauu

SEQ ID NO: 1017105 - RNA, 19 nt, Artificial Sequence
  Description of Artificial Sequence: Synthetic oligonucleotide
  Antisense strand to SEQ ID NO: 1017104
aauaucacuucuugccacu

SEQ ID NO: 1017106 - RNA, 19 nt, Artificial Sequence
  Description of Artificial Sequence: Synthetic oligonucleotide
  Sense strand starting at position 278 of SEQ ID NO: 914609
aagugauauuccgaaauag

SEQ ID NO: 1017107 - RNA, 19 nt, Artificial Sequence
  Description of Artificial Sequence: Synthetic oligonucleotide
  Antisense strand to SEQ ID NO: 1017106
cuauuucggaauaucacuu

SEQ ID NO: 1017108 - RNA, 19 nt, Artificial Sequence
  Description of Artificial Sequence: Synthetic oligonucleotide
  Sense strand starting at position 295 of SEQ ID NO: 914609
agcaauugcuuucuagaac

SEQ ID NO: 1017109 - RNA, 19 nt, Artificial Sequence
  Description of Artificial Sequence: Synthetic oligonucleotide
  Antisense strand to SEQ ID NO: 1017108
guucuagaaagcaauugcu

SEQ ID NO: 1017110 - RNA, 19 nt, Artificial Sequence
  Description of Artificial Sequence: Synthetic oligonucleotide
  Sense strand starting at position 391 of SEQ ID NO: 914609
ccaaguguacuaugucauu

SEQ ID NO: 1017111 - RNA, 19 nt, Artificial Sequence
  Description of Artificial Sequence: Synthetic oligonucleotide
  Antisense strand to SEQ ID NO: 1017110
aaugacauaguacacuugg

SEQ ID NO: 1017112 - RNA, 19 nt, Artificial Sequence
  Description of Artificial Sequence: Synthetic oligonucleotide
  Sense strand starting at position 420 of SEQ ID NO: 914609
auagauuugugccugcuca

SEQ ID NO: 1017113 - RNA, 19 nt, Artificial Sequence
  Description of Artificial Sequence: Synthetic oligonucleotide
  Antisense strand to SEQ ID NO: 1017112
ugagcaggcacaaaucuau

SEQ ID NO: 1017114 - RNA, 19 nt, Artificial Sequence
  Description of Artificial Sequence: Synthetic oligonucleotide
  Sense strand starting at position 421 of SEQ ID NO: 914609
uagauuugugccugcucag

SEQ ID NO: 1017115 - RNA, 19 nt, Artificial Sequence
  Description of Artificial Sequence: Synthetic oligonucleotide
  Antisense strand to SEQ ID NO: 1017114
cugagcaggcacaaaucua

SEQ ID NO: 1017116 - RNA, 19 nt, Artificial Sequence
  Description of Artificial Sequence: Synthetic oligonucleotide
  Sense strand starting at position 467 of SEQ ID NO: 914609
ugggaauccaaguguagaa

SEQ ID NO: 1017117 - RNA, 19 nt, Artificial Sequence
  Description of Artificial Sequence: Synthetic oligonucleotide
  Antisense strand to SEQ ID NO: 1017116
uucuacacuuggauuccca

SEQ ID NO: 1017118 - RNA, 19 nt, Artificial Sequence
  Description of Artificial Sequence: Synthetic oligonucleotide
  Sense strand starting at position 494 of SEQ ID NO: 914609
gcaagagcugcucaucuuu

SEQ ID NO: 1017119 - RNA, 19 nt, Artificial Sequence
  Description of Artificial Sequence: Synthetic oligonucleotide
  Antisense strand to SEQ ID NO: 1017118
aaagaugagcagcucuugc

SEQ ID NO: 1017120 - RNA, 19 nt, Artificial Sequence
  Description of Artificial Sequence: Synthetic oligonucleotide
  Sense strand starting at position 499 of SEQ ID NO: 914609
agcugcucaucuuugagaa

SEQ ID NO: 1017121 - RNA, 19 nt, Artificial Sequence
  Description of Artificial Sequence: Synthetic oligonucleotide
  Antisense strand to SEQ ID NO: 1017120
uucucaaagaugagcagcu

SEQ ID NO: 1017122 - RNA, 19 nt, Artificial Sequence
  Description of Artificial Sequence: Synthetic oligonucleotide
  Sense strand starting at position 500 of SEQ ID NO: 914609
gcugcucaucuuugagaaa

SEQ ID NO: 1017123 - RNA, 19 nt, Artificial Sequence
  Description of Artificial Sequence: Synthetic oligonucleotide
  Antisense strand to SEQ ID NO: 1017122
uuucucaaagaugagcagc

SEQ ID NO: 1017124 - RNA, 19 nt, Artificial Sequence
  Description of Artificial Sequence: Synthetic oligonucleotide
  Sense strand starting at position 501 of SEQ ID NO: 914609
cugcucaucuuugagaaac

SEQ ID NO: 1017125 - RNA, 19 nt, Artificial Sequence
  Description of Artificial Sequence: Synthetic oligonucleotide
  Antisense strand to SEQ ID NO: 1017124
guuucucaaagaugagcag

SEQ ID NO: 1017126 - RNA, 19 nt, Artificial Sequence
  Description of Artificial Sequence: Synthetic oligonucleotide
  Sense strand starting at position 503 of SEQ ID NO: 914609
gcucaucuuugagaaacaa

SEQ ID NO: 1017127 - RNA, 19 nt, Artificial Sequence
  Description of Artificial Sequence: Synthetic oligonucleotide
  Antisense strand to SEQ ID NO: 1017126
uuguuucucaaagaugagc

SEQ ID NO: 1017128 - RNA, 19 nt, Artificial Sequence
  Description of Artificial Sequence: Synthetic oligonucleotide
  Sense strand starting at position 538 of SEQ ID NO: 914609
cugacaaggugcuauggau

SEQ ID NO: 1017129 - RNA, 19 nt, Artificial Sequence
  Description of Artificial Sequence: Synthetic oligonucleotide
  Antisense strand to SEQ ID NO: 1017128
auccauagcaccuugucag

SEQ ID NO: 1017130 - RNA, 19 nt, Artificial Sequence
  Description of Artificial Sequence: Synthetic oligonucleotide
  Sense strand starting at position 561 of SEQ ID NO: 914609
uguuccauccucugacuuu

SEQ ID NO: 1017131 - RNA, 19 nt, Artificial Sequence
  Description of Artificial Sequence: Synthetic oligonucleotide
  Antisense strand to SEQ ID NO: 1017130
aaagucagaggauggaaca

SEQ ID NO: 1017132 - RNA, 19 nt, Artificial Sequence
  Description of Artificial Sequence: Synthetic oligonucleotide
  Sense strand starting at position 588 of SEQ ID NO: 914609
acaguugguaagugugaga

SEQ ID NO: 1017133 - RNA, 19 nt, Artificial Sequence
  Description of Artificial Sequence: Synthetic oligonucleotide
  Antisense strand to SEQ ID NO: 1017132
ucucacacuuaccaacugu

SEQ ID NO: 1017134 - RNA, 19 nt, Artificial Sequence
  Description of Artificial Sequence: Synthetic oligonucleotide
  Sense strand starting at position 591 of SEQ ID NO: 914609
guugguaagugugagacaa

SEQ ID NO: 1017135 - RNA, 19 nt, Artificial Sequence
  Description of Artificial Sequence: Synthetic oligonucleotide
  Antisense strand to SEQ ID NO: 1017134
uugucucacacuuaccaac

SEQ ID NO: 1017136 - RNA, 19 nt, Artificial Sequence
  Description of Artificial Sequence: Synthetic oligonucleotide
  Sense strand starting at position 629 of SEQ ID NO: 914609
gugugaaccuaggaugcua

SEQ ID NO: 1017137 - RNA, 19 nt, Artificial Sequence
  Description of Artificial Sequence: Synthetic oligonucleotide
  Antisense strand to SEQ ID NO: 1017136
uagcauccuagguucacac

SEQ ID NO: 1017138 - RNA, 19 nt, Artificial Sequence
  Description of Artificial Sequence: Synthetic oligonucleotide
  Sense strand starting at position 938 of SEQ ID NO: 914609
agaaguaccucauggacaa

SEQ ID NO: 1017139 - RNA, 19 nt, Artificial Sequence
  Description of Artificial Sequence: Synthetic oligonucleotide
  Antisense strand to SEQ ID NO: 1017138
uuguccaugagguacuucu

SEQ ID NO: 1017140 - RNA, 19 nt, Artificial Sequence
  Description of Artificial Sequence: Synthetic oligonucleotide
  Sense strand starting at position 1026 of SEQ ID NO: 914609
acaggcuccucccugauua

SEQ ID NO: 1017141 - RNA, 19 nt, Artificial Sequence
  Description of Artificial Sequence: Synthetic oligonucleotide
  Antisense strand to SEQ ID NO: 1017140
uaaucagggaggagccugu

SEQ ID NO: 1017142 - RNA, 19 nt, Artificial Sequence
  Description of Artificial Sequence: Synthetic oligonucleotide
  Sense strand starting at position 1085 of SEQ ID NO: 914609
ucauaauccucucugaggu

SEQ ID NO: 1017143 - RNA, 19 nt, Artificial Sequence
  Description of Artificial Sequence: Synthetic oligonucleotide
  Antisense strand to SEQ ID NO: 1017142
accucagagaggauuauga

SEQ ID NO: 1017144 - RNA, 19 nt, Artificial Sequence
  Description of Artificial Sequence: Synthetic oligonucleotide
  Sense strand starting at position 1089 of SEQ ID NO: 914609
aauccucucugaggucaga

SEQ ID NO: 1017145 - RNA, 19 nt, Artificial Sequence
  Description of Artificial Sequence: Synthetic oligonucleotide
  Antisense strand to SEQ ID NO: 1017144
ucugaccucagagaggauu

SEQ ID NO: 1017146 - RNA, 19 nt, Artificial Sequence
  Description of Artificial Sequence: Synthetic oligonucleotide
  Sense strand starting at position 1118 of SEQ ID NO: 914609
ucaggucuggcugauacau

SEQ ID NO: 1017147 - RNA, 19 nt, Artificial Sequence
  Description of Artificial Sequence: Synthetic oligonucleotide
  Antisense strand to SEQ ID NO: 1017146
auguaucagccagaccuga

SEQ ID NO: 1017148 - RNA, 19 nt, Artificial Sequence
  Description of Artificial Sequence: Synthetic oligonucleotide
  Sense strand starting at position 1120 of SEQ ID NO: 914609
aggucuggcugauacauuu

SEQ ID NO: 1017149 - RNA, 19 nt, Artificial Sequence
  Description of Artificial Sequence: Synthetic oligonucleotide
  Antisense strand to SEQ ID NO: 1017148
aaauguaucagccagaccu

SEQ ID NO: 1017150 - RNA, 19 nt, Artificial Sequence
  Description of Artificial Sequence: Synthetic oligonucleotide
  Sense strand starting at position 1188 of SEQ ID NO: 914609
gcaauccugcagcaaagau

SEQ ID NO: 1017151 - RNA, 19 nt, Artificial Sequence
  Description of Artificial Sequence: Synthetic oligonucleotide
  Antisense strand to SEQ ID NO: 1017150
aucuuugcugcaggauugc

SEQ ID NO: 1017152 - RNA, 19 nt, Artificial Sequence
  Description of Artificial Sequence: Synthetic oligonucleotide
  Sense strand starting at position 1264 of SEQ ID NO: 914609
guucuauauccucaugaag

SEQ ID NO: 1017153 - RNA, 19 nt, Artificial Sequence
  Description of Artificial Sequence: Synthetic oligonucleotide
  Antisense strand to SEQ ID NO: 1017152
cuucaugaggauauagaac

SEQ ID NO: 1017154 - RNA, 19 nt, Artificial Sequence
  Description of Artificial Sequence: Synthetic oligonucleotide
  Sense strand starting at position 1266 of SEQ ID NO: 914609
ucuauauccucaugaagug

SEQ ID NO: 1017155 - RNA, 19 nt, Artificial Sequence
  Description of Artificial Sequence: Synthetic oligonucleotide
  Antisense strand to SEQ ID NO: 1017154
cacuucaugaggauauaga

SEQ ID NO: 1017156 - RNA, 19 nt, Artificial Sequence
  Description of Artificial Sequence: Synthetic oligonucleotide
  Sense strand starting at position 2230 of SEQ ID NO: 914609
ccgcguaucggcagaauca

SEQ ID NO: 1017157 - RNA, 19 nt, Artificial Sequence
  Description of Artificial Sequence: Synthetic oligonucleotide
  Antisense strand to SEQ ID NO: 1017156
ugauucugccgauacgcgg

SEQ ID NO: 1017158 - RNA, 19 nt, Artificial Sequence
  Description of Artificial Sequence: Synthetic oligonucleotide
  Sense strand starting at position 2255 of SEQ ID NO: 914609
gggcucuaguggucugagu

SEQ ID NO: 1017159 - RNA, 19 nt, Artificial Sequence
  Description of Artificial Sequence: Synthetic oligonucleotide
  Antisense strand to SEQ ID NO: 1017158
acucagaccacuagagccc

SEQ ID NO: 1017160 - RNA, 19 nt, Artificial Sequence
  Description of Artificial Sequence: Synthetic oligonucleotide
  Sense strand starting at position 2597 of SEQ ID NO: 914609
gggcuauccuuccuucuga

SEQ ID NO: 1017161 - RNA, 19 nt, Artificial Sequence
  Description of Artificial Sequence: Synthetic oligonucleotide
  Antisense strand to SEQ ID NO: 1017160
ucagaaggaaggauagccc

SEQ ID NO: 1017162 - RNA, 19 nt, Artificial Sequence
  Description of Artificial Sequence: Synthetic oligonucleotide
  Sense strand starting at position 2823 of SEQ ID NO: 914609
gggucagcauuagaagaaa

SEQ ID NO: 1017163 - RNA, 19 nt, Artificial Sequence
  Description of Artificial Sequence: Synthetic oligonucleotide
  Antisense strand to SEQ ID NO: 1017162
uuucuucuaaugcugaccc

SEQ ID NO: 1017164 - RNA, 19 nt, Artificial Sequence
  Description of Artificial Sequence: Synthetic oligonucleotide
  Sense strand starting at position 3069 of SEQ ID NO: 914609
cuaucaggcucagaagagu

SEQ ID NO: 1017165 - RNA, 19 nt, Artificial Sequence
  Description of Artificial Sequence: Synthetic oligonucleotide
  Antisense strand to SEQ ID NO: 1017164
acucuucugagccugauag

SEQ ID NO: 1017166 - RNA, 19 nt, Artificial Sequence
  Description of Artificial Sequence: Synthetic oligonucleotide
  Sense strand starting at position 3084 of SEQ ID NO: 914609
gagugaaaggccugcagaa

SEQ ID NO: 1017167 - RNA, 19 nt, Artificial Sequence
  Description of Artificial Sequence: Synthetic oligonucleotide
  Antisense strand to SEQ ID NO: 1017166
uucugcaggccuuucacuc

SEQ ID NO: 1017168 - RNA, 19 nt, Artificial Sequence
  Description of Artificial Sequence: Synthetic oligonucleotide
  Sense strand starting at position 3134 of SEQ ID NO: 914609
aauuccgcuccaggugaua

SEQ ID NO: 1017169 - RNA, 19 nt, Artificial Sequence
  Description of Artificial Sequence: Synthetic oligonucleotide
  Antisense strand to SEQ ID NO: 1017168
uaucaccuggagcggaauu

SEQ ID NO: 1017170 - RNA, 19 nt, Artificial Sequence
  Description of Artificial Sequence: Synthetic oligonucleotide
  Sense strand starting at position 3237 of SEQ ID NO: 914609
gggugaugaagaugucuuc

SEQ ID NO: 1017171 - RNA, 19 nt, Artificial Sequence
  Description of Artificial Sequence: Synthetic oligonucleotide
  Antisense strand to SEQ ID NO: 1017170
gaagacaucuucaucaccc

SEQ ID NO: 1017172 - RNA, 19 nt, Artificial Sequence
  Description of Artificial Sequence: Synthetic oligonucleotide
  Sense strand starting at position 3240 of SEQ ID NO: 914609
ugaugaagaugucuucuga

SEQ ID NO: 1017173 - RNA, 19 nt, Artificial Sequence
  Description of Artificial Sequence: Synthetic oligonucleotide
  Antisense strand to SEQ ID NO: 1017172
ucagaagacaucuucauca

SEQ ID NO: 1017174 - RNA, 19 nt, Artificial Sequence
  Description of Artificial Sequence: Synthetic oligonucleotide
  Sense strand starting at position 3244 of SEQ ID NO: 914609
gaagaugucuucugagugg

SEQ ID NO: 1017175 - RNA, 19 nt, Artificial Sequence
  Description of Artificial Sequence: Synthetic oligonucleotide
  Antisense strand to SEQ ID NO: 1017174
ccacucagaagacaucuuc

SEQ ID NO: 1017176 - RNA, 19 nt, Artificial Sequence
  Description of Artificial Sequence: Synthetic oligonucleotide
  Sense strand starting at position 3247 of SEQ ID NO: 914609
gaugucuucugaguggaua

SEQ ID NO: 1017177 - RNA, 19 nt, Artificial Sequence
  Description of Artificial Sequence: Synthetic oligonucleotide
  Antisense strand to SEQ ID NO: 1017176
uauccacucagaagacauc

SEQ ID NO: 1017178 - RNA, 19 nt, Artificial Sequence
  Description of Artificial Sequence: Synthetic oligonucleotide
  Sense strand starting at position 3248 of SEQ ID NO: 914609
augucuucugaguggauag

SEQ ID NO: 1017179 - RNA, 19 nt, Artificial Sequence
  Description of Artificial Sequence: Synthetic oligonucleotide
  Antisense strand to SEQ ID NO: 1017178
cuauccacucagaagacau

SEQ ID NO: 1017180 - RNA, 19 nt, Artificial Sequence
  Description of Artificial Sequence: Synthetic oligonucleotide
  Sense strand starting at position 3249 of SEQ ID NO: 914609
ugucuucugaguggauaga

SEQ ID NO: 1017181 - RNA, 19 nt, Artificial Sequence
  Description of Artificial Sequence: Synthetic oligonucleotide
  Antisense strand to SEQ ID NO: 1017180
ucuauccacucagaagaca

SEQ ID NO: 1017182 - RNA, 19 nt, Artificial Sequence
  Description of Artificial Sequence: Synthetic oligonucleotide
  Sense strand starting at position 3278 of SEQ ID NO: 914609
gcaccacauuaugaagaua

SEQ ID NO: 1017183 - RNA, 19 nt, Artificial Sequence
  Description of Artificial Sequence: Synthetic oligonucleotide
  Antisense strand to SEQ ID NO: 1017182
uaucuucauaauguggugc

SEQ ID NO: 1017184 - RNA, 19 nt, Artificial Sequence
  Description of Artificial Sequence: Synthetic oligonucleotide
  Sense strand starting at position 16 of SEQ ID NO: 914610
ggauaacgcccauggagaa

SEQ ID NO: 1017185 - RNA, 19 nt, Artificial Sequence
  Description of Artificial Sequence: Synthetic oligonucleotide
  Antisense strand to SEQ ID NO: 1017184
uucuccaugggcguuaucc

SEQ ID NO: 1017186 - RNA, 19 nt, Artificial Sequence
  Description of Artificial Sequence: Synthetic oligonucleotide
  Sense strand starting at position 68 of SEQ ID NO: 914610
ugcucugcucaagaagaga

SEQ ID NO: 1017187 - RNA, 19 nt, Artificial Sequence
  Description of Artificial Sequence: Synthetic oligonucleotide
  Antisense strand to SEQ ID NO: 1017186
ucucuucuugagcagagca

SEQ ID NO: 1017188 - RNA, 19 nt, Artificial Sequence
  Description of Artificial Sequence: Synthetic oligonucleotide
  Sense strand starting at position 147 of SEQ ID NO: 914610
gcugcagacuuucugaaca

SEQ ID NO: 1017189 - RNA, 19 nt, Artificial Sequence
  Description of Artificial Sequence: Synthetic oligonucleotide
  Antisense strand to SEQ ID NO: 1017188
uguucagaaagucugcagc

SEQ ID NO: 1017190 - RNA, 19 nt, Artificial Sequence
  Description of Artificial Sequence: Synthetic oligonucleotide
  Sense strand starting at position 187 of SEQ ID NO: 914610
aggugacuuagucagucuu

SEQ ID NO: 1017191 - RNA, 19 nt, Artificial Sequence
  Description of Artificial Sequence: Synthetic oligonucleotide
  Antisense strand to SEQ ID NO: 1017190
aagacugacuaagucaccu

SEQ ID NO: 1017192 - RNA, 19 nt, Artificial Sequence
  Description of Artificial Sequence: Synthetic oligonucleotide
  Sense strand starting at position 189 of SEQ ID NO: 914610
gugacuuagucagucuuac

SEQ ID NO: 1017193 - RNA, 19 nt, Artificial Sequence
  Description of Artificial Sequence: Synthetic oligonucleotide
  Antisense strand to SEQ ID NO: 1017192
guaagacugacuaagucac

SEQ ID NO: 1017194 - RNA, 19 nt, Artificial Sequence
  Description of Artificial Sequence: Synthetic oligonucleotide
  Sense strand starting at position 195 of SEQ ID NO: 914610
uagucagucuuaccgggaa

SEQ ID NO: 1017195 - RNA, 19 nt, Artificial Sequence
  Description of Artificial Sequence: Synthetic oligonucleotide
  Antisense strand to SEQ ID NO: 1017194
uucccgguaagacugacua

SEQ ID NO: 1017196 - RNA, 19 nt, Artificial Sequence
  Description of Artificial Sequence: Synthetic oligonucleotide
  Sense strand starting at position 197 of SEQ ID NO: 914610
gucagucuuaccgggaauc

SEQ ID NO: 1017197 - RNA, 19 nt, Artificial Sequence
  Description of Artificial Sequence: Synthetic oligonucleotide
  Antisense strand to SEQ ID NO: 1017196
gauucccgguaagacugac

SEQ ID NO: 1017198 - RNA, 19 nt, Artificial Sequence
  Description of Artificial Sequence: Synthetic oligonucleotide
  Sense strand starting at position 198 of SEQ ID NO: 914610
ucagucuuaccgggaaucu

SEQ ID NO: 1017199 - RNA, 19 nt, Artificial Sequence
  Description of Artificial Sequence: Synthetic oligonucleotide
  Antisense strand to SEQ ID NO: 1017198
agauucccgguaagacuga

SEQ ID NO: 1017200 - RNA, 19 nt, Artificial Sequence
  Description of Artificial Sequence: Synthetic oligonucleotide
  Sense strand starting at position 199 of SEQ ID NO: 914610
cagucuuaccgggaaucug

SEQ ID NO: 1017201 - RNA, 19 nt, Artificial Sequence
  Description of Artificial Sequence: Synthetic oligonucleotide
  Antisense strand to SEQ ID NO: 1017200
cagauucccgguaagacug

SEQ ID NO: 1017202 - RNA, 19 nt, Artificial Sequence
  Description of Artificial Sequence: Synthetic oligonucleotide
  Sense strand starting at position 208 of SEQ ID NO: 914610
cgggaaucugugugcagga

SEQ ID NO: 1017203 - RNA, 19 nt, Artificial Sequence
  Description of Artificial Sequence: Synthetic oligonucleotide
  Antisense strand to SEQ ID NO: 1017202
uccugcacacagauucccg

SEQ ID NO: 1017204 - RNA, 19 nt, Artificial Sequence
  Description of Artificial Sequence: Synthetic oligonucleotide
  Sense strand starting at position 355 of SEQ ID NO: 914610
uuaauugcuccaugucaug

SEQ ID NO: 1017205 - RNA, 19 nt, Artificial Sequence
  Description of Artificial Sequence: Synthetic oligonucleotide
  Antisense strand to SEQ ID NO: 1017204
caugacauggagcaauuaa

SEQ ID NO: 1017206 - RNA, 19 nt, Artificial Sequence
  Description of Artificial Sequence: Synthetic oligonucleotide
  Sense strand starting at position 361 of SEQ ID NO: 914610
gcuccaugucaugauuguu

SEQ ID NO: 1017207 - RNA, 19 nt, Artificial Sequence
  Description of Artificial Sequence: Synthetic oligonucleotide
  Antisense strand to SEQ ID NO: 1017206
aacaaucaugacauggagc

SEQ ID NO: 1017208 - RNA, 19 nt, Artificial Sequence
  Description of Artificial Sequence: Synthetic oligonucleotide
  Sense strand starting at position 395 of SEQ ID NO: 914610
acagaaagaucaugggucu

SEQ ID NO: 1017209 - RNA, 19 nt, Artificial Sequence
  Description of Artificial Sequence: Synthetic oligonucleotide
  Antisense strand to SEQ ID NO: 1017208
agacccaugaucuuucugu

SEQ ID NO: 1017210 - RNA, 19 nt, Artificial Sequence
  Description of Artificial Sequence: Synthetic oligonucleotide
  Sense strand starting at position 396 of SEQ ID NO: 914610
cagaaagaucaugggucuu

SEQ ID NO: 1017211 - RNA, 19 nt, Artificial Sequence
  Description of Artificial Sequence: Synthetic oligonucleotide
  Antisense strand to SEQ ID NO: 1017210
aagacccaugaucuuucug

SEQ ID NO: 1017212 - RNA, 19 nt, Artificial Sequence
  Description of Artificial Sequence: Synthetic oligonucleotide
  Sense strand starting at position 422 of SEQ ID NO: 914610
gggccuguccaguggauau

SEQ ID NO: 1017213 - RNA, 19 nt, Artificial Sequence
  Description of Artificial Sequence: Synthetic oligonucleotide
  Antisense strand to SEQ ID NO: 1017212
auauccacuggacaggccc

SEQ ID NO: 1017214 - RNA, 19 nt, Artificial Sequence
  Description of Artificial Sequence: Synthetic oligonucleotide
  Sense strand starting at position 594 of SEQ ID NO: 914610
caguuaaggcuuugcccaa

SEQ ID NO: 1017215 - RNA, 19 nt, Artificial Sequence
  Description of Artificial Sequence: Synthetic oligonucleotide
  Antisense strand to SEQ ID NO: 1017214
uugggcaaagccuuaacug

SEQ ID NO: 1017216 - RNA, 19 nt, Artificial Sequence
  Description of Artificial Sequence: Synthetic oligonucleotide
  Sense strand starting at position 708 of SEQ ID NO: 914610
gcuggcuccucucuauaga

SEQ ID NO: 1017217 - RNA, 19 nt, Artificial Sequence
  Description of Artificial Sequence: Synthetic oligonucleotide
  Antisense strand to SEQ ID NO: 1017216
ucuauagagaggagccagc

SEQ ID NO: 1017218 - RNA, 19 nt, Artificial Sequence
  Description of Artificial Sequence: Synthetic oligonucleotide
  Sense strand starting at position 899 of SEQ ID NO: 914610
aguguuuagaccuggaggu

SEQ ID NO: 1017219 - RNA, 19 nt, Artificial Sequence
  Description of Artificial Sequence: Synthetic oligonucleotide
  Antisense strand to SEQ ID NO: 1017218
accuccaggucuaaacacu

SEQ ID NO: 1017220 - RNA, 19 nt, Artificial Sequence
  Description of Artificial Sequence: Synthetic oligonucleotide
  Sense strand starting at position 901 of SEQ ID NO: 914610
uguuuagaccuggagguga

SEQ ID NO: 1017221 - RNA, 19 nt, Artificial Sequence
  Description of Artificial Sequence: Synthetic oligonucleotide
  Antisense strand to SEQ ID NO: 1017220
ucaccuccaggucuaaaca

SEQ ID NO: 1017222 - RNA, 19 nt, Artificial Sequence
  Description of Artificial Sequence: Synthetic oligonucleotide
  Sense strand starting at position 936 of SEQ ID NO: 914610
ggcaaagcuuugcuaaggu

SEQ ID NO: 1017223 - RNA, 19 nt, Artificial Sequence
  Description of Artificial Sequence: Synthetic oligonucleotide
  Antisense strand to SEQ ID NO: 1017222
accuuagcaaagcuuugcc

SEQ ID NO: 1017224 - RNA, 19 nt, Artificial Sequence
  Description of Artificial Sequence: Synthetic oligonucleotide
  Sense strand starting at position 953 of SEQ ID NO: 914610
guacgugguaucugauaau

SEQ ID NO: 1017225 - RNA, 19 nt, Artificial Sequence
  Description of Artificial Sequence: Synthetic oligonucleotide
  Antisense strand to SEQ ID NO: 1017224
auuaucagauaccacguac

SEQ ID NO: 1017226 - RNA, 19 nt, Artificial Sequence
  Description of Artificial Sequence: Synthetic oligonucleotide
  Sense strand starting at position 962 of SEQ ID NO: 914610
aucugauaauaguugcuaa

SEQ ID NO: 1017227 - RNA, 19 nt, Artificial Sequence
  Description of Artificial Sequence: Synthetic oligonucleotide
  Antisense strand to SEQ ID NO: 1017226
uuagcaacuauuaucagau

SEQ ID NO: 1017228 - RNA, 19 nt, Artificial Sequence
  Description of Artificial Sequence: Synthetic oligonucleotide
  Sense strand starting at position 1040 of SEQ ID NO: 914610
aacugaggugcaggauauu

SEQ ID NO: 1017229 - RNA, 19 nt, Artificial Sequence
  Description of Artificial Sequence: Synthetic oligonucleotide
  Antisense strand to SEQ ID NO: 1017228
aauauccugcaccucaguu

SEQ ID NO: 1017230 - RNA, 19 nt, Artificial Sequence
  Description of Artificial Sequence: Synthetic oligonucleotide
  Sense strand starting at position 1403 of SEQ ID NO: 914610
cugcaaaccucugcugaca

SEQ ID NO: 1017231 - RNA, 19 nt, Artificial Sequence
  Description of Artificial Sequence: Synthetic oligonucleotide
  Antisense strand to SEQ ID NO: 1017230
ugucagcagagguuugcag

SEQ ID NO: 1017232 - RNA, 19 nt, Artificial Sequence
  Description of Artificial Sequence: Synthetic oligonucleotide
  Sense strand starting at position 1758 of SEQ ID NO: 914610
cugcguguccuccaucagu

SEQ ID NO: 1017233 - RNA, 19 nt, Artificial Sequence
  Description of Artificial Sequence: Synthetic oligonucleotide
  Antisense strand to SEQ ID NO: 1017232
acugauggaggacacgcag

SEQ ID NO: 1017234 - RNA, 19 nt, Artificial Sequence
  Description of Artificial Sequence: Synthetic oligonucleotide
  Sense strand starting at position 1790 of SEQ ID NO: 914610
ggaacaucucauugagggu

SEQ ID NO: 1017235 - RNA, 19 nt, Artificial Sequence
  Description of Artificial Sequence: Synthetic oligonucleotide
  Antisense strand to SEQ ID NO: 1017234
acccucaaugagauguucc

SEQ ID NO: 1017236 - RNA, 19 nt, Artificial Sequence
  Description of Artificial Sequence: Synthetic oligonucleotide
  Sense strand starting at position 2266 of SEQ ID NO: 914610
ccggauccucuacgcuaau

SEQ ID NO: 1017237 - RNA, 19 nt, Artificial Sequence
  Description of Artificial Sequence: Synthetic oligonucleotide
  Antisense strand to SEQ ID NO: 1017236
auuagcguagaggauccgg

SEQ ID NO: 1017238 - RNA, 19 nt, Artificial Sequence
  Description of Artificial Sequence: Synthetic oligonucleotide
  Sense strand starting at position 2267 of SEQ ID NO: 914610
cggauccucuacgcuaaua

SEQ ID NO: 1017239 - RNA, 19 nt, Artificial Sequence
  Description of Artificial Sequence: Synthetic oligonucleotide
  Antisense strand to SEQ ID NO: 1017238
uauuagcguagaggauccg

SEQ ID NO: 1017240 - RNA, 19 nt, Artificial Sequence
  Description of Artificial Sequence: Synthetic oligonucleotide
  Sense strand starting at position 3017 of SEQ ID NO: 914610
accucuguccugugaaauc

SEQ ID NO: 1017241 - RNA, 19 nt, Artificial Sequence
  Description of Artificial Sequence: Synthetic oligonucleotide
  Antisense strand to SEQ ID NO: 1017240
gauuucacaggacagaggu

SEQ ID NO: 1017242 - RNA, 19 nt, Artificial Sequence
  Description of Artificial Sequence: Synthetic oligonucleotide
  Sense strand starting at position 3084 of SEQ ID NO: 914610
ggccuuagucugccgugau

SEQ ID NO: 1017243 - RNA, 19 nt, Artificial Sequence
  Description of Artificial Sequence: Synthetic oligonucleotide
  Antisense strand to SEQ ID NO: 1017242
aucacggcagacuaaggcc

SEQ ID NO: 1017244 - RNA, 19 nt, Artificial Sequence
  Description of Artificial Sequence: Synthetic oligonucleotide
  Sense strand starting at position 3087 of SEQ ID NO: 914610
cuuagucugccgugauuga

SEQ ID NO: 1017245 - RNA, 19 nt, Artificial Sequence
  Description of Artificial Sequence: Synthetic oligonucleotide
  Antisense strand to SEQ ID NO: 1017244
ucaaucacggcagacuaag

SEQ ID NO: 1017246 - RNA, 19 nt, Artificial Sequence
  Description of Artificial Sequence: Synthetic oligonucleotide
  Sense strand starting at position 3108 of SEQ ID NO: 914610
ccgugcuccagccaggaua

SEQ ID NO: 1017247 - RNA, 19 nt, Artificial Sequence
  Description of Artificial Sequence: Synthetic oligonucleotide
  Antisense strand to SEQ ID NO: 1017246
uauccuggcuggagcacgg

SEQ ID NO: 1017248 - RNA, 19 nt, Artificial Sequence
  Description of Artificial Sequence: Synthetic oligonucleotide
  Sense strand starting at position 3149 of SEQ ID NO: 914610
gggagaacgucaugagaaa

SEQ ID NO: 1017249 - RNA, 19 nt, Artificial Sequence
  Description of Artificial Sequence: Synthetic oligonucleotide
  Antisense strand to SEQ ID NO: 1017248
uuucucaugacguucuccc

SEQ ID NO: 1017250 - RNA, 19 nt, Artificial Sequence
  Description of Artificial Sequence: Synthetic oligonucleotide
  Sense strand starting at position 3254 of SEQ ID NO: 914610
uggcgaaguuaccagauuu

SEQ ID NO: 1017251 - RNA, 19 nt, Artificial Sequence
  Description of Artificial Sequence: Synthetic oligonucleotide
  Antisense strand to SEQ ID NO: 1017250
aaaucugguaacuucgcca

SEQ ID NO: 1017252 - RNA, 19 nt, Artificial Sequence
  Description of Artificial Sequence: Synthetic oligonucleotide
  Sense strand starting at position 3270 of SEQ ID NO: 914610
uuuguaugcgucccaguua

SEQ ID NO: 1017253 - RNA, 19 nt, Artificial Sequence
  Description of Artificial Sequence: Synthetic oligonucleotide
  Antisense strand to SEQ ID NO: 1017252
uaacugggacgcauacaaa

SEQ ID NO: 1017254 - RNA, 19 nt, Artificial Sequence
  Description of Artificial Sequence: Synthetic oligonucleotide
  Sense strand starting at position 3339 of SEQ ID NO: 914610
aguggagaaucagagaagu

SEQ ID NO: 1017255 - RNA, 19 nt, Artificial Sequence
  Description of Artificial Sequence: Synthetic oligonucleotide
  Antisense strand to SEQ ID NO: 1017254
acuucucugauucuccacu

SEQ ID NO: 1017256 - RNA, 19 nt, Artificial Sequence
  Description of Artificial Sequence: Synthetic oligonucleotide
  Sense strand starting at position 3396 of SEQ ID NO: 914610
gccagagguccugagugua

SEQ ID NO: 1017257 - RNA, 19 nt, Artificial Sequence
  Description of Artificial Sequence: Synthetic oligonucleotide
  Antisense strand to SEQ ID NO: 1017256
uacacucaggaccucuggc

SEQ ID NO: 1017258 - RNA, 19 nt, Artificial Sequence
  Description of Artificial Sequence: Synthetic oligonucleotide
  Sense strand starting at position 3695 of SEQ ID NO: 914610
aguggacauuaggaagaaa

SEQ ID NO: 1017259 - RNA, 19 nt, Artificial Sequence
  Description of Artificial Sequence: Synthetic oligonucleotide
  Antisense strand to SEQ ID NO: 1017258
uuucuuccuaauguccacu

SEQ ID NO: 1017260 - RNA, 19 nt, Artificial Sequence
  Description of Artificial Sequence: Synthetic oligonucleotide
  Sense strand starting at position 3814 of SEQ ID NO: 914610
ucauguugcuggcuuaaag

SEQ ID NO: 1017261 - RNA, 19 nt, Artificial Sequence
  Description of Artificial Sequence: Synthetic oligonucleotide
  Antisense strand to SEQ ID NO: 1017260
cuuuaagccagcaacauga

SEQ ID NO: 1017262 - RNA, 19 nt, Artificial Sequence
  Description of Artificial Sequence: Synthetic oligonucleotide
  Sense strand starting at position 3850 of SEQ ID NO: 914610
cugagauugucuucugccu

SEQ ID NO: 1017263 - RNA, 19 nt, Artificial Sequence
  Description of Artificial Sequence: Synthetic oligonucleotide
  Antisense strand to SEQ ID NO: 1017262
aggcagaagacaaucucag

SEQ ID NO: 1017264 - RNA, 19 nt, Artificial Sequence
  Description of Artificial Sequence: Synthetic oligonucleotide
  Sense strand starting at position 168 of SEQ ID NO: 914611
aguguuuagaccuggaggu

SEQ ID NO: 1017265 - RNA, 19 nt, Artificial Sequence
  Description of Artificial Sequence: Synthetic oligonucleotide
  Antisense strand to SEQ ID NO: 1017264
accuccaggucuaaacacu

SEQ ID NO: 1017266 - RNA, 19 nt, Artificial Sequence
  Description of Artificial Sequence: Synthetic oligonucleotide
  Sense strand starting at position 170 of SEQ ID NO: 914611
uguuuagaccuggagguga

SEQ ID NO: 1017267 - RNA, 19 nt, Artificial Sequence
  Description of Artificial Sequence: Synthetic oligonucleotide
  Antisense strand to SEQ ID NO: 1017266
ucaccuccaggucuaaaca

SEQ ID NO: 1017268 - RNA, 19 nt, Artificial Sequence
  Description of Artificial Sequence: Synthetic oligonucleotide
  Sense strand starting at position 205 of SEQ ID NO: 914611
ggcaaagcuuugcuaaggu

SEQ ID NO: 1017269 - RNA, 19 nt, Artificial Sequence
  Description of Artificial Sequence: Synthetic oligonucleotide
  Antisense strand to SEQ ID NO: 1017268
accuuagcaaagcuuugcc

SEQ ID NO: 1017270 - RNA, 19 nt, Artificial Sequence
  Description of Artificial Sequence: Synthetic oligonucleotide
  Sense strand starting at position 218 of SEQ ID NO: 914611
uaagguacgugguaucuga

SEQ ID NO: 1017271 - RNA, 19 nt, Artificial Sequence
  Description of Artificial Sequence: Synthetic oligonucleotide
  Antisense strand to SEQ ID NO: 1017270
ucagauaccacguaccuua

SEQ ID NO: 1017272 - RNA, 19 nt, Artificial Sequence
  Description of Artificial Sequence: Synthetic oligonucleotide
  Sense strand starting at position 222 of SEQ ID NO: 914611
guacgugguaucugauaau

SEQ ID NO: 1017273 - RNA, 19 nt, Artificial Sequence
  Description of Artificial Sequence: Synthetic oligonucleotide
  Antisense strand to SEQ ID NO: 1017272
auuaucagauaccacguac

SEQ ID NO: 1017274 - RNA, 19 nt, Artificial Sequence
  Description of Artificial Sequence: Synthetic oligonucleotide
  Sense strand starting at position 225 of SEQ ID NO: 914611
cgugguaucugauaauagu

SEQ ID NO: 1017275 - RNA, 19 nt, Artificial Sequence
  Description of Artificial Sequence: Synthetic oligonucleotide
  Antisense strand to SEQ ID NO: 1017274
acuauuaucagauaccacg

SEQ ID NO: 1017276 - RNA, 19 nt, Artificial Sequence
  Description of Artificial Sequence: Synthetic oligonucleotide
  Sense strand starting at position 231 of SEQ ID NO: 914611
aucugauaauaguugcuaa

SEQ ID NO: 1017277 - RNA, 19 nt, Artificial Sequence
  Description of Artificial Sequence: Synthetic oligonucleotide
  Antisense strand to SEQ ID NO: 1017276
uuagcaacuauuaucagau

SEQ ID NO: 1017278 - RNA, 19 nt, Artificial Sequence
  Description of Artificial Sequence: Synthetic oligonucleotide
  Sense strand starting at position 309 of SEQ ID NO: 914611
aacugaggugcaggauauu

SEQ ID NO: 1017279 - RNA, 19 nt, Artificial Sequence
  Description of Artificial Sequence: Synthetic oligonucleotide
  Antisense strand to SEQ ID NO: 1017278
aauauccugcaccucaguu

SEQ ID NO: 1017280 - RNA, 19 nt, Artificial Sequence
  Description of Artificial Sequence: Synthetic oligonucleotide
  Sense strand starting at position 491 of SEQ ID NO: 914611
cacauugcgugagaagcaa

SEQ ID NO: 1017281 - RNA, 19 nt, Artificial Sequence
  Description of Artificial Sequence: Synthetic oligonucleotide
  Antisense strand to SEQ ID NO: 1017280
uugcuucucacgcaaugug

SEQ ID NO: 1017282 - RNA, 19 nt, Artificial Sequence
  Description of Artificial Sequence: Synthetic oligonucleotide
  Sense strand starting at position 631 of SEQ ID NO: 914611
ccggguuucugugaaacca

SEQ ID NO: 1017283 - RNA, 19 nt, Artificial Sequence
  Description of Artificial Sequence: Synthetic oligonucleotide
  Antisense strand to SEQ ID NO: 1017282
ugguuucacagaaacccgg

SEQ ID NO: 1017284 - RNA, 19 nt, Artificial Sequence
  Description of Artificial Sequence: Synthetic oligonucleotide
  Sense strand starting at position 644 of SEQ ID NO: 914611
aaaccacagugcuggaaua

SEQ ID NO: 1017285 - RNA, 19 nt, Artificial Sequence
  Description of Artificial Sequence: Synthetic oligonucleotide
  Antisense strand to SEQ ID NO: 1017284
uauuccagcacugugguuu

SEQ ID NO: 1017286 - RNA, 19 nt, Artificial Sequence
  Description of Artificial Sequence: Synthetic oligonucleotide
  Sense strand starting at position 672 of SEQ ID NO: 914611
cugcaaaccucugcugaca

SEQ ID NO: 1017287 - RNA, 19 nt, Artificial Sequence
  Description of Artificial Sequence: Synthetic oligonucleotide
  Antisense strand to SEQ ID NO: 1017286
ugucagcagagguuugcag

SEQ ID NO: 1017288 - RNA, 19 nt, Artificial Sequence
  Description of Artificial Sequence: Synthetic oligonucleotide
  Sense strand starting at position 1027 of SEQ ID NO: 914611
cugcguguccuccaucagu

SEQ ID NO: 1017289 - RNA, 19 nt, Artificial Sequence
  Description of Artificial Sequence: Synthetic oligonucleotide
  Antisense strand to SEQ ID NO: 1017288
acugauggaggacacgcag

SEQ ID NO: 1017290 - RNA, 19 nt, Artificial Sequence
  Description of Artificial Sequence: Synthetic oligonucleotide
  Sense strand starting at position 1059 of SEQ ID NO: 914611
ggaacaucucauugagggu

SEQ ID NO: 1017291 - RNA, 19 nt, Artificial Sequence
  Description of Artificial Sequence: Synthetic oligonucleotide
  Antisense strand to SEQ ID NO: 1017290
acccucaaugagauguucc

SEQ ID NO: 1017292 - RNA, 19 nt, Artificial Sequence
  Description of Artificial Sequence: Synthetic oligonucleotide
  Sense strand starting at position 1535 of SEQ ID NO: 914611
ccggauccucuacgcuaau

SEQ ID NO: 1017293 - RNA, 19 nt, Artificial Sequence
  Description of Artificial Sequence: Synthetic oligonucleotide
  Antisense strand to SEQ ID NO: 1017292
auuagcguagaggauccgg

SEQ ID NO: 1017294 - RNA, 19 nt, Artificial Sequence
  Description of Artificial Sequence: Synthetic oligonucleotide
  Sense strand starting at position 1536 of SEQ ID NO: 914611
cggauccucuacgcuaaua

SEQ ID NO: 1017295 - RNA, 19 nt, Artificial Sequence
  Description of Artificial Sequence: Synthetic oligonucleotide
  Antisense strand to SEQ ID NO: 1017294
uauuagcguagaggauccg

SEQ ID NO: 1017296 - RNA, 19 nt, Artificial Sequence
  Description of Artificial Sequence: Synthetic oligonucleotide
  Sense strand starting at position 2286 of SEQ ID NO: 914611
accucuguccugugaaauc

SEQ ID NO: 1017297 - RNA, 19 nt, Artificial Sequence
  Description of Artificial Sequence: Synthetic oligonucleotide
  Antisense strand to SEQ ID NO: 1017296
gauuucacaggacagaggu

SEQ ID NO: 1017298 - RNA, 19 nt, Artificial Sequence
  Description of Artificial Sequence: Synthetic oligonucleotide
  Sense strand starting at position 2353 of SEQ ID NO: 914611
ggccuuagucugccgugau

SEQ ID NO: 1017299 - RNA, 19 nt, Artificial Sequence
  Description of Artificial Sequence: Synthetic oligonucleotide
  Antisense strand to SEQ ID NO: 1017298
aucacggcagacuaaggcc

SEQ ID NO: 1017300 - RNA, 19 nt, Artificial Sequence
  Description of Artificial Sequence: Synthetic oligonucleotide
  Sense strand starting at position 2356 of SEQ ID NO: 914611
cuuagucugccgugauuga

SEQ ID NO: 1017301 - RNA, 19 nt, Artificial Sequence
  Description of Artificial Sequence: Synthetic oligonucleotide
  Antisense strand to SEQ ID NO: 1017300
ucaaucacggcagacuaag

SEQ ID NO: 1017302 - RNA, 19 nt, Artificial Sequence
  Description of Artificial Sequence: Synthetic oligonucleotide
  Sense strand starting at position 2377 of SEQ ID NO: 914611
ccgugcuccagccaggaua

SEQ ID NO: 1017303 - RNA, 19 nt, Artificial Sequence
  Description of Artificial Sequence: Synthetic oligonucleotide
  Antisense strand to SEQ ID NO: 1017302
uauccuggcuggagcacgg

SEQ ID NO: 1017304 - RNA, 19 nt, Artificial Sequence
  Description of Artificial Sequence: Synthetic oligonucleotide
  Sense strand starting at position 2418 of SEQ ID NO: 914611
gggagaacgucaugagaaa

SEQ ID NO: 1017305 - RNA, 19 nt, Artificial Sequence
  Description of Artificial Sequence: Synthetic oligonucleotide
  Antisense strand to SEQ ID NO: 1017304
uuucucaugacguucuccc

SEQ ID NO: 1017306 - RNA, 19 nt, Artificial Sequence
  Description of Artificial Sequence: Synthetic oligonucleotide
  Sense strand starting at position 2523 of SEQ ID NO: 914611
uggcgaaguuaccagauuu

SEQ ID NO: 1017307 - RNA, 19 nt, Artificial Sequence
  Description of Artificial Sequence: Synthetic oligonucleotide
  Antisense strand to SEQ ID NO: 1017306
aaaucugguaacuucgcca

SEQ ID NO: 1017308 - RNA, 19 nt, Artificial Sequence
  Description of Artificial Sequence: Synthetic oligonucleotide
  Sense strand starting at position 2539 of SEQ ID NO: 914611
uuuguaugcgucccaguua

SEQ ID NO: 1017309 - RNA, 19 nt, Artificial Sequence
  Description of Artificial Sequence: Synthetic oligonucleotide
  Antisense strand to SEQ ID NO: 1017308
uaacugggacgcauacaaa

SEQ ID NO: 1017310 - RNA, 19 nt, Artificial Sequence
  Description of Artificial Sequence: Synthetic oligonucleotide
  Sense strand starting at position 2608 of SEQ ID NO: 914611
aguggagaaucagagaagu

SEQ ID NO: 1017311 - RNA, 19 nt, Artificial Sequence
  Description of Artificial Sequence: Synthetic oligonucleotide
  Antisense strand to SEQ ID NO: 1017310
acuucucugauucuccacu

SEQ ID NO: 1017312 - RNA, 19 nt, Artificial Sequence
  Description of Artificial Sequence: Synthetic oligonucleotide
  Sense strand starting at position 2665 of SEQ ID NO: 914611
gccagagguccugagugua

SEQ ID NO: 1017313 - RNA, 19 nt, Artificial Sequence
  Description of Artificial Sequence: Synthetic oligonucleotide
  Antisense strand to SEQ ID NO: 1017312
uacacucaggaccucuggc

SEQ ID NO: 1017314 - RNA, 19 nt, Artificial Sequence
  Description of Artificial Sequence: Synthetic oligonucleotide
  Sense strand starting at position 2964 of SEQ ID NO: 914611
aguggacauuaggaagaaa

SEQ ID NO: 1017315 - RNA, 19 nt, Artificial Sequence
  Description of Artificial Sequence: Synthetic oligonucleotide
  Antisense strand to SEQ ID NO: 1017314
uuucuuccuaauguccacu

SEQ ID NO: 1017316 - RNA, 19 nt, Artificial Sequence
  Description of Artificial Sequence: Synthetic oligonucleotide
  Sense strand starting at position 2975 of SEQ ID NO: 914611
ggaagaaacuaaugccgaa

SEQ ID NO: 1017317 - RNA, 19 nt, Artificial Sequence
  Description of Artificial Sequence: Synthetic oligonucleotide
  Antisense strand to SEQ ID NO: 1017316
uucggcauuaguuucuucc

SEQ ID NO: 1017318 - RNA, 19 nt, Artificial Sequence
  Description of Artificial Sequence: Synthetic oligonucleotide
  Sense strand starting at position 3083 of SEQ ID NO: 914611
ucauguugcuggcuuaaag

SEQ ID NO: 1017319 - RNA, 19 nt, Artificial Sequence
  Description of Artificial Sequence: Synthetic oligonucleotide
  Antisense strand to SEQ ID NO: 1017318
cuuuaagccagcaacauga

SEQ ID NO: 1017320 - RNA, 19 nt, Artificial Sequence
  Description of Artificial Sequence: Synthetic oligonucleotide
  Sense strand starting at position 3119 of SEQ ID NO: 914611
cugagauugucuucugccu

SEQ ID NO: 1017321 - RNA, 19 nt, Artificial Sequence
  Description of Artificial Sequence: Synthetic oligonucleotide
  Antisense strand to SEQ ID NO: 1017320
aggcagaagacaaucucag

SEQ ID NO: 1017322 - RNA, 19 nt, Artificial Sequence
  Description of Artificial Sequence: Synthetic oligonucleotide
  Sense strand starting at position 3606 of SEQ ID NO: 914611
caaggagugucagcuccaa

SEQ ID NO: 1017323 - RNA, 19 nt, Artificial Sequence
  Description of Artificial Sequence: Synthetic oligonucleotide
  Antisense strand to SEQ ID NO: 1017322
uuggagcugacacuccuug

SEQ ID NO: 1017324 - RNA, 19 nt, Artificial Sequence
  Description of Artificial Sequence: Synthetic oligonucleotide
  Sense strand starting at position 3610 of SEQ ID NO: 914611
gagugucagcuccaaagaa

SEQ ID NO: 1017325 - RNA, 19 nt, Artificial Sequence
  Description of Artificial Sequence: Synthetic oligonucleotide
  Antisense strand to SEQ ID NO: 1017324
uucuuuggagcugacacuc

SEQ ID NO: 1017326 - RNA, 19 nt, Artificial Sequence
  Description of Artificial Sequence: Synthetic oligonucleotide
  Sense strand starting at position 3656 of SEQ ID NO: 914611
gggacuuguuggagaaagg

SEQ ID NO: 1017327 - RNA, 19 nt, Artificial Sequence
  Description of Artificial Sequence: Synthetic oligonucleotide
  Antisense strand to SEQ ID NO: 1017326
ccuuucuccaacaaguccc

SEQ ID NO: 1017328 - RNA, 19 nt, Artificial Sequence
  Description of Artificial Sequence: Synthetic oligonucleotide
  Sense strand starting at position 3739 of SEQ ID NO: 914611
ggacaaucauagguagagu

SEQ ID NO: 1017329 - RNA, 19 nt, Artificial Sequence
  Description of Artificial Sequence: Synthetic oligonucleotide
  Antisense strand to SEQ ID NO: 1017328
acucuaccuaugauugucc

SEQ ID NO: 1017330 - RNA, 19 nt, Artificial Sequence
  Description of Artificial Sequence: Synthetic oligonucleotide
  Sense strand starting at position 3784 of SEQ ID NO: 914611
cccauugugucacuggcua

SEQ ID NO: 1017331 - RNA, 19 nt, Artificial Sequence
  Description of Artificial Sequence: Synthetic oligonucleotide
  Antisense strand to SEQ ID NO: 1017330
uagccagugacacaauggg

SEQ ID NO: 1017332 - RNA, 19 nt, Artificial Sequence
  Description of Artificial Sequence: Synthetic oligonucleotide
  Sense strand starting at position 3797 of SEQ ID NO: 914611
uggcuaagcucuguaucca

SEQ ID NO: 1017333 - RNA, 19 nt, Artificial Sequence
  Description of Artificial Sequence: Synthetic oligonucleotide
  Antisense strand to SEQ ID NO: 1017332
uggauacagagcuuagcca

SEQ ID NO: 1017334 - RNA, 19 nt, Artificial Sequence
  Description of Artificial Sequence: Synthetic oligonucleotide
  Sense strand starting at position 3805 of SEQ ID NO: 914611
cucuguauccacugggaac

SEQ ID NO: 1017335 - RNA, 19 nt, Artificial Sequence
  Description of Artificial Sequence: Synthetic oligonucleotide
  Antisense strand to SEQ ID NO: 1017334
guucccaguggauacagag

SEQ ID NO: 1017336 - RNA, 19 nt, Artificial Sequence
  Description of Artificial Sequence: Synthetic oligonucleotide
  Sense strand starting at position 3849 of SEQ ID NO: 914611
ggaaacacauucuggaauu

SEQ ID NO: 1017337 - RNA, 19 nt, Artificial Sequence
  Description of Artificial Sequence: Synthetic oligonucleotide
  Antisense strand to SEQ ID NO: 1017336
aauuccagaauguguuucc

SEQ ID NO: 1017338 - RNA, 19 nt, Artificial Sequence
  Description of Artificial Sequence: Synthetic oligonucleotide
  Sense strand starting at position 3937 of SEQ ID NO: 914611
uuucaugguugaggaaaug

SEQ ID NO: 1017339 - RNA, 19 nt, Artificial Sequence
  Description of Artificial Sequence: Synthetic oligonucleotide
  Antisense strand to SEQ ID NO: 1017338
cauuuccucaaccaugaaa

SEQ ID NO: 1017340 - RNA, 19 nt, Artificial Sequence
  Description of Artificial Sequence: Synthetic oligonucleotide
  Sense strand starting at position 3957 of SEQ ID NO: 914611
cagcaaagcggauauaacu

SEQ ID NO: 1017341 - RNA, 19 nt, Artificial Sequence
  Description of Artificial Sequence: Synthetic oligonucleotide
  Antisense strand to SEQ ID NO: 1017340
aguuauauccgcuuugcug

SEQ ID NO: 1017342 - RNA, 19 nt, Artificial Sequence
  Description of Artificial Sequence: Synthetic oligonucleotide
  Sense strand starting at position 3964 of SEQ ID NO: 914611
gcggauauaacuggcugaa

SEQ ID NO: 1017343 - RNA, 19 nt, Artificial Sequence
  Description of Artificial Sequence: Synthetic oligonucleotide
  Antisense strand to SEQ ID NO: 1017342
uucagccaguuauauccgc

SEQ ID NO: 1017344 - RNA, 19 nt, Artificial Sequence
  Description of Artificial Sequence: Synthetic oligonucleotide
  Sense strand starting at position 151 of SEQ ID NO: 914612
caguuaaggcuuugcccaa

SEQ ID NO: 1017345 - RNA, 19 nt, Artificial Sequence
  Description of Artificial Sequence: Synthetic oligonucleotide
  Antisense strand to SEQ ID NO: 1017344
uugggcaaagccuuaacug

SEQ ID NO: 1017346 - RNA, 19 nt, Artificial Sequence
  Description of Artificial Sequence: Synthetic oligonucleotide
  Sense strand starting at position 265 of SEQ ID NO: 914612
gcuggcuccucucuauaga

SEQ ID NO: 1017347 - RNA, 19 nt, Artificial Sequence
  Description of Artificial Sequence: Synthetic oligonucleotide
  Antisense strand to SEQ ID NO: 1017346
ucuauagagaggagccagc

SEQ ID NO: 1017348 - RNA, 19 nt, Artificial Sequence
  Description of Artificial Sequence: Synthetic oligonucleotide
  Sense strand starting at position 456 of SEQ ID NO: 914612
aguguuuagaccuggaggu

SEQ ID NO: 1017349 - RNA, 19 nt, Artificial Sequence
  Description of Artificial Sequence: Synthetic oligonucleotide
  Antisense strand to SEQ ID NO: 1017348
accuccaggucuaaacacu

SEQ ID NO: 1017350 - RNA, 19 nt, Artificial Sequence
  Description of Artificial Sequence: Synthetic oligonucleotide
  Sense strand starting at position 458 of SEQ ID NO: 914612
uguuuagaccuggagguga

SEQ ID NO: 1017351 - RNA, 19 nt, Artificial Sequence
  Description of Artificial Sequence: Synthetic oligonucleotide
  Antisense strand to SEQ ID NO: 1017350
ucaccuccaggucuaaaca

SEQ ID NO: 1017352 - RNA, 19 nt, Artificial Sequence
  Description of Artificial Sequence: Synthetic oligonucleotide
  Sense strand starting at position 493 of SEQ ID NO: 914612
ggcaaagcuuugcuaaggu

SEQ ID NO: 1017353 - RNA, 19 nt, Artificial Sequence
  Description of Artificial Sequence: Synthetic oligonucleotide
  Antisense strand to SEQ ID NO: 1017352
accuuagcaaagcuuugcc

SEQ ID NO: 1017354 - RNA, 19 nt, Artificial Sequence
  Description of Artificial Sequence: Synthetic oligonucleotide
  Sense strand starting at position 506 of SEQ ID NO: 914612
uaagguacgugguaucuga

SEQ ID NO: 1017355 - RNA, 19 nt, Artificial Sequence
  Description of Artificial Sequence: Synthetic oligonucleotide
  Antisense strand to SEQ ID NO: 1017354
ucagauaccacguaccuua

SEQ ID NO: 1017356 - RNA, 19 nt, Artificial Sequence
  Description of Artificial Sequence: Synthetic oligonucleotide
  Sense strand starting at position 510 of SEQ ID NO: 914612
guacgugguaucugauaau

SEQ ID NO: 1017357 - RNA, 19 nt, Artificial Sequence
  Description of Artificial Sequence: Synthetic oligonucleotide
  Antisense strand to SEQ ID NO: 1017356
auuaucagauaccacguac

SEQ ID NO: 1017358 - RNA, 19 nt, Artificial Sequence
  Description of Artificial Sequence: Synthetic oligonucleotide
  Sense strand starting at position 513 of SEQ ID NO: 914612
cgugguaucugauaauagu

SEQ ID NO: 1017359 - RNA, 19 nt, Artificial Sequence
  Description of Artificial Sequence: Synthetic oligonucleotide
  Antisense strand to SEQ ID NO: 1017358
acuauuaucagauaccacg

SEQ ID NO: 1017360 - RNA, 19 nt, Artificial Sequence
  Description of Artificial Sequence: Synthetic oligonucleotide
  Sense strand starting at position 519 of SEQ ID NO: 914612
aucugauaauaguugcuaa

SEQ ID NO: 1017361 - RNA, 19 nt, Artificial Sequence
  Description of Artificial Sequence: Synthetic oligonucleotide
  Antisense strand to SEQ ID NO: 1017360
uuagcaacuauuaucagau

SEQ ID NO: 1017362 - RNA, 19 nt, Artificial Sequence
  Description of Artificial Sequence: Synthetic oligonucleotide
  Sense strand starting at position 597 of SEQ ID NO: 914612
aacugaggugcaggauauu

SEQ ID NO: 1017363 - RNA, 19 nt, Artificial Sequence
  Description of Artificial Sequence: Synthetic oligonucleotide
  Antisense strand to SEQ ID NO: 1017362
aauauccugcaccucaguu

SEQ ID NO: 1017364 - RNA, 19 nt, Artificial Sequence
  Description of Artificial Sequence: Synthetic oligonucleotide
  Sense strand starting at position 732 of SEQ ID NO: 914612
cucauacagugcugagauu

SEQ ID NO: 1017365 - RNA, 19 nt, Artificial Sequence
  Description of Artificial Sequence: Synthetic oligonucleotide
  Antisense strand to SEQ ID NO: 1017364
aaucucagcacuguaugag

SEQ ID NO: 1017366 - RNA, 19 nt, Artificial Sequence
  Description of Artificial Sequence: Synthetic oligonucleotide
  Sense strand starting at position 779 of SEQ ID NO: 914612
cacauugcgugagaagcaa

SEQ ID NO: 1017367 - RNA, 19 nt, Artificial Sequence
  Description of Artificial Sequence: Synthetic oligonucleotide
  Antisense strand to SEQ ID NO: 1017366
uugcuucucacgcaaugug

SEQ ID NO: 1017368 - RNA, 19 nt, Artificial Sequence
  Description of Artificial Sequence: Synthetic oligonucleotide
  Sense strand starting at position 919 of SEQ ID NO: 914612
ccggguuucugugaaacca

SEQ ID NO: 1017369 - RNA, 19 nt, Artificial Sequence
  Description of Artificial Sequence: Synthetic oligonucleotide
  Antisense strand to SEQ ID NO: 1017368
ugguuucacagaaacccgg

SEQ ID NO: 1017370 - RNA, 19 nt, Artificial Sequence
  Description of Artificial Sequence: Synthetic oligonucleotide
  Sense strand starting at position 932 of SEQ ID NO: 914612
aaaccacagugcuggaaua

SEQ ID NO: 1017371 - RNA, 19 nt, Artificial Sequence
  Description of Artificial Sequence: Synthetic oligonucleotide
  Antisense strand to SEQ ID NO: 1017370
uauuccagcacugugguuu

SEQ ID NO: 1017372 - RNA, 19 nt, Artificial Sequence
  Description of Artificial Sequence: Synthetic oligonucleotide
  Sense strand starting at position 960 of SEQ ID NO: 914612
cugcaaaccucugcugaca

SEQ ID NO: 1017373 - RNA, 19 nt, Artificial Sequence
  Description of Artificial Sequence: Synthetic oligonucleotide
  Antisense strand to SEQ ID NO: 1017372
ugucagcagagguuugcag

SEQ ID NO: 1017374 - RNA, 19 nt, Artificial Sequence
  Description of Artificial Sequence: Synthetic oligonucleotide
  Sense strand starting at position 962 of SEQ ID NO: 914612
gcaaaccucugcugacaau

SEQ ID NO: 1017375 - RNA, 19 nt, Artificial Sequence
  Description of Artificial Sequence: Synthetic oligonucleotide
  Antisense strand to SEQ ID NO: 1017374
auugucagcagagguuugc

SEQ ID NO: 1017376 - RNA, 19 nt, Artificial Sequence
  Description of Artificial Sequence: Synthetic oligonucleotide
  Sense strand starting at position 1315 of SEQ ID NO: 914612
cugcguguccuccaucagu

SEQ ID NO: 1017377 - RNA, 19 nt, Artificial Sequence
  Description of Artificial Sequence: Synthetic oligonucleotide
  Antisense strand to SEQ ID NO: 1017376
acugauggaggacacgcag

SEQ ID NO: 1017378 - RNA, 19 nt, Artificial Sequence
  Description of Artificial Sequence: Synthetic oligonucleotide
  Sense strand starting at position 1347 of SEQ ID NO: 914612
ggaacaucucauugagggu

SEQ ID NO: 1017379 - RNA, 19 nt, Artificial Sequence
  Description of Artificial Sequence: Synthetic oligonucleotide
  Antisense strand to SEQ ID NO: 1017378
acccucaaugagauguucc

SEQ ID NO: 1017380 - RNA, 19 nt, Artificial Sequence
  Description of Artificial Sequence: Synthetic oligonucleotide
  Sense strand starting at position 1823 of SEQ ID NO: 914612
ccggauccucuacgcuaau

SEQ ID NO: 1017381 - RNA, 19 nt, Artificial Sequence
  Description of Artificial Sequence: Synthetic oligonucleotide
  Antisense strand to SEQ ID NO: 1017380
auuagcguagaggauccgg

SEQ ID NO: 1017382 - RNA, 19 nt, Artificial Sequence
  Description of Artificial Sequence: Synthetic oligonucleotide
  Sense strand starting at position 1824 of SEQ ID NO: 914612
cggauccucuacgcuaaua

SEQ ID NO: 1017383 - RNA, 19 nt, Artificial Sequence
  Description of Artificial Sequence: Synthetic oligonucleotide
  Antisense strand to SEQ ID NO: 1017382
uauuagcguagaggauccg

SEQ ID NO: 1017384 - RNA, 19 nt, Artificial Sequence
  Description of Artificial Sequence: Synthetic oligonucleotide
  Sense strand starting at position 2574 of SEQ ID NO: 914612
accucuguccugugaaauc

SEQ ID NO: 1017385 - RNA, 19 nt, Artificial Sequence
  Description of Artificial Sequence: Synthetic oligonucleotide
  Antisense strand to SEQ ID NO: 1017384
gauuucacaggacagaggu

SEQ ID NO: 1017386 - RNA, 19 nt, Artificial Sequence
  Description of Artificial Sequence: Synthetic oligonucleotide
  Sense strand starting at position 2641 of SEQ ID NO: 914612
ggccuuagucugccgugau

SEQ ID NO: 1017387 - RNA, 19 nt, Artificial Sequence
  Description of Artificial Sequence: Synthetic oligonucleotide
  Antisense strand to SEQ ID NO: 1017386
aucacggcagacuaaggcc

SEQ ID NO: 1017388 - RNA, 19 nt, Artificial Sequence
  Description of Artificial Sequence: Synthetic oligonucleotide
  Sense strand starting at position 2642 of SEQ ID NO: 914612
gccuuagucugccgugauu

SEQ ID NO: 1017389 - RNA, 19 nt, Artificial Sequence
  Description of Artificial Sequence: Synthetic oligonucleotide
  Antisense strand to SEQ ID NO: 1017388
aaucacggcagacuaaggc

SEQ ID NO: 1017390 - RNA, 19 nt, Artificial Sequence
  Description of Artificial Sequence: Synthetic oligonucleotide
  Sense strand starting at position 2644 of SEQ ID NO: 914612
cuuagucugccgugauuga

SEQ ID NO: 1017391 - RNA, 19 nt, Artificial Sequence
  Description of Artificial Sequence: Synthetic oligonucleotide
  Antisense strand to SEQ ID NO: 1017390
ucaaucacggcagacuaag

SEQ ID NO: 1017392 - RNA, 19 nt, Artificial Sequence
  Description of Artificial Sequence: Synthetic oligonucleotide
  Sense strand starting at position 2665 of SEQ ID NO: 914612
ccgugcuccagccaggaua

SEQ ID NO: 1017393 - RNA, 19 nt, Artificial Sequence
  Description of Artificial Sequence: Synthetic oligonucleotide
  Antisense strand to SEQ ID NO: 1017392
uauccuggcuggagcacgg

SEQ ID NO: 1017394 - RNA, 19 nt, Artificial Sequence
  Description of Artificial Sequence: Synthetic oligonucleotide
  Sense strand starting at position 2706 of SEQ ID NO: 914612
gggagaacgucaugagaaa

SEQ ID NO: 1017395 - RNA, 19 nt, Artificial Sequence
  Description of Artificial Sequence: Synthetic oligonucleotide
  Antisense strand to SEQ ID NO: 1017394
uuucucaugacguucuccc

SEQ ID NO: 1017396 - RNA, 19 nt, Artificial Sequence
  Description of Artificial Sequence: Synthetic oligonucleotide
  Sense strand starting at position 2811 of SEQ ID NO: 914612
uggcgaaguuaccagauuu

SEQ ID NO: 1017397 - RNA, 19 nt, Artificial Sequence
  Description of Artificial Sequence: Synthetic oligonucleotide
  Antisense strand to SEQ ID NO: 1017396
aaaucugguaacuucgcca

SEQ ID NO: 1017398 - RNA, 19 nt, Artificial Sequence
  Description of Artificial Sequence: Synthetic oligonucleotide
  Sense strand starting at position 2827 of SEQ ID NO: 914612
uuuguaugcgucccaguua

SEQ ID NO: 1017399 - RNA, 19 nt, Artificial Sequence
  Description of Artificial Sequence: Synthetic oligonucleotide
  Antisense strand to SEQ ID NO: 1017398
uaacugggacgcauacaaa

SEQ ID NO: 1017400 - RNA, 19 nt, Artificial Sequence
  Description of Artificial Sequence: Synthetic oligonucleotide
  Sense strand starting at position 2896 of SEQ ID NO: 914612
aguggagaaucagagaagu

SEQ ID NO: 1017401 - RNA, 19 nt, Artificial Sequence
  Description of Artificial Sequence: Synthetic oligonucleotide
  Antisense strand to SEQ ID NO: 1017400
acuucucugauucuccacu

SEQ ID NO: 1017402 - RNA, 19 nt, Artificial Sequence
  Description of Artificial Sequence: Synthetic oligonucleotide
  Sense strand starting at position 2953 of SEQ ID NO: 914612
gccagagguccugagugua

SEQ ID NO: 1017403 - RNA, 19 nt, Artificial Sequence
  Description of Artificial Sequence: Synthetic oligonucleotide
  Antisense strand to SEQ ID NO: 1017402
uacacucaggaccucuggc

SEQ ID NO: 1017404 - RNA, 19 nt, Artificial Sequence
  Description of Artificial Sequence: Synthetic oligonucleotide
  Sense strand starting at position 3029 of SEQ ID NO: 914612
auuacuguuuaccgccaaa

SEQ ID NO: 1017405 - RNA, 19 nt, Artificial Sequence
  Description of Artificial Sequence: Synthetic oligonucleotide
  Antisense strand to SEQ ID NO: 1017404
uuuggcgguaaacaguaau

SEQ ID NO: 1017406 - RNA, 19 nt, Artificial Sequence
  Description of Artificial Sequence: Synthetic oligonucleotide
  Sense strand starting at position 3234 of SEQ ID NO: 914612
gcuugucacuucgggcaga

SEQ ID NO: 1017407 - RNA, 19 nt, Artificial Sequence
  Description of Artificial Sequence: Synthetic oligonucleotide
  Antisense strand to SEQ ID NO: 1017406
ucugcccgaagugacaagc

SEQ ID NO: 1017408 - RNA, 19 nt, Artificial Sequence
  Description of Artificial Sequence: Synthetic oligonucleotide
  Sense strand starting at position 3252 of SEQ ID NO: 914612
aguggacauuaggaagaaa

SEQ ID NO: 1017409 - RNA, 19 nt, Artificial Sequence
  Description of Artificial Sequence: Synthetic oligonucleotide
  Antisense strand to SEQ ID NO: 1017408
uuucuuccuaauguccacu

SEQ ID NO: 1017410 - RNA, 19 nt, Artificial Sequence
  Description of Artificial Sequence: Synthetic oligonucleotide
  Sense strand starting at position 3263 of SEQ ID NO: 914612
ggaagaaacuaaugccgaa

SEQ ID NO: 1017411 - RNA, 19 nt, Artificial Sequence
  Description of Artificial Sequence: Synthetic oligonucleotide
  Antisense strand to SEQ ID NO: 1017410
uucggcauuaguuucuucc

SEQ ID NO: 1017412 - RNA, 19 nt, Artificial Sequence
  Description of Artificial Sequence: Synthetic oligonucleotide
  Sense strand starting at position 3371 of SEQ ID NO: 914612
ucauguugcuggcuuaaag

SEQ ID NO: 1017413 - RNA, 19 nt, Artificial Sequence
  Description of Artificial Sequence: Synthetic oligonucleotide
  Antisense strand to SEQ ID NO: 1017412
cuuuaagccagcaacauga

SEQ ID NO: 1017414 - RNA, 19 nt, Artificial Sequence
  Description of Artificial Sequence: Synthetic oligonucleotide
  Sense strand starting at position 3407 of SEQ ID NO: 914612
cugagauugucuucugccu

SEQ ID NO: 1017415 - RNA, 19 nt, Artificial Sequence
  Description of Artificial Sequence: Synthetic oligonucleotide
  Antisense strand to SEQ ID NO: 1017414
aggcagaagacaaucucag

SEQ ID NO: 1017416 - RNA, 19 nt, Artificial Sequence
  Description of Artificial Sequence: Synthetic oligonucleotide
  Sense strand starting at position 3409 of SEQ ID NO: 914612
gagauugucuucugccuua

SEQ ID NO: 1017417 - RNA, 19 nt, Artificial Sequence
  Description of Artificial Sequence: Synthetic oligonucleotide
  Antisense strand to SEQ ID NO: 1017416
uaaggcagaagacaaucuc

SEQ ID NO: 1017418 - RNA, 19 nt, Artificial Sequence
  Description of Artificial Sequence: Synthetic oligonucleotide
  Sense strand starting at position 3894 of SEQ ID NO: 914612
caaggagugucagcuccaa

SEQ ID NO: 1017419 - RNA, 19 nt, Artificial Sequence
  Description of Artificial Sequence: Synthetic oligonucleotide
  Antisense strand to SEQ ID NO: 1017418
uuggagcugacacuccuug

SEQ ID NO: 1017420 - RNA, 19 nt, Artificial Sequence
  Description of Artificial Sequence: Synthetic oligonucleotide
  Sense strand starting at position 3898 of SEQ ID NO: 914612
gagugucagcuccaaagaa

SEQ ID NO: 1017421 - RNA, 19 nt, Artificial Sequence
  Description of Artificial Sequence: Synthetic oligonucleotide
  Antisense strand to SEQ ID NO: 1017420
uucuuuggagcugacacuc

SEQ ID NO: 1017422 - RNA, 19 nt, Artificial Sequence
  Description of Artificial Sequence: Synthetic oligonucleotide
  Sense strand starting at position 3944 of SEQ ID NO: 914612
gggacuuguuggagaaagg

SEQ ID NO: 1017423 - RNA, 19 nt, Artificial Sequence
  Description of Artificial Sequence: Synthetic oligonucleotide
  Antisense strand to SEQ ID NO: 1017422
ccuuucuccaacaaguccc

SEQ ID NO: 1017424 - RNA, 19 nt, Artificial Sequence
  Description of Artificial Sequence: Synthetic oligonucleotide
  Sense strand starting at position 665 of SEQ ID NO: 914613
cucucagucuggcuuaaga

SEQ ID NO: 1017425 - RNA, 19 nt, Artificial Sequence
  Description of Artificial Sequence: Synthetic oligonucleotide
  Antisense strand to SEQ ID NO: 1017424
ucuuaagccagacugagag

SEQ ID NO: 1017426 - RNA, 19 nt, Artificial Sequence
  Description of Artificial Sequence: Synthetic oligonucleotide
  Sense strand starting at position 667 of SEQ ID NO: 914613
cucagucuggcuuaagauu

SEQ ID NO: 1017427 - RNA, 19 nt, Artificial Sequence
  Description of Artificial Sequence: Synthetic oligonucleotide
  Antisense strand to SEQ ID NO: 1017426
aaucuuaagccagacugag

SEQ ID NO: 1017428 - RNA, 19 nt, Artificial Sequence
  Description of Artificial Sequence: Synthetic oligonucleotide
  Sense strand starting at position 752 of SEQ ID NO: 914613
gggaguuccuguccaugag

SEQ ID NO: 1017429 - RNA, 19 nt, Artificial Sequence
  Description of Artificial Sequence: Synthetic oligonucleotide
  Antisense strand to SEQ ID NO: 1017428
cucauggacaggaacuccc

SEQ ID NO: 1017430 - RNA, 19 nt, Artificial Sequence
  Description of Artificial Sequence: Synthetic oligonucleotide
  Sense strand starting at position 753 of SEQ ID NO: 914613
ggaguuccuguccaugaga

SEQ ID NO: 1017431 - RNA, 19 nt, Artificial Sequence
  Description of Artificial Sequence: Synthetic oligonucleotide
  Antisense strand to SEQ ID NO: 1017430
ucucauggacaggaacucc

SEQ ID NO: 1017432 - RNA, 19 nt, Artificial Sequence
  Description of Artificial Sequence: Synthetic oligonucleotide
  Sense strand starting at position 755 of SEQ ID NO: 914613
aguuccuguccaugagaag

SEQ ID NO: 1017433 - RNA, 19 nt, Artificial Sequence
  Description of Artificial Sequence: Synthetic oligonucleotide
  Antisense strand to SEQ ID NO: 1017432
cuucucauggacaggaacu

SEQ ID NO: 1017434 - RNA, 19 nt, Artificial Sequence
  Description of Artificial Sequence: Synthetic oligonucleotide
  Sense strand starting at position 756 of SEQ ID NO: 914613
guuccuguccaugagaagu

SEQ ID NO: 1017435 - RNA, 19 nt, Artificial Sequence
  Description of Artificial Sequence: Synthetic oligonucleotide
  Antisense strand to SEQ ID NO: 1017434
acuucucauggacaggaac

SEQ ID NO: 1017436 - RNA, 19 nt, Artificial Sequence
  Description of Artificial Sequence: Synthetic oligonucleotide
  Sense strand starting at position 766 of SEQ ID NO: 914613
augagaaguuaguaauuuc

SEQ ID NO: 1017437 - RNA, 19 nt, Artificial Sequence
  Description of Artificial Sequence: Synthetic oligonucleotide
  Antisense strand to SEQ ID NO: 1017436
gaaauuacuaacuucucau

SEQ ID NO: 1017438 - RNA, 19 nt, Artificial Sequence
  Description of Artificial Sequence: Synthetic oligonucleotide
  Sense strand starting at position 829 of SEQ ID NO: 914613
caugaaccucggcagauau

SEQ ID NO: 1017439 - RNA, 19 nt, Artificial Sequence
  Description of Artificial Sequence: Synthetic oligonucleotide
  Antisense strand to SEQ ID NO: 1017438
auaucugccgagguucaug

SEQ ID NO: 1017440 - RNA, 19 nt, Artificial Sequence
  Description of Artificial Sequence: Synthetic oligonucleotide
  Sense strand starting at position 839 of SEQ ID NO: 914613
ggcagauauucugcauaca

SEQ ID NO: 1017441 - RNA, 19 nt, Artificial Sequence
  Description of Artificial Sequence: Synthetic oligonucleotide
  Antisense strand to SEQ ID NO: 1017440
uguaugcagaauaucugcc

SEQ ID NO: 1017442 - RNA, 19 nt, Artificial Sequence
  Description of Artificial Sequence: Synthetic oligonucleotide
  Sense strand starting at position 840 of SEQ ID NO: 914613
gcagauauucugcauacag

SEQ ID NO: 1017443 - RNA, 19 nt, Artificial Sequence
  Description of Artificial Sequence: Synthetic oligonucleotide
  Antisense strand to SEQ ID NO: 1017442
cuguaugcagaauaucugc

SEQ ID NO: 1017444 - RNA, 19 nt, Artificial Sequence
  Description of Artificial Sequence: Synthetic oligonucleotide
  Sense strand starting at position 1010 of SEQ ID NO: 914613
uccagucagcucugaagga

SEQ ID NO: 1017445 - RNA, 19 nt, Artificial Sequence
  Description of Artificial Sequence: Synthetic oligonucleotide
  Antisense strand to SEQ ID NO: 1017444
uccuucagagcugacugga

SEQ ID NO: 1017446 - RNA, 19 nt, Artificial Sequence
  Description of Artificial Sequence: Synthetic oligonucleotide
  Sense strand starting at position 2112 of SEQ ID NO: 914613
gcauauucccuguaugaag

SEQ ID NO: 1017447 - RNA, 19 nt, Artificial Sequence
  Description of Artificial Sequence: Synthetic oligonucleotide
  Antisense strand to SEQ ID NO: 1017446
cuucauacagggaauaugc

SEQ ID NO: 1017448 - RNA, 19 nt, Artificial Sequence
  Description of Artificial Sequence: Synthetic oligonucleotide
  Sense strand starting at position 2114 of SEQ ID NO: 914613
auauucccuguaugaagau

SEQ ID NO: 1017449 - RNA, 19 nt, Artificial Sequence
  Description of Artificial Sequence: Synthetic oligonucleotide
  Antisense strand to SEQ ID NO: 1017448
aucuucauacagggaauau

SEQ ID NO: 1017450 - RNA, 19 nt, Artificial Sequence
  Description of Artificial Sequence: Synthetic oligonucleotide
  Sense strand starting at position 2235 of SEQ ID NO: 914613
cguugaaggcaugaagagu

SEQ ID NO: 1017451 - RNA, 19 nt, Artificial Sequence
  Description of Artificial Sequence: Synthetic oligonucleotide
  Antisense strand to SEQ ID NO: 1017450
acucuucaugccuucaacg

SEQ ID NO: 1017452 - RNA, 19 nt, Artificial Sequence
  Description of Artificial Sequence: Synthetic oligonucleotide
  Sense strand starting at position 2243 of SEQ ID NO: 914613
gcaugaagagugucugcgu

SEQ ID NO: 1017453 - RNA, 19 nt, Artificial Sequence
  Description of Artificial Sequence: Synthetic oligonucleotide
  Antisense strand to SEQ ID NO: 1017452
acgcagacacucuucaugc

SEQ ID NO: 1017454 - RNA, 19 nt, Artificial Sequence
  Description of Artificial Sequence: Synthetic oligonucleotide
  Sense strand starting at position 2281 of SEQ ID NO: 914613
agagcuuaauauccaguaa

SEQ ID NO: 1017455 - RNA, 19 nt, Artificial Sequence
  Description of Artificial Sequence: Synthetic oligonucleotide
  Antisense strand to SEQ ID NO: 1017454
uuacuggauauuaagcucu

SEQ ID NO: 1017456 - RNA, 19 nt, Artificial Sequence
  Description of Artificial Sequence: Synthetic oligonucleotide
  Sense strand starting at position 2413 of SEQ ID NO: 914613
cugaacugaaggugacauu

SEQ ID NO: 1017457 - RNA, 19 nt, Artificial Sequence
  Description of Artificial Sequence: Synthetic oligonucleotide
  Antisense strand to SEQ ID NO: 1017456
aaugucaccuucaguucag

SEQ ID NO: 1017458 - RNA, 19 nt, Artificial Sequence
  Description of Artificial Sequence: Synthetic oligonucleotide
  Sense strand starting at position 2471 of SEQ ID NO: 914613
cccuguagagaugguuaga

SEQ ID NO: 1017459 - RNA, 19 nt, Artificial Sequence
  Description of Artificial Sequence: Synthetic oligonucleotide
  Antisense strand to SEQ ID NO: 1017458
ucuaaccaucucuacaggg

SEQ ID NO: 1017460 - RNA, 19 nt, Artificial Sequence
  Description of Artificial Sequence: Synthetic oligonucleotide
  Sense strand starting at position 2683 of SEQ ID NO: 914613
gggcuaaucuugcuaacaa

SEQ ID NO: 1017461 - RNA, 19 nt, Artificial Sequence
  Description of Artificial Sequence: Synthetic oligonucleotide
  Antisense strand to SEQ ID NO: 1017460
uuguuagcaagauuagccc

SEQ ID NO: 1017462 - RNA, 19 nt, Artificial Sequence
  Description of Artificial Sequence: Synthetic oligonucleotide
  Sense strand starting at position 2755 of SEQ ID NO: 914613
uggaauguuuaagcaggua

SEQ ID NO: 1017463 - RNA, 19 nt, Artificial Sequence
  Description of Artificial Sequence: Synthetic oligonucleotide
  Antisense strand to SEQ ID NO: 1017462
uaccugcuuaaacauucca

SEQ ID NO: 1017464 - RNA, 19 nt, Artificial Sequence
  Description of Artificial Sequence: Synthetic oligonucleotide
  Sense strand starting at position 2770 of SEQ ID NO: 914613
gguacagcugucuaucaga

SEQ ID NO: 1017465 - RNA, 19 nt, Artificial Sequence
  Description of Artificial Sequence: Synthetic oligonucleotide
  Antisense strand to SEQ ID NO: 1017464
ucugauagacagcuguacc

SEQ ID NO: 1017466 - RNA, 19 nt, Artificial Sequence
  Description of Artificial Sequence: Synthetic oligonucleotide
  Sense strand starting at position 2784 of SEQ ID NO: 914613
ucagaauaauauguaagca

SEQ ID NO: 1017467 - RNA, 19 nt, Artificial Sequence
  Description of Artificial Sequence: Synthetic oligonucleotide
  Antisense strand to SEQ ID NO: 1017466
ugcuuacauauuauucuga

SEQ ID NO: 1017468 - RNA, 19 nt, Artificial Sequence
  Description of Artificial Sequence: Synthetic oligonucleotide
  Sense strand starting at position 3364 of SEQ ID NO: 914613
ggugaucuuccggaucugu

SEQ ID NO: 1017469 - RNA, 19 nt, Artificial Sequence
  Description of Artificial Sequence: Synthetic oligonucleotide
  Antisense strand to SEQ ID NO: 1017468
acagauccggaagaucacc

SEQ ID NO: 1017470 - RNA, 19 nt, Artificial Sequence
  Description of Artificial Sequence: Synthetic oligonucleotide
  Sense strand starting at position 3441 of SEQ ID NO: 914613
uugugucuugaauauacuu

SEQ ID NO: 1017471 - RNA, 19 nt, Artificial Sequence
  Description of Artificial Sequence: Synthetic oligonucleotide
  Antisense strand to SEQ ID NO: 1017470
aaguauauucaagacacaa

SEQ ID NO: 1017472 - RNA, 19 nt, Artificial Sequence
  Description of Artificial Sequence: Synthetic oligonucleotide
  Sense strand starting at position 3460 of SEQ ID NO: 914613
uugacuuaaguguaguuaa

SEQ ID NO: 1017473 - RNA, 19 nt, Artificial Sequence
  Description of Artificial Sequence: Synthetic oligonucleotide
  Antisense strand to SEQ ID NO: 1017472
uuaacuacacuuaagucaa

SEQ ID NO: 1017474 - RNA, 19 nt, Artificial Sequence
  Description of Artificial Sequence: Synthetic oligonucleotide
  Sense strand starting at position 3495 of SEQ ID NO: 914613
gcucaaacaguccagagau

SEQ ID NO: 1017475 - RNA, 19 nt, Artificial Sequence
  Description of Artificial Sequence: Synthetic oligonucleotide
  Antisense strand to SEQ ID NO: 1017474
aucucuggacuguuugagc

SEQ ID NO: 1017476 - RNA, 19 nt, Artificial Sequence
  Description of Artificial Sequence: Synthetic oligonucleotide
  Sense strand starting at position 3505 of SEQ ID NO: 914613
uccagagauggcgagcuua

SEQ ID NO: 1017477 - RNA, 19 nt, Artificial Sequence
  Description of Artificial Sequence: Synthetic oligonucleotide
  Antisense strand to SEQ ID NO: 1017476
uaagcucgccaucucugga

SEQ ID NO: 1017478 - RNA, 19 nt, Artificial Sequence
  Description of Artificial Sequence: Synthetic oligonucleotide
  Sense strand starting at position 3543 of SEQ ID NO: 914613
augcuuagguuucucaaau

SEQ ID NO: 1017479 - RNA, 19 nt, Artificial Sequence
  Description of Artificial Sequence: Synthetic oligonucleotide
  Antisense strand to SEQ ID NO: 1017478
auuugagaaaccuaagcau

SEQ ID NO: 1017480 - RNA, 19 nt, Artificial Sequence
  Description of Artificial Sequence: Synthetic oligonucleotide
  Sense strand starting at position 3570 of SEQ ID NO: 914613
agagaacaagcuugaauuc

SEQ ID NO: 1017481 - RNA, 19 nt, Artificial Sequence
  Description of Artificial Sequence: Synthetic oligonucleotide
  Antisense strand to SEQ ID NO: 1017480
gaauucaagcuuguucucu

SEQ ID NO: 1017482 - RNA, 19 nt, Artificial Sequence
  Description of Artificial Sequence: Synthetic oligonucleotide
  Sense strand starting at position 3652 of SEQ ID NO: 914613
agagauacuuaagagaaug

SEQ ID NO: 1017483 - RNA, 19 nt, Artificial Sequence
  Description of Artificial Sequence: Synthetic oligonucleotide
  Antisense strand to SEQ ID NO: 1017482
cauucucuuaaguaucucu

SEQ ID NO: 1017484 - RNA, 19 nt, Artificial Sequence
  Description of Artificial Sequence: Synthetic oligonucleotide
  Sense strand starting at position 3669 of SEQ ID NO: 914613
uggugauaucacugauauu

SEQ ID NO: 1017485 - RNA, 19 nt, Artificial Sequence
  Description of Artificial Sequence: Synthetic oligonucleotide
  Antisense strand to SEQ ID NO: 1017484
aauaucagugauaucacca

SEQ ID NO: 1017486 - RNA, 19 nt, Artificial Sequence
  Description of Artificial Sequence: Synthetic oligonucleotide
  Sense strand starting at position 3695 of SEQ ID NO: 914613
acagaaauuaguugguagu

SEQ ID NO: 1017487 - RNA, 19 nt, Artificial Sequence
  Description of Artificial Sequence: Synthetic oligonucleotide
  Antisense strand to SEQ ID NO: 1017486
acuaccaacuaauuucugu

SEQ ID NO: 1017488 - RNA, 19 nt, Artificial Sequence
  Description of Artificial Sequence: Synthetic oligonucleotide
  Sense strand starting at position 3697 of SEQ ID NO: 914613
agaaauuaguugguaguga

SEQ ID NO: 1017489 - RNA, 19 nt, Artificial Sequence
  Description of Artificial Sequence: Synthetic oligonucleotide
  Antisense strand to SEQ ID NO: 1017488
ucacuaccaacuaauuucu

SEQ ID NO: 1017490 - RNA, 19 nt, Artificial Sequence
  Description of Artificial Sequence: Synthetic oligonucleotide
  Sense strand starting at position 3702 of SEQ ID NO: 914613
uuaguugguagugaaagau

SEQ ID NO: 1017491 - RNA, 19 nt, Artificial Sequence
  Description of Artificial Sequence: Synthetic oligonucleotide
  Antisense strand to SEQ ID NO: 1017490
aucuuucacuaccaacuaa

SEQ ID NO: 1017492 - RNA, 19 nt, Artificial Sequence
  Description of Artificial Sequence: Synthetic oligonucleotide
  Sense strand starting at position 3831 of SEQ ID NO: 914613
gcaaacauuuaagaugaau

SEQ ID NO: 1017493 - RNA, 19 nt, Artificial Sequence
  Description of Artificial Sequence: Synthetic oligonucleotide
  Antisense strand to SEQ ID NO: 1017492
auucaucuuaaauguuugc

SEQ ID NO: 1017494 - RNA, 19 nt, Artificial Sequence
  Description of Artificial Sequence: Synthetic oligonucleotide
  Sense strand starting at position 3908 of SEQ ID NO: 914613
auacacauuucugaaagag

SEQ ID NO: 1017495 - RNA, 19 nt, Artificial Sequence
  Description of Artificial Sequence: Synthetic oligonucleotide
  Antisense strand to SEQ ID NO: 1017494
cucuuucagaaauguguau

SEQ ID NO: 1017496 - RNA, 19 nt, Artificial Sequence
  Description of Artificial Sequence: Synthetic oligonucleotide
  Sense strand starting at position 3918 of SEQ ID NO: 914613
cugaaagaguucuuaaugc

SEQ ID NO: 1017497 - RNA, 19 nt, Artificial Sequence
  Description of Artificial Sequence: Synthetic oligonucleotide
  Antisense strand to SEQ ID NO: 1017496
gcauuaagaacucuuucag

SEQ ID NO: 1017498 - RNA, 19 nt, Artificial Sequence
  Description of Artificial Sequence: Synthetic oligonucleotide
  Sense strand starting at position 3963 of SEQ ID NO: 914613
uuauacucuuggguucuua

SEQ ID NO: 1017499 - RNA, 19 nt, Artificial Sequence
  Description of Artificial Sequence: Synthetic oligonucleotide
  Antisense strand to SEQ ID NO: 1017498
uaagaacccaagaguauaa

SEQ ID NO: 1017500 - RNA, 19 nt, Artificial Sequence
  Description of Artificial Sequence: Synthetic oligonucleotide
  Sense strand starting at position 3974 of SEQ ID NO: 914613
gguucuuauuuguuugcau

SEQ ID NO: 1017501 - RNA, 19 nt, Artificial Sequence
  Description of Artificial Sequence: Synthetic oligonucleotide
  Antisense strand to SEQ ID NO: 1017500
augcaaacaaauaagaacc

SEQ ID NO: 1017502 - RNA, 19 nt, Artificial Sequence
  Description of Artificial Sequence: Synthetic oligonucleotide
  Sense strand starting at position 3976 of SEQ ID NO: 914613
uucuuauuuguuugcaugu

SEQ ID NO: 1017503 - RNA, 19 nt, Artificial Sequence
  Description of Artificial Sequence: Synthetic oligonucleotide
  Antisense strand to SEQ ID NO: 1017502
acaugcaaacaaauaagaa

SEQ ID NO: 1017504 - RNA, 19 nt, Artificial Sequence
  Description of Artificial Sequence: Synthetic oligonucleotide
  Sense strand starting at position 28 of SEQ ID NO: 914614
gucaaagagccauaucauu

SEQ ID NO: 1017505 - RNA, 19 nt, Artificial Sequence
  Description of Artificial Sequence: Synthetic oligonucleotide
  Antisense strand to SEQ ID NO: 1017504
aaugauauggcucuuugac

SEQ ID NO: 1017506 - RNA, 19 nt, Artificial Sequence
  Description of Artificial Sequence: Synthetic oligonucleotide
  Sense strand starting at position 104 of SEQ ID NO: 914614
ggacaaguguggcuccaaa

SEQ ID NO: 1017507 - RNA, 19 nt, Artificial Sequence
  Description of Artificial Sequence: Synthetic oligonucleotide
  Antisense strand to SEQ ID NO: 1017506
uuuggagccacacuugucc

SEQ ID NO: 1017508 - RNA, 19 nt, Artificial Sequence
  Description of Artificial Sequence: Synthetic oligonucleotide
  Sense strand starting at position 276 of SEQ ID NO: 914614
uaaggcaucucagugauua

SEQ ID NO: 1017509 - RNA, 19 nt, Artificial Sequence
  Description of Artificial Sequence: Synthetic oligonucleotide
  Antisense strand to SEQ ID NO: 1017508
uaaucacugagaugccuua

SEQ ID NO: 1017510 - RNA, 19 nt, Artificial Sequence
  Description of Artificial Sequence: Synthetic oligonucleotide
  Sense strand starting at position 277 of SEQ ID NO: 914614
aaggcaucucagugauuau

SEQ ID NO: 1017511 - RNA, 19 nt, Artificial Sequence
  Description of Artificial Sequence: Synthetic oligonucleotide
  Antisense strand to SEQ ID NO: 1017510
auaaucacugagaugccuu

SEQ ID NO: 1017512 - RNA, 19 nt, Artificial Sequence
  Description of Artificial Sequence: Synthetic oligonucleotide
  Sense strand starting at position 280 of SEQ ID NO: 914614
gcaucucagugauuauaag

SEQ ID NO: 1017513 - RNA, 19 nt, Artificial Sequence
  Description of Artificial Sequence: Synthetic oligonucleotide
  Antisense strand to SEQ ID NO: 1017512
cuuauaaucacugagaugc

SEQ ID NO: 1017514 - RNA, 19 nt, Artificial Sequence
  Description of Artificial Sequence: Synthetic oligonucleotide
  Sense strand starting at position 421 of SEQ ID NO: 914614
ggacaacauuuggaucuau

SEQ ID NO: 1017515 - RNA, 19 nt, Artificial Sequence
  Description of Artificial Sequence: Synthetic oligonucleotide
  Antisense strand to SEQ ID NO: 1017514
auagauccaaauguugucc

SEQ ID NO: 1017516 - RNA, 19 nt, Artificial Sequence
  Description of Artificial Sequence: Synthetic oligonucleotide
  Sense strand starting at position 432 of SEQ ID NO: 914614
ggaucuauauuaguccagu

SEQ ID NO: 1017517 - RNA, 19 nt, Artificial Sequence
  Description of Artificial Sequence: Synthetic oligonucleotide
  Antisense strand to SEQ ID NO: 1017516
acuggacuaauauagaucc

SEQ ID NO: 1017518 - RNA, 19 nt, Artificial Sequence
  Description of Artificial Sequence: Synthetic oligonucleotide
  Sense strand starting at position 435 of SEQ ID NO: 914614
ucuauauuaguccaguaua

SEQ ID NO: 1017519 - RNA, 19 nt, Artificial Sequence
  Description of Artificial Sequence: Synthetic oligonucleotide
  Antisense strand to SEQ ID NO: 1017518
uauacuggacuaauauaga

SEQ ID NO: 1017520 - RNA, 19 nt, Artificial Sequence
  Description of Artificial Sequence: Synthetic oligonucleotide
  Sense strand starting at position 438 of SEQ ID NO: 914614
auauuaguccaguauagca

SEQ ID NO: 1017521 - RNA, 19 nt, Artificial Sequence
  Description of Artificial Sequence: Synthetic oligonucleotide
  Antisense strand to SEQ ID NO: 1017520
ugcuauacuggacuaauau

SEQ ID NO: 1017522 - RNA, 19 nt, Artificial Sequence
  Description of Artificial Sequence: Synthetic oligonucleotide
  Sense strand starting at position 496 of SEQ ID NO: 914614
uugagaaacucuuuacagu

SEQ ID NO: 1017523 - RNA, 19 nt, Artificial Sequence
  Description of Artificial Sequence: Synthetic oligonucleotide
  Antisense strand to SEQ ID NO: 1017522
acuguaaagaguuucucaa

SEQ ID NO: 1017524 - RNA, 19 nt, Artificial Sequence
  Description of Artificial Sequence: Synthetic oligonucleotide
  Sense strand starting at position 744 of SEQ ID NO: 914614
acaaucauguuauuggaua

SEQ ID NO: 1017525 - RNA, 19 nt, Artificial Sequence
  Description of Artificial Sequence: Synthetic oligonucleotide
  Antisense strand to SEQ ID NO: 1017524
uauccaauaacaugauugu

SEQ ID NO: 1017526 - RNA, 19 nt, Artificial Sequence
  Description of Artificial Sequence: Synthetic oligonucleotide
  Sense strand starting at position 749 of SEQ ID NO: 914614
cauguuauuggauaaugca

SEQ ID NO: 1017527 - RNA, 19 nt, Artificial Sequence
  Description of Artificial Sequence: Synthetic oligonucleotide
  Antisense strand to SEQ ID NO: 1017526
ugcauuauccaauaacaug

SEQ ID NO: 1017528 - RNA, 19 nt, Artificial Sequence
  Description of Artificial Sequence: Synthetic oligonucleotide
  Sense strand starting at position 756 of SEQ ID NO: 914614
uuggauaaugcauauaucu

SEQ ID NO: 1017529 - RNA, 19 nt, Artificial Sequence
  Description of Artificial Sequence: Synthetic oligonucleotide
  Antisense strand to SEQ ID NO: 1017528
agauauaugcauuauccaa

SEQ ID NO: 1017530 - RNA, 19 nt, Artificial Sequence
  Description of Artificial Sequence: Synthetic oligonucleotide
  Sense strand starting at position 782 of SEQ ID NO: 914614
cacaauagucacgaaaguu

SEQ ID NO: 1017531 - RNA, 19 nt, Artificial Sequence
  Description of Artificial Sequence: Synthetic oligonucleotide
  Antisense strand to SEQ ID NO: 1017530
aacuuucgugacuauugug

SEQ ID NO: 1017532 - RNA, 19 nt, Artificial Sequence
  Description of Artificial Sequence: Synthetic oligonucleotide
  Sense strand starting at position 816 of SEQ ID NO: 914614
agugaagauuuacacuaga

SEQ ID NO: 1017533 - RNA, 19 nt, Artificial Sequence
  Description of Artificial Sequence: Synthetic oligonucleotide
  Antisense strand to SEQ ID NO: 1017532
ucuaguguaaaucuucacu

SEQ ID NO: 1017534 - RNA, 19 nt, Artificial Sequence
  Description of Artificial Sequence: Synthetic oligonucleotide
  Sense strand starting at position 1054 of SEQ ID NO: 914614
ccaaaucugcgguacugaa

SEQ ID NO: 1017535 - RNA, 19 nt, Artificial Sequence
  Description of Artificial Sequence: Synthetic oligonucleotide
  Antisense strand to SEQ ID NO: 1017534
uucaguaccgcagauuugg

SEQ ID NO: 1017536 - RNA, 19 nt, Artificial Sequence
  Description of Artificial Sequence: Synthetic oligonucleotide
  Sense strand starting at position 1078 of SEQ ID NO: 914614
ucuuauuaccaacggugau

SEQ ID NO: 1017537 - RNA, 19 nt, Artificial Sequence
  Description of Artificial Sequence: Synthetic oligonucleotide
  Antisense strand to SEQ ID NO: 1017536
aucaccguugguaauaaga

SEQ ID NO: 1017538 - RNA, 19 nt, Artificial Sequence
  Description of Artificial Sequence: Synthetic oligonucleotide
  Sense strand starting at position 1081 of SEQ ID NO: 914614
uauuaccaacggugauaua

SEQ ID NO: 1017539 - RNA, 19 nt, Artificial Sequence
  Description of Artificial Sequence: Synthetic oligonucleotide
  Antisense strand to SEQ ID NO: 1017538
uauaucaccguugguaaua

SEQ ID NO: 1017540 - RNA, 19 nt, Artificial Sequence
  Description of Artificial Sequence: Synthetic oligonucleotide
  Sense strand starting at position 1476 of SEQ ID NO: 914614
ugagucuucuaugucagac

SEQ ID NO: 1017541 - RNA, 19 nt, Artificial Sequence
  Description of Artificial Sequence: Synthetic oligonucleotide
  Antisense strand to SEQ ID NO: 1017540
gucugacauagaagacuca

SEQ ID NO: 1017542 - RNA, 19 nt, Artificial Sequence
  Description of Artificial Sequence: Synthetic oligonucleotide
  Sense strand starting at position 1546 of SEQ ID NO: 914614
cagaguuuacagcaacgua

SEQ ID NO: 1017543 - RNA, 19 nt, Artificial Sequence
  Description of Artificial Sequence: Synthetic oligonucleotide
  Antisense strand to SEQ ID NO: 1017542
uacguugcuguaaacucug

SEQ ID NO: 1017544 - RNA, 19 nt, Artificial Sequence
  Description of Artificial Sequence: Synthetic oligonucleotide
  Sense strand starting at position 1644 of SEQ ID NO: 914614
ugaagaacguuacugaaau

SEQ ID NO: 1017545 - RNA, 19 nt, Artificial Sequence
  Description of Artificial Sequence: Synthetic oligonucleotide
  Antisense strand to SEQ ID NO: 1017544
auuucaguaacguucuuca

SEQ ID NO: 1017546 - RNA, 19 nt, Artificial Sequence
  Description of Artificial Sequence: Synthetic oligonucleotide
  Sense strand starting at position 1928 of SEQ ID NO: 914614
ucagaaguuccggaucuca

SEQ ID NO: 1017547 - RNA, 19 nt, Artificial Sequence
  Description of Artificial Sequence: Synthetic oligonucleotide
  Antisense strand to SEQ ID NO: 1017546
ugagauccggaacuucuga

SEQ ID NO: 1017548 - RNA, 19 nt, Artificial Sequence
  Description of Artificial Sequence: Synthetic oligonucleotide
  Sense strand starting at position 2044 of SEQ ID NO: 914614
cugauccucccauguauua

SEQ ID NO: 1017549 - RNA, 19 nt, Artificial Sequence
  Description of Artificial Sequence: Synthetic oligonucleotide
  Antisense strand to SEQ ID NO: 1017548
uaauacaugggaggaucag

SEQ ID NO: 1017550 - RNA, 19 nt, Artificial Sequence
  Description of Artificial Sequence: Synthetic oligonucleotide
  Sense strand starting at position 2221 of SEQ ID NO: 914614
ucccuauccggcgaggaaa

SEQ ID NO: 1017551 - RNA, 19 nt, Artificial Sequence
  Description of Artificial Sequence: Synthetic oligonucleotide
  Antisense strand to SEQ ID NO: 1017550
uuuccucgccggauaggga

SEQ ID NO: 1017552 - RNA, 19 nt, Artificial Sequence
  Description of Artificial Sequence: Synthetic oligonucleotide
  Sense strand starting at position 2299 of SEQ ID NO: 914614
aguaguauuagacauguaa

SEQ ID NO: 1017553 - RNA, 19 nt, Artificial Sequence
  Description of Artificial Sequence: Synthetic oligonucleotide
  Antisense strand to SEQ ID NO: 1017552
uuacaugucuaauacuacu

SEQ ID NO: 1017554 - RNA, 19 nt, Artificial Sequence
  Description of Artificial Sequence: Synthetic oligonucleotide
  Sense strand starting at position 2592 of SEQ ID NO: 914614
ucuguaagacauggagacu

SEQ ID NO: 1017555 - RNA, 19 nt, Artificial Sequence
  Description of Artificial Sequence: Synthetic oligonucleotide
  Antisense strand to SEQ ID NO: 1017554
agucuccaugucuuacaga

SEQ ID NO: 1017556 - RNA, 19 nt, Artificial Sequence
  Description of Artificial Sequence: Synthetic oligonucleotide
  Sense strand starting at position 2635 of SEQ ID NO: 914614
ggagauacugcugggcauu

SEQ ID NO: 1017557 - RNA, 19 nt, Artificial Sequence
  Description of Artificial Sequence: Synthetic oligonucleotide
  Antisense strand to SEQ ID NO: 1017556
aaugcccagcaguaucucc

SEQ ID NO: 1017558 - RNA, 19 nt, Artificial Sequence
  Description of Artificial Sequence: Synthetic oligonucleotide
  Sense strand starting at position 2647 of SEQ ID NO: 914614
gggcauuuaacgugcacaa

SEQ ID NO: 1017559 - RNA, 19 nt, Artificial Sequence
  Description of Artificial Sequence: Synthetic oligonucleotide
  Antisense strand to SEQ ID NO: 1017558
uugugcacguuaaaugccc

SEQ ID NO: 1017560 - RNA, 19 nt, Artificial Sequence
  Description of Artificial Sequence: Synthetic oligonucleotide
  Sense strand starting at position 2738 of SEQ ID NO: 914614
gggcaaauuucucuccggu

SEQ ID NO: 1017561 - RNA, 19 nt, Artificial Sequence
  Description of Artificial Sequence: Synthetic oligonucleotide
  Antisense strand to SEQ ID NO: 1017560
accggagagaaauuugccc

SEQ ID NO: 1017562 - RNA, 19 nt, Artificial Sequence
  Description of Artificial Sequence: Synthetic oligonucleotide
  Sense strand starting at position 2740 of SEQ ID NO: 914614
gcaaauuucucuccggucu

SEQ ID NO: 1017563 - RNA, 19 nt, Artificial Sequence
  Description of Artificial Sequence: Synthetic oligonucleotide
  Antisense strand to SEQ ID NO: 1017562
agaccggagagaaauuugc

SEQ ID NO: 1017564 - RNA, 19 nt, Artificial Sequence
  Description of Artificial Sequence: Synthetic oligonucleotide
  Sense strand starting at position 2889 of SEQ ID NO: 914614
ggaggaggugcccgagaaa

SEQ ID NO: 1017565 - RNA, 19 nt, Artificial Sequence
  Description of Artificial Sequence: Synthetic oligonucleotide
  Antisense strand to SEQ ID NO: 1017564
uuucucgggcaccuccucc

SEQ ID NO: 1017566 - RNA, 19 nt, Artificial Sequence
  Description of Artificial Sequence: Synthetic oligonucleotide
  Sense strand starting at position 3058 of SEQ ID NO: 914614
cgaagagaucagggagcua

SEQ ID NO: 1017567 - RNA, 19 nt, Artificial Sequence
  Description of Artificial Sequence: Synthetic oligonucleotide
  Antisense strand to SEQ ID NO: 1017566
uagcucccugaucucuucg

SEQ ID NO: 1017568 - RNA, 19 nt, Artificial Sequence
  Description of Artificial Sequence: Synthetic oligonucleotide
  Sense strand starting at position 3078 of SEQ ID NO: 914614
gcugauaaauagucaggga

SEQ ID NO: 1017569 - RNA, 19 nt, Artificial Sequence
  Description of Artificial Sequence: Synthetic oligonucleotide
  Antisense strand to SEQ ID NO: 1017568
ucccugacuauuuaucagc

SEQ ID NO: 1017570 - RNA, 19 nt, Artificial Sequence
  Description of Artificial Sequence: Synthetic oligonucleotide
  Sense strand starting at position 3254 of SEQ ID NO: 914614
aggcguugagccguaaauc

SEQ ID NO: 1017571 - RNA, 19 nt, Artificial Sequence
  Description of Artificial Sequence: Synthetic oligonucleotide
  Antisense strand to SEQ ID NO: 1017570
gauuuacggcucaacgccu

SEQ ID NO: 1017572 - RNA, 19 nt, Artificial Sequence
  Description of Artificial Sequence: Synthetic oligonucleotide
  Sense strand starting at position 3425 of SEQ ID NO: 914614
ggaaauccgaagugguaug

SEQ ID NO: 1017573 - RNA, 19 nt, Artificial Sequence
  Description of Artificial Sequence: Synthetic oligonucleotide
  Antisense strand to SEQ ID NO: 1017572
cauaccacuucggauuucc

SEQ ID NO: 1017574 - RNA, 19 nt, Artificial Sequence
  Description of Artificial Sequence: Synthetic oligonucleotide
  Sense strand starting at position 3543 of SEQ ID NO: 914614
ggagcagucgauuaagucu

SEQ ID NO: 1017575 - RNA, 19 nt, Artificial Sequence
  Description of Artificial Sequence: Synthetic oligonucleotide
  Antisense strand to SEQ ID NO: 1017574
agacuuaaucgacugcucc

SEQ ID NO: 1017576 - RNA, 19 nt, Artificial Sequence
  Description of Artificial Sequence: Synthetic oligonucleotide
  Sense strand starting at position 3588 of SEQ ID NO: 914614
gaacguagaugaccuaaau

SEQ ID NO: 1017577 - RNA, 19 nt, Artificial Sequence
  Description of Artificial Sequence: Synthetic oligonucleotide
  Antisense strand to SEQ ID NO: 1017576
auuuaggucaucuacguuc

SEQ ID NO: 1017578 - RNA, 19 nt, Artificial Sequence
  Description of Artificial Sequence: Synthetic oligonucleotide
  Sense strand starting at position 3676 of SEQ ID NO: 914614
uggaguauuucccugcuuc

SEQ ID NO: 1017579 - RNA, 19 nt, Artificial Sequence
  Description of Artificial Sequence: Synthetic oligonucleotide
  Antisense strand to SEQ ID NO: 1017578
gaagcagggaaauacucca

SEQ ID NO: 1017580 - RNA, 19 nt, Artificial Sequence
  Description of Artificial Sequence: Synthetic oligonucleotide
  Sense strand starting at position 3677 of SEQ ID NO: 914614
ggaguauuucccugcuucu

SEQ ID NO: 1017581 - RNA, 19 nt, Artificial Sequence
  Description of Artificial Sequence: Synthetic oligonucleotide
  Antisense strand to SEQ ID NO: 1017580
agaagcagggaaauacucc

SEQ ID NO: 1017582 - RNA, 19 nt, Artificial Sequence
  Description of Artificial Sequence: Synthetic oligonucleotide
  Sense strand starting at position 3725 of SEQ ID NO: 914614
cucuuucgguuauugauuu

SEQ ID NO: 1017583 - RNA, 19 nt, Artificial Sequence
  Description of Artificial Sequence: Synthetic oligonucleotide
  Antisense strand to SEQ ID NO: 1017582
aaaucaauaaccgaaagag

SEQ ID NO: 1017584 - RNA, 19 nt, Artificial Sequence
  Description of Artificial Sequence: Synthetic oligonucleotide
  Sense strand starting at position 78 of SEQ ID NO: 914615
gacagaguagcccacgaau

SEQ ID NO: 1017585 - RNA, 19 nt, Artificial Sequence
  Description of Artificial Sequence: Synthetic oligonucleotide
  Antisense strand to SEQ ID NO: 1017584
auucgugggcuacucuguc

SEQ ID NO: 1017586 - RNA, 19 nt, Artificial Sequence
  Description of Artificial Sequence: Synthetic oligonucleotide
  Sense strand starting at position 81 of SEQ ID NO: 914615
agaguagcccacgaauuau

SEQ ID NO: 1017587 - RNA, 19 nt, Artificial Sequence
  Description of Artificial Sequence: Synthetic oligonucleotide
  Antisense strand to SEQ ID NO: 1017586
auaauucgugggcuacucu

SEQ ID NO: 1017588 - RNA, 19 nt, Artificial Sequence
  Description of Artificial Sequence: Synthetic oligonucleotide
  Sense strand starting at position 301 of SEQ ID NO: 914615
gacgcuuguugguugauuu

SEQ ID NO: 1017589 - RNA, 19 nt, Artificial Sequence
  Description of Artificial Sequence: Synthetic oligonucleotide
  Antisense strand to SEQ ID NO: 1017588
aaaucaaccaacaagcguc

SEQ ID NO: 1017590 - RNA, 19 nt, Artificial Sequence
  Description of Artificial Sequence: Synthetic oligonucleotide
  Sense strand starting at position 302 of SEQ ID NO: 914615
acgcuuguugguugauuua

SEQ ID NO: 1017591 - RNA, 19 nt, Artificial Sequence
  Description of Artificial Sequence: Synthetic oligonucleotide
  Antisense strand to SEQ ID NO: 1017590
uaaaucaaccaacaagcgu

SEQ ID NO: 1017592 - RNA, 19 nt, Artificial Sequence
  Description of Artificial Sequence: Synthetic oligonucleotide
  Sense strand starting at position 613 of SEQ ID NO: 914615
cuccgugaacgaggaaaua

SEQ ID NO: 1017593 - RNA, 19 nt, Artificial Sequence
  Description of Artificial Sequence: Synthetic oligonucleotide
  Antisense strand to SEQ ID NO: 1017592
uauuuccucguucacggag

SEQ ID NO: 1017594 - RNA, 19 nt, Artificial Sequence
  Description of Artificial Sequence: Synthetic oligonucleotide
  Sense strand starting at position 622 of SEQ ID NO: 914615
cgaggaaauacuugagguc

SEQ ID NO: 1017595 - RNA, 19 nt, Artificial Sequence
  Description of Artificial Sequence: Synthetic oligonucleotide
  Antisense strand to SEQ ID NO: 1017594
gaccucaaguauuuccucg

SEQ ID NO: 1017596 - RNA, 19 nt, Artificial Sequence
  Description of Artificial Sequence: Synthetic oligonucleotide
  Sense strand starting at position 781 of SEQ ID NO: 914615
agaguuucccaccauuagu

SEQ ID NO: 1017597 - RNA, 19 nt, Artificial Sequence
  Description of Artificial Sequence: Synthetic oligonucleotide
  Antisense strand to SEQ ID NO: 1017596
acuaauggugggaaacucu

SEQ ID NO: 1017598 - RNA, 19 nt, Artificial Sequence
  Description of Artificial Sequence: Synthetic oligonucleotide
  Sense strand starting at position 836 of SEQ ID NO: 914615
ggcuuuaguagucaagauc

SEQ ID NO: 1017599 - RNA, 19 nt, Artificial Sequence
  Description of Artificial Sequence: Synthetic oligonucleotide
  Antisense strand to SEQ ID NO: 1017598
gaucuugacuacuaaagcc

SEQ ID NO: 1017600 - RNA, 19 nt, Artificial Sequence
  Description of Artificial Sequence: Synthetic oligonucleotide
  Sense strand starting at position 839 of SEQ ID NO: 914615
uuuaguagucaagaucaac

SEQ ID NO: 1017601 - RNA, 19 nt, Artificial Sequence
  Description of Artificial Sequence: Synthetic oligonucleotide
  Antisense strand to SEQ ID NO: 1017600
guugaucuugacuacuaaa

SEQ ID NO: 1017602 - RNA, 19 nt, Artificial Sequence
  Description of Artificial Sequence: Synthetic oligonucleotide
  Sense strand starting at position 853 of SEQ ID NO: 914615
ucaacuuaccgugauccaa

SEQ ID NO: 1017603 - RNA, 19 nt, Artificial Sequence
  Description of Artificial Sequence: Synthetic oligonucleotide
  Antisense strand to SEQ ID NO: 1017602
uuggaucacgguaaguuga

SEQ ID NO: 1017604 - RNA, 19 nt, Artificial Sequence
  Description of Artificial Sequence: Synthetic oligonucleotide
  Sense strand starting at position 902 of SEQ ID NO: 914615
ucaaauauagcccagaguu

SEQ ID NO: 1017605 - RNA, 19 nt, Artificial Sequence
  Description of Artificial Sequence: Synthetic oligonucleotide
  Antisense strand to SEQ ID NO: 1017604
aacucugggcuauauuuga

SEQ ID NO: 1017606 - RNA, 19 nt, Artificial Sequence
  Description of Artificial Sequence: Synthetic oligonucleotide
  Sense strand starting at position 1029 of SEQ ID NO: 914615
agaagcauaucucuugagu

SEQ ID NO: 1017607 - RNA, 19 nt, Artificial Sequence
  Description of Artificial Sequence: Synthetic oligonucleotide
  Antisense strand to SEQ ID NO: 1017606
acucaagagauaugcuucu

SEQ ID NO: 1017608 - RNA, 19 nt, Artificial Sequence
  Description of Artificial Sequence: Synthetic oligonucleotide
  Sense strand starting at position 1042 of SEQ ID NO: 914615
uugaguuucuaugucagaa

SEQ ID NO: 1017609 - RNA, 19 nt, Artificial Sequence
  Description of Artificial Sequence: Synthetic oligonucleotide
  Antisense strand to SEQ ID NO: 1017608
uucugacauagaaacucaa

SEQ ID NO: 1017610 - RNA, 19 nt, Artificial Sequence
  Description of Artificial Sequence: Synthetic oligonucleotide
  Sense strand starting at position 1129 of SEQ ID NO: 914615
uagcuaauuggugaucuca

SEQ ID NO: 1017611 - RNA, 19 nt, Artificial Sequence
  Description of Artificial Sequence: Synthetic oligonucleotide
  Antisense strand to SEQ ID NO: 1017610
ugagaucaccaauuagcua

SEQ ID NO: 1017612 - RNA, 19 nt, Artificial Sequence
  Description of Artificial Sequence: Synthetic oligonucleotide
  Sense strand starting at position 1186 of SEQ ID NO: 914615
uuaauauucuucuugguag

SEQ ID NO: 1017613 - RNA, 19 nt, Artificial Sequence
  Description of Artificial Sequence: Synthetic oligonucleotide
  Antisense strand to SEQ ID NO: 1017612
cuaccaagaagaauauuaa

SEQ ID NO: 1017614 - RNA, 19 nt, Artificial Sequence
  Description of Artificial Sequence: Synthetic oligonucleotide
  Sense strand starting at position 1215 of SEQ ID NO: 914615
cuuaucucggccuaucaaa

SEQ ID NO: 1017615 - RNA, 19 nt, Artificial Sequence
  Description of Artificial Sequence: Synthetic oligonucleotide
  Antisense strand to SEQ ID NO: 1017614
uuugauaggccgagauaag

SEQ ID NO: 1017616 - RNA, 19 nt, Artificial Sequence
  Description of Artificial Sequence: Synthetic oligonucleotide
  Sense strand starting at position 1245 of SEQ ID NO: 914615
ugauuccucugguuaaaua

SEQ ID NO: 1017617 - RNA, 19 nt, Artificial Sequence
  Description of Artificial Sequence: Synthetic oligonucleotide
  Antisense strand to SEQ ID NO: 1017616
uauuuaaccagaggaauca

SEQ ID NO: 1017618 - RNA, 19 nt, Artificial Sequence
  Description of Artificial Sequence: Synthetic oligonucleotide
  Sense strand starting at position 1533 of SEQ ID NO: 914615
ggaaauaaacauugcaguu

SEQ ID NO: 1017619 - RNA, 19 nt, Artificial Sequence
  Description of Artificial Sequence: Synthetic oligonucleotide
  Antisense strand to SEQ ID NO: 1017618
aacugcaauguuuauuucc

SEQ ID NO: 1017620 - RNA, 19 nt, Artificial Sequence
  Description of Artificial Sequence: Synthetic oligonucleotide
  Sense strand starting at position 1599 of SEQ ID NO: 914615
aguacaugccacuauuaga

SEQ ID NO: 1017621 - RNA, 19 nt, Artificial Sequence
  Description of Artificial Sequence: Synthetic oligonucleotide
  Antisense strand to SEQ ID NO: 1017620
ucuaauaguggcauguacu

SEQ ID NO: 1017622 - RNA, 19 nt, Artificial Sequence
  Description of Artificial Sequence: Synthetic oligonucleotide
  Sense strand starting at position 1641 of SEQ ID NO: 914615
guuugauuggaccacuguu

SEQ ID NO: 1017623 - RNA, 19 nt, Artificial Sequence
  Description of Artificial Sequence: Synthetic oligonucleotide
  Antisense strand to SEQ ID NO: 1017622
aacagugguccaaucaaac

SEQ ID NO: 1017624 - RNA, 19 nt, Artificial Sequence
  Description of Artificial Sequence: Synthetic oligonucleotide
  Sense strand starting at position 1671 of SEQ ID NO: 914615
accgauuaaugcuuggaca

SEQ ID NO: 1017625 - RNA, 19 nt, Artificial Sequence
  Description of Artificial Sequence: Synthetic oligonucleotide
  Antisense strand to SEQ ID NO: 1017624
uguccaagcauuaaucggu

SEQ ID NO: 1017626 - RNA, 19 nt, Artificial Sequence
  Description of Artificial Sequence: Synthetic oligonucleotide
  Sense strand starting at position 2400 of SEQ ID NO: 914615
aagggagucgguuauauac

SEQ ID NO: 1017627 - RNA, 19 nt, Artificial Sequence
  Description of Artificial Sequence: Synthetic oligonucleotide
  Antisense strand to SEQ ID NO: 1017626
guauauaaccgacucccuu

SEQ ID NO: 1017628 - RNA, 19 nt, Artificial Sequence
  Description of Artificial Sequence: Synthetic oligonucleotide
  Sense strand starting at position 2521 of SEQ ID NO: 914615
cucucaguuuaguuaagag

SEQ ID NO: 1017629 - RNA, 19 nt, Artificial Sequence
  Description of Artificial Sequence: Synthetic oligonucleotide
  Antisense strand to SEQ ID NO: 1017628
cucuuaacuaaacugagag

SEQ ID NO: 1017630 - RNA, 19 nt, Artificial Sequence
  Description of Artificial Sequence: Synthetic oligonucleotide
  Sense strand starting at position 2529 of SEQ ID NO: 914615
uuaguuaagagcuagaugu

SEQ ID NO: 1017631 - RNA, 19 nt, Artificial Sequence
  Description of Artificial Sequence: Synthetic oligonucleotide
  Antisense strand to SEQ ID NO: 1017630
acaucuagcucuuaacuaa

SEQ ID NO: 1017632 - RNA, 19 nt, Artificial Sequence
  Description of Artificial Sequence: Synthetic oligonucleotide
  Sense strand starting at position 2531 of SEQ ID NO: 914615
aguuaagagcuagauguga

SEQ ID NO: 1017633 - RNA, 19 nt, Artificial Sequence
  Description of Artificial Sequence: Synthetic oligonucleotide
  Antisense strand to SEQ ID NO: 1017632
ucacaucuagcucuuaacu

SEQ ID NO: 1017634 - RNA, 19 nt, Artificial Sequence
  Description of Artificial Sequence: Synthetic oligonucleotide
  Sense strand starting at position 2567 of SEQ ID NO: 914615
gaguauuacugucuuaaug

SEQ ID NO: 1017635 - RNA, 19 nt, Artificial Sequence
  Description of Artificial Sequence: Synthetic oligonucleotide
  Antisense strand to SEQ ID NO: 1017634
cauuaagacaguaauacuc

SEQ ID NO: 1017636 - RNA, 19 nt, Artificial Sequence
  Description of Artificial Sequence: Synthetic oligonucleotide
  Sense strand starting at position 2578 of SEQ ID NO: 914615
ucuuaauggcacuaugagu

SEQ ID NO: 1017637 - RNA, 19 nt, Artificial Sequence
  Description of Artificial Sequence: Synthetic oligonucleotide
  Antisense strand to SEQ ID NO: 1017636
acucauagugccauuaaga

SEQ ID NO: 1017638 - RNA, 19 nt, Artificial Sequence
  Description of Artificial Sequence: Synthetic oligonucleotide
  Sense strand starting at position 2591 of SEQ ID NO: 914615
augaguuguuuaucuggga

SEQ ID NO: 1017639 - RNA, 19 nt, Artificial Sequence
  Description of Artificial Sequence: Synthetic oligonucleotide
  Antisense strand to SEQ ID NO: 1017638
ucccagauaaacaacucau

SEQ ID NO: 1017640 - RNA, 19 nt, Artificial Sequence
  Description of Artificial Sequence: Synthetic oligonucleotide
  Sense strand starting at position 2754 of SEQ ID NO: 914615
uuaaauguucucgggaaau

SEQ ID NO: 1017641 - RNA, 19 nt, Artificial Sequence
  Description of Artificial Sequence: Synthetic oligonucleotide
  Antisense strand to SEQ ID NO: 1017640
auuucccgagaacauuuaa

SEQ ID NO: 1017642 - RNA, 19 nt, Artificial Sequence
  Description of Artificial Sequence: Synthetic oligonucleotide
  Sense strand starting at position 2813 of SEQ ID NO: 914615
ugugcacuucgacaacaaa

SEQ ID NO: 1017643 - RNA, 19 nt, Artificial Sequence
  Description of Artificial Sequence: Synthetic oligonucleotide
  Antisense strand to SEQ ID NO: 1017642
uuuguugucgaagugcaca

SEQ ID NO: 1017644 - RNA, 19 nt, Artificial Sequence
  Description of Artificial Sequence: Synthetic oligonucleotide
  Sense strand starting at position 2838 of SEQ ID NO: 914615
ucguauaagcaugaaauaa

SEQ ID NO: 1017645 - RNA, 19 nt, Artificial Sequence
  Description of Artificial Sequence: Synthetic oligonucleotide
  Antisense strand to SEQ ID NO: 1017644
uuauuucaugcuuauacga

SEQ ID NO: 1017646 - RNA, 19 nt, Artificial Sequence
  Description of Artificial Sequence: Synthetic oligonucleotide
  Sense strand starting at position 2996 of SEQ ID NO: 914615
gaaggugaugcucagagca

SEQ ID NO: 1017647 - RNA, 19 nt, Artificial Sequence
  Description of Artificial Sequence: Synthetic oligonucleotide
  Antisense strand to SEQ ID NO: 1017646
ugcucugagcaucaccuuc

SEQ ID NO: 1017648 - RNA, 19 nt, Artificial Sequence
  Description of Artificial Sequence: Synthetic oligonucleotide
  Sense strand starting at position 3082 of SEQ ID NO: 914615
caagcaugucaagagguaa

SEQ ID NO: 1017649 - RNA, 19 nt, Artificial Sequence
  Description of Artificial Sequence: Synthetic oligonucleotide
  Antisense strand to SEQ ID NO: 1017648
uuaccucuugacaugcuug

SEQ ID NO: 1017650 - RNA, 19 nt, Artificial Sequence
  Description of Artificial Sequence: Synthetic oligonucleotide
  Sense strand starting at position 3180 of SEQ ID NO: 914615
guacaaauuguaggaaaca

SEQ ID NO: 1017651 - RNA, 19 nt, Artificial Sequence
  Description of Artificial Sequence: Synthetic oligonucleotide
  Antisense strand to SEQ ID NO: 1017650
uguuuccuacaauuuguac

SEQ ID NO: 1017652 - RNA, 19 nt, Artificial Sequence
  Description of Artificial Sequence: Synthetic oligonucleotide
  Sense strand starting at position 3238 of SEQ ID NO: 914615
uuggaagagcagcaugauu

SEQ ID NO: 1017653 - RNA, 19 nt, Artificial Sequence
  Description of Artificial Sequence: Synthetic oligonucleotide
  Antisense strand to SEQ ID NO: 1017652
aaucaugcugcucuuccaa

SEQ ID NO: 1017654 - RNA, 19 nt, Artificial Sequence
  Description of Artificial Sequence: Synthetic oligonucleotide
  Sense strand starting at position 3449 of SEQ ID NO: 914615
uuaccuaauuuguagggaa

SEQ ID NO: 1017655 - RNA, 19 nt, Artificial Sequence
  Description of Artificial Sequence: Synthetic oligonucleotide
  Antisense strand to SEQ ID NO: 1017654
uucccuacaaauuagguaa

SEQ ID NO: 1017656 - RNA, 19 nt, Artificial Sequence
  Description of Artificial Sequence: Synthetic oligonucleotide
  Sense strand starting at position 3506 of SEQ ID NO: 914615
ggcuauugccauuagacag

SEQ ID NO: 1017657 - RNA, 19 nt, Artificial Sequence
  Description of Artificial Sequence: Synthetic oligonucleotide
  Antisense strand to SEQ ID NO: 1017656
cugucuaauggcaauagcc

SEQ ID NO: 1017658 - RNA, 19 nt, Artificial Sequence
  Description of Artificial Sequence: Synthetic oligonucleotide
  Sense strand starting at position 3713 of SEQ ID NO: 914615
acuaguaaauguucugaau

SEQ ID NO: 1017659 - RNA, 19 nt, Artificial Sequence
  Description of Artificial Sequence: Synthetic oligonucleotide
  Antisense strand to SEQ ID NO: 1017658
auucagaacauuuacuagu

SEQ ID NO: 1017660 - RNA, 19 nt, Artificial Sequence
  Description of Artificial Sequence: Synthetic oligonucleotide
  Sense strand starting at position 3724 of SEQ ID NO: 914615
uucugaauuucucaggaaa

SEQ ID NO: 1017661 - RNA, 19 nt, Artificial Sequence
  Description of Artificial Sequence: Synthetic oligonucleotide
  Antisense strand to SEQ ID NO: 1017660
uuuccugagaaauucagaa

SEQ ID NO: 1017662 - RNA, 19 nt, Artificial Sequence
  Description of Artificial Sequence: Synthetic oligonucleotide
  Sense strand starting at position 3803 of SEQ ID NO: 914615
ugaaauucuuaagcaaaug

SEQ ID NO: 1017663 - RNA, 19 nt, Artificial Sequence
  Description of Artificial Sequence: Synthetic oligonucleotide
  Antisense strand to SEQ ID NO: 1017662
cauuugcuuaagaauuuca

SEQ ID NO: 1017664 - RNA, 19 nt, Artificial Sequence
  Description of Artificial Sequence: Synthetic oligonucleotide
  Sense strand starting at position 81 of SEQ ID NO: 914616
uugcucuauccagaagcuu

SEQ ID NO: 1017665 - RNA, 19 nt, Artificial Sequence
  Description of Artificial Sequence: Synthetic oligonucleotide
  Antisense strand to SEQ ID NO: 1017664
aagcuucuggauagagcaa

SEQ ID NO: 1017666 - RNA, 19 nt, Artificial Sequence
  Description of Artificial Sequence: Synthetic oligonucleotide
  Sense strand starting at position 142 of SEQ ID NO: 914616
ccgcuuguggauuagaaac

SEQ ID NO: 1017667 - RNA, 19 nt, Artificial Sequence
  Description of Artificial Sequence: Synthetic oligonucleotide
  Antisense strand to SEQ ID NO: 1017666
guuucuaauccacaagcgg

SEQ ID NO: 1017668 - RNA, 19 nt, Artificial Sequence
  Description of Artificial Sequence: Synthetic oligonucleotide
  Sense strand starting at position 213 of SEQ ID NO: 914616
gcucuuuaagcagaacuua

SEQ ID NO: 1017669 - RNA, 19 nt, Artificial Sequence
  Description of Artificial Sequence: Synthetic oligonucleotide
  Antisense strand to SEQ ID NO: 1017668
uaaguucugcuuaaagagc

SEQ ID NO: 1017670 - RNA, 19 nt, Artificial Sequence
  Description of Artificial Sequence: Synthetic oligonucleotide
  Sense strand starting at position 716 of SEQ ID NO: 914616
gccauaugacaccagaguu

SEQ ID NO: 1017671 - RNA, 19 nt, Artificial Sequence
  Description of Artificial Sequence: Synthetic oligonucleotide
  Antisense strand to SEQ ID NO: 1017670
aacucuggugucauauggc

SEQ ID NO: 1017672 - RNA, 19 nt, Artificial Sequence
  Description of Artificial Sequence: Synthetic oligonucleotide
  Sense strand starting at position 729 of SEQ ID NO: 914616
agaguuaaaucugcuauug

SEQ ID NO: 1017673 - RNA, 19 nt, Artificial Sequence
  Description of Artificial Sequence: Synthetic oligonucleotide
  Antisense strand to SEQ ID NO: 1017672
caauagcagauuuaacucu

SEQ ID NO: 1017674 - RNA, 19 nt, Artificial Sequence
  Description of Artificial Sequence: Synthetic oligonucleotide
  Sense strand starting at position 777 of SEQ ID NO: 914616
ccaugagauuuggacagag

SEQ ID NO: 1017675 - RNA, 19 nt, Artificial Sequence
  Description of Artificial Sequence: Synthetic oligonucleotide
  Antisense strand to SEQ ID NO: 1017674
cucuguccaaaucucaugg

SEQ ID NO: 1017676 - RNA, 19 nt, Artificial Sequence
  Description of Artificial Sequence: Synthetic oligonucleotide
  Sense strand starting at position 971 of SEQ ID NO: 914616
guaauuguuaauggugaua

SEQ ID NO: 1017677 - RNA, 19 nt, Artificial Sequence
  Description of Artificial Sequence: Synthetic oligonucleotide
  Antisense strand to SEQ ID NO: 1017676
uaucaccauuaacaauuac

SEQ ID NO: 1017678 - RNA, 19 nt, Artificial Sequence
  Description of Artificial Sequence: Synthetic oligonucleotide
  Sense strand starting at position 1145 of SEQ ID NO: 914616
augcaaaucucauuggauu

SEQ ID NO: 1017679 - RNA, 19 nt, Artificial Sequence
  Description of Artificial Sequence: Synthetic oligonucleotide
  Antisense strand to SEQ ID NO: 1017678
aauccaaugagauuugcau

SEQ ID NO: 1017680 - RNA, 19 nt, Artificial Sequence
  Description of Artificial Sequence: Synthetic oligonucleotide
  Sense strand starting at position 1146 of SEQ ID NO: 914616
ugcaaaucucauuggauuc

SEQ ID NO: 1017681 - RNA, 19 nt, Artificial Sequence
  Description of Artificial Sequence: Synthetic oligonucleotide
  Antisense strand to SEQ ID NO: 1017680
gaauccaaugagauuugca

SEQ ID NO: 1017682 - RNA, 19 nt, Artificial Sequence
  Description of Artificial Sequence: Synthetic oligonucleotide
  Sense strand starting at position 1156 of SEQ ID NO: 914616
auuggauucugaucccauc

SEQ ID NO: 1017683 - RNA, 19 nt, Artificial Sequence
  Description of Artificial Sequence: Synthetic oligonucleotide
  Antisense strand to SEQ ID NO: 1017682
gaugggaucagaauccaau

SEQ ID NO: 1017684 - RNA, 19 nt, Artificial Sequence
  Description of Artificial Sequence: Synthetic oligonucleotide
  Sense strand starting at position 1274 of SEQ ID NO: 914616
auuugaaucuugccuugca

SEQ ID NO: 1017685 - RNA, 19 nt, Artificial Sequence
  Description of Artificial Sequence: Synthetic oligonucleotide
  Antisense strand to SEQ ID NO: 1017684
ugcaaggcaagauucaaau

SEQ ID NO: 1017686 - RNA, 19 nt, Artificial Sequence
  Description of Artificial Sequence: Synthetic oligonucleotide
  Sense strand starting at position 1429 of SEQ ID NO: 914616
acaauuucgugacaaagag

SEQ ID NO: 1017687 - RNA, 19 nt, Artificial Sequence
  Description of Artificial Sequence: Synthetic oligonucleotide
  Antisense strand to SEQ ID NO: 1017686
cucuuugucacgaaauugu

SEQ ID NO: 1017688 - RNA, 19 nt, Artificial Sequence
  Description of Artificial Sequence: Synthetic oligonucleotide
  Sense strand starting at position 1433 of SEQ ID NO: 914616
uuucgugacaaagagacuu

SEQ ID NO: 1017689 - RNA, 19 nt, Artificial Sequence
  Description of Artificial Sequence: Synthetic oligonucleotide
  Antisense strand to SEQ ID NO: 1017688
aagucucuuugucacgaaa

SEQ ID NO: 1017690 - RNA, 19 nt, Artificial Sequence
  Description of Artificial Sequence: Synthetic oligonucleotide
  Sense strand starting at position 1599 of SEQ ID NO: 914616
aaaggaaauuguggaauuu

SEQ ID NO: 1017691 - RNA, 19 nt, Artificial Sequence
  Description of Artificial Sequence: Synthetic oligonucleotide
  Antisense strand to SEQ ID NO: 1017690
aaauuccacaauuuccuuu

SEQ ID NO: 1017692 - RNA, 19 nt, Artificial Sequence
  Description of Artificial Sequence: Synthetic oligonucleotide
  Sense strand starting at position 1819 of SEQ ID NO: 914616
gucugcuguccgguucaca

SEQ ID NO: 1017693 - RNA, 19 nt, Artificial Sequence
  Description of Artificial Sequence: Synthetic oligonucleotide
  Antisense strand to SEQ ID NO: 1017692
ugugaaccggacagcagac

SEQ ID NO: 1017694 - RNA, 19 nt, Artificial Sequence
  Description of Artificial Sequence: Synthetic oligonucleotide
  Sense strand starting at position 1875 of SEQ ID NO: 914616
gcggaaccugaugaauuau

SEQ ID NO: 1017695 - RNA, 19 nt, Artificial Sequence
  Description of Artificial Sequence: Synthetic oligonucleotide
  Antisense strand to SEQ ID NO: 1017694
auaauucaucagguuccgc

SEQ ID NO: 1017696 - RNA, 19 nt, Artificial Sequence
  Description of Artificial Sequence: Synthetic oligonucleotide
  Sense strand starting at position 2007 of SEQ ID NO: 914616
cuuagaagcagugacagua

SEQ ID NO: 1017697 - RNA, 19 nt, Artificial Sequence
  Description of Artificial Sequence: Synthetic oligonucleotide
  Antisense strand to SEQ ID NO: 1017696
uacugucacugcuucuaag

SEQ ID NO: 1017698 - RNA, 19 nt, Artificial Sequence
  Description of Artificial Sequence: Synthetic oligonucleotide
  Sense strand starting at position 2022 of SEQ ID NO: 914616
aguaauugguguuugggau

SEQ ID NO: 1017699 - RNA, 19 nt, Artificial Sequence
  Description of Artificial Sequence: Synthetic oligonucleotide
  Antisense strand to SEQ ID NO: 1017698
aucccaaacaccaauuacu

SEQ ID NO: 1017700 - RNA, 19 nt, Artificial Sequence
  Description of Artificial Sequence: Synthetic oligonucleotide
  Sense strand starting at position 2062 of SEQ ID NO: 914616
augcuuucccaccaucagu

SEQ ID NO: 1017701 - RNA, 19 nt, Artificial Sequence
  Description of Artificial Sequence: Synthetic oligonucleotide
  Antisense strand to SEQ ID NO: 1017700
acugauggugggaaagcau

SEQ ID NO: 1017702 - RNA, 19 nt, Artificial Sequence
  Description of Artificial Sequence: Synthetic oligonucleotide
  Sense strand starting at position 2300 of SEQ ID NO: 914616
ugagucucucagugacuaa

SEQ ID NO: 1017703 - RNA, 19 nt, Artificial Sequence
  Description of Artificial Sequence: Synthetic oligonucleotide
  Antisense strand to SEQ ID NO: 1017702
uuagucacugagagacuca

SEQ ID NO: 1017704 - RNA, 19 nt, Artificial Sequence
  Description of Artificial Sequence: Synthetic oligonucleotide
  Sense strand starting at position 2303 of SEQ ID NO: 914616
gucucucagugacuaaaga

SEQ ID NO: 1017705 - RNA, 19 nt, Artificial Sequence
  Description of Artificial Sequence: Synthetic oligonucleotide
  Antisense strand to SEQ ID NO: 1017704
ucuuuagucacugagagac

SEQ ID NO: 1017706 - RNA, 19 nt, Artificial Sequence
  Description of Artificial Sequence: Synthetic oligonucleotide
  Sense strand starting at position 2311 of SEQ ID NO: 914616
gugacuaaagaagguauca

SEQ ID NO: 1017707 - RNA, 19 nt, Artificial Sequence
  Description of Artificial Sequence: Synthetic oligonucleotide
  Antisense strand to SEQ ID NO: 1017706
ugauaccuucuuuagucac

SEQ ID NO: 1017708 - RNA, 19 nt, Artificial Sequence
  Description of Artificial Sequence: Synthetic oligonucleotide
  Sense strand starting at position 2322 of SEQ ID NO: 914616
agguaucaggagugcuaca

SEQ ID NO: 1017709 - RNA, 19 nt, Artificial Sequence
  Description of Artificial Sequence: Synthetic oligonucleotide
  Antisense strand to SEQ ID NO: 1017708
uguagcacuccugauaccu

SEQ ID NO: 1017710 - RNA, 19 nt, Artificial Sequence
  Description of Artificial Sequence: Synthetic oligonucleotide
  Sense strand starting at position 2327 of SEQ ID NO: 914616
ucaggagugcuacaguaca

SEQ ID NO: 1017711 - RNA, 19 nt, Artificial Sequence
  Description of Artificial Sequence: Synthetic oligonucleotide
  Antisense strand to SEQ ID NO: 1017710
uguacuguagcacuccuga

SEQ ID NO: 1017712 - RNA, 19 nt, Artificial Sequence
  Description of Artificial Sequence: Synthetic oligonucleotide
  Sense strand starting at position 2495 of SEQ ID NO: 914616
ggucacacaaagugugauu

SEQ ID NO: 1017713 - RNA, 19 nt, Artificial Sequence
  Description of Artificial Sequence: Synthetic oligonucleotide
  Antisense strand to SEQ ID NO: 1017712
aaucacacuuugugugacc

SEQ ID NO: 1017714 - RNA, 19 nt, Artificial Sequence
  Description of Artificial Sequence: Synthetic oligonucleotide
  Sense strand starting at position 2498 of SEQ ID NO: 914616
cacacaaagugugauuuga

SEQ ID NO: 1017715 - RNA, 19 nt, Artificial Sequence
  Description of Artificial Sequence: Synthetic oligonucleotide
  Antisense strand to SEQ ID NO: 1017714
ucaaaucacacuuugugug

SEQ ID NO: 1017716 - RNA, 19 nt, Artificial Sequence
  Description of Artificial Sequence: Synthetic oligonucleotide
  Sense strand starting at position 2698 of SEQ ID NO: 914616
cccugacaaggucaguuua

SEQ ID NO: 1017717 - RNA, 19 nt, Artificial Sequence
  Description of Artificial Sequence: Synthetic oligonucleotide
  Antisense strand to SEQ ID NO: 1017716
uaaacugaccuugucaggg

SEQ ID NO: 1017718 - RNA, 19 nt, Artificial Sequence
  Description of Artificial Sequence: Synthetic oligonucleotide
  Sense strand starting at position 2865 of SEQ ID NO: 914616
guacuaucaugagcaacau

SEQ ID NO: 1017719 - RNA, 19 nt, Artificial Sequence
  Description of Artificial Sequence: Synthetic oligonucleotide
  Antisense strand to SEQ ID NO: 1017718
auguugcucaugauaguac

SEQ ID NO: 1017720 - RNA, 19 nt, Artificial Sequence
  Description of Artificial Sequence: Synthetic oligonucleotide
  Sense strand starting at position 2930 of SEQ ID NO: 914616
aggaucauauaucuguuaa

SEQ ID NO: 1017721 - RNA, 19 nt, Artificial Sequence
  Description of Artificial Sequence: Synthetic oligonucleotide
  Antisense strand to SEQ ID NO: 1017720
uuaacagauauaugauccu

SEQ ID NO: 1017722 - RNA, 19 nt, Artificial Sequence
  Description of Artificial Sequence: Synthetic oligonucleotide
  Sense strand starting at position 2949 of SEQ ID NO: 914616
guggcagagcucuaaugga

SEQ ID NO: 1017723 - RNA, 19 nt, Artificial Sequence
  Description of Artificial Sequence: Synthetic oligonucleotide
  Antisense strand to SEQ ID NO: 1017722
uccauuagagcucugccac

SEQ ID NO: 1017724 - RNA, 19 nt, Artificial Sequence
  Description of Artificial Sequence: Synthetic oligonucleotide
  Sense strand starting at position 3076 of SEQ ID NO: 914616
uacuauggccuuuaguaga

SEQ ID NO: 1017725 - RNA, 19 nt, Artificial Sequence
  Description of Artificial Sequence: Synthetic oligonucleotide
  Antisense strand to SEQ ID NO: 1017724
ucuacuaaaggccauagua

SEQ ID NO: 1017726 - RNA, 19 nt, Artificial Sequence
  Description of Artificial Sequence: Synthetic oligonucleotide
  Sense strand starting at position 3193 of SEQ ID NO: 914616
gguauauugaaacguacau

SEQ ID NO: 1017727 - RNA, 19 nt, Artificial Sequence
  Description of Artificial Sequence: Synthetic oligonucleotide
  Antisense strand to SEQ ID NO: 1017726
auguacguuucaauauacc

SEQ ID NO: 1017728 - RNA, 19 nt, Artificial Sequence
  Description of Artificial Sequence: Synthetic oligonucleotide
  Sense strand starting at position 3277 of SEQ ID NO: 914616
guucucauuccugccguau

SEQ ID NO: 1017729 - RNA, 19 nt, Artificial Sequence
  Description of Artificial Sequence: Synthetic oligonucleotide
  Antisense strand to SEQ ID NO: 1017728
auacggcaggaaugagaac

SEQ ID NO: 1017730 - RNA, 19 nt, Artificial Sequence
  Description of Artificial Sequence: Synthetic oligonucleotide
  Sense strand starting at position 3288 of SEQ ID NO: 914616
ugccguauuuccuuugaca

SEQ ID NO: 1017731 - RNA, 19 nt, Artificial Sequence
  Description of Artificial Sequence: Synthetic oligonucleotide
  Antisense strand to SEQ ID NO: 1017730
ugucaaaggaaauacggca

SEQ ID NO: 1017732 - RNA, 19 nt, Artificial Sequence
  Description of Artificial Sequence: Synthetic oligonucleotide
  Sense strand starting at position 3789 of SEQ ID NO: 914616
uggugaggucucuaucuga

SEQ ID NO: 1017733 - RNA, 19 nt, Artificial Sequence
  Description of Artificial Sequence: Synthetic oligonucleotide
  Antisense strand to SEQ ID NO: 1017732
ucagauagagaccucacca

SEQ ID NO: 1017734 - RNA, 19 nt, Artificial Sequence
  Description of Artificial Sequence: Synthetic oligonucleotide
  Sense strand starting at position 3792 of SEQ ID NO: 914616
ugaggucucuaucugauga

SEQ ID NO: 1017735 - RNA, 19 nt, Artificial Sequence
  Description of Artificial Sequence: Synthetic oligonucleotide
  Antisense strand to SEQ ID NO: 1017734
ucaucagauagagaccuca

SEQ ID NO: 1017736 - RNA, 19 nt, Artificial Sequence
  Description of Artificial Sequence: Synthetic oligonucleotide
  Sense strand starting at position 3808 of SEQ ID NO: 914616
ugagcuccucccgaucaga

SEQ ID NO: 1017737 - RNA, 19 nt, Artificial Sequence
  Description of Artificial Sequence: Synthetic oligonucleotide
  Antisense strand to SEQ ID NO: 1017736
ucugaucgggaggagcuca

SEQ ID NO: 1017738 - RNA, 19 nt, Artificial Sequence
  Description of Artificial Sequence: Synthetic oligonucleotide
  Sense strand starting at position 3848 of SEQ ID NO: 914616
cagucagcauuccuugaga

SEQ ID NO: 1017739 - RNA, 19 nt, Artificial Sequence
  Description of Artificial Sequence: Synthetic oligonucleotide
  Antisense strand to SEQ ID NO: 1017738
ucucaaggaaugcugacug

SEQ ID NO: 1017740 - RNA, 19 nt, Artificial Sequence
  Description of Artificial Sequence: Synthetic oligonucleotide
  Sense strand starting at position 3874 of SEQ ID NO: 914616
gaaguaacccucuguggga

SEQ ID NO: 1017741 - RNA, 19 nt, Artificial Sequence
  Description of Artificial Sequence: Synthetic oligonucleotide
  Antisense strand to SEQ ID NO: 1017740
ucccacagaggguuacuuc

SEQ ID NO: 1017742 - RNA, 19 nt, Artificial Sequence
  Description of Artificial Sequence: Synthetic oligonucleotide
  Sense strand starting at position 3949 of SEQ ID NO: 914616
agcuccauguuuccagaga

SEQ ID NO: 1017743 - RNA, 19 nt, Artificial Sequence
  Description of Artificial Sequence: Synthetic oligonucleotide
  Antisense strand to SEQ ID NO: 1017742
ucucuggaaacauggagcu

SEQ ID NO: 1017744 - RNA, 19 nt, Artificial Sequence
  Description of Artificial Sequence: Synthetic oligonucleotide
  Sense strand starting at position 6 of SEQ ID NO: 914617
auguuacaucuuggauuaa

SEQ ID NO: 1017745 - RNA, 19 nt, Artificial Sequence
  Description of Artificial Sequence: Synthetic oligonucleotide
  Antisense strand to SEQ ID NO: 1017744
uuaauccaagauguaacau

SEQ ID NO: 1017746 - RNA, 19 nt, Artificial Sequence
  Description of Artificial Sequence: Synthetic oligonucleotide
  Sense strand starting at position 65 of SEQ ID NO: 914617
gugcaacaaccauaagcua

SEQ ID NO: 1017747 - RNA, 19 nt, Artificial Sequence
  Description of Artificial Sequence: Synthetic oligonucleotide
  Antisense strand to SEQ ID NO: 1017746
uagcuuaugguuguugcac

SEQ ID NO: 1017748 - RNA, 19 nt, Artificial Sequence
  Description of Artificial Sequence: Synthetic oligonucleotide
  Sense strand starting at position 113 of SEQ ID NO: 914617
cuaugugagccuugagaau

SEQ ID NO: 1017749 - RNA, 19 nt, Artificial Sequence
  Description of Artificial Sequence: Synthetic oligonucleotide
  Antisense strand to SEQ ID NO: 1017748
auucucaaggcucacauag

SEQ ID NO: 1017750 - RNA, 19 nt, Artificial Sequence
  Description of Artificial Sequence: Synthetic oligonucleotide
  Sense strand starting at position 175 of SEQ ID NO: 914617
gaauguauuuguuaaagag

SEQ ID NO: 1017751 - RNA, 19 nt, Artificial Sequence
  Description of Artificial Sequence: Synthetic oligonucleotide
  Antisense strand to SEQ ID NO: 1017750
cucuuuaacaaauacauuc

SEQ ID NO: 1017752 - RNA, 19 nt, Artificial Sequence
  Description of Artificial Sequence: Synthetic oligonucleotide
  Sense strand starting at position 412 of SEQ ID NO: 914617
uauggcuaugcauauguaa

SEQ ID NO: 1017753 - RNA, 19 nt, Artificial Sequence
  Description of Artificial Sequence: Synthetic oligonucleotide
  Antisense strand to SEQ ID NO: 1017752
uuacauaugcauagccaua

SEQ ID NO: 1017754 - RNA, 19 nt, Artificial Sequence
  Description of Artificial Sequence: Synthetic oligonucleotide
  Sense strand starting at position 454 of SEQ ID NO: 914617
aaugacauucuuggaagua

SEQ ID NO: 1017755 - RNA, 19 nt, Artificial Sequence
  Description of Artificial Sequence: Synthetic oligonucleotide
  Antisense strand to SEQ ID NO: 1017754
uacuuccaagaaugucauu

SEQ ID NO: 1017756 - RNA, 19 nt, Artificial Sequence
  Description of Artificial Sequence: Synthetic oligonucleotide
  Sense strand starting at position 809 of SEQ ID NO: 914617
gcacaucugcuuuagaaau

SEQ ID NO: 1017757 - RNA, 19 nt, Artificial Sequence
  Description of Artificial Sequence: Synthetic oligonucleotide
  Antisense strand to SEQ ID NO: 1017756
auuucuaaagcagaugugc

SEQ ID NO: 1017758 - RNA, 19 nt, Artificial Sequence
  Description of Artificial Sequence: Synthetic oligonucleotide
  Sense strand starting at position 820 of SEQ ID NO: 914617
uuagaaaugcguuauagaa

SEQ ID NO: 1017759 - RNA, 19 nt, Artificial Sequence
  Description of Artificial Sequence: Synthetic oligonucleotide
  Antisense strand to SEQ ID NO: 1017758
uucuauaacgcauuucuaa

SEQ ID NO: 1017760 - RNA, 19 nt, Artificial Sequence
  Description of Artificial Sequence: Synthetic oligonucleotide
  Sense strand starting at position 847 of SEQ ID NO: 914617
gcuauagauguugauauaa

SEQ ID NO: 1017761 - RNA, 19 nt, Artificial Sequence
  Description of Artificial Sequence: Synthetic oligonucleotide
  Antisense strand to SEQ ID NO: 1017760
uuauaucaacaucuauagc

SEQ ID NO: 1017762 - RNA, 19 nt, Artificial Sequence
  Description of Artificial Sequence: Synthetic oligonucleotide
  Sense strand starting at position 1658 of SEQ ID NO: 914617
gucugagaacuguacccga

SEQ ID NO: 1017763 - RNA, 19 nt, Artificial Sequence
  Description of Artificial Sequence: Synthetic oligonucleotide
  Antisense strand to SEQ ID NO: 1017762
ucggguacaguucucagac

SEQ ID NO: 1017764 - RNA, 19 nt, Artificial Sequence
  Description of Artificial Sequence: Synthetic oligonucleotide
  Sense strand starting at position 1835 of SEQ ID NO: 914617
gucagcucugcacagaaau

SEQ ID NO: 1017765 - RNA, 19 nt, Artificial Sequence
  Description of Artificial Sequence: Synthetic oligonucleotide
  Antisense strand to SEQ ID NO: 1017764
auuucugugcagagcugac

SEQ ID NO: 1017766 - RNA, 19 nt, Artificial Sequence
  Description of Artificial Sequence: Synthetic oligonucleotide
  Sense strand starting at position 1910 of SEQ ID NO: 914617
uggauuccucaguaucuuu

SEQ ID NO: 1017767 - RNA, 19 nt, Artificial Sequence
  Description of Artificial Sequence: Synthetic oligonucleotide
  Antisense strand to SEQ ID NO: 1017766
aaagauacugaggaaucca

SEQ ID NO: 1017768 - RNA, 19 nt, Artificial Sequence
  Description of Artificial Sequence: Synthetic oligonucleotide
  Sense strand starting at position 2010 of SEQ ID NO: 914617
gcucuuugucaauagauga

SEQ ID NO: 1017769 - RNA, 19 nt, Artificial Sequence
  Description of Artificial Sequence: Synthetic oligonucleotide
  Antisense strand to SEQ ID NO: 1017768
ucaucuauugacaaagagc

SEQ ID NO: 1017770 - RNA, 19 nt, Artificial Sequence
  Description of Artificial Sequence: Synthetic oligonucleotide
  Sense strand starting at position 2017 of SEQ ID NO: 914617
gucaauagaugacucaacu

SEQ ID NO: 1017771 - RNA, 19 nt, Artificial Sequence
  Description of Artificial Sequence: Synthetic oligonucleotide
  Antisense strand to SEQ ID NO: 1017770
aguugagucaucuauugac

SEQ ID NO: 1017772 - RNA, 19 nt, Artificial Sequence
  Description of Artificial Sequence: Synthetic oligonucleotide
  Sense strand starting at position 2266 of SEQ ID NO: 914617
ggacccuucuuuccagaaa

SEQ ID NO: 1017773 - RNA, 19 nt, Artificial Sequence
  Description of Artificial Sequence: Synthetic oligonucleotide
  Antisense strand to SEQ ID NO: 1017772
uuucuggaaagaagggucc

SEQ ID NO: 1017774 - RNA, 19 nt, Artificial Sequence
  Description of Artificial Sequence: Synthetic oligonucleotide
  Sense strand starting at position 2285 of SEQ ID NO: 914617
ggaugcaucuaggcuuaaa

SEQ ID NO: 1017775 - RNA, 19 nt, Artificial Sequence
  Description of Artificial Sequence: Synthetic oligonucleotide
  Antisense strand to SEQ ID NO: 1017774
uuuaagccuagaugcaucc

SEQ ID NO: 1017776 - RNA, 19 nt, Artificial Sequence
  Description of Artificial Sequence: Synthetic oligonucleotide
  Sense strand starting at position 2288 of SEQ ID NO: 914617
ugcaucuaggcuuaaacuu

SEQ ID NO: 1017777 - RNA, 19 nt, Artificial Sequence
  Description of Artificial Sequence: Synthetic oligonucleotide
  Antisense strand to SEQ ID NO: 1017776
aaguuuaagccuagaugca

SEQ ID NO: 1017778 - RNA, 19 nt, Artificial Sequence
  Description of Artificial Sequence: Synthetic oligonucleotide
  Sense strand starting at position 2295 of SEQ ID NO: 914617
aggcuuaaacuuuauagca

SEQ ID NO: 1017779 - RNA, 19 nt, Artificial Sequence
  Description of Artificial Sequence: Synthetic oligonucleotide
  Antisense strand to SEQ ID NO: 1017778
ugcuauaaaguuuaagccu

SEQ ID NO: 1017780 - RNA, 19 nt, Artificial Sequence
  Description of Artificial Sequence: Synthetic oligonucleotide
  Sense strand starting at position 2331 of SEQ ID NO: 914617
ugggaaaguuaaccuguaa

SEQ ID NO: 1017781 - RNA, 19 nt, Artificial Sequence
  Description of Artificial Sequence: Synthetic oligonucleotide
  Antisense strand to SEQ ID NO: 1017780
uuacagguuaacuuuccca

SEQ ID NO: 1017782 - RNA, 19 nt, Artificial Sequence
  Description of Artificial Sequence: Synthetic oligonucleotide
  Sense strand starting at position 2530 of SEQ ID NO: 914617
uuaaaucacgauuaugcau

SEQ ID NO: 1017783 - RNA, 19 nt, Artificial Sequence
  Description of Artificial Sequence: Synthetic oligonucleotide
  Antisense strand to SEQ ID NO: 1017782
augcauaaucgugauuuaa

SEQ ID NO: 1017784 - RNA, 19 nt, Artificial Sequence
  Description of Artificial Sequence: Synthetic oligonucleotide
  Sense strand starting at position 2566 of SEQ ID NO: 914617
uucuuuaugcuauacacga

SEQ ID NO: 1017785 - RNA, 19 nt, Artificial Sequence
  Description of Artificial Sequence: Synthetic oligonucleotide
  Antisense strand to SEQ ID NO: 1017784
ucguguauagcauaaagaa

SEQ ID NO: 1017786 - RNA, 19 nt, Artificial Sequence
  Description of Artificial Sequence: Synthetic oligonucleotide
  Sense strand starting at position 2574 of SEQ ID NO: 914617
gcuauacacgauuauuaau

SEQ ID NO: 1017787 - RNA, 19 nt, Artificial Sequence
  Description of Artificial Sequence: Synthetic oligonucleotide
  Antisense strand to SEQ ID NO: 1017786
auuaauaaucguguauagc

SEQ ID NO: 1017788 - RNA, 19 nt, Artificial Sequence
  Description of Artificial Sequence: Synthetic oligonucleotide
  Sense strand starting at position 2926 of SEQ ID NO: 914617
agugaagugaaaggcuaau

SEQ ID NO: 1017789 - RNA, 19 nt, Artificial Sequence
  Description of Artificial Sequence: Synthetic oligonucleotide
  Antisense strand to SEQ ID NO: 1017788
auuagccuuucacuucacu

SEQ ID NO: 1017790 - RNA, 19 nt, Artificial Sequence
  Description of Artificial Sequence: Synthetic oligonucleotide
  Sense strand starting at position 2938 of SEQ ID NO: 914617
ggcuaauugccauaacauu

SEQ ID NO: 1017791 - RNA, 19 nt, Artificial Sequence
  Description of Artificial Sequence: Synthetic oligonucleotide
  Antisense strand to SEQ ID NO: 1017790
aauguuauggcaauuagcc

SEQ ID NO: 1017792 - RNA, 19 nt, Artificial Sequence
  Description of Artificial Sequence: Synthetic oligonucleotide
  Sense strand starting at position 3108 of SEQ ID NO: 914617
uuacuuuaucuguagacca

SEQ ID NO: 1017793 - RNA, 19 nt, Artificial Sequence
  Description of Artificial Sequence: Synthetic oligonucleotide
  Antisense strand to SEQ ID NO: 1017792
uggucuacagauaaaguaa

SEQ ID NO: 1017794 - RNA, 19 nt, Artificial Sequence
  Description of Artificial Sequence: Synthetic oligonucleotide
  Sense strand starting at position 3268 of SEQ ID NO: 914617
uggauaaaucacuguuaga

SEQ ID NO: 1017795 - RNA, 19 nt, Artificial Sequence
  Description of Artificial Sequence: Synthetic oligonucleotide
  Antisense strand to SEQ ID NO: 1017794
ucuaacagugauuuaucca

SEQ ID NO: 1017796 - RNA, 19 nt, Artificial Sequence
  Description of Artificial Sequence: Synthetic oligonucleotide
  Sense strand starting at position 3426 of SEQ ID NO: 914617
uaauaauggccagauaugu

SEQ ID NO: 1017797 - RNA, 19 nt, Artificial Sequence
  Description of Artificial Sequence: Synthetic oligonucleotide
  Antisense strand to SEQ ID NO: 1017796
acauaucuggccauuauua

SEQ ID NO: 1017798 - RNA, 19 nt, Artificial Sequence
  Description of Artificial Sequence: Synthetic oligonucleotide
  Sense strand starting at position 3432 of SEQ ID NO: 914617
uggccagauauguaaguuu

SEQ ID NO: 1017799 - RNA, 19 nt, Artificial Sequence
  Description of Artificial Sequence: Synthetic oligonucleotide
  Antisense strand to SEQ ID NO: 1017798
aaacuuacauaucuggcca

SEQ ID NO: 1017800 - RNA, 19 nt, Artificial Sequence
  Description of Artificial Sequence: Synthetic oligonucleotide
  Sense strand starting at position 3435 of SEQ ID NO: 914617
ccagauauguaaguuuaga

SEQ ID NO: 1017801 - RNA, 19 nt, Artificial Sequence
  Description of Artificial Sequence: Synthetic oligonucleotide
  Antisense strand to SEQ ID NO: 1017800
ucuaaacuuacauaucugg

SEQ ID NO: 1017802 - RNA, 19 nt, Artificial Sequence
  Description of Artificial Sequence: Synthetic oligonucleotide
  Sense strand starting at position 3534 of SEQ ID NO: 914617
cauacauauguuugacgga

SEQ ID NO: 1017803 - RNA, 19 nt, Artificial Sequence
  Description of Artificial Sequence: Synthetic oligonucleotide
  Antisense strand to SEQ ID NO: 1017802
uccgucaaacauauguaug

SEQ ID NO: 1017804 - RNA, 19 nt, Artificial Sequence
  Description of Artificial Sequence: Synthetic oligonucleotide
  Sense strand starting at position 3558 of SEQ ID NO: 914617
ggaugguuggguggaagua

SEQ ID NO: 1017805 - RNA, 19 nt, Artificial Sequence
  Description of Artificial Sequence: Synthetic oligonucleotide
  Antisense strand to SEQ ID NO: 1017804
uacuuccacccaaccaucc

SEQ ID NO: 1017806 - RNA, 19 nt, Artificial Sequence
  Description of Artificial Sequence: Synthetic oligonucleotide
  Sense strand starting at position 3559 of SEQ ID NO: 914617
gaugguuggguggaaguau

SEQ ID NO: 1017807 - RNA, 19 nt, Artificial Sequence
  Description of Artificial Sequence: Synthetic oligonucleotide
  Antisense strand to SEQ ID NO: 1017806
auacuuccacccaaccauc

SEQ ID NO: 1017808 - RNA, 19 nt, Artificial Sequence
  Description of Artificial Sequence: Synthetic oligonucleotide
  Sense strand starting at position 3560 of SEQ ID NO: 914617
augguuggguggaaguaua

SEQ ID NO: 1017809 - RNA, 19 nt, Artificial Sequence
  Description of Artificial Sequence: Synthetic oligonucleotide
  Antisense strand to SEQ ID NO: 1017808
uauacuuccacccaaccau

SEQ ID NO: 1017810 - RNA, 19 nt, Artificial Sequence
  Description of Artificial Sequence: Synthetic oligonucleotide
  Sense strand starting at position 3645 of SEQ ID NO: 914617
agcaauguucuagaaacau

SEQ ID NO: 1017811 - RNA, 19 nt, Artificial Sequence
  Description of Artificial Sequence: Synthetic oligonucleotide
  Antisense strand to SEQ ID NO: 1017810
auguuucuagaacauugcu

SEQ ID NO: 1017812 - RNA, 19 nt, Artificial Sequence
  Description of Artificial Sequence: Synthetic oligonucleotide
  Sense strand starting at position 3701 of SEQ ID NO: 914617
gagguauucuuguuaagga

SEQ ID NO: 1017813 - RNA, 19 nt, Artificial Sequence
  Description of Artificial Sequence: Synthetic oligonucleotide
  Antisense strand to SEQ ID NO: 1017812
uccuuaacaagaauaccuc

SEQ ID NO: 1017814 - RNA, 19 nt, Artificial Sequence
  Description of Artificial Sequence: Synthetic oligonucleotide
  Sense strand starting at position 3915 of SEQ ID NO: 914617
gaaagaacuguugggucga

SEQ ID NO: 1017815 - RNA, 19 nt, Artificial Sequence
  Description of Artificial Sequence: Synthetic oligonucleotide
  Antisense strand to SEQ ID NO: 1017814
ucgacccaacaguucuuuc

SEQ ID NO: 1017816 - RNA, 19 nt, Artificial Sequence
  Description of Artificial Sequence: Synthetic oligonucleotide
  Sense strand starting at position 3920 of SEQ ID NO: 914617
aacuguugggucgaagaaa

SEQ ID NO: 1017817 - RNA, 19 nt, Artificial Sequence
  Description of Artificial Sequence: Synthetic oligonucleotide
  Antisense strand to SEQ ID NO: 1017816
uuucuucgacccaacaguu

SEQ ID NO: 1017818 - RNA, 19 nt, Artificial Sequence
  Description of Artificial Sequence: Synthetic oligonucleotide
  Sense strand starting at position 3941 of SEQ ID NO: 914617
ccuagagaacuuuaggcuu

SEQ ID NO: 1017819 - RNA, 19 nt, Artificial Sequence
  Description of Artificial Sequence: Synthetic oligonucleotide
  Antisense strand to SEQ ID NO: 1017818
aagccuaaaguucucuagg

SEQ ID NO: 1017820 - RNA, 19 nt, Artificial Sequence
  Description of Artificial Sequence: Synthetic oligonucleotide
  Sense strand starting at position 3962 of SEQ ID NO: 914617
cugguauaaccaugaugca

SEQ ID NO: 1017821 - RNA, 19 nt, Artificial Sequence
  Description of Artificial Sequence: Synthetic oligonucleotide
  Antisense strand to SEQ ID NO: 1017820
ugcaucaugguuauaccag

SEQ ID NO: 1017822 - RNA, 19 nt, Artificial Sequence
  Description of Artificial Sequence: Synthetic oligonucleotide
  Sense strand starting at position 3963 of SEQ ID NO: 914617
ugguauaaccaugaugcau

SEQ ID NO: 1017823 - RNA, 19 nt, Artificial Sequence
  Description of Artificial Sequence: Synthetic oligonucleotide
  Antisense strand to SEQ ID NO: 1017822
augcaucaugguuauacca

SEQ ID NO: 1017824 - RNA, 19 nt, Artificial Sequence
  Description of Artificial Sequence: Synthetic oligonucleotide
  Sense strand starting at position 101 of SEQ ID NO: 914618
cauaaagacgacuguuagu

SEQ ID NO: 1017825 - RNA, 19 nt, Artificial Sequence
  Description of Artificial Sequence: Synthetic oligonucleotide
  Antisense strand to SEQ ID NO: 1017824
acuaacagucgucuuuaug

SEQ ID NO: 1017826 - RNA, 19 nt, Artificial Sequence
  Description of Artificial Sequence: Synthetic oligonucleotide
  Sense strand starting at position 111 of SEQ ID NO: 914618
acuguuaguagguaagagu

SEQ ID NO: 1017827 - RNA, 19 nt, Artificial Sequence
  Description of Artificial Sequence: Synthetic oligonucleotide
  Antisense strand to SEQ ID NO: 1017826
acucuuaccuacuaacagu

SEQ ID NO: 1017828 - RNA, 19 nt, Artificial Sequence
  Description of Artificial Sequence: Synthetic oligonucleotide
  Sense strand starting at position 249 of SEQ ID NO: 914618
ggagcuuccgcugaauaaa

SEQ ID NO: 1017829 - RNA, 19 nt, Artificial Sequence
  Description of Artificial Sequence: Synthetic oligonucleotide
  Antisense strand to SEQ ID NO: 1017828
uuuauucagcggaagcucc

SEQ ID NO: 1017830 - RNA, 19 nt, Artificial Sequence
  Description of Artificial Sequence: Synthetic oligonucleotide
  Sense strand starting at position 360 of SEQ ID NO: 914618
agaagaugauaauagagaa

SEQ ID NO: 1017831 - RNA, 19 nt, Artificial Sequence
  Description of Artificial Sequence: Synthetic oligonucleotide
  Antisense strand to SEQ ID NO: 1017830
uucucuauuaucaucuucu

SEQ ID NO: 1017832 - RNA, 19 nt, Artificial Sequence
  Description of Artificial Sequence: Synthetic oligonucleotide
  Sense strand starting at position 435 of SEQ ID NO: 914618
guuuacugucuacaucuua

SEQ ID NO: 1017833 - RNA, 19 nt, Artificial Sequence
  Description of Artificial Sequence: Synthetic oligonucleotide
  Antisense strand to SEQ ID NO: 1017832
uaagauguagacaguaaac

SEQ ID NO: 1017834 - RNA, 19 nt, Artificial Sequence
  Description of Artificial Sequence: Synthetic oligonucleotide
  Sense strand starting at position 838 of SEQ ID NO: 914618
uggacuucuuucuccaaga

SEQ ID NO: 1017835 - RNA, 19 nt, Artificial Sequence
  Description of Artificial Sequence: Synthetic oligonucleotide
  Antisense strand to SEQ ID NO: 1017834
ucuuggagaaagaagucca

SEQ ID NO: 1017836 - RNA, 19 nt, Artificial Sequence
  Description of Artificial Sequence: Synthetic oligonucleotide
  Sense strand starting at position 839 of SEQ ID NO: 914618
ggacuucuuucuccaagaa

SEQ ID NO: 1017837 - RNA, 19 nt, Artificial Sequence
  Description of Artificial Sequence: Synthetic oligonucleotide
  Antisense strand to SEQ ID NO: 1017836
uucuuggagaaagaagucc

SEQ ID NO: 1017838 - RNA, 19 nt, Artificial Sequence
  Description of Artificial Sequence: Synthetic oligonucleotide
  Sense strand starting at position 870 of SEQ ID NO: 914618
aauguuaaccaaggaugua

SEQ ID NO: 1017839 - RNA, 19 nt, Artificial Sequence
  Description of Artificial Sequence: Synthetic oligonucleotide
  Antisense strand to SEQ ID NO: 1017838
uacauccuugguuaacauu

SEQ ID NO: 1017840 - RNA, 19 nt, Artificial Sequence
  Description of Artificial Sequence: Synthetic oligonucleotide
  Sense strand starting at position 873 of SEQ ID NO: 914618
guuaaccaaggauguaauu

SEQ ID NO: 1017841 - RNA, 19 nt, Artificial Sequence
  Description of Artificial Sequence: Synthetic oligonucleotide
  Antisense strand to SEQ ID NO: 1017840
aauuacauccuugguuaac

SEQ ID NO: 1017842 - RNA, 19 nt, Artificial Sequence
  Description of Artificial Sequence: Synthetic oligonucleotide
  Sense strand starting at position 944 of SEQ ID NO: 914618
gaaugaacacagugucaga

SEQ ID NO: 1017843 - RNA, 19 nt, Artificial Sequence
  Description of Artificial Sequence: Synthetic oligonucleotide
  Antisense strand to SEQ ID NO: 1017842
ucugacacuguguucauuc

SEQ ID NO: 1017844 - RNA, 19 nt, Artificial Sequence
  Description of Artificial Sequence: Synthetic oligonucleotide
  Sense strand starting at position 1130 of SEQ ID NO: 914618
uuuguauaaucaguaucac

SEQ ID NO: 1017845 - RNA, 19 nt, Artificial Sequence
  Description of Artificial Sequence: Synthetic oligonucleotide
  Antisense strand to SEQ ID NO: 1017844
gugauacugauuauacaaa

SEQ ID NO: 1017846 - RNA, 19 nt, Artificial Sequence
  Description of Artificial Sequence: Synthetic oligonucleotide
  Sense strand starting at position 1190 of SEQ ID NO: 914618
ucagguaucccacagagca

SEQ ID NO: 1017847 - RNA, 19 nt, Artificial Sequence
  Description of Artificial Sequence: Synthetic oligonucleotide
  Antisense strand to SEQ ID NO: 1017846
ugcucugugggauaccuga

SEQ ID NO: 1017848 - RNA, 19 nt, Artificial Sequence
  Description of Artificial Sequence: Synthetic oligonucleotide
  Sense strand starting at position 1218 of SEQ ID NO: 914618
ccauuacagucacuagauu

SEQ ID NO: 1017849 - RNA, 19 nt, Artificial Sequence
  Description of Artificial Sequence: Synthetic oligonucleotide
  Antisense strand to SEQ ID NO: 1017848
aaucuagugacuguaaugg

SEQ ID NO: 1017850 - RNA, 19 nt, Artificial Sequence
  Description of Artificial Sequence: Synthetic oligonucleotide
  Sense strand starting at position 1420 of SEQ ID NO: 914618
gagcgugaaccugaauuac

SEQ ID NO: 1017851 - RNA, 19 nt, Artificial Sequence
  Description of Artificial Sequence: Synthetic oligonucleotide
  Antisense strand to SEQ ID NO: 1017850
guaauucagguucacgcuc

SEQ ID NO: 1017852 - RNA, 19 nt, Artificial Sequence
  Description of Artificial Sequence: Synthetic oligonucleotide
  Sense strand starting at position 1686 of SEQ ID NO: 914618
ugcaaagaacauugcagua

SEQ ID NO: 1017853 - RNA, 19 nt, Artificial Sequence
  Description of Artificial Sequence: Synthetic oligonucleotide
  Antisense strand to SEQ ID NO: 1017852
uacugcaauguucuuugca

SEQ ID NO: 1017854 - RNA, 19 nt, Artificial Sequence
  Description of Artificial Sequence: Synthetic oligonucleotide
  Sense strand starting at position 1699 of SEQ ID NO: 914618
gcaguaaauaaggagcaua

SEQ ID NO: 1017855 - RNA, 19 nt, Artificial Sequence
  Description of Artificial Sequence: Synthetic oligonucleotide
  Antisense strand to SEQ ID NO: 1017854
uaugcuccuuauuuacugc

SEQ ID NO: 1017856 - RNA, 19 nt, Artificial Sequence
  Description of Artificial Sequence: Synthetic oligonucleotide
  Sense strand starting at position 1848 of SEQ ID NO: 914618
acgacaugucuugaaggca

SEQ ID NO: 1017857 - RNA, 19 nt, Artificial Sequence
  Description of Artificial Sequence: Synthetic oligonucleotide
  Antisense strand to SEQ ID NO: 1017856
ugccuucaagacaugucgu

SEQ ID NO: 1017858 - RNA, 19 nt, Artificial Sequence
  Description of Artificial Sequence: Synthetic oligonucleotide
  Sense strand starting at position 2183 of SEQ ID NO: 914618
ucuuccuuuggagguuuaa

SEQ ID NO: 1017859 - RNA, 19 nt, Artificial Sequence
  Description of Artificial Sequence: Synthetic oligonucleotide
  Antisense strand to SEQ ID NO: 1017858
uuaaaccuccaaaggaaga

SEQ ID NO: 1017860 - RNA, 19 nt, Artificial Sequence
  Description of Artificial Sequence: Synthetic oligonucleotide
  Sense strand starting at position 2192 of SEQ ID NO: 914618
ggagguuuaauaugagcuc

SEQ ID NO: 1017861 - RNA, 19 nt, Artificial Sequence
  Description of Artificial Sequence: Synthetic oligonucleotide
  Antisense strand to SEQ ID NO: 1017860
gagcucauauuaaaccucc

SEQ ID NO: 1017862 - RNA, 19 nt, Artificial Sequence
  Description of Artificial Sequence: Synthetic oligonucleotide
  Sense strand starting at position 2201 of SEQ ID NO: 914618
auaugagcucugcacuaua

SEQ ID NO: 1017863 - RNA, 19 nt, Artificial Sequence
  Description of Artificial Sequence: Synthetic oligonucleotide
  Antisense strand to SEQ ID NO: 1017862
uauagugcagagcucauau

SEQ ID NO: 1017864 - RNA, 19 nt, Artificial Sequence
  Description of Artificial Sequence: Synthetic oligonucleotide
  Sense strand starting at position 2315 of SEQ ID NO: 914618
accagaggaucauugucau

SEQ ID NO: 1017865 - RNA, 19 nt, Artificial Sequence
  Description of Artificial Sequence: Synthetic oligonucleotide
  Antisense strand to SEQ ID NO: 1017864
augacaaugauccucuggu

SEQ ID NO: 1017866 - RNA, 19 nt, Artificial Sequence
  Description of Artificial Sequence: Synthetic oligonucleotide
  Sense strand starting at position 2318 of SEQ ID NO: 914618
agaggaucauugucauaua

SEQ ID NO: 1017867 - RNA, 19 nt, Artificial Sequence
  Description of Artificial Sequence: Synthetic oligonucleotide
  Antisense strand to SEQ ID NO: 1017866
uauaugacaaugauccucu

SEQ ID NO: 1017868 - RNA, 19 nt, Artificial Sequence
  Description of Artificial Sequence: Synthetic oligonucleotide
  Sense strand starting at position 2370 of SEQ ID NO: 914618
ggugaucugugguuaaagg

SEQ ID NO: 1017869 - RNA, 19 nt, Artificial Sequence
  Description of Artificial Sequence: Synthetic oligonucleotide
  Antisense strand to SEQ ID NO: 1017868
ccuuuaaccacagaucacc

SEQ ID NO: 1017870 - RNA, 19 nt, Artificial Sequence
  Description of Artificial Sequence: Synthetic oligonucleotide
  Sense strand starting at position 2371 of SEQ ID NO: 914618
gugaucugugguuaaagga

SEQ ID NO: 1017871 - RNA, 19 nt, Artificial Sequence
  Description of Artificial Sequence: Synthetic oligonucleotide
  Antisense strand to SEQ ID NO: 1017870
uccuuuaaccacagaucac

SEQ ID NO: 1017872 - RNA, 19 nt, Artificial Sequence
  Description of Artificial Sequence: Synthetic oligonucleotide
  Sense strand starting at position 2450 of SEQ ID NO: 914618
guugccagacuccauaaua

SEQ ID NO: 1017873 - RNA, 19 nt, Artificial Sequence
  Description of Artificial Sequence: Synthetic oligonucleotide
  Antisense strand to SEQ ID NO: 1017872
uauuauggagucuggcaac

SEQ ID NO: 1017874 - RNA, 19 nt, Artificial Sequence
  Description of Artificial Sequence: Synthetic oligonucleotide
  Sense strand starting at position 2662 of SEQ ID NO: 914618
cccuauaaguccguaagga

SEQ ID NO: 1017875 - RNA, 19 nt, Artificial Sequence
  Description of Artificial Sequence: Synthetic oligonucleotide
  Antisense strand to SEQ ID NO: 1017874
uccuuacggacuuauaggg

SEQ ID NO: 1017876 - RNA, 19 nt, Artificial Sequence
  Description of Artificial Sequence: Synthetic oligonucleotide
  Sense strand starting at position 2663 of SEQ ID NO: 914618
ccuauaaguccguaaggaa

SEQ ID NO: 1017877 - RNA, 19 nt, Artificial Sequence
  Description of Artificial Sequence: Synthetic oligonucleotide
  Antisense strand to SEQ ID NO: 1017876
uuccuuacggacuuauagg

SEQ ID NO: 1017878 - RNA, 19 nt, Artificial Sequence
  Description of Artificial Sequence: Synthetic oligonucleotide
  Sense strand starting at position 2847 of SEQ ID NO: 914618
uucuaaagcuaucuggcaa

SEQ ID NO: 1017879 - RNA, 19 nt, Artificial Sequence
  Description of Artificial Sequence: Synthetic oligonucleotide
  Antisense strand to SEQ ID NO: 1017878
uugccagauagcuuuagaa

SEQ ID NO: 1017880 - RNA, 19 nt, Artificial Sequence
  Description of Artificial Sequence: Synthetic oligonucleotide
  Sense strand starting at position 3023 of SEQ ID NO: 914618
uuaauaugcuuugcauaag

SEQ ID NO: 1017881 - RNA, 19 nt, Artificial Sequence
  Description of Artificial Sequence: Synthetic oligonucleotide
  Antisense strand to SEQ ID NO: 1017880
cuuaugcaaagcauauuaa

SEQ ID NO: 1017882 - RNA, 19 nt, Artificial Sequence
  Description of Artificial Sequence: Synthetic oligonucleotide
  Sense strand starting at position 3081 of SEQ ID NO: 914618
aucagaguuacugggcauu

SEQ ID NO: 1017883 - RNA, 19 nt, Artificial Sequence
  Description of Artificial Sequence: Synthetic oligonucleotide
  Antisense strand to SEQ ID NO: 1017882
aaugcccaguaacucugau

SEQ ID NO: 1017884 - RNA, 19 nt, Artificial Sequence
  Description of Artificial Sequence: Synthetic oligonucleotide
  Sense strand starting at position 3094 of SEQ ID NO: 914618
ggcauuucuccugggcaau

SEQ ID NO: 1017885 - RNA, 19 nt, Artificial Sequence
  Description of Artificial Sequence: Synthetic oligonucleotide
  Antisense strand to SEQ ID NO: 1017884
auugcccaggagaaaugcc

SEQ ID NO: 1017886 - RNA, 19 nt, Artificial Sequence
  Description of Artificial Sequence: Synthetic oligonucleotide
  Sense strand starting at position 3095 of SEQ ID NO: 914618
gcauuucuccugggcaaug

SEQ ID NO: 1017887 - RNA, 19 nt, Artificial Sequence
  Description of Artificial Sequence: Synthetic oligonucleotide
  Antisense strand to SEQ ID NO: 1017886
cauugcccaggagaaaugc

SEQ ID NO: 1017888 - RNA, 19 nt, Artificial Sequence
  Description of Artificial Sequence: Synthetic oligonucleotide
  Sense strand starting at position 3224 of SEQ ID NO: 914618
gucaguucugacuaaauag

SEQ ID NO: 1017889 - RNA, 19 nt, Artificial Sequence
  Description of Artificial Sequence: Synthetic oligonucleotide
  Antisense strand to SEQ ID NO: 1017888
cuauuuagucagaacugac

SEQ ID NO: 1017890 - RNA, 19 nt, Artificial Sequence
  Description of Artificial Sequence: Synthetic oligonucleotide
  Sense strand starting at position 3286 of SEQ ID NO: 914618
aaggcagucuuauccuaag

SEQ ID NO: 1017891 - RNA, 19 nt, Artificial Sequence
  Description of Artificial Sequence: Synthetic oligonucleotide
  Antisense strand to SEQ ID NO: 1017890
cuuaggauaagacugccuu

SEQ ID NO: 1017892 - RNA, 19 nt, Artificial Sequence
  Description of Artificial Sequence: Synthetic oligonucleotide
  Sense strand starting at position 3304 of SEQ ID NO: 914618
gcuggagauccuugggcaa

SEQ ID NO: 1017893 - RNA, 19 nt, Artificial Sequence
  Description of Artificial Sequence: Synthetic oligonucleotide
  Antisense strand to SEQ ID NO: 1017892
uugcccaaggaucuccagc

SEQ ID NO: 1017894 - RNA, 19 nt, Artificial Sequence
  Description of Artificial Sequence: Synthetic oligonucleotide
  Sense strand starting at position 3366 of SEQ ID NO: 914618
gucuuaggagccuagguaa

SEQ ID NO: 1017895 - RNA, 19 nt, Artificial Sequence
  Description of Artificial Sequence: Synthetic oligonucleotide
  Antisense strand to SEQ ID NO: 1017894
uuaccuaggcuccuaagac

SEQ ID NO: 1017896 - RNA, 19 nt, Artificial Sequence
  Description of Artificial Sequence: Synthetic oligonucleotide
  Sense strand starting at position 3415 of SEQ ID NO: 914618
cagugacuuccaggacauu

SEQ ID NO: 1017897 - RNA, 19 nt, Artificial Sequence
  Description of Artificial Sequence: Synthetic oligonucleotide
  Antisense strand to SEQ ID NO: 1017896
aauguccuggaagucacug

SEQ ID NO: 1017898 - RNA, 19 nt, Artificial Sequence
  Description of Artificial Sequence: Synthetic oligonucleotide
  Sense strand starting at position 3535 of SEQ ID NO: 914618
aagguuauagcaggucaca

SEQ ID NO: 1017899 - RNA, 19 nt, Artificial Sequence
  Description of Artificial Sequence: Synthetic oligonucleotide
  Antisense strand to SEQ ID NO: 1017898
ugugaccugcuauaaccuu

SEQ ID NO: 1017900 - RNA, 19 nt, Artificial Sequence
  Description of Artificial Sequence: Synthetic oligonucleotide
  Sense strand starting at position 3632 of SEQ ID NO: 914618
gccuuucuccacugaggau

SEQ ID NO: 1017901 - RNA, 19 nt, Artificial Sequence
  Description of Artificial Sequence: Synthetic oligonucleotide
  Antisense strand to SEQ ID NO: 1017900
auccucaguggagaaaggc

SEQ ID NO: 1017902 - RNA, 19 nt, Artificial Sequence
  Description of Artificial Sequence: Synthetic oligonucleotide
  Sense strand starting at position 3871 of SEQ ID NO: 914618
ugaagaaguacauguaggu

SEQ ID NO: 1017903 - RNA, 19 nt, Artificial Sequence
  Description of Artificial Sequence: Synthetic oligonucleotide
  Antisense strand to SEQ ID NO: 1017902
accuacauguacuucuuca

SEQ ID NO: 1017904 - RNA, 19 nt, Artificial Sequence
  Description of Artificial Sequence: Synthetic oligonucleotide
  Sense strand starting at position 1 of SEQ ID NO: 914619
uugauugaguuauccugga

SEQ ID NO: 1017905 - RNA, 19 nt, Artificial Sequence
  Description of Artificial Sequence: Synthetic oligonucleotide
  Antisense strand to SEQ ID NO: 1017904
uccaggauaacucaaucaa

SEQ ID NO: 1017906 - RNA, 19 nt, Artificial Sequence
  Description of Artificial Sequence: Synthetic oligonucleotide
  Sense strand starting at position 6 of SEQ ID NO: 914619
ugaguuauccuggacuccu

SEQ ID NO: 1017907 - RNA, 19 nt, Artificial Sequence
  Description of Artificial Sequence: Synthetic oligonucleotide
  Antisense strand to SEQ ID NO: 1017906
aggaguccaggauaacuca

SEQ ID NO: 1017908 - RNA, 19 nt, Artificial Sequence
  Description of Artificial Sequence: Synthetic oligonucleotide
  Sense strand starting at position 176 of SEQ ID NO: 914619
cuguaacacucaucacagu

SEQ ID NO: 1017909 - RNA, 19 nt, Artificial Sequence
  Description of Artificial Sequence: Synthetic oligonucleotide
  Antisense strand to SEQ ID NO: 1017908
acugugaugaguguuacag

SEQ ID NO: 1017910 - RNA, 19 nt, Artificial Sequence
  Description of Artificial Sequence: Synthetic oligonucleotide
  Sense strand starting at position 189 of SEQ ID NO: 914619
cacaguuguggugacuuau

SEQ ID NO: 1017911 - RNA, 19 nt, Artificial Sequence
  Description of Artificial Sequence: Synthetic oligonucleotide
  Antisense strand to SEQ ID NO: 1017910
auaagucaccacaacugug

SEQ ID NO: 1017912 - RNA, 19 nt, Artificial Sequence
  Description of Artificial Sequence: Synthetic oligonucleotide
  Sense strand starting at position 229 of SEQ ID NO: 914619
aaucuagcugcaugaggua

SEQ ID NO: 1017913 - RNA, 19 nt, Artificial Sequence
  Description of Artificial Sequence: Synthetic oligonucleotide
  Antisense strand to SEQ ID NO: 1017912
uaccucaugcagcuagauu

SEQ ID NO: 1017914 - RNA, 19 nt, Artificial Sequence
  Description of Artificial Sequence: Synthetic oligonucleotide
  Sense strand starting at position 242 of SEQ ID NO: 914619
gagguaagggagugucgau

SEQ ID NO: 1017915 - RNA, 19 nt, Artificial Sequence
  Description of Artificial Sequence: Synthetic oligonucleotide
  Antisense strand to SEQ ID NO: 1017914
aucgacacucccuuaccuc

SEQ ID NO: 1017916 - RNA, 19 nt, Artificial Sequence
  Description of Artificial Sequence: Synthetic oligonucleotide
  Sense strand starting at position 315 of SEQ ID NO: 914619
ccucucaacccuuguggua

SEQ ID NO: 1017917 - RNA, 19 nt, Artificial Sequence
  Description of Artificial Sequence: Synthetic oligonucleotide
  Antisense strand to SEQ ID NO: 1017916
uaccacaaggguugagagg

SEQ ID NO: 1017918 - RNA, 19 nt, Artificial Sequence
  Description of Artificial Sequence: Synthetic oligonucleotide
  Sense strand starting at position 328 of SEQ ID NO: 914619
gugguagacgcucaauaaa

SEQ ID NO: 1017919 - RNA, 19 nt, Artificial Sequence
  Description of Artificial Sequence: Synthetic oligonucleotide
  Antisense strand to SEQ ID NO: 1017918
uuuauugagcgucuaccac

SEQ ID NO: 1017920 - RNA, 19 nt, Artificial Sequence
  Description of Artificial Sequence: Synthetic oligonucleotide
  Sense strand starting at position 726 of SEQ ID NO: 914619
gccagaacguccuuaagau

SEQ ID NO: 1017921 - RNA, 19 nt, Artificial Sequence
  Description of Artificial Sequence: Synthetic oligonucleotide
  Antisense strand to SEQ ID NO: 1017920
aucuuaaggacguucuggc

SEQ ID NO: 1017922 - RNA, 19 nt, Artificial Sequence
  Description of Artificial Sequence: Synthetic oligonucleotide
  Sense strand starting at position 727 of SEQ ID NO: 914619
ccagaacguccuuaagauc

SEQ ID NO: 1017923 - RNA, 19 nt, Artificial Sequence
  Description of Artificial Sequence: Synthetic oligonucleotide
  Antisense strand to SEQ ID NO: 1017922
gaucuuaaggacguucugg

SEQ ID NO: 1017924 - RNA, 19 nt, Artificial Sequence
  Description of Artificial Sequence: Synthetic oligonucleotide
  Sense strand starting at position 734 of SEQ ID NO: 914619
guccuuaagauccgaugga

SEQ ID NO: 1017925 - RNA, 19 nt, Artificial Sequence
  Description of Artificial Sequence: Synthetic oligonucleotide
  Antisense strand to SEQ ID NO: 1017924
uccaucggaucuuaaggac

SEQ ID NO: 1017926 - RNA, 19 nt, Artificial Sequence
  Description of Artificial Sequence: Synthetic oligonucleotide
  Sense strand starting at position 738 of SEQ ID NO: 914619
uuaagauccgauggaagua

SEQ ID NO: 1017927 - RNA, 19 nt, Artificial Sequence
  Description of Artificial Sequence: Synthetic oligonucleotide
  Antisense strand to SEQ ID NO: 1017926
uacuuccaucggaucuuaa

SEQ ID NO: 1017928 - RNA, 19 nt, Artificial Sequence
  Description of Artificial Sequence: Synthetic oligonucleotide
  Sense strand starting at position 760 of SEQ ID NO: 914619
aggaauguaguuuagucaa

SEQ ID NO: 1017929 - RNA, 19 nt, Artificial Sequence
  Description of Artificial Sequence: Synthetic oligonucleotide
  Antisense strand to SEQ ID NO: 1017928
uugacuaaacuacauuccu

SEQ ID NO: 1017930 - RNA, 19 nt, Artificial Sequence
  Description of Artificial Sequence: Synthetic oligonucleotide
  Sense strand starting at position 762 of SEQ ID NO: 914619
gaauguaguuuagucaaug

SEQ ID NO: 1017931 - RNA, 19 nt, Artificial Sequence
  Description of Artificial Sequence: Synthetic oligonucleotide
  Antisense strand to SEQ ID NO: 1017930
cauugacuaaacuacauuc

SEQ ID NO: 1017932 - RNA, 19 nt, Artificial Sequence
  Description of Artificial Sequence: Synthetic oligonucleotide
  Sense strand starting at position 767 of SEQ ID NO: 914619
uaguuuagucaaugcugaa

SEQ ID NO: 1017933 - RNA, 19 nt, Artificial Sequence
  Description of Artificial Sequence: Synthetic oligonucleotide
  Antisense strand to SEQ ID NO: 1017932
uucagcauugacuaaacua

SEQ ID NO: 1017934 - RNA, 19 nt, Artificial Sequence
  Description of Artificial Sequence: Synthetic oligonucleotide
  Sense strand starting at position 788 of SEQ ID NO: 914619
ccuccaucauggccagaau

SEQ ID NO: 1017935 - RNA, 19 nt, Artificial Sequence
  Description of Artificial Sequence: Synthetic oligonucleotide
  Antisense strand to SEQ ID NO: 1017934
auucuggccaugauggagg

SEQ ID NO: 1017936 - RNA, 19 nt, Artificial Sequence
  Description of Artificial Sequence: Synthetic oligonucleotide
  Sense strand starting at position 789 of SEQ ID NO: 914619
cuccaucauggccagaauu

SEQ ID NO: 1017937 - RNA, 19 nt, Artificial Sequence
  Description of Artificial Sequence: Synthetic oligonucleotide
  Antisense strand to SEQ ID NO: 1017936
aauucuggccaugauggag

SEQ ID NO: 1017938 - RNA, 19 nt, Artificial Sequence
  Description of Artificial Sequence: Synthetic oligonucleotide
  Sense strand starting at position 851 of SEQ ID NO: 914619
agccucugguucuccauaa

SEQ ID NO: 1017939 - RNA, 19 nt, Artificial Sequence
  Description of Artificial Sequence: Synthetic oligonucleotide
  Antisense strand to SEQ ID NO: 1017938
uuauggagaaccagaggcu

SEQ ID NO: 1017940 - RNA, 19 nt, Artificial Sequence
  Description of Artificial Sequence: Synthetic oligonucleotide
  Sense strand starting at position 2225 of SEQ ID NO: 914619
aguaauaauggucaggugu

SEQ ID NO: 1017941 - RNA, 19 nt, Artificial Sequence
  Description of Artificial Sequence: Synthetic oligonucleotide
  Antisense strand to SEQ ID NO: 1017940
acaccugaccauuauuacu

SEQ ID NO: 1017942 - RNA, 19 nt, Artificial Sequence
  Description of Artificial Sequence: Synthetic oligonucleotide
  Sense strand starting at position 2262 of SEQ ID NO: 914619
auuggaauuuguuuggugu

SEQ ID NO: 1017943 - RNA, 19 nt, Artificial Sequence
  Description of Artificial Sequence: Synthetic oligonucleotide
  Antisense strand to SEQ ID NO: 1017942
acaccaaacaaauuccaau

SEQ ID NO: 1017944 - RNA, 19 nt, Artificial Sequence
  Description of Artificial Sequence: Synthetic oligonucleotide
  Sense strand starting at position 2263 of SEQ ID NO: 914619
uuggaauuuguuugguguu

SEQ ID NO: 1017945 - RNA, 19 nt, Artificial Sequence
  Description of Artificial Sequence: Synthetic oligonucleotide
  Antisense strand to SEQ ID NO: 1017944
aacaccaaacaaauuccaa

SEQ ID NO: 1017946 - RNA, 19 nt, Artificial Sequence
  Description of Artificial Sequence: Synthetic oligonucleotide
  Sense strand starting at position 2651 of SEQ ID NO: 914619
cuuacagugagggaguuau

SEQ ID NO: 1017947 - RNA, 19 nt, Artificial Sequence
  Description of Artificial Sequence: Synthetic oligonucleotide
  Antisense strand to SEQ ID NO: 1017946
auaacucccucacuguaag

SEQ ID NO: 1017948 - RNA, 19 nt, Artificial Sequence
  Description of Artificial Sequence: Synthetic oligonucleotide
  Sense strand starting at position 2894 of SEQ ID NO: 914619
uccucauuacuucgaguga

SEQ ID NO: 1017949 - RNA, 19 nt, Artificial Sequence
  Description of Artificial Sequence: Synthetic oligonucleotide
  Antisense strand to SEQ ID NO: 1017948
ucacucgaaguaaugagga

SEQ ID NO: 1017950 - RNA, 19 nt, Artificial Sequence
  Description of Artificial Sequence: Synthetic oligonucleotide
  Sense strand starting at position 2898 of SEQ ID NO: 914619
cauuacuucgagugaacuc

SEQ ID NO: 1017951 - RNA, 19 nt, Artificial Sequence
  Description of Artificial Sequence: Synthetic oligonucleotide
  Antisense strand to SEQ ID NO: 1017950
gaguucacucgaaguaaug

SEQ ID NO: 1017952 - RNA, 19 nt, Artificial Sequence
  Description of Artificial Sequence: Synthetic oligonucleotide
  Sense strand starting at position 2999 of SEQ ID NO: 914619
acccacugcuugucagaau

SEQ ID NO: 1017953 - RNA, 19 nt, Artificial Sequence
  Description of Artificial Sequence: Synthetic oligonucleotide
  Antisense strand to SEQ ID NO: 1017952
auucugacaagcagugggu

SEQ ID NO: 1017954 - RNA, 19 nt, Artificial Sequence
  Description of Artificial Sequence: Synthetic oligonucleotide
  Sense strand starting at position 3179 of SEQ ID NO: 914619
uuagaacauuccuuguuga

SEQ ID NO: 1017955 - RNA, 19 nt, Artificial Sequence
  Description of Artificial Sequence: Synthetic oligonucleotide
  Antisense strand to SEQ ID NO: 1017954
ucaacaaggaauguucuaa

SEQ ID NO: 1017956 - RNA, 19 nt, Artificial Sequence
  Description of Artificial Sequence: Synthetic oligonucleotide
  Sense strand starting at position 3182 of SEQ ID NO: 914619
gaacauuccuuguugaagg

SEQ ID NO: 1017957 - RNA, 19 nt, Artificial Sequence
  Description of Artificial Sequence: Synthetic oligonucleotide
  Antisense strand to SEQ ID NO: 1017956
ccuucaacaaggaauguuc

SEQ ID NO: 1017958 - RNA, 19 nt, Artificial Sequence
  Description of Artificial Sequence: Synthetic oligonucleotide
  Sense strand starting at position 3187 of SEQ ID NO: 914619
uuccuuguugaaggaauau

SEQ ID NO: 1017959 - RNA, 19 nt, Artificial Sequence
  Description of Artificial Sequence: Synthetic oligonucleotide
  Antisense strand to SEQ ID NO: 1017958
auauuccuucaacaaggaa

SEQ ID NO: 1017960 - RNA, 19 nt, Artificial Sequence
  Description of Artificial Sequence: Synthetic oligonucleotide
  Sense strand starting at position 3221 of SEQ ID NO: 914619
cucccuaccuguuuguaau

SEQ ID NO: 1017961 - RNA, 19 nt, Artificial Sequence
  Description of Artificial Sequence: Synthetic oligonucleotide
  Antisense strand to SEQ ID NO: 1017960
auuacaaacagguagggag

SEQ ID NO: 1017962 - RNA, 19 nt, Artificial Sequence
  Description of Artificial Sequence: Synthetic oligonucleotide
  Sense strand starting at position 3452 of SEQ ID NO: 914619
ugucacaggcuguauagua

SEQ ID NO: 1017963 - RNA, 19 nt, Artificial Sequence
  Description of Artificial Sequence: Synthetic oligonucleotide
  Antisense strand to SEQ ID NO: 1017962
uacuauacagccugugaca

SEQ ID NO: 1017964 - RNA, 19 nt, Artificial Sequence
  Description of Artificial Sequence: Synthetic oligonucleotide
  Sense strand starting at position 3465 of SEQ ID NO: 914619
auaguacucucuguugaug

SEQ ID NO: 1017965 - RNA, 19 nt, Artificial Sequence
  Description of Artificial Sequence: Synthetic oligonucleotide
  Antisense strand to SEQ ID NO: 1017964
caucaacagagaguacuau

SEQ ID NO: 1017966 - RNA, 19 nt, Artificial Sequence
  Description of Artificial Sequence: Synthetic oligonucleotide
  Sense strand starting at position 3471 of SEQ ID NO: 914619
cucucuguugaugaacauu

SEQ ID NO: 1017967 - RNA, 19 nt, Artificial Sequence
  Description of Artificial Sequence: Synthetic oligonucleotide
  Antisense strand to SEQ ID NO: 1017966
aauguucaucaacagagag

SEQ ID NO: 1017968 - RNA, 19 nt, Artificial Sequence
  Description of Artificial Sequence: Synthetic oligonucleotide
  Sense strand starting at position 3479 of SEQ ID NO: 914619
ugaugaacauuuggguaua

SEQ ID NO: 1017969 - RNA, 19 nt, Artificial Sequence
  Description of Artificial Sequence: Synthetic oligonucleotide
  Antisense strand to SEQ ID NO: 1017968
uauacccaaauguucauca

SEQ ID NO: 1017970 - RNA, 19 nt, Artificial Sequence
  Description of Artificial Sequence: Synthetic oligonucleotide
  Sense strand starting at position 3480 of SEQ ID NO: 914619
gaugaacauuuggguauau

SEQ ID NO: 1017971 - RNA, 19 nt, Artificial Sequence
  Description of Artificial Sequence: Synthetic oligonucleotide
  Antisense strand to SEQ ID NO: 1017970
auauacccaaauguucauc

SEQ ID NO: 1017972 - RNA, 19 nt, Artificial Sequence
  Description of Artificial Sequence: Synthetic oligonucleotide
  Sense strand starting at position 3544 of SEQ ID NO: 914619
cuaauuuacgcuggcaaca

SEQ ID NO: 1017973 - RNA, 19 nt, Artificial Sequence
  Description of Artificial Sequence: Synthetic oligonucleotide
  Antisense strand to SEQ ID NO: 1017972
uguugccagcguaaauuag

SEQ ID NO: 1017974 - RNA, 19 nt, Artificial Sequence
  Description of Artificial Sequence: Synthetic oligonucleotide
  Sense strand starting at position 3792 of SEQ ID NO: 914619
gaggucuugccauauugug

SEQ ID NO: 1017975 - RNA, 19 nt, Artificial Sequence
  Description of Artificial Sequence: Synthetic oligonucleotide
  Antisense strand to SEQ ID NO: 1017974
cacaauauggcaagaccuc

SEQ ID NO: 1017976 - RNA, 19 nt, Artificial Sequence
  Description of Artificial Sequence: Synthetic oligonucleotide
  Sense strand starting at position 3931 of SEQ ID NO: 914619
aacguuugccaauauagua

SEQ ID NO: 1017977 - RNA, 19 nt, Artificial Sequence
  Description of Artificial Sequence: Synthetic oligonucleotide
  Antisense strand to SEQ ID NO: 1017976
uacuauauuggcaaacguu

SEQ ID NO: 1017978 - RNA, 19 nt, Artificial Sequence
  Description of Artificial Sequence: Synthetic oligonucleotide
  Sense strand starting at position 3939 of SEQ ID NO: 914619
ccaauauaguaggcauaaa

SEQ ID NO: 1017979 - RNA, 19 nt, Artificial Sequence
  Description of Artificial Sequence: Synthetic oligonucleotide
  Antisense strand to SEQ ID NO: 1017978
uuuaugccuacuauauugg

SEQ ID NO: 1017980 - RNA, 19 nt, Artificial Sequence
  Description of Artificial Sequence: Synthetic oligonucleotide
  Sense strand starting at position 3981 of SEQ ID NO: 914619
auuugcauuucuugguuga

SEQ ID NO: 1017981 - RNA, 19 nt, Artificial Sequence
  Description of Artificial Sequence: Synthetic oligonucleotide
  Antisense strand to SEQ ID NO: 1017980
ucaaccaagaaaugcaaau

SEQ ID NO: 1017982 - RNA, 19 nt, Artificial Sequence
  Description of Artificial Sequence: Synthetic oligonucleotide
  Sense strand starting at position 3983 of SEQ ID NO: 914619
uugcauuucuugguugagu

SEQ ID NO: 1017983 - RNA, 19 nt, Artificial Sequence
  Description of Artificial Sequence: Synthetic oligonucleotide
  Antisense strand to SEQ ID NO: 1017982
acucaaccaagaaaugcaa

SEQ ID NO: 1017984 - RNA, 19 nt, Artificial Sequence
  Description of Artificial Sequence: Synthetic oligonucleotide
  Sense strand starting at position 32 of SEQ ID NO: 914620
guguauaaauggucuaaau

SEQ ID NO: 1017985 - RNA, 19 nt, Artificial Sequence
  Description of Artificial Sequence: Synthetic oligonucleotide
  Antisense strand to SEQ ID NO: 1017984
auuuagaccauuuauacac

SEQ ID NO: 1017986 - RNA, 19 nt, Artificial Sequence
  Description of Artificial Sequence: Synthetic oligonucleotide
  Sense strand starting at position 82 of SEQ ID NO: 914620
auaaaugccggcuacauau

SEQ ID NO: 1017987 - RNA, 19 nt, Artificial Sequence
  Description of Artificial Sequence: Synthetic oligonucleotide
  Antisense strand to SEQ ID NO: 1017986
auauguagccggcauuuau

SEQ ID NO: 1017988 - RNA, 19 nt, Artificial Sequence
  Description of Artificial Sequence: Synthetic oligonucleotide
  Sense strand starting at position 136 of SEQ ID NO: 914620
cuuugauaugugcaaauac

SEQ ID NO: 1017989 - RNA, 19 nt, Artificial Sequence
  Description of Artificial Sequence: Synthetic oligonucleotide
  Antisense strand to SEQ ID NO: 1017988
guauuugcacauaucaaag

SEQ ID NO: 1017990 - RNA, 19 nt, Artificial Sequence
  Description of Artificial Sequence: Synthetic oligonucleotide
  Sense strand starting at position 270 of SEQ ID NO: 914620
cagggaguuuaacugugau

SEQ ID NO: 1017991 - RNA, 19 nt, Artificial Sequence
  Description of Artificial Sequence: Synthetic oligonucleotide
  Antisense strand to SEQ ID NO: 1017990
aucacaguuaaacucccug

SEQ ID NO: 1017992 - RNA, 19 nt, Artificial Sequence
  Description of Artificial Sequence: Synthetic oligonucleotide
  Sense strand starting at position 273 of SEQ ID NO: 914620
ggaguuuaacugugauaag

SEQ ID NO: 1017993 - RNA, 19 nt, Artificial Sequence
  Description of Artificial Sequence: Synthetic oligonucleotide
  Antisense strand to SEQ ID NO: 1017992
cuuaucacaguuaaacucc

SEQ ID NO: 1017994 - RNA, 19 nt, Artificial Sequence
  Description of Artificial Sequence: Synthetic oligonucleotide
  Sense strand starting at position 284 of SEQ ID NO: 914620
gugauaaguuuauuaaagg

SEQ ID NO: 1017995 - RNA, 19 nt, Artificial Sequence
  Description of Artificial Sequence: Synthetic oligonucleotide
  Antisense strand to SEQ ID NO: 1017994
ccuuuaauaaacuuaucac

SEQ ID NO: 1017996 - RNA, 19 nt, Artificial Sequence
  Description of Artificial Sequence: Synthetic oligonucleotide
  Sense strand starting at position 316 of SEQ ID NO: 914620
aguggacaguauguauaaa

SEQ ID NO: 1017997 - RNA, 19 nt, Artificial Sequence
  Description of Artificial Sequence: Synthetic oligonucleotide
  Antisense strand to SEQ ID NO: 1017996
uuuauacauacuguccacu

SEQ ID NO: 1017998 - RNA, 19 nt, Artificial Sequence
  Description of Artificial Sequence: Synthetic oligonucleotide
  Sense strand starting at position 1103 of SEQ ID NO: 914620
cuucucagauuagcugaau

SEQ ID NO: 1017999 - RNA, 19 nt, Artificial Sequence
  Description of Artificial Sequence: Synthetic oligonucleotide
  Antisense strand to SEQ ID NO: 1017998
auucagcuaaucugagaag

SEQ ID NO: 1018000 - RNA, 19 nt, Artificial Sequence
  Description of Artificial Sequence: Synthetic oligonucleotide
  Sense strand starting at position 1104 of SEQ ID NO: 914620
uucucagauuagcugaaua

SEQ ID NO: 1018001 - RNA, 19 nt, Artificial Sequence
  Description of Artificial Sequence: Synthetic oligonucleotide
  Antisense strand to SEQ ID NO: 1018000
uauucagcuaaucugagaa

SEQ ID NO: 1018002 - RNA, 19 nt, Artificial Sequence
  Description of Artificial Sequence: Synthetic oligonucleotide
  Sense strand starting at position 1149 of SEQ ID NO: 914620
uuugccauguaucuaagaa

SEQ ID NO: 1018003 - RNA, 19 nt, Artificial Sequence
  Description of Artificial Sequence: Synthetic oligonucleotide
  Antisense strand to SEQ ID NO: 1018002
uucuuagauacauggcaaa

SEQ ID NO: 1018004 - RNA, 19 nt, Artificial Sequence
  Description of Artificial Sequence: Synthetic oligonucleotide
  Sense strand starting at position 1183 of SEQ ID NO: 914620
ccuuguaaauucuuuagua

SEQ ID NO: 1018005 - RNA, 19 nt, Artificial Sequence
  Description of Artificial Sequence: Synthetic oligonucleotide
  Antisense strand to SEQ ID NO: 1018004
uacuaaagaauuuacaagg

SEQ ID NO: 1018006 - RNA, 19 nt, Artificial Sequence
  Description of Artificial Sequence: Synthetic oligonucleotide
  Sense strand starting at position 1195 of SEQ ID NO: 914620
uuuaguauuuagucgagua

SEQ ID NO: 1018007 - RNA, 19 nt, Artificial Sequence
  Description of Artificial Sequence: Synthetic oligonucleotide
  Antisense strand to SEQ ID NO: 1018006
uacucgacuaaauacuaaa

SEQ ID NO: 1018008 - RNA, 19 nt, Artificial Sequence
  Description of Artificial Sequence: Synthetic oligonucleotide
  Sense strand starting at position 1196 of SEQ ID NO: 914620
uuaguauuuagucgaguaa

SEQ ID NO: 1018009 - RNA, 19 nt, Artificial Sequence
  Description of Artificial Sequence: Synthetic oligonucleotide
  Antisense strand to SEQ ID NO: 1018008
uuacucgacuaaauacuaa

SEQ ID NO: 1018010 - RNA, 19 nt, Artificial Sequence
  Description of Artificial Sequence: Synthetic oligonucleotide
  Sense strand starting at position 1205 of SEQ ID NO: 914620
agucgaguaaaucaugauu

SEQ ID NO: 1018011 - RNA, 19 nt, Artificial Sequence
  Description of Artificial Sequence: Synthetic oligonucleotide
  Antisense strand to SEQ ID NO: 1018010
aaucaugauuuacucgacu

SEQ ID NO: 1018012 - RNA, 19 nt, Artificial Sequence
  Description of Artificial Sequence: Synthetic oligonucleotide
  Sense strand starting at position 1308 of SEQ ID NO: 914620
cguguuagguauuucacga

SEQ ID NO: 1018013 - RNA, 19 nt, Artificial Sequence
  Description of Artificial Sequence: Synthetic oligonucleotide
  Antisense strand to SEQ ID NO: 1018012
ucgugaaauaccuaacacg

SEQ ID NO: 1018014 - RNA, 19 nt, Artificial Sequence
  Description of Artificial Sequence: Synthetic oligonucleotide
  Sense strand starting at position 1376 of SEQ ID NO: 914620
uaaugaaccagguggugua

SEQ ID NO: 1018015 - RNA, 19 nt, Artificial Sequence
  Description of Artificial Sequence: Synthetic oligonucleotide
  Antisense strand to SEQ ID NO: 1018014
uacaccaccugguucauua

SEQ ID NO: 1018016 - RNA, 19 nt, Artificial Sequence
  Description of Artificial Sequence: Synthetic oligonucleotide
  Sense strand starting at position 1406 of SEQ ID NO: 914620
gaagguauuucugcuaguc

SEQ ID NO: 1018017 - RNA, 19 nt, Artificial Sequence
  Description of Artificial Sequence: Synthetic oligonucleotide
  Antisense strand to SEQ ID NO: 1018016
gacuagcagaaauaccuuc

SEQ ID NO: 1018018 - RNA, 19 nt, Artificial Sequence
  Description of Artificial Sequence: Synthetic oligonucleotide
  Sense strand starting at position 1466 of SEQ ID NO: 914620
gcuggaggagcuuaaugaa

SEQ ID NO: 1018019 - RNA, 19 nt, Artificial Sequence
  Description of Artificial Sequence: Synthetic oligonucleotide
  Antisense strand to SEQ ID NO: 1018018
uucauuaagcuccuccagc

SEQ ID NO: 1018020 - RNA, 19 nt, Artificial Sequence
  Description of Artificial Sequence: Synthetic oligonucleotide
  Sense strand starting at position 1584 of SEQ ID NO: 914620
ccuccagauugucuggaga

SEQ ID NO: 1018021 - RNA, 19 nt, Artificial Sequence
  Description of Artificial Sequence: Synthetic oligonucleotide
  Antisense strand to SEQ ID NO: 1018020
ucuccagacaaucuggagg

SEQ ID NO: 1018022 - RNA, 19 nt, Artificial Sequence
  Description of Artificial Sequence: Synthetic oligonucleotide
  Sense strand starting at position 1587 of SEQ ID NO: 914620
ccagauugucuggagagca

SEQ ID NO: 1018023 - RNA, 19 nt, Artificial Sequence
  Description of Artificial Sequence: Synthetic oligonucleotide
  Antisense strand to SEQ ID NO: 1018022
ugcucuccagacaaucugg

SEQ ID NO: 1018024 - RNA, 19 nt, Artificial Sequence
  Description of Artificial Sequence: Synthetic oligonucleotide
  Sense strand starting at position 1592 of SEQ ID NO: 914620
uugucuggagagcaugaua

SEQ ID NO: 1018025 - RNA, 19 nt, Artificial Sequence
  Description of Artificial Sequence: Synthetic oligonucleotide
  Antisense strand to SEQ ID NO: 1018024
uaucaugcucuccagacaa

SEQ ID NO: 1018026 - RNA, 19 nt, Artificial Sequence
  Description of Artificial Sequence: Synthetic oligonucleotide
  Sense strand starting at position 1691 of SEQ ID NO: 914620
agugaaacucucuacgcga

SEQ ID NO: 1018027 - RNA, 19 nt, Artificial Sequence
  Description of Artificial Sequence: Synthetic oligonucleotide
  Antisense strand to SEQ ID NO: 1018026
ucgcguagagaguuucacu

SEQ ID NO: 1018028 - RNA, 19 nt, Artificial Sequence
  Description of Artificial Sequence: Synthetic oligonucleotide
  Sense strand starting at position 1832 of SEQ ID NO: 914620
uugggaaucuucuccauuc

SEQ ID NO: 1018029 - RNA, 19 nt, Artificial Sequence
  Description of Artificial Sequence: Synthetic oligonucleotide
  Antisense strand to SEQ ID NO: 1018028
gaauggagaagauucccaa

SEQ ID NO: 1018030 - RNA, 19 nt, Artificial Sequence
  Description of Artificial Sequence: Synthetic oligonucleotide
  Sense strand starting at position 1885 of SEQ ID NO: 914620
acccucuccgcgcuuuaua

SEQ ID NO: 1018031 - RNA, 19 nt, Artificial Sequence
  Description of Artificial Sequence: Synthetic oligonucleotide
  Antisense strand to SEQ ID NO: 1018030
uauaaagcgcggagagggu

SEQ ID NO: 1018032 - RNA, 19 nt, Artificial Sequence
  Description of Artificial Sequence: Synthetic oligonucleotide
  Sense strand starting at position 1895 of SEQ ID NO: 914620
cgcuuuauacgacaucaga

SEQ ID NO: 1018033 - RNA, 19 nt, Artificial Sequence
  Description of Artificial Sequence: Synthetic oligonucleotide
  Antisense strand to SEQ ID NO: 1018032
ucugaugucguauaaagcg

SEQ ID NO: 1018034 - RNA, 19 nt, Artificial Sequence
  Description of Artificial Sequence: Synthetic oligonucleotide
  Sense strand starting at position 2139 of SEQ ID NO: 914620
guucccaaacugugaagaa

SEQ ID NO: 1018035 - RNA, 19 nt, Artificial Sequence
  Description of Artificial Sequence: Synthetic oligonucleotide
  Antisense strand to SEQ ID NO: 1018034
uucuucacaguuugggaac

SEQ ID NO: 1018036 - RNA, 19 nt, Artificial Sequence
  Description of Artificial Sequence: Synthetic oligonucleotide
  Sense strand starting at position 2507 of SEQ ID NO: 914620
gaagauauucgacguaauu

SEQ ID NO: 1018037 - RNA, 19 nt, Artificial Sequence
  Description of Artificial Sequence: Synthetic oligonucleotide
  Antisense strand to SEQ ID NO: 1018036
aauuacgucgaauaucuuc

SEQ ID NO: 1018038 - RNA, 19 nt, Artificial Sequence
  Description of Artificial Sequence: Synthetic oligonucleotide
  Sense strand starting at position 2509 of SEQ ID NO: 914620
agauauucgacguaauuau

SEQ ID NO: 1018039 - RNA, 19 nt, Artificial Sequence
  Description of Artificial Sequence: Synthetic oligonucleotide
  Antisense strand to SEQ ID NO: 1018038
auaauuacgucgaauaucu

SEQ ID NO: 1018040 - RNA, 19 nt, Artificial Sequence
  Description of Artificial Sequence: Synthetic oligonucleotide
  Sense strand starting at position 2981 of SEQ ID NO: 914620
cuagcauuguaccuggaga

SEQ ID NO: 1018041 - RNA, 19 nt, Artificial Sequence
  Description of Artificial Sequence: Synthetic oligonucleotide
  Antisense strand to SEQ ID NO: 1018040
ucuccagguacaaugcuag

SEQ ID NO: 1018042 - RNA, 19 nt, Artificial Sequence
  Description of Artificial Sequence: Synthetic oligonucleotide
  Sense strand starting at position 2983 of SEQ ID NO: 914620
agcauuguaccuggagaug

SEQ ID NO: 1018043 - RNA, 19 nt, Artificial Sequence
  Description of Artificial Sequence: Synthetic oligonucleotide
  Antisense strand to SEQ ID NO: 1018042
caucuccagguacaaugcu

SEQ ID NO: 1018044 - RNA, 19 nt, Artificial Sequence
  Description of Artificial Sequence: Synthetic oligonucleotide
  Sense strand starting at position 3108 of SEQ ID NO: 914620
cuaccaaucugaguuugag

SEQ ID NO: 1018045 - RNA, 19 nt, Artificial Sequence
  Description of Artificial Sequence: Synthetic oligonucleotide
  Antisense strand to SEQ ID NO: 1018044
cucaaacucagauugguag

SEQ ID NO: 1018046 - RNA, 19 nt, Artificial Sequence
  Description of Artificial Sequence: Synthetic oligonucleotide
  Sense strand starting at position 3111 of SEQ ID NO: 914620
ccaaucugaguuugagaag

SEQ ID NO: 1018047 - RNA, 19 nt, Artificial Sequence
  Description of Artificial Sequence: Synthetic oligonucleotide
  Antisense strand to SEQ ID NO: 1018046
cuucucaaacucagauugg

SEQ ID NO: 1018048 - RNA, 19 nt, Artificial Sequence
  Description of Artificial Sequence: Synthetic oligonucleotide
  Sense strand starting at position 3317 of SEQ ID NO: 914620
uaguccuggcugcaucaua

SEQ ID NO: 1018049 - RNA, 19 nt, Artificial Sequence
  Description of Artificial Sequence: Synthetic oligonucleotide
  Antisense strand to SEQ ID NO: 1018048
uaugaugcagccaggacua

SEQ ID NO: 1018050 - RNA, 19 nt, Artificial Sequence
  Description of Artificial Sequence: Synthetic oligonucleotide
  Sense strand starting at position 3375 of SEQ ID NO: 914620
aauuaaguaguguggugaa

SEQ ID NO: 1018051 - RNA, 19 nt, Artificial Sequence
  Description of Artificial Sequence: Synthetic oligonucleotide
  Antisense strand to SEQ ID NO: 1018050
uucaccacacuacuuaauu

SEQ ID NO: 1018052 - RNA, 19 nt, Artificial Sequence
  Description of Artificial Sequence: Synthetic oligonucleotide
  Sense strand starting at position 3477 of SEQ ID NO: 914620
uuccuuguguagguagaua

SEQ ID NO: 1018053 - RNA, 19 nt, Artificial Sequence
  Description of Artificial Sequence: Synthetic oligonucleotide
  Antisense strand to SEQ ID NO: 1018052
uaucuaccuacacaaggaa

SEQ ID NO: 1018054 - RNA, 19 nt, Artificial Sequence
  Description of Artificial Sequence: Synthetic oligonucleotide
  Sense strand starting at position 3714 of SEQ ID NO: 914620
ucauuauuggacugucaca

SEQ ID NO: 1018055 - RNA, 19 nt, Artificial Sequence
  Description of Artificial Sequence: Synthetic oligonucleotide
  Antisense strand to SEQ ID NO: 1018054
ugugacaguccaauaauga

SEQ ID NO: 1018056 - RNA, 19 nt, Artificial Sequence
  Description of Artificial Sequence: Synthetic oligonucleotide
  Sense strand starting at position 3789 of SEQ ID NO: 914620
ugguuugcuugacucagaa

SEQ ID NO: 1018057 - RNA, 19 nt, Artificial Sequence
  Description of Artificial Sequence: Synthetic oligonucleotide
  Antisense strand to SEQ ID NO: 1018056
uucugagucaagcaaacca

SEQ ID NO: 1018058 - RNA, 19 nt, Artificial Sequence
  Description of Artificial Sequence: Synthetic oligonucleotide
  Sense strand starting at position 3910 of SEQ ID NO: 914620
uugccauuggcuuacugaa

SEQ ID NO: 1018059 - RNA, 19 nt, Artificial Sequence
  Description of Artificial Sequence: Synthetic oligonucleotide
  Antisense strand to SEQ ID NO: 1018058
uucaguaagccaauggcaa

SEQ ID NO: 1018060 - RNA, 19 nt, Artificial Sequence
  Description of Artificial Sequence: Synthetic oligonucleotide
  Sense strand starting at position 3917 of SEQ ID NO: 914620
uggcuuacugaaugagaac

SEQ ID NO: 1018061 - RNA, 19 nt, Artificial Sequence
  Description of Artificial Sequence: Synthetic oligonucleotide
  Antisense strand to SEQ ID NO: 1018060
guucucauucaguaagcca

SEQ ID NO: 1018062 - RNA, 19 nt, Artificial Sequence
  Description of Artificial Sequence: Synthetic oligonucleotide
  Sense strand starting at position 3929 of SEQ ID NO: 914620
ugagaacaguugucuuaca

SEQ ID NO: 1018063 - RNA, 19 nt, Artificial Sequence
  Description of Artificial Sequence: Synthetic oligonucleotide
  Antisense strand to SEQ ID NO: 1018062
uguaagacaacuguucuca

SEQ ID NO: 1018064 - RNA, 19 nt, Artificial Sequence
  Description of Artificial Sequence: Synthetic oligonucleotide
  Sense strand starting at position 81 of SEQ ID NO: 914621
gguccagguuucucaagag

SEQ ID NO: 1018065 - RNA, 19 nt, Artificial Sequence
  Description of Artificial Sequence: Synthetic oligonucleotide
  Antisense strand to SEQ ID NO: 1018064
cucuugagaaaccuggacc

SEQ ID NO: 1018066 - RNA, 19 nt, Artificial Sequence
  Description of Artificial Sequence: Synthetic oligonucleotide
  Sense strand starting at position 227 of SEQ ID NO: 914621
cagagaugcuggucuacuc

SEQ ID NO: 1018067 - RNA, 19 nt, Artificial Sequence
  Description of Artificial Sequence: Synthetic oligonucleotide
  Antisense strand to SEQ ID NO: 1018066
gaguagaccagcaucucug

SEQ ID NO: 1018068 - RNA, 19 nt, Artificial Sequence
  Description of Artificial Sequence: Synthetic oligonucleotide
  Sense strand starting at position 235 of SEQ ID NO: 914621
cuggucuacuccugggaau

SEQ ID NO: 1018069 - RNA, 19 nt, Artificial Sequence
  Description of Artificial Sequence: Synthetic oligonucleotide
  Antisense strand to SEQ ID NO: 1018068
auucccaggaguagaccag

SEQ ID NO: 1018070 - RNA, 19 nt, Artificial Sequence
  Description of Artificial Sequence: Synthetic oligonucleotide
  Sense strand starting at position 236 of SEQ ID NO: 914621
uggucuacuccugggaauu

SEQ ID NO: 1018071 - RNA, 19 nt, Artificial Sequence
  Description of Artificial Sequence: Synthetic oligonucleotide
  Antisense strand to SEQ ID NO: 1018070
aauucccaggaguagacca

SEQ ID NO: 1018072 - RNA, 19 nt, Artificial Sequence
  Description of Artificial Sequence: Synthetic oligonucleotide
  Sense strand starting at position 536 of SEQ ID NO: 914621
acagaucugucuccagauc

SEQ ID NO: 1018073 - RNA, 19 nt, Artificial Sequence
  Description of Artificial Sequence: Synthetic oligonucleotide
  Antisense strand to SEQ ID NO: 1018072
gaucuggagacagaucugu

SEQ ID NO: 1018074 - RNA, 19 nt, Artificial Sequence
  Description of Artificial Sequence: Synthetic oligonucleotide
  Sense strand starting at position 564 of SEQ ID NO: 914621
uuuggaguguuucaggcau

SEQ ID NO: 1018075 - RNA, 19 nt, Artificial Sequence
  Description of Artificial Sequence: Synthetic oligonucleotide
  Antisense strand to SEQ ID NO: 1018074
augccugaaacacuccaaa

SEQ ID NO: 1018076 - RNA, 19 nt, Artificial Sequence
  Description of Artificial Sequence: Synthetic oligonucleotide
  Sense strand starting at position 570 of SEQ ID NO: 914621
guguuucaggcauagugca

SEQ ID NO: 1018077 - RNA, 19 nt, Artificial Sequence
  Description of Artificial Sequence: Synthetic oligonucleotide
  Antisense strand to SEQ ID NO: 1018076
ugcacuaugccugaaacac

SEQ ID NO: 1018078 - RNA, 19 nt, Artificial Sequence
  Description of Artificial Sequence: Synthetic oligonucleotide
  Sense strand starting at position 1065 of SEQ ID NO: 914621
gaggguuaugcacagugau

SEQ ID NO: 1018079 - RNA, 19 nt, Artificial Sequence
  Description of Artificial Sequence: Synthetic oligonucleotide
  Antisense strand to SEQ ID NO: 1018078
aucacugugcauaacccuc

SEQ ID NO: 1018080 - RNA, 19 nt, Artificial Sequence
  Description of Artificial Sequence: Synthetic oligonucleotide
  Sense strand starting at position 1068 of SEQ ID NO: 914621
gguuaugcacagugauaca

SEQ ID NO: 1018081 - RNA, 19 nt, Artificial Sequence
  Description of Artificial Sequence: Synthetic oligonucleotide
  Antisense strand to SEQ ID NO: 1018080
uguaucacugugcauaacc

SEQ ID NO: 1018082 - RNA, 19 nt, Artificial Sequence
  Description of Artificial Sequence: Synthetic oligonucleotide
  Sense strand starting at position 1085 of SEQ ID NO: 914621
cagcgaugcuuggaaacca

SEQ ID NO: 1018083 - RNA, 19 nt, Artificial Sequence
  Description of Artificial Sequence: Synthetic oligonucleotide
  Antisense strand to SEQ ID NO: 1018082
ugguuuccaagcaucgcug

SEQ ID NO: 1018084 - RNA, 19 nt, Artificial Sequence
  Description of Artificial Sequence: Synthetic oligonucleotide
  Sense strand starting at position 1101 of SEQ ID NO: 914621
ccacuagagcugugguaag

SEQ ID NO: 1018085 - RNA, 19 nt, Artificial Sequence
  Description of Artificial Sequence: Synthetic oligonucleotide
  Antisense strand to SEQ ID NO: 1018084
cuuaccacagcucuagugg

SEQ ID NO: 1018086 - RNA, 19 nt, Artificial Sequence
  Description of Artificial Sequence: Synthetic oligonucleotide
  Sense strand starting at position 1113 of SEQ ID NO: 914621
ugguaagagcguuggguuu

SEQ ID NO: 1018087 - RNA, 19 nt, Artificial Sequence
  Description of Artificial Sequence: Synthetic oligonucleotide
  Antisense strand to SEQ ID NO: 1018086
aaacccaacgcucuuacca

SEQ ID NO: 1018088 - RNA, 19 nt, Artificial Sequence
  Description of Artificial Sequence: Synthetic oligonucleotide
  Sense strand starting at position 1125 of SEQ ID NO: 914621
uggguuugaccuggacuca

SEQ ID NO: 1018089 - RNA, 19 nt, Artificial Sequence
  Description of Artificial Sequence: Synthetic oligonucleotide
  Antisense strand to SEQ ID NO: 1018088
ugaguccaggucaaaccca

SEQ ID NO: 1018090 - RNA, 19 nt, Artificial Sequence
  Description of Artificial Sequence: Synthetic oligonucleotide
  Sense strand starting at position 1157 of SEQ ID NO: 914621
gccgcuuaaaucgguguau

SEQ ID NO: 1018091 - RNA, 19 nt, Artificial Sequence
  Description of Artificial Sequence: Synthetic oligonucleotide
  Antisense strand to SEQ ID NO: 1018090
auacaccgauuuaagcggc

SEQ ID NO: 1018092 - RNA, 19 nt, Artificial Sequence
  Description of Artificial Sequence: Synthetic oligonucleotide
  Sense strand starting at position 1159 of SEQ ID NO: 914621
cgcuuaaaucgguguauga

SEQ ID NO: 1018093 - RNA, 19 nt, Artificial Sequence
  Description of Artificial Sequence: Synthetic oligonucleotide
  Antisense strand to SEQ ID NO: 1018092
ucauacaccgauuuaagcg

SEQ ID NO: 1018094 - RNA, 19 nt, Artificial Sequence
  Description of Artificial Sequence: Synthetic oligonucleotide
  Sense strand starting at position 1185 of SEQ ID NO: 914621
ggucuucucuaucucugau

SEQ ID NO: 1018095 - RNA, 19 nt, Artificial Sequence
  Description of Artificial Sequence: Synthetic oligonucleotide
  Antisense strand to SEQ ID NO: 1018094
aucagagauagagaagacc

SEQ ID NO: 1018096 - RNA, 19 nt, Artificial Sequence
  Description of Artificial Sequence: Synthetic oligonucleotide
  Sense strand starting at position 1221 of SEQ ID NO: 914621
aggguuaccugagacaaac

SEQ ID NO: 1018097 - RNA, 19 nt, Artificial Sequence
  Description of Artificial Sequence: Synthetic oligonucleotide
  Antisense strand to SEQ ID NO: 1018096
guuugucucagguaacccu

SEQ ID NO: 1018098 - RNA, 19 nt, Artificial Sequence
  Description of Artificial Sequence: Synthetic oligonucleotide
  Sense strand starting at position 2054 of SEQ ID NO: 914621
ugcagcgagguauaucuua

SEQ ID NO: 1018099 - RNA, 19 nt, Artificial Sequence
  Description of Artificial Sequence: Synthetic oligonucleotide
  Antisense strand to SEQ ID NO: 1018098
uaagauauaccucgcugca

SEQ ID NO: 1018100 - RNA, 19 nt, Artificial Sequence
  Description of Artificial Sequence: Synthetic oligonucleotide
  Sense strand starting at position 2059 of SEQ ID NO: 914621
cgagguauaucuuacggag

SEQ ID NO: 1018101 - RNA, 19 nt, Artificial Sequence
  Description of Artificial Sequence: Synthetic oligonucleotide
  Antisense strand to SEQ ID NO: 1018100
cuccguaagauauaccucg

SEQ ID NO: 1018102 - RNA, 19 nt, Artificial Sequence
  Description of Artificial Sequence: Synthetic oligonucleotide
  Sense strand starting at position 2228 of SEQ ID NO: 914621
gcuccucucuguuacagaa

SEQ ID NO: 1018103 - RNA, 19 nt, Artificial Sequence
  Description of Artificial Sequence: Synthetic oligonucleotide
  Antisense strand to SEQ ID NO: 1018102
uucuguaacagagaggagc

SEQ ID NO: 1018104 - RNA, 19 nt, Artificial Sequence
  Description of Artificial Sequence: Synthetic oligonucleotide
  Sense strand starting at position 2414 of SEQ ID NO: 914621
cgagcaaucucugcacguu

SEQ ID NO: 1018105 - RNA, 19 nt, Artificial Sequence
  Description of Artificial Sequence: Synthetic oligonucleotide
  Antisense strand to SEQ ID NO: 1018104
aacgugcagagauugcucg

SEQ ID NO: 1018106 - RNA, 19 nt, Artificial Sequence
  Description of Artificial Sequence: Synthetic oligonucleotide
  Sense strand starting at position 2483 of SEQ ID NO: 914621
cagggcugugcccagaauu

SEQ ID NO: 1018107 - RNA, 19 nt, Artificial Sequence
  Description of Artificial Sequence: Synthetic oligonucleotide
  Antisense strand to SEQ ID NO: 1018106
aauucugggcacagcccug

SEQ ID NO: 1018108 - RNA, 19 nt, Artificial Sequence
  Description of Artificial Sequence: Synthetic oligonucleotide
  Sense strand starting at position 2528 of SEQ ID NO: 914621
uccuuagggaggcauguua

SEQ ID NO: 1018109 - RNA, 19 nt, Artificial Sequence
  Description of Artificial Sequence: Synthetic oligonucleotide
  Antisense strand to SEQ ID NO: 1018108
uaacaugccucccuaagga

SEQ ID NO: 1018110 - RNA, 19 nt, Artificial Sequence
  Description of Artificial Sequence: Synthetic oligonucleotide
  Sense strand starting at position 2554 of SEQ ID NO: 914621
gaacaugucccuggaccuu

SEQ ID NO: 1018111 - RNA, 19 nt, Artificial Sequence
  Description of Artificial Sequence: Synthetic oligonucleotide
  Antisense strand to SEQ ID NO: 1018110
aagguccagggacauguuc

SEQ ID NO: 1018112 - RNA, 19 nt, Artificial Sequence
  Description of Artificial Sequence: Synthetic oligonucleotide
  Sense strand starting at position 2584 of SEQ ID NO: 914621
gagggcaaaucuugugacu

SEQ ID NO: 1018113 - RNA, 19 nt, Artificial Sequence
  Description of Artificial Sequence: Synthetic oligonucleotide
  Antisense strand to SEQ ID NO: 1018112
agucacaagauuugcccuc

SEQ ID NO: 1018114 - RNA, 19 nt, Artificial Sequence
  Description of Artificial Sequence: Synthetic oligonucleotide
  Sense strand starting at position 2593 of SEQ ID NO: 914621
ucuugugacucuggaggga

SEQ ID NO: 1018115 - RNA, 19 nt, Artificial Sequence
  Description of Artificial Sequence: Synthetic oligonucleotide
  Antisense strand to SEQ ID NO: 1018114
ucccuccagagucacaaga

SEQ ID NO: 1018116 - RNA, 19 nt, Artificial Sequence
  Description of Artificial Sequence: Synthetic oligonucleotide
  Sense strand starting at position 2596 of SEQ ID NO: 914621
ugugacucuggagggaauu

SEQ ID NO: 1018117 - RNA, 19 nt, Artificial Sequence
  Description of Artificial Sequence: Synthetic oligonucleotide
  Antisense strand to SEQ ID NO: 1018116
aauucccuccagagucaca

SEQ ID NO: 1018118 - RNA, 19 nt, Artificial Sequence
  Description of Artificial Sequence: Synthetic oligonucleotide
  Sense strand starting at position 2609 of SEQ ID NO: 914621
ggaauugugacccagccaa

SEQ ID NO: 1018119 - RNA, 19 nt, Artificial Sequence
  Description of Artificial Sequence: Synthetic oligonucleotide
  Antisense strand to SEQ ID NO: 1018118
uuggcugggucacaauucc

SEQ ID NO: 1018120 - RNA, 19 nt, Artificial Sequence
  Description of Artificial Sequence: Synthetic oligonucleotide
  Sense strand starting at position 2684 of SEQ ID NO: 914621
caagcaagaugguuuguca

SEQ ID NO: 1018121 - RNA, 19 nt, Artificial Sequence
  Description of Artificial Sequence: Synthetic oligonucleotide
  Antisense strand to SEQ ID NO: 1018120
ugacaaaccaucuugcuug

SEQ ID NO: 1018122 - RNA, 19 nt, Artificial Sequence
  Description of Artificial Sequence: Synthetic oligonucleotide
  Sense strand starting at position 2687 of SEQ ID NO: 914621
gcaagaugguuugucacuc

SEQ ID NO: 1018123 - RNA, 19 nt, Artificial Sequence
  Description of Artificial Sequence: Synthetic oligonucleotide
  Antisense strand to SEQ ID NO: 1018122
gagugacaaaccaucuugc

SEQ ID NO: 1018124 - RNA, 19 nt, Artificial Sequence
  Description of Artificial Sequence: Synthetic oligonucleotide
  Sense strand starting at position 2691 of SEQ ID NO: 914621
gaugguuugucacucugca

SEQ ID NO: 1018125 - RNA, 19 nt, Artificial Sequence
  Description of Artificial Sequence: Synthetic oligonucleotide
  Antisense strand to SEQ ID NO: 1018124
ugcagagugacaaaccauc

SEQ ID NO: 1018126 - RNA, 19 nt, Artificial Sequence
  Description of Artificial Sequence: Synthetic oligonucleotide
  Sense strand starting at position 2707 of SEQ ID NO: 914621
gcaccugugucuccacaaa

SEQ ID NO: 1018127 - RNA, 19 nt, Artificial Sequence
  Description of Artificial Sequence: Synthetic oligonucleotide
  Antisense strand to SEQ ID NO: 1018126
uuuguggagacacaggugc

SEQ ID NO: 1018128 - RNA, 19 nt, Artificial Sequence
  Description of Artificial Sequence: Synthetic oligonucleotide
  Sense strand starting at position 2913 of SEQ ID NO: 914621
ggaucauguacccgagccu

SEQ ID NO: 1018129 - RNA, 19 nt, Artificial Sequence
  Description of Artificial Sequence: Synthetic oligonucleotide
  Antisense strand to SEQ ID NO: 1018128
aggcucggguacaugaucc

SEQ ID NO: 1018130 - RNA, 19 nt, Artificial Sequence
  Description of Artificial Sequence: Synthetic oligonucleotide
  Sense strand starting at position 2914 of SEQ ID NO: 914621
gaucauguacccgagccua

SEQ ID NO: 1018131 - RNA, 19 nt, Artificial Sequence
  Description of Artificial Sequence: Synthetic oligonucleotide
  Antisense strand to SEQ ID NO: 1018130
uaggcucggguacaugauc

SEQ ID NO: 1018132 - RNA, 19 nt, Artificial Sequence
  Description of Artificial Sequence: Synthetic oligonucleotide
  Sense strand starting at position 2926 of SEQ ID NO: 914621
gagccuacucacuggacau

SEQ ID NO: 1018133 - RNA, 19 nt, Artificial Sequence
  Description of Artificial Sequence: Synthetic oligonucleotide
  Antisense strand to SEQ ID NO: 1018132
auguccagugaguaggcuc

SEQ ID NO: 1018134 - RNA, 19 nt, Artificial Sequence
  Description of Artificial Sequence: Synthetic oligonucleotide
  Sense strand starting at position 3116 of SEQ ID NO: 914621
gccuguuaccuguguacag

SEQ ID NO: 1018135 - RNA, 19 nt, Artificial Sequence
  Description of Artificial Sequence: Synthetic oligonucleotide
  Antisense strand to SEQ ID NO: 1018134
cuguacacagguaacaggc

SEQ ID NO: 1018136 - RNA, 19 nt, Artificial Sequence
  Description of Artificial Sequence: Synthetic oligonucleotide
  Sense strand starting at position 3163 of SEQ ID NO: 914621
agcauuacagaaugucaga

SEQ ID NO: 1018137 - RNA, 19 nt, Artificial Sequence
  Description of Artificial Sequence: Synthetic oligonucleotide
  Antisense strand to SEQ ID NO: 1018136
ucugacauucuguaaugcu

SEQ ID NO: 1018138 - RNA, 19 nt, Artificial Sequence
  Description of Artificial Sequence: Synthetic oligonucleotide
  Sense strand starting at position 3168 of SEQ ID NO: 914621
uacagaaugucagaugaug

SEQ ID NO: 1018139 - RNA, 19 nt, Artificial Sequence
  Description of Artificial Sequence: Synthetic oligonucleotide
  Antisense strand to SEQ ID NO: 1018138
caucaucugacauucugua

SEQ ID NO: 1018140 - RNA, 19 nt, Artificial Sequence
  Description of Artificial Sequence: Synthetic oligonucleotide
  Sense strand starting at position 3179 of SEQ ID NO: 914621
agaugaugggcauguuugu

SEQ ID NO: 1018141 - RNA, 19 nt, Artificial Sequence
  Description of Artificial Sequence: Synthetic oligonucleotide
  Antisense strand to SEQ ID NO: 1018140
acaaacaugcccaucaucu

SEQ ID NO: 1018142 - RNA, 19 nt, Artificial Sequence
  Description of Artificial Sequence: Synthetic oligonucleotide
  Sense strand starting at position 3942 of SEQ ID NO: 914621
uuaucauuguuuccauuga

SEQ ID NO: 1018143 - RNA, 19 nt, Artificial Sequence
  Description of Artificial Sequence: Synthetic oligonucleotide
  Antisense strand to SEQ ID NO: 1018142
ucaauggaaacaaugauaa

SEQ ID NO: 1018144 - RNA, 19 nt, Artificial Sequence
  Description of Artificial Sequence: Synthetic oligonucleotide
  Sense strand starting at position 13 of SEQ ID NO: 914622
ggagacuucugacaucauc

SEQ ID NO: 1018145 - RNA, 19 nt, Artificial Sequence
  Description of Artificial Sequence: Synthetic oligonucleotide
  Antisense strand to SEQ ID NO: 1018144
gaugaugucagaagucucc

SEQ ID NO: 1018146 - RNA, 19 nt, Artificial Sequence
  Description of Artificial Sequence: Synthetic oligonucleotide
  Sense strand starting at position 59 of SEQ ID NO: 914622
ucaagcuguuauucuaaag

SEQ ID NO: 1018147 - RNA, 19 nt, Artificial Sequence
  Description of Artificial Sequence: Synthetic oligonucleotide
  Antisense strand to SEQ ID NO: 1018146
cuuuagaauaacagcuuga

SEQ ID NO: 1018148 - RNA, 19 nt, Artificial Sequence
  Description of Artificial Sequence: Synthetic oligonucleotide
  Sense strand starting at position 87 of SEQ ID NO: 914622
ccucauagcugacuucuga

SEQ ID NO: 1018149 - RNA, 19 nt, Artificial Sequence
  Description of Artificial Sequence: Synthetic oligonucleotide
  Antisense strand to SEQ ID NO: 1018148
ucagaagucagcuaugagg

SEQ ID NO: 1018150 - RNA, 19 nt, Artificial Sequence
  Description of Artificial Sequence: Synthetic oligonucleotide
  Sense strand starting at position 198 of SEQ ID NO: 914622
acuagcuuuguguggaguu

SEQ ID NO: 1018151 - RNA, 19 nt, Artificial Sequence
  Description of Artificial Sequence: Synthetic oligonucleotide
  Antisense strand to SEQ ID NO: 1018150
aacuccacacaaagcuagu

SEQ ID NO: 1018152 - RNA, 19 nt, Artificial Sequence
  Description of Artificial Sequence: Synthetic oligonucleotide
  Sense strand starting at position 215 of SEQ ID NO: 914622
uugggcuaaucccugugau

SEQ ID NO: 1018153 - RNA, 19 nt, Artificial Sequence
  Description of Artificial Sequence: Synthetic oligonucleotide
  Antisense strand to SEQ ID NO: 1018152
aucacagggauuagcccaa

SEQ ID NO: 1018154 - RNA, 19 nt, Artificial Sequence
  Description of Artificial Sequence: Synthetic oligonucleotide
  Sense strand starting at position 216 of SEQ ID NO: 914622
ugggcuaaucccugugaua

SEQ ID NO: 1018155 - RNA, 19 nt, Artificial Sequence
  Description of Artificial Sequence: Synthetic oligonucleotide
  Antisense strand to SEQ ID NO: 1018154
uaucacagggauuagccca

SEQ ID NO: 1018156 - RNA, 19 nt, Artificial Sequence
  Description of Artificial Sequence: Synthetic oligonucleotide
  Sense strand starting at position 218 of SEQ ID NO: 914622
ggcuaaucccugugauaaa

SEQ ID NO: 1018157 - RNA, 19 nt, Artificial Sequence
  Description of Artificial Sequence: Synthetic oligonucleotide
  Antisense strand to SEQ ID NO: 1018156
uuuaucacagggauuagcc

SEQ ID NO: 1018158 - RNA, 19 nt, Artificial Sequence
  Description of Artificial Sequence: Synthetic oligonucleotide
  Sense strand starting at position 219 of SEQ ID NO: 914622
gcuaaucccugugauaaac

SEQ ID NO: 1018159 - RNA, 19 nt, Artificial Sequence
  Description of Artificial Sequence: Synthetic oligonucleotide
  Antisense strand to SEQ ID NO: 1018158
guuuaucacagggauuagc

SEQ ID NO: 1018160 - RNA, 19 nt, Artificial Sequence
  Description of Artificial Sequence: Synthetic oligonucleotide
  Sense strand starting at position 1722 of SEQ ID NO: 914622
ggguuaacaggucgucacu

SEQ ID NO: 1018161 - RNA, 19 nt, Artificial Sequence
  Description of Artificial Sequence: Synthetic oligonucleotide
  Antisense strand to SEQ ID NO: 1018160
agugacgaccuguuaaccc

SEQ ID NO: 1018162 - RNA, 19 nt, Artificial Sequence
  Description of Artificial Sequence: Synthetic oligonucleotide
  Sense strand starting at position 1825 of SEQ ID NO: 914622
agcaaaugauggucaggau

SEQ ID NO: 1018163 - RNA, 19 nt, Artificial Sequence
  Description of Artificial Sequence: Synthetic oligonucleotide
  Antisense strand to SEQ ID NO: 1018162
auccugaccaucauuugcu

SEQ ID NO: 1018164 - RNA, 19 nt, Artificial Sequence
  Description of Artificial Sequence: Synthetic oligonucleotide
  Sense strand starting at position 1986 of SEQ ID NO: 914622
agcuguuagaaccguuaca

SEQ ID NO: 1018165 - RNA, 19 nt, Artificial Sequence
  Description of Artificial Sequence: Synthetic oligonucleotide
  Antisense strand to SEQ ID NO: 1018164
uguaacgguucuaacagcu

SEQ ID NO: 1018166 - RNA, 19 nt, Artificial Sequence
  Description of Artificial Sequence: Synthetic oligonucleotide
  Sense strand starting at position 1991 of SEQ ID NO: 914622
uuagaaccguuacaagauu

SEQ ID NO: 1018167 - RNA, 19 nt, Artificial Sequence
  Description of Artificial Sequence: Synthetic oligonucleotide
  Antisense strand to SEQ ID NO: 1018166
aaucuuguaacgguucuaa

SEQ ID NO: 1018168 - RNA, 19 nt, Artificial Sequence
  Description of Artificial Sequence: Synthetic oligonucleotide
  Sense strand starting at position 2021 of SEQ ID NO: 914622
gagucuuugccaggagcau

SEQ ID NO: 1018169 - RNA, 19 nt, Artificial Sequence
  Description of Artificial Sequence: Synthetic oligonucleotide
  Antisense strand to SEQ ID NO: 1018168
augcuccuggcaaagacuc

SEQ ID NO: 1018170 - RNA, 19 nt, Artificial Sequence
  Description of Artificial Sequence: Synthetic oligonucleotide
  Sense strand starting at position 2203 of SEQ ID NO: 914622
acgguugacucgggagacu

SEQ ID NO: 1018171 - RNA, 19 nt, Artificial Sequence
  Description of Artificial Sequence: Synthetic oligonucleotide
  Antisense strand to SEQ ID NO: 1018170
agucucccgagucaaccgu

SEQ ID NO: 1018172 - RNA, 19 nt, Artificial Sequence
  Description of Artificial Sequence: Synthetic oligonucleotide
  Sense strand starting at position 2236 of SEQ ID NO: 914622
ugucguaagcagguguuua

SEQ ID NO: 1018173 - RNA, 19 nt, Artificial Sequence
  Description of Artificial Sequence: Synthetic oligonucleotide
  Antisense strand to SEQ ID NO: 1018172
uaaacaccugcuuacgaca

SEQ ID NO: 1018174 - RNA, 19 nt, Artificial Sequence
  Description of Artificial Sequence: Synthetic oligonucleotide
  Sense strand starting at position 2237 of SEQ ID NO: 914622
gucguaagcagguguuuau

SEQ ID NO: 1018175 - RNA, 19 nt, Artificial Sequence
  Description of Artificial Sequence: Synthetic oligonucleotide
  Antisense strand to SEQ ID NO: 1018174
auaaacaccugcuuacgac

SEQ ID NO: 1018176 - RNA, 19 nt, Artificial Sequence
  Description of Artificial Sequence: Synthetic oligonucleotide
  Sense strand starting at position 2253 of SEQ ID NO: 914622
uauauccauucgcugagua

SEQ ID NO: 1018177 - RNA, 19 nt, Artificial Sequence
  Description of Artificial Sequence: Synthetic oligonucleotide
  Antisense strand to SEQ ID NO: 1018176
uacucagcgaauggauaua

SEQ ID NO: 1018178 - RNA, 19 nt, Artificial Sequence
  Description of Artificial Sequence: Synthetic oligonucleotide
  Sense strand starting at position 2254 of SEQ ID NO: 914622
auauccauucgcugaguau

SEQ ID NO: 1018179 - RNA, 19 nt, Artificial Sequence
  Description of Artificial Sequence: Synthetic oligonucleotide
  Antisense strand to SEQ ID NO: 1018178
auacucagcgaauggauau

SEQ ID NO: 1018180 - RNA, 19 nt, Artificial Sequence
  Description of Artificial Sequence: Synthetic oligonucleotide
  Sense strand starting at position 2255 of SEQ ID NO: 914622
uauccauucgcugaguauc

SEQ ID NO: 1018181 - RNA, 19 nt, Artificial Sequence
  Description of Artificial Sequence: Synthetic oligonucleotide
  Antisense strand to SEQ ID NO: 1018180
gauacucagcgaauggaua

SEQ ID NO: 1018182 - RNA, 19 nt, Artificial Sequence
  Description of Artificial Sequence: Synthetic oligonucleotide
  Sense strand starting at position 2257 of SEQ ID NO: 914622
uccauucgcugaguaucua

SEQ ID NO: 1018183 - RNA, 19 nt, Artificial Sequence
  Description of Artificial Sequence: Synthetic oligonucleotide
  Antisense strand to SEQ ID NO: 1018182
uagauacucagcgaaugga

SEQ ID NO: 1018184 - RNA, 19 nt, Artificial Sequence
  Description of Artificial Sequence: Synthetic oligonucleotide
  Sense strand starting at position 2258 of SEQ ID NO: 914622
ccauucgcugaguaucuaa

SEQ ID NO: 1018185 - RNA, 19 nt, Artificial Sequence
  Description of Artificial Sequence: Synthetic oligonucleotide
  Antisense strand to SEQ ID NO: 1018184
uuagauacucagcgaaugg

SEQ ID NO: 1018186 - RNA, 19 nt, Artificial Sequence
  Description of Artificial Sequence: Synthetic oligonucleotide
  Sense strand starting at position 2275 of SEQ ID NO: 914622
aaacuagugccaggucuuu

SEQ ID NO: 1018187 - RNA, 19 nt, Artificial Sequence
  Description of Artificial Sequence: Synthetic oligonucleotide
  Antisense strand to SEQ ID NO: 1018186
aaagaccuggcacuaguuu

SEQ ID NO: 1018188 - RNA, 19 nt, Artificial Sequence
  Description of Artificial Sequence: Synthetic oligonucleotide
  Sense strand starting at position 2280 of SEQ ID NO: 914622
agugccaggucuuugguau

SEQ ID NO: 1018189 - RNA, 19 nt, Artificial Sequence
  Description of Artificial Sequence: Synthetic oligonucleotide
  Antisense strand to SEQ ID NO: 1018188
auaccaaagaccuggcacu

SEQ ID NO: 1018190 - RNA, 19 nt, Artificial Sequence
  Description of Artificial Sequence: Synthetic oligonucleotide
  Sense strand starting at position 2281 of SEQ ID NO: 914622
gugccaggucuuugguaug

SEQ ID NO: 1018191 - RNA, 19 nt, Artificial Sequence
  Description of Artificial Sequence: Synthetic oligonucleotide
  Antisense strand to SEQ ID NO: 1018190
cauaccaaagaccuggcac

SEQ ID NO: 1018192 - RNA, 19 nt, Artificial Sequence
  Description of Artificial Sequence: Synthetic oligonucleotide
  Sense strand starting at position 2887 of SEQ ID NO: 914622
gcuuauagguaucucaaac

SEQ ID NO: 1018193 - RNA, 19 nt, Artificial Sequence
  Description of Artificial Sequence: Synthetic oligonucleotide
  Antisense strand to SEQ ID NO: 1018192
guuugagauaccuauaagc

SEQ ID NO: 1018194 - RNA, 19 nt, Artificial Sequence
  Description of Artificial Sequence: Synthetic oligonucleotide
  Sense strand starting at position 3132 of SEQ ID NO: 914622
ucaggaaauucugcugguu

SEQ ID NO: 1018195 - RNA, 19 nt, Artificial Sequence
  Description of Artificial Sequence: Synthetic oligonucleotide
  Antisense strand to SEQ ID NO: 1018194
aaccagcagaauuuccuga

SEQ ID NO: 1018196 - RNA, 19 nt, Artificial Sequence
  Description of Artificial Sequence: Synthetic oligonucleotide
  Sense strand starting at position 3134 of SEQ ID NO: 914622
aggaaauucugcugguugu

SEQ ID NO: 1018197 - RNA, 19 nt, Artificial Sequence
  Description of Artificial Sequence: Synthetic oligonucleotide
  Antisense strand to SEQ ID NO: 1018196
acaaccagcagaauuuccu

SEQ ID NO: 1018198 - RNA, 19 nt, Artificial Sequence
  Description of Artificial Sequence: Synthetic oligonucleotide
  Sense strand starting at position 3198 of SEQ ID NO: 914622
guacuacaaccuuggucua

SEQ ID NO: 1018199 - RNA, 19 nt, Artificial Sequence
  Description of Artificial Sequence: Synthetic oligonucleotide
  Antisense strand to SEQ ID NO: 1018198
uagaccaagguuguaguac

SEQ ID NO: 1018200 - RNA, 19 nt, Artificial Sequence
  Description of Artificial Sequence: Synthetic oligonucleotide
  Sense strand starting at position 3211 of SEQ ID NO: 914622
ggucuaagcugcuaucauu

SEQ ID NO: 1018201 - RNA, 19 nt, Artificial Sequence
  Description of Artificial Sequence: Synthetic oligonucleotide
  Antisense strand to SEQ ID NO: 1018200
aaugauagcagcuuagacc

SEQ ID NO: 1018202 - RNA, 19 nt, Artificial Sequence
  Description of Artificial Sequence: Synthetic oligonucleotide
  Sense strand starting at position 3350 of SEQ ID NO: 914622
auaggcagauccuauaacu

SEQ ID NO: 1018203 - RNA, 19 nt, Artificial Sequence
  Description of Artificial Sequence: Synthetic oligonucleotide
  Antisense strand to SEQ ID NO: 1018202
aguuauaggaucugccuau

SEQ ID NO: 1018204 - RNA, 19 nt, Artificial Sequence
  Description of Artificial Sequence: Synthetic oligonucleotide
  Sense strand starting at position 3418 of SEQ ID NO: 914622
aggccaaaguccuaucaug

SEQ ID NO: 1018205 - RNA, 19 nt, Artificial Sequence
  Description of Artificial Sequence: Synthetic oligonucleotide
  Antisense strand to SEQ ID NO: 1018204
caugauaggacuuuggccu

SEQ ID NO: 1018206 - RNA, 19 nt, Artificial Sequence
  Description of Artificial Sequence: Synthetic oligonucleotide
  Sense strand starting at position 3426 of SEQ ID NO: 914622
guccuaucauggccuacaa

SEQ ID NO: 1018207 - RNA, 19 nt, Artificial Sequence
  Description of Artificial Sequence: Synthetic oligonucleotide
  Antisense strand to SEQ ID NO: 1018206
uuguaggccaugauaggac

SEQ ID NO: 1018208 - RNA, 19 nt, Artificial Sequence
  Description of Artificial Sequence: Synthetic oligonucleotide
  Sense strand starting at position 3437 of SEQ ID NO: 914622
gccuacaaauugcugauaa

SEQ ID NO: 1018209 - RNA, 19 nt, Artificial Sequence
  Description of Artificial Sequence: Synthetic oligonucleotide
  Antisense strand to SEQ ID NO: 1018208
uuaucagcaauuuguaggc

SEQ ID NO: 1018210 - RNA, 19 nt, Artificial Sequence
  Description of Artificial Sequence: Synthetic oligonucleotide
  Sense strand starting at position 3502 of SEQ ID NO: 914622
uacugcugugccugaauca

SEQ ID NO: 1018211 - RNA, 19 nt, Artificial Sequence
  Description of Artificial Sequence: Synthetic oligonucleotide
  Antisense strand to SEQ ID NO: 1018210
ugauucaggcacagcagua

SEQ ID NO: 1018212 - RNA, 19 nt, Artificial Sequence
  Description of Artificial Sequence: Synthetic oligonucleotide
  Sense strand starting at position 3569 of SEQ ID NO: 914622
gcuuguguaucaguuagga

SEQ ID NO: 1018213 - RNA, 19 nt, Artificial Sequence
  Description of Artificial Sequence: Synthetic oligonucleotide
  Antisense strand to SEQ ID NO: 1018212
uccuaacugauacacaagc

SEQ ID NO: 1018214 - RNA, 19 nt, Artificial Sequence
  Description of Artificial Sequence: Synthetic oligonucleotide
  Sense strand starting at position 3571 of SEQ ID NO: 914622
uuguguaucaguuaggaga

SEQ ID NO: 1018215 - RNA, 19 nt, Artificial Sequence
  Description of Artificial Sequence: Synthetic oligonucleotide
  Antisense strand to SEQ ID NO: 1018214
ucuccuaacugauacacaa

SEQ ID NO: 1018216 - RNA, 19 nt, Artificial Sequence
  Description of Artificial Sequence: Synthetic oligonucleotide
  Sense strand starting at position 3573 of SEQ ID NO: 914622
guguaucaguuaggagaua

SEQ ID NO: 1018217 - RNA, 19 nt, Artificial Sequence
  Description of Artificial Sequence: Synthetic oligonucleotide
  Antisense strand to SEQ ID NO: 1018216
uaucuccuaacugauacac

SEQ ID NO: 1018218 - RNA, 19 nt, Artificial Sequence
  Description of Artificial Sequence: Synthetic oligonucleotide
  Sense strand starting at position 3735 of SEQ ID NO: 914622
cccggcugugaugguuaau

SEQ ID NO: 1018219 - RNA, 19 nt, Artificial Sequence
  Description of Artificial Sequence: Synthetic oligonucleotide
  Antisense strand to SEQ ID NO: 1018218
auuaaccaucacagccggg

SEQ ID NO: 1018220 - RNA, 19 nt, Artificial Sequence
  Description of Artificial Sequence: Synthetic oligonucleotide
  Sense strand starting at position 3891 of SEQ ID NO: 914622
guggaugggcauuguacaa

SEQ ID NO: 1018221 - RNA, 19 nt, Artificial Sequence
  Description of Artificial Sequence: Synthetic oligonucleotide
  Antisense strand to SEQ ID NO: 1018220
uuguacaaugcccauccac

SEQ ID NO: 1018222 - RNA, 19 nt, Artificial Sequence
  Description of Artificial Sequence: Synthetic oligonucleotide
  Sense strand starting at position 3973 of SEQ ID NO: 914622
aucuucuguccauggacau

SEQ ID NO: 1018223 - RNA, 19 nt, Artificial Sequence
  Description of Artificial Sequence: Synthetic oligonucleotide
  Antisense strand to SEQ ID NO: 1018222
auguccauggacagaagau

SEQ ID NO: 1018224 - RNA, 19 nt, Artificial Sequence
  Description of Artificial Sequence: Synthetic oligonucleotide
  Sense strand starting at position 37 of SEQ ID NO: 914623
ucugcauuguuauuugcaa

SEQ ID NO: 1018225 - RNA, 19 nt, Artificial Sequence
  Description of Artificial Sequence: Synthetic oligonucleotide
  Antisense strand to SEQ ID NO: 1018224
uugcaaauaacaaugcaga

SEQ ID NO: 1018226 - RNA, 19 nt, Artificial Sequence
  Description of Artificial Sequence: Synthetic oligonucleotide
  Sense strand starting at position 38 of SEQ ID NO: 914623
cugcauuguuauuugcaaa

SEQ ID NO: 1018227 - RNA, 19 nt, Artificial Sequence
  Description of Artificial Sequence: Synthetic oligonucleotide
  Antisense strand to SEQ ID NO: 1018226
uuugcaaauaacaaugcag

SEQ ID NO: 1018228 - RNA, 19 nt, Artificial Sequence
  Description of Artificial Sequence: Synthetic oligonucleotide
  Sense strand starting at position 190 of SEQ ID NO: 914623
ccaacucuaccagguugaa

SEQ ID NO: 1018229 - RNA, 19 nt, Artificial Sequence
  Description of Artificial Sequence: Synthetic oligonucleotide
  Antisense strand to SEQ ID NO: 1018228
uucaaccugguagaguugg

SEQ ID NO: 1018230 - RNA, 19 nt, Artificial Sequence
  Description of Artificial Sequence: Synthetic oligonucleotide
  Sense strand starting at position 274 of SEQ ID NO: 914623
uauugauggcauugguaca

SEQ ID NO: 1018231 - RNA, 19 nt, Artificial Sequence
  Description of Artificial Sequence: Synthetic oligonucleotide
  Antisense strand to SEQ ID NO: 1018230
uguaccaaugccaucaaua

SEQ ID NO: 1018232 - RNA, 19 nt, Artificial Sequence
  Description of Artificial Sequence: Synthetic oligonucleotide
  Sense strand starting at position 281 of SEQ ID NO: 914623
ggcauugguacagaacacu

SEQ ID NO: 1018233 - RNA, 19 nt, Artificial Sequence
  Description of Artificial Sequence: Synthetic oligonucleotide
  Antisense strand to SEQ ID NO: 1018232
aguguucuguaccaaugcc

SEQ ID NO: 1018234 - RNA, 19 nt, Artificial Sequence
  Description of Artificial Sequence: Synthetic oligonucleotide
  Sense strand starting at position 437 of SEQ ID NO: 914623
cagaaaggaucugggaaga

SEQ ID NO: 1018235 - RNA, 19 nt, Artificial Sequence
  Description of Artificial Sequence: Synthetic oligonucleotide
  Antisense strand to SEQ ID NO: 1018234
ucuucccagauccuuucug

SEQ ID NO: 1018236 - RNA, 19 nt, Artificial Sequence
  Description of Artificial Sequence: Synthetic oligonucleotide
  Sense strand starting at position 510 of SEQ ID NO: 914623
cccugaaguaggugccaua

SEQ ID NO: 1018237 - RNA, 19 nt, Artificial Sequence
  Description of Artificial Sequence: Synthetic oligonucleotide
  Antisense strand to SEQ ID NO: 1018236
uauggcaccuacuucaggg

SEQ ID NO: 1018238 - RNA, 19 nt, Artificial Sequence
  Description of Artificial Sequence: Synthetic oligonucleotide
  Sense strand starting at position 607 of SEQ ID NO: 914623
ggucguguugccaaaguug

SEQ ID NO: 1018239 - RNA, 19 nt, Artificial Sequence
  Description of Artificial Sequence: Synthetic oligonucleotide
  Antisense strand to SEQ ID NO: 1018238
caacuuuggcaacacgacc

SEQ ID NO: 1018240 - RNA, 19 nt, Artificial Sequence
  Description of Artificial Sequence: Synthetic oligonucleotide
  Sense strand starting at position 609 of SEQ ID NO: 914623
ucguguugccaaaguuggu

SEQ ID NO: 1018241 - RNA, 19 nt, Artificial Sequence
  Description of Artificial Sequence: Synthetic oligonucleotide
  Antisense strand to SEQ ID NO: 1018240
accaacuuuggcaacacga

SEQ ID NO: 1018242 - RNA, 19 nt, Artificial Sequence
  Description of Artificial Sequence: Synthetic oligonucleotide
  Sense strand starting at position 613 of SEQ ID NO: 914623
guugccaaaguuggugaaa

SEQ ID NO: 1018243 - RNA, 19 nt, Artificial Sequence
  Description of Artificial Sequence: Synthetic oligonucleotide
  Antisense strand to SEQ ID NO: 1018242
uuucaccaacuuuggcaac

SEQ ID NO: 1018244 - RNA, 19 nt, Artificial Sequence
  Description of Artificial Sequence: Synthetic oligonucleotide
  Sense strand starting at position 614 of SEQ ID NO: 914623
uugccaaaguuggugaaau

SEQ ID NO: 1018245 - RNA, 19 nt, Artificial Sequence
  Description of Artificial Sequence: Synthetic oligonucleotide
  Antisense strand to SEQ ID NO: 1018244
auuucaccaacuuuggcaa

SEQ ID NO: 1018246 - RNA, 19 nt, Artificial Sequence
  Description of Artificial Sequence: Synthetic oligonucleotide
  Sense strand starting at position 616 of SEQ ID NO: 914623
gccaaaguuggugaaauag

SEQ ID NO: 1018247 - RNA, 19 nt, Artificial Sequence
  Description of Artificial Sequence: Synthetic oligonucleotide
  Antisense strand to SEQ ID NO: 1018246
cuauuucaccaacuuuggc

SEQ ID NO: 1018248 - RNA, 19 nt, Artificial Sequence
  Description of Artificial Sequence: Synthetic oligonucleotide
  Sense strand starting at position 1039 of SEQ ID NO: 914623
gcugaucacucccugggau

SEQ ID NO: 1018249 - RNA, 19 nt, Artificial Sequence
  Description of Artificial Sequence: Synthetic oligonucleotide
  Antisense strand to SEQ ID NO: 1018248
aucccagggagugaucagc

SEQ ID NO: 1018250 - RNA, 19 nt, Artificial Sequence
  Description of Artificial Sequence: Synthetic oligonucleotide
  Sense strand starting at position 1040 of SEQ ID NO: 914623
cugaucacucccugggauu

SEQ ID NO: 1018251 - RNA, 19 nt, Artificial Sequence
  Description of Artificial Sequence: Synthetic oligonucleotide
  Antisense strand to SEQ ID NO: 1018250
aaucccagggagugaucag

SEQ ID NO: 1018252 - RNA, 19 nt, Artificial Sequence
  Description of Artificial Sequence: Synthetic oligonucleotide
  Sense strand starting at position 1216 of SEQ ID NO: 914623
gccagagucccagauauac

SEQ ID NO: 1018253 - RNA, 19 nt, Artificial Sequence
  Description of Artificial Sequence: Synthetic oligonucleotide
  Antisense strand to SEQ ID NO: 1018252
guauaucugggacucuggc

SEQ ID NO: 1018254 - RNA, 19 nt, Artificial Sequence
  Description of Artificial Sequence: Synthetic oligonucleotide
  Sense strand starting at position 1499 of SEQ ID NO: 914623
gggugacuguggccacaaa

SEQ ID NO: 1018255 - RNA, 19 nt, Artificial Sequence
  Description of Artificial Sequence: Synthetic oligonucleotide
  Antisense strand to SEQ ID NO: 1018254
uuuguggccacagucaccc

SEQ ID NO: 1018256 - RNA, 19 nt, Artificial Sequence
  Description of Artificial Sequence: Synthetic oligonucleotide
  Sense strand starting at position 1500 of SEQ ID NO: 914623
ggugacuguggccacaaau

SEQ ID NO: 1018257 - RNA, 19 nt, Artificial Sequence
  Description of Artificial Sequence: Synthetic oligonucleotide
  Antisense strand to SEQ ID NO: 1018256
auuuguggccacagucacc

SEQ ID NO: 1018258 - RNA, 19 nt, Artificial Sequence
  Description of Artificial Sequence: Synthetic oligonucleotide
  Sense strand starting at position 1815 of SEQ ID NO: 914623
gaucuuguucgcugaacaa

SEQ ID NO: 1018259 - RNA, 19 nt, Artificial Sequence
  Description of Artificial Sequence: Synthetic oligonucleotide
  Antisense strand to SEQ ID NO: 1018258
uuguucagcgaacaagauc

SEQ ID NO: 1018260 - RNA, 19 nt, Artificial Sequence
  Description of Artificial Sequence: Synthetic oligonucleotide
  Sense strand starting at position 1896 of SEQ ID NO: 914623
guggaagagaagugugauu

SEQ ID NO: 1018261 - RNA, 19 nt, Artificial Sequence
  Description of Artificial Sequence: Synthetic oligonucleotide
  Antisense strand to SEQ ID NO: 1018260
aaucacacuucucuuccac

SEQ ID NO: 1018262 - RNA, 19 nt, Artificial Sequence
  Description of Artificial Sequence: Synthetic oligonucleotide
  Sense strand starting at position 1901 of SEQ ID NO: 914623
agagaagugugauuccaaa

SEQ ID NO: 1018263 - RNA, 19 nt, Artificial Sequence
  Description of Artificial Sequence: Synthetic oligonucleotide
  Antisense strand to SEQ ID NO: 1018262
uuuggaaucacacuucucu

SEQ ID NO: 1018264 - RNA, 19 nt, Artificial Sequence
  Description of Artificial Sequence: Synthetic oligonucleotide
  Sense strand starting at position 1991 of SEQ ID NO: 914623
acggauacuucccuaacau

SEQ ID NO: 1018265 - RNA, 19 nt, Artificial Sequence
  Description of Artificial Sequence: Synthetic oligonucleotide
  Antisense strand to SEQ ID NO: 1018264
auguuagggaaguauccgu

SEQ ID NO: 1018266 - RNA, 19 nt, Artificial Sequence
  Description of Artificial Sequence: Synthetic oligonucleotide
  Sense strand starting at position 1992 of SEQ ID NO: 914623
cggauacuucccuaacauu

SEQ ID NO: 1018267 - RNA, 19 nt, Artificial Sequence
  Description of Artificial Sequence: Synthetic oligonucleotide
  Antisense strand to SEQ ID NO: 1018266
aauguuagggaaguauccg

SEQ ID NO: 1018268 - RNA, 19 nt, Artificial Sequence
  Description of Artificial Sequence: Synthetic oligonucleotide
  Sense strand starting at position 2194 of SEQ ID NO: 914623
ccaggaagauggcuauuga

SEQ ID NO: 1018269 - RNA, 19 nt, Artificial Sequence
  Description of Artificial Sequence: Synthetic oligonucleotide
  Antisense strand to SEQ ID NO: 1018268
ucaauagccaucuuccugg

SEQ ID NO: 1018270 - RNA, 19 nt, Artificial Sequence
  Description of Artificial Sequence: Synthetic oligonucleotide
  Sense strand starting at position 2257 of SEQ ID NO: 914623
uguuucuugcaggaaaccu

SEQ ID NO: 1018271 - RNA, 19 nt, Artificial Sequence
  Description of Artificial Sequence: Synthetic oligonucleotide
  Antisense strand to SEQ ID NO: 1018270
agguuuccugcaagaaaca

SEQ ID NO: 1018272 - RNA, 19 nt, Artificial Sequence
  Description of Artificial Sequence: Synthetic oligonucleotide
  Sense strand starting at position 2268 of SEQ ID NO: 914623
ggaaaccuguugccaacau

SEQ ID NO: 1018273 - RNA, 19 nt, Artificial Sequence
  Description of Artificial Sequence: Synthetic oligonucleotide
  Antisense strand to SEQ ID NO: 1018272
auguuggcaacagguuucc

SEQ ID NO: 1018274 - RNA, 19 nt, Artificial Sequence
  Description of Artificial Sequence: Synthetic oligonucleotide
  Sense strand starting at position 2307 of SEQ ID NO: 914623
acaacucaguucccggaaa

SEQ ID NO: 1018275 - RNA, 19 nt, Artificial Sequence
  Description of Artificial Sequence: Synthetic oligonucleotide
  Antisense strand to SEQ ID NO: 1018274
uuuccgggaacugaguugu

SEQ ID NO: 1018276 - RNA, 19 nt, Artificial Sequence
  Description of Artificial Sequence: Synthetic oligonucleotide
  Sense strand starting at position 2309 of SEQ ID NO: 914623
aacucaguucccggaaaca

SEQ ID NO: 1018277 - RNA, 19 nt, Artificial Sequence
  Description of Artificial Sequence: Synthetic oligonucleotide
  Antisense strand to SEQ ID NO: 1018276
uguuuccgggaacugaguu

SEQ ID NO: 1018278 - RNA, 19 nt, Artificial Sequence
  Description of Artificial Sequence: Synthetic oligonucleotide
  Sense strand starting at position 2320 of SEQ ID NO: 914623
cggaaacaaagcuacgauu

SEQ ID NO: 1018279 - RNA, 19 nt, Artificial Sequence
  Description of Artificial Sequence: Synthetic oligonucleotide
  Antisense strand to SEQ ID NO: 1018278
aaucguagcuuuguuuccg

SEQ ID NO: 1018280 - RNA, 19 nt, Artificial Sequence
  Description of Artificial Sequence: Synthetic oligonucleotide
  Sense strand starting at position 2552 of SEQ ID NO: 914623
cguggaucacugcauugua

SEQ ID NO: 1018281 - RNA, 19 nt, Artificial Sequence
  Description of Artificial Sequence: Synthetic oligonucleotide
  Antisense strand to SEQ ID NO: 1018280
uacaaugcagugauccacg

SEQ ID NO: 1018282 - RNA, 19 nt, Artificial Sequence
  Description of Artificial Sequence: Synthetic oligonucleotide
  Sense strand starting at position 2688 of SEQ ID NO: 914623
gguuucuuccuguagguca

SEQ ID NO: 1018283 - RNA, 19 nt, Artificial Sequence
  Description of Artificial Sequence: Synthetic oligonucleotide
  Antisense strand to SEQ ID NO: 1018282
ugaccuacaggaagaaacc

SEQ ID NO: 1018284 - RNA, 19 nt, Artificial Sequence
  Description of Artificial Sequence: Synthetic oligonucleotide
  Sense strand starting at position 3155 of SEQ ID NO: 914623
gcucuuaggcggcaaauga

SEQ ID NO: 1018285 - RNA, 19 nt, Artificial Sequence
  Description of Artificial Sequence: Synthetic oligonucleotide
  Antisense strand to SEQ ID NO: 1018284
ucauuugccgccuaagagc

SEQ ID NO: 1018286 - RNA, 19 nt, Artificial Sequence
  Description of Artificial Sequence: Synthetic oligonucleotide
  Sense strand starting at position 3162 of SEQ ID NO: 914623
ggcggcaaaugauuuccau

SEQ ID NO: 1018287 - RNA, 19 nt, Artificial Sequence
  Description of Artificial Sequence: Synthetic oligonucleotide
  Antisense strand to SEQ ID NO: 1018286
auggaaaucauuugccgcc

SEQ ID NO: 1018288 - RNA, 19 nt, Artificial Sequence
  Description of Artificial Sequence: Synthetic oligonucleotide
  Sense strand starting at position 3175 of SEQ ID NO: 914623
uuccauuugucagagagga

SEQ ID NO: 1018289 - RNA, 19 nt, Artificial Sequence
  Description of Artificial Sequence: Synthetic oligonucleotide
  Antisense strand to SEQ ID NO: 1018288
uccucucugacaaauggaa

SEQ ID NO: 1018290 - RNA, 19 nt, Artificial Sequence
  Description of Artificial Sequence: Synthetic oligonucleotide
  Sense strand starting at position 3194 of SEQ ID NO: 914623
agucaccaccagugaguua

SEQ ID NO: 1018291 - RNA, 19 nt, Artificial Sequence
  Description of Artificial Sequence: Synthetic oligonucleotide
  Antisense strand to SEQ ID NO: 1018290
uaacucacugguggugacu

SEQ ID NO: 1018292 - RNA, 19 nt, Artificial Sequence
  Description of Artificial Sequence: Synthetic oligonucleotide
  Sense strand starting at position 3259 of SEQ ID NO: 914623
uggcauguuccaggaguca

SEQ ID NO: 1018293 - RNA, 19 nt, Artificial Sequence
  Description of Artificial Sequence: Synthetic oligonucleotide
  Antisense strand to SEQ ID NO: 1018292
ugacuccuggaacaugcca

SEQ ID NO: 1018294 - RNA, 19 nt, Artificial Sequence
  Description of Artificial Sequence: Synthetic oligonucleotide
  Sense strand starting at position 3302 of SEQ ID NO: 914623
cgaagauaguuucuucuuu

SEQ ID NO: 1018295 - RNA, 19 nt, Artificial Sequence
  Description of Artificial Sequence: Synthetic oligonucleotide
  Antisense strand to SEQ ID NO: 1018294
aaagaagaaacuaucuucg

SEQ ID NO: 1018296 - RNA, 19 nt, Artificial Sequence
  Description of Artificial Sequence: Synthetic oligonucleotide
  Sense strand starting at position 3646 of SEQ ID NO: 914623
ucagaugugaaauggcuuu

SEQ ID NO: 1018297 - RNA, 19 nt, Artificial Sequence
  Description of Artificial Sequence: Synthetic oligonucleotide
  Antisense strand to SEQ ID NO: 1018296
aaagccauuucacaucuga

SEQ ID NO: 1018298 - RNA, 19 nt, Artificial Sequence
  Description of Artificial Sequence: Synthetic oligonucleotide
  Sense strand starting at position 3728 of SEQ ID NO: 914623
uuucguaauuuacuugcua

SEQ ID NO: 1018299 - RNA, 19 nt, Artificial Sequence
  Description of Artificial Sequence: Synthetic oligonucleotide
  Antisense strand to SEQ ID NO: 1018298
uagcaaguaaauuacgaaa

SEQ ID NO: 1018300 - RNA, 19 nt, Artificial Sequence
  Description of Artificial Sequence: Synthetic oligonucleotide
  Sense strand starting at position 3732 of SEQ ID NO: 914623
guaauuuacuugcuaguau

SEQ ID NO: 1018301 - RNA, 19 nt, Artificial Sequence
  Description of Artificial Sequence: Synthetic oligonucleotide
  Antisense strand to SEQ ID NO: 1018300
auacuagcaaguaaauuac

SEQ ID NO: 1018302 - RNA, 19 nt, Artificial Sequence
  Description of Artificial Sequence: Synthetic oligonucleotide
  Sense strand starting at position 3893 of SEQ ID NO: 914623
acagacaucuguguacaag

SEQ ID NO: 1018303 - RNA, 19 nt, Artificial Sequence
  Description of Artificial Sequence: Synthetic oligonucleotide
  Antisense strand to SEQ ID NO: 1018302
cuuguacacagaugucugu

SEQ ID NO: 1018304 - RNA, 19 nt, Artificial Sequence
  Description of Artificial Sequence: Synthetic oligonucleotide
  Sense strand starting at position 29 of SEQ ID NO: 914624
gugccauaucuccaaauga

SEQ ID NO: 1018305 - RNA, 19 nt, Artificial Sequence
  Description of Artificial Sequence: Synthetic oligonucleotide
  Antisense strand to SEQ ID NO: 1018304
ucauuuggagauauggcac

SEQ ID NO: 1018306 - RNA, 19 nt, Artificial Sequence
  Description of Artificial Sequence: Synthetic oligonucleotide
  Sense strand starting at position 76 of SEQ ID NO: 914624
gggauaauucugugggagu

SEQ ID NO: 1018307 - RNA, 19 nt, Artificial Sequence
  Description of Artificial Sequence: Synthetic oligonucleotide
  Antisense strand to SEQ ID NO: 1018306
acucccacagaauuauccc

SEQ ID NO: 1018308 - RNA, 19 nt, Artificial Sequence
  Description of Artificial Sequence: Synthetic oligonucleotide
  Sense strand starting at position 93 of SEQ ID NO: 914624
guacguauuaauugugauc

SEQ ID NO: 1018309 - RNA, 19 nt, Artificial Sequence
  Description of Artificial Sequence: Synthetic oligonucleotide
  Antisense strand to SEQ ID NO: 1018308
gaucacaauuaauacguac

SEQ ID NO: 1018310 - RNA, 19 nt, Artificial Sequence
  Description of Artificial Sequence: Synthetic oligonucleotide
  Sense strand starting at position 98 of SEQ ID NO: 914624
uauuaauugugaucugagg

SEQ ID NO: 1018311 - RNA, 19 nt, Artificial Sequence
  Description of Artificial Sequence: Synthetic oligonucleotide
  Antisense strand to SEQ ID NO: 1018310
ccucagaucacaauuaaua

SEQ ID NO: 1018312 - RNA, 19 nt, Artificial Sequence
  Description of Artificial Sequence: Synthetic oligonucleotide
  Sense strand starting at position 143 of SEQ ID NO: 914624
gagaguugguuucucauua

SEQ ID NO: 1018313 - RNA, 19 nt, Artificial Sequence
  Description of Artificial Sequence: Synthetic oligonucleotide
  Antisense strand to SEQ ID NO: 1018312
uaaugagaaaccaacucuc

SEQ ID NO: 1018314 - RNA, 19 nt, Artificial Sequence
  Description of Artificial Sequence: Synthetic oligonucleotide
  Sense strand starting at position 144 of SEQ ID NO: 914624
agaguugguuucucauuac

SEQ ID NO: 1018315 - RNA, 19 nt, Artificial Sequence
  Description of Artificial Sequence: Synthetic oligonucleotide
  Antisense strand to SEQ ID NO: 1018314
guaaugagaaaccaacucu

SEQ ID NO: 1018316 - RNA, 19 nt, Artificial Sequence
  Description of Artificial Sequence: Synthetic oligonucleotide
  Sense strand starting at position 171 of SEQ ID NO: 914624
aggaauuaguggcugguga

SEQ ID NO: 1018317 - RNA, 19 nt, Artificial Sequence
  Description of Artificial Sequence: Synthetic oligonucleotide
  Antisense strand to SEQ ID NO: 1018316
ucaccagccacuaauuccu

SEQ ID NO: 1018318 - RNA, 19 nt, Artificial Sequence
  Description of Artificial Sequence: Synthetic oligonucleotide
  Sense strand starting at position 172 of SEQ ID NO: 914624
ggaauuaguggcuggugau

SEQ ID NO: 1018319 - RNA, 19 nt, Artificial Sequence
  Description of Artificial Sequence: Synthetic oligonucleotide
  Antisense strand to SEQ ID NO: 1018318
aucaccagccacuaauucc

SEQ ID NO: 1018320 - RNA, 19 nt, Artificial Sequence
  Description of Artificial Sequence: Synthetic oligonucleotide
  Sense strand starting at position 173 of SEQ ID NO: 914624
gaauuaguggcuggugaug

SEQ ID NO: 1018321 - RNA, 19 nt, Artificial Sequence
  Description of Artificial Sequence: Synthetic oligonucleotide
  Antisense strand to SEQ ID NO: 1018320
caucaccagccacuaauuc

SEQ ID NO: 1018322 - RNA, 19 nt, Artificial Sequence
  Description of Artificial Sequence: Synthetic oligonucleotide
  Sense strand starting at position 226 of SEQ ID NO: 914624
gaugucacgcucuguuuaa

SEQ ID NO: 1018323 - RNA, 19 nt, Artificial Sequence
  Description of Artificial Sequence: Synthetic oligonucleotide
  Antisense strand to SEQ ID NO: 1018322
uuaaacagagcgugacauc

SEQ ID NO: 1018324 - RNA, 19 nt, Artificial Sequence
  Description of Artificial Sequence: Synthetic oligonucleotide
  Sense strand starting at position 227 of SEQ ID NO: 914624
augucacgcucuguuuaaa

SEQ ID NO: 1018325 - RNA, 19 nt, Artificial Sequence
  Description of Artificial Sequence: Synthetic oligonucleotide
  Antisense strand to SEQ ID NO: 1018324
uuuaaacagagcgugacau

SEQ ID NO: 1018326 - RNA, 19 nt, Artificial Sequence
  Description of Artificial Sequence: Synthetic oligonucleotide
  Sense strand starting at position 289 of SEQ ID NO: 914624
cccuauuucucugaggaaa

SEQ ID NO: 1018327 - RNA, 19 nt, Artificial Sequence
  Description of Artificial Sequence: Synthetic oligonucleotide
  Antisense strand to SEQ ID NO: 1018326
uuuccucagagaaauaggg

SEQ ID NO: 1018328 - RNA, 19 nt, Artificial Sequence
  Description of Artificial Sequence: Synthetic oligonucleotide
  Sense strand starting at position 319 of SEQ ID NO: 914624
cgaagaaccucacuacguu

SEQ ID NO: 1018329 - RNA, 19 nt, Artificial Sequence
  Description of Artificial Sequence: Synthetic oligonucleotide
  Antisense strand to SEQ ID NO: 1018328
aacguagugagguucuucg

SEQ ID NO: 1018330 - RNA, 19 nt, Artificial Sequence
  Description of Artificial Sequence: Synthetic oligonucleotide
  Sense strand starting at position 320 of SEQ ID NO: 914624
gaagaaccucacuacguuu

SEQ ID NO: 1018331 - RNA, 19 nt, Artificial Sequence
  Description of Artificial Sequence: Synthetic oligonucleotide
  Antisense strand to SEQ ID NO: 1018330
aaacguagugagguucuuc

SEQ ID NO: 1018332 - RNA, 19 nt, Artificial Sequence
  Description of Artificial Sequence: Synthetic oligonucleotide
  Sense strand starting at position 372 of SEQ ID NO: 914624
ccaguacaaugagaaucuu

SEQ ID NO: 1018333 - RNA, 19 nt, Artificial Sequence
  Description of Artificial Sequence: Synthetic oligonucleotide
  Antisense strand to SEQ ID NO: 1018332
aagauucucauuguacugg

SEQ ID NO: 1018334 - RNA, 19 nt, Artificial Sequence
  Description of Artificial Sequence: Synthetic oligonucleotide
  Sense strand starting at position 401 of SEQ ID NO: 914624
uuuggagaaaccuguguaa

SEQ ID NO: 1018335 - RNA, 19 nt, Artificial Sequence
  Description of Artificial Sequence: Synthetic oligonucleotide
  Antisense strand to SEQ ID NO: 1018334
uuacacagguuucuccaaa

SEQ ID NO: 1018336 - RNA, 19 nt, Artificial Sequence
  Description of Artificial Sequence: Synthetic oligonucleotide
  Sense strand starting at position 501 of SEQ ID NO: 914624
cuggauaaaugguagauca

SEQ ID NO: 1018337 - RNA, 19 nt, Artificial Sequence
  Description of Artificial Sequence: Synthetic oligonucleotide
  Antisense strand to SEQ ID NO: 1018336
ugaucuaccauuuauccag

SEQ ID NO: 1018338 - RNA, 19 nt, Artificial Sequence
  Description of Artificial Sequence: Synthetic oligonucleotide
  Sense strand starting at position 512 of SEQ ID NO: 914624
guagaucaacagugucauu

SEQ ID NO: 1018339 - RNA, 19 nt, Artificial Sequence
  Description of Artificial Sequence: Synthetic oligonucleotide
  Antisense strand to SEQ ID NO: 1018338
aaugacacuguugaucuac

SEQ ID NO: 1018340 - RNA, 19 nt, Artificial Sequence
  Description of Artificial Sequence: Synthetic oligonucleotide
  Sense strand starting at position 826 of SEQ ID NO: 914624
agcugugagucccuuagaa

SEQ ID NO: 1018341 - RNA, 19 nt, Artificial Sequence
  Description of Artificial Sequence: Synthetic oligonucleotide
  Antisense strand to SEQ ID NO: 1018340
uucuaagggacucacagcu

SEQ ID NO: 1018342 - RNA, 19 nt, Artificial Sequence
  Description of Artificial Sequence: Synthetic oligonucleotide
  Sense strand starting at position 828 of SEQ ID NO: 914624
cugugagucccuuagaaga

SEQ ID NO: 1018343 - RNA, 19 nt, Artificial Sequence
  Description of Artificial Sequence: Synthetic oligonucleotide
  Antisense strand to SEQ ID NO: 1018342
ucuucuaagggacucacag

SEQ ID NO: 1018344 - RNA, 19 nt, Artificial Sequence
  Description of Artificial Sequence: Synthetic oligonucleotide
  Sense strand starting at position 855 of SEQ ID NO: 914624
accuuuaccucgucaucca

SEQ ID NO: 1018345 - RNA, 19 nt, Artificial Sequence
  Description of Artificial Sequence: Synthetic oligonucleotide
  Antisense strand to SEQ ID NO: 1018344
uggaugacgagguaaaggu

SEQ ID NO: 1018346 - RNA, 19 nt, Artificial Sequence
  Description of Artificial Sequence: Synthetic oligonucleotide
  Sense strand starting at position 1003 of SEQ ID NO: 914624
ucugauucuucuguaggaa

SEQ ID NO: 1018347 - RNA, 19 nt, Artificial Sequence
  Description of Artificial Sequence: Synthetic oligonucleotide
  Antisense strand to SEQ ID NO: 1018346
uuccuacagaagaaucaga

SEQ ID NO: 1018348 - RNA, 19 nt, Artificial Sequence
  Description of Artificial Sequence: Synthetic oligonucleotide
  Sense strand starting at position 1004 of SEQ ID NO: 914624
cugauucuucuguaggaau

SEQ ID NO: 1018349 - RNA, 19 nt, Artificial Sequence
  Description of Artificial Sequence: Synthetic oligonucleotide
  Antisense strand to SEQ ID NO: 1018348
auuccuacagaagaaucag

SEQ ID NO: 1018350 - RNA, 19 nt, Artificial Sequence
  Description of Artificial Sequence: Synthetic oligonucleotide
  Sense strand starting at position 1006 of SEQ ID NO: 914624
gauucuucuguaggaauaa

SEQ ID NO: 1018351 - RNA, 19 nt, Artificial Sequence
  Description of Artificial Sequence: Synthetic oligonucleotide
  Antisense strand to SEQ ID NO: 1018350
uuauuccuacagaagaauc

SEQ ID NO: 1018352 - RNA, 19 nt, Artificial Sequence
  Description of Artificial Sequence: Synthetic oligonucleotide
  Sense strand starting at position 1007 of SEQ ID NO: 914624
auucuucuguaggaauaaa

SEQ ID NO: 1018353 - RNA, 19 nt, Artificial Sequence
  Description of Artificial Sequence: Synthetic oligonucleotide
  Antisense strand to SEQ ID NO: 1018352
uuuauuccuacagaagaau

SEQ ID NO: 1018354 - RNA, 19 nt, Artificial Sequence
  Description of Artificial Sequence: Synthetic oligonucleotide
  Sense strand starting at position 1135 of SEQ ID NO: 914624
aucguauaauaggaagaau

SEQ ID NO: 1018355 - RNA, 19 nt, Artificial Sequence
  Description of Artificial Sequence: Synthetic oligonucleotide
  Antisense strand to SEQ ID NO: 1018354
auucuuccuauuauacgau

SEQ ID NO: 1018356 - RNA, 19 nt, Artificial Sequence
  Description of Artificial Sequence: Synthetic oligonucleotide
  Sense strand starting at position 1272 of SEQ ID NO: 914624
uggauccgcuccucgauaa

SEQ ID NO: 1018357 - RNA, 19 nt, Artificial Sequence
  Description of Artificial Sequence: Synthetic oligonucleotide
  Antisense strand to SEQ ID NO: 1018356
uuaucgaggagcggaucca

SEQ ID NO: 1018358 - RNA, 19 nt, Artificial Sequence
  Description of Artificial Sequence: Synthetic oligonucleotide
  Sense strand starting at position 1273 of SEQ ID NO: 914624
ggauccgcuccucgauaaa

SEQ ID NO: 1018359 - RNA, 19 nt, Artificial Sequence
  Description of Artificial Sequence: Synthetic oligonucleotide
  Antisense strand to SEQ ID NO: 1018358
uuuaucgaggagcggaucc

SEQ ID NO: 1018360 - RNA, 19 nt, Artificial Sequence
  Description of Artificial Sequence: Synthetic oligonucleotide
  Sense strand starting at position 1276 of SEQ ID NO: 914624
uccgcuccucgauaaauuc

SEQ ID NO: 1018361 - RNA, 19 nt, Artificial Sequence
  Description of Artificial Sequence: Synthetic oligonucleotide
  Antisense strand to SEQ ID NO: 1018360
gaauuuaucgaggagcgga

SEQ ID NO: 1018362 - RNA, 19 nt, Artificial Sequence
  Description of Artificial Sequence: Synthetic oligonucleotide
  Sense strand starting at position 1284 of SEQ ID NO: 914624
ucgauaaauucuucccaag

SEQ ID NO: 1018363 - RNA, 19 nt, Artificial Sequence
  Description of Artificial Sequence: Synthetic oligonucleotide
  Antisense strand to SEQ ID NO: 1018362
cuugggaagaauuuaucga

SEQ ID NO: 1018364 - RNA, 19 nt, Artificial Sequence
  Description of Artificial Sequence: Synthetic oligonucleotide
  Sense strand starting at position 2823 of SEQ ID NO: 914624
aguccacuccuggauauac

SEQ ID NO: 1018365 - RNA, 19 nt, Artificial Sequence
  Description of Artificial Sequence: Synthetic oligonucleotide
  Antisense strand to SEQ ID NO: 1018364
guauauccaggaguggacu

SEQ ID NO: 1018366 - RNA, 19 nt, Artificial Sequence
  Description of Artificial Sequence: Synthetic oligonucleotide
  Sense strand starting at position 2857 of SEQ ID NO: 914624
acaagaagcugagugcaau

SEQ ID NO: 1018367 - RNA, 19 nt, Artificial Sequence
  Description of Artificial Sequence: Synthetic oligonucleotide
  Antisense strand to SEQ ID NO: 1018366
auugcacucagcuucuugu

SEQ ID NO: 1018368 - RNA, 19 nt, Artificial Sequence
  Description of Artificial Sequence: Synthetic oligonucleotide
  Sense strand starting at position 3310 of SEQ ID NO: 914624
guacaagaauguucguaac

SEQ ID NO: 1018369 - RNA, 19 nt, Artificial Sequence
  Description of Artificial Sequence: Synthetic oligonucleotide
  Antisense strand to SEQ ID NO: 1018368
guuacgaacauucuuguac

SEQ ID NO: 1018370 - RNA, 19 nt, Artificial Sequence
  Description of Artificial Sequence: Synthetic oligonucleotide
  Sense strand starting at position 3312 of SEQ ID NO: 914624
acaagaauguucguaacaa

SEQ ID NO: 1018371 - RNA, 19 nt, Artificial Sequence
  Description of Artificial Sequence: Synthetic oligonucleotide
  Antisense strand to SEQ ID NO: 1018370
uuguuacgaacauucuugu

SEQ ID NO: 1018372 - RNA, 19 nt, Artificial Sequence
  Description of Artificial Sequence: Synthetic oligonucleotide
  Sense strand starting at position 3378 of SEQ ID NO: 914624
ugcucuugucgcuccuuaa

SEQ ID NO: 1018373 - RNA, 19 nt, Artificial Sequence
  Description of Artificial Sequence: Synthetic oligonucleotide
  Antisense strand to SEQ ID NO: 1018372
uuaaggagcgacaagagca

SEQ ID NO: 1018374 - RNA, 19 nt, Artificial Sequence
  Description of Artificial Sequence: Synthetic oligonucleotide
  Sense strand starting at position 3381 of SEQ ID NO: 914624
ucuugucgcuccuuaacaa

SEQ ID NO: 1018375 - RNA, 19 nt, Artificial Sequence
  Description of Artificial Sequence: Synthetic oligonucleotide
  Antisense strand to SEQ ID NO: 1018374
uuguuaaggagcgacaaga

SEQ ID NO: 1018376 - RNA, 19 nt, Artificial Sequence
  Description of Artificial Sequence: Synthetic oligonucleotide
  Sense strand starting at position 3382 of SEQ ID NO: 914624
cuugucgcuccuuaacaaa

SEQ ID NO: 1018377 - RNA, 19 nt, Artificial Sequence
  Description of Artificial Sequence: Synthetic oligonucleotide
  Antisense strand to SEQ ID NO: 1018376
uuuguuaaggagcgacaag

SEQ ID NO: 1018378 - RNA, 19 nt, Artificial Sequence
  Description of Artificial Sequence: Synthetic oligonucleotide
  Sense strand starting at position 3705 of SEQ ID NO: 914624
gcuauugaugcuggguuca

SEQ ID NO: 1018379 - RNA, 19 nt, Artificial Sequence
  Description of Artificial Sequence: Synthetic oligonucleotide
  Antisense strand to SEQ ID NO: 1018378
ugaacccagcaucaauagc

SEQ ID NO: 1018380 - RNA, 19 nt, Artificial Sequence
  Description of Artificial Sequence: Synthetic oligonucleotide
  Sense strand starting at position 3823 of SEQ ID NO: 914624
gaucuuauguagcuugacu

SEQ ID NO: 1018381 - RNA, 19 nt, Artificial Sequence
  Description of Artificial Sequence: Synthetic oligonucleotide
  Antisense strand to SEQ ID NO: 1018380
agucaagcuacauaagauc

SEQ ID NO: 1018382 - RNA, 19 nt, Artificial Sequence
  Description of Artificial Sequence: Synthetic oligonucleotide
  Sense strand starting at position 3825 of SEQ ID NO: 914624
ucuuauguagcuugacuaa

SEQ ID NO: 1018383 - RNA, 19 nt, Artificial Sequence
  Description of Artificial Sequence: Synthetic oligonucleotide
  Antisense strand to SEQ ID NO: 1018382
uuagucaagcuacauaaga

SEQ ID NO: 1018384 - RNA, 19 nt, Artificial Sequence
  Description of Artificial Sequence: Synthetic oligonucleotide
  Sense strand starting at position 23 of SEQ ID NO: 914625
ccauauuuggucuguaguc

SEQ ID NO: 1018385 - RNA, 19 nt, Artificial Sequence
  Description of Artificial Sequence: Synthetic oligonucleotide
  Antisense strand to SEQ ID NO: 1018384
gacuacagaccaaauaugg

SEQ ID NO: 1018386 - RNA, 19 nt, Artificial Sequence
  Description of Artificial Sequence: Synthetic oligonucleotide
  Sense strand starting at position 32 of SEQ ID NO: 914625
gucuguagucccuaaaccu

SEQ ID NO: 1018387 - RNA, 19 nt, Artificial Sequence
  Description of Artificial Sequence: Synthetic oligonucleotide
  Antisense strand to SEQ ID NO: 1018386
agguuuagggacuacagac

SEQ ID NO: 1018388 - RNA, 19 nt, Artificial Sequence
  Description of Artificial Sequence: Synthetic oligonucleotide
  Sense strand starting at position 375 of SEQ ID NO: 914625
acuaccuaguauuacagau

SEQ ID NO: 1018389 - RNA, 19 nt, Artificial Sequence
  Description of Artificial Sequence: Synthetic oligonucleotide
  Antisense strand to SEQ ID NO: 1018388
aucuguaauacuagguagu

SEQ ID NO: 1018390 - RNA, 19 nt, Artificial Sequence
  Description of Artificial Sequence: Synthetic oligonucleotide
  Sense strand starting at position 415 of SEQ ID NO: 914625
ggcuaagagccuugccuaa

SEQ ID NO: 1018391 - RNA, 19 nt, Artificial Sequence
  Description of Artificial Sequence: Synthetic oligonucleotide
  Antisense strand to SEQ ID NO: 1018390
uuaggcaaggcucuuagcc

SEQ ID NO: 1018392 - RNA, 19 nt, Artificial Sequence
  Description of Artificial Sequence: Synthetic oligonucleotide
  Sense strand starting at position 417 of SEQ ID NO: 914625
cuaagagccuugccuaauc

SEQ ID NO: 1018393 - RNA, 19 nt, Artificial Sequence
  Description of Artificial Sequence: Synthetic oligonucleotide
  Antisense strand to SEQ ID NO: 1018392
gauuaggcaaggcucuuag

SEQ ID NO: 1018394 - RNA, 19 nt, Artificial Sequence
  Description of Artificial Sequence: Synthetic oligonucleotide
  Sense strand starting at position 427 of SEQ ID NO: 914625
ugccuaaucccacaaugga

SEQ ID NO: 1018395 - RNA, 19 nt, Artificial Sequence
  Description of Artificial Sequence: Synthetic oligonucleotide
  Antisense strand to SEQ ID NO: 1018394
uccauugugggauuaggca

SEQ ID NO: 1018396 - RNA, 19 nt, Artificial Sequence
  Description of Artificial Sequence: Synthetic oligonucleotide
  Sense strand starting at position 455 of SEQ ID NO: 914625
agcagagauccucaucucu

SEQ ID NO: 1018397 - RNA, 19 nt, Artificial Sequence
  Description of Artificial Sequence: Synthetic oligonucleotide
  Antisense strand to SEQ ID NO: 1018396
agagaugaggaucucugcu

SEQ ID NO: 1018398 - RNA, 19 nt, Artificial Sequence
  Description of Artificial Sequence: Synthetic oligonucleotide
  Sense strand starting at position 835 of SEQ ID NO: 914625
cugugcucacaaggauaaa

SEQ ID NO: 1018399 - RNA, 19 nt, Artificial Sequence
  Description of Artificial Sequence: Synthetic oligonucleotide
  Antisense strand to SEQ ID NO: 1018398
uuuauccuugugagcacag

SEQ ID NO: 1018400 - RNA, 19 nt, Artificial Sequence
  Description of Artificial Sequence: Synthetic oligonucleotide
  Sense strand starting at position 979 of SEQ ID NO: 914625
ccaauauuaccaggugggu

SEQ ID NO: 1018401 - RNA, 19 nt, Artificial Sequence
  Description of Artificial Sequence: Synthetic oligonucleotide
  Antisense strand to SEQ ID NO: 1018400
acccaccugguaauauugg

SEQ ID NO: 1018402 - RNA, 19 nt, Artificial Sequence
  Description of Artificial Sequence: Synthetic oligonucleotide
  Sense strand starting at position 998 of SEQ ID NO: 914625
gcgcuaaucagaugaaguc

SEQ ID NO: 1018403 - RNA, 19 nt, Artificial Sequence
  Description of Artificial Sequence: Synthetic oligonucleotide
  Antisense strand to SEQ ID NO: 1018402
gacuucaucugauuagcgc

SEQ ID NO: 1018404 - RNA, 19 nt, Artificial Sequence
  Description of Artificial Sequence: Synthetic oligonucleotide
  Sense strand starting at position 1207 of SEQ ID NO: 914625
gcaacaauuuacugaaggu

SEQ ID NO: 1018405 - RNA, 19 nt, Artificial Sequence
  Description of Artificial Sequence: Synthetic oligonucleotide
  Antisense strand to SEQ ID NO: 1018404
accuucaguaaauuguugc

SEQ ID NO: 1018406 - RNA, 19 nt, Artificial Sequence
  Description of Artificial Sequence: Synthetic oligonucleotide
  Sense strand starting at position 2264 of SEQ ID NO: 914625
ccagaugccugauggauga

SEQ ID NO: 1018407 - RNA, 19 nt, Artificial Sequence
  Description of Artificial Sequence: Synthetic oligonucleotide
  Antisense strand to SEQ ID NO: 1018406
ucauccaucaggcaucugg

SEQ ID NO: 1018408 - RNA, 19 nt, Artificial Sequence
  Description of Artificial Sequence: Synthetic oligonucleotide
  Sense strand starting at position 2452 of SEQ ID NO: 914625
ugagguugucugggagucu

SEQ ID NO: 1018409 - RNA, 19 nt, Artificial Sequence
  Description of Artificial Sequence: Synthetic oligonucleotide
  Antisense strand to SEQ ID NO: 1018408
agacucccagacaaccuca

SEQ ID NO: 1018410 - RNA, 19 nt, Artificial Sequence
  Description of Artificial Sequence: Synthetic oligonucleotide
  Sense strand starting at position 2453 of SEQ ID NO: 914625
gagguugucugggagucuu

SEQ ID NO: 1018411 - RNA, 19 nt, Artificial Sequence
  Description of Artificial Sequence: Synthetic oligonucleotide
  Antisense strand to SEQ ID NO: 1018410
aagacucccagacaaccuc

SEQ ID NO: 1018412 - RNA, 19 nt, Artificial Sequence
  Description of Artificial Sequence: Synthetic oligonucleotide
  Sense strand starting at position 2461 of SEQ ID NO: 914625
cugggagucuuggcuuuau

SEQ ID NO: 1018413 - RNA, 19 nt, Artificial Sequence
  Description of Artificial Sequence: Synthetic oligonucleotide
  Antisense strand to SEQ ID NO: 1018412
auaaagccaagacucccag

SEQ ID NO: 1018414 - RNA, 19 nt, Artificial Sequence
  Description of Artificial Sequence: Synthetic oligonucleotide
  Sense strand starting at position 2465 of SEQ ID NO: 914625
gagucuuggcuuuaugaac

SEQ ID NO: 1018415 - RNA, 19 nt, Artificial Sequence
  Description of Artificial Sequence: Synthetic oligonucleotide
  Antisense strand to SEQ ID NO: 1018414
guucauaaagccaagacuc

SEQ ID NO: 1018416 - RNA, 19 nt, Artificial Sequence
  Description of Artificial Sequence: Synthetic oligonucleotide
  Sense strand starting at position 2518 of SEQ ID NO: 914625
gggauauuguaaguuguga

SEQ ID NO: 1018417 - RNA, 19 nt, Artificial Sequence
  Description of Artificial Sequence: Synthetic oligonucleotide
  Antisense strand to SEQ ID NO: 1018416
ucacaacuuacaauauccc

SEQ ID NO: 1018418 - RNA, 19 nt, Artificial Sequence
  Description of Artificial Sequence: Synthetic oligonucleotide
  Sense strand starting at position 2520 of SEQ ID NO: 914625
gauauuguaaguugugaug

SEQ ID NO: 1018419 - RNA, 19 nt, Artificial Sequence
  Description of Artificial Sequence: Synthetic oligonucleotide
  Antisense strand to SEQ ID NO: 1018418
caucacaacuuacaauauc

SEQ ID NO: 1018420 - RNA, 19 nt, Artificial Sequence
  Description of Artificial Sequence: Synthetic oligonucleotide
  Sense strand starting at position 2527 of SEQ ID NO: 914625
uaaguugugauguguugac

SEQ ID NO: 1018421 - RNA, 19 nt, Artificial Sequence
  Description of Artificial Sequence: Synthetic oligonucleotide
  Antisense strand to SEQ ID NO: 1018420
gucaacacaucacaacuua

SEQ ID NO: 1018422 - RNA, 19 nt, Artificial Sequence
  Description of Artificial Sequence: Synthetic oligonucleotide
  Sense strand starting at position 2664 of SEQ ID NO: 914625
guuucucauccacaaaggu

SEQ ID NO: 1018423 - RNA, 19 nt, Artificial Sequence
  Description of Artificial Sequence: Synthetic oligonucleotide
  Antisense strand to SEQ ID NO: 1018422
accuuuguggaugagaaac

SEQ ID NO: 1018424 - RNA, 19 nt, Artificial Sequence
  Description of Artificial Sequence: Synthetic oligonucleotide
  Sense strand starting at position 2716 of SEQ ID NO: 914625
agcuguuagcuuugaugau

SEQ ID NO: 1018425 - RNA, 19 nt, Artificial Sequence
  Description of Artificial Sequence: Synthetic oligonucleotide
  Antisense strand to SEQ ID NO: 1018424
aucaucaaagcuaacagcu

SEQ ID NO: 1018426 - RNA, 19 nt, Artificial Sequence
  Description of Artificial Sequence: Synthetic oligonucleotide
  Sense strand starting at position 2717 of SEQ ID NO: 914625
gcuguuagcuuugaugauu

SEQ ID NO: 1018427 - RNA, 19 nt, Artificial Sequence
  Description of Artificial Sequence: Synthetic oligonucleotide
  Antisense strand to SEQ ID NO: 1018426
aaucaucaaagcuaacagc

SEQ ID NO: 1018428 - RNA, 19 nt, Artificial Sequence
  Description of Artificial Sequence: Synthetic oligonucleotide
  Sense strand starting at position 2720 of SEQ ID NO: 914625
guuagcuuugaugauuacu

SEQ ID NO: 1018429 - RNA, 19 nt, Artificial Sequence
  Description of Artificial Sequence: Synthetic oligonucleotide
  Antisense strand to SEQ ID NO: 1018428
aguaaucaucaaagcuaac

SEQ ID NO: 1018430 - RNA, 19 nt, Artificial Sequence
  Description of Artificial Sequence: Synthetic oligonucleotide
  Sense strand starting at position 2725 of SEQ ID NO: 914625
cuuugaugauuacuuguua

SEQ ID NO: 1018431 - RNA, 19 nt, Artificial Sequence
  Description of Artificial Sequence: Synthetic oligonucleotide
  Antisense strand to SEQ ID NO: 1018430
uaacaaguaaucaucaaag

SEQ ID NO: 1018432 - RNA, 19 nt, Artificial Sequence
  Description of Artificial Sequence: Synthetic oligonucleotide
  Sense strand starting at position 2729 of SEQ ID NO: 914625
gaugauuacuuguuauaug

SEQ ID NO: 1018433 - RNA, 19 nt, Artificial Sequence
  Description of Artificial Sequence: Synthetic oligonucleotide
  Antisense strand to SEQ ID NO: 1018432
cauauaacaaguaaucauc

SEQ ID NO: 1018434 - RNA, 19 nt, Artificial Sequence
  Description of Artificial Sequence: Synthetic oligonucleotide
  Sense strand starting at position 2832 of SEQ ID NO: 914625
gguauaaaguuggcugaca

SEQ ID NO: 1018435 - RNA, 19 nt, Artificial Sequence
  Description of Artificial Sequence: Synthetic oligonucleotide
  Antisense strand to SEQ ID NO: 1018434
ugucagccaacuuuauacc

SEQ ID NO: 1018436 - RNA, 19 nt, Artificial Sequence
  Description of Artificial Sequence: Synthetic oligonucleotide
  Sense strand starting at position 2841 of SEQ ID NO: 914625
uuggcugacaggugaaguu

SEQ ID NO: 1018437 - RNA, 19 nt, Artificial Sequence
  Description of Artificial Sequence: Synthetic oligonucleotide
  Antisense strand to SEQ ID NO: 1018436
aacuucaccugucagccaa

SEQ ID NO: 1018438 - RNA, 19 nt, Artificial Sequence
  Description of Artificial Sequence: Synthetic oligonucleotide
  Sense strand starting at position 2858 of SEQ ID NO: 914625
uugaaaugugcacagguaa

SEQ ID NO: 1018439 - RNA, 19 nt, Artificial Sequence
  Description of Artificial Sequence: Synthetic oligonucleotide
  Antisense strand to SEQ ID NO: 1018438
uuaccugugcacauuucaa

SEQ ID NO: 1018440 - RNA, 19 nt, Artificial Sequence
  Description of Artificial Sequence: Synthetic oligonucleotide
  Sense strand starting at position 2954 of SEQ ID NO: 914625
ccagcuacgugaucacauu

SEQ ID NO: 1018441 - RNA, 19 nt, Artificial Sequence
  Description of Artificial Sequence: Synthetic oligonucleotide
  Antisense strand to SEQ ID NO: 1018440
aaugugaucacguagcugg

SEQ ID NO: 1018442 - RNA, 19 nt, Artificial Sequence
  Description of Artificial Sequence: Synthetic oligonucleotide
  Sense strand starting at position 3017 of SEQ ID NO: 914625
agcaguuuggcauggagga

SEQ ID NO: 1018443 - RNA, 19 nt, Artificial Sequence
  Description of Artificial Sequence: Synthetic oligonucleotide
  Antisense strand to SEQ ID NO: 1018442
uccuccaugccaaacugcu

SEQ ID NO: 1018444 - RNA, 19 nt, Artificial Sequence
  Description of Artificial Sequence: Synthetic oligonucleotide
  Sense strand starting at position 3062 of SEQ ID NO: 914625
gagguaugaucacuuuacc

SEQ ID NO: 1018445 - RNA, 19 nt, Artificial Sequence
  Description of Artificial Sequence: Synthetic oligonucleotide
  Antisense strand to SEQ ID NO: 1018444
gguaaagugaucauaccuc

SEQ ID NO: 1018446 - RNA, 19 nt, Artificial Sequence
  Description of Artificial Sequence: Synthetic oligonucleotide
  Sense strand starting at position 3065 of SEQ ID NO: 914625
guaugaucacuuuacccau

SEQ ID NO: 1018447 - RNA, 19 nt, Artificial Sequence
  Description of Artificial Sequence: Synthetic oligonucleotide
  Antisense strand to SEQ ID NO: 1018446
auggguaaagugaucauac

SEQ ID NO: 1018448 - RNA, 19 nt, Artificial Sequence
  Description of Artificial Sequence: Synthetic oligonucleotide
  Sense strand starting at position 3198 of SEQ ID NO: 914625
agucuaucacuggagucau

SEQ ID NO: 1018449 - RNA, 19 nt, Artificial Sequence
  Description of Artificial Sequence: Synthetic oligonucleotide
  Antisense strand to SEQ ID NO: 1018448
augacuccagugauagacu

SEQ ID NO: 1018450 - RNA, 19 nt, Artificial Sequence
  Description of Artificial Sequence: Synthetic oligonucleotide
  Sense strand starting at position 3279 of SEQ ID NO: 914625
acgaaucaacuguguuaca

SEQ ID NO: 1018451 - RNA, 19 nt, Artificial Sequence
  Description of Artificial Sequence: Synthetic oligonucleotide
  Antisense strand to SEQ ID NO: 1018450
uguaacacaguugauucgu

SEQ ID NO: 1018452 - RNA, 19 nt, Artificial Sequence
  Description of Artificial Sequence: Synthetic oligonucleotide
  Sense strand starting at position 3295 of SEQ ID NO: 914625
acaggugcucucuguauau

SEQ ID NO: 1018453 - RNA, 19 nt, Artificial Sequence
  Description of Artificial Sequence: Synthetic oligonucleotide
  Antisense strand to SEQ ID NO: 1018452
auauacagagagcaccugu

SEQ ID NO: 1018454 - RNA, 19 nt, Artificial Sequence
  Description of Artificial Sequence: Synthetic oligonucleotide
  Sense strand starting at position 3328 of SEQ ID NO: 914625
cgagguagugacuguuauc

SEQ ID NO: 1018455 - RNA, 19 nt, Artificial Sequence
  Description of Artificial Sequence: Synthetic oligonucleotide
  Antisense strand to SEQ ID NO: 1018454
gauaacagucacuaccucg

SEQ ID NO: 1018456 - RNA, 19 nt, Artificial Sequence
  Description of Artificial Sequence: Synthetic oligonucleotide
  Sense strand starting at position 3593 of SEQ ID NO: 914625
uguguuguguguauguuga

SEQ ID NO: 1018457 - RNA, 19 nt, Artificial Sequence
  Description of Artificial Sequence: Synthetic oligonucleotide
  Antisense strand to SEQ ID NO: 1018456
ucaacauacacacaacaca

SEQ ID NO: 1018458 - RNA, 19 nt, Artificial Sequence
  Description of Artificial Sequence: Synthetic oligonucleotide
  Sense strand starting at position 3699 of SEQ ID NO: 914625
gcaagaaucugaucacacc

SEQ ID NO: 1018459 - RNA, 19 nt, Artificial Sequence
  Description of Artificial Sequence: Synthetic oligonucleotide
  Antisense strand to SEQ ID NO: 1018458
ggugugaucagauucuugc

SEQ ID NO: 1018460 - RNA, 19 nt, Artificial Sequence
  Description of Artificial Sequence: Synthetic oligonucleotide
  Sense strand starting at position 3757 of SEQ ID NO: 914625
cucaauaacccaggucuga

SEQ ID NO: 1018461 - RNA, 19 nt, Artificial Sequence
  Description of Artificial Sequence: Synthetic oligonucleotide
  Antisense strand to SEQ ID NO: 1018460
ucagaccuggguuauugag

SEQ ID NO: 1018462 - RNA, 19 nt, Artificial Sequence
  Description of Artificial Sequence: Synthetic oligonucleotide
  Sense strand starting at position 3882 of SEQ ID NO: 914625
ggccuauacucagagccuu

SEQ ID NO: 1018463 - RNA, 19 nt, Artificial Sequence
  Description of Artificial Sequence: Synthetic oligonucleotide
  Antisense strand to SEQ ID NO: 1018462
aaggcucugaguauaggcc

SEQ ID NO: 1018464 - RNA, 19 nt, Artificial Sequence
  Description of Artificial Sequence: Synthetic oligonucleotide
  Sense strand starting at position 116 of SEQ ID NO: 914626
gcaggaucuuucgggagaa

SEQ ID NO: 1018465 - RNA, 19 nt, Artificial Sequence
  Description of Artificial Sequence: Synthetic oligonucleotide
  Antisense strand to SEQ ID NO: 1018464
uucucccgaaagauccugc

SEQ ID NO: 1018466 - RNA, 19 nt, Artificial Sequence
  Description of Artificial Sequence: Synthetic oligonucleotide
  Sense strand starting at position 117 of SEQ ID NO: 914626
caggaucuuucgggagaac

SEQ ID NO: 1018467 - RNA, 19 nt, Artificial Sequence
  Description of Artificial Sequence: Synthetic oligonucleotide
  Antisense strand to SEQ ID NO: 1018466
guucucccgaaagauccug

SEQ ID NO: 1018468 - RNA, 19 nt, Artificial Sequence
  Description of Artificial Sequence: Synthetic oligonucleotide
  Sense strand starting at position 120 of SEQ ID NO: 914626
gaucuuucgggagaacagu

SEQ ID NO: 1018469 - RNA, 19 nt, Artificial Sequence
  Description of Artificial Sequence: Synthetic oligonucleotide
  Antisense strand to SEQ ID NO: 1018468
acuguucucccgaaagauc

SEQ ID NO: 1018470 - RNA, 19 nt, Artificial Sequence
  Description of Artificial Sequence: Synthetic oligonucleotide
  Sense strand starting at position 277 of SEQ ID NO: 914626
gcugcucaccucugaaagu

SEQ ID NO: 1018471 - RNA, 19 nt, Artificial Sequence
  Description of Artificial Sequence: Synthetic oligonucleotide
  Antisense strand to SEQ ID NO: 1018470
acuuucagaggugagcagc

SEQ ID NO: 1018472 - RNA, 19 nt, Artificial Sequence
  Description of Artificial Sequence: Synthetic oligonucleotide
  Sense strand starting at position 905 of SEQ ID NO: 914626
ugcacugcuuccuggaaga

SEQ ID NO: 1018473 - RNA, 19 nt, Artificial Sequence
  Description of Artificial Sequence: Synthetic oligonucleotide
  Antisense strand to SEQ ID NO: 1018472
ucuuccaggaagcagugca

SEQ ID NO: 1018474 - RNA, 19 nt, Artificial Sequence
  Description of Artificial Sequence: Synthetic oligonucleotide
  Sense strand starting at position 2180 of SEQ ID NO: 914626
ggcugcgccugucuauaaa

SEQ ID NO: 1018475 - RNA, 19 nt, Artificial Sequence
  Description of Artificial Sequence: Synthetic oligonucleotide
  Antisense strand to SEQ ID NO: 1018474
uuuauagacaggcgcagcc

SEQ ID NO: 1018476 - RNA, 19 nt, Artificial Sequence
  Description of Artificial Sequence: Synthetic oligonucleotide
  Sense strand starting at position 2183 of SEQ ID NO: 914626
ugcgccugucuauaaaguu

SEQ ID NO: 1018477 - RNA, 19 nt, Artificial Sequence
  Description of Artificial Sequence: Synthetic oligonucleotide
  Antisense strand to SEQ ID NO: 1018476
aacuuuauagacaggcgca

SEQ ID NO: 1018478 - RNA, 19 nt, Artificial Sequence
  Description of Artificial Sequence: Synthetic oligonucleotide
  Sense strand starting at position 2191 of SEQ ID NO: 914626
ucuauaaaguuguuguuga

SEQ ID NO: 1018479 - RNA, 19 nt, Artificial Sequence
  Description of Artificial Sequence: Synthetic oligonucleotide
  Antisense strand to SEQ ID NO: 1018478
ucaacaacaacuuuauaga

SEQ ID NO: 1018480 - RNA, 19 nt, Artificial Sequence
  Description of Artificial Sequence: Synthetic oligonucleotide
  Sense strand starting at position 2515 of SEQ ID NO: 914626
ccuguaaccucucuggacu

SEQ ID NO: 1018481 - RNA, 19 nt, Artificial Sequence
  Description of Artificial Sequence: Synthetic oligonucleotide
  Antisense strand to SEQ ID NO: 1018480
aguccagagagguuacagg

SEQ ID NO: 1018482 - RNA, 19 nt, Artificial Sequence
  Description of Artificial Sequence: Synthetic oligonucleotide
  Sense strand starting at position 2516 of SEQ ID NO: 914626
cuguaaccucucuggacuu

SEQ ID NO: 1018483 - RNA, 19 nt, Artificial Sequence
  Description of Artificial Sequence: Synthetic oligonucleotide
  Antisense strand to SEQ ID NO: 1018482
aaguccagagagguuacag

SEQ ID NO: 1018484 - RNA, 19 nt, Artificial Sequence
  Description of Artificial Sequence: Synthetic oligonucleotide
  Sense strand starting at position 2623 of SEQ ID NO: 914626
gcuucuuugcguuccucua

SEQ ID NO: 1018485 - RNA, 19 nt, Artificial Sequence
  Description of Artificial Sequence: Synthetic oligonucleotide
  Antisense strand to SEQ ID NO: 1018484
uagaggaacgcaaagaagc

SEQ ID NO: 1018486 - RNA, 19 nt, Artificial Sequence
  Description of Artificial Sequence: Synthetic oligonucleotide
  Sense strand starting at position 2657 of SEQ ID NO: 914626
ccggauaccugccaggaaa

SEQ ID NO: 1018487 - RNA, 19 nt, Artificial Sequence
  Description of Artificial Sequence: Synthetic oligonucleotide
  Antisense strand to SEQ ID NO: 1018486
uuuccuggcagguauccgg

SEQ ID NO: 1018488 - RNA, 19 nt, Artificial Sequence
  Description of Artificial Sequence: Synthetic oligonucleotide
  Sense strand starting at position 2807 of SEQ ID NO: 914626
ucuguaagucaaggagaau

SEQ ID NO: 1018489 - RNA, 19 nt, Artificial Sequence
  Description of Artificial Sequence: Synthetic oligonucleotide
  Antisense strand to SEQ ID NO: 1018488
auucuccuugacuuacaga

SEQ ID NO: 1018490 - RNA, 19 nt, Artificial Sequence
  Description of Artificial Sequence: Synthetic oligonucleotide
  Sense strand starting at position 2907 of SEQ ID NO: 914626
uuguuaucccauuguaaag

SEQ ID NO: 1018491 - RNA, 19 nt, Artificial Sequence
  Description of Artificial Sequence: Synthetic oligonucleotide
  Antisense strand to SEQ ID NO: 1018490
cuuuacaaugggauaacaa

SEQ ID NO: 1018492 - RNA, 19 nt, Artificial Sequence
  Description of Artificial Sequence: Synthetic oligonucleotide
  Sense strand starting at position 2909 of SEQ ID NO: 914626
guuaucccauuguaaagau

SEQ ID NO: 1018493 - RNA, 19 nt, Artificial Sequence
  Description of Artificial Sequence: Synthetic oligonucleotide
  Antisense strand to SEQ ID NO: 1018492
aucuuuacaaugggauaac

SEQ ID NO: 1018494 - RNA, 19 nt, Artificial Sequence
  Description of Artificial Sequence: Synthetic oligonucleotide
  Sense strand starting at position 2992 of SEQ ID NO: 914626
aucuguaguuauugucuca

SEQ ID NO: 1018495 - RNA, 19 nt, Artificial Sequence
  Description of Artificial Sequence: Synthetic oligonucleotide
  Antisense strand to SEQ ID NO: 1018494
ugagacaauaacuacagau

SEQ ID NO: 1018496 - RNA, 19 nt, Artificial Sequence
  Description of Artificial Sequence: Synthetic oligonucleotide
  Sense strand starting at position 2995 of SEQ ID NO: 914626
uguaguuauugucucagac

SEQ ID NO: 1018497 - RNA, 19 nt, Artificial Sequence
  Description of Artificial Sequence: Synthetic oligonucleotide
  Antisense strand to SEQ ID NO: 1018496
gucugagacaauaacuaca

SEQ ID NO: 1018498 - RNA, 19 nt, Artificial Sequence
  Description of Artificial Sequence: Synthetic oligonucleotide
  Sense strand starting at position 3157 of SEQ ID NO: 914626
aguguuugaugcccgcaca

SEQ ID NO: 1018499 - RNA, 19 nt, Artificial Sequence
  Description of Artificial Sequence: Synthetic oligonucleotide
  Antisense strand to SEQ ID NO: 1018498
ugugcgggcaucaaacacu

SEQ ID NO: 1018500 - RNA, 19 nt, Artificial Sequence
  Description of Artificial Sequence: Synthetic oligonucleotide
  Sense strand starting at position 3158 of SEQ ID NO: 914626
guguuugaugcccgcacaa

SEQ ID NO: 1018501 - RNA, 19 nt, Artificial Sequence
  Description of Artificial Sequence: Synthetic oligonucleotide
  Antisense strand to SEQ ID NO: 1018500
uugugcgggcaucaaacac

SEQ ID NO: 1018502 - RNA, 19 nt, Artificial Sequence
  Description of Artificial Sequence: Synthetic oligonucleotide
  Sense strand starting at position 3421 of SEQ ID NO: 914626
gggcaaguggcuuaugcau

SEQ ID NO: 1018503 - RNA, 19 nt, Artificial Sequence
  Description of Artificial Sequence: Synthetic oligonucleotide
  Antisense strand to SEQ ID NO: 1018502
augcauaagccacuugccc

SEQ ID NO: 1018504 - RNA, 19 nt, Artificial Sequence
  Description of Artificial Sequence: Synthetic oligonucleotide
  Sense strand starting at position 3550 of SEQ ID NO: 914626
ccaggucaucuguguuuac

SEQ ID NO: 1018505 - RNA, 19 nt, Artificial Sequence
  Description of Artificial Sequence: Synthetic oligonucleotide
  Antisense strand to SEQ ID NO: 1018504
guaaacacagaugaccugg

SEQ ID NO: 1018506 - RNA, 19 nt, Artificial Sequence
  Description of Artificial Sequence: Synthetic oligonucleotide
  Sense strand starting at position 3560 of SEQ ID NO: 914626
uguguuuacacggacgacu

SEQ ID NO: 1018507 - RNA, 19 nt, Artificial Sequence
  Description of Artificial Sequence: Synthetic oligonucleotide
  Antisense strand to SEQ ID NO: 1018506
agucguccguguaaacaca

SEQ ID NO: 1018508 - RNA, 19 nt, Artificial Sequence
  Description of Artificial Sequence: Synthetic oligonucleotide
  Sense strand starting at position 3655 of SEQ ID NO: 914626
gccugaugucuacaccuac

SEQ ID NO: 1018509 - RNA, 19 nt, Artificial Sequence
  Description of Artificial Sequence: Synthetic oligonucleotide
  Antisense strand to SEQ ID NO: 1018508
guagguguagacaucaggc

SEQ ID NO: 1018510 - RNA, 19 nt, Artificial Sequence
  Description of Artificial Sequence: Synthetic oligonucleotide
  Sense strand starting at position 3907 of SEQ ID NO: 914626
cuaggucacuugggaacua

SEQ ID NO: 1018511 - RNA, 19 nt, Artificial Sequence
  Description of Artificial Sequence: Synthetic oligonucleotide
  Antisense strand to SEQ ID NO: 1018510
uaguucccaagugaccuag

SEQ ID NO: 1018512 - RNA, 19 nt, Artificial Sequence
  Description of Artificial Sequence: Synthetic oligonucleotide
  Sense strand starting at position 55 of SEQ ID NO: 914627
auauaaauuuccugggccu

SEQ ID NO: 1018513 - RNA, 19 nt, Artificial Sequence
  Description of Artificial Sequence: Synthetic oligonucleotide
  Antisense strand to SEQ ID NO: 1018512
aggcccaggaaauuuauau

SEQ ID NO: 1018514 - RNA, 19 nt, Artificial Sequence
  Description of Artificial Sequence: Synthetic oligonucleotide
  Sense strand starting at position 133 of SEQ ID NO: 914627
ccagcuucucagggaauuc

SEQ ID NO: 1018515 - RNA, 19 nt, Artificial Sequence
  Description of Artificial Sequence: Synthetic oligonucleotide
  Antisense strand to SEQ ID NO: 1018514
gaauucccugagaagcugg

SEQ ID NO: 1018516 - RNA, 19 nt, Artificial Sequence
  Description of Artificial Sequence: Synthetic oligonucleotide
  Sense strand starting at position 174 of SEQ ID NO: 914627
gagaaaugcugcccggacu

SEQ ID NO: 1018517 - RNA, 19 nt, Artificial Sequence
  Description of Artificial Sequence: Synthetic oligonucleotide
  Antisense strand to SEQ ID NO: 1018516
aguccgggcagcauuucuc

SEQ ID NO: 1018518 - RNA, 19 nt, Artificial Sequence
  Description of Artificial Sequence: Synthetic oligonucleotide
  Sense strand starting at position 175 of SEQ ID NO: 914627
agaaaugcugcccggacuu

SEQ ID NO: 1018519 - RNA, 19 nt, Artificial Sequence
  Description of Artificial Sequence: Synthetic oligonucleotide
  Antisense strand to SEQ ID NO: 1018518
aaguccgggcagcauuucu

SEQ ID NO: 1018520 - RNA, 19 nt, Artificial Sequence
  Description of Artificial Sequence: Synthetic oligonucleotide
  Sense strand starting at position 259 of SEQ ID NO: 914627
cucaaugaucuuuaagagc

SEQ ID NO: 1018521 - RNA, 19 nt, Artificial Sequence
  Description of Artificial Sequence: Synthetic oligonucleotide
  Antisense strand to SEQ ID NO: 1018520
gcucuuaaagaucauugag

SEQ ID NO: 1018522 - RNA, 19 nt, Artificial Sequence
  Description of Artificial Sequence: Synthetic oligonucleotide
  Sense strand starting at position 267 of SEQ ID NO: 914627
ucuuuaagagcugggacua

SEQ ID NO: 1018523 - RNA, 19 nt, Artificial Sequence
  Description of Artificial Sequence: Synthetic oligonucleotide
  Antisense strand to SEQ ID NO: 1018522
uagucccagcucuuaaaga

SEQ ID NO: 1018524 - RNA, 19 nt, Artificial Sequence
  Description of Artificial Sequence: Synthetic oligonucleotide
  Sense strand starting at position 324 of SEQ ID NO: 914627
accacuuccuugucagaug

SEQ ID NO: 1018525 - RNA, 19 nt, Artificial Sequence
  Description of Artificial Sequence: Synthetic oligonucleotide
  Antisense strand to SEQ ID NO: 1018524
caucugacaaggaaguggu

SEQ ID NO: 1018526 - RNA, 19 nt, Artificial Sequence
  Description of Artificial Sequence: Synthetic oligonucleotide
  Sense strand starting at position 332 of SEQ ID NO: 914627
cuugucagaugucugcauu

SEQ ID NO: 1018527 - RNA, 19 nt, Artificial Sequence
  Description of Artificial Sequence: Synthetic oligonucleotide
  Antisense strand to SEQ ID NO: 1018526
aaugcagacaucugacaag

SEQ ID NO: 1018528 - RNA, 19 nt, Artificial Sequence
  Description of Artificial Sequence: Synthetic oligonucleotide
  Sense strand starting at position 439 of SEQ ID NO: 914627
gaaagcagcuugcugauuu

SEQ ID NO: 1018529 - RNA, 19 nt, Artificial Sequence
  Description of Artificial Sequence: Synthetic oligonucleotide
  Antisense strand to SEQ ID NO: 1018528
aaaucagcaagcugcuuuc

SEQ ID NO: 1018530 - RNA, 19 nt, Artificial Sequence
  Description of Artificial Sequence: Synthetic oligonucleotide
  Sense strand starting at position 458 of SEQ ID NO: 914627
ucuugaaacuggucaugcu

SEQ ID NO: 1018531 - RNA, 19 nt, Artificial Sequence
  Description of Artificial Sequence: Synthetic oligonucleotide
  Antisense strand to SEQ ID NO: 1018530
agcaugaccaguuucaaga

SEQ ID NO: 1018532 - RNA, 19 nt, Artificial Sequence
  Description of Artificial Sequence: Synthetic oligonucleotide
  Sense strand starting at position 570 of SEQ ID NO: 914627
caggaugaaucagagauaa

SEQ ID NO: 1018533 - RNA, 19 nt, Artificial Sequence
  Description of Artificial Sequence: Synthetic oligonucleotide
  Antisense strand to SEQ ID NO: 1018532
uuaucucugauucauccug

SEQ ID NO: 1018534 - RNA, 19 nt, Artificial Sequence
  Description of Artificial Sequence: Synthetic oligonucleotide
  Sense strand starting at position 638 of SEQ ID NO: 914627
acaucuagcucccuaagga

SEQ ID NO: 1018535 - RNA, 19 nt, Artificial Sequence
  Description of Artificial Sequence: Synthetic oligonucleotide
  Antisense strand to SEQ ID NO: 1018534
uccuuagggagcuagaugu

SEQ ID NO: 1018536 - RNA, 19 nt, Artificial Sequence
  Description of Artificial Sequence: Synthetic oligonucleotide
  Sense strand starting at position 658 of SEQ ID NO: 914627
gagcaaggauuggccuaaa

SEQ ID NO: 1018537 - RNA, 19 nt, Artificial Sequence
  Description of Artificial Sequence: Synthetic oligonucleotide
  Antisense strand to SEQ ID NO: 1018536
uuuaggccaauccuugcuc

SEQ ID NO: 1018538 - RNA, 19 nt, Artificial Sequence
  Description of Artificial Sequence: Synthetic oligonucleotide
  Sense strand starting at position 677 of SEQ ID NO: 914627
agguuuguagccuggucaa

SEQ ID NO: 1018539 - RNA, 19 nt, Artificial Sequence
  Description of Artificial Sequence: Synthetic oligonucleotide
  Antisense strand to SEQ ID NO: 1018538
uugaccaggcuacaaaccu

SEQ ID NO: 1018540 - RNA, 19 nt, Artificial Sequence
  Description of Artificial Sequence: Synthetic oligonucleotide
  Sense strand starting at position 698 of SEQ ID NO: 914627
uacagaaaggcuuggaucu

SEQ ID NO: 1018541 - RNA, 19 nt, Artificial Sequence
  Description of Artificial Sequence: Synthetic oligonucleotide
  Antisense strand to SEQ ID NO: 1018540
agauccaagccuuucugua

SEQ ID NO: 1018542 - RNA, 19 nt, Artificial Sequence
  Description of Artificial Sequence: Synthetic oligonucleotide
  Sense strand starting at position 900 of SEQ ID NO: 914627
acuuguguccauggugaag

SEQ ID NO: 1018543 - RNA, 19 nt, Artificial Sequence
  Description of Artificial Sequence: Synthetic oligonucleotide
  Antisense strand to SEQ ID NO: 1018542
cuucaccauggacacaagu

SEQ ID NO: 1018544 - RNA, 19 nt, Artificial Sequence
  Description of Artificial Sequence: Synthetic oligonucleotide
  Sense strand starting at position 909 of SEQ ID NO: 914627
cauggugaagccuguuaug

SEQ ID NO: 1018545 - RNA, 19 nt, Artificial Sequence
  Description of Artificial Sequence: Synthetic oligonucleotide
  Antisense strand to SEQ ID NO: 1018544
cauaacaggcuucaccaug

SEQ ID NO: 1018546 - RNA, 19 nt, Artificial Sequence
  Description of Artificial Sequence: Synthetic oligonucleotide
  Sense strand starting at position 1061 of SEQ ID NO: 914627
gggcucucgguccaucaua

SEQ ID NO: 1018547 - RNA, 19 nt, Artificial Sequence
  Description of Artificial Sequence: Synthetic oligonucleotide
  Antisense strand to SEQ ID NO: 1018546
uaugauggaccgagagccc

SEQ ID NO: 1018548 - RNA, 19 nt, Artificial Sequence
  Description of Artificial Sequence: Synthetic oligonucleotide
  Sense strand starting at position 1288 of SEQ ID NO: 914627
cuuagcuucugccuuagaa

SEQ ID NO: 1018549 - RNA, 19 nt, Artificial Sequence
  Description of Artificial Sequence: Synthetic oligonucleotide
  Antisense strand to SEQ ID NO: 1018548
uucuaaggcagaagcuaag

SEQ ID NO: 1018550 - RNA, 19 nt, Artificial Sequence
  Description of Artificial Sequence: Synthetic oligonucleotide
  Sense strand starting at position 2343 of SEQ ID NO: 914627
agaguaauaagcugugauu

SEQ ID NO: 1018551 - RNA, 19 nt, Artificial Sequence
  Description of Artificial Sequence: Synthetic oligonucleotide
  Antisense strand to SEQ ID NO: 1018550
aaucacagcuuauuacucu

SEQ ID NO: 1018552 - RNA, 19 nt, Artificial Sequence
  Description of Artificial Sequence: Synthetic oligonucleotide
  Sense strand starting at position 2391 of SEQ ID NO: 914627
agucuucuccuuugaggac

SEQ ID NO: 1018553 - RNA, 19 nt, Artificial Sequence
  Description of Artificial Sequence: Synthetic oligonucleotide
  Antisense strand to SEQ ID NO: 1018552
guccucaaaggagaagacu

SEQ ID NO: 1018554 - RNA, 19 nt, Artificial Sequence
  Description of Artificial Sequence: Synthetic oligonucleotide
  Sense strand starting at position 2512 of SEQ ID NO: 914627
gaaucuauguagucaguuc

SEQ ID NO: 1018555 - RNA, 19 nt, Artificial Sequence
  Description of Artificial Sequence: Synthetic oligonucleotide
  Antisense strand to SEQ ID NO: 1018554
gaacugacuacauagauuc

SEQ ID NO: 1018556 - RNA, 19 nt, Artificial Sequence
  Description of Artificial Sequence: Synthetic oligonucleotide
  Sense strand starting at position 2526 of SEQ ID NO: 914627
aguucuauugcuggacuca

SEQ ID NO: 1018557 - RNA, 19 nt, Artificial Sequence
  Description of Artificial Sequence: Synthetic oligonucleotide
  Antisense strand to SEQ ID NO: 1018556
ugaguccagcaauagaacu

SEQ ID NO: 1018558 - RNA, 19 nt, Artificial Sequence
  Description of Artificial Sequence: Synthetic oligonucleotide
  Sense strand starting at position 2527 of SEQ ID NO: 914627
guucuauugcuggacucau

SEQ ID NO: 1018559 - RNA, 19 nt, Artificial Sequence
  Description of Artificial Sequence: Synthetic oligonucleotide
  Antisense strand to SEQ ID NO: 1018558
augaguccagcaauagaac

SEQ ID NO: 1018560 - RNA, 19 nt, Artificial Sequence
  Description of Artificial Sequence: Synthetic oligonucleotide
  Sense strand starting at position 2569 of SEQ ID NO: 914627
guugaccugacauggaaau

SEQ ID NO: 1018561 - RNA, 19 nt, Artificial Sequence
  Description of Artificial Sequence: Synthetic oligonucleotide
  Antisense strand to SEQ ID NO: 1018560
auuuccaugucaggucaac

SEQ ID NO: 1018562 - RNA, 19 nt, Artificial Sequence
  Description of Artificial Sequence: Synthetic oligonucleotide
  Sense strand starting at position 2727 of SEQ ID NO: 914627
agaggaaccucguucuucu

SEQ ID NO: 1018563 - RNA, 19 nt, Artificial Sequence
  Description of Artificial Sequence: Synthetic oligonucleotide
  Antisense strand to SEQ ID NO: 1018562
agaagaacgagguuccucu

SEQ ID NO: 1018564 - RNA, 19 nt, Artificial Sequence
  Description of Artificial Sequence: Synthetic oligonucleotide
  Sense strand starting at position 2938 of SEQ ID NO: 914627
guccucaguuugccagauu

SEQ ID NO: 1018565 - RNA, 19 nt, Artificial Sequence
  Description of Artificial Sequence: Synthetic oligonucleotide
  Antisense strand to SEQ ID NO: 1018564
aaucuggcaaacugaggac

SEQ ID NO: 1018566 - RNA, 19 nt, Artificial Sequence
  Description of Artificial Sequence: Synthetic oligonucleotide
  Sense strand starting at position 2949 of SEQ ID NO: 914627
gccagauucugugucagau

SEQ ID NO: 1018567 - RNA, 19 nt, Artificial Sequence
  Description of Artificial Sequence: Synthetic oligonucleotide
  Antisense strand to SEQ ID NO: 1018566
aucugacacagaaucuggc

SEQ ID NO: 1018568 - RNA, 19 nt, Artificial Sequence
  Description of Artificial Sequence: Synthetic oligonucleotide
  Sense strand starting at position 3371 of SEQ ID NO: 914627
gauggaguguccuugcaaa

SEQ ID NO: 1018569 - RNA, 19 nt, Artificial Sequence
  Description of Artificial Sequence: Synthetic oligonucleotide
  Antisense strand to SEQ ID NO: 1018568
uuugcaaggacacuccauc

SEQ ID NO: 1018570 - RNA, 19 nt, Artificial Sequence
  Description of Artificial Sequence: Synthetic oligonucleotide
  Sense strand starting at position 3611 of SEQ ID NO: 914627
ccuagaauguugccauaau

SEQ ID NO: 1018571 - RNA, 19 nt, Artificial Sequence
  Description of Artificial Sequence: Synthetic oligonucleotide
  Antisense strand to SEQ ID NO: 1018570
auuauggcaacauucuagg

SEQ ID NO: 1018572 - RNA, 19 nt, Artificial Sequence
  Description of Artificial Sequence: Synthetic oligonucleotide
  Sense strand starting at position 3632 of SEQ ID NO: 914627
ccuuuaagggaucagccau

SEQ ID NO: 1018573 - RNA, 19 nt, Artificial Sequence
  Description of Artificial Sequence: Synthetic oligonucleotide
  Antisense strand to SEQ ID NO: 1018572
auggcugaucccuuaaagg

SEQ ID NO: 1018574 - RNA, 19 nt, Artificial Sequence
  Description of Artificial Sequence: Synthetic oligonucleotide
  Sense strand starting at position 3651 of SEQ ID NO: 914627
uacagauaugguugacauc

SEQ ID NO: 1018575 - RNA, 19 nt, Artificial Sequence
  Description of Artificial Sequence: Synthetic oligonucleotide
  Antisense strand to SEQ ID NO: 1018574
gaugucaaccauaucugua

SEQ ID NO: 1018576 - RNA, 19 nt, Artificial Sequence
  Description of Artificial Sequence: Synthetic oligonucleotide
  Sense strand starting at position 3671 of SEQ ID NO: 914627
caguguuucccuuguauac

SEQ ID NO: 1018577 - RNA, 19 nt, Artificial Sequence
  Description of Artificial Sequence: Synthetic oligonucleotide
  Antisense strand to SEQ ID NO: 1018576
guauacaagggaaacacug

SEQ ID NO: 1018578 - RNA, 19 nt, Artificial Sequence
  Description of Artificial Sequence: Synthetic oligonucleotide
  Sense strand starting at position 3681 of SEQ ID NO: 914627
cuuguauacccuuggacca

SEQ ID NO: 1018579 - RNA, 19 nt, Artificial Sequence
  Description of Artificial Sequence: Synthetic oligonucleotide
  Antisense strand to SEQ ID NO: 1018578
ugguccaaggguauacaag

SEQ ID NO: 1018580 - RNA, 19 nt, Artificial Sequence
  Description of Artificial Sequence: Synthetic oligonucleotide
  Sense strand starting at position 3841 of SEQ ID NO: 914627
ugccuaaauugcuugaucu

SEQ ID NO: 1018581 - RNA, 19 nt, Artificial Sequence
  Description of Artificial Sequence: Synthetic oligonucleotide
  Antisense strand to SEQ ID NO: 1018580
agaucaagcaauuuaggca

SEQ ID NO: 1018582 - RNA, 19 nt, Artificial Sequence
  Description of Artificial Sequence: Synthetic oligonucleotide
  Sense strand starting at position 3842 of SEQ ID NO: 914627
gccuaaauugcuugaucuc

SEQ ID NO: 1018583 - RNA, 19 nt, Artificial Sequence
  Description of Artificial Sequence: Synthetic oligonucleotide
  Antisense strand to SEQ ID NO: 1018582
gagaucaagcaauuuaggc

SEQ ID NO: 1018584 - RNA, 19 nt, Artificial Sequence
  Description of Artificial Sequence: Synthetic oligonucleotide
  Sense strand starting at position 3849 of SEQ ID NO: 914627
uugcuugaucucgcgaagu

SEQ ID NO: 1018585 - RNA, 19 nt, Artificial Sequence
  Description of Artificial Sequence: Synthetic oligonucleotide
  Antisense strand to SEQ ID NO: 1018584
acuucgcgagaucaagcaa

SEQ ID NO: 1018586 - RNA, 19 nt, Artificial Sequence
  Description of Artificial Sequence: Synthetic oligonucleotide
  Sense strand starting at position 3909 of SEQ ID NO: 914627
cucugagcuuuacugagaa

SEQ ID NO: 1018587 - RNA, 19 nt, Artificial Sequence
  Description of Artificial Sequence: Synthetic oligonucleotide
  Antisense strand to SEQ ID NO: 1018586
uucucaguaaagcucagag

SEQ ID NO: 1018588 - RNA, 19 nt, Artificial Sequence
  Description of Artificial Sequence: Synthetic oligonucleotide
  Sense strand starting at position 3941 of SEQ ID NO: 914627
cauguuagacaaugguaau

SEQ ID NO: 1018589 - RNA, 19 nt, Artificial Sequence
  Description of Artificial Sequence: Synthetic oligonucleotide
  Antisense strand to SEQ ID NO: 1018588
auuaccauugucuaacaug

SEQ ID NO: 1018590 - RNA, 19 nt, Artificial Sequence
  Description of Artificial Sequence: Synthetic oligonucleotide
  Sense strand starting at position 3954 of SEQ ID NO: 914627
gguaauaugggccaucucu

SEQ ID NO: 1018591 - RNA, 19 nt, Artificial Sequence
  Description of Artificial Sequence: Synthetic oligonucleotide
  Antisense strand to SEQ ID NO: 1018590
agagauggcccauauuacc

SEQ ID NO: 1018592 - RNA, 19 nt, Artificial Sequence
  Description of Artificial Sequence: Synthetic oligonucleotide
  Sense strand starting at position 471 of SEQ ID NO: 914628
gcgugaaucacggcuucug

SEQ ID NO: 1018593 - RNA, 19 nt, Artificial Sequence
  Description of Artificial Sequence: Synthetic oligonucleotide
  Antisense strand to SEQ ID NO: 1018592
cagaagccgugauucacgc

SEQ ID NO: 1018594 - RNA, 19 nt, Artificial Sequence
  Description of Artificial Sequence: Synthetic oligonucleotide
  Sense strand starting at position 550 of SEQ ID NO: 914628
ccugauaucaucgggcuca

SEQ ID NO: 1018595 - RNA, 19 nt, Artificial Sequence
  Description of Artificial Sequence: Synthetic oligonucleotide
  Antisense strand to SEQ ID NO: 1018594
ugagcccgaugauaucagg

SEQ ID NO: 1018596 - RNA, 19 nt, Artificial Sequence
  Description of Artificial Sequence: Synthetic oligonucleotide
  Sense strand starting at position 551 of SEQ ID NO: 914628
cugauaucaucgggcucaa

SEQ ID NO: 1018597 - RNA, 19 nt, Artificial Sequence
  Description of Artificial Sequence: Synthetic oligonucleotide
  Antisense strand to SEQ ID NO: 1018596
uugagcccgaugauaucag

SEQ ID NO: 1018598 - RNA, 19 nt, Artificial Sequence
  Description of Artificial Sequence: Synthetic oligonucleotide
  Sense strand starting at position 641 of SEQ ID NO: 914628
ggcuaaguucucuguggga

SEQ ID NO: 1018599 - RNA, 19 nt, Artificial Sequence
  Description of Artificial Sequence: Synthetic oligonucleotide
  Antisense strand to SEQ ID NO: 1018598
ucccacagagaacuuagcc

SEQ ID NO: 1018600 - RNA, 19 nt, Artificial Sequence
  Description of Artificial Sequence: Synthetic oligonucleotide
  Sense strand starting at position 643 of SEQ ID NO: 914628
cuaaguucucugugggaga

SEQ ID NO: 1018601 - RNA, 19 nt, Artificial Sequence
  Description of Artificial Sequence: Synthetic oligonucleotide
  Antisense strand to SEQ ID NO: 1018600
ucucccacagagaacuuag

SEQ ID NO: 1018602 - RNA, 19 nt, Artificial Sequence
  Description of Artificial Sequence: Synthetic oligonucleotide
  Sense strand starting at position 644 of SEQ ID NO: 914628
uaaguucucugugggagac

SEQ ID NO: 1018603 - RNA, 19 nt, Artificial Sequence
  Description of Artificial Sequence: Synthetic oligonucleotide
  Antisense strand to SEQ ID NO: 1018602
gucucccacagagaacuua

SEQ ID NO: 1018604 - RNA, 19 nt, Artificial Sequence
  Description of Artificial Sequence: Synthetic oligonucleotide
  Sense strand starting at position 645 of SEQ ID NO: 914628
aaguucucugugggagacu

SEQ ID NO: 1018605 - RNA, 19 nt, Artificial Sequence
  Description of Artificial Sequence: Synthetic oligonucleotide
  Antisense strand to SEQ ID NO: 1018604
agucucccacagagaacuu

SEQ ID NO: 1018606 - RNA, 19 nt, Artificial Sequence
  Description of Artificial Sequence: Synthetic oligonucleotide
  Sense strand starting at position 658 of SEQ ID NO: 914628
gagacucgggcacguuaau

SEQ ID NO: 1018607 - RNA, 19 nt, Artificial Sequence
  Description of Artificial Sequence: Synthetic oligonucleotide
  Antisense strand to SEQ ID NO: 1018606
auuaacgugcccgagucuc

SEQ ID NO: 1018608 - RNA, 19 nt, Artificial Sequence
  Description of Artificial Sequence: Synthetic oligonucleotide
  Sense strand starting at position 697 of SEQ ID NO: 914628
guaagacaagggugaugau

SEQ ID NO: 1018609 - RNA, 19 nt, Artificial Sequence
  Description of Artificial Sequence: Synthetic oligonucleotide
  Antisense strand to SEQ ID NO: 1018608
aucaucacccuugucuuac

SEQ ID NO: 1018610 - RNA, 19 nt, Artificial Sequence
  Description of Artificial Sequence: Synthetic oligonucleotide
  Sense strand starting at position 700 of SEQ ID NO: 914628
agacaagggugaugauagu

SEQ ID NO: 1018611 - RNA, 19 nt, Artificial Sequence
  Description of Artificial Sequence: Synthetic oligonucleotide
  Antisense strand to SEQ ID NO: 1018610
acuaucaucacccuugucu

SEQ ID NO: 1018612 - RNA, 19 nt, Artificial Sequence
  Description of Artificial Sequence: Synthetic oligonucleotide
  Sense strand starting at position 709 of SEQ ID NO: 914628
ugaugauaguauccacauc

SEQ ID NO: 1018613 - RNA, 19 nt, Artificial Sequence
  Description of Artificial Sequence: Synthetic oligonucleotide
  Antisense strand to SEQ ID NO: 1018612
gauguggauacuaucauca

SEQ ID NO: 1018614 - RNA, 19 nt, Artificial Sequence
  Description of Artificial Sequence: Synthetic oligonucleotide
  Sense strand starting at position 717 of SEQ ID NO: 914628
guauccacaucauaauugu

SEQ ID NO: 1018615 - RNA, 19 nt, Artificial Sequence
  Description of Artificial Sequence: Synthetic oligonucleotide
  Antisense strand to SEQ ID NO: 1018614
acaauuaugauguggauac

SEQ ID NO: 1018616 - RNA, 19 nt, Artificial Sequence
  Description of Artificial Sequence: Synthetic oligonucleotide
  Sense strand starting at position 726 of SEQ ID NO: 914628
ucauaauugucuugaagau

SEQ ID NO: 1018617 - RNA, 19 nt, Artificial Sequence
  Description of Artificial Sequence: Synthetic oligonucleotide
  Antisense strand to SEQ ID NO: 1018616
aucuucaagacaauuauga

SEQ ID NO: 1018618 - RNA, 19 nt, Artificial Sequence
  Description of Artificial Sequence: Synthetic oligonucleotide
  Sense strand starting at position 865 of SEQ ID NO: 914628
agauuaggagcuuaaacgu

SEQ ID NO: 1018619 - RNA, 19 nt, Artificial Sequence
  Description of Artificial Sequence: Synthetic oligonucleotide
  Antisense strand to SEQ ID NO: 1018618
acguuuaagcuccuaaucu

SEQ ID NO: 1018620 - RNA, 19 nt, Artificial Sequence
  Description of Artificial Sequence: Synthetic oligonucleotide
  Sense strand starting at position 872 of SEQ ID NO: 914628
gagcuuaaacgucgucacu

SEQ ID NO: 1018621 - RNA, 19 nt, Artificial Sequence
  Description of Artificial Sequence: Synthetic oligonucleotide
  Antisense strand to SEQ ID NO: 1018620
agugacgacguuuaagcuc

SEQ ID NO: 1018622 - RNA, 19 nt, Artificial Sequence
  Description of Artificial Sequence: Synthetic oligonucleotide
  Sense strand starting at position 874 of SEQ ID NO: 914628
gcuuaaacgucgucacugu

SEQ ID NO: 1018623 - RNA, 19 nt, Artificial Sequence
  Description of Artificial Sequence: Synthetic oligonucleotide
  Antisense strand to SEQ ID NO: 1018622
acagugacgacguuuaagc

SEQ ID NO: 1018624 - RNA, 19 nt, Artificial Sequence
  Description of Artificial Sequence: Synthetic oligonucleotide
  Sense strand starting at position 892 of SEQ ID NO: 914628
ugacgucugcggcucgaaa

SEQ ID NO: 1018625 - RNA, 19 nt, Artificial Sequence
  Description of Artificial Sequence: Synthetic oligonucleotide
  Antisense strand to SEQ ID NO: 1018624
uuucgagccgcagacguca

SEQ ID NO: 1018626 - RNA, 19 nt, Artificial Sequence
  Description of Artificial Sequence: Synthetic oligonucleotide
  Sense strand starting at position 1410 of SEQ ID NO: 914628
uugacaaagucgccuguuu

SEQ ID NO: 1018627 - RNA, 19 nt, Artificial Sequence
  Description of Artificial Sequence: Synthetic oligonucleotide
  Antisense strand to SEQ ID NO: 1018626
aaacaggcgacuuugucaa

SEQ ID NO: 1018628 - RNA, 19 nt, Artificial Sequence
  Description of Artificial Sequence: Synthetic oligonucleotide
  Sense strand starting at position 1450 of SEQ ID NO: 914628
acgggcaucuccuggauaa

SEQ ID NO: 1018629 - RNA, 19 nt, Artificial Sequence
  Description of Artificial Sequence: Synthetic oligonucleotide
  Antisense strand to SEQ ID NO: 1018628
uuauccaggagaugcccgu

SEQ ID NO: 1018630 - RNA, 19 nt, Artificial Sequence
  Description of Artificial Sequence: Synthetic oligonucleotide
  Sense strand starting at position 1451 of SEQ ID NO: 914628
cgggcaucuccuggauaac

SEQ ID NO: 1018631 - RNA, 19 nt, Artificial Sequence
  Description of Artificial Sequence: Synthetic oligonucleotide
  Antisense strand to SEQ ID NO: 1018630
guuauccaggagaugcccg

SEQ ID NO: 1018632 - RNA, 19 nt, Artificial Sequence
  Description of Artificial Sequence: Synthetic oligonucleotide
  Sense strand starting at position 1560 of SEQ ID NO: 914628
gguguaucgccgagggaca

SEQ ID NO: 1018633 - RNA, 19 nt, Artificial Sequence
  Description of Artificial Sequence: Synthetic oligonucleotide
  Antisense strand to SEQ ID NO: 1018632
ugucccucggcgauacacc

SEQ ID NO: 1018634 - RNA, 19 nt, Artificial Sequence
  Description of Artificial Sequence: Synthetic oligonucleotide
  Sense strand starting at position 1561 of SEQ ID NO: 914628
guguaucgccgagggacaa

SEQ ID NO: 1018635 - RNA, 19 nt, Artificial Sequence
  Description of Artificial Sequence: Synthetic oligonucleotide
  Antisense strand to SEQ ID NO: 1018634
uugucccucggcgauacac

SEQ ID NO: 1018636 - RNA, 19 nt, Artificial Sequence
  Description of Artificial Sequence: Synthetic oligonucleotide
  Sense strand starting at position 2149 of SEQ ID NO: 914628
cccaguauuugcucaucuu

SEQ ID NO: 1018637 - RNA, 19 nt, Artificial Sequence
  Description of Artificial Sequence: Synthetic oligonucleotide
  Antisense strand to SEQ ID NO: 1018636
aagaugagcaaauacuggg

SEQ ID NO: 1018638 - RNA, 19 nt, Artificial Sequence
  Description of Artificial Sequence: Synthetic oligonucleotide
  Sense strand starting at position 2155 of SEQ ID NO: 914628
auuugcucaucuuggaauu

SEQ ID NO: 1018639 - RNA, 19 nt, Artificial Sequence
  Description of Artificial Sequence: Synthetic oligonucleotide
  Antisense strand to SEQ ID NO: 1018638
aauuccaagaugagcaaau

SEQ ID NO: 1018640 - RNA, 19 nt, Artificial Sequence
  Description of Artificial Sequence: Synthetic oligonucleotide
  Sense strand starting at position 2876 of SEQ ID NO: 914628
aagagaaagugcuugcaaa

SEQ ID NO: 1018641 - RNA, 19 nt, Artificial Sequence
  Description of Artificial Sequence: Synthetic oligonucleotide
  Antisense strand to SEQ ID NO: 1018640
uuugcaagcacuuucucuu

SEQ ID NO: 1018642 - RNA, 19 nt, Artificial Sequence
  Description of Artificial Sequence: Synthetic oligonucleotide
  Sense strand starting at position 2877 of SEQ ID NO: 914628
agagaaagugcuugcaaag

SEQ ID NO: 1018643 - RNA, 19 nt, Artificial Sequence
  Description of Artificial Sequence: Synthetic oligonucleotide
  Antisense strand to SEQ ID NO: 1018642
cuuugcaagcacuuucucu

SEQ ID NO: 1018644 - RNA, 19 nt, Artificial Sequence
  Description of Artificial Sequence: Synthetic oligonucleotide
  Sense strand starting at position 2899 of SEQ ID NO: 914628
agcagagaauucuauggac

SEQ ID NO: 1018645 - RNA, 19 nt, Artificial Sequence
  Description of Artificial Sequence: Synthetic oligonucleotide
  Antisense strand to SEQ ID NO: 1018644
guccauagaauucucugcu

SEQ ID NO: 1018646 - RNA, 19 nt, Artificial Sequence
  Description of Artificial Sequence: Synthetic oligonucleotide
  Sense strand starting at position 2902 of SEQ ID NO: 914628
agagaauucuauggacucu

SEQ ID NO: 1018647 - RNA, 19 nt, Artificial Sequence
  Description of Artificial Sequence: Synthetic oligonucleotide
  Antisense strand to SEQ ID NO: 1018646
agaguccauagaauucucu

SEQ ID NO: 1018648 - RNA, 19 nt, Artificial Sequence
  Description of Artificial Sequence: Synthetic oligonucleotide
  Sense strand starting at position 2959 of SEQ ID NO: 914628
ucuguagucugucacuaag

SEQ ID NO: 1018649 - RNA, 19 nt, Artificial Sequence
  Description of Artificial Sequence: Synthetic oligonucleotide
  Antisense strand to SEQ ID NO: 1018648
cuuagugacagacuacaga

SEQ ID NO: 1018650 - RNA, 19 nt, Artificial Sequence
  Description of Artificial Sequence: Synthetic oligonucleotide
  Sense strand starting at position 3150 of SEQ ID NO: 914628
gugcguuaaagggagaaau

SEQ ID NO: 1018651 - RNA, 19 nt, Artificial Sequence
  Description of Artificial Sequence: Synthetic oligonucleotide
  Antisense strand to SEQ ID NO: 1018650
auuucucccuuuaacgcac

SEQ ID NO: 1018652 - RNA, 19 nt, Artificial Sequence
  Description of Artificial Sequence: Synthetic oligonucleotide
  Sense strand starting at position 3293 of SEQ ID NO: 914628
cccucuugugcagaucagu

SEQ ID NO: 1018653 - RNA, 19 nt, Artificial Sequence
  Description of Artificial Sequence: Synthetic oligonucleotide
  Antisense strand to SEQ ID NO: 1018652
acugaucugcacaagaggg

SEQ ID NO: 1018654 - RNA, 19 nt, Artificial Sequence
  Description of Artificial Sequence: Synthetic oligonucleotide
  Sense strand starting at position 3321 of SEQ ID NO: 914628
uugugaacccuugagcaaa

SEQ ID NO: 1018655 - RNA, 19 nt, Artificial Sequence
  Description of Artificial Sequence: Synthetic oligonucleotide
  Antisense strand to SEQ ID NO: 1018654
uuugcucaaggguucacaa

SEQ ID NO: 1018656 - RNA, 19 nt, Artificial Sequence
  Description of Artificial Sequence: Synthetic oligonucleotide
  Sense strand starting at position 3490 of SEQ ID NO: 914628
ggaaguuucuucucuccca

SEQ ID NO: 1018657 - RNA, 19 nt, Artificial Sequence
  Description of Artificial Sequence: Synthetic oligonucleotide
  Antisense strand to SEQ ID NO: 1018656
ugggagagaagaaacuucc

SEQ ID NO: 1018658 - RNA, 19 nt, Artificial Sequence
  Description of Artificial Sequence: Synthetic oligonucleotide
  Sense strand starting at position 3657 of SEQ ID NO: 914628
ggaugugugcagcacacau

SEQ ID NO: 1018659 - RNA, 19 nt, Artificial Sequence
  Description of Artificial Sequence: Synthetic oligonucleotide
  Antisense strand to SEQ ID NO: 1018658
augugugcugcacacaucc

SEQ ID NO: 1018660 - RNA, 19 nt, Artificial Sequence
  Description of Artificial Sequence: Synthetic oligonucleotide
  Sense strand starting at position 15 of SEQ ID NO: 914629
gugcuuucucgccugacaa

SEQ ID NO: 1018661 - RNA, 19 nt, Artificial Sequence
  Description of Artificial Sequence: Synthetic oligonucleotide
  Antisense strand to SEQ ID NO: 1018660
uugucaggcgagaaagcac

SEQ ID NO: 1018662 - RNA, 19 nt, Artificial Sequence
  Description of Artificial Sequence: Synthetic oligonucleotide
  Sense strand starting at position 16 of SEQ ID NO: 914629
ugcuuucucgccugacaaa

SEQ ID NO: 1018663 - RNA, 19 nt, Artificial Sequence
  Description of Artificial Sequence: Synthetic oligonucleotide
  Antisense strand to SEQ ID NO: 1018662
uuugucaggcgagaaagca

SEQ ID NO: 1018664 - RNA, 19 nt, Artificial Sequence
  Description of Artificial Sequence: Synthetic oligonucleotide
  Sense strand starting at position 17 of SEQ ID NO: 914629
gcuuucucgccugacaaau

SEQ ID NO: 1018665 - RNA, 19 nt, Artificial Sequence
  Description of Artificial Sequence: Synthetic oligonucleotide
  Antisense strand to SEQ ID NO: 1018664
auuugucaggcgagaaagc

SEQ ID NO: 1018666 - RNA, 19 nt, Artificial Sequence
  Description of Artificial Sequence: Synthetic oligonucleotide
  Sense strand starting at position 336 of SEQ ID NO: 914629
aacuacuuugucgacgauu

SEQ ID NO: 1018667 - RNA, 19 nt, Artificial Sequence
  Description of Artificial Sequence: Synthetic oligonucleotide
  Antisense strand to SEQ ID NO: 1018666
aaucgucgacaaaguaguu

SEQ ID NO: 1018668 - RNA, 19 nt, Artificial Sequence
  Description of Artificial Sequence: Synthetic oligonucleotide
  Sense strand starting at position 856 of SEQ ID NO: 914629
gguggcuucagucggaaau

SEQ ID NO: 1018669 - RNA, 19 nt, Artificial Sequence
  Description of Artificial Sequence: Synthetic oligonucleotide
  Antisense strand to SEQ ID NO: 1018668
auuuccgacugaagccacc

SEQ ID NO: 1018670 - RNA, 19 nt, Artificial Sequence
  Description of Artificial Sequence: Synthetic oligonucleotide
  Sense strand starting at position 857 of SEQ ID NO: 914629
guggcuucagucggaaaug

SEQ ID NO: 1018671 - RNA, 19 nt, Artificial Sequence
  Description of Artificial Sequence: Synthetic oligonucleotide
  Antisense strand to SEQ ID NO: 1018670
cauuuccgacugaagccac

SEQ ID NO: 1018672 - RNA, 19 nt, Artificial Sequence
  Description of Artificial Sequence: Synthetic oligonucleotide
  Sense strand starting at position 1157 of SEQ ID NO: 914629
gagggugaccucuggguuu

SEQ ID NO: 1018673 - RNA, 19 nt, Artificial Sequence
  Description of Artificial Sequence: Synthetic oligonucleotide
  Antisense strand to SEQ ID NO: 1018672
aaacccagaggucacccuc

SEQ ID NO: 1018674 - RNA, 19 nt, Artificial Sequence
  Description of Artificial Sequence: Synthetic oligonucleotide
  Sense strand starting at position 1163 of SEQ ID NO: 914629
gaccucuggguuuggagaa

SEQ ID NO: 1018675 - RNA, 19 nt, Artificial Sequence
  Description of Artificial Sequence: Synthetic oligonucleotide
  Antisense strand to SEQ ID NO: 1018674
uucuccaaacccagagguc

SEQ ID NO: 1018676 - RNA, 19 nt, Artificial Sequence
  Description of Artificial Sequence: Synthetic oligonucleotide
  Sense strand starting at position 1322 of SEQ ID NO: 914629
ggacauagcggaggaauca

SEQ ID NO: 1018677 - RNA, 19 nt, Artificial Sequence
  Description of Artificial Sequence: Synthetic oligonucleotide
  Antisense strand to SEQ ID NO: 1018676
ugauuccuccgcuaugucc

SEQ ID NO: 1018678 - RNA, 19 nt, Artificial Sequence
  Description of Artificial Sequence: Synthetic oligonucleotide
  Sense strand starting at position 1347 of SEQ ID NO: 914629
gaguccgaggccugaauaa

SEQ ID NO: 1018679 - RNA, 19 nt, Artificial Sequence
  Description of Artificial Sequence: Synthetic oligonucleotide
  Antisense strand to SEQ ID NO: 1018678
uuauucaggccucggacuc

SEQ ID NO: 1018680 - RNA, 19 nt, Artificial Sequence
  Description of Artificial Sequence: Synthetic oligonucleotide
  Sense strand starting at position 1370 of SEQ ID NO: 914629
ggacuccuaggucaagagu

SEQ ID NO: 1018681 - RNA, 19 nt, Artificial Sequence
  Description of Artificial Sequence: Synthetic oligonucleotide
  Antisense strand to SEQ ID NO: 1018680
acucuugaccuaggagucc

SEQ ID NO: 1018682 - RNA, 19 nt, Artificial Sequence
  Description of Artificial Sequence: Synthetic oligonucleotide
  Sense strand starting at position 1764 of SEQ ID NO: 914629
aggucucaccuuuguguaa

SEQ ID NO: 1018683 - RNA, 19 nt, Artificial Sequence
  Description of Artificial Sequence: Synthetic oligonucleotide
  Antisense strand to SEQ ID NO: 1018682
uuacacaaaggugagaccu

SEQ ID NO: 1018684 - RNA, 19 nt, Artificial Sequence
  Description of Artificial Sequence: Synthetic oligonucleotide
  Sense strand starting at position 1765 of SEQ ID NO: 914629
ggucucaccuuuguguaaa

SEQ ID NO: 1018685 - RNA, 19 nt, Artificial Sequence
  Description of Artificial Sequence: Synthetic oligonucleotide
  Antisense strand to SEQ ID NO: 1018684
uuuacacaaaggugagacc

SEQ ID NO: 1018686 - RNA, 19 nt, Artificial Sequence
  Description of Artificial Sequence: Synthetic oligonucleotide
  Sense strand starting at position 1767 of SEQ ID NO: 914629
ucucaccuuuguguaaaga

SEQ ID NO: 1018687 - RNA, 19 nt, Artificial Sequence
  Description of Artificial Sequence: Synthetic oligonucleotide
  Antisense strand to SEQ ID NO: 1018686
ucuuuacacaaaggugaga

SEQ ID NO: 1018688 - RNA, 19 nt, Artificial Sequence
  Description of Artificial Sequence: Synthetic oligonucleotide
  Sense strand starting at position 2214 of SEQ ID NO: 914629
augugucauccaugugcca

SEQ ID NO: 1018689 - RNA, 19 nt, Artificial Sequence
  Description of Artificial Sequence: Synthetic oligonucleotide
  Antisense strand to SEQ ID NO: 1018688
uggcacauggaugacacau

SEQ ID NO: 1018690 - RNA, 19 nt, Artificial Sequence
  Description of Artificial Sequence: Synthetic oligonucleotide
  Sense strand starting at position 2216 of SEQ ID NO: 914629
gugucauccaugugccaac

SEQ ID NO: 1018691 - RNA, 19 nt, Artificial Sequence
  Description of Artificial Sequence: Synthetic oligonucleotide
  Antisense strand to SEQ ID NO: 1018690
guuggcacauggaugacac

SEQ ID NO: 1018692 - RNA, 19 nt, Artificial Sequence
  Description of Artificial Sequence: Synthetic oligonucleotide
  Sense strand starting at position 2262 of SEQ ID NO: 914629
ccgguuucuacuggccuaa

SEQ ID NO: 1018693 - RNA, 19 nt, Artificial Sequence
  Description of Artificial Sequence: Synthetic oligonucleotide
  Antisense strand to SEQ ID NO: 1018692
uuaggccaguagaaaccgg

SEQ ID NO: 1018694 - RNA, 19 nt, Artificial Sequence
  Description of Artificial Sequence: Synthetic oligonucleotide
  Sense strand starting at position 2264 of SEQ ID NO: 914629
gguuucuacuggccuaagu

SEQ ID NO: 1018695 - RNA, 19 nt, Artificial Sequence
  Description of Artificial Sequence: Synthetic oligonucleotide
  Antisense strand to SEQ ID NO: 1018694
acuuaggccaguagaaacc

SEQ ID NO: 1018696 - RNA, 19 nt, Artificial Sequence
  Description of Artificial Sequence: Synthetic oligonucleotide
  Sense strand starting at position 2275 of SEQ ID NO: 914629
gccuaagucaccugggaca

SEQ ID NO: 1018697 - RNA, 19 nt, Artificial Sequence
  Description of Artificial Sequence: Synthetic oligonucleotide
  Antisense strand to SEQ ID NO: 1018696
ugucccaggugacuuaggc

SEQ ID NO: 1018698 - RNA, 19 nt, Artificial Sequence
  Description of Artificial Sequence: Synthetic oligonucleotide
  Sense strand starting at position 2567 of SEQ ID NO: 914629
caguuuaaugucuacgcua

SEQ ID NO: 1018699 - RNA, 19 nt, Artificial Sequence
  Description of Artificial Sequence: Synthetic oligonucleotide
  Antisense strand to SEQ ID NO: 1018698
uagcguagacauuaaacug

SEQ ID NO: 1018700 - RNA, 19 nt, Artificial Sequence
  Description of Artificial Sequence: Synthetic oligonucleotide
  Sense strand starting at position 2588 of SEQ ID NO: 914629
uguguuaucuuccuccuuu

SEQ ID NO: 1018701 - RNA, 19 nt, Artificial Sequence
  Description of Artificial Sequence: Synthetic oligonucleotide
  Antisense strand to SEQ ID NO: 1018700
aaaggaggaagauaacaca

SEQ ID NO: 1018702 - RNA, 19 nt, Artificial Sequence
  Description of Artificial Sequence: Synthetic oligonucleotide
  Sense strand starting at position 2589 of SEQ ID NO: 914629
guguuaucuuccuccuuug

SEQ ID NO: 1018703 - RNA, 19 nt, Artificial Sequence
  Description of Artificial Sequence: Synthetic oligonucleotide
  Antisense strand to SEQ ID NO: 1018702
caaaggaggaagauaacac

SEQ ID NO: 1018704 - RNA, 19 nt, Artificial Sequence
  Description of Artificial Sequence: Synthetic oligonucleotide
  Sense strand starting at position 2629 of SEQ ID NO: 914629
agcuuuccugccugacaga

SEQ ID NO: 1018705 - RNA, 19 nt, Artificial Sequence
  Description of Artificial Sequence: Synthetic oligonucleotide
  Antisense strand to SEQ ID NO: 1018704
ucugucaggcaggaaagcu

SEQ ID NO: 1018706 - RNA, 19 nt, Artificial Sequence
  Description of Artificial Sequence: Synthetic oligonucleotide
  Sense strand starting at position 2630 of SEQ ID NO: 914629
gcuuuccugccugacagaa

SEQ ID NO: 1018707 - RNA, 19 nt, Artificial Sequence
  Description of Artificial Sequence: Synthetic oligonucleotide
  Antisense strand to SEQ ID NO: 1018706
uucugucaggcaggaaagc

SEQ ID NO: 1018708 - RNA, 19 nt, Artificial Sequence
  Description of Artificial Sequence: Synthetic oligonucleotide
  Sense strand starting at position 2705 of SEQ ID NO: 914629
gagggcgucuucucaguga

SEQ ID NO: 1018709 - RNA, 19 nt, Artificial Sequence
  Description of Artificial Sequence: Synthetic oligonucleotide
  Antisense strand to SEQ ID NO: 1018708
ucacugagaagacgcccuc

SEQ ID NO: 1018710 - RNA, 19 nt, Artificial Sequence
  Description of Artificial Sequence: Synthetic oligonucleotide
  Sense strand starting at position 2940 of SEQ ID NO: 914629
cauggaagcugcuuugagu

SEQ ID NO: 1018711 - RNA, 19 nt, Artificial Sequence
  Description of Artificial Sequence: Synthetic oligonucleotide
  Antisense strand to SEQ ID NO: 1018710
acucaaagcagcuuccaug

SEQ ID NO: 1018712 - RNA, 19 nt, Artificial Sequence
  Description of Artificial Sequence: Synthetic oligonucleotide
  Sense strand starting at position 2951 of SEQ ID NO: 914629
cuuugaguaugcccugaca

SEQ ID NO: 1018713 - RNA, 19 nt, Artificial Sequence
  Description of Artificial Sequence: Synthetic oligonucleotide
  Antisense strand to SEQ ID NO: 1018712
ugucagggcauacucaaag

SEQ ID NO: 1018714 - RNA, 19 nt, Artificial Sequence
  Description of Artificial Sequence: Synthetic oligonucleotide
  Sense strand starting at position 2953 of SEQ ID NO: 914629
uugaguaugcccugacaau

SEQ ID NO: 1018715 - RNA, 19 nt, Artificial Sequence
  Description of Artificial Sequence: Synthetic oligonucleotide
  Antisense strand to SEQ ID NO: 1018714
auugucagggcauacucaa

SEQ ID NO: 1018716 - RNA, 19 nt, Artificial Sequence
  Description of Artificial Sequence: Synthetic oligonucleotide
  Sense strand starting at position 2954 of SEQ ID NO: 914629
ugaguaugcccugacaauu

SEQ ID NO: 1018717 - RNA, 19 nt, Artificial Sequence
  Description of Artificial Sequence: Synthetic oligonucleotide
  Antisense strand to SEQ ID NO: 1018716
aauugucagggcauacuca

SEQ ID NO: 1018718 - RNA, 19 nt, Artificial Sequence
  Description of Artificial Sequence: Synthetic oligonucleotide
  Sense strand starting at position 3077 of SEQ ID NO: 914629
cgaaaugugcggccuaagu

SEQ ID NO: 1018719 - RNA, 19 nt, Artificial Sequence
  Description of Artificial Sequence: Synthetic oligonucleotide
  Antisense strand to SEQ ID NO: 1018718
acuuaggccgcacauuucg

SEQ ID NO: 1018720 - RNA, 19 nt, Artificial Sequence
  Description of Artificial Sequence: Synthetic oligonucleotide
  Sense strand starting at position 3235 of SEQ ID NO: 914629
uguacuauucuguggcauu

SEQ ID NO: 1018721 - RNA, 19 nt, Artificial Sequence
  Description of Artificial Sequence: Synthetic oligonucleotide
  Antisense strand to SEQ ID NO: 1018720
aaugccacagaauaguaca

SEQ ID NO: 1018722 - RNA, 19 nt, Artificial Sequence
  Description of Artificial Sequence: Synthetic oligonucleotide
  Sense strand starting at position 3389 of SEQ ID NO: 914629
cuacuuugucucuaugaag

SEQ ID NO: 1018723 - RNA, 19 nt, Artificial Sequence
  Description of Artificial Sequence: Synthetic oligonucleotide
  Antisense strand to SEQ ID NO: 1018722
cuucauagagacaaaguag

SEQ ID NO: 1018724 - RNA, 19 nt, Artificial Sequence
  Description of Artificial Sequence: Synthetic oligonucleotide
  Sense strand starting at position 3420 of SEQ ID NO: 914629
gguaccucauaagugagau

SEQ ID NO: 1018725 - RNA, 19 nt, Artificial Sequence
  Description of Artificial Sequence: Synthetic oligonucleotide
  Antisense strand to SEQ ID NO: 1018724
aucucacuuaugagguacc

SEQ ID NO: 1018726 - RNA, 19 nt, Artificial Sequence
  Description of Artificial Sequence: Synthetic oligonucleotide
  Sense strand starting at position 3424 of SEQ ID NO: 914629
ccucauaagugagaucaua

SEQ ID NO: 1018727 - RNA, 19 nt, Artificial Sequence
  Description of Artificial Sequence: Synthetic oligonucleotide
  Antisense strand to SEQ ID NO: 1018726
uaugaucucacuuaugagg

SEQ ID NO: 1018728 - RNA, 19 nt, Artificial Sequence
  Description of Artificial Sequence: Synthetic oligonucleotide
  Sense strand starting at position 3492 of SEQ ID NO: 914629
caagguucguccuuuaaac

SEQ ID NO: 1018729 - RNA, 19 nt, Artificial Sequence
  Description of Artificial Sequence: Synthetic oligonucleotide
  Antisense strand to SEQ ID NO: 1018728
guuuaaaggacgaaccuug

SEQ ID NO: 1018730 - RNA, 19 nt, Artificial Sequence
  Description of Artificial Sequence: Synthetic oligonucleotide
  Sense strand starting at position 3500 of SEQ ID NO: 914629
guccuuuaaacgggugaga

SEQ ID NO: 1018731 - RNA, 19 nt, Artificial Sequence
  Description of Artificial Sequence: Synthetic oligonucleotide
  Antisense strand to SEQ ID NO: 1018730
ucucacccguuuaaaggac

SEQ ID NO: 1018732 - RNA, 19 nt, Artificial Sequence
  Description of Artificial Sequence: Synthetic oligonucleotide
  Sense strand starting at position 3502 of SEQ ID NO: 914629
ccuuuaaacgggugagaaa

SEQ ID NO: 1018733 - RNA, 19 nt, Artificial Sequence
  Description of Artificial Sequence: Synthetic oligonucleotide
  Antisense strand to SEQ ID NO: 1018732
uuucucacccguuuaaagg

SEQ ID NO: 1018734 - RNA, 19 nt, Artificial Sequence
  Description of Artificial Sequence: Synthetic oligonucleotide
  Sense strand starting at position 3596 of SEQ ID NO: 914629
agcagagcuugcucuauaa

SEQ ID NO: 1018735 - RNA, 19 nt, Artificial Sequence
  Description of Artificial Sequence: Synthetic oligonucleotide
  Antisense strand to SEQ ID NO: 1018734
uuauagagcaagcucugcu

SEQ ID NO: 1018736 - RNA, 19 nt, Artificial Sequence
  Description of Artificial Sequence: Synthetic oligonucleotide
  Sense strand starting at position 3738 of SEQ ID NO: 914629
ggguguuugagaugaccca

SEQ ID NO: 1018737 - RNA, 19 nt, Artificial Sequence
  Description of Artificial Sequence: Synthetic oligonucleotide
  Antisense strand to SEQ ID NO: 1018736
ugggucaucucaaacaccc

SEQ ID NO: 1018738 - RNA, 19 nt, Artificial Sequence
  Description of Artificial Sequence: Synthetic oligonucleotide
  Sense strand starting at position 3942 of SEQ ID NO: 914629
aacggucauugagaggaau

SEQ ID NO: 1018739 - RNA, 19 nt, Artificial Sequence
  Description of Artificial Sequence: Synthetic oligonucleotide
  Antisense strand to SEQ ID NO: 1018738
auuccucucaaugaccguu

SEQ ID NO: 1018740 - RNA, 19 nt, Artificial Sequence
  Description of Artificial Sequence: Synthetic oligonucleotide
  Sense strand starting at position 251 of SEQ ID NO: 914630
gcaggaagccuuugcgaag

SEQ ID NO: 1018741 - RNA, 19 nt, Artificial Sequence
  Description of Artificial Sequence: Synthetic oligonucleotide
  Antisense strand to SEQ ID NO: 1018740
cuucgcaaaggcuuccugc

SEQ ID NO: 1018742 - RNA, 19 nt, Artificial Sequence
  Description of Artificial Sequence: Synthetic oligonucleotide
  Sense strand starting at position 366 of SEQ ID NO: 914630
gggaguggauuguuaccga

SEQ ID NO: 1018743 - RNA, 19 nt, Artificial Sequence
  Description of Artificial Sequence: Synthetic oligonucleotide
  Antisense strand to SEQ ID NO: 1018742
ucgguaacaauccacuccc

SEQ ID NO: 1018744 - RNA, 19 nt, Artificial Sequence
  Description of Artificial Sequence: Synthetic oligonucleotide
  Sense strand starting at position 369 of SEQ ID NO: 914630
aguggauuguuaccgacua

SEQ ID NO: 1018745 - RNA, 19 nt, Artificial Sequence
  Description of Artificial Sequence: Synthetic oligonucleotide
  Antisense strand to SEQ ID NO: 1018744
uagucgguaacaauccacu

SEQ ID NO: 1018746 - RNA, 19 nt, Artificial Sequence
  Description of Artificial Sequence: Synthetic oligonucleotide
  Sense strand starting at position 419 of SEQ ID NO: 914630
ugauacuauuugcauggau

SEQ ID NO: 1018747 - RNA, 19 nt, Artificial Sequence
  Description of Artificial Sequence: Synthetic oligonucleotide
  Antisense strand to SEQ ID NO: 1018746
auccaugcaaauaguauca

SEQ ID NO: 1018748 - RNA, 19 nt, Artificial Sequence
  Description of Artificial Sequence: Synthetic oligonucleotide
  Sense strand starting at position 450 of SEQ ID NO: 914630
gggaggauccugcgaggau

SEQ ID NO: 1018749 - RNA, 19 nt, Artificial Sequence
  Description of Artificial Sequence: Synthetic oligonucleotide
  Antisense strand to SEQ ID NO: 1018748
auccucgcaggauccuccc

SEQ ID NO: 1018750 - RNA, 19 nt, Artificial Sequence
  Description of Artificial Sequence: Synthetic oligonucleotide
  Sense strand starting at position 462 of SEQ ID NO: 914630
cgaggauucagcggaguga

SEQ ID NO: 1018751 - RNA, 19 nt, Artificial Sequence
  Description of Artificial Sequence: Synthetic oligonucleotide
  Antisense strand to SEQ ID NO: 1018750
ucacuccgcugaauccucg

SEQ ID NO: 1018752 - RNA, 19 nt, Artificial Sequence
  Description of Artificial Sequence: Synthetic oligonucleotide
  Sense strand starting at position 463 of SEQ ID NO: 914630
gaggauucagcggagugaa

SEQ ID NO: 1018753 - RNA, 19 nt, Artificial Sequence
  Description of Artificial Sequence: Synthetic oligonucleotide
  Antisense strand to SEQ ID NO: 1018752
uucacuccgcugaauccuc

SEQ ID NO: 1018754 - RNA, 19 nt, Artificial Sequence
  Description of Artificial Sequence: Synthetic oligonucleotide
  Sense strand starting at position 1098 of SEQ ID NO: 914630
ggucgagucgcuucaugca

SEQ ID NO: 1018755 - RNA, 19 nt, Artificial Sequence
  Description of Artificial Sequence: Synthetic oligonucleotide
  Antisense strand to SEQ ID NO: 1018754
ugcaugaagcgacucgacc

SEQ ID NO: 1018756 - RNA, 19 nt, Artificial Sequence
  Description of Artificial Sequence: Synthetic oligonucleotide
  Sense strand starting at position 1477 of SEQ ID NO: 914630
gguuccuugaugcagagaa

SEQ ID NO: 1018757 - RNA, 19 nt, Artificial Sequence
  Description of Artificial Sequence: Synthetic oligonucleotide
  Antisense strand to SEQ ID NO: 1018756
uucucugcaucaaggaacc

SEQ ID NO: 1018758 - RNA, 19 nt, Artificial Sequence
  Description of Artificial Sequence: Synthetic oligonucleotide
  Sense strand starting at position 1759 of SEQ ID NO: 914630
uuagcuguccgucaaggaa

SEQ ID NO: 1018759 - RNA, 19 nt, Artificial Sequence
  Description of Artificial Sequence: Synthetic oligonucleotide
  Antisense strand to SEQ ID NO: 1018758
uuccuugacggacagcuaa

SEQ ID NO: 1018760 - RNA, 19 nt, Artificial Sequence
  Description of Artificial Sequence: Synthetic oligonucleotide
  Sense strand starting at position 1805 of SEQ ID NO: 914630
gcgagugcccuggagcuua

SEQ ID NO: 1018761 - RNA, 19 nt, Artificial Sequence
  Description of Artificial Sequence: Synthetic oligonucleotide
  Antisense strand to SEQ ID NO: 1018760
uaagcuccagggcacucgc

SEQ ID NO: 1018762 - RNA, 19 nt, Artificial Sequence
  Description of Artificial Sequence: Synthetic oligonucleotide
  Sense strand starting at position 1906 of SEQ ID NO: 914630
gcagcaauuucgcuaauga

SEQ ID NO: 1018763 - RNA, 19 nt, Artificial Sequence
  Description of Artificial Sequence: Synthetic oligonucleotide
  Antisense strand to SEQ ID NO: 1018762
ucauuagcgaaauugcugc

SEQ ID NO: 1018764 - RNA, 19 nt, Artificial Sequence
  Description of Artificial Sequence: Synthetic oligonucleotide
  Sense strand starting at position 1910 of SEQ ID NO: 914630
caauuucgcuaaugaugga

SEQ ID NO: 1018765 - RNA, 19 nt, Artificial Sequence
  Description of Artificial Sequence: Synthetic oligonucleotide
  Antisense strand to SEQ ID NO: 1018764
uccaucauuagcgaaauug

SEQ ID NO: 1018766 - RNA, 19 nt, Artificial Sequence
  Description of Artificial Sequence: Synthetic oligonucleotide
  Sense strand starting at position 1930 of SEQ ID NO: 914630
uuauauuaccuacguagag

SEQ ID NO: 1018767 - RNA, 19 nt, Artificial Sequence
  Description of Artificial Sequence: Synthetic oligonucleotide
  Antisense strand to SEQ ID NO: 1018766
cucuacguagguaauauaa

SEQ ID NO: 1018768 - RNA, 19 nt, Artificial Sequence
  Description of Artificial Sequence: Synthetic oligonucleotide
  Sense strand starting at position 1931 of SEQ ID NO: 914630
uauauuaccuacguagaga

SEQ ID NO: 1018769 - RNA, 19 nt, Artificial Sequence
  Description of Artificial Sequence: Synthetic oligonucleotide
  Antisense strand to SEQ ID NO: 1018768
ucucuacguagguaauaua

SEQ ID NO: 1018770 - RNA, 19 nt, Artificial Sequence
  Description of Artificial Sequence: Synthetic oligonucleotide
  Sense strand starting at position 1990 of SEQ ID NO: 914630
caggaagacgcauguuaga

SEQ ID NO: 1018771 - RNA, 19 nt, Artificial Sequence
  Description of Artificial Sequence: Synthetic oligonucleotide
  Antisense strand to SEQ ID NO: 1018770
ucuaacaugcgucuuccug

SEQ ID NO: 1018772 - RNA, 19 nt, Artificial Sequence
  Description of Artificial Sequence: Synthetic oligonucleotide
  Sense strand starting at position 2144 of SEQ ID NO: 914630
ugaagucaggauuaugcau

SEQ ID NO: 1018773 - RNA, 19 nt, Artificial Sequence
  Description of Artificial Sequence: Synthetic oligonucleotide
  Antisense strand to SEQ ID NO: 1018772
augcauaauccugacuuca

SEQ ID NO: 1018774 - RNA, 19 nt, Artificial Sequence
  Description of Artificial Sequence: Synthetic oligonucleotide
  Sense strand starting at position 2151 of SEQ ID NO: 914630
aggauuaugcauuauccuu

SEQ ID NO: 1018775 - RNA, 19 nt, Artificial Sequence
  Description of Artificial Sequence: Synthetic oligonucleotide
  Antisense strand to SEQ ID NO: 1018774
aaggauaaugcauaauccu

SEQ ID NO: 1018776 - RNA, 19 nt, Artificial Sequence
  Description of Artificial Sequence: Synthetic oligonucleotide
  Sense strand starting at position 2159 of SEQ ID NO: 914630
gcauuauccuugucaaaga

SEQ ID NO: 1018777 - RNA, 19 nt, Artificial Sequence
  Description of Artificial Sequence: Synthetic oligonucleotide
  Antisense strand to SEQ ID NO: 1018776
ucuuugacaaggauaaugc

SEQ ID NO: 1018778 - RNA, 19 nt, Artificial Sequence
  Description of Artificial Sequence: Synthetic oligonucleotide
  Sense strand starting at position 2223 of SEQ ID NO: 914630
aaucgagucuuaucaagau

SEQ ID NO: 1018779 - RNA, 19 nt, Artificial Sequence
  Description of Artificial Sequence: Synthetic oligonucleotide
  Antisense strand to SEQ ID NO: 1018778
aucuugauaagacucgauu

SEQ ID NO: 1018780 - RNA, 19 nt, Artificial Sequence
  Description of Artificial Sequence: Synthetic oligonucleotide
  Sense strand starting at position 2245 of SEQ ID NO: 914630
aguuauaggaugcgggaaa

SEQ ID NO: 1018781 - RNA, 19 nt, Artificial Sequence
  Description of Artificial Sequence: Synthetic oligonucleotide
  Antisense strand to SEQ ID NO: 1018780
uuucccgcauccuauaacu

SEQ ID NO: 1018782 - RNA, 19 nt, Artificial Sequence
  Description of Artificial Sequence: Synthetic oligonucleotide
  Sense strand starting at position 2269 of SEQ ID NO: 914630
aauagauuauguguuagag

SEQ ID NO: 1018783 - RNA, 19 nt, Artificial Sequence
  Description of Artificial Sequence: Synthetic oligonucleotide
  Antisense strand to SEQ ID NO: 1018782
cucuaacacauaaucuauu

SEQ ID NO: 1018784 - RNA, 19 nt, Artificial Sequence
  Description of Artificial Sequence: Synthetic oligonucleotide
  Sense strand starting at position 2278 of SEQ ID NO: 914630
uguguuagagaaugggauu

SEQ ID NO: 1018785 - RNA, 19 nt, Artificial Sequence
  Description of Artificial Sequence: Synthetic oligonucleotide
  Antisense strand to SEQ ID NO: 1018784
aaucccauucucuaacaca

SEQ ID NO: 1018786 - RNA, 19 nt, Artificial Sequence
  Description of Artificial Sequence: Synthetic oligonucleotide
  Sense strand starting at position 2387 of SEQ ID NO: 914630
agcugucauuucucccauu

SEQ ID NO: 1018787 - RNA, 19 nt, Artificial Sequence
  Description of Artificial Sequence: Synthetic oligonucleotide
  Antisense strand to SEQ ID NO: 1018786
aaugggagaaaugacagcu

SEQ ID NO: 1018788 - RNA, 19 nt, Artificial Sequence
  Description of Artificial Sequence: Synthetic oligonucleotide
  Sense strand starting at position 2891 of SEQ ID NO: 914630
agaagugucucagugugaa

SEQ ID NO: 1018789 - RNA, 19 nt, Artificial Sequence
  Description of Artificial Sequence: Synthetic oligonucleotide
  Antisense strand to SEQ ID NO: 1018788
uucacacugagacacuucu

SEQ ID NO: 1018790 - RNA, 19 nt, Artificial Sequence
  Description of Artificial Sequence: Synthetic oligonucleotide
  Sense strand starting at position 2894 of SEQ ID NO: 914630
agugucucagugugaaaga

SEQ ID NO: 1018791 - RNA, 19 nt, Artificial Sequence
  Description of Artificial Sequence: Synthetic oligonucleotide
  Antisense strand to SEQ ID NO: 1018790
ucuuucacacugagacacu

SEQ ID NO: 1018792 - RNA, 19 nt, Artificial Sequence
  Description of Artificial Sequence: Synthetic oligonucleotide
  Sense strand starting at position 3050 of SEQ ID NO: 914630
ucuuauagucuugguaagu

SEQ ID NO: 1018793 - RNA, 19 nt, Artificial Sequence
  Description of Artificial Sequence: Synthetic oligonucleotide
  Antisense strand to SEQ ID NO: 1018792
acuuaccaagacuauaaga

SEQ ID NO: 1018794 - RNA, 19 nt, Artificial Sequence
  Description of Artificial Sequence: Synthetic oligonucleotide
  Sense strand starting at position 3051 of SEQ ID NO: 914630
cuuauagucuugguaagua

SEQ ID NO: 1018795 - RNA, 19 nt, Artificial Sequence
  Description of Artificial Sequence: Synthetic oligonucleotide
  Antisense strand to SEQ ID NO: 1018794
uacuuaccaagacuauaag

SEQ ID NO: 1018796 - RNA, 19 nt, Artificial Sequence
  Description of Artificial Sequence: Synthetic oligonucleotide
  Sense strand starting at position 3056 of SEQ ID NO: 914630
agucuugguaaguaugaau

SEQ ID NO: 1018797 - RNA, 19 nt, Artificial Sequence
  Description of Artificial Sequence: Synthetic oligonucleotide
  Antisense strand to SEQ ID NO: 1018796
auucauacuuaccaagacu

SEQ ID NO: 1018798 - RNA, 19 nt, Artificial Sequence
  Description of Artificial Sequence: Synthetic oligonucleotide
  Sense strand starting at position 3210 of SEQ ID NO: 914630
agcuguuugaaaggcgaau

SEQ ID NO: 1018799 - RNA, 19 nt, Artificial Sequence
  Description of Artificial Sequence: Synthetic oligonucleotide
  Antisense strand to SEQ ID NO: 1018798
auucgccuuucaaacagcu

SEQ ID NO: 1018800 - RNA, 19 nt, Artificial Sequence
  Description of Artificial Sequence: Synthetic oligonucleotide
  Sense strand starting at position 3278 of SEQ ID NO: 914630
uguaucuggucuucuugua

SEQ ID NO: 1018801 - RNA, 19 nt, Artificial Sequence
  Description of Artificial Sequence: Synthetic oligonucleotide
  Antisense strand to SEQ ID NO: 1018800
uacaagaagaccagauaca

SEQ ID NO: 1018802 - RNA, 19 nt, Artificial Sequence
  Description of Artificial Sequence: Synthetic oligonucleotide
  Sense strand starting at position 3292 of SEQ ID NO: 914630
uuguaucuuccauguuaaa

SEQ ID NO: 1018803 - RNA, 19 nt, Artificial Sequence
  Description of Artificial Sequence: Synthetic oligonucleotide
  Antisense strand to SEQ ID NO: 1018802
uuuaacauggaagauacaa

SEQ ID NO: 1018804 - RNA, 19 nt, Artificial Sequence
  Description of Artificial Sequence: Synthetic oligonucleotide
  Sense strand starting at position 3342 of SEQ ID NO: 914630
ucuuaugacaugugagaag

SEQ ID NO: 1018805 - RNA, 19 nt, Artificial Sequence
  Description of Artificial Sequence: Synthetic oligonucleotide
  Antisense strand to SEQ ID NO: 1018804
cuucucacaugucauaaga

SEQ ID NO: 1018806 - RNA, 19 nt, Artificial Sequence
  Description of Artificial Sequence: Synthetic oligonucleotide
  Sense strand starting at position 3353 of SEQ ID NO: 914630
gugagaagguuuguaugua

SEQ ID NO: 1018807 - RNA, 19 nt, Artificial Sequence
  Description of Artificial Sequence: Synthetic oligonucleotide
  Antisense strand to SEQ ID NO: 1018806
uacauacaaaccuucucac

SEQ ID NO: 1018808 - RNA, 19 nt, Artificial Sequence
  Description of Artificial Sequence: Synthetic oligonucleotide
  Sense strand starting at position 3357 of SEQ ID NO: 914630
gaagguuuguauguagucu

SEQ ID NO: 1018809 - RNA, 19 nt, Artificial Sequence
  Description of Artificial Sequence: Synthetic oligonucleotide
  Antisense strand to SEQ ID NO: 1018808
agacuacauacaaaccuuc

SEQ ID NO: 1018810 - RNA, 19 nt, Artificial Sequence
  Description of Artificial Sequence: Synthetic oligonucleotide
  Sense strand starting at position 3361 of SEQ ID NO: 914630
guuuguauguagucugauu

SEQ ID NO: 1018811 - RNA, 19 nt, Artificial Sequence
  Description of Artificial Sequence: Synthetic oligonucleotide
  Antisense strand to SEQ ID NO: 1018810
aaucagacuacauacaaac

SEQ ID NO: 1018812 - RNA, 19 nt, Artificial Sequence
  Description of Artificial Sequence: Synthetic oligonucleotide
  Sense strand starting at position 3692 of SEQ ID NO: 914630
uuuccauuccuugauaggu

SEQ ID NO: 1018813 - RNA, 19 nt, Artificial Sequence
  Description of Artificial Sequence: Synthetic oligonucleotide
  Antisense strand to SEQ ID NO: 1018812
accuaucaaggaauggaaa

SEQ ID NO: 1018814 - RNA, 19 nt, Artificial Sequence
  Description of Artificial Sequence: Synthetic oligonucleotide
  Sense strand starting at position 3780 of SEQ ID NO: 914630
ggaucaggaucaugaaaca

SEQ ID NO: 1018815 - RNA, 19 nt, Artificial Sequence
  Description of Artificial Sequence: Synthetic oligonucleotide
  Antisense strand to SEQ ID NO: 1018814
uguuucaugauccugaucc

SEQ ID NO: 1018816 - RNA, 19 nt, Artificial Sequence
  Description of Artificial Sequence: Synthetic oligonucleotide
  Sense strand starting at position 3872 of SEQ ID NO: 914630
uggcuaucaagagguagaa

SEQ ID NO: 1018817 - RNA, 19 nt, Artificial Sequence
  Description of Artificial Sequence: Synthetic oligonucleotide
  Antisense strand to SEQ ID NO: 1018816
uucuaccucuugauagcca

SEQ ID NO: 1018818 - RNA, 19 nt, Artificial Sequence
  Description of Artificial Sequence: Synthetic oligonucleotide
  Sense strand starting at position 3874 of SEQ ID NO: 914630
gcuaucaagagguagaagu

SEQ ID NO: 1018819 - RNA, 19 nt, Artificial Sequence
  Description of Artificial Sequence: Synthetic oligonucleotide
  Antisense strand to SEQ ID NO: 1018818
acuucuaccucuugauagc

SEQ ID NO: 1018820 - RNA, 19 nt, Artificial Sequence
  Description of Artificial Sequence: Synthetic oligonucleotide
  Sense strand starting at position 173 of SEQ ID NO: 914631
ucugcagaguccuuggcaa

SEQ ID NO: 1018821 - RNA, 19 nt, Artificial Sequence
  Description of Artificial Sequence: Synthetic oligonucleotide
  Antisense strand to SEQ ID NO: 1018820
uugccaaggacucugcaga

SEQ ID NO: 1018822 - RNA, 19 nt, Artificial Sequence
  Description of Artificial Sequence: Synthetic oligonucleotide
  Sense strand starting at position 175 of SEQ ID NO: 914631
ugcagaguccuuggcaaag

SEQ ID NO: 1018823 - RNA, 19 nt, Artificial Sequence
  Description of Artificial Sequence: Synthetic oligonucleotide
  Antisense strand to SEQ ID NO: 1018822
cuuugccaaggacucugca

SEQ ID NO: 1018824 - RNA, 19 nt, Artificial Sequence
  Description of Artificial Sequence: Synthetic oligonucleotide
  Sense strand starting at position 196 of SEQ ID NO: 914631
guugcugggaguuaugacu

SEQ ID NO: 1018825 - RNA, 19 nt, Artificial Sequence
  Description of Artificial Sequence: Synthetic oligonucleotide
  Antisense strand to SEQ ID NO: 1018824
agucauaacucccagcaac

SEQ ID NO: 1018826 - RNA, 19 nt, Artificial Sequence
  Description of Artificial Sequence: Synthetic oligonucleotide
  Sense strand starting at position 347 of SEQ ID NO: 914631
gagucaucuucucuacguc

SEQ ID NO: 1018827 - RNA, 19 nt, Artificial Sequence
  Description of Artificial Sequence: Synthetic oligonucleotide
  Antisense strand to SEQ ID NO: 1018826
gacguagagaagaugacuc

SEQ ID NO: 1018828 - RNA, 19 nt, Artificial Sequence
  Description of Artificial Sequence: Synthetic oligonucleotide
  Sense strand starting at position 473 of SEQ ID NO: 914631
gaaacucuucccgggucau

SEQ ID NO: 1018829 - RNA, 19 nt, Artificial Sequence
  Description of Artificial Sequence: Synthetic oligonucleotide
  Antisense strand to SEQ ID NO: 1018828
augacccgggaagaguuuc

SEQ ID NO: 1018830 - RNA, 19 nt, Artificial Sequence
  Description of Artificial Sequence: Synthetic oligonucleotide
  Sense strand starting at position 484 of SEQ ID NO: 914631
cgggucaucgauuaagcaa

SEQ ID NO: 1018831 - RNA, 19 nt, Artificial Sequence
  Description of Artificial Sequence: Synthetic oligonucleotide
  Antisense strand to SEQ ID NO: 1018830
uugcuuaaucgaugacccg

SEQ ID NO: 1018832 - RNA, 19 nt, Artificial Sequence
  Description of Artificial Sequence: Synthetic oligonucleotide
  Sense strand starting at position 646 of SEQ ID NO: 914631
gugacaacuugauucucau

SEQ ID NO: 1018833 - RNA, 19 nt, Artificial Sequence
  Description of Artificial Sequence: Synthetic oligonucleotide
  Antisense strand to SEQ ID NO: 1018832
augagaaucaaguugucac

SEQ ID NO: 1018834 - RNA, 19 nt, Artificial Sequence
  Description of Artificial Sequence: Synthetic oligonucleotide
  Sense strand starting at position 738 of SEQ ID NO: 914631
gacaguuucuccuuaggaa

SEQ ID NO: 1018835 - RNA, 19 nt, Artificial Sequence
  Description of Artificial Sequence: Synthetic oligonucleotide
  Antisense strand to SEQ ID NO: 1018834
uuccuaaggagaaacuguc

SEQ ID NO: 1018836 - RNA, 19 nt, Artificial Sequence
  Description of Artificial Sequence: Synthetic oligonucleotide
  Sense strand starting at position 739 of SEQ ID NO: 914631
acaguuucuccuuaggaau

SEQ ID NO: 1018837 - RNA, 19 nt, Artificial Sequence
  Description of Artificial Sequence: Synthetic oligonucleotide
  Antisense strand to SEQ ID NO: 1018836
auuccuaaggagaaacugu

SEQ ID NO: 1018838 - RNA, 19 nt, Artificial Sequence
  Description of Artificial Sequence: Synthetic oligonucleotide
  Sense strand starting at position 865 of SEQ ID NO: 914631
gcauguaguguguagcaga

SEQ ID NO: 1018839 - RNA, 19 nt, Artificial Sequence
  Description of Artificial Sequence: Synthetic oligonucleotide
  Antisense strand to SEQ ID NO: 1018838
ucugcuacacacuacaugc

SEQ ID NO: 1018840 - RNA, 19 nt, Artificial Sequence
  Description of Artificial Sequence: Synthetic oligonucleotide
  Sense strand starting at position 878 of SEQ ID NO: 914631
agcagaggcauucgccaau

SEQ ID NO: 1018841 - RNA, 19 nt, Artificial Sequence
  Description of Artificial Sequence: Synthetic oligonucleotide
  Antisense strand to SEQ ID NO: 1018840
auuggcgaaugccucugcu

SEQ ID NO: 1018842 - RNA, 19 nt, Artificial Sequence
  Description of Artificial Sequence: Synthetic oligonucleotide
  Sense strand starting at position 1160 of SEQ ID NO: 914631
gcaggaagccuuugcgaag

SEQ ID NO: 1018843 - RNA, 19 nt, Artificial Sequence
  Description of Artificial Sequence: Synthetic oligonucleotide
  Antisense strand to SEQ ID NO: 1018842
cuucgcaaaggcuuccugc

SEQ ID NO: 1018844 - RNA, 19 nt, Artificial Sequence
  Description of Artificial Sequence: Synthetic oligonucleotide
  Sense strand starting at position 1275 of SEQ ID NO: 914631
gggaguggauuguuaccga

SEQ ID NO: 1018845 - RNA, 19 nt, Artificial Sequence
  Description of Artificial Sequence: Synthetic oligonucleotide
  Antisense strand to SEQ ID NO: 1018844
ucgguaacaauccacuccc

SEQ ID NO: 1018846 - RNA, 19 nt, Artificial Sequence
  Description of Artificial Sequence: Synthetic oligonucleotide
  Sense strand starting at position 1278 of SEQ ID NO: 914631
aguggauuguuaccgacua

SEQ ID NO: 1018847 - RNA, 19 nt, Artificial Sequence
  Description of Artificial Sequence: Synthetic oligonucleotide
  Antisense strand to SEQ ID NO: 1018846
uagucgguaacaauccacu

SEQ ID NO: 1018848 - RNA, 19 nt, Artificial Sequence
  Description of Artificial Sequence: Synthetic oligonucleotide
  Sense strand starting at position 1328 of SEQ ID NO: 914631
ugauacuauuugcauggau

SEQ ID NO: 1018849 - RNA, 19 nt, Artificial Sequence
  Description of Artificial Sequence: Synthetic oligonucleotide
  Antisense strand to SEQ ID NO: 1018848
auccaugcaaauaguauca

SEQ ID NO: 1018850 - RNA, 19 nt, Artificial Sequence
  Description of Artificial Sequence: Synthetic oligonucleotide
  Sense strand starting at position 1359 of SEQ ID NO: 914631
gggaggauccugcgaggau

SEQ ID NO: 1018851 - RNA, 19 nt, Artificial Sequence
  Description of Artificial Sequence: Synthetic oligonucleotide
  Antisense strand to SEQ ID NO: 1018850
auccucgcaggauccuccc

SEQ ID NO: 1018852 - RNA, 19 nt, Artificial Sequence
  Description of Artificial Sequence: Synthetic oligonucleotide
  Sense strand starting at position 1371 of SEQ ID NO: 914631
cgaggauucagcggaguga

SEQ ID NO: 1018853 - RNA, 19 nt, Artificial Sequence
  Description of Artificial Sequence: Synthetic oligonucleotide
  Antisense strand to SEQ ID NO: 1018852
ucacuccgcugaauccucg

SEQ ID NO: 1018854 - RNA, 19 nt, Artificial Sequence
  Description of Artificial Sequence: Synthetic oligonucleotide
  Sense strand starting at position 1372 of SEQ ID NO: 914631
gaggauucagcggagugaa

SEQ ID NO: 1018855 - RNA, 19 nt, Artificial Sequence
  Description of Artificial Sequence: Synthetic oligonucleotide
  Antisense strand to SEQ ID NO: 1018854
uucacuccgcugaauccuc

SEQ ID NO: 1018856 - RNA, 19 nt, Artificial Sequence
  Description of Artificial Sequence: Synthetic oligonucleotide
  Sense strand starting at position 2007 of SEQ ID NO: 914631
ggucgagucgcuucaugca

SEQ ID NO: 1018857 - RNA, 19 nt, Artificial Sequence
  Description of Artificial Sequence: Synthetic oligonucleotide
  Antisense strand to SEQ ID NO: 1018856
ugcaugaagcgacucgacc

SEQ ID NO: 1018858 - RNA, 19 nt, Artificial Sequence
  Description of Artificial Sequence: Synthetic oligonucleotide
  Sense strand starting at position 2386 of SEQ ID NO: 914631
gguuccuugaugcagagaa

SEQ ID NO: 1018859 - RNA, 19 nt, Artificial Sequence
  Description of Artificial Sequence: Synthetic oligonucleotide
  Antisense strand to SEQ ID NO: 1018858
uucucugcaucaaggaacc

SEQ ID NO: 1018860 - RNA, 19 nt, Artificial Sequence
  Description of Artificial Sequence: Synthetic oligonucleotide
  Sense strand starting at position 2668 of SEQ ID NO: 914631
uuagcuguccgucaaggaa

SEQ ID NO: 1018861 - RNA, 19 nt, Artificial Sequence
  Description of Artificial Sequence: Synthetic oligonucleotide
  Antisense strand to SEQ ID NO: 1018860
uuccuugacggacagcuaa

SEQ ID NO: 1018862 - RNA, 19 nt, Artificial Sequence
  Description of Artificial Sequence: Synthetic oligonucleotide
  Sense strand starting at position 2714 of SEQ ID NO: 914631
gcgagugcccuggagcuua

SEQ ID NO: 1018863 - RNA, 19 nt, Artificial Sequence
  Description of Artificial Sequence: Synthetic oligonucleotide
  Antisense strand to SEQ ID NO: 1018862
uaagcuccagggcacucgc

SEQ ID NO: 1018864 - RNA, 19 nt, Artificial Sequence
  Description of Artificial Sequence: Synthetic oligonucleotide
  Sense strand starting at position 2815 of SEQ ID NO: 914631
gcagcaauuucgcuaauga

SEQ ID NO: 1018865 - RNA, 19 nt, Artificial Sequence
  Description of Artificial Sequence: Synthetic oligonucleotide
  Antisense strand to SEQ ID NO: 1018864
ucauuagcgaaauugcugc

SEQ ID NO: 1018866 - RNA, 19 nt, Artificial Sequence
  Description of Artificial Sequence: Synthetic oligonucleotide
  Sense strand starting at position 2819 of SEQ ID NO: 914631
caauuucgcuaaugaugga

SEQ ID NO: 1018867 - RNA, 19 nt, Artificial Sequence
  Description of Artificial Sequence: Synthetic oligonucleotide
  Antisense strand to SEQ ID NO: 1018866
uccaucauuagcgaaauug

SEQ ID NO: 1018868 - RNA, 19 nt, Artificial Sequence
  Description of Artificial Sequence: Synthetic oligonucleotide
  Sense strand starting at position 2839 of SEQ ID NO: 914631
uuauauuaccuacguagag

SEQ ID NO: 1018869 - RNA, 19 nt, Artificial Sequence
  Description of Artificial Sequence: Synthetic oligonucleotide
  Antisense strand to SEQ ID NO: 1018868
cucuacguagguaauauaa

SEQ ID NO: 1018870 - RNA, 19 nt, Artificial Sequence
  Description of Artificial Sequence: Synthetic oligonucleotide
  Sense strand starting at position 2840 of SEQ ID NO: 914631
uauauuaccuacguagaga

SEQ ID NO: 1018871 - RNA, 19 nt, Artificial Sequence
  Description of Artificial Sequence: Synthetic oligonucleotide
  Antisense strand to SEQ ID NO: 1018870
ucucuacguagguaauaua

SEQ ID NO: 1018872 - RNA, 19 nt, Artificial Sequence
  Description of Artificial Sequence: Synthetic oligonucleotide
  Sense strand starting at position 2899 of SEQ ID NO: 914631
caggaagacgcauguuaga

SEQ ID NO: 1018873 - RNA, 19 nt, Artificial Sequence
  Description of Artificial Sequence: Synthetic oligonucleotide
  Antisense strand to SEQ ID NO: 1018872
ucuaacaugcgucuuccug

SEQ ID NO: 1018874 - RNA, 19 nt, Artificial Sequence
  Description of Artificial Sequence: Synthetic oligonucleotide
  Sense strand starting at position 3053 of SEQ ID NO: 914631
ugaagucaggauuaugcau

SEQ ID NO: 1018875 - RNA, 19 nt, Artificial Sequence
  Description of Artificial Sequence: Synthetic oligonucleotide
  Antisense strand to SEQ ID NO: 1018874
augcauaauccugacuuca

SEQ ID NO: 1018876 - RNA, 19 nt, Artificial Sequence
  Description of Artificial Sequence: Synthetic oligonucleotide
  Sense strand starting at position 3060 of SEQ ID NO: 914631
aggauuaugcauuauccuu

SEQ ID NO: 1018877 - RNA, 19 nt, Artificial Sequence
  Description of Artificial Sequence: Synthetic oligonucleotide
  Antisense strand to SEQ ID NO: 1018876
aaggauaaugcauaauccu

SEQ ID NO: 1018878 - RNA, 19 nt, Artificial Sequence
  Description of Artificial Sequence: Synthetic oligonucleotide
  Sense strand starting at position 3068 of SEQ ID NO: 914631
gcauuauccuugucaaaga

SEQ ID NO: 1018879 - RNA, 19 nt, Artificial Sequence
  Description of Artificial Sequence: Synthetic oligonucleotide
  Antisense strand to SEQ ID NO: 1018878
ucuuugacaaggauaaugc

SEQ ID NO: 1018880 - RNA, 19 nt, Artificial Sequence
  Description of Artificial Sequence: Synthetic oligonucleotide
  Sense strand starting at position 3132 of SEQ ID NO: 914631
aaucgagucuuaucaagau

SEQ ID NO: 1018881 - RNA, 19 nt, Artificial Sequence
  Description of Artificial Sequence: Synthetic oligonucleotide
  Antisense strand to SEQ ID NO: 1018880
aucuugauaagacucgauu

SEQ ID NO: 1018882 - RNA, 19 nt, Artificial Sequence
  Description of Artificial Sequence: Synthetic oligonucleotide
  Sense strand starting at position 3154 of SEQ ID NO: 914631
aguuauaggaugcgggaaa

SEQ ID NO: 1018883 - RNA, 19 nt, Artificial Sequence
  Description of Artificial Sequence: Synthetic oligonucleotide
  Antisense strand to SEQ ID NO: 1018882
uuucccgcauccuauaacu

SEQ ID NO: 1018884 - RNA, 19 nt, Artificial Sequence
  Description of Artificial Sequence: Synthetic oligonucleotide
  Sense strand starting at position 3178 of SEQ ID NO: 914631
aauagauuauguguuagag

SEQ ID NO: 1018885 - RNA, 19 nt, Artificial Sequence
  Description of Artificial Sequence: Synthetic oligonucleotide
  Antisense strand to SEQ ID NO: 1018884
cucuaacacauaaucuauu

SEQ ID NO: 1018886 - RNA, 19 nt, Artificial Sequence
  Description of Artificial Sequence: Synthetic oligonucleotide
  Sense strand starting at position 3187 of SEQ ID NO: 914631
uguguuagagaaugggauu

SEQ ID NO: 1018887 - RNA, 19 nt, Artificial Sequence
  Description of Artificial Sequence: Synthetic oligonucleotide
  Antisense strand to SEQ ID NO: 1018886
aaucccauucucuaacaca

SEQ ID NO: 1018888 - RNA, 19 nt, Artificial Sequence
  Description of Artificial Sequence: Synthetic oligonucleotide
  Sense strand starting at position 3296 of SEQ ID NO: 914631
agcugucauuucucccauu

SEQ ID NO: 1018889 - RNA, 19 nt, Artificial Sequence
  Description of Artificial Sequence: Synthetic oligonucleotide
  Antisense strand to SEQ ID NO: 1018888
aaugggagaaaugacagcu

SEQ ID NO: 1018890 - RNA, 19 nt, Artificial Sequence
  Description of Artificial Sequence: Synthetic oligonucleotide
  Sense strand starting at position 3800 of SEQ ID NO: 914631
agaagugucucagugugaa

SEQ ID NO: 1018891 - RNA, 19 nt, Artificial Sequence
  Description of Artificial Sequence: Synthetic oligonucleotide
  Antisense strand to SEQ ID NO: 1018890
uucacacugagacacuucu

SEQ ID NO: 1018892 - RNA, 19 nt, Artificial Sequence
  Description of Artificial Sequence: Synthetic oligonucleotide
  Sense strand starting at position 3803 of SEQ ID NO: 914631
agugucucagugugaaaga

SEQ ID NO: 1018893 - RNA, 19 nt, Artificial Sequence
  Description of Artificial Sequence: Synthetic oligonucleotide
  Antisense strand to SEQ ID NO: 1018892
ucuuucacacugagacacu

SEQ ID NO: 1018894 - RNA, 19 nt, Artificial Sequence
  Description of Artificial Sequence: Synthetic oligonucleotide
  Sense strand starting at position 3959 of SEQ ID NO: 914631
ucuuauagucuugguaagu

SEQ ID NO: 1018895 - RNA, 19 nt, Artificial Sequence
  Description of Artificial Sequence: Synthetic oligonucleotide
  Antisense strand to SEQ ID NO: 1018894
acuuaccaagacuauaaga

SEQ ID NO: 1018896 - RNA, 19 nt, Artificial Sequence
  Description of Artificial Sequence: Synthetic oligonucleotide
  Sense strand starting at position 3960 of SEQ ID NO: 914631
cuuauagucuugguaagua

SEQ ID NO: 1018897 - RNA, 19 nt, Artificial Sequence
  Description of Artificial Sequence: Synthetic oligonucleotide
  Antisense strand to SEQ ID NO: 1018896
uacuuaccaagacuauaag

SEQ ID NO: 1018898 - RNA, 19 nt, Artificial Sequence
  Description of Artificial Sequence: Synthetic oligonucleotide
  Sense strand starting at position 3965 of SEQ ID NO: 914631
agucuugguaaguaugaau

SEQ ID NO: 1018899 - RNA, 19 nt, Artificial Sequence
  Description of Artificial Sequence: Synthetic oligonucleotide
  Antisense strand to SEQ ID NO: 1018898
auucauacuuaccaagacu

SEQ ID NO: 1018900 - RNA, 19 nt, Artificial Sequence
  Description of Artificial Sequence: Synthetic oligonucleotide
  Sense strand starting at position 267 of SEQ ID NO: 914632
gucucagagccggacauau

SEQ ID NO: 1018901 - RNA, 19 nt, Artificial Sequence
  Description of Artificial Sequence: Synthetic oligonucleotide
  Antisense strand to SEQ ID NO: 1018900
auauguccggcucugagac

SEQ ID NO: 1018902 - RNA, 19 nt, Artificial Sequence
  Description of Artificial Sequence: Synthetic oligonucleotide
  Sense strand starting at position 420 of SEQ ID NO: 914632
ugcaguucucauggccaga

SEQ ID NO: 1018903 - RNA, 19 nt, Artificial Sequence
  Description of Artificial Sequence: Synthetic oligonucleotide
  Antisense strand to SEQ ID NO: 1018902
ucuggccaugagaacugca

SEQ ID NO: 1018904 - RNA, 19 nt, Artificial Sequence
  Description of Artificial Sequence: Synthetic oligonucleotide
  Sense strand starting at position 422 of SEQ ID NO: 914632
caguucucauggccagagu

SEQ ID NO: 1018905 - RNA, 19 nt, Artificial Sequence
  Description of Artificial Sequence: Synthetic oligonucleotide
  Antisense strand to SEQ ID NO: 1018904
acucuggccaugagaacug

SEQ ID NO: 1018906 - RNA, 19 nt, Artificial Sequence
  Description of Artificial Sequence: Synthetic oligonucleotide
  Sense strand starting at position 480 of SEQ ID NO: 914632
ugccuucugcaagaaguga

SEQ ID NO: 1018907 - RNA, 19 nt, Artificial Sequence
  Description of Artificial Sequence: Synthetic oligonucleotide
  Antisense strand to SEQ ID NO: 1018906
ucacuucuugcagaaggca

SEQ ID NO: 1018908 - RNA, 19 nt, Artificial Sequence
  Description of Artificial Sequence: Synthetic oligonucleotide
  Sense strand starting at position 645 of SEQ ID NO: 914632
augggacuuuauucccaga

SEQ ID NO: 1018909 - RNA, 19 nt, Artificial Sequence
  Description of Artificial Sequence: Synthetic oligonucleotide
  Antisense strand to SEQ ID NO: 1018908
ucugggaauaaagucccau

SEQ ID NO: 1018910 - RNA, 19 nt, Artificial Sequence
  Description of Artificial Sequence: Synthetic oligonucleotide
  Sense strand starting at position 648 of SEQ ID NO: 914632
ggacuuuauucccagaagc

SEQ ID NO: 1018911 - RNA, 19 nt, Artificial Sequence
  Description of Artificial Sequence: Synthetic oligonucleotide
  Antisense strand to SEQ ID NO: 1018910
gcuucugggaauaaagucc

SEQ ID NO: 1018912 - RNA, 19 nt, Artificial Sequence
  Description of Artificial Sequence: Synthetic oligonucleotide
  Sense strand starting at position 810 of SEQ ID NO: 914632
agugcuuauuagcagugaa

SEQ ID NO: 1018913 - RNA, 19 nt, Artificial Sequence
  Description of Artificial Sequence: Synthetic oligonucleotide
  Antisense strand to SEQ ID NO: 1018912
uucacugcuaauaagcacu

SEQ ID NO: 1018914 - RNA, 19 nt, Artificial Sequence
  Description of Artificial Sequence: Synthetic oligonucleotide
  Sense strand starting at position 1176 of SEQ ID NO: 914632
gaggcagauucucccagaa

SEQ ID NO: 1018915 - RNA, 19 nt, Artificial Sequence
  Description of Artificial Sequence: Synthetic oligonucleotide
  Antisense strand to SEQ ID NO: 1018914
uucugggagaaucugccuc

SEQ ID NO: 1018916 - RNA, 19 nt, Artificial Sequence
  Description of Artificial Sequence: Synthetic oligonucleotide
  Sense strand starting at position 1178 of SEQ ID NO: 914632
ggcagauucucccagaagg

SEQ ID NO: 1018917 - RNA, 19 nt, Artificial Sequence
  Description of Artificial Sequence: Synthetic oligonucleotide
  Antisense strand to SEQ ID NO: 1018916
ccuucugggagaaucugcc

SEQ ID NO: 1018918 - RNA, 19 nt, Artificial Sequence
  Description of Artificial Sequence: Synthetic oligonucleotide
  Sense strand starting at position 1241 of SEQ ID NO: 914632
aggccagacuauuagguau

SEQ ID NO: 1018919 - RNA, 19 nt, Artificial Sequence
  Description of Artificial Sequence: Synthetic oligonucleotide
  Antisense strand to SEQ ID NO: 1018918
auaccuaauagucuggccu

SEQ ID NO: 1018920 - RNA, 19 nt, Artificial Sequence
  Description of Artificial Sequence: Synthetic oligonucleotide
  Sense strand starting at position 1663 of SEQ ID NO: 914632
ccugguggguccuggauuu

SEQ ID NO: 1018921 - RNA, 19 nt, Artificial Sequence
  Description of Artificial Sequence: Synthetic oligonucleotide
  Antisense strand to SEQ ID NO: 1018920
aaauccaggacccaccagg

SEQ ID NO: 1018922 - RNA, 19 nt, Artificial Sequence
  Description of Artificial Sequence: Synthetic oligonucleotide
  Sense strand starting at position 3135 of SEQ ID NO: 914632
ggaagaacgcacggguaau

SEQ ID NO: 1018923 - RNA, 19 nt, Artificial Sequence
  Description of Artificial Sequence: Synthetic oligonucleotide
  Antisense strand to SEQ ID NO: 1018922
auuacccgugcguucuucc

SEQ ID NO: 1018924 - RNA, 19 nt, Artificial Sequence
  Description of Artificial Sequence: Synthetic oligonucleotide
  Sense strand starting at position 3136 of SEQ ID NO: 914632
gaagaacgcacggguaauu

SEQ ID NO: 1018925 - RNA, 19 nt, Artificial Sequence
  Description of Artificial Sequence: Synthetic oligonucleotide
  Antisense strand to SEQ ID NO: 1018924
aauuacccgugcguucuuc

SEQ ID NO: 1018926 - RNA, 19 nt, Artificial Sequence
  Description of Artificial Sequence: Synthetic oligonucleotide
  Sense strand starting at position 3224 of SEQ ID NO: 914632
ccucgcuguccuggaggaa

SEQ ID NO: 1018927 - RNA, 19 nt, Artificial Sequence
  Description of Artificial Sequence: Synthetic oligonucleotide
  Antisense strand to SEQ ID NO: 1018926
uuccuccaggacagcgagg

SEQ ID NO: 1018928 - RNA, 19 nt, Artificial Sequence
  Description of Artificial Sequence: Synthetic oligonucleotide
  Sense strand starting at position 3269 of SEQ ID NO: 914632
cugggagccuuugaaagua

SEQ ID NO: 1018929 - RNA, 19 nt, Artificial Sequence
  Description of Artificial Sequence: Synthetic oligonucleotide
  Antisense strand to SEQ ID NO: 1018928
uacuuucaaaggcucccag

SEQ ID NO: 1018930 - RNA, 19 nt, Artificial Sequence
  Description of Artificial Sequence: Synthetic oligonucleotide
  Sense strand starting at position 3658 of SEQ ID NO: 914632
uacaccguuggcgauuaau

SEQ ID NO: 1018931 - RNA, 19 nt, Artificial Sequence
  Description of Artificial Sequence: Synthetic oligonucleotide
  Antisense strand to SEQ ID NO: 1018930
auuaaucgccaacggugua

SEQ ID NO: 1018932 - RNA, 19 nt, Artificial Sequence
  Description of Artificial Sequence: Synthetic oligonucleotide
  Sense strand starting at position 3661 of SEQ ID NO: 914632
accguuggcgauuaauaag

SEQ ID NO: 1018933 - RNA, 19 nt, Artificial Sequence
  Description of Artificial Sequence: Synthetic oligonucleotide
  Antisense strand to SEQ ID NO: 1018932
cuuauuaaucgccaacggu

SEQ ID NO: 1018934 - RNA, 19 nt, Artificial Sequence
  Description of Artificial Sequence: Synthetic oligonucleotide
  Sense strand starting at position 3807 of SEQ ID NO: 914632
gggucugucccggaaggga

SEQ ID NO: 1018935 - RNA, 19 nt, Artificial Sequence
  Description of Artificial Sequence: Synthetic oligonucleotide
  Antisense strand to SEQ ID NO: 1018934
ucccuuccgggacagaccc

SEQ ID NO: 1018936 - RNA, 19 nt, Artificial Sequence
  Description of Artificial Sequence: Synthetic oligonucleotide
  Sense strand starting at position 48 of SEQ ID NO: 914633
uuacaaugucguuauggcu

SEQ ID NO: 1018937 - RNA, 19 nt, Artificial Sequence
  Description of Artificial Sequence: Synthetic oligonucleotide
  Antisense strand to SEQ ID NO: 1018936
agccauaacgacauuguaa

SEQ ID NO: 1018938 - RNA, 19 nt, Artificial Sequence
  Description of Artificial Sequence: Synthetic oligonucleotide
  Sense strand starting at position 54 of SEQ ID NO: 914633
ugucguuauggcuauuaaa

SEQ ID NO: 1018939 - RNA, 19 nt, Artificial Sequence
  Description of Artificial Sequence: Synthetic oligonucleotide
  Antisense strand to SEQ ID NO: 1018938
uuuaauagccauaacgaca

SEQ ID NO: 1018940 - RNA, 19 nt, Artificial Sequence
  Description of Artificial Sequence: Synthetic oligonucleotide
  Sense strand starting at position 134 of SEQ ID NO: 914633
guuagcuaugauuauccau

SEQ ID NO: 1018941 - RNA, 19 nt, Artificial Sequence
  Description of Artificial Sequence: Synthetic oligonucleotide
  Antisense strand to SEQ ID NO: 1018940
auggauaaucauagcuaac

SEQ ID NO: 1018942 - RNA, 19 nt, Artificial Sequence
  Description of Artificial Sequence: Synthetic oligonucleotide
  Sense strand starting at position 172 of SEQ ID NO: 914633
acccaucaugccuggcaaa

SEQ ID NO: 1018943 - RNA, 19 nt, Artificial Sequence
  Description of Artificial Sequence: Synthetic oligonucleotide
  Antisense strand to SEQ ID NO: 1018942
uuugccaggcaugaugggu

SEQ ID NO: 1018944 - RNA, 19 nt, Artificial Sequence
  Description of Artificial Sequence: Synthetic oligonucleotide
  Sense strand starting at position 261 of SEQ ID NO: 914633
uagugaauagggugaauga

SEQ ID NO: 1018945 - RNA, 19 nt, Artificial Sequence
  Description of Artificial Sequence: Synthetic oligonucleotide
  Antisense strand to SEQ ID NO: 1018944
ucauucacccuauucacua

SEQ ID NO: 1018946 - RNA, 19 nt, Artificial Sequence
  Description of Artificial Sequence: Synthetic oligonucleotide
  Sense strand starting at position 564 of SEQ ID NO: 914633
ggguaauacgagcgaaacu

SEQ ID NO: 1018947 - RNA, 19 nt, Artificial Sequence
  Description of Artificial Sequence: Synthetic oligonucleotide
  Antisense strand to SEQ ID NO: 1018946
aguuucgcucguauuaccc

SEQ ID NO: 1018948 - RNA, 19 nt, Artificial Sequence
  Description of Artificial Sequence: Synthetic oligonucleotide
  Sense strand starting at position 644 of SEQ ID NO: 914633
cugcuagaccuagggauaa

SEQ ID NO: 1018949 - RNA, 19 nt, Artificial Sequence
  Description of Artificial Sequence: Synthetic oligonucleotide
  Antisense strand to SEQ ID NO: 1018948
uuaucccuaggucuagcag

SEQ ID NO: 1018950 - RNA, 19 nt, Artificial Sequence
  Description of Artificial Sequence: Synthetic oligonucleotide
  Sense strand starting at position 836 of SEQ ID NO: 914633
gagggagcagugcaauuaa

SEQ ID NO: 1018951 - RNA, 19 nt, Artificial Sequence
  Description of Artificial Sequence: Synthetic oligonucleotide
  Antisense strand to SEQ ID NO: 1018950
uuaauugcacugcucccuc

SEQ ID NO: 1018952 - RNA, 19 nt, Artificial Sequence
  Description of Artificial Sequence: Synthetic oligonucleotide
  Sense strand starting at position 950 of SEQ ID NO: 914633
ucccuugggcaauguuaaa

SEQ ID NO: 1018953 - RNA, 19 nt, Artificial Sequence
  Description of Artificial Sequence: Synthetic oligonucleotide
  Antisense strand to SEQ ID NO: 1018952
uuuaacauugcccaaggga

SEQ ID NO: 1018954 - RNA, 19 nt, Artificial Sequence
  Description of Artificial Sequence: Synthetic oligonucleotide
  Sense strand starting at position 1373 of SEQ ID NO: 914633
gaacgaaacuccguauaaa

SEQ ID NO: 1018955 - RNA, 19 nt, Artificial Sequence
  Description of Artificial Sequence: Synthetic oligonucleotide
  Antisense strand to SEQ ID NO: 1018954
uuuauacggaguuucguuc

SEQ ID NO: 1018956 - RNA, 19 nt, Artificial Sequence
  Description of Artificial Sequence: Synthetic oligonucleotide
  Sense strand starting at position 1464 of SEQ ID NO: 914633
gaugcaaagcuuggaaacu

SEQ ID NO: 1018957 - RNA, 19 nt, Artificial Sequence
  Description of Artificial Sequence: Synthetic oligonucleotide
  Antisense strand to SEQ ID NO: 1018956
aguuuccaagcuuugcauc

SEQ ID NO: 1018958 - RNA, 19 nt, Artificial Sequence
  Description of Artificial Sequence: Synthetic oligonucleotide
  Sense strand starting at position 1556 of SEQ ID NO: 914633
aaaggaucugguugguaaa

SEQ ID NO: 1018959 - RNA, 19 nt, Artificial Sequence
  Description of Artificial Sequence: Synthetic oligonucleotide
  Antisense strand to SEQ ID NO: 1018958
uuuaccaaccagauccuuu

SEQ ID NO: 1018960 - RNA, 19 nt, Artificial Sequence
  Description of Artificial Sequence: Synthetic oligonucleotide
  Sense strand starting at position 2332 of SEQ ID NO: 914633
agguacacaucuguuaaga

SEQ ID NO: 1018961 - RNA, 19 nt, Artificial Sequence
  Description of Artificial Sequence: Synthetic oligonucleotide
  Antisense strand to SEQ ID NO: 1018960
ucuuaacagauguguaccu

SEQ ID NO: 1018962 - RNA, 19 nt, Artificial Sequence
  Description of Artificial Sequence: Synthetic oligonucleotide
  Sense strand starting at position 2743 of SEQ ID NO: 914633
uccgaacauucgucaaaca

SEQ ID NO: 1018963 - RNA, 19 nt, Artificial Sequence
  Description of Artificial Sequence: Synthetic oligonucleotide
  Antisense strand to SEQ ID NO: 1018962
uguuugacgaauguucgga

SEQ ID NO: 1018964 - RNA, 19 nt, Artificial Sequence
  Description of Artificial Sequence: Synthetic oligonucleotide
  Sense strand starting at position 2840 of SEQ ID NO: 914633
uggcaagaacuguaauuac

SEQ ID NO: 1018965 - RNA, 19 nt, Artificial Sequence
  Description of Artificial Sequence: Synthetic oligonucleotide
  Antisense strand to SEQ ID NO: 1018964
guaauuacaguucuugcca

SEQ ID NO: 1018966 - RNA, 19 nt, Artificial Sequence
  Description of Artificial Sequence: Synthetic oligonucleotide
  Sense strand starting at position 3080 of SEQ ID NO: 914633
uuuauuugcugagcaacuu

SEQ ID NO: 1018967 - RNA, 19 nt, Artificial Sequence
  Description of Artificial Sequence: Synthetic oligonucleotide
  Antisense strand to SEQ ID NO: 1018966
aaguugcucagcaaauaaa

SEQ ID NO: 1018968 - RNA, 19 nt, Artificial Sequence
  Description of Artificial Sequence: Synthetic oligonucleotide
  Sense strand starting at position 3126 of SEQ ID NO: 914633
gcugaacugcucuaaauua

SEQ ID NO: 1018969 - RNA, 19 nt, Artificial Sequence
  Description of Artificial Sequence: Synthetic oligonucleotide
  Antisense strand to SEQ ID NO: 1018968
uaauuuagagcaguucagc

SEQ ID NO: 1018970 - RNA, 19 nt, Artificial Sequence
  Description of Artificial Sequence: Synthetic oligonucleotide
  Sense strand starting at position 3281 of SEQ ID NO: 914633
ccaagaugacuguguagcu

SEQ ID NO: 1018971 - RNA, 19 nt, Artificial Sequence
  Description of Artificial Sequence: Synthetic oligonucleotide
  Antisense strand to SEQ ID NO: 1018970
agcuacacagucaucuugg

SEQ ID NO: 1018972 - RNA, 19 nt, Artificial Sequence
  Description of Artificial Sequence: Synthetic oligonucleotide
  Sense strand starting at position 3282 of SEQ ID NO: 914633
caagaugacuguguagcua

SEQ ID NO: 1018973 - RNA, 19 nt, Artificial Sequence
  Description of Artificial Sequence: Synthetic oligonucleotide
  Antisense strand to SEQ ID NO: 1018972
uagcuacacagucaucuug

SEQ ID NO: 1018974 - RNA, 19 nt, Artificial Sequence
  Description of Artificial Sequence: Synthetic oligonucleotide
  Sense strand starting at position 3286 of SEQ ID NO: 914633
augacuguguagcuaauaa

SEQ ID NO: 1018975 - RNA, 19 nt, Artificial Sequence
  Description of Artificial Sequence: Synthetic oligonucleotide
  Antisense strand to SEQ ID NO: 1018974
uuauuagcuacacagucau

SEQ ID NO: 1018976 - RNA, 19 nt, Artificial Sequence
  Description of Artificial Sequence: Synthetic oligonucleotide
  Sense strand starting at position 3320 of SEQ ID NO: 914633
caaagugaccacuaugguu

SEQ ID NO: 1018977 - RNA, 19 nt, Artificial Sequence
  Description of Artificial Sequence: Synthetic oligonucleotide
  Antisense strand to SEQ ID NO: 1018976
aaccauaguggucacuuug

SEQ ID NO: 1018978 - RNA, 19 nt, Artificial Sequence
  Description of Artificial Sequence: Synthetic oligonucleotide
  Sense strand starting at position 3325 of SEQ ID NO: 914633
ugaccacuaugguuacaga

SEQ ID NO: 1018979 - RNA, 19 nt, Artificial Sequence
  Description of Artificial Sequence: Synthetic oligonucleotide
  Antisense strand to SEQ ID NO: 1018978
ucuguaaccauagugguca

SEQ ID NO: 1018980 - RNA, 19 nt, Artificial Sequence
  Description of Artificial Sequence: Synthetic oligonucleotide
  Sense strand starting at position 3355 of SEQ ID NO: 914633
ugcaaugagcauuaucacu

SEQ ID NO: 1018981 - RNA, 19 nt, Artificial Sequence
  Description of Artificial Sequence: Synthetic oligonucleotide
  Antisense strand to SEQ ID NO: 1018980
agugauaaugcucauugca

SEQ ID NO: 1018982 - RNA, 19 nt, Artificial Sequence
  Description of Artificial Sequence: Synthetic oligonucleotide
  Sense strand starting at position 3387 of SEQ ID NO: 914633
ucaggaaagucuccauuac

SEQ ID NO: 1018983 - RNA, 19 nt, Artificial Sequence
  Description of Artificial Sequence: Synthetic oligonucleotide
  Antisense strand to SEQ ID NO: 1018982
guaauggagacuuuccuga

SEQ ID NO: 1018984 - RNA, 19 nt, Artificial Sequence
  Description of Artificial Sequence: Synthetic oligonucleotide
  Sense strand starting at position 3415 of SEQ ID NO: 914633
cucgguuuggugaguuguu

SEQ ID NO: 1018985 - RNA, 19 nt, Artificial Sequence
  Description of Artificial Sequence: Synthetic oligonucleotide
  Antisense strand to SEQ ID NO: 1018984
aacaacucaccaaaccgag

SEQ ID NO: 1018986 - RNA, 19 nt, Artificial Sequence
  Description of Artificial Sequence: Synthetic oligonucleotide
  Sense strand starting at position 3436 of SEQ ID NO: 914633
gguggaaauguaugaaaug

SEQ ID NO: 1018987 - RNA, 19 nt, Artificial Sequence
  Description of Artificial Sequence: Synthetic oligonucleotide
  Antisense strand to SEQ ID NO: 1018986
cauuucauacauuuccacc

SEQ ID NO: 1018988 - RNA, 19 nt, Artificial Sequence
  Description of Artificial Sequence: Synthetic oligonucleotide
  Sense strand starting at position 3445 of SEQ ID NO: 914633
guaugaaauggcugaauug

SEQ ID NO: 1018989 - RNA, 19 nt, Artificial Sequence
  Description of Artificial Sequence: Synthetic oligonucleotide
  Antisense strand to SEQ ID NO: 1018988
caauucagccauuucauac

SEQ ID NO: 1018990 - RNA, 19 nt, Artificial Sequence
  Description of Artificial Sequence: Synthetic oligonucleotide
  Sense strand starting at position 3528 of SEQ ID NO: 914633
augagaucaugaguaugug

SEQ ID NO: 1018991 - RNA, 19 nt, Artificial Sequence
  Description of Artificial Sequence: Synthetic oligonucleotide
  Antisense strand to SEQ ID NO: 1018990
cacauacucaugaucucau

SEQ ID NO: 1018992 - RNA, 19 nt, Artificial Sequence
  Description of Artificial Sequence: Synthetic oligonucleotide
  Sense strand starting at position 3531 of SEQ ID NO: 914633
agaucaugaguaugugauc

SEQ ID NO: 1018993 - RNA, 19 nt, Artificial Sequence
  Description of Artificial Sequence: Synthetic oligonucleotide
  Antisense strand to SEQ ID NO: 1018992
gaucacauacucaugaucu

SEQ ID NO: 1018994 - RNA, 19 nt, Artificial Sequence
  Description of Artificial Sequence: Synthetic oligonucleotide
  Sense strand starting at position 3598 of SEQ ID NO: 914633
cuaugaaauuguguuugaa

SEQ ID NO: 1018995 - RNA, 19 nt, Artificial Sequence
  Description of Artificial Sequence: Synthetic oligonucleotide
  Antisense strand to SEQ ID NO: 1018994
uucaaacacaauuucauag

SEQ ID NO: 1018996 - RNA, 19 nt, Artificial Sequence
  Description of Artificial Sequence: Synthetic oligonucleotide
  Sense strand starting at position 3600 of SEQ ID NO: 914633
augaaauuguguuugaauc

SEQ ID NO: 1018997 - RNA, 19 nt, Artificial Sequence
  Description of Artificial Sequence: Synthetic oligonucleotide
  Antisense strand to SEQ ID NO: 1018996
gauucaaacacaauuucau

SEQ ID NO: 1018998 - RNA, 19 nt, Artificial Sequence
  Description of Artificial Sequence: Synthetic oligonucleotide
  Sense strand starting at position 3601 of SEQ ID NO: 914633
ugaaauuguguuugaauca

SEQ ID NO: 1018999 - RNA, 19 nt, Artificial Sequence
  Description of Artificial Sequence: Synthetic oligonucleotide
  Antisense strand to SEQ ID NO: 1018998
ugauucaaacacaauuuca

SEQ ID NO: 1019000 - RNA, 19 nt, Artificial Sequence
  Description of Artificial Sequence: Synthetic oligonucleotide
  Sense strand starting at position 3743 of SEQ ID NO: 914633
agauacggacuuuauguau

SEQ ID NO: 1019001 - RNA, 19 nt, Artificial Sequence
  Description of Artificial Sequence: Synthetic oligonucleotide
  Antisense strand to SEQ ID NO: 1019000
auacauaaaguccguaucu

SEQ ID NO: 1019002 - RNA, 19 nt, Artificial Sequence
  Description of Artificial Sequence: Synthetic oligonucleotide
  Sense strand starting at position 3747 of SEQ ID NO: 914633
acggacuuuauguauugua

SEQ ID NO: 1019003 - RNA, 19 nt, Artificial Sequence
  Description of Artificial Sequence: Synthetic oligonucleotide
  Antisense strand to SEQ ID NO: 1019002
uacaauacauaaaguccgu

SEQ ID NO: 1019004 - RNA, 19 nt, Artificial Sequence
  Description of Artificial Sequence: Synthetic oligonucleotide
  Sense strand starting at position 3824 of SEQ ID NO: 914633
agagaugguaagugguaga

SEQ ID NO: 1019005 - RNA, 19 nt, Artificial Sequence
  Description of Artificial Sequence: Synthetic oligonucleotide
  Antisense strand to SEQ ID NO: 1019004
ucuaccacuuaccaucucu

SEQ ID NO: 1019006 - RNA, 19 nt, Artificial Sequence
  Description of Artificial Sequence: Synthetic oligonucleotide
  Sense strand starting at position 3829 of SEQ ID NO: 914633
ugguaagugguagaaccaa

SEQ ID NO: 1019007 - RNA, 19 nt, Artificial Sequence
  Description of Artificial Sequence: Synthetic oligonucleotide
  Antisense strand to SEQ ID NO: 1019006
uugguucuaccacuuacca

SEQ ID NO: 1019008 - RNA, 19 nt, Artificial Sequence
  Description of Artificial Sequence: Synthetic oligonucleotide
  Sense strand starting at position 3892 of SEQ ID NO: 914633
aucacaguguuagccagau

SEQ ID NO: 1019009 - RNA, 19 nt, Artificial Sequence
  Description of Artificial Sequence: Synthetic oligonucleotide
  Antisense strand to SEQ ID NO: 1019008
aucuggcuaacacugugau

SEQ ID NO: 1019010 - RNA, 19 nt, Artificial Sequence
  Description of Artificial Sequence: Synthetic oligonucleotide
  Sense strand starting at position 3896 of SEQ ID NO: 914633
caguguuagccagauaucc

SEQ ID NO: 1019011 - RNA, 19 nt, Artificial Sequence
  Description of Artificial Sequence: Synthetic oligonucleotide
  Antisense strand to SEQ ID NO: 1019010
ggauaucuggcuaacacug

SEQ ID NO: 1019012 - RNA, 19 nt, Artificial Sequence
  Description of Artificial Sequence: Synthetic oligonucleotide
  Sense strand starting at position 3966 of SEQ ID NO: 914633
guggucaugugacuaauuc

SEQ ID NO: 1019013 - RNA, 19 nt, Artificial Sequence
  Description of Artificial Sequence: Synthetic oligonucleotide
  Antisense strand to SEQ ID NO: 1019012
gaauuagucacaugaccac

SEQ ID NO: 1019014 - RNA, 19 nt, Artificial Sequence
  Description of Artificial Sequence: Synthetic oligonucleotide
  Sense strand starting at position 3967 of SEQ ID NO: 914633
uggucaugugacuaauucu

SEQ ID NO: 1019015 - RNA, 19 nt, Artificial Sequence
  Description of Artificial Sequence: Synthetic oligonucleotide
  Antisense strand to SEQ ID NO: 1019014
agaauuagucacaugacca

SEQ ID NO: 1019016 - RNA, 19 nt, Artificial Sequence
  Description of Artificial Sequence: Synthetic oligonucleotide
  Sense strand starting at position 114 of SEQ ID NO: 914634
ugauuugguagcugucuca

SEQ ID NO: 1019017 - RNA, 19 nt, Artificial Sequence
  Description of Artificial Sequence: Synthetic oligonucleotide
  Antisense strand to SEQ ID NO: 1019016
ugagacagcuaccaaauca

SEQ ID NO: 1019018 - RNA, 19 nt, Artificial Sequence
  Description of Artificial Sequence: Synthetic oligonucleotide
  Sense strand starting at position 194 of SEQ ID NO: 914634
uucugaggauucuugaaca

SEQ ID NO: 1019019 - RNA, 19 nt, Artificial Sequence
  Description of Artificial Sequence: Synthetic oligonucleotide
  Antisense strand to SEQ ID NO: 1019018
uguucaagaauccucagaa

SEQ ID NO: 1019020 - RNA, 19 nt, Artificial Sequence
  Description of Artificial Sequence: Synthetic oligonucleotide
  Sense strand starting at position 226 of SEQ ID NO: 914634
aagggcauuugacaugauu

SEQ ID NO: 1019021 - RNA, 19 nt, Artificial Sequence
  Description of Artificial Sequence: Synthetic oligonucleotide
  Antisense strand to SEQ ID NO: 1019020
aaucaugucaaaugcccuu

SEQ ID NO: 1019022 - RNA, 19 nt, Artificial Sequence
  Description of Artificial Sequence: Synthetic oligonucleotide
  Sense strand starting at position 426 of SEQ ID NO: 914634
guuaaaucaggaugauacu

SEQ ID NO: 1019023 - RNA, 19 nt, Artificial Sequence
  Description of Artificial Sequence: Synthetic oligonucleotide
  Antisense strand to SEQ ID NO: 1019022
aguaucauccugauuuaac

SEQ ID NO: 1019024 - RNA, 19 nt, Artificial Sequence
  Description of Artificial Sequence: Synthetic oligonucleotide
  Sense strand starting at position 432 of SEQ ID NO: 914634
ucaggaugauacugaauuu

SEQ ID NO: 1019025 - RNA, 19 nt, Artificial Sequence
  Description of Artificial Sequence: Synthetic oligonucleotide
  Antisense strand to SEQ ID NO: 1019024
aaauucaguaucauccuga

SEQ ID NO: 1019026 - RNA, 19 nt, Artificial Sequence
  Description of Artificial Sequence: Synthetic oligonucleotide
  Sense strand starting at position 493 of SEQ ID NO: 914634
guucuccauucuguaaauu

SEQ ID NO: 1019027 - RNA, 19 nt, Artificial Sequence
  Description of Artificial Sequence: Synthetic oligonucleotide
  Antisense strand to SEQ ID NO: 1019026
aauuuacagaauggagaac

SEQ ID NO: 1019028 - RNA, 19 nt, Artificial Sequence
  Description of Artificial Sequence: Synthetic oligonucleotide
  Sense strand starting at position 738 of SEQ ID NO: 914634
uuuauucucgaccagagau

SEQ ID NO: 1019029 - RNA, 19 nt, Artificial Sequence
  Description of Artificial Sequence: Synthetic oligonucleotide
  Antisense strand to SEQ ID NO: 1019028
aucucuggucgagaauaaa

SEQ ID NO: 1019030 - RNA, 19 nt, Artificial Sequence
  Description of Artificial Sequence: Synthetic oligonucleotide
  Sense strand starting at position 1003 of SEQ ID NO: 914634
ggguacaagucugcaucua

SEQ ID NO: 1019031 - RNA, 19 nt, Artificial Sequence
  Description of Artificial Sequence: Synthetic oligonucleotide
  Antisense strand to SEQ ID NO: 1019030
uagaugcagacuuguaccc

SEQ ID NO: 1019032 - RNA, 19 nt, Artificial Sequence
  Description of Artificial Sequence: Synthetic oligonucleotide
  Sense strand starting at position 1015 of SEQ ID NO: 914634
gcaucuagaugccuggauu

SEQ ID NO: 1019033 - RNA, 19 nt, Artificial Sequence
  Description of Artificial Sequence: Synthetic oligonucleotide
  Antisense strand to SEQ ID NO: 1019032
aauccaggcaucuagaugc

SEQ ID NO: 1019034 - RNA, 19 nt, Artificial Sequence
  Description of Artificial Sequence: Synthetic oligonucleotide
  Sense strand starting at position 1065 of SEQ ID NO: 914634
caguaaagucgugggaggu

SEQ ID NO: 1019035 - RNA, 19 nt, Artificial Sequence
  Description of Artificial Sequence: Synthetic oligonucleotide
  Antisense strand to SEQ ID NO: 1019034
accucccacgacuuuacug

SEQ ID NO: 1019036 - RNA, 19 nt, Artificial Sequence
  Description of Artificial Sequence: Synthetic oligonucleotide
  Sense strand starting at position 1081 of SEQ ID NO: 914634
ggucgcuugacaggaaagu

SEQ ID NO: 1019037 - RNA, 19 nt, Artificial Sequence
  Description of Artificial Sequence: Synthetic oligonucleotide
  Antisense strand to SEQ ID NO: 1019036
acuuuccugucaagcgacc

SEQ ID NO: 1019038 - RNA, 19 nt, Artificial Sequence
  Description of Artificial Sequence: Synthetic oligonucleotide
  Sense strand starting at position 1082 of SEQ ID NO: 914634
gucgcuugacaggaaaguu

SEQ ID NO: 1019039 - RNA, 19 nt, Artificial Sequence
  Description of Artificial Sequence: Synthetic oligonucleotide
  Antisense strand to SEQ ID NO: 1019038
aacuuuccugucaagcgac

SEQ ID NO: 1019040 - RNA, 19 nt, Artificial Sequence
  Description of Artificial Sequence: Synthetic oligonucleotide
  Sense strand starting at position 1110 of SEQ ID NO: 914634
gucccaaagcuccaaguau

SEQ ID NO: 1019041 - RNA, 19 nt, Artificial Sequence
  Description of Artificial Sequence: Synthetic oligonucleotide
  Antisense strand to SEQ ID NO: 1019040
auacuuggagcuuugggac

SEQ ID NO: 1019042 - RNA, 19 nt, Artificial Sequence
  Description of Artificial Sequence: Synthetic oligonucleotide
  Sense strand starting at position 1411 of SEQ ID NO: 914634
cgugguuuccaggacaaca

SEQ ID NO: 1019043 - RNA, 19 nt, Artificial Sequence
  Description of Artificial Sequence: Synthetic oligonucleotide
  Antisense strand to SEQ ID NO: 1019042
uguuguccuggaaaccacg

SEQ ID NO: 1019044 - RNA, 19 nt, Artificial Sequence
  Description of Artificial Sequence: Synthetic oligonucleotide
  Sense strand starting at position 2514 of SEQ ID NO: 914634
ugagaacucagguguagga

SEQ ID NO: 1019045 - RNA, 19 nt, Artificial Sequence
  Description of Artificial Sequence: Synthetic oligonucleotide
  Antisense strand to SEQ ID NO: 1019044
uccuacaccugaguucuca

SEQ ID NO: 1019046 - RNA, 19 nt, Artificial Sequence
  Description of Artificial Sequence: Synthetic oligonucleotide
  Sense strand starting at position 2908 of SEQ ID NO: 914634
gcucguccuccucuguaau

SEQ ID NO: 1019047 - RNA, 19 nt, Artificial Sequence
  Description of Artificial Sequence: Synthetic oligonucleotide
  Antisense strand to SEQ ID NO: 1019046
auuacagaggaggacgagc

SEQ ID NO: 1019048 - RNA, 19 nt, Artificial Sequence
  Description of Artificial Sequence: Synthetic oligonucleotide
  Sense strand starting at position 2918 of SEQ ID NO: 914634
cucuguaaucgcgugucuu

SEQ ID NO: 1019049 - RNA, 19 nt, Artificial Sequence
  Description of Artificial Sequence: Synthetic oligonucleotide
  Antisense strand to SEQ ID NO: 1019048
aagacacgcgauuacagag

SEQ ID NO: 1019050 - RNA, 19 nt, Artificial Sequence
  Description of Artificial Sequence: Synthetic oligonucleotide
  Sense strand starting at position 2920 of SEQ ID NO: 914634
cuguaaucgcgugucuuua

SEQ ID NO: 1019051 - RNA, 19 nt, Artificial Sequence
  Description of Artificial Sequence: Synthetic oligonucleotide
  Antisense strand to SEQ ID NO: 1019050
uaaagacacgcgauuacag

SEQ ID NO: 1019052 - RNA, 19 nt, Artificial Sequence
  Description of Artificial Sequence: Synthetic oligonucleotide
  Sense strand starting at position 2921 of SEQ ID NO: 914634
uguaaucgcgugucuuuag

SEQ ID NO: 1019053 - RNA, 19 nt, Artificial Sequence
  Description of Artificial Sequence: Synthetic oligonucleotide
  Antisense strand to SEQ ID NO: 1019052
cuaaagacacgcgauuaca

SEQ ID NO: 1019054 - RNA, 19 nt, Artificial Sequence
  Description of Artificial Sequence: Synthetic oligonucleotide
  Sense strand starting at position 3242 of SEQ ID NO: 914634
gcaggucuugcucaagaag

SEQ ID NO: 1019055 - RNA, 19 nt, Artificial Sequence
  Description of Artificial Sequence: Synthetic oligonucleotide
  Antisense strand to SEQ ID NO: 1019054
cuucuugagcaagaccugc

SEQ ID NO: 1019056 - RNA, 19 nt, Artificial Sequence
  Description of Artificial Sequence: Synthetic oligonucleotide
  Sense strand starting at position 3318 of SEQ ID NO: 914634
gcucgcagauuugaaauaa

SEQ ID NO: 1019057 - RNA, 19 nt, Artificial Sequence
  Description of Artificial Sequence: Synthetic oligonucleotide
  Antisense strand to SEQ ID NO: 1019056
uuauuucaaaucugcgagc

SEQ ID NO: 1019058 - RNA, 19 nt, Artificial Sequence
  Description of Artificial Sequence: Synthetic oligonucleotide
  Sense strand starting at position 3416 of SEQ ID NO: 914634
ggagcaagacuggguucua

SEQ ID NO: 1019059 - RNA, 19 nt, Artificial Sequence
  Description of Artificial Sequence: Synthetic oligonucleotide
  Antisense strand to SEQ ID NO: 1019058
uagaacccagucuugcucc

SEQ ID NO: 1019060 - RNA, 19 nt, Artificial Sequence
  Description of Artificial Sequence: Synthetic oligonucleotide
  Sense strand starting at position 3417 of SEQ ID NO: 914634
gagcaagacuggguucuaa

SEQ ID NO: 1019061 - RNA, 19 nt, Artificial Sequence
  Description of Artificial Sequence: Synthetic oligonucleotide
  Antisense strand to SEQ ID NO: 1019060
uuagaacccagucuugcuc

SEQ ID NO: 1019062 - RNA, 19 nt, Artificial Sequence
  Description of Artificial Sequence: Synthetic oligonucleotide
  Sense strand starting at position 3558 of SEQ ID NO: 914634
ccuaauguacccgaaguua

SEQ ID NO: 1019063 - RNA, 19 nt, Artificial Sequence
  Description of Artificial Sequence: Synthetic oligonucleotide
  Antisense strand to SEQ ID NO: 1019062
uaacuucggguacauuagg

SEQ ID NO: 1019064 - RNA, 19 nt, Artificial Sequence
  Description of Artificial Sequence: Synthetic oligonucleotide
  Sense strand starting at position 3589 of SEQ ID NO: 914634
aguccugugggccauaaau

SEQ ID NO: 1019065 - RNA, 19 nt, Artificial Sequence
  Description of Artificial Sequence: Synthetic oligonucleotide
  Antisense strand to SEQ ID NO: 1019064
auuuauggcccacaggacu

SEQ ID NO: 1019066 - RNA, 19 nt, Artificial Sequence
  Description of Artificial Sequence: Synthetic oligonucleotide
  Sense strand starting at position 3612 of SEQ ID NO: 914634
uuuaaaguucuuuagaagc

SEQ ID NO: 1019067 - RNA, 19 nt, Artificial Sequence
  Description of Artificial Sequence: Synthetic oligonucleotide
  Antisense strand to SEQ ID NO: 1019066
gcuucuaaagaacuuuaaa

SEQ ID NO: 1019068 - RNA, 19 nt, Artificial Sequence
  Description of Artificial Sequence: Synthetic oligonucleotide
  Sense strand starting at position 3654 of SEQ ID NO: 914634
cagagauagugacuaauuc

SEQ ID NO: 1019069 - RNA, 19 nt, Artificial Sequence
  Description of Artificial Sequence: Synthetic oligonucleotide
  Antisense strand to SEQ ID NO: 1019068
gaauuagucacuaucucug

SEQ ID NO: 1019070 - RNA, 19 nt, Artificial Sequence
  Description of Artificial Sequence: Synthetic oligonucleotide
  Sense strand starting at position 3675 of SEQ ID NO: 914634
ucaaaucugugaucuacag

SEQ ID NO: 1019071 - RNA, 19 nt, Artificial Sequence
  Description of Artificial Sequence: Synthetic oligonucleotide
  Antisense strand to SEQ ID NO: 1019070
cuguagaucacagauuuga

SEQ ID NO: 1019072 - RNA, 19 nt, Artificial Sequence
  Description of Artificial Sequence: Synthetic oligonucleotide
  Sense strand starting at position 3681 of SEQ ID NO: 914634
cugugaucuacagggccau

SEQ ID NO: 1019073 - RNA, 19 nt, Artificial Sequence
  Description of Artificial Sequence: Synthetic oligonucleotide
  Antisense strand to SEQ ID NO: 1019072
auggcccuguagaucacag

SEQ ID NO: 1019074 - RNA, 19 nt, Artificial Sequence
  Description of Artificial Sequence: Synthetic oligonucleotide
  Sense strand starting at position 3707 of SEQ ID NO: 914634
gcagaugucugagugacag

SEQ ID NO: 1019075 - RNA, 19 nt, Artificial Sequence
  Description of Artificial Sequence: Synthetic oligonucleotide
  Antisense strand to SEQ ID NO: 1019074
cugucacucagacaucugc

SEQ ID NO: 1019076 - RNA, 19 nt, Artificial Sequence
  Description of Artificial Sequence: Synthetic oligonucleotide
  Sense strand starting at position 3709 of SEQ ID NO: 914634
agaugucugagugacaguu

SEQ ID NO: 1019077 - RNA, 19 nt, Artificial Sequence
  Description of Artificial Sequence: Synthetic oligonucleotide
  Antisense strand to SEQ ID NO: 1019076
aacugucacucagacaucu

SEQ ID NO: 1019078 - RNA, 19 nt, Artificial Sequence
  Description of Artificial Sequence: Synthetic oligonucleotide
  Sense strand starting at position 3717 of SEQ ID NO: 914634
gagugacaguuaccuguaa

SEQ ID NO: 1019079 - RNA, 19 nt, Artificial Sequence
  Description of Artificial Sequence: Synthetic oligonucleotide
  Antisense strand to SEQ ID NO: 1019078
uuacagguaacugucacuc

SEQ ID NO: 1019080 - RNA, 19 nt, Artificial Sequence
  Description of Artificial Sequence: Synthetic oligonucleotide
  Sense strand starting at position 3721 of SEQ ID NO: 914634
gacaguuaccuguaaggca

SEQ ID NO: 1019081 - RNA, 19 nt, Artificial Sequence
  Description of Artificial Sequence: Synthetic oligonucleotide
  Antisense strand to SEQ ID NO: 1019080
ugccuuacagguaacuguc

SEQ ID NO: 1019082 - RNA, 19 nt, Artificial Sequence
  Description of Artificial Sequence: Synthetic oligonucleotide
  Sense strand starting at position 3762 of SEQ ID NO: 914634
ucuggugacacuugacaga

SEQ ID NO: 1019083 - RNA, 19 nt, Artificial Sequence
  Description of Artificial Sequence: Synthetic oligonucleotide
  Antisense strand to SEQ ID NO: 1019082
ucugucaagugucaccaga

SEQ ID NO: 1019084 - RNA, 19 nt, Artificial Sequence
  Description of Artificial Sequence: Synthetic oligonucleotide
  Sense strand starting at position 3808 of SEQ ID NO: 914634
gugugaaagcauggguuau

SEQ ID NO: 1019085 - RNA, 19 nt, Artificial Sequence
  Description of Artificial Sequence: Synthetic oligonucleotide
  Antisense strand to SEQ ID NO: 1019084
auaacccaugcuuucacac

SEQ ID NO: 1019086 - RNA, 19 nt, Artificial Sequence
  Description of Artificial Sequence: Synthetic oligonucleotide
  Sense strand starting at position 3809 of SEQ ID NO: 914634
ugugaaagcauggguuaug

SEQ ID NO: 1019087 - RNA, 19 nt, Artificial Sequence
  Description of Artificial Sequence: Synthetic oligonucleotide
  Antisense strand to SEQ ID NO: 1019086
cauaacccaugcuuucaca

SEQ ID NO: 1019088 - RNA, 19 nt, Artificial Sequence
  Description of Artificial Sequence: Synthetic oligonucleotide
  Sense strand starting at position 3810 of SEQ ID NO: 914634
gugaaagcauggguuauga

SEQ ID NO: 1019089 - RNA, 19 nt, Artificial Sequence
  Description of Artificial Sequence: Synthetic oligonucleotide
  Antisense strand to SEQ ID NO: 1019088
ucauaacccaugcuuucac

SEQ ID NO: 1019090 - RNA, 19 nt, Artificial Sequence
  Description of Artificial Sequence: Synthetic oligonucleotide
  Sense strand starting at position 3820 of SEQ ID NO: 914634
ggguuaugacucugagagg

SEQ ID NO: 1019091 - RNA, 19 nt, Artificial Sequence
  Description of Artificial Sequence: Synthetic oligonucleotide
  Antisense strand to SEQ ID NO: 1019090
ccucucagagucauaaccc

SEQ ID NO: 1019092 - RNA, 19 nt, Artificial Sequence
  Description of Artificial Sequence: Synthetic oligonucleotide
  Sense strand starting at position 3823 of SEQ ID NO: 914634
uuaugacucugagagggaa

SEQ ID NO: 1019093 - RNA, 19 nt, Artificial Sequence
  Description of Artificial Sequence: Synthetic oligonucleotide
  Antisense strand to SEQ ID NO: 1019092
uucccucucagagucauaa

SEQ ID NO: 1019094 - RNA, 19 nt, Artificial Sequence
  Description of Artificial Sequence: Synthetic oligonucleotide
  Sense strand starting at position 3924 of SEQ ID NO: 914634
gggcuuuccacugaaagcu

SEQ ID NO: 1019095 - RNA, 19 nt, Artificial Sequence
  Description of Artificial Sequence: Synthetic oligonucleotide
  Antisense strand to SEQ ID NO: 1019094
agcuuucaguggaaagccc

SEQ ID NO: 1019096 - RNA, 19 nt, Artificial Sequence
  Description of Artificial Sequence: Synthetic oligonucleotide
  Sense strand starting at position 79 of SEQ ID NO: 914635
ugauuugguagcugucuca

SEQ ID NO: 1019097 - RNA, 19 nt, Artificial Sequence
  Description of Artificial Sequence: Synthetic oligonucleotide
  Antisense strand to SEQ ID NO: 1019096
ugagacagcuaccaaauca

SEQ ID NO: 1019098 - RNA, 19 nt, Artificial Sequence
  Description of Artificial Sequence: Synthetic oligonucleotide
  Sense strand starting at position 159 of SEQ ID NO: 914635
uucugaggauucuugaaca

SEQ ID NO: 1019099 - RNA, 19 nt, Artificial Sequence
  Description of Artificial Sequence: Synthetic oligonucleotide
  Antisense strand to SEQ ID NO: 1019098
uguucaagaauccucagaa

SEQ ID NO: 1019100 - RNA, 19 nt, Artificial Sequence
  Description of Artificial Sequence: Synthetic oligonucleotide
  Sense strand starting at position 191 of SEQ ID NO: 914635
aagggcauuugacaugauu

SEQ ID NO: 1019101 - RNA, 19 nt, Artificial Sequence
  Description of Artificial Sequence: Synthetic oligonucleotide
  Antisense strand to SEQ ID NO: 1019100
aaucaugucaaaugcccuu

SEQ ID NO: 1019102 - RNA, 19 nt, Artificial Sequence
  Description of Artificial Sequence: Synthetic oligonucleotide
  Sense strand starting at position 391 of SEQ ID NO: 914635
guuaaaucaggaugauacu

SEQ ID NO: 1019103 - RNA, 19 nt, Artificial Sequence
  Description of Artificial Sequence: Synthetic oligonucleotide
  Antisense strand to SEQ ID NO: 1019102
aguaucauccugauuuaac

SEQ ID NO: 1019104 - RNA, 19 nt, Artificial Sequence
  Description of Artificial Sequence: Synthetic oligonucleotide
  Sense strand starting at position 397 of SEQ ID NO: 914635
ucaggaugauacugaauuu

SEQ ID NO: 1019105 - RNA, 19 nt, Artificial Sequence
  Description of Artificial Sequence: Synthetic oligonucleotide
  Antisense strand to SEQ ID NO: 1019104
aaauucaguaucauccuga

SEQ ID NO: 1019106 - RNA, 19 nt, Artificial Sequence
  Description of Artificial Sequence: Synthetic oligonucleotide
  Sense strand starting at position 458 of SEQ ID NO: 914635
guucuccauucuguaaauu

SEQ ID NO: 1019107 - RNA, 19 nt, Artificial Sequence
  Description of Artificial Sequence: Synthetic oligonucleotide
  Antisense strand to SEQ ID NO: 1019106
aauuuacagaauggagaac

SEQ ID NO: 1019108 - RNA, 19 nt, Artificial Sequence
  Description of Artificial Sequence: Synthetic oligonucleotide
  Sense strand starting at position 703 of SEQ ID NO: 914635
uuuauucucgaccagagau

SEQ ID NO: 1019109 - RNA, 19 nt, Artificial Sequence
  Description of Artificial Sequence: Synthetic oligonucleotide
  Antisense strand to SEQ ID NO: 1019108
aucucuggucgagaauaaa

SEQ ID NO: 1019110 - RNA, 19 nt, Artificial Sequence
  Description of Artificial Sequence: Synthetic oligonucleotide
  Sense strand starting at position 968 of SEQ ID NO: 914635
ggguacaagucugcaucua

SEQ ID NO: 1019111 - RNA, 19 nt, Artificial Sequence
  Description of Artificial Sequence: Synthetic oligonucleotide
  Antisense strand to SEQ ID NO: 1019110
uagaugcagacuuguaccc

SEQ ID NO: 1019112 - RNA, 19 nt, Artificial Sequence
  Description of Artificial Sequence: Synthetic oligonucleotide
  Sense strand starting at position 980 of SEQ ID NO: 914635
gcaucuagaugccuggauu

SEQ ID NO: 1019113 - RNA, 19 nt, Artificial Sequence
  Description of Artificial Sequence: Synthetic oligonucleotide
  Antisense strand to SEQ ID NO: 1019112
aauccaggcaucuagaugc

SEQ ID NO: 1019114 - RNA, 19 nt, Artificial Sequence
  Description of Artificial Sequence: Synthetic oligonucleotide
  Sense strand starting at position 1030 of SEQ ID NO: 914635
caguaaagucgugggaggu

SEQ ID NO: 1019115 - RNA, 19 nt, Artificial Sequence
  Description of Artificial Sequence: Synthetic oligonucleotide
  Antisense strand to SEQ ID NO: 1019114
accucccacgacuuuacug

SEQ ID NO: 1019116 - RNA, 19 nt, Artificial Sequence
  Description of Artificial Sequence: Synthetic oligonucleotide
  Sense strand starting at position 1046 of SEQ ID NO: 914635
ggucgcuugacaggaaagu

SEQ ID NO: 1019117 - RNA, 19 nt, Artificial Sequence
  Description of Artificial Sequence: Synthetic oligonucleotide
  Antisense strand to SEQ ID NO: 1019116
acuuuccugucaagcgacc

SEQ ID NO: 1019118 - RNA, 19 nt, Artificial Sequence
  Description of Artificial Sequence: Synthetic oligonucleotide
  Sense strand starting at position 1047 of SEQ ID NO: 914635
gucgcuugacaggaaaguu

SEQ ID NO: 1019119 - RNA, 19 nt, Artificial Sequence
  Description of Artificial Sequence: Synthetic oligonucleotide
  Antisense strand to SEQ ID NO: 1019118
aacuuuccugucaagcgac

SEQ ID NO: 1019120 - RNA, 19 nt, Artificial Sequence
  Description of Artificial Sequence: Synthetic oligonucleotide
  Sense strand starting at position 1075 of SEQ ID NO: 914635
gucccaaagcuccaaguau

SEQ ID NO: 1019121 - RNA, 19 nt, Artificial Sequence
  Description of Artificial Sequence: Synthetic oligonucleotide
  Antisense strand to SEQ ID NO: 1019120
auacuuggagcuuugggac

SEQ ID NO: 1019122 - RNA, 19 nt, Artificial Sequence
  Description of Artificial Sequence: Synthetic oligonucleotide
  Sense strand starting at position 1376 of SEQ ID NO: 914635
cgugguuuccaggacaaca

SEQ ID NO: 1019123 - RNA, 19 nt, Artificial Sequence
  Description of Artificial Sequence: Synthetic oligonucleotide
  Antisense strand to SEQ ID NO: 1019122
uguuguccuggaaaccacg

SEQ ID NO: 1019124 - RNA, 19 nt, Artificial Sequence
  Description of Artificial Sequence: Synthetic oligonucleotide
  Sense strand starting at position 2479 of SEQ ID NO: 914635
ugagaacucagguguagga

SEQ ID NO: 1019125 - RNA, 19 nt, Artificial Sequence
  Description of Artificial Sequence: Synthetic oligonucleotide
  Antisense strand to SEQ ID NO: 1019124
uccuacaccugaguucuca

SEQ ID NO: 1019126 - RNA, 19 nt, Artificial Sequence
  Description of Artificial Sequence: Synthetic oligonucleotide
  Sense strand starting at position 2873 of SEQ ID NO: 914635
gcucguccuccucuguaau

SEQ ID NO: 1019127 - RNA, 19 nt, Artificial Sequence
  Description of Artificial Sequence: Synthetic oligonucleotide
  Antisense strand to SEQ ID NO: 1019126
auuacagaggaggacgagc

SEQ ID NO: 1019128 - RNA, 19 nt, Artificial Sequence
  Description of Artificial Sequence: Synthetic oligonucleotide
  Sense strand starting at position 2883 of SEQ ID NO: 914635
cucuguaaucgcgugucuu

SEQ ID NO: 1019129 - RNA, 19 nt, Artificial Sequence
  Description of Artificial Sequence: Synthetic oligonucleotide
  Antisense strand to SEQ ID NO: 1019128
aagacacgcgauuacagag

SEQ ID NO: 1019130 - RNA, 19 nt, Artificial Sequence
  Description of Artificial Sequence: Synthetic oligonucleotide
  Sense strand starting at position 2885 of SEQ ID NO: 914635
cuguaaucgcgugucuuua

SEQ ID NO: 1019131 - RNA, 19 nt, Artificial Sequence
  Description of Artificial Sequence: Synthetic oligonucleotide
  Antisense strand to SEQ ID NO: 1019130
uaaagacacgcgauuacag

SEQ ID NO: 1019132 - RNA, 19 nt, Artificial Sequence
  Description of Artificial Sequence: Synthetic oligonucleotide
  Sense strand starting at position 2886 of SEQ ID NO: 914635
uguaaucgcgugucuuuag

SEQ ID NO: 1019133 - RNA, 19 nt, Artificial Sequence
  Description of Artificial Sequence: Synthetic oligonucleotide
  Antisense strand to SEQ ID NO: 1019132
cuaaagacacgcgauuaca

SEQ ID NO: 1019134 - RNA, 19 nt, Artificial Sequence
  Description of Artificial Sequence: Synthetic oligonucleotide
  Sense strand starting at position 3207 of SEQ ID NO: 914635
gcaggucuugcucaagaag

SEQ ID NO: 1019135 - RNA, 19 nt, Artificial Sequence
  Description of Artificial Sequence: Synthetic oligonucleotide
  Antisense strand to SEQ ID NO: 1019134
cuucuugagcaagaccugc

SEQ ID NO: 1019136 - RNA, 19 nt, Artificial Sequence
  Description of Artificial Sequence: Synthetic oligonucleotide
  Sense strand starting at position 3381 of SEQ ID NO: 914635
ggagcaagacuggguucua

SEQ ID NO: 1019137 - RNA, 19 nt, Artificial Sequence
  Description of Artificial Sequence: Synthetic oligonucleotide
  Antisense strand to SEQ ID NO: 1019136
uagaacccagucuugcucc

SEQ ID NO: 1019138 - RNA, 19 nt, Artificial Sequence
  Description of Artificial Sequence: Synthetic oligonucleotide
  Sense strand starting at position 3382 of SEQ ID NO: 914635
gagcaagacuggguucuaa

SEQ ID NO: 1019139 - RNA, 19 nt, Artificial Sequence
  Description of Artificial Sequence: Synthetic oligonucleotide
  Antisense strand to SEQ ID NO: 1019138
uuagaacccagucuugcuc

SEQ ID NO: 1019140 - RNA, 19 nt, Artificial Sequence
  Description of Artificial Sequence: Synthetic oligonucleotide
  Sense strand starting at position 3523 of SEQ ID NO: 914635
ccuaauguacccgaaguua

SEQ ID NO: 1019141 - RNA, 19 nt, Artificial Sequence
  Description of Artificial Sequence: Synthetic oligonucleotide
  Antisense strand to SEQ ID NO: 1019140
uaacuucggguacauuagg

SEQ ID NO: 1019142 - RNA, 19 nt, Artificial Sequence
  Description of Artificial Sequence: Synthetic oligonucleotide
  Sense strand starting at position 3554 of SEQ ID NO: 914635
aguccugugggccauaaau

SEQ ID NO: 1019143 - RNA, 19 nt, Artificial Sequence
  Description of Artificial Sequence: Synthetic oligonucleotide
  Antisense strand to SEQ ID NO: 1019142
auuuauggcccacaggacu

SEQ ID NO: 1019144 - RNA, 19 nt, Artificial Sequence
  Description of Artificial Sequence: Synthetic oligonucleotide
  Sense strand starting at position 3577 of SEQ ID NO: 914635
uuuaaaguucuuuagaagc

SEQ ID NO: 1019145 - RNA, 19 nt, Artificial Sequence
  Description of Artificial Sequence: Synthetic oligonucleotide
  Antisense strand to SEQ ID NO: 1019144
gcuucuaaagaacuuuaaa

SEQ ID NO: 1019146 - RNA, 19 nt, Artificial Sequence
  Description of Artificial Sequence: Synthetic oligonucleotide
  Sense strand starting at position 3619 of SEQ ID NO: 914635
cagagauagugacuaauuc

SEQ ID NO: 1019147 - RNA, 19 nt, Artificial Sequence
  Description of Artificial Sequence: Synthetic oligonucleotide
  Antisense strand to SEQ ID NO: 1019146
gaauuagucacuaucucug

SEQ ID NO: 1019148 - RNA, 19 nt, Artificial Sequence
  Description of Artificial Sequence: Synthetic oligonucleotide
  Sense strand starting at position 3640 of SEQ ID NO: 914635
ucaaaucugugaucuacag

SEQ ID NO: 1019149 - RNA, 19 nt, Artificial Sequence
  Description of Artificial Sequence: Synthetic oligonucleotide
  Antisense strand to SEQ ID NO: 1019148
cuguagaucacagauuuga

SEQ ID NO: 1019150 - RNA, 19 nt, Artificial Sequence
  Description of Artificial Sequence: Synthetic oligonucleotide
  Sense strand starting at position 3646 of SEQ ID NO: 914635
cugugaucuacagggccau

SEQ ID NO: 1019151 - RNA, 19 nt, Artificial Sequence
  Description of Artificial Sequence: Synthetic oligonucleotide
  Antisense strand to SEQ ID NO: 1019150
auggcccuguagaucacag

SEQ ID NO: 1019152 - RNA, 19 nt, Artificial Sequence
  Description of Artificial Sequence: Synthetic oligonucleotide
  Sense strand starting at position 3672 of SEQ ID NO: 914635
gcagaugucugagugacag

SEQ ID NO: 1019153 - RNA, 19 nt, Artificial Sequence
  Description of Artificial Sequence: Synthetic oligonucleotide
  Antisense strand to SEQ ID NO: 1019152
cugucacucagacaucugc

SEQ ID NO: 1019154 - RNA, 19 nt, Artificial Sequence
  Description of Artificial Sequence: Synthetic oligonucleotide
  Sense strand starting at position 3674 of SEQ ID NO: 914635
agaugucugagugacaguu

SEQ ID NO: 1019155 - RNA, 19 nt, Artificial Sequence
  Description of Artificial Sequence: Synthetic oligonucleotide
  Antisense strand to SEQ ID NO: 1019154
aacugucacucagacaucu

SEQ ID NO: 1019156 - RNA, 19 nt, Artificial Sequence
  Description of Artificial Sequence: Synthetic oligonucleotide
  Sense strand starting at position 3682 of SEQ ID NO: 914635
gagugacaguuaccuguaa

SEQ ID NO: 1019157 - RNA, 19 nt, Artificial Sequence
  Description of Artificial Sequence: Synthetic oligonucleotide
  Antisense strand to SEQ ID NO: 1019156
uuacagguaacugucacuc

SEQ ID NO: 1019158 - RNA, 19 nt, Artificial Sequence
  Description of Artificial Sequence: Synthetic oligonucleotide
  Sense strand starting at position 3686 of SEQ ID NO: 914635
gacaguuaccuguaaggca

SEQ ID NO: 1019159 - RNA, 19 nt, Artificial Sequence
  Description of Artificial Sequence: Synthetic oligonucleotide
  Antisense strand to SEQ ID NO: 1019158
ugccuuacagguaacuguc

SEQ ID NO: 1019160 - RNA, 19 nt, Artificial Sequence
  Description of Artificial Sequence: Synthetic oligonucleotide
  Sense strand starting at position 3727 of SEQ ID NO: 914635
ucuggugacacuugacaga

SEQ ID NO: 1019161 - RNA, 19 nt, Artificial Sequence
  Description of Artificial Sequence: Synthetic oligonucleotide
  Antisense strand to SEQ ID NO: 1019160
ucugucaagugucaccaga

SEQ ID NO: 1019162 - RNA, 19 nt, Artificial Sequence
  Description of Artificial Sequence: Synthetic oligonucleotide
  Sense strand starting at position 3773 of SEQ ID NO: 914635
gugugaaagcauggguuau

SEQ ID NO: 1019163 - RNA, 19 nt, Artificial Sequence
  Description of Artificial Sequence: Synthetic oligonucleotide
  Antisense strand to SEQ ID NO: 1019162
auaacccaugcuuucacac

SEQ ID NO: 1019164 - RNA, 19 nt, Artificial Sequence
  Description of Artificial Sequence: Synthetic oligonucleotide
  Sense strand starting at position 3774 of SEQ ID NO: 914635
ugugaaagcauggguuaug

SEQ ID NO: 1019165 - RNA, 19 nt, Artificial Sequence
  Description of Artificial Sequence: Synthetic oligonucleotide
  Antisense strand to SEQ ID NO: 1019164
cauaacccaugcuuucaca

SEQ ID NO: 1019166 - RNA, 19 nt, Artificial Sequence
  Description of Artificial Sequence: Synthetic oligonucleotide
  Sense strand starting at position 3775 of SEQ ID NO: 914635
gugaaagcauggguuauga

SEQ ID NO: 1019167 - RNA, 19 nt, Artificial Sequence
  Description of Artificial Sequence: Synthetic oligonucleotide
  Antisense strand to SEQ ID NO: 1019166
ucauaacccaugcuuucac

SEQ ID NO: 1019168 - RNA, 19 nt, Artificial Sequence
  Description of Artificial Sequence: Synthetic oligonucleotide
  Sense strand starting at position 3785 of SEQ ID NO: 914635
ggguuaugacucugagagg

SEQ ID NO: 1019169 - RNA, 19 nt, Artificial Sequence
  Description of Artificial Sequence: Synthetic oligonucleotide
  Antisense strand to SEQ ID NO: 1019168
ccucucagagucauaaccc

SEQ ID NO: 1019170 - RNA, 19 nt, Artificial Sequence
  Description of Artificial Sequence: Synthetic oligonucleotide
  Sense strand starting at position 3788 of SEQ ID NO: 914635
uuaugacucugagagggaa

SEQ ID NO: 1019171 - RNA, 19 nt, Artificial Sequence
  Description of Artificial Sequence: Synthetic oligonucleotide
  Antisense strand to SEQ ID NO: 1019170
uucccucucagagucauaa

SEQ ID NO: 1019172 - RNA, 19 nt, Artificial Sequence
  Description of Artificial Sequence: Synthetic oligonucleotide
  Sense strand starting at position 3889 of SEQ ID NO: 914635
gggcuuuccacugaaagcu

SEQ ID NO: 1019173 - RNA, 19 nt, Artificial Sequence
  Description of Artificial Sequence: Synthetic oligonucleotide
  Antisense strand to SEQ ID NO: 1019172
agcuuucaguggaaagccc

SEQ ID NO: 1019174 - RNA, 19 nt, Artificial Sequence
  Description of Artificial Sequence: Synthetic oligonucleotide
  Sense strand starting at position 3949 of SEQ ID NO: 914635
uaggauaguugugucccau

SEQ ID NO: 1019175 - RNA, 19 nt, Artificial Sequence
  Description of Artificial Sequence: Synthetic oligonucleotide
  Antisense strand to SEQ ID NO: 1019174
augggacacaacuauccua

SEQ ID NO: 1019176 - RNA, 19 nt, Artificial Sequence
  Description of Artificial Sequence: Synthetic oligonucleotide
  Sense strand starting at position 36 of SEQ ID NO: 914636
agacuauguuccuuccagu

SEQ ID NO: 1019177 - RNA, 19 nt, Artificial Sequence
  Description of Artificial Sequence: Synthetic oligonucleotide
  Antisense strand to SEQ ID NO: 1019176
acuggaaggaacauagucu

SEQ ID NO: 1019178 - RNA, 19 nt, Artificial Sequence
  Description of Artificial Sequence: Synthetic oligonucleotide
  Sense strand starting at position 181 of SEQ ID NO: 914636
uugugacaucuuggguuua

SEQ ID NO: 1019179 - RNA, 19 nt, Artificial Sequence
  Description of Artificial Sequence: Synthetic oligonucleotide
  Antisense strand to SEQ ID NO: 1019178
uaaacccaagaugucacaa

SEQ ID NO: 1019180 - RNA, 19 nt, Artificial Sequence
  Description of Artificial Sequence: Synthetic oligonucleotide
  Sense strand starting at position 183 of SEQ ID NO: 914636
gugacaucuuggguuuauc

SEQ ID NO: 1019181 - RNA, 19 nt, Artificial Sequence
  Description of Artificial Sequence: Synthetic oligonucleotide
  Antisense strand to SEQ ID NO: 1019180
gauaaacccaagaugucac

SEQ ID NO: 1019182 - RNA, 19 nt, Artificial Sequence
  Description of Artificial Sequence: Synthetic oligonucleotide
  Sense strand starting at position 193 of SEQ ID NO: 914636
ggguuuaucaagugcauuu

SEQ ID NO: 1019183 - RNA, 19 nt, Artificial Sequence
  Description of Artificial Sequence: Synthetic oligonucleotide
  Antisense strand to SEQ ID NO: 1019182
aaaugcacuugauaaaccc

SEQ ID NO: 1019184 - RNA, 19 nt, Artificial Sequence
  Description of Artificial Sequence: Synthetic oligonucleotide
  Sense strand starting at position 202 of SEQ ID NO: 914636
aagugcauuuccguuugua

SEQ ID NO: 1019185 - RNA, 19 nt, Artificial Sequence
  Description of Artificial Sequence: Synthetic oligonucleotide
  Antisense strand to SEQ ID NO: 1019184
uacaaacggaaaugcacuu

SEQ ID NO: 1019186 - RNA, 19 nt, Artificial Sequence
  Description of Artificial Sequence: Synthetic oligonucleotide
  Sense strand starting at position 205 of SEQ ID NO: 914636
ugcauuuccguuuguaugu

SEQ ID NO: 1019187 - RNA, 19 nt, Artificial Sequence
  Description of Artificial Sequence: Synthetic oligonucleotide
  Antisense strand to SEQ ID NO: 1019186
acauacaaacggaaaugca

SEQ ID NO: 1019188 - RNA, 19 nt, Artificial Sequence
  Description of Artificial Sequence: Synthetic oligonucleotide
  Sense strand starting at position 206 of SEQ ID NO: 914636
gcauuuccguuuguauguu

SEQ ID NO: 1019189 - RNA, 19 nt, Artificial Sequence
  Description of Artificial Sequence: Synthetic oligonucleotide
  Antisense strand to SEQ ID NO: 1019188
aacauacaaacggaaaugc

SEQ ID NO: 1019190 - RNA, 19 nt, Artificial Sequence
  Description of Artificial Sequence: Synthetic oligonucleotide
  Sense strand starting at position 212 of SEQ ID NO: 914636
ccguuuguauguucaugga

SEQ ID NO: 1019191 - RNA, 19 nt, Artificial Sequence
  Description of Artificial Sequence: Synthetic oligonucleotide
  Antisense strand to SEQ ID NO: 1019190
uccaugaacauacaaacgg

SEQ ID NO: 1019192 - RNA, 19 nt, Artificial Sequence
  Description of Artificial Sequence: Synthetic oligonucleotide
  Sense strand starting at position 311 of SEQ ID NO: 914636
caaguauggugcucuucuu

SEQ ID NO: 1019193 - RNA, 19 nt, Artificial Sequence
  Description of Artificial Sequence: Synthetic oligonucleotide
  Antisense strand to SEQ ID NO: 1019192
aagaagagcaccauacuug

SEQ ID NO: 1019194 - RNA, 19 nt, Artificial Sequence
  Description of Artificial Sequence: Synthetic oligonucleotide
  Sense strand starting at position 377 of SEQ ID NO: 914636
gugcaucugagauguacug

SEQ ID NO: 1019195 - RNA, 19 nt, Artificial Sequence
  Description of Artificial Sequence: Synthetic oligonucleotide
  Antisense strand to SEQ ID NO: 1019194
caguacaucucagaugcac

SEQ ID NO: 1019196 - RNA, 19 nt, Artificial Sequence
  Description of Artificial Sequence: Synthetic oligonucleotide
  Sense strand starting at position 379 of SEQ ID NO: 914636
gcaucugagauguacugau

SEQ ID NO: 1019197 - RNA, 19 nt, Artificial Sequence
  Description of Artificial Sequence: Synthetic oligonucleotide
  Antisense strand to SEQ ID NO: 1019196
aucaguacaucucagaugc

SEQ ID NO: 1019198 - RNA, 19 nt, Artificial Sequence
  Description of Artificial Sequence: Synthetic oligonucleotide
  Sense strand starting at position 416 of SEQ ID NO: 914636
uuugccucagauuaucaga

SEQ ID NO: 1019199 - RNA, 19 nt, Artificial Sequence
  Description of Artificial Sequence: Synthetic oligonucleotide
  Antisense strand to SEQ ID NO: 1019198
ucugauaaucugaggcaaa

SEQ ID NO: 1019200 - RNA, 19 nt, Artificial Sequence
  Description of Artificial Sequence: Synthetic oligonucleotide
  Sense strand starting at position 421 of SEQ ID NO: 914636
cucagauuaucagaagcaa

SEQ ID NO: 1019201 - RNA, 19 nt, Artificial Sequence
  Description of Artificial Sequence: Synthetic oligonucleotide
  Antisense strand to SEQ ID NO: 1019200
uugcuucugauaaucugag

SEQ ID NO: 1019202 - RNA, 19 nt, Artificial Sequence
  Description of Artificial Sequence: Synthetic oligonucleotide
  Sense strand starting at position 477 of SEQ ID NO: 914636
aggaaauaugcauguaagu

SEQ ID NO: 1019203 - RNA, 19 nt, Artificial Sequence
  Description of Artificial Sequence: Synthetic oligonucleotide
  Antisense strand to SEQ ID NO: 1019202
acuuacaugcauauuuccu

SEQ ID NO: 1019204 - RNA, 19 nt, Artificial Sequence
  Description of Artificial Sequence: Synthetic oligonucleotide
  Sense strand starting at position 508 of SEQ ID NO: 914636
accuauuaguaguuggaca

SEQ ID NO: 1019205 - RNA, 19 nt, Artificial Sequence
  Description of Artificial Sequence: Synthetic oligonucleotide
  Antisense strand to SEQ ID NO: 1019204
uguccaacuacuaauaggu

SEQ ID NO: 1019206 - RNA, 19 nt, Artificial Sequence
  Description of Artificial Sequence: Synthetic oligonucleotide
  Sense strand starting at position 697 of SEQ ID NO: 914636
ucagaaauguuguaaugaa

SEQ ID NO: 1019207 - RNA, 19 nt, Artificial Sequence
  Description of Artificial Sequence: Synthetic oligonucleotide
  Antisense strand to SEQ ID NO: 1019206
uucauuacaacauuucuga

SEQ ID NO: 1019208 - RNA, 19 nt, Artificial Sequence
  Description of Artificial Sequence: Synthetic oligonucleotide
  Sense strand starting at position 774 of SEQ ID NO: 914636
ugauuugguagcugucuca

SEQ ID NO: 1019209 - RNA, 19 nt, Artificial Sequence
  Description of Artificial Sequence: Synthetic oligonucleotide
  Antisense strand to SEQ ID NO: 1019208
ugagacagcuaccaaauca

SEQ ID NO: 1019210 - RNA, 19 nt, Artificial Sequence
  Description of Artificial Sequence: Synthetic oligonucleotide
  Sense strand starting at position 854 of SEQ ID NO: 914636
uucugaggauucuugaaca

SEQ ID NO: 1019211 - RNA, 19 nt, Artificial Sequence
  Description of Artificial Sequence: Synthetic oligonucleotide
  Antisense strand to SEQ ID NO: 1019210
uguucaagaauccucagaa

SEQ ID NO: 1019212 - RNA, 19 nt, Artificial Sequence
  Description of Artificial Sequence: Synthetic oligonucleotide
  Sense strand starting at position 886 of SEQ ID NO: 914636
aagggcauuugacaugauu

SEQ ID NO: 1019213 - RNA, 19 nt, Artificial Sequence
  Description of Artificial Sequence: Synthetic oligonucleotide
  Antisense strand to SEQ ID NO: 1019212
aaucaugucaaaugcccuu

SEQ ID NO: 1019214 - RNA, 19 nt, Artificial Sequence
  Description of Artificial Sequence: Synthetic oligonucleotide
  Sense strand starting at position 1083 of SEQ ID NO: 914636
ggaguuaaaucaggaugau

SEQ ID NO: 1019215 - RNA, 19 nt, Artificial Sequence
  Description of Artificial Sequence: Synthetic oligonucleotide
  Antisense strand to SEQ ID NO: 1019214
aucauccugauuuaacucc

SEQ ID NO: 1019216 - RNA, 19 nt, Artificial Sequence
  Description of Artificial Sequence: Synthetic oligonucleotide
  Sense strand starting at position 1086 of SEQ ID NO: 914636
guuaaaucaggaugauacu

SEQ ID NO: 1019217 - RNA, 19 nt, Artificial Sequence
  Description of Artificial Sequence: Synthetic oligonucleotide
  Antisense strand to SEQ ID NO: 1019216
aguaucauccugauuuaac

SEQ ID NO: 1019218 - RNA, 19 nt, Artificial Sequence
  Description of Artificial Sequence: Synthetic oligonucleotide
  Sense strand starting at position 1092 of SEQ ID NO: 914636
ucaggaugauacugaauuu

SEQ ID NO: 1019219 - RNA, 19 nt, Artificial Sequence
  Description of Artificial Sequence: Synthetic oligonucleotide
  Antisense strand to SEQ ID NO: 1019218
aaauucaguaucauccuga

SEQ ID NO: 1019220 - RNA, 19 nt, Artificial Sequence
  Description of Artificial Sequence: Synthetic oligonucleotide
  Sense strand starting at position 1153 of SEQ ID NO: 914636
guucuccauucuguaaauu

SEQ ID NO: 1019221 - RNA, 19 nt, Artificial Sequence
  Description of Artificial Sequence: Synthetic oligonucleotide
  Antisense strand to SEQ ID NO: 1019220
aauuuacagaauggagaac

SEQ ID NO: 1019222 - RNA, 19 nt, Artificial Sequence
  Description of Artificial Sequence: Synthetic oligonucleotide
  Sense strand starting at position 1398 of SEQ ID NO: 914636
uuuauucucgaccagagau

SEQ ID NO: 1019223 - RNA, 19 nt, Artificial Sequence
  Description of Artificial Sequence: Synthetic oligonucleotide
  Antisense strand to SEQ ID NO: 1019222
aucucuggucgagaauaaa

SEQ ID NO: 1019224 - RNA, 19 nt, Artificial Sequence
  Description of Artificial Sequence: Synthetic oligonucleotide
  Sense strand starting at position 1663 of SEQ ID NO: 914636
ggguacaagucugcaucua

SEQ ID NO: 1019225 - RNA, 19 nt, Artificial Sequence
  Description of Artificial Sequence: Synthetic oligonucleotide
  Antisense strand to SEQ ID NO: 1019224
uagaugcagacuuguaccc

SEQ ID NO: 1019226 - RNA, 19 nt, Artificial Sequence
  Description of Artificial Sequence: Synthetic oligonucleotide
  Sense strand starting at position 1675 of SEQ ID NO: 914636
gcaucuagaugccuggauu

SEQ ID NO: 1019227 - RNA, 19 nt, Artificial Sequence
  Description of Artificial Sequence: Synthetic oligonucleotide
  Antisense strand to SEQ ID NO: 1019226
aauccaggcaucuagaugc

SEQ ID NO: 1019228 - RNA, 19 nt, Artificial Sequence
  Description of Artificial Sequence: Synthetic oligonucleotide
  Sense strand starting at position 1725 of SEQ ID NO: 914636
caguaaagucgugggaggu

SEQ ID NO: 1019229 - RNA, 19 nt, Artificial Sequence
  Description of Artificial Sequence: Synthetic oligonucleotide
  Antisense strand to SEQ ID NO: 1019228
accucccacgacuuuacug

SEQ ID NO: 1019230 - RNA, 19 nt, Artificial Sequence
  Description of Artificial Sequence: Synthetic oligonucleotide
  Sense strand starting at position 1734 of SEQ ID NO: 914636
cgugggaggucgcuugaca

SEQ ID NO: 1019231 - RNA, 19 nt, Artificial Sequence
  Description of Artificial Sequence: Synthetic oligonucleotide
  Antisense strand to SEQ ID NO: 1019230
ugucaagcgaccucccacg

SEQ ID NO: 1019232 - RNA, 19 nt, Artificial Sequence
  Description of Artificial Sequence: Synthetic oligonucleotide
  Sense strand starting at position 1741 of SEQ ID NO: 914636
ggucgcuugacaggaaagu

SEQ ID NO: 1019233 - RNA, 19 nt, Artificial Sequence
  Description of Artificial Sequence: Synthetic oligonucleotide
  Antisense strand to SEQ ID NO: 1019232
acuuuccugucaagcgacc

SEQ ID NO: 1019234 - RNA, 19 nt, Artificial Sequence
  Description of Artificial Sequence: Synthetic oligonucleotide
  Sense strand starting at position 1742 of SEQ ID NO: 914636
gucgcuugacaggaaaguu

SEQ ID NO: 1019235 - RNA, 19 nt, Artificial Sequence
  Description of Artificial Sequence: Synthetic oligonucleotide
  Antisense strand to SEQ ID NO: 1019234
aacuuuccugucaagcgac

SEQ ID NO: 1019236 - RNA, 19 nt, Artificial Sequence
  Description of Artificial Sequence: Synthetic oligonucleotide
  Sense strand starting at position 1770 of SEQ ID NO: 914636
gucccaaagcuccaaguau

SEQ ID NO: 1019237 - RNA, 19 nt, Artificial Sequence
  Description of Artificial Sequence: Synthetic oligonucleotide
  Antisense strand to SEQ ID NO: 1019236
auacuuggagcuuugggac

SEQ ID NO: 1019238 - RNA, 19 nt, Artificial Sequence
  Description of Artificial Sequence: Synthetic oligonucleotide
  Sense strand starting at position 2071 of SEQ ID NO: 914636
cgugguuuccaggacaaca

SEQ ID NO: 1019239 - RNA, 19 nt, Artificial Sequence
  Description of Artificial Sequence: Synthetic oligonucleotide
  Antisense strand to SEQ ID NO: 1019238
uguuguccuggaaaccacg

SEQ ID NO: 1019240 - RNA, 19 nt, Artificial Sequence
  Description of Artificial Sequence: Synthetic oligonucleotide
  Sense strand starting at position 3174 of SEQ ID NO: 914636
ugagaacucagguguagga

SEQ ID NO: 1019241 - RNA, 19 nt, Artificial Sequence
  Description of Artificial Sequence: Synthetic oligonucleotide
  Antisense strand to SEQ ID NO: 1019240
uccuacaccugaguucuca

SEQ ID NO: 1019242 - RNA, 19 nt, Artificial Sequence
  Description of Artificial Sequence: Synthetic oligonucleotide
  Sense strand starting at position 3568 of SEQ ID NO: 914636
gcucguccuccucuguaau

SEQ ID NO: 1019243 - RNA, 19 nt, Artificial Sequence
  Description of Artificial Sequence: Synthetic oligonucleotide
  Antisense strand to SEQ ID NO: 1019242
auuacagaggaggacgagc

SEQ ID NO: 1019244 - RNA, 19 nt, Artificial Sequence
  Description of Artificial Sequence: Synthetic oligonucleotide
  Sense strand starting at position 3578 of SEQ ID NO: 914636
cucuguaaucgcgugucuu

SEQ ID NO: 1019245 - RNA, 19 nt, Artificial Sequence
  Description of Artificial Sequence: Synthetic oligonucleotide
  Antisense strand to SEQ ID NO: 1019244
aagacacgcgauuacagag

SEQ ID NO: 1019246 - RNA, 19 nt, Artificial Sequence
  Description of Artificial Sequence: Synthetic oligonucleotide
  Sense strand starting at position 3580 of SEQ ID NO: 914636
cuguaaucgcgugucuuua

SEQ ID NO: 1019247 - RNA, 19 nt, Artificial Sequence
  Description of Artificial Sequence: Synthetic oligonucleotide
  Antisense strand to SEQ ID NO: 1019246
uaaagacacgcgauuacag

SEQ ID NO: 1019248 - RNA, 19 nt, Artificial Sequence
  Description of Artificial Sequence: Synthetic oligonucleotide
  Sense strand starting at position 3581 of SEQ ID NO: 914636
uguaaucgcgugucuuuag

SEQ ID NO: 1019249 - RNA, 19 nt, Artificial Sequence
  Description of Artificial Sequence: Synthetic oligonucleotide
  Antisense strand to SEQ ID NO: 1019248
cuaaagacacgcgauuaca

SEQ ID NO: 1019250 - RNA, 19 nt, Artificial Sequence
  Description of Artificial Sequence: Synthetic oligonucleotide
  Sense strand starting at position 3902 of SEQ ID NO: 914636
gcaggucuugcucaagaag

SEQ ID NO: 1019251 - RNA, 19 nt, Artificial Sequence
  Description of Artificial Sequence: Synthetic oligonucleotide
  Antisense strand to SEQ ID NO: 1019250
cuucuugagcaagaccugc

SEQ ID NO: 1019252 - RNA, 19 nt, Artificial Sequence
  Description of Artificial Sequence: Synthetic oligonucleotide
  Sense strand starting at position 3921 of SEQ ID NO: 914636
gcgcuucgaccugaaagca

SEQ ID NO: 1019253 - RNA, 19 nt, Artificial Sequence
  Description of Artificial Sequence: Synthetic oligonucleotide
  Antisense strand to SEQ ID NO: 1019252
ugcuuucaggucgaagcgc

SEQ ID NO: 1019254 - RNA, 19 nt, Artificial Sequence
  Description of Artificial Sequence: Synthetic oligonucleotide
  Sense strand starting at position 3978 of SEQ ID NO: 914636
gcucgcagauuugaaauaa

SEQ ID NO: 1019255 - RNA, 19 nt, Artificial Sequence
  Description of Artificial Sequence: Synthetic oligonucleotide
  Antisense strand to SEQ ID NO: 1019254
uuauuucaaaucugcgagc

SEQ ID NO: 1019256 - RNA, 19 nt, Artificial Sequence
  Description of Artificial Sequence: Synthetic oligonucleotide
  Sense strand starting at position 8 of SEQ ID NO: 914637
acucuaaucugccuagaga

SEQ ID NO: 1019257 - RNA, 19 nt, Artificial Sequence
  Description of Artificial Sequence: Synthetic oligonucleotide
  Antisense strand to SEQ ID NO: 1019256
ucucuaggcagauuagagu

SEQ ID NO: 1019258 - RNA, 19 nt, Artificial Sequence
  Description of Artificial Sequence: Synthetic oligonucleotide
  Sense strand starting at position 9 of SEQ ID NO: 914637
cucuaaucugccuagagaa

SEQ ID NO: 1019259 - RNA, 19 nt, Artificial Sequence
  Description of Artificial Sequence: Synthetic oligonucleotide
  Antisense strand to SEQ ID NO: 1019258
uucucuaggcagauuagag

SEQ ID NO: 1019260 - RNA, 19 nt, Artificial Sequence
  Description of Artificial Sequence: Synthetic oligonucleotide
  Sense strand starting at position 92 of SEQ ID NO: 914637
guuagaucccaauguacag

SEQ ID NO: 1019261 - RNA, 19 nt, Artificial Sequence
  Description of Artificial Sequence: Synthetic oligonucleotide
  Antisense strand to SEQ ID NO: 1019260
cuguacauugggaucuaac

SEQ ID NO: 1019262 - RNA, 19 nt, Artificial Sequence
  Description of Artificial Sequence: Synthetic oligonucleotide
  Sense strand starting at position 99 of SEQ ID NO: 914637
cccaauguacagugagauu

SEQ ID NO: 1019263 - RNA, 19 nt, Artificial Sequence
  Description of Artificial Sequence: Synthetic oligonucleotide
  Antisense strand to SEQ ID NO: 1019262
aaucucacuguacauuggg

SEQ ID NO: 1019264 - RNA, 19 nt, Artificial Sequence
  Description of Artificial Sequence: Synthetic oligonucleotide
  Sense strand starting at position 319 of SEQ ID NO: 914637
agaaacugcguguagaaga

SEQ ID NO: 1019265 - RNA, 19 nt, Artificial Sequence
  Description of Artificial Sequence: Synthetic oligonucleotide
  Antisense strand to SEQ ID NO: 1019264
ucuucuacacgcaguuucu

SEQ ID NO: 1019266 - RNA, 19 nt, Artificial Sequence
  Description of Artificial Sequence: Synthetic oligonucleotide
  Sense strand starting at position 495 of SEQ ID NO: 914637
caagauacuucguugaccu

SEQ ID NO: 1019267 - RNA, 19 nt, Artificial Sequence
  Description of Artificial Sequence: Synthetic oligonucleotide
  Antisense strand to SEQ ID NO: 1019266
aggucaacgaaguaucuug

SEQ ID NO: 1019268 - RNA, 19 nt, Artificial Sequence
  Description of Artificial Sequence: Synthetic oligonucleotide
  Sense strand starting at position 497 of SEQ ID NO: 914637
agauacuucguugaccuua

SEQ ID NO: 1019269 - RNA, 19 nt, Artificial Sequence
  Description of Artificial Sequence: Synthetic oligonucleotide
  Antisense strand to SEQ ID NO: 1019268
uaaggucaacgaaguaucu

SEQ ID NO: 1019270 - RNA, 19 nt, Artificial Sequence
  Description of Artificial Sequence: Synthetic oligonucleotide
  Sense strand starting at position 508 of SEQ ID NO: 914637
ugaccuuacugguuaucaa

SEQ ID NO: 1019271 - RNA, 19 nt, Artificial Sequence
  Description of Artificial Sequence: Synthetic oligonucleotide
  Antisense strand to SEQ ID NO: 1019270
uugauaaccaguaagguca

SEQ ID NO: 1019272 - RNA, 19 nt, Artificial Sequence
  Description of Artificial Sequence: Synthetic oligonucleotide
  Sense strand starting at position 588 of SEQ ID NO: 914637
aaacucaguuggguuaaau

SEQ ID NO: 1019273 - RNA, 19 nt, Artificial Sequence
  Description of Artificial Sequence: Synthetic oligonucleotide
  Antisense strand to SEQ ID NO: 1019272
auuuaacccaacugaguuu

SEQ ID NO: 1019274 - RNA, 19 nt, Artificial Sequence
  Description of Artificial Sequence: Synthetic oligonucleotide
  Sense strand starting at position 959 of SEQ ID NO: 914637
ccgcaaaucgaagaucacu

SEQ ID NO: 1019275 - RNA, 19 nt, Artificial Sequence
  Description of Artificial Sequence: Synthetic oligonucleotide
  Antisense strand to SEQ ID NO: 1019274
agugaucuucgauuugcgg

SEQ ID NO: 1019276 - RNA, 19 nt, Artificial Sequence
  Description of Artificial Sequence: Synthetic oligonucleotide
  Sense strand starting at position 2310 of SEQ ID NO: 914637
guuugaauucucguuugcu

SEQ ID NO: 1019277 - RNA, 19 nt, Artificial Sequence
  Description of Artificial Sequence: Synthetic oligonucleotide
  Antisense strand to SEQ ID NO: 1019276
agcaaacgagaauucaaac

SEQ ID NO: 1019278 - RNA, 19 nt, Artificial Sequence
  Description of Artificial Sequence: Synthetic oligonucleotide
  Sense strand starting at position 2384 of SEQ ID NO: 914637
accgaauuauacucuagac

SEQ ID NO: 1019279 - RNA, 19 nt, Artificial Sequence
  Description of Artificial Sequence: Synthetic oligonucleotide
  Antisense strand to SEQ ID NO: 1019278
gucuagaguauaauucggu

SEQ ID NO: 1019280 - RNA, 19 nt, Artificial Sequence
  Description of Artificial Sequence: Synthetic oligonucleotide
  Sense strand starting at position 2418 of SEQ ID NO: 914637
gucggauauuuauucuguu

SEQ ID NO: 1019281 - RNA, 19 nt, Artificial Sequence
  Description of Artificial Sequence: Synthetic oligonucleotide
  Antisense strand to SEQ ID NO: 1019280
aacagaauaaauauccgac

SEQ ID NO: 1019282 - RNA, 19 nt, Artificial Sequence
  Description of Artificial Sequence: Synthetic oligonucleotide
  Sense strand starting at position 2475 of SEQ ID NO: 914637
uaccaauagugguuaagac

SEQ ID NO: 1019283 - RNA, 19 nt, Artificial Sequence
  Description of Artificial Sequence: Synthetic oligonucleotide
  Antisense strand to SEQ ID NO: 1019282
gucuuaaccacuauuggua

SEQ ID NO: 1019284 - RNA, 19 nt, Artificial Sequence
  Description of Artificial Sequence: Synthetic oligonucleotide
  Sense strand starting at position 2568 of SEQ ID NO: 914637
aaggauaggcccugaacua

SEQ ID NO: 1019285 - RNA, 19 nt, Artificial Sequence
  Description of Artificial Sequence: Synthetic oligonucleotide
  Antisense strand to SEQ ID NO: 1019284
uaguucagggccuauccuu

SEQ ID NO: 1019286 - RNA, 19 nt, Artificial Sequence
  Description of Artificial Sequence: Synthetic oligonucleotide
  Sense strand starting at position 2608 of SEQ ID NO: 914637
gcucaucuccauuaugaga

SEQ ID NO: 1019287 - RNA, 19 nt, Artificial Sequence
  Description of Artificial Sequence: Synthetic oligonucleotide
  Antisense strand to SEQ ID NO: 1019286
ucucauaauggagaugagc

SEQ ID NO: 1019288 - RNA, 19 nt, Artificial Sequence
  Description of Artificial Sequence: Synthetic oligonucleotide
  Sense strand starting at position 2616 of SEQ ID NO: 914637
ccauuaugagauugugaua

SEQ ID NO: 1019289 - RNA, 19 nt, Artificial Sequence
  Description of Artificial Sequence: Synthetic oligonucleotide
  Antisense strand to SEQ ID NO: 1019288
uaucacaaucucauaaugg

SEQ ID NO: 1019290 - RNA, 19 nt, Artificial Sequence
  Description of Artificial Sequence: Synthetic oligonucleotide
  Sense strand starting at position 2628 of SEQ ID NO: 914637
ugugauacuuaaccgacaa

SEQ ID NO: 1019291 - RNA, 19 nt, Artificial Sequence
  Description of Artificial Sequence: Synthetic oligonucleotide
  Antisense strand to SEQ ID NO: 1019290
uugucgguuaaguaucaca

SEQ ID NO: 1019292 - RNA, 19 nt, Artificial Sequence
  Description of Artificial Sequence: Synthetic oligonucleotide
  Sense strand starting at position 2632 of SEQ ID NO: 914637
auacuuaaccgacaauguu

SEQ ID NO: 1019293 - RNA, 19 nt, Artificial Sequence
  Description of Artificial Sequence: Synthetic oligonucleotide
  Antisense strand to SEQ ID NO: 1019292
aacauugucgguuaaguau

SEQ ID NO: 1019294 - RNA, 19 nt, Artificial Sequence
  Description of Artificial Sequence: Synthetic oligonucleotide
  Sense strand starting at position 2719 of SEQ ID NO: 914637
auauuugccucuguuacua

SEQ ID NO: 1019295 - RNA, 19 nt, Artificial Sequence
  Description of Artificial Sequence: Synthetic oligonucleotide
  Antisense strand to SEQ ID NO: 1019294
uaguaacagaggcaaauau

SEQ ID NO: 1019296 - RNA, 19 nt, Artificial Sequence
  Description of Artificial Sequence: Synthetic oligonucleotide
  Sense strand starting at position 2751 of SEQ ID NO: 914637
gcaggugccagauaacauu

SEQ ID NO: 1019297 - RNA, 19 nt, Artificial Sequence
  Description of Artificial Sequence: Synthetic oligonucleotide
  Antisense strand to SEQ ID NO: 1019296
aauguuaucuggcaccugc

SEQ ID NO: 1019298 - RNA, 19 nt, Artificial Sequence
  Description of Artificial Sequence: Synthetic oligonucleotide
  Sense strand starting at position 2757 of SEQ ID NO: 914637
gccagauaacauuggugag

SEQ ID NO: 1019299 - RNA, 19 nt, Artificial Sequence
  Description of Artificial Sequence: Synthetic oligonucleotide
  Antisense strand to SEQ ID NO: 1019298
cucaccaauguuaucuggc

SEQ ID NO: 1019300 - RNA, 19 nt, Artificial Sequence
  Description of Artificial Sequence: Synthetic oligonucleotide
  Sense strand starting at position 2771 of SEQ ID NO: 914637
gugagccuuguggaauuau

SEQ ID NO: 1019301 - RNA, 19 nt, Artificial Sequence
  Description of Artificial Sequence: Synthetic oligonucleotide
  Antisense strand to SEQ ID NO: 1019300
auaauuccacaaggcucac

SEQ ID NO: 1019302 - RNA, 19 nt, Artificial Sequence
  Description of Artificial Sequence: Synthetic oligonucleotide
  Sense strand starting at position 2782 of SEQ ID NO: 914637
ggaauuauuauauggguca

SEQ ID NO: 1019303 - RNA, 19 nt, Artificial Sequence
  Description of Artificial Sequence: Synthetic oligonucleotide
  Antisense strand to SEQ ID NO: 1019302
ugacccauauaauaauucc

SEQ ID NO: 1019304 - RNA, 19 nt, Artificial Sequence
  Description of Artificial Sequence: Synthetic oligonucleotide
  Sense strand starting at position 2785 of SEQ ID NO: 914637
auuauuauaugggucauga

SEQ ID NO: 1019305 - RNA, 19 nt, Artificial Sequence
  Description of Artificial Sequence: Synthetic oligonucleotide
  Antisense strand to SEQ ID NO: 1019304
ucaugacccauauaauaau

SEQ ID NO: 1019306 - RNA, 19 nt, Artificial Sequence
  Description of Artificial Sequence: Synthetic oligonucleotide
  Sense strand starting at position 2887 of SEQ ID NO: 914637
uuagaacaugauugugacu

SEQ ID NO: 1019307 - RNA, 19 nt, Artificial Sequence
  Description of Artificial Sequence: Synthetic oligonucleotide
  Antisense strand to SEQ ID NO: 1019306
agucacaaucauguucuaa

SEQ ID NO: 1019308 - RNA, 19 nt, Artificial Sequence
  Description of Artificial Sequence: Synthetic oligonucleotide
  Sense strand starting at position 2999 of SEQ ID NO: 914637
cuugauguuguauaucuuu

SEQ ID NO: 1019309 - RNA, 19 nt, Artificial Sequence
  Description of Artificial Sequence: Synthetic oligonucleotide
  Antisense strand to SEQ ID NO: 1019308
aaagauauacaacaucaag

SEQ ID NO: 1019310 - RNA, 19 nt, Artificial Sequence
  Description of Artificial Sequence: Synthetic oligonucleotide
  Sense strand starting at position 3041 of SEQ ID NO: 914637
ccuagagugcaccauccau

SEQ ID NO: 1019311 - RNA, 19 nt, Artificial Sequence
  Description of Artificial Sequence: Synthetic oligonucleotide
  Antisense strand to SEQ ID NO: 1019310
auggauggugcacucuagg

SEQ ID NO: 1019312 - RNA, 19 nt, Artificial Sequence
  Description of Artificial Sequence: Synthetic oligonucleotide
  Sense strand starting at position 3119 of SEQ ID NO: 914637
uccuuaucugcagauugca

SEQ ID NO: 1019313 - RNA, 19 nt, Artificial Sequence
  Description of Artificial Sequence: Synthetic oligonucleotide
  Antisense strand to SEQ ID NO: 1019312
ugcaaucugcagauaagga

SEQ ID NO: 1019314 - RNA, 19 nt, Artificial Sequence
  Description of Artificial Sequence: Synthetic oligonucleotide
  Sense strand starting at position 3166 of SEQ ID NO: 914637
agaacucuugguugagaau

SEQ ID NO: 1019315 - RNA, 19 nt, Artificial Sequence
  Description of Artificial Sequence: Synthetic oligonucleotide
  Antisense strand to SEQ ID NO: 1019314
auucucaaccaagaguucu

SEQ ID NO: 1019316 - RNA, 19 nt, Artificial Sequence
  Description of Artificial Sequence: Synthetic oligonucleotide
  Sense strand starting at position 3211 of SEQ ID NO: 914637
gucagaaugagagguuucu

SEQ ID NO: 1019317 - RNA, 19 nt, Artificial Sequence
  Description of Artificial Sequence: Synthetic oligonucleotide
  Antisense strand to SEQ ID NO: 1019316
agaaaccucucauucugac

SEQ ID NO: 1019318 - RNA, 19 nt, Artificial Sequence
  Description of Artificial Sequence: Synthetic oligonucleotide
  Sense strand starting at position 3279 of SEQ ID NO: 914637
ucucaaugacggcagucau

SEQ ID NO: 1019319 - RNA, 19 nt, Artificial Sequence
  Description of Artificial Sequence: Synthetic oligonucleotide
  Antisense strand to SEQ ID NO: 1019318
augacugccgucauugaga

SEQ ID NO: 1019320 - RNA, 19 nt, Artificial Sequence
  Description of Artificial Sequence: Synthetic oligonucleotide
  Sense strand starting at position 3335 of SEQ ID NO: 914637
acuccucaguuggugagaa

SEQ ID NO: 1019321 - RNA, 19 nt, Artificial Sequence
  Description of Artificial Sequence: Synthetic oligonucleotide
  Antisense strand to SEQ ID NO: 1019320
uucucaccaacugaggagu

SEQ ID NO: 1019322 - RNA, 19 nt, Artificial Sequence
  Description of Artificial Sequence: Synthetic oligonucleotide
  Sense strand starting at position 3337 of SEQ ID NO: 914637
uccucaguuggugagaaga

SEQ ID NO: 1019323 - RNA, 19 nt, Artificial Sequence
  Description of Artificial Sequence: Synthetic oligonucleotide
  Antisense strand to SEQ ID NO: 1019322
ucuucucaccaacugagga

SEQ ID NO: 1019324 - RNA, 19 nt, Artificial Sequence
  Description of Artificial Sequence: Synthetic oligonucleotide
  Sense strand starting at position 3576 of SEQ ID NO: 914637
ggagucaacgucuagucau

SEQ ID NO: 1019325 - RNA, 19 nt, Artificial Sequence
  Description of Artificial Sequence: Synthetic oligonucleotide
  Antisense strand to SEQ ID NO: 1019324
augacuagacguugacucc

SEQ ID NO: 1019326 - RNA, 19 nt, Artificial Sequence
  Description of Artificial Sequence: Synthetic oligonucleotide
  Sense strand starting at position 3609 of SEQ ID NO: 914637
gcugaacauuuggauaaag

SEQ ID NO: 1019327 - RNA, 19 nt, Artificial Sequence
  Description of Artificial Sequence: Synthetic oligonucleotide
  Antisense strand to SEQ ID NO: 1019326
cuuuauccaaauguucagc

SEQ ID NO: 1019328 - RNA, 19 nt, Artificial Sequence
  Description of Artificial Sequence: Synthetic oligonucleotide
  Sense strand starting at position 3780 of SEQ ID NO: 914637
cguuauugucacuacauua

SEQ ID NO: 1019329 - RNA, 19 nt, Artificial Sequence
  Description of Artificial Sequence: Synthetic oligonucleotide
  Antisense strand to SEQ ID NO: 1019328
uaauguagugacaauaacg

SEQ ID NO: 1019330 - RNA, 19 nt, Artificial Sequence
  Description of Artificial Sequence: Synthetic oligonucleotide
  Sense strand starting at position 3862 of SEQ ID NO: 914637
agcugucaagacuaucaca

SEQ ID NO: 1019331 - RNA, 19 nt, Artificial Sequence
  Description of Artificial Sequence: Synthetic oligonucleotide
  Antisense strand to SEQ ID NO: 1019330
ugugauagucuugacagcu

SEQ ID NO: 1019332 - RNA, 19 nt, Artificial Sequence
  Description of Artificial Sequence: Synthetic oligonucleotide
  Sense strand starting at position 3928 of SEQ ID NO: 914637
auguauagucaaggagcaa

SEQ ID NO: 1019333 - RNA, 19 nt, Artificial Sequence
  Description of Artificial Sequence: Synthetic oligonucleotide
  Antisense strand to SEQ ID NO: 1019332
uugcuccuugacuauacau

SEQ ID NO: 1019334 - RNA, 19 nt, Artificial Sequence
  Description of Artificial Sequence: Synthetic oligonucleotide
  Sense strand starting at position 3929 of SEQ ID NO: 914637
uguauagucaaggagcaaa

SEQ ID NO: 1019335 - RNA, 19 nt, Artificial Sequence
  Description of Artificial Sequence: Synthetic oligonucleotide
  Antisense strand to SEQ ID NO: 1019334
uuugcuccuugacuauaca

SEQ ID NO: 1019336 - RNA, 19 nt, Artificial Sequence
  Description of Artificial Sequence: Synthetic oligonucleotide
  Sense strand starting at position 8 of SEQ ID NO: 914638
ggcugaugauucucacuau

SEQ ID NO: 1019337 - RNA, 19 nt, Artificial Sequence
  Description of Artificial Sequence: Synthetic oligonucleotide
  Antisense strand to SEQ ID NO: 1019336
auagugagaaucaucagcc

SEQ ID NO: 1019338 - RNA, 19 nt, Artificial Sequence
  Description of Artificial Sequence: Synthetic oligonucleotide
  Sense strand starting at position 137 of SEQ ID NO: 914638
ggauauuuguaugaaaucu

SEQ ID NO: 1019339 - RNA, 19 nt, Artificial Sequence
  Description of Artificial Sequence: Synthetic oligonucleotide
  Antisense strand to SEQ ID NO: 1019338
agauuucauacaaauaucc

SEQ ID NO: 1019340 - RNA, 19 nt, Artificial Sequence
  Description of Artificial Sequence: Synthetic oligonucleotide
  Sense strand starting at position 191 of SEQ ID NO: 914638
uguaucaaugucuguauca

SEQ ID NO: 1019341 - RNA, 19 nt, Artificial Sequence
  Description of Artificial Sequence: Synthetic oligonucleotide
  Antisense strand to SEQ ID NO: 1019340
ugauacagacauugauaca

SEQ ID NO: 1019342 - RNA, 19 nt, Artificial Sequence
  Description of Artificial Sequence: Synthetic oligonucleotide
  Sense strand starting at position 192 of SEQ ID NO: 914638
guaucaaugucuguaucag

SEQ ID NO: 1019343 - RNA, 19 nt, Artificial Sequence
  Description of Artificial Sequence: Synthetic oligonucleotide
  Antisense strand to SEQ ID NO: 1019342
cugauacagacauugauac

SEQ ID NO: 1019344 - RNA, 19 nt, Artificial Sequence
  Description of Artificial Sequence: Synthetic oligonucleotide
  Sense strand starting at position 198 of SEQ ID NO: 914638
augucuguaucaguuaaag

SEQ ID NO: 1019345 - RNA, 19 nt, Artificial Sequence
  Description of Artificial Sequence: Synthetic oligonucleotide
  Antisense strand to SEQ ID NO: 1019344
cuuuaacugauacagacau

SEQ ID NO: 1019346 - RNA, 19 nt, Artificial Sequence
  Description of Artificial Sequence: Synthetic oligonucleotide
  Sense strand starting at position 200 of SEQ ID NO: 914638
gucuguaucaguuaaagua

SEQ ID NO: 1019347 - RNA, 19 nt, Artificial Sequence
  Description of Artificial Sequence: Synthetic oligonucleotide
  Antisense strand to SEQ ID NO: 1019346
uacuuuaacugauacagac

SEQ ID NO: 1019348 - RNA, 19 nt, Artificial Sequence
  Description of Artificial Sequence: Synthetic oligonucleotide
  Sense strand starting at position 329 of SEQ ID NO: 914638
cugauauauuugcacugaa

SEQ ID NO: 1019349 - RNA, 19 nt, Artificial Sequence
  Description of Artificial Sequence: Synthetic oligonucleotide
  Antisense strand to SEQ ID NO: 1019348
uucagugcaaauauaucag

SEQ ID NO: 1019350 - RNA, 19 nt, Artificial Sequence
  Description of Artificial Sequence: Synthetic oligonucleotide
  Sense strand starting at position 547 of SEQ ID NO: 914638
gggccuugguuucucagaa

SEQ ID NO: 1019351 - RNA, 19 nt, Artificial Sequence
  Description of Artificial Sequence: Synthetic oligonucleotide
  Antisense strand to SEQ ID NO: 1019350
uucugagaaaccaaggccc

SEQ ID NO: 1019352 - RNA, 19 nt, Artificial Sequence
  Description of Artificial Sequence: Synthetic oligonucleotide
  Sense strand starting at position 548 of SEQ ID NO: 914638
ggccuugguuucucagaac

SEQ ID NO: 1019353 - RNA, 19 nt, Artificial Sequence
  Description of Artificial Sequence: Synthetic oligonucleotide
  Antisense strand to SEQ ID NO: 1019352
guucugagaaaccaaggcc

SEQ ID NO: 1019354 - RNA, 19 nt, Artificial Sequence
  Description of Artificial Sequence: Synthetic oligonucleotide
  Sense strand starting at position 604 of SEQ ID NO: 914638
caggaaauuugcggagaaa

SEQ ID NO: 1019355 - RNA, 19 nt, Artificial Sequence
  Description of Artificial Sequence: Synthetic oligonucleotide
  Antisense strand to SEQ ID NO: 1019354
uuucuccgcaaauuuccug

SEQ ID NO: 1019356 - RNA, 19 nt, Artificial Sequence
  Description of Artificial Sequence: Synthetic oligonucleotide
  Sense strand starting at position 877 of SEQ ID NO: 914638
ugaaccaaguccuuuagua

SEQ ID NO: 1019357 - RNA, 19 nt, Artificial Sequence
  Description of Artificial Sequence: Synthetic oligonucleotide
  Antisense strand to SEQ ID NO: 1019356
uacuaaaggacuugguuca

SEQ ID NO: 1019358 - RNA, 19 nt, Artificial Sequence
  Description of Artificial Sequence: Synthetic oligonucleotide
  Sense strand starting at position 898 of SEQ ID NO: 914638
ugucauauguaaucagaau

SEQ ID NO: 1019359 - RNA, 19 nt, Artificial Sequence
  Description of Artificial Sequence: Synthetic oligonucleotide
  Antisense strand to SEQ ID NO: 1019358
auucugauuacauaugaca

SEQ ID NO: 1019360 - RNA, 19 nt, Artificial Sequence
  Description of Artificial Sequence: Synthetic oligonucleotide
  Sense strand starting at position 909 of SEQ ID NO: 914638
aucagaauccuccgaaaua

SEQ ID NO: 1019361 - RNA, 19 nt, Artificial Sequence
  Description of Artificial Sequence: Synthetic oligonucleotide
  Antisense strand to SEQ ID NO: 1019360
uauuucggaggauucugau

SEQ ID NO: 1019362 - RNA, 19 nt, Artificial Sequence
  Description of Artificial Sequence: Synthetic oligonucleotide
  Sense strand starting at position 956 of SEQ ID NO: 914638
aaauaaagcuuguugacag

SEQ ID NO: 1019363 - RNA, 19 nt, Artificial Sequence
  Description of Artificial Sequence: Synthetic oligonucleotide
  Antisense strand to SEQ ID NO: 1019362
cugucaacaagcuuuauuu

SEQ ID NO: 1019364 - RNA, 19 nt, Artificial Sequence
  Description of Artificial Sequence: Synthetic oligonucleotide
  Sense strand starting at position 960 of SEQ ID NO: 914638
aaagcuuguugacagauuu

SEQ ID NO: 1019365 - RNA, 19 nt, Artificial Sequence
  Description of Artificial Sequence: Synthetic oligonucleotide
  Antisense strand to SEQ ID NO: 1019364
aaaucugucaacaagcuuu

SEQ ID NO: 1019366 - RNA, 19 nt, Artificial Sequence
  Description of Artificial Sequence: Synthetic oligonucleotide
  Sense strand starting at position 988 of SEQ ID NO: 914638
uaaggacaccucuggaagu

SEQ ID NO: 1019367 - RNA, 19 nt, Artificial Sequence
  Description of Artificial Sequence: Synthetic oligonucleotide
  Antisense strand to SEQ ID NO: 1019366
acuuccagagguguccuua

SEQ ID NO: 1019368 - RNA, 19 nt, Artificial Sequence
  Description of Artificial Sequence: Synthetic oligonucleotide
  Sense strand starting at position 1248 of SEQ ID NO: 914638
auggcaugccgucuucuua

SEQ ID NO: 1019369 - RNA, 19 nt, Artificial Sequence
  Description of Artificial Sequence: Synthetic oligonucleotide
  Antisense strand to SEQ ID NO: 1019368
uaagaagacggcaugccau

SEQ ID NO: 1019370 - RNA, 19 nt, Artificial Sequence
  Description of Artificial Sequence: Synthetic oligonucleotide
  Sense strand starting at position 1249 of SEQ ID NO: 914638
uggcaugccgucuucuuaa

SEQ ID NO: 1019371 - RNA, 19 nt, Artificial Sequence
  Description of Artificial Sequence: Synthetic oligonucleotide
  Antisense strand to SEQ ID NO: 1019370
uuaagaagacggcaugcca

SEQ ID NO: 1019372 - RNA, 19 nt, Artificial Sequence
  Description of Artificial Sequence: Synthetic oligonucleotide
  Sense strand starting at position 1293 of SEQ ID NO: 914638
uuucuuuccgugucgcgaa

SEQ ID NO: 1019373 - RNA, 19 nt, Artificial Sequence
  Description of Artificial Sequence: Synthetic oligonucleotide
  Antisense strand to SEQ ID NO: 1019372
uucgcgacacggaaagaaa

SEQ ID NO: 1019374 - RNA, 19 nt, Artificial Sequence
  Description of Artificial Sequence: Synthetic oligonucleotide
  Sense strand starting at position 1349 of SEQ ID NO: 914638
ggcguugggcuucucuauu

SEQ ID NO: 1019375 - RNA, 19 nt, Artificial Sequence
  Description of Artificial Sequence: Synthetic oligonucleotide
  Antisense strand to SEQ ID NO: 1019374
aauagagaagcccaacgcc

SEQ ID NO: 1019376 - RNA, 19 nt, Artificial Sequence
  Description of Artificial Sequence: Synthetic oligonucleotide
  Sense strand starting at position 1381 of SEQ ID NO: 914638
gaguccaauuggucugacu

SEQ ID NO: 1019377 - RNA, 19 nt, Artificial Sequence
  Description of Artificial Sequence: Synthetic oligonucleotide
  Antisense strand to SEQ ID NO: 1019376
agucagaccaauuggacuc

SEQ ID NO: 1019378 - RNA, 19 nt, Artificial Sequence
  Description of Artificial Sequence: Synthetic oligonucleotide
  Sense strand starting at position 1383 of SEQ ID NO: 914638
guccaauuggucugacuuc

SEQ ID NO: 1019379 - RNA, 19 nt, Artificial Sequence
  Description of Artificial Sequence: Synthetic oligonucleotide
  Antisense strand to SEQ ID NO: 1019378
gaagucagaccaauuggac

SEQ ID NO: 1019380 - RNA, 19 nt, Artificial Sequence
  Description of Artificial Sequence: Synthetic oligonucleotide
  Sense strand starting at position 1395 of SEQ ID NO: 914638
ugacuucacuguccggaga

SEQ ID NO: 1019381 - RNA, 19 nt, Artificial Sequence
  Description of Artificial Sequence: Synthetic oligonucleotide
  Antisense strand to SEQ ID NO: 1019380
ucuccggacagugaaguca

SEQ ID NO: 1019382 - RNA, 19 nt, Artificial Sequence
  Description of Artificial Sequence: Synthetic oligonucleotide
  Sense strand starting at position 1525 of SEQ ID NO: 914638
cacagaaguucgucaaccu

SEQ ID NO: 1019383 - RNA, 19 nt, Artificial Sequence
  Description of Artificial Sequence: Synthetic oligonucleotide
  Antisense strand to SEQ ID NO: 1019382
agguugacgaacuucugug

SEQ ID NO: 1019384 - RNA, 19 nt, Artificial Sequence
  Description of Artificial Sequence: Synthetic oligonucleotide
  Sense strand starting at position 1534 of SEQ ID NO: 914638
ucgucaaccugcccagaua

SEQ ID NO: 1019385 - RNA, 19 nt, Artificial Sequence
  Description of Artificial Sequence: Synthetic oligonucleotide
  Antisense strand to SEQ ID NO: 1019384
uaucugggcagguugacga

SEQ ID NO: 1019386 - RNA, 19 nt, Artificial Sequence
  Description of Artificial Sequence: Synthetic oligonucleotide
  Sense strand starting at position 2130 of SEQ ID NO: 914638
gagucuagacguggaggua

SEQ ID NO: 1019387 - RNA, 19 nt, Artificial Sequence
  Description of Artificial Sequence: Synthetic oligonucleotide
  Antisense strand to SEQ ID NO: 1019386
uaccuccacgucuagacuc

SEQ ID NO: 1019388 - RNA, 19 nt, Artificial Sequence
  Description of Artificial Sequence: Synthetic oligonucleotide
  Sense strand starting at position 2275 of SEQ ID NO: 914638
ggacaagugacuugauggu

SEQ ID NO: 1019389 - RNA, 19 nt, Artificial Sequence
  Description of Artificial Sequence: Synthetic oligonucleotide
  Antisense strand to SEQ ID NO: 1019388
accaucaagucacuugucc

SEQ ID NO: 1019390 - RNA, 19 nt, Artificial Sequence
  Description of Artificial Sequence: Synthetic oligonucleotide
  Sense strand starting at position 2279 of SEQ ID NO: 914638
aagugacuugaugguagau

SEQ ID NO: 1019391 - RNA, 19 nt, Artificial Sequence
  Description of Artificial Sequence: Synthetic oligonucleotide
  Antisense strand to SEQ ID NO: 1019390
aucuaccaucaagucacuu

SEQ ID NO: 1019392 - RNA, 19 nt, Artificial Sequence
  Description of Artificial Sequence: Synthetic oligonucleotide
  Sense strand starting at position 2281 of SEQ ID NO: 914638
gugacuugaugguagauuu

SEQ ID NO: 1019393 - RNA, 19 nt, Artificial Sequence
  Description of Artificial Sequence: Synthetic oligonucleotide
  Antisense strand to SEQ ID NO: 1019392
aaaucuaccaucaagucac

SEQ ID NO: 1019394 - RNA, 19 nt, Artificial Sequence
  Description of Artificial Sequence: Synthetic oligonucleotide
  Sense strand starting at position 2461 of SEQ ID NO: 914638
aagugagguuugcucacau

SEQ ID NO: 1019395 - RNA, 19 nt, Artificial Sequence
  Description of Artificial Sequence: Synthetic oligonucleotide
  Antisense strand to SEQ ID NO: 1019394
augugagcaaaccucacuu

SEQ ID NO: 1019396 - RNA, 19 nt, Artificial Sequence
  Description of Artificial Sequence: Synthetic oligonucleotide
  Sense strand starting at position 2704 of SEQ ID NO: 914638
gaugaacucuccucguuua

SEQ ID NO: 1019397 - RNA, 19 nt, Artificial Sequence
  Description of Artificial Sequence: Synthetic oligonucleotide
  Antisense strand to SEQ ID NO: 1019396
uaaacgaggagaguucauc

SEQ ID NO: 1019398 - RNA, 19 nt, Artificial Sequence
  Description of Artificial Sequence: Synthetic oligonucleotide
  Sense strand starting at position 2705 of SEQ ID NO: 914638
augaacucuccucguuuaa

SEQ ID NO: 1019399 - RNA, 19 nt, Artificial Sequence
  Description of Artificial Sequence: Synthetic oligonucleotide
  Antisense strand to SEQ ID NO: 1019398
uuaaacgaggagaguucau

SEQ ID NO: 1019400 - RNA, 19 nt, Artificial Sequence
  Description of Artificial Sequence: Synthetic oligonucleotide
  Sense strand starting at position 2707 of SEQ ID NO: 914638
gaacucuccucguuuaaag

SEQ ID NO: 1019401 - RNA, 19 nt, Artificial Sequence
  Description of Artificial Sequence: Synthetic oligonucleotide
  Antisense strand to SEQ ID NO: 1019400
cuuuaaacgaggagaguuc

SEQ ID NO: 1019402 - RNA, 19 nt, Artificial Sequence
  Description of Artificial Sequence: Synthetic oligonucleotide
  Sense strand starting at position 2747 of SEQ ID NO: 914638
cgcaaaucuccguccuugu

SEQ ID NO: 1019403 - RNA, 19 nt, Artificial Sequence
  Description of Artificial Sequence: Synthetic oligonucleotide
  Antisense strand to SEQ ID NO: 1019402
acaaggacggagauuugcg

SEQ ID NO: 1019404 - RNA, 19 nt, Artificial Sequence
  Description of Artificial Sequence: Synthetic oligonucleotide
  Sense strand starting at position 2907 of SEQ ID NO: 914638
ucgagcugugcgaacugua

SEQ ID NO: 1019405 - RNA, 19 nt, Artificial Sequence
  Description of Artificial Sequence: Synthetic oligonucleotide
  Antisense strand to SEQ ID NO: 1019404
uacaguucgcacagcucga

SEQ ID NO: 1019406 - RNA, 19 nt, Artificial Sequence
  Description of Artificial Sequence: Synthetic oligonucleotide
  Sense strand starting at position 3053 of SEQ ID NO: 914638
gggagacuguauuaauaaa

SEQ ID NO: 1019407 - RNA, 19 nt, Artificial Sequence
  Description of Artificial Sequence: Synthetic oligonucleotide
  Antisense strand to SEQ ID NO: 1019406
uuuauuaauacagucuccc

SEQ ID NO: 1019408 - RNA, 19 nt, Artificial Sequence
  Description of Artificial Sequence: Synthetic oligonucleotide
  Sense strand starting at position 3116 of SEQ ID NO: 914638
ugucgaauugcuugaggga

SEQ ID NO: 1019409 - RNA, 19 nt, Artificial Sequence
  Description of Artificial Sequence: Synthetic oligonucleotide
  Antisense strand to SEQ ID NO: 1019408
ucccucaagcaauucgaca

SEQ ID NO: 1019410 - RNA, 19 nt, Artificial Sequence
  Description of Artificial Sequence: Synthetic oligonucleotide
  Sense strand starting at position 3117 of SEQ ID NO: 914638
gucgaauugcuugagggag

SEQ ID NO: 1019411 - RNA, 19 nt, Artificial Sequence
  Description of Artificial Sequence: Synthetic oligonucleotide
  Antisense strand to SEQ ID NO: 1019410
cucccucaagcaauucgac

SEQ ID NO: 1019412 - RNA, 19 nt, Artificial Sequence
  Description of Artificial Sequence: Synthetic oligonucleotide
  Sense strand starting at position 3836 of SEQ ID NO: 914638
cccagugcuucccugaaua

SEQ ID NO: 1019413 - RNA, 19 nt, Artificial Sequence
  Description of Artificial Sequence: Synthetic oligonucleotide
  Antisense strand to SEQ ID NO: 1019412
uauucagggaagcacuggg

SEQ ID NO: 1019414 - RNA, 19 nt, Artificial Sequence
  Description of Artificial Sequence: Synthetic oligonucleotide
  Sense strand starting at position 3900 of SEQ ID NO: 914638
aagggaucggcguagcaga

SEQ ID NO: 1019415 - RNA, 19 nt, Artificial Sequence
  Description of Artificial Sequence: Synthetic oligonucleotide
  Antisense strand to SEQ ID NO: 1019414
ucugcuacgccgaucccuu

SEQ ID NO: 1019416 - RNA, 19 nt, Artificial Sequence
  Description of Artificial Sequence: Synthetic oligonucleotide
  Sense strand starting at position 94 of SEQ ID NO: 914639
acaugagugucuggaugag

SEQ ID NO: 1019417 - RNA, 19 nt, Artificial Sequence
  Description of Artificial Sequence: Synthetic oligonucleotide
  Antisense strand to SEQ ID NO: 1019416
cucauccagacacucaugu

SEQ ID NO: 1019418 - RNA, 19 nt, Artificial Sequence
  Description of Artificial Sequence: Synthetic oligonucleotide
  Sense strand starting at position 151 of SEQ ID NO: 914639
gaacaugaggucugaguuu

SEQ ID NO: 1019419 - RNA, 19 nt, Artificial Sequence
  Description of Artificial Sequence: Synthetic oligonucleotide
  Antisense strand to SEQ ID NO: 1019418
aaacucagaccucauguuc

SEQ ID NO: 1019420 - RNA, 19 nt, Artificial Sequence
  Description of Artificial Sequence: Synthetic oligonucleotide
  Sense strand starting at position 312 of SEQ ID NO: 914639
ccguguaggucguugauga

SEQ ID NO: 1019421 - RNA, 19 nt, Artificial Sequence
  Description of Artificial Sequence: Synthetic oligonucleotide
  Antisense strand to SEQ ID NO: 1019420
ucaucaacgaccuacacgg

SEQ ID NO: 1019422 - RNA, 19 nt, Artificial Sequence
  Description of Artificial Sequence: Synthetic oligonucleotide
  Sense strand starting at position 411 of SEQ ID NO: 914639
gucagacacucguugacau

SEQ ID NO: 1019423 - RNA, 19 nt, Artificial Sequence
  Description of Artificial Sequence: Synthetic oligonucleotide
  Antisense strand to SEQ ID NO: 1019422
augucaacgagugucugac

SEQ ID NO: 1019424 - RNA, 19 nt, Artificial Sequence
  Description of Artificial Sequence: Synthetic oligonucleotide
  Sense strand starting at position 504 of SEQ ID NO: 914639
ucggccuucucugagaugu

SEQ ID NO: 1019425 - RNA, 19 nt, Artificial Sequence
  Description of Artificial Sequence: Synthetic oligonucleotide
  Antisense strand to SEQ ID NO: 1019424
acaucucagagaaggccga

SEQ ID NO: 1019426 - RNA, 19 nt, Artificial Sequence
  Description of Artificial Sequence: Synthetic oligonucleotide
  Sense strand starting at position 506 of SEQ ID NO: 914639
ggccuucucugagaugugu

SEQ ID NO: 1019427 - RNA, 19 nt, Artificial Sequence
  Description of Artificial Sequence: Synthetic oligonucleotide
  Antisense strand to SEQ ID NO: 1019426
acacaucucagagaaggcc

SEQ ID NO: 1019428 - RNA, 19 nt, Artificial Sequence
  Description of Artificial Sequence: Synthetic oligonucleotide
  Sense strand starting at position 737 of SEQ ID NO: 914639
cucccagguugugaugaga

SEQ ID NO: 1019429 - RNA, 19 nt, Artificial Sequence
  Description of Artificial Sequence: Synthetic oligonucleotide
  Antisense strand to SEQ ID NO: 1019428
ucucaucacaaccugggag

SEQ ID NO: 1019430 - RNA, 19 nt, Artificial Sequence
  Description of Artificial Sequence: Synthetic oligonucleotide
  Sense strand starting at position 821 of SEQ ID NO: 914639
ggacaagguuuccuggguu

SEQ ID NO: 1019431 - RNA, 19 nt, Artificial Sequence
  Description of Artificial Sequence: Synthetic oligonucleotide
  Antisense strand to SEQ ID NO: 1019430
aacccaggaaaccuugucc

SEQ ID NO: 1019432 - RNA, 19 nt, Artificial Sequence
  Description of Artificial Sequence: Synthetic oligonucleotide
  Sense strand starting at position 1076 of SEQ ID NO: 914639
ugugcauuccuggaaggga

SEQ ID NO: 1019433 - RNA, 19 nt, Artificial Sequence
  Description of Artificial Sequence: Synthetic oligonucleotide
  Antisense strand to SEQ ID NO: 1019432
ucccuuccaggaaugcaca

SEQ ID NO: 1019434 - RNA, 19 nt, Artificial Sequence
  Description of Artificial Sequence: Synthetic oligonucleotide
  Sense strand starting at position 1329 of SEQ ID NO: 914639
ucagaauccugaggagaag

SEQ ID NO: 1019435 - RNA, 19 nt, Artificial Sequence
  Description of Artificial Sequence: Synthetic oligonucleotide
  Antisense strand to SEQ ID NO: 1019434
cuucuccucaggauucuga

SEQ ID NO: 1019436 - RNA, 19 nt, Artificial Sequence
  Description of Artificial Sequence: Synthetic oligonucleotide
  Sense strand starting at position 2137 of SEQ ID NO: 914639
augucauccugcucaccua

SEQ ID NO: 1019437 - RNA, 19 nt, Artificial Sequence
  Description of Artificial Sequence: Synthetic oligonucleotide
  Antisense strand to SEQ ID NO: 1019436
uaggugagcaggaugacau

SEQ ID NO: 1019438 - RNA, 19 nt, Artificial Sequence
  Description of Artificial Sequence: Synthetic oligonucleotide
  Sense strand starting at position 2242 of SEQ ID NO: 914639
ccgagaucguccuggguac

SEQ ID NO: 1019439 - RNA, 19 nt, Artificial Sequence
  Description of Artificial Sequence: Synthetic oligonucleotide
  Antisense strand to SEQ ID NO: 1019438
guacccaggacgaucucgg

SEQ ID NO: 1019440 - RNA, 19 nt, Artificial Sequence
  Description of Artificial Sequence: Synthetic oligonucleotide
  Sense strand starting at position 2326 of SEQ ID NO: 914639
cccagaccgucauuguaaa

SEQ ID NO: 1019441 - RNA, 19 nt, Artificial Sequence
  Description of Artificial Sequence: Synthetic oligonucleotide
  Antisense strand to SEQ ID NO: 1019440
uuuacaaugacggucuggg

SEQ ID NO: 1019442 - RNA, 19 nt, Artificial Sequence
  Description of Artificial Sequence: Synthetic oligonucleotide
  Sense strand starting at position 3457 of SEQ ID NO: 914639
caaagaaauuagcuggugu

SEQ ID NO: 1019443 - RNA, 19 nt, Artificial Sequence
  Description of Artificial Sequence: Synthetic oligonucleotide
  Antisense strand to SEQ ID NO: 1019442
acaccagcuaauuucuuug

SEQ ID NO: 1019444 - RNA, 19 nt, Artificial Sequence
  Description of Artificial Sequence: Synthetic oligonucleotide
  Sense strand starting at position 3459 of SEQ ID NO: 914639
aagaaauuagcugguguag

SEQ ID NO: 1019445 - RNA, 19 nt, Artificial Sequence
  Description of Artificial Sequence: Synthetic oligonucleotide
  Antisense strand to SEQ ID NO: 1019444
cuacaccagcuaauuucuu

SEQ ID NO: 1019446 - RNA, 19 nt, Artificial Sequence
  Description of Artificial Sequence: Synthetic oligonucleotide
  Sense strand starting at position 3461 of SEQ ID NO: 914639
gaaauuagcugguguagug

SEQ ID NO: 1019447 - RNA, 19 nt, Artificial Sequence
  Description of Artificial Sequence: Synthetic oligonucleotide
  Antisense strand to SEQ ID NO: 1019446
cacuacaccagcuaauuuc

SEQ ID NO: 1019448 - RNA, 19 nt, Artificial Sequence
  Description of Artificial Sequence: Synthetic oligonucleotide
  Sense strand starting at position 3699 of SEQ ID NO: 914639
ugcacuguugguggacaau

SEQ ID NO: 1019449 - RNA, 19 nt, Artificial Sequence
  Description of Artificial Sequence: Synthetic oligonucleotide
  Antisense strand to SEQ ID NO: 1019448
auuguccaccaacagugca

SEQ ID NO: 1019450 - RNA, 19 nt, Artificial Sequence
  Description of Artificial Sequence: Synthetic oligonucleotide
  Sense strand starting at position 3710 of SEQ ID NO: 914639
uggacaauggucuggcagu

SEQ ID NO: 1019451 - RNA, 19 nt, Artificial Sequence
  Description of Artificial Sequence: Synthetic oligonucleotide
  Antisense strand to SEQ ID NO: 1019450
acugccagaccauugucca

SEQ ID NO: 1019452 - RNA, 19 nt, Artificial Sequence
  Description of Artificial Sequence: Synthetic oligonucleotide
  Sense strand starting at position 3711 of SEQ ID NO: 914639
ggacaauggucuggcaguu

SEQ ID NO: 1019453 - RNA, 19 nt, Artificial Sequence
  Description of Artificial Sequence: Synthetic oligonucleotide
  Antisense strand to SEQ ID NO: 1019452
aacugccagaccauugucc

SEQ ID NO: 1019454 - RNA, 19 nt, Artificial Sequence
  Description of Artificial Sequence: Synthetic oligonucleotide
  Sense strand starting at position 3817 of SEQ ID NO: 914639
ucuguacgcagcguuuaua

SEQ ID NO: 1019455 - RNA, 19 nt, Artificial Sequence
  Description of Artificial Sequence: Synthetic oligonucleotide
  Antisense strand to SEQ ID NO: 1019454
uauaaacgcugcguacaga

SEQ ID NO: 1019456 - RNA, 19 nt, Artificial Sequence
  Description of Artificial Sequence: Synthetic oligonucleotide
  Sense strand starting at position 3826 of SEQ ID NO: 914639
agcguuuauagcugcacua

SEQ ID NO: 1019457 - RNA, 19 nt, Artificial Sequence
  Description of Artificial Sequence: Synthetic oligonucleotide
  Antisense strand to SEQ ID NO: 1019456
uagugcagcuauaaacgcu

SEQ ID NO: 1019458 - RNA, 19 nt, Artificial Sequence
  Description of Artificial Sequence: Synthetic oligonucleotide
  Sense strand starting at position 3827 of SEQ ID NO: 914639
gcguuuauagcugcacuau

SEQ ID NO: 1019459 - RNA, 19 nt, Artificial Sequence
  Description of Artificial Sequence: Synthetic oligonucleotide
  Antisense strand to SEQ ID NO: 1019458
auagugcagcuauaaacgc

SEQ ID NO: 1019460 - RNA, 19 nt, Artificial Sequence
  Description of Artificial Sequence: Synthetic oligonucleotide
  Sense strand starting at position 3828 of SEQ ID NO: 914639
cguuuauagcugcacuaua

SEQ ID NO: 1019461 - RNA, 19 nt, Artificial Sequence
  Description of Artificial Sequence: Synthetic oligonucleotide
  Antisense strand to SEQ ID NO: 1019460
uauagugcagcuauaaacg

SEQ ID NO: 1019462 - RNA, 19 nt, Artificial Sequence
  Description of Artificial Sequence: Synthetic oligonucleotide
  Sense strand starting at position 3878 of SEQ ID NO: 914639
gccgucaacugaugaauaa

SEQ ID NO: 1019463 - RNA, 19 nt, Artificial Sequence
  Description of Artificial Sequence: Synthetic oligonucleotide
  Antisense strand to SEQ ID NO: 1019462
uuauucaucaguugacggc

SEQ ID NO: 1019464 - RNA, 19 nt, Artificial Sequence
  Description of Artificial Sequence: Synthetic oligonucleotide
  Sense strand starting at position 3879 of SEQ ID NO: 914639
ccgucaacugaugaauaac

SEQ ID NO: 1019465 - RNA, 19 nt, Artificial Sequence
  Description of Artificial Sequence: Synthetic oligonucleotide
  Antisense strand to SEQ ID NO: 1019464
guuauucaucaguugacgg

SEQ ID NO: 1019466 - RNA, 19 nt, Artificial Sequence
  Description of Artificial Sequence: Synthetic oligonucleotide
  Sense strand starting at position 3956 of SEQ ID NO: 914639
ugaugcaugccacaauaua

SEQ ID NO: 1019467 - RNA, 19 nt, Artificial Sequence
  Description of Artificial Sequence: Synthetic oligonucleotide
  Antisense strand to SEQ ID NO: 1019466
uauauuguggcaugcauca

SEQ ID NO: 1019468 - RNA, 19 nt, Artificial Sequence
  Description of Artificial Sequence: Synthetic oligonucleotide
  Sense strand starting at position 3964 of SEQ ID NO: 914639
gccacaauauaggugaauu

SEQ ID NO: 1019469 - RNA, 19 nt, Artificial Sequence
  Description of Artificial Sequence: Synthetic oligonucleotide
  Antisense strand to SEQ ID NO: 1019468
aauucaccuauauuguggc

SEQ ID NO: 1019470 - RNA, 19 nt, Artificial Sequence
  Description of Artificial Sequence: Synthetic oligonucleotide
  Sense strand starting at position 170 of SEQ ID NO: 914640
auaagugccucucuguuaa

SEQ ID NO: 1019471 - RNA, 19 nt, Artificial Sequence
  Description of Artificial Sequence: Synthetic oligonucleotide
  Antisense strand to SEQ ID NO: 1019470
uuaacagagaggcacuuau

SEQ ID NO: 1019472 - RNA, 19 nt, Artificial Sequence
  Description of Artificial Sequence: Synthetic oligonucleotide
  Sense strand starting at position 180 of SEQ ID NO: 914640
cucuguuaacccugaggau

SEQ ID NO: 1019473 - RNA, 19 nt, Artificial Sequence
  Description of Artificial Sequence: Synthetic oligonucleotide
  Antisense strand to SEQ ID NO: 1019472
auccucaggguuaacagag

SEQ ID NO: 1019474 - RNA, 19 nt, Artificial Sequence
  Description of Artificial Sequence: Synthetic oligonucleotide
  Sense strand starting at position 624 of SEQ ID NO: 914640
ccaggcucugcugaaagau

SEQ ID NO: 1019475 - RNA, 19 nt, Artificial Sequence
  Description of Artificial Sequence: Synthetic oligonucleotide
  Antisense strand to SEQ ID NO: 1019474
aucuuucagcagagccugg

SEQ ID NO: 1019476 - RNA, 19 nt, Artificial Sequence
  Description of Artificial Sequence: Synthetic oligonucleotide
  Sense strand starting at position 630 of SEQ ID NO: 914640
ucugcugaaagaugugaau

SEQ ID NO: 1019477 - RNA, 19 nt, Artificial Sequence
  Description of Artificial Sequence: Synthetic oligonucleotide
  Antisense strand to SEQ ID NO: 1019476
auucacaucuuucagcaga

SEQ ID NO: 1019478 - RNA, 19 nt, Artificial Sequence
  Description of Artificial Sequence: Synthetic oligonucleotide
  Sense strand starting at position 859 of SEQ ID NO: 914640
acguauauuuaggguguga

SEQ ID NO: 1019479 - RNA, 19 nt, Artificial Sequence
  Description of Artificial Sequence: Synthetic oligonucleotide
  Antisense strand to SEQ ID NO: 1019478
ucacacccuaaauauacgu

SEQ ID NO: 1019480 - RNA, 19 nt, Artificial Sequence
  Description of Artificial Sequence: Synthetic oligonucleotide
  Sense strand starting at position 924 of SEQ ID NO: 914640
cccugaaccuguugguagu

SEQ ID NO: 1019481 - RNA, 19 nt, Artificial Sequence
  Description of Artificial Sequence: Synthetic oligonucleotide
  Antisense strand to SEQ ID NO: 1019480
acuaccaacagguucaggg

SEQ ID NO: 1019482 - RNA, 19 nt, Artificial Sequence
  Description of Artificial Sequence: Synthetic oligonucleotide
  Sense strand starting at position 954 of SEQ ID NO: 914640
ccugcacccucuggugaau

SEQ ID NO: 1019483 - RNA, 19 nt, Artificial Sequence
  Description of Artificial Sequence: Synthetic oligonucleotide
  Antisense strand to SEQ ID NO: 1019482
auucaccagagggugcagg

SEQ ID NO: 1019484 - RNA, 19 nt, Artificial Sequence
  Description of Artificial Sequence: Synthetic oligonucleotide
  Sense strand starting at position 1133 of SEQ ID NO: 914640
ccagcacucuggcugaaga

SEQ ID NO: 1019485 - RNA, 19 nt, Artificial Sequence
  Description of Artificial Sequence: Synthetic oligonucleotide
  Antisense strand to SEQ ID NO: 1019484
ucuucagccagagugcugg

SEQ ID NO: 1019486 - RNA, 19 nt, Artificial Sequence
  Description of Artificial Sequence: Synthetic oligonucleotide
  Sense strand starting at position 1166 of SEQ ID NO: 914640
ggguucuucuggcucaaca

SEQ ID NO: 1019487 - RNA, 19 nt, Artificial Sequence
  Description of Artificial Sequence: Synthetic oligonucleotide
  Antisense strand to SEQ ID NO: 1019486
uguugagccagaagaaccc

SEQ ID NO: 1019488 - RNA, 19 nt, Artificial Sequence
  Description of Artificial Sequence: Synthetic oligonucleotide
  Sense strand starting at position 1203 of SEQ ID NO: 914640
gggcaacaucucuguucuu

SEQ ID NO: 1019489 - RNA, 19 nt, Artificial Sequence
  Description of Artificial Sequence: Synthetic oligonucleotide
  Antisense strand to SEQ ID NO: 1019488
aagaacagagauguugccc

SEQ ID NO: 1019490 - RNA, 19 nt, Artificial Sequence
  Description of Artificial Sequence: Synthetic oligonucleotide
  Sense strand starting at position 1204 of SEQ ID NO: 914640
ggcaacaucucuguucuua

SEQ ID NO: 1019491 - RNA, 19 nt, Artificial Sequence
  Description of Artificial Sequence: Synthetic oligonucleotide
  Antisense strand to SEQ ID NO: 1019490
uaagaacagagauguugcc

SEQ ID NO: 1019492 - RNA, 19 nt, Artificial Sequence
  Description of Artificial Sequence: Synthetic oligonucleotide
  Sense strand starting at position 1214 of SEQ ID NO: 914640
cuguucuuagcuggacuaa

SEQ ID NO: 1019493 - RNA, 19 nt, Artificial Sequence
  Description of Artificial Sequence: Synthetic oligonucleotide
  Antisense strand to SEQ ID NO: 1019492
uuaguccagcuaagaacag

SEQ ID NO: 1019494 - RNA, 19 nt, Artificial Sequence
  Description of Artificial Sequence: Synthetic oligonucleotide
  Sense strand starting at position 1314 of SEQ ID NO: 914640
ccaccuuucuggcacaaga

SEQ ID NO: 1019495 - RNA, 19 nt, Artificial Sequence
  Description of Artificial Sequence: Synthetic oligonucleotide
  Antisense strand to SEQ ID NO: 1019494
ucuugugccagaaaggugg

SEQ ID NO: 1019496 - RNA, 19 nt, Artificial Sequence
  Description of Artificial Sequence: Synthetic oligonucleotide
  Sense strand starting at position 1316 of SEQ ID NO: 914640
accuuucuggcacaagaca

SEQ ID NO: 1019497 - RNA, 19 nt, Artificial Sequence
  Description of Artificial Sequence: Synthetic oligonucleotide
  Antisense strand to SEQ ID NO: 1019496
ugucuugugccagaaaggu

SEQ ID NO: 1019498 - RNA, 19 nt, Artificial Sequence
  Description of Artificial Sequence: Synthetic oligonucleotide
  Sense strand starting at position 1390 of SEQ ID NO: 914640
gaaccucaggccugaaagu

SEQ ID NO: 1019499 - RNA, 19 nt, Artificial Sequence
  Description of Artificial Sequence: Synthetic oligonucleotide
  Antisense strand to SEQ ID NO: 1019498
acuuucaggccugagguuc

SEQ ID NO: 1019500 - RNA, 19 nt, Artificial Sequence
  Description of Artificial Sequence: Synthetic oligonucleotide
  Sense strand starting at position 1556 of SEQ ID NO: 914640
agaguccucucaggcucaa

SEQ ID NO: 1019501 - RNA, 19 nt, Artificial Sequence
  Description of Artificial Sequence: Synthetic oligonucleotide
  Antisense strand to SEQ ID NO: 1019500
uugagccugagaggacucu

SEQ ID NO: 1019502 - RNA, 19 nt, Artificial Sequence
  Description of Artificial Sequence: Synthetic oligonucleotide
  Sense strand starting at position 2332 of SEQ ID NO: 914640
agagucauacugugaaugu

SEQ ID NO: 1019503 - RNA, 19 nt, Artificial Sequence
  Description of Artificial Sequence: Synthetic oligonucleotide
  Antisense strand to SEQ ID NO: 1019502
acauucacaguaugacucu

SEQ ID NO: 1019504 - RNA, 19 nt, Artificial Sequence
  Description of Artificial Sequence: Synthetic oligonucleotide
  Sense strand starting at position 2333 of SEQ ID NO: 914640
gagucauacugugaaugug

SEQ ID NO: 1019505 - RNA, 19 nt, Artificial Sequence
  Description of Artificial Sequence: Synthetic oligonucleotide
  Antisense strand to SEQ ID NO: 1019504
cacauucacaguaugacuc

SEQ ID NO: 1019506 - RNA, 19 nt, Artificial Sequence
  Description of Artificial Sequence: Synthetic oligonucleotide
  Sense strand starting at position 2443 of SEQ ID NO: 914640
accugacucugcugucaag

SEQ ID NO: 1019507 - RNA, 19 nt, Artificial Sequence
  Description of Artificial Sequence: Synthetic oligonucleotide
  Antisense strand to SEQ ID NO: 1019506
cuugacagcagagucaggu

SEQ ID NO: 1019508 - RNA, 19 nt, Artificial Sequence
  Description of Artificial Sequence: Synthetic oligonucleotide
  Sense strand starting at position 2483 of SEQ ID NO: 914640
cgacaaguagcuggagaau

SEQ ID NO: 1019509 - RNA, 19 nt, Artificial Sequence
  Description of Artificial Sequence: Synthetic oligonucleotide
  Antisense strand to SEQ ID NO: 1019508
auucuccagcuacuugucg

SEQ ID NO: 1019510 - RNA, 19 nt, Artificial Sequence
  Description of Artificial Sequence: Synthetic oligonucleotide
  Sense strand starting at position 2492 of SEQ ID NO: 914640
gcuggagaaucauaacuga

SEQ ID NO: 1019511 - RNA, 19 nt, Artificial Sequence
  Description of Artificial Sequence: Synthetic oligonucleotide
  Antisense strand to SEQ ID NO: 1019510
ucaguuaugauucuccagc

SEQ ID NO: 1019512 - RNA, 19 nt, Artificial Sequence
  Description of Artificial Sequence: Synthetic oligonucleotide
  Sense strand starting at position 2520 of SEQ ID NO: 914640
aagugugacuuugggcaaa

SEQ ID NO: 1019513 - RNA, 19 nt, Artificial Sequence
  Description of Artificial Sequence: Synthetic oligonucleotide
  Antisense strand to SEQ ID NO: 1019512
uuugcccaaagucacacuu

SEQ ID NO: 1019514 - RNA, 19 nt, Artificial Sequence
  Description of Artificial Sequence: Synthetic oligonucleotide
  Sense strand starting at position 2641 of SEQ ID NO: 914640
agcagaaagccuggcugau

SEQ ID NO: 1019515 - RNA, 19 nt, Artificial Sequence
  Description of Artificial Sequence: Synthetic oligonucleotide
  Antisense strand to SEQ ID NO: 1019514
aucagccaggcuuucugcu

SEQ ID NO: 1019516 - RNA, 19 nt, Artificial Sequence
  Description of Artificial Sequence: Synthetic oligonucleotide
  Sense strand starting at position 2682 of SEQ ID NO: 914640
ugggaugcgcuauaaugga

SEQ ID NO: 1019517 - RNA, 19 nt, Artificial Sequence
  Description of Artificial Sequence: Synthetic oligonucleotide
  Antisense strand to SEQ ID NO: 1019516
uccauuauagcgcauccca

SEQ ID NO: 1019518 - RNA, 19 nt, Artificial Sequence
  Description of Artificial Sequence: Synthetic oligonucleotide
  Sense strand starting at position 2760 of SEQ ID NO: 914640
gagcguuagcagcugugaa

SEQ ID NO: 1019519 - RNA, 19 nt, Artificial Sequence
  Description of Artificial Sequence: Synthetic oligonucleotide
  Antisense strand to SEQ ID NO: 1019518
uucacagcugcuaacgcuc

SEQ ID NO: 1019520 - RNA, 19 nt, Artificial Sequence
  Description of Artificial Sequence: Synthetic oligonucleotide
  Sense strand starting at position 2856 of SEQ ID NO: 914640
ggcaauaggucaguuuguu

SEQ ID NO: 1019521 - RNA, 19 nt, Artificial Sequence
  Description of Artificial Sequence: Synthetic oligonucleotide
  Antisense strand to SEQ ID NO: 1019520
aacaaacugaccuauugcc

SEQ ID NO: 1019522 - RNA, 19 nt, Artificial Sequence
  Description of Artificial Sequence: Synthetic oligonucleotide
  Sense strand starting at position 2886 of SEQ ID NO: 914640
cucugcaagguguguaaau

SEQ ID NO: 1019523 - RNA, 19 nt, Artificial Sequence
  Description of Artificial Sequence: Synthetic oligonucleotide
  Antisense strand to SEQ ID NO: 1019522
auuuacacaccuugcagag

SEQ ID NO: 1019524 - RNA, 19 nt, Artificial Sequence
  Description of Artificial Sequence: Synthetic oligonucleotide
  Sense strand starting at position 2920 of SEQ ID NO: 914640
gcgugacugcuacuugguu

SEQ ID NO: 1019525 - RNA, 19 nt, Artificial Sequence
  Description of Artificial Sequence: Synthetic oligonucleotide
  Antisense strand to SEQ ID NO: 1019524
aaccaaguagcagucacgc

SEQ ID NO: 1019526 - RNA, 19 nt, Artificial Sequence
  Description of Artificial Sequence: Synthetic oligonucleotide
  Sense strand starting at position 2922 of SEQ ID NO: 914640
gugacugcuacuugguuua

SEQ ID NO: 1019527 - RNA, 19 nt, Artificial Sequence
  Description of Artificial Sequence: Synthetic oligonucleotide
  Antisense strand to SEQ ID NO: 1019526
uaaaccaaguagcagucac

SEQ ID NO: 1019528 - RNA, 19 nt, Artificial Sequence
  Description of Artificial Sequence: Synthetic oligonucleotide
  Sense strand starting at position 2935 of SEQ ID NO: 914640
gguuuaacgggaugucuga

SEQ ID NO: 1019529 - RNA, 19 nt, Artificial Sequence
  Description of Artificial Sequence: Synthetic oligonucleotide
  Antisense strand to SEQ ID NO: 1019528
ucagacaucccguuaaacc

SEQ ID NO: 1019530 - RNA, 19 nt, Artificial Sequence
  Description of Artificial Sequence: Synthetic oligonucleotide
  Sense strand starting at position 3186 of SEQ ID NO: 914640
ccgguuuccuaagaaaccu

SEQ ID NO: 1019531 - RNA, 19 nt, Artificial Sequence
  Description of Artificial Sequence: Synthetic oligonucleotide
  Antisense strand to SEQ ID NO: 1019530
agguuucuuaggaaaccgg

SEQ ID NO: 1019532 - RNA, 19 nt, Artificial Sequence
  Description of Artificial Sequence: Synthetic oligonucleotide
  Sense strand starting at position 3516 of SEQ ID NO: 914640
uggaaaguuucccuccuca

SEQ ID NO: 1019533 - RNA, 19 nt, Artificial Sequence
  Description of Artificial Sequence: Synthetic oligonucleotide
  Antisense strand to SEQ ID NO: 1019532
ugaggagggaaacuuucca

SEQ ID NO: 1019534 - RNA, 19 nt, Artificial Sequence
  Description of Artificial Sequence: Synthetic oligonucleotide
  Sense strand starting at position 103 of SEQ ID NO: 914641
ggugguuacccuggaagau

SEQ ID NO: 1019535 - RNA, 19 nt, Artificial Sequence
  Description of Artificial Sequence: Synthetic oligonucleotide
  Antisense strand to SEQ ID NO: 1019534
aucuuccaggguaaccacc

SEQ ID NO: 1019536 - RNA, 19 nt, Artificial Sequence
  Description of Artificial Sequence: Synthetic oligonucleotide
  Sense strand starting at position 104 of SEQ ID NO: 914641
gugguuacccuggaagauu

SEQ ID NO: 1019537 - RNA, 19 nt, Artificial Sequence
  Description of Artificial Sequence: Synthetic oligonucleotide
  Antisense strand to SEQ ID NO: 1019536
aaucuuccaggguaaccac

SEQ ID NO: 1019538 - RNA, 19 nt, Artificial Sequence
  Description of Artificial Sequence: Synthetic oligonucleotide
  Sense strand starting at position 175 of SEQ ID NO: 914641
guggguuuacucugggaag

SEQ ID NO: 1019539 - RNA, 19 nt, Artificial Sequence
  Description of Artificial Sequence: Synthetic oligonucleotide
  Antisense strand to SEQ ID NO: 1019538
cuucccagaguaaacccac

SEQ ID NO: 1019540 - RNA, 19 nt, Artificial Sequence
  Description of Artificial Sequence: Synthetic oligonucleotide
  Sense strand starting at position 213 of SEQ ID NO: 914641
gggaguggucacugagggu

SEQ ID NO: 1019541 - RNA, 19 nt, Artificial Sequence
  Description of Artificial Sequence: Synthetic oligonucleotide
  Antisense strand to SEQ ID NO: 1019540
acccucagugaccacuccc

SEQ ID NO: 1019542 - RNA, 19 nt, Artificial Sequence
  Description of Artificial Sequence: Synthetic oligonucleotide
  Sense strand starting at position 352 of SEQ ID NO: 914641
ugaggaaagcguugccaaa

SEQ ID NO: 1019543 - RNA, 19 nt, Artificial Sequence
  Description of Artificial Sequence: Synthetic oligonucleotide
  Antisense strand to SEQ ID NO: 1019542
uuuggcaacgcuuuccuca

SEQ ID NO: 1019544 - RNA, 19 nt, Artificial Sequence
  Description of Artificial Sequence: Synthetic oligonucleotide
  Sense strand starting at position 514 of SEQ ID NO: 914641
cgaucaggugucggaugaa

SEQ ID NO: 1019545 - RNA, 19 nt, Artificial Sequence
  Description of Artificial Sequence: Synthetic oligonucleotide
  Antisense strand to SEQ ID NO: 1019544
uucauccgacaccugaucg

SEQ ID NO: 1019546 - RNA, 19 nt, Artificial Sequence
  Description of Artificial Sequence: Synthetic oligonucleotide
  Sense strand starting at position 517 of SEQ ID NO: 914641
ucaggugucggaugaaggu

SEQ ID NO: 1019547 - RNA, 19 nt, Artificial Sequence
  Description of Artificial Sequence: Synthetic oligonucleotide
  Antisense strand to SEQ ID NO: 1019546
accuucauccgacaccuga

SEQ ID NO: 1019548 - RNA, 19 nt, Artificial Sequence
  Description of Artificial Sequence: Synthetic oligonucleotide
  Sense strand starting at position 573 of SEQ ID NO: 914641
auaggcuuguugucgaagu

SEQ ID NO: 1019549 - RNA, 19 nt, Artificial Sequence
  Description of Artificial Sequence: Synthetic oligonucleotide
  Antisense strand to SEQ ID NO: 1019548
acuucgacaacaagccuau

SEQ ID NO: 1019550 - RNA, 19 nt, Artificial Sequence
  Description of Artificial Sequence: Synthetic oligonucleotide
  Sense strand starting at position 575 of SEQ ID NO: 914641
aggcuuguugucgaaguca

SEQ ID NO: 1019551 - RNA, 19 nt, Artificial Sequence
  Description of Artificial Sequence: Synthetic oligonucleotide
  Antisense strand to SEQ ID NO: 1019550
ugacuucgacaacaagccu

SEQ ID NO: 1019552 - RNA, 19 nt, Artificial Sequence
  Description of Artificial Sequence: Synthetic oligonucleotide
  Sense strand starting at position 1064 of SEQ ID NO: 914641
cccauuggcugauuccaaa

SEQ ID NO: 1019553 - RNA, 19 nt, Artificial Sequence
  Description of Artificial Sequence: Synthetic oligonucleotide
  Antisense strand to SEQ ID NO: 1019552
uuuggaaucagccaauggg

SEQ ID NO: 1019554 - RNA, 19 nt, Artificial Sequence
  Description of Artificial Sequence: Synthetic oligonucleotide
  Sense strand starting at position 1152 of SEQ ID NO: 914641
cgcgaaagugcugcgguua

SEQ ID NO: 1019555 - RNA, 19 nt, Artificial Sequence
  Description of Artificial Sequence: Synthetic oligonucleotide
  Antisense strand to SEQ ID NO: 1019554
uaaccgcagcacuuucgcg

SEQ ID NO: 1019556 - RNA, 19 nt, Artificial Sequence
  Description of Artificial Sequence: Synthetic oligonucleotide
  Sense strand starting at position 1250 of SEQ ID NO: 914641
gcgggauggcuccacgaga

SEQ ID NO: 1019557 - RNA, 19 nt, Artificial Sequence
  Description of Artificial Sequence: Synthetic oligonucleotide
  Antisense strand to SEQ ID NO: 1019556
ucucguggagccaucccgc

SEQ ID NO: 1019558 - RNA, 19 nt, Artificial Sequence
  Description of Artificial Sequence: Synthetic oligonucleotide
  Sense strand starting at position 1721 of SEQ ID NO: 914641
cguauugggaagugaaauc

SEQ ID NO: 1019559 - RNA, 19 nt, Artificial Sequence
  Description of Artificial Sequence: Synthetic oligonucleotide
  Antisense strand to SEQ ID NO: 1019558
gauuucacuucccaauacg

SEQ ID NO: 1019560 - RNA, 19 nt, Artificial Sequence
  Description of Artificial Sequence: Synthetic oligonucleotide
  Sense strand starting at position 1785 of SEQ ID NO: 914641
gaaaucuugugggaauuua

SEQ ID NO: 1019561 - RNA, 19 nt, Artificial Sequence
  Description of Artificial Sequence: Synthetic oligonucleotide
  Antisense strand to SEQ ID NO: 1019560
uaaauucccacaagauuuc

SEQ ID NO: 1019562 - RNA, 19 nt, Artificial Sequence
  Description of Artificial Sequence: Synthetic oligonucleotide
  Sense strand starting at position 1863 of SEQ ID NO: 914641
aucauuuacugggaucugu

SEQ ID NO: 1019563 - RNA, 19 nt, Artificial Sequence
  Description of Artificial Sequence: Synthetic oligonucleotide
  Antisense strand to SEQ ID NO: 1019562
acagaucccaguaaaugau

SEQ ID NO: 1019564 - RNA, 19 nt, Artificial Sequence
  Description of Artificial Sequence: Synthetic oligonucleotide
  Sense strand starting at position 1992 of SEQ ID NO: 914641
gugggugaugucagagcuu

SEQ ID NO: 1019565 - RNA, 19 nt, Artificial Sequence
  Description of Artificial Sequence: Synthetic oligonucleotide
  Antisense strand to SEQ ID NO: 1019564
aagcucugacaucacccac

SEQ ID NO: 1019566 - RNA, 19 nt, Artificial Sequence
  Description of Artificial Sequence: Synthetic oligonucleotide
  Sense strand starting at position 2016 of SEQ ID NO: 914641
acugauuguuauguaacca

SEQ ID NO: 1019567 - RNA, 19 nt, Artificial Sequence
  Description of Artificial Sequence: Synthetic oligonucleotide
  Antisense strand to SEQ ID NO: 1019566
ugguuacauaacaaucagu

SEQ ID NO: 1019568 - RNA, 19 nt, Artificial Sequence
  Description of Artificial Sequence: Synthetic oligonucleotide
  Sense strand starting at position 2020 of SEQ ID NO: 914641
auuguuauguaaccaguau

SEQ ID NO: 1019569 - RNA, 19 nt, Artificial Sequence
  Description of Artificial Sequence: Synthetic oligonucleotide
  Antisense strand to SEQ ID NO: 1019568
auacugguuacauaacaau

SEQ ID NO: 1019570 - RNA, 19 nt, Artificial Sequence
  Description of Artificial Sequence: Synthetic oligonucleotide
  Sense strand starting at position 2024 of SEQ ID NO: 914641
uuauguaaccaguaucaag

SEQ ID NO: 1019571 - RNA, 19 nt, Artificial Sequence
  Description of Artificial Sequence: Synthetic oligonucleotide
  Antisense strand to SEQ ID NO: 1019570
cuugauacugguuacauaa

SEQ ID NO: 1019572 - RNA, 19 nt, Artificial Sequence
  Description of Artificial Sequence: Synthetic oligonucleotide
  Sense strand starting at position 2132 of SEQ ID NO: 914641
gcuucugggagauguggaa

SEQ ID NO: 1019573 - RNA, 19 nt, Artificial Sequence
  Description of Artificial Sequence: Synthetic oligonucleotide
  Antisense strand to SEQ ID NO: 1019572
uuccacaucucccagaagc

SEQ ID NO: 1019574 - RNA, 19 nt, Artificial Sequence
  Description of Artificial Sequence: Synthetic oligonucleotide
  Sense strand starting at position 2178 of SEQ ID NO: 914641
gggauaacuugggcuggua

SEQ ID NO: 1019575 - RNA, 19 nt, Artificial Sequence
  Description of Artificial Sequence: Synthetic oligonucleotide
  Antisense strand to SEQ ID NO: 1019574
uaccagcccaaguuauccc

SEQ ID NO: 1019576 - RNA, 19 nt, Artificial Sequence
  Description of Artificial Sequence: Synthetic oligonucleotide
  Sense strand starting at position 2259 of SEQ ID NO: 914641
gguggaaucuagagaggac

SEQ ID NO: 1019577 - RNA, 19 nt, Artificial Sequence
  Description of Artificial Sequence: Synthetic oligonucleotide
  Antisense strand to SEQ ID NO: 1019576
guccucucuagauuccacc

SEQ ID NO: 1019578 - RNA, 19 nt, Artificial Sequence
  Description of Artificial Sequence: Synthetic oligonucleotide
  Sense strand starting at position 2295 of SEQ ID NO: 914641
cgccuaccgcuuguaagau

SEQ ID NO: 1019579 - RNA, 19 nt, Artificial Sequence
  Description of Artificial Sequence: Synthetic oligonucleotide
  Antisense strand to SEQ ID NO: 1019578
aucuuacaagcgguaggcg

SEQ ID NO: 1019580 - RNA, 19 nt, Artificial Sequence
  Description of Artificial Sequence: Synthetic oligonucleotide
  Sense strand starting at position 2304 of SEQ ID NO: 914641
cuuguaagaucccuuccga

SEQ ID NO: 1019581 - RNA, 19 nt, Artificial Sequence
  Description of Artificial Sequence: Synthetic oligonucleotide
  Antisense strand to SEQ ID NO: 1019580
ucggaagggaucuuacaag

SEQ ID NO: 1019582 - RNA, 19 nt, Artificial Sequence
  Description of Artificial Sequence: Synthetic oligonucleotide
  Sense strand starting at position 2311 of SEQ ID NO: 914641
gaucccuuccgagggaaua

SEQ ID NO: 1019583 - RNA, 19 nt, Artificial Sequence
  Description of Artificial Sequence: Synthetic oligonucleotide
  Antisense strand to SEQ ID NO: 1019582
uauucccucggaagggauc

SEQ ID NO: 1019584 - RNA, 19 nt, Artificial Sequence
  Description of Artificial Sequence: Synthetic oligonucleotide
  Sense strand starting at position 2323 of SEQ ID NO: 914641
gggaauagauaguucccuu

SEQ ID NO: 1019585 - RNA, 19 nt, Artificial Sequence
  Description of Artificial Sequence: Synthetic oligonucleotide
  Antisense strand to SEQ ID NO: 1019584
aagggaacuaucuauuccc

SEQ ID NO: 1019586 - RNA, 19 nt, Artificial Sequence
  Description of Artificial Sequence: Synthetic oligonucleotide
  Sense strand starting at position 2374 of SEQ ID NO: 914641
gcggauaaguaauuccaac

SEQ ID NO: 1019587 - RNA, 19 nt, Artificial Sequence
  Description of Artificial Sequence: Synthetic oligonucleotide
  Antisense strand to SEQ ID NO: 1019586
guuggaauuacuuauccgc

SEQ ID NO: 1019588 - RNA, 19 nt, Artificial Sequence
  Description of Artificial Sequence: Synthetic oligonucleotide
  Sense strand starting at position 2412 of SEQ ID NO: 914641
cccuuagugcuuugauuug

SEQ ID NO: 1019589 - RNA, 19 nt, Artificial Sequence
  Description of Artificial Sequence: Synthetic oligonucleotide
  Antisense strand to SEQ ID NO: 1019588
caaaucaaagcacuaaggg

SEQ ID NO: 1019590 - RNA, 19 nt, Artificial Sequence
  Description of Artificial Sequence: Synthetic oligonucleotide
  Sense strand starting at position 2672 of SEQ ID NO: 914641
ugcaguuucuggguugauc

SEQ ID NO: 1019591 - RNA, 19 nt, Artificial Sequence
  Description of Artificial Sequence: Synthetic oligonucleotide
  Antisense strand to SEQ ID NO: 1019590
gaucaacccagaaacugca

SEQ ID NO: 1019592 - RNA, 19 nt, Artificial Sequence
  Description of Artificial Sequence: Synthetic oligonucleotide
  Sense strand starting at position 2674 of SEQ ID NO: 914641
caguuucuggguugaucua

SEQ ID NO: 1019593 - RNA, 19 nt, Artificial Sequence
  Description of Artificial Sequence: Synthetic oligonucleotide
  Antisense strand to SEQ ID NO: 1019592
uagaucaacccagaaacug

SEQ ID NO: 1019594 - RNA, 19 nt, Artificial Sequence
  Description of Artificial Sequence: Synthetic oligonucleotide
  Sense strand starting at position 2680 of SEQ ID NO: 914641
cuggguugaucuagggaag

SEQ ID NO: 1019595 - RNA, 19 nt, Artificial Sequence
  Description of Artificial Sequence: Synthetic oligonucleotide
  Antisense strand to SEQ ID NO: 1019594
cuucccuagaucaacccag

SEQ ID NO: 1019596 - RNA, 19 nt, Artificial Sequence
  Description of Artificial Sequence: Synthetic oligonucleotide
  Sense strand starting at position 2715 of SEQ ID NO: 914641
uccugaaugaaguaguugu

SEQ ID NO: 1019597 - RNA, 19 nt, Artificial Sequence
  Description of Artificial Sequence: Synthetic oligonucleotide
  Antisense strand to SEQ ID NO: 1019596
acaacuacuucauucagga

SEQ ID NO: 1019598 - RNA, 19 nt, Artificial Sequence
  Description of Artificial Sequence: Synthetic oligonucleotide
  Sense strand starting at position 2894 of SEQ ID NO: 914641
cagacccugucguuaugua

SEQ ID NO: 1019599 - RNA, 19 nt, Artificial Sequence
  Description of Artificial Sequence: Synthetic oligonucleotide
  Antisense strand to SEQ ID NO: 1019598
uacauaacgacagggucug

SEQ ID NO: 1019600 - RNA, 19 nt, Artificial Sequence
  Description of Artificial Sequence: Synthetic oligonucleotide
  Sense strand starting at position 2895 of SEQ ID NO: 914641
agacccugucguuauguau

SEQ ID NO: 1019601 - RNA, 19 nt, Artificial Sequence
  Description of Artificial Sequence: Synthetic oligonucleotide
  Antisense strand to SEQ ID NO: 1019600
auacauaacgacagggucu

SEQ ID NO: 1019602 - RNA, 19 nt, Artificial Sequence
  Description of Artificial Sequence: Synthetic oligonucleotide
  Sense strand starting at position 2928 of SEQ ID NO: 914641
cuccaaagaucuuaaagga

SEQ ID NO: 1019603 - RNA, 19 nt, Artificial Sequence
  Description of Artificial Sequence: Synthetic oligonucleotide
  Antisense strand to SEQ ID NO: 1019602
uccuuuaagaucuuuggag

SEQ ID NO: 1019604 - RNA, 19 nt, Artificial Sequence
  Description of Artificial Sequence: Synthetic oligonucleotide
  Sense strand starting at position 3112 of SEQ ID NO: 914641
gcaguuuguuuggugggaa

SEQ ID NO: 1019605 - RNA, 19 nt, Artificial Sequence
  Description of Artificial Sequence: Synthetic oligonucleotide
  Antisense strand to SEQ ID NO: 1019604
uucccaccaaacaaacugc

SEQ ID NO: 1019606 - RNA, 19 nt, Artificial Sequence
  Description of Artificial Sequence: Synthetic oligonucleotide
  Sense strand starting at position 3115 of SEQ ID NO: 914641
guuuguuuggugggaaagu

SEQ ID NO: 1019607 - RNA, 19 nt, Artificial Sequence
  Description of Artificial Sequence: Synthetic oligonucleotide
  Antisense strand to SEQ ID NO: 1019606
acuuucccaccaaacaaac

SEQ ID NO: 1019608 - RNA, 19 nt, Artificial Sequence
  Description of Artificial Sequence: Synthetic oligonucleotide
  Sense strand starting at position 3407 of SEQ ID NO: 914641
ccugucauggccugaucua

SEQ ID NO: 1019609 - RNA, 19 nt, Artificial Sequence
  Description of Artificial Sequence: Synthetic oligonucleotide
  Antisense strand to SEQ ID NO: 1019608
uagaucaggccaugacagg

SEQ ID NO: 1019610 - RNA, 19 nt, Artificial Sequence
  Description of Artificial Sequence: Synthetic oligonucleotide
  Sense strand starting at position 3874 of SEQ ID NO: 914641
uggccucaucaaggugaau

SEQ ID NO: 1019611 - RNA, 19 nt, Artificial Sequence
  Description of Artificial Sequence: Synthetic oligonucleotide
  Antisense strand to SEQ ID NO: 1019610
auucaccuugaugaggcca

SEQ ID NO: 1019612 - RNA, 19 nt, Artificial Sequence
  Description of Artificial Sequence: Synthetic oligonucleotide
  Sense strand starting at position 3972 of SEQ ID NO: 914641
ggagcaauuugcugacaug

SEQ ID NO: 1019613 - RNA, 19 nt, Artificial Sequence
  Description of Artificial Sequence: Synthetic oligonucleotide
  Antisense strand to SEQ ID NO: 1019612
caugucagcaaauugcucc

SEQ ID NO: 1019614 - RNA, 19 nt, Artificial Sequence
  Description of Artificial Sequence: Synthetic oligonucleotide
  Sense strand starting at position 299 of SEQ ID NO: 914642
uucgcuggugcagaauuau

SEQ ID NO: 1019615 - RNA, 19 nt, Artificial Sequence
  Description of Artificial Sequence: Synthetic oligonucleotide
  Antisense strand to SEQ ID NO: 1019614
auaauucugcaccagcgaa

SEQ ID NO: 1019616 - RNA, 19 nt, Artificial Sequence
  Description of Artificial Sequence: Synthetic oligonucleotide
  Sense strand starting at position 310 of SEQ ID NO: 914642
agaauuaugaaaggcaugu

SEQ ID NO: 1019617 - RNA, 19 nt, Artificial Sequence
  Description of Artificial Sequence: Synthetic oligonucleotide
  Antisense strand to SEQ ID NO: 1019616
acaugccuuucauaauucu

SEQ ID NO: 1019618 - RNA, 19 nt, Artificial Sequence
  Description of Artificial Sequence: Synthetic oligonucleotide
  Sense strand starting at position 367 of SEQ ID NO: 914642
ugugaaguacuuugguaug

SEQ ID NO: 1019619 - RNA, 19 nt, Artificial Sequence
  Description of Artificial Sequence: Synthetic oligonucleotide
  Antisense strand to SEQ ID NO: 1019618
cauaccaaaguacuucaca

SEQ ID NO: 1019620 - RNA, 19 nt, Artificial Sequence
  Description of Artificial Sequence: Synthetic oligonucleotide
  Sense strand starting at position 406 of SEQ ID NO: 914642
gcaugucucgaguuucucu

SEQ ID NO: 1019621 - RNA, 19 nt, Artificial Sequence
  Description of Artificial Sequence: Synthetic oligonucleotide
  Antisense strand to SEQ ID NO: 1019620
agagaaacucgagacaugc

SEQ ID NO: 1019622 - RNA, 19 nt, Artificial Sequence
  Description of Artificial Sequence: Synthetic oligonucleotide
  Sense strand starting at position 411 of SEQ ID NO: 914642
ucucgaguuucucuggaga

SEQ ID NO: 1019623 - RNA, 19 nt, Artificial Sequence
  Description of Artificial Sequence: Synthetic oligonucleotide
  Antisense strand to SEQ ID NO: 1019622
ucuccagagaaacucgaga

SEQ ID NO: 1019624 - RNA, 19 nt, Artificial Sequence
  Description of Artificial Sequence: Synthetic oligonucleotide
  Sense strand starting at position 498 of SEQ ID NO: 914642
ggcagaguccuggagcuca

SEQ ID NO: 1019625 - RNA, 19 nt, Artificial Sequence
  Description of Artificial Sequence: Synthetic oligonucleotide
  Antisense strand to SEQ ID NO: 1019624
ugagcuccaggacucugcc

SEQ ID NO: 1019626 - RNA, 19 nt, Artificial Sequence
  Description of Artificial Sequence: Synthetic oligonucleotide
  Sense strand starting at position 694 of SEQ ID NO: 914642
gagagcugccauugggaga

SEQ ID NO: 1019627 - RNA, 19 nt, Artificial Sequence
  Description of Artificial Sequence: Synthetic oligonucleotide
  Antisense strand to SEQ ID NO: 1019626
ucucccaauggcagcucuc

SEQ ID NO: 1019628 - RNA, 19 nt, Artificial Sequence
  Description of Artificial Sequence: Synthetic oligonucleotide
  Sense strand starting at position 707 of SEQ ID NO: 914642
gggagaaguguucgaaccu

SEQ ID NO: 1019629 - RNA, 19 nt, Artificial Sequence
  Description of Artificial Sequence: Synthetic oligonucleotide
  Antisense strand to SEQ ID NO: 1019628
agguucgaacacuucuccc

SEQ ID NO: 1019630 - RNA, 19 nt, Artificial Sequence
  Description of Artificial Sequence: Synthetic oligonucleotide
  Sense strand starting at position 911 of SEQ ID NO: 914642
gguugauuuccgugaauua

SEQ ID NO: 1019631 - RNA, 19 nt, Artificial Sequence
  Description of Artificial Sequence: Synthetic oligonucleotide
  Antisense strand to SEQ ID NO: 1019630
uaauucacggaaaucaacc

SEQ ID NO: 1019632 - RNA, 19 nt, Artificial Sequence
  Description of Artificial Sequence: Synthetic oligonucleotide
  Sense strand starting at position 1048 of SEQ ID NO: 914642
ggugguuacccuggaagau

SEQ ID NO: 1019633 - RNA, 19 nt, Artificial Sequence
  Description of Artificial Sequence: Synthetic oligonucleotide
  Antisense strand to SEQ ID NO: 1019632
aucuuccaggguaaccacc

SEQ ID NO: 1019634 - RNA, 19 nt, Artificial Sequence
  Description of Artificial Sequence: Synthetic oligonucleotide
  Sense strand starting at position 1049 of SEQ ID NO: 914642
gugguuacccuggaagauu

SEQ ID NO: 1019635 - RNA, 19 nt, Artificial Sequence
  Description of Artificial Sequence: Synthetic oligonucleotide
  Antisense strand to SEQ ID NO: 1019634
aaucuuccaggguaaccac

SEQ ID NO: 1019636 - RNA, 19 nt, Artificial Sequence
  Description of Artificial Sequence: Synthetic oligonucleotide
  Sense strand starting at position 1120 of SEQ ID NO: 914642
guggguuuacucugggaag

SEQ ID NO: 1019637 - RNA, 19 nt, Artificial Sequence
  Description of Artificial Sequence: Synthetic oligonucleotide
  Antisense strand to SEQ ID NO: 1019636
cuucccagaguaaacccac

SEQ ID NO: 1019638 - RNA, 19 nt, Artificial Sequence
  Description of Artificial Sequence: Synthetic oligonucleotide
  Sense strand starting at position 1158 of SEQ ID NO: 914642
gggaguggucacugagggu

SEQ ID NO: 1019639 - RNA, 19 nt, Artificial Sequence
  Description of Artificial Sequence: Synthetic oligonucleotide
  Antisense strand to SEQ ID NO: 1019638
acccucagugaccacuccc

SEQ ID NO: 1019640 - RNA, 19 nt, Artificial Sequence
  Description of Artificial Sequence: Synthetic oligonucleotide
  Sense strand starting at position 1297 of SEQ ID NO: 914642
ugaggaaagcguugccaaa

SEQ ID NO: 1019641 - RNA, 19 nt, Artificial Sequence
  Description of Artificial Sequence: Synthetic oligonucleotide
  Antisense strand to SEQ ID NO: 1019640
uuuggcaacgcuuuccuca

SEQ ID NO: 1019642 - RNA, 19 nt, Artificial Sequence
  Description of Artificial Sequence: Synthetic oligonucleotide
  Sense strand starting at position 1459 of SEQ ID NO: 914642
cgaucaggugucggaugaa

SEQ ID NO: 1019643 - RNA, 19 nt, Artificial Sequence
  Description of Artificial Sequence: Synthetic oligonucleotide
  Antisense strand to SEQ ID NO: 1019642
uucauccgacaccugaucg

SEQ ID NO: 1019644 - RNA, 19 nt, Artificial Sequence
  Description of Artificial Sequence: Synthetic oligonucleotide
  Sense strand starting at position 1462 of SEQ ID NO: 914642
ucaggugucggaugaaggu

SEQ ID NO: 1019645 - RNA, 19 nt, Artificial Sequence
  Description of Artificial Sequence: Synthetic oligonucleotide
  Antisense strand to SEQ ID NO: 1019644
accuucauccgacaccuga

SEQ ID NO: 1019646 - RNA, 19 nt, Artificial Sequence
  Description of Artificial Sequence: Synthetic oligonucleotide
  Sense strand starting at position 2009 of SEQ ID NO: 914642
cccauuggcugauuccaaa

SEQ ID NO: 1019647 - RNA, 19 nt, Artificial Sequence
  Description of Artificial Sequence: Synthetic oligonucleotide
  Antisense strand to SEQ ID NO: 1019646
uuuggaaucagccaauggg

SEQ ID NO: 1019648 - RNA, 19 nt, Artificial Sequence
  Description of Artificial Sequence: Synthetic oligonucleotide
  Sense strand starting at position 2097 of SEQ ID NO: 914642
cgcgaaagugcugcgguua

SEQ ID NO: 1019649 - RNA, 19 nt, Artificial Sequence
  Description of Artificial Sequence: Synthetic oligonucleotide
  Antisense strand to SEQ ID NO: 1019648
uaaccgcagcacuuucgcg

SEQ ID NO: 1019650 - RNA, 19 nt, Artificial Sequence
  Description of Artificial Sequence: Synthetic oligonucleotide
  Sense strand starting at position 2195 of SEQ ID NO: 914642
gcgggauggcuccacgaga

SEQ ID NO: 1019651 - RNA, 19 nt, Artificial Sequence
  Description of Artificial Sequence: Synthetic oligonucleotide
  Antisense strand to SEQ ID NO: 1019650
ucucguggagccaucccgc

SEQ ID NO: 1019652 - RNA, 19 nt, Artificial Sequence
  Description of Artificial Sequence: Synthetic oligonucleotide
  Sense strand starting at position 2666 of SEQ ID NO: 914642
cguauugggaagugaaauc

SEQ ID NO: 1019653 - RNA, 19 nt, Artificial Sequence
  Description of Artificial Sequence: Synthetic oligonucleotide
  Antisense strand to SEQ ID NO: 1019652
gauuucacuucccaauacg

SEQ ID NO: 1019654 - RNA, 19 nt, Artificial Sequence
  Description of Artificial Sequence: Synthetic oligonucleotide
  Sense strand starting at position 2730 of SEQ ID NO: 914642
gaaaucuugugggaauuua

SEQ ID NO: 1019655 - RNA, 19 nt, Artificial Sequence
  Description of Artificial Sequence: Synthetic oligonucleotide
  Antisense strand to SEQ ID NO: 1019654
uaaauucccacaagauuuc

SEQ ID NO: 1019656 - RNA, 19 nt, Artificial Sequence
  Description of Artificial Sequence: Synthetic oligonucleotide
  Sense strand starting at position 2808 of SEQ ID NO: 914642
aucauuuacugggaucugu

SEQ ID NO: 1019657 - RNA, 19 nt, Artificial Sequence
  Description of Artificial Sequence: Synthetic oligonucleotide
  Antisense strand to SEQ ID NO: 1019656
acagaucccaguaaaugau

SEQ ID NO: 1019658 - RNA, 19 nt, Artificial Sequence
  Description of Artificial Sequence: Synthetic oligonucleotide
  Sense strand starting at position 2937 of SEQ ID NO: 914642
gugggugaugucagagcuu

SEQ ID NO: 1019659 - RNA, 19 nt, Artificial Sequence
  Description of Artificial Sequence: Synthetic oligonucleotide
  Antisense strand to SEQ ID NO: 1019658
aagcucugacaucacccac

SEQ ID NO: 1019660 - RNA, 19 nt, Artificial Sequence
  Description of Artificial Sequence: Synthetic oligonucleotide
  Sense strand starting at position 2961 of SEQ ID NO: 914642
acugauuguuauguaacca

SEQ ID NO: 1019661 - RNA, 19 nt, Artificial Sequence
  Description of Artificial Sequence: Synthetic oligonucleotide
  Antisense strand to SEQ ID NO: 1019660
ugguuacauaacaaucagu

SEQ ID NO: 1019662 - RNA, 19 nt, Artificial Sequence
  Description of Artificial Sequence: Synthetic oligonucleotide
  Sense strand starting at position 2965 of SEQ ID NO: 914642
auuguuauguaaccaguau

SEQ ID NO: 1019663 - RNA, 19 nt, Artificial Sequence
  Description of Artificial Sequence: Synthetic oligonucleotide
  Antisense strand to SEQ ID NO: 1019662
auacugguuacauaacaau

SEQ ID NO: 1019664 - RNA, 19 nt, Artificial Sequence
  Description of Artificial Sequence: Synthetic oligonucleotide
  Sense strand starting at position 2969 of SEQ ID NO: 914642
uuauguaaccaguaucaag

SEQ ID NO: 1019665 - RNA, 19 nt, Artificial Sequence
  Description of Artificial Sequence: Synthetic oligonucleotide
  Antisense strand to SEQ ID NO: 1019664
cuugauacugguuacauaa

SEQ ID NO: 1019666 - RNA, 19 nt, Artificial Sequence
  Description of Artificial Sequence: Synthetic oligonucleotide
  Sense strand starting at position 3077 of SEQ ID NO: 914642
gcuucugggagauguggaa

SEQ ID NO: 1019667 - RNA, 19 nt, Artificial Sequence
  Description of Artificial Sequence: Synthetic oligonucleotide
  Antisense strand to SEQ ID NO: 1019666
uuccacaucucccagaagc

SEQ ID NO: 1019668 - RNA, 19 nt, Artificial Sequence
  Description of Artificial Sequence: Synthetic oligonucleotide
  Sense strand starting at position 3123 of SEQ ID NO: 914642
gggauaacuugggcuggua

SEQ ID NO: 1019669 - RNA, 19 nt, Artificial Sequence
  Description of Artificial Sequence: Synthetic oligonucleotide
  Antisense strand to SEQ ID NO: 1019668
uaccagcccaaguuauccc

SEQ ID NO: 1019670 - RNA, 19 nt, Artificial Sequence
  Description of Artificial Sequence: Synthetic oligonucleotide
  Sense strand starting at position 3204 of SEQ ID NO: 914642
gguggaaucuagagaggac

SEQ ID NO: 1019671 - RNA, 19 nt, Artificial Sequence
  Description of Artificial Sequence: Synthetic oligonucleotide
  Antisense strand to SEQ ID NO: 1019670
guccucucuagauuccacc

SEQ ID NO: 1019672 - RNA, 19 nt, Artificial Sequence
  Description of Artificial Sequence: Synthetic oligonucleotide
  Sense strand starting at position 3240 of SEQ ID NO: 914642
cgccuaccgcuuguaagau

SEQ ID NO: 1019673 - RNA, 19 nt, Artificial Sequence
  Description of Artificial Sequence: Synthetic oligonucleotide
  Antisense strand to SEQ ID NO: 1019672
aucuuacaagcgguaggcg

SEQ ID NO: 1019674 - RNA, 19 nt, Artificial Sequence
  Description of Artificial Sequence: Synthetic oligonucleotide
  Sense strand starting at position 3249 of SEQ ID NO: 914642
cuuguaagaucccuuccga

SEQ ID NO: 1019675 - RNA, 19 nt, Artificial Sequence
  Description of Artificial Sequence: Synthetic oligonucleotide
  Antisense strand to SEQ ID NO: 1019674
ucggaagggaucuuacaag

SEQ ID NO: 1019676 - RNA, 19 nt, Artificial Sequence
  Description of Artificial Sequence: Synthetic oligonucleotide
  Sense strand starting at position 3256 of SEQ ID NO: 914642
gaucccuuccgagggaaua

SEQ ID NO: 1019677 - RNA, 19 nt, Artificial Sequence
  Description of Artificial Sequence: Synthetic oligonucleotide
  Antisense strand to SEQ ID NO: 1019676
uauucccucggaagggauc

SEQ ID NO: 1019678 - RNA, 19 nt, Artificial Sequence
  Description of Artificial Sequence: Synthetic oligonucleotide
  Sense strand starting at position 3268 of SEQ ID NO: 914642
gggaauagauaguucccuu

SEQ ID NO: 1019679 - RNA, 19 nt, Artificial Sequence
  Description of Artificial Sequence: Synthetic oligonucleotide
  Antisense strand to SEQ ID NO: 1019678
aagggaacuaucuauuccc

SEQ ID NO: 1019680 - RNA, 19 nt, Artificial Sequence
  Description of Artificial Sequence: Synthetic oligonucleotide
  Sense strand starting at position 3319 of SEQ ID NO: 914642
gcggauaaguaauuccaac

SEQ ID NO: 1019681 - RNA, 19 nt, Artificial Sequence
  Description of Artificial Sequence: Synthetic oligonucleotide
  Antisense strand to SEQ ID NO: 1019680
guuggaauuacuuauccgc

SEQ ID NO: 1019682 - RNA, 19 nt, Artificial Sequence
  Description of Artificial Sequence: Synthetic oligonucleotide
  Sense strand starting at position 3357 of SEQ ID NO: 914642
cccuuagugcuuugauuug

SEQ ID NO: 1019683 - RNA, 19 nt, Artificial Sequence
  Description of Artificial Sequence: Synthetic oligonucleotide
  Antisense strand to SEQ ID NO: 1019682
caaaucaaagcacuaaggg

SEQ ID NO: 1019684 - RNA, 19 nt, Artificial Sequence
  Description of Artificial Sequence: Synthetic oligonucleotide
  Sense strand starting at position 3619 of SEQ ID NO: 914642
caguuucuggguugaucua

SEQ ID NO: 1019685 - RNA, 19 nt, Artificial Sequence
  Description of Artificial Sequence: Synthetic oligonucleotide
  Antisense strand to SEQ ID NO: 1019684
uagaucaacccagaaacug

SEQ ID NO: 1019686 - RNA, 19 nt, Artificial Sequence
  Description of Artificial Sequence: Synthetic oligonucleotide
  Sense strand starting at position 3625 of SEQ ID NO: 914642
cuggguugaucuagggaag

SEQ ID NO: 1019687 - RNA, 19 nt, Artificial Sequence
  Description of Artificial Sequence: Synthetic oligonucleotide
  Antisense strand to SEQ ID NO: 1019686
cuucccuagaucaacccag

SEQ ID NO: 1019688 - RNA, 19 nt, Artificial Sequence
  Description of Artificial Sequence: Synthetic oligonucleotide
  Sense strand starting at position 3660 of SEQ ID NO: 914642
uccugaaugaaguaguugu

SEQ ID NO: 1019689 - RNA, 19 nt, Artificial Sequence
  Description of Artificial Sequence: Synthetic oligonucleotide
  Antisense strand to SEQ ID NO: 1019688
acaacuacuucauucagga

SEQ ID NO: 1019690 - RNA, 19 nt, Artificial Sequence
  Description of Artificial Sequence: Synthetic oligonucleotide
  Sense strand starting at position 3840 of SEQ ID NO: 914642
agacccugucguuauguau

SEQ ID NO: 1019691 - RNA, 19 nt, Artificial Sequence
  Description of Artificial Sequence: Synthetic oligonucleotide
  Antisense strand to SEQ ID NO: 1019690
auacauaacgacagggucu

SEQ ID NO: 1019692 - RNA, 19 nt, Artificial Sequence
  Description of Artificial Sequence: Synthetic oligonucleotide
  Sense strand starting at position 3873 of SEQ ID NO: 914642
cuccaaagaucuuaaagga

SEQ ID NO: 1019693 - RNA, 19 nt, Artificial Sequence
  Description of Artificial Sequence: Synthetic oligonucleotide
  Antisense strand to SEQ ID NO: 1019692
uccuuuaagaucuuuggag

SEQ ID NO: 1019694 - RNA, 19 nt, Artificial Sequence
  Description of Artificial Sequence: Synthetic oligonucleotide
  Sense strand starting at position 96 of SEQ ID NO: 914643
caucuugcgcggucaugua

SEQ ID NO: 1019695 - RNA, 19 nt, Artificial Sequence
  Description of Artificial Sequence: Synthetic oligonucleotide
  Antisense strand to SEQ ID NO: 1019694
uacaugaccgcgcaagaug

SEQ ID NO: 1019696 - RNA, 19 nt, Artificial Sequence
  Description of Artificial Sequence: Synthetic oligonucleotide
  Sense strand starting at position 307 of SEQ ID NO: 914643
aaugguguugucuacauga

SEQ ID NO: 1019697 - RNA, 19 nt, Artificial Sequence
  Description of Artificial Sequence: Synthetic oligonucleotide
  Antisense strand to SEQ ID NO: 1019696
ucauguagacaacaccauu

SEQ ID NO: 1019698 - RNA, 19 nt, Artificial Sequence
  Description of Artificial Sequence: Synthetic oligonucleotide
  Sense strand starting at position 309 of SEQ ID NO: 914643
ugguguugucuacaugacu

SEQ ID NO: 1019699 - RNA, 19 nt, Artificial Sequence
  Description of Artificial Sequence: Synthetic oligonucleotide
  Antisense strand to SEQ ID NO: 1019698
agucauguagacaacacca

SEQ ID NO: 1019700 - RNA, 19 nt, Artificial Sequence
  Description of Artificial Sequence: Synthetic oligonucleotide
  Sense strand starting at position 399 of SEQ ID NO: 914643
aguggauccucugcaaacu

SEQ ID NO: 1019701 - RNA, 19 nt, Artificial Sequence
  Description of Artificial Sequence: Synthetic oligonucleotide
  Antisense strand to SEQ ID NO: 1019700
aguuugcagaggauccacu

SEQ ID NO: 1019702 - RNA, 19 nt, Artificial Sequence
  Description of Artificial Sequence: Synthetic oligonucleotide
  Sense strand starting at position 400 of SEQ ID NO: 914643
guggauccucugcaaacuu

SEQ ID NO: 1019703 - RNA, 19 nt, Artificial Sequence
  Description of Artificial Sequence: Synthetic oligonucleotide
  Antisense strand to SEQ ID NO: 1019702
aaguuugcagaggauccac

SEQ ID NO: 1019704 - RNA, 19 nt, Artificial Sequence
  Description of Artificial Sequence: Synthetic oligonucleotide
  Sense strand starting at position 471 of SEQ ID NO: 914643
aguaucuccuagccaugaa

SEQ ID NO: 1019705 - RNA, 19 nt, Artificial Sequence
  Description of Artificial Sequence: Synthetic oligonucleotide
  Antisense strand to SEQ ID NO: 1019704
uucauggcuaggagauacu

SEQ ID NO: 1019706 - RNA, 19 nt, Artificial Sequence
  Description of Artificial Sequence: Synthetic oligonucleotide
  Sense strand starting at position 656 of SEQ ID NO: 914643
agacuuccaucaguaaguu

SEQ ID NO: 1019707 - RNA, 19 nt, Artificial Sequence
  Description of Artificial Sequence: Synthetic oligonucleotide
  Antisense strand to SEQ ID NO: 1019706
aacuuacugauggaagucu

SEQ ID NO: 1019708 - RNA, 19 nt, Artificial Sequence
  Description of Artificial Sequence: Synthetic oligonucleotide
  Sense strand starting at position 664 of SEQ ID NO: 914643
aucaguaaguucuuggaau

SEQ ID NO: 1019709 - RNA, 19 nt, Artificial Sequence
  Description of Artificial Sequence: Synthetic oligonucleotide
  Antisense strand to SEQ ID NO: 1019708
auuccaagaacuuacugau

SEQ ID NO: 1019710 - RNA, 19 nt, Artificial Sequence
  Description of Artificial Sequence: Synthetic oligonucleotide
  Sense strand starting at position 731 of SEQ ID NO: 914643
cagagacaccugugaacuu

SEQ ID NO: 1019711 - RNA, 19 nt, Artificial Sequence
  Description of Artificial Sequence: Synthetic oligonucleotide
  Antisense strand to SEQ ID NO: 1019710
aaguucacaggugucucug

SEQ ID NO: 1019712 - RNA, 19 nt, Artificial Sequence
  Description of Artificial Sequence: Synthetic oligonucleotide
  Sense strand starting at position 807 of SEQ ID NO: 914643
caugguaaaucagcaaaga

SEQ ID NO: 1019713 - RNA, 19 nt, Artificial Sequence
  Description of Artificial Sequence: Synthetic oligonucleotide
  Antisense strand to SEQ ID NO: 1019712
ucuuugcugauuuaccaug

SEQ ID NO: 1019714 - RNA, 19 nt, Artificial Sequence
  Description of Artificial Sequence: Synthetic oligonucleotide
  Sense strand starting at position 1110 of SEQ ID NO: 914643
gaguaaacaaaggguuagu

SEQ ID NO: 1019715 - RNA, 19 nt, Artificial Sequence
  Description of Artificial Sequence: Synthetic oligonucleotide
  Antisense strand to SEQ ID NO: 1019714
acuaacccuuuguuuacuc

SEQ ID NO: 1019716 - RNA, 19 nt, Artificial Sequence
  Description of Artificial Sequence: Synthetic oligonucleotide
  Sense strand starting at position 1119 of SEQ ID NO: 914643
aaggguuaguuuguaaaca

SEQ ID NO: 1019717 - RNA, 19 nt, Artificial Sequence
  Description of Artificial Sequence: Synthetic oligonucleotide
  Antisense strand to SEQ ID NO: 1019716
uguuuacaaacuaacccuu

SEQ ID NO: 1019718 - RNA, 19 nt, Artificial Sequence
  Description of Artificial Sequence: Synthetic oligonucleotide
  Sense strand starting at position 1285 of SEQ ID NO: 914643
guguauguucuugccuauu

SEQ ID NO: 1019719 - RNA, 19 nt, Artificial Sequence
  Description of Artificial Sequence: Synthetic oligonucleotide
  Antisense strand to SEQ ID NO: 1019718
aauaggcaagaacauacac

SEQ ID NO: 1019720 - RNA, 19 nt, Artificial Sequence
  Description of Artificial Sequence: Synthetic oligonucleotide
  Sense strand starting at position 1287 of SEQ ID NO: 914643
guauguucuugccuauuuc

SEQ ID NO: 1019721 - RNA, 19 nt, Artificial Sequence
  Description of Artificial Sequence: Synthetic oligonucleotide
  Antisense strand to SEQ ID NO: 1019720
gaaauaggcaagaacauac

SEQ ID NO: 1019722 - RNA, 19 nt, Artificial Sequence
  Description of Artificial Sequence: Synthetic oligonucleotide
  Sense strand starting at position 1313 of SEQ ID NO: 914643
uuuccaguccuggaacaua

SEQ ID NO: 1019723 - RNA, 19 nt, Artificial Sequence
  Description of Artificial Sequence: Synthetic oligonucleotide
  Antisense strand to SEQ ID NO: 1019722
uauguuccaggacuggaaa

SEQ ID NO: 1019724 - RNA, 19 nt, Artificial Sequence
  Description of Artificial Sequence: Synthetic oligonucleotide
  Sense strand starting at position 1350 of SEQ ID NO: 914643
uuccauguagcucauaagu

SEQ ID NO: 1019725 - RNA, 19 nt, Artificial Sequence
  Description of Artificial Sequence: Synthetic oligonucleotide
  Antisense strand to SEQ ID NO: 1019724
acuuaugagcuacauggaa

SEQ ID NO: 1019726 - RNA, 19 nt, Artificial Sequence
  Description of Artificial Sequence: Synthetic oligonucleotide
  Sense strand starting at position 1451 of SEQ ID NO: 914643
uucucugagcuauaucaga

SEQ ID NO: 1019727 - RNA, 19 nt, Artificial Sequence
  Description of Artificial Sequence: Synthetic oligonucleotide
  Antisense strand to SEQ ID NO: 1019726
ucugauauagcucagagaa

SEQ ID NO: 1019728 - RNA, 19 nt, Artificial Sequence
  Description of Artificial Sequence: Synthetic oligonucleotide
  Sense strand starting at position 1484 of SEQ ID NO: 914643
gcugccuauuuguuccaga

SEQ ID NO: 1019729 - RNA, 19 nt, Artificial Sequence
  Description of Artificial Sequence: Synthetic oligonucleotide
  Antisense strand to SEQ ID NO: 1019728
ucuggaacaaauaggcagc

SEQ ID NO: 1019730 - RNA, 19 nt, Artificial Sequence
  Description of Artificial Sequence: Synthetic oligonucleotide
  Sense strand starting at position 1485 of SEQ ID NO: 914643
cugccuauuuguuccagaa

SEQ ID NO: 1019731 - RNA, 19 nt, Artificial Sequence
  Description of Artificial Sequence: Synthetic oligonucleotide
  Antisense strand to SEQ ID NO: 1019730
uucuggaacaaauaggcag

SEQ ID NO: 1019732 - RNA, 19 nt, Artificial Sequence
  Description of Artificial Sequence: Synthetic oligonucleotide
  Sense strand starting at position 1583 of SEQ ID NO: 914643
ccagacaaugcaggaaauu

SEQ ID NO: 1019733 - RNA, 19 nt, Artificial Sequence
  Description of Artificial Sequence: Synthetic oligonucleotide
  Antisense strand to SEQ ID NO: 1019732
aauuuccugcauugucugg

SEQ ID NO: 1019734 - RNA, 19 nt, Artificial Sequence
  Description of Artificial Sequence: Synthetic oligonucleotide
  Sense strand starting at position 1706 of SEQ ID NO: 914643
cuccaagagucuguucuag

SEQ ID NO: 1019735 - RNA, 19 nt, Artificial Sequence
  Description of Artificial Sequence: Synthetic oligonucleotide
  Antisense strand to SEQ ID NO: 1019734
cuagaacagacucuuggag

SEQ ID NO: 1019736 - RNA, 19 nt, Artificial Sequence
  Description of Artificial Sequence: Synthetic oligonucleotide
  Sense strand starting at position 1759 of SEQ ID NO: 914643
ccacucaaguguuuggauu

SEQ ID NO: 1019737 - RNA, 19 nt, Artificial Sequence
  Description of Artificial Sequence: Synthetic oligonucleotide
  Antisense strand to SEQ ID NO: 1019736
aauccaaacacuugagugg

SEQ ID NO: 1019738 - RNA, 19 nt, Artificial Sequence
  Description of Artificial Sequence: Synthetic oligonucleotide
  Sense strand starting at position 1988 of SEQ ID NO: 914643
guaggauguuaagcaauaa

SEQ ID NO: 1019739 - RNA, 19 nt, Artificial Sequence
  Description of Artificial Sequence: Synthetic oligonucleotide
  Antisense strand to SEQ ID NO: 1019738
uuauugcuuaacauccuac

SEQ ID NO: 1019740 - RNA, 19 nt, Artificial Sequence
  Description of Artificial Sequence: Synthetic oligonucleotide
  Sense strand starting at position 2015 of SEQ ID NO: 914643
ccgggaauucccuaaguca

SEQ ID NO: 1019741 - RNA, 19 nt, Artificial Sequence
  Description of Artificial Sequence: Synthetic oligonucleotide
  Antisense strand to SEQ ID NO: 1019740
ugacuuagggaauucccgg

SEQ ID NO: 1019742 - RNA, 19 nt, Artificial Sequence
  Description of Artificial Sequence: Synthetic oligonucleotide
  Sense strand starting at position 2018 of SEQ ID NO: 914643
ggaauucccuaagucacuu

SEQ ID NO: 1019743 - RNA, 19 nt, Artificial Sequence
  Description of Artificial Sequence: Synthetic oligonucleotide
  Antisense strand to SEQ ID NO: 1019742
aagugacuuagggaauucc

SEQ ID NO: 1019744 - RNA, 19 nt, Artificial Sequence
  Description of Artificial Sequence: Synthetic oligonucleotide
  Sense strand starting at position 2303 of SEQ ID NO: 914643
aagcaaagugaguagaagu

SEQ ID NO: 1019745 - RNA, 19 nt, Artificial Sequence
  Description of Artificial Sequence: Synthetic oligonucleotide
  Antisense strand to SEQ ID NO: 1019744
acuucuacucacuuugcuu

SEQ ID NO: 1019746 - RNA, 19 nt, Artificial Sequence
  Description of Artificial Sequence: Synthetic oligonucleotide
  Sense strand starting at position 2363 of SEQ ID NO: 914643
gcaccugucucauuuauua

SEQ ID NO: 1019747 - RNA, 19 nt, Artificial Sequence
  Description of Artificial Sequence: Synthetic oligonucleotide
  Antisense strand to SEQ ID NO: 1019746
uaauaaaugagacaggugc

SEQ ID NO: 1019748 - RNA, 19 nt, Artificial Sequence
  Description of Artificial Sequence: Synthetic oligonucleotide
  Sense strand starting at position 2400 of SEQ ID NO: 914643
cugcuuuggcaucaagauc

SEQ ID NO: 1019749 - RNA, 19 nt, Artificial Sequence
  Description of Artificial Sequence: Synthetic oligonucleotide
  Antisense strand to SEQ ID NO: 1019748
gaucuugaugccaaagcag

SEQ ID NO: 1019750 - RNA, 19 nt, Artificial Sequence
  Description of Artificial Sequence: Synthetic oligonucleotide
  Sense strand starting at position 2608 of SEQ ID NO: 914643
ugaggagaugcuuagguca

SEQ ID NO: 1019751 - RNA, 19 nt, Artificial Sequence
  Description of Artificial Sequence: Synthetic oligonucleotide
  Antisense strand to SEQ ID NO: 1019750
ugaccuaagcaucuccuca

SEQ ID NO: 1019752 - RNA, 19 nt, Artificial Sequence
  Description of Artificial Sequence: Synthetic oligonucleotide
  Sense strand starting at position 2639 of SEQ ID NO: 914643
ucaaauaugcaagagcuga

SEQ ID NO: 1019753 - RNA, 19 nt, Artificial Sequence
  Description of Artificial Sequence: Synthetic oligonucleotide
  Antisense strand to SEQ ID NO: 1019752
ucagcucuugcauauuuga

SEQ ID NO: 1019754 - RNA, 19 nt, Artificial Sequence
  Description of Artificial Sequence: Synthetic oligonucleotide
  Sense strand starting at position 2930 of SEQ ID NO: 914643
cucccauacgggugaauga

SEQ ID NO: 1019755 - RNA, 19 nt, Artificial Sequence
  Description of Artificial Sequence: Synthetic oligonucleotide
  Antisense strand to SEQ ID NO: 1019754
ucauucacccguaugggag

SEQ ID NO: 1019756 - RNA, 19 nt, Artificial Sequence
  Description of Artificial Sequence: Synthetic oligonucleotide
  Sense strand starting at position 3030 of SEQ ID NO: 914643
caaagugucuaagcagauu

SEQ ID NO: 1019757 - RNA, 19 nt, Artificial Sequence
  Description of Artificial Sequence: Synthetic oligonucleotide
  Antisense strand to SEQ ID NO: 1019756
aaucugcuuagacacuuug

SEQ ID NO: 1019758 - RNA, 19 nt, Artificial Sequence
  Description of Artificial Sequence: Synthetic oligonucleotide
  Sense strand starting at position 3177 of SEQ ID NO: 914643
gucaaaggcugacugaaua

SEQ ID NO: 1019759 - RNA, 19 nt, Artificial Sequence
  Description of Artificial Sequence: Synthetic oligonucleotide
  Antisense strand to SEQ ID NO: 1019758
uauucagucagccuuugac

SEQ ID NO: 1019760 - RNA, 19 nt, Artificial Sequence
  Description of Artificial Sequence: Synthetic oligonucleotide
  Sense strand starting at position 3590 of SEQ ID NO: 914643
cuaucaguuccagaucuga

SEQ ID NO: 1019761 - RNA, 19 nt, Artificial Sequence
  Description of Artificial Sequence: Synthetic oligonucleotide
  Antisense strand to SEQ ID NO: 1019760
ucagaucuggaacugauag

SEQ ID NO: 1019762 - RNA, 19 nt, Artificial Sequence
  Description of Artificial Sequence: Synthetic oligonucleotide
  Sense strand starting at position 3698 of SEQ ID NO: 914643
gggcauuuguguguaguga

SEQ ID NO: 1019763 - RNA, 19 nt, Artificial Sequence
  Description of Artificial Sequence: Synthetic oligonucleotide
  Antisense strand to SEQ ID NO: 1019762
ucacuacacacaaaugccc

SEQ ID NO: 1019764 - RNA, 19 nt, Artificial Sequence
  Description of Artificial Sequence: Synthetic oligonucleotide
  Sense strand starting at position 3699 of SEQ ID NO: 914643
ggcauuuguguguagugau

SEQ ID NO: 1019765 - RNA, 19 nt, Artificial Sequence
  Description of Artificial Sequence: Synthetic oligonucleotide
  Antisense strand to SEQ ID NO: 1019764
aucacuacacacaaaugcc

SEQ ID NO: 1019766 - RNA, 19 nt, Artificial Sequence
  Description of Artificial Sequence: Synthetic oligonucleotide
  Sense strand starting at position 3813 of SEQ ID NO: 914643
acaccauugccugagauua

SEQ ID NO: 1019767 - RNA, 19 nt, Artificial Sequence
  Description of Artificial Sequence: Synthetic oligonucleotide
  Antisense strand to SEQ ID NO: 1019766
uaaucucaggcaauggugu

SEQ ID NO: 1019768 - RNA, 19 nt, Artificial Sequence
  Description of Artificial Sequence: Synthetic oligonucleotide
  Sense strand starting at position 3821 of SEQ ID NO: 914643
gccugagauuaaccugaga

SEQ ID NO: 1019769 - RNA, 19 nt, Artificial Sequence
  Description of Artificial Sequence: Synthetic oligonucleotide
  Antisense strand to SEQ ID NO: 1019768
ucucagguuaaucucaggc

SEQ ID NO: 1019770 - RNA, 19 nt, Artificial Sequence
  Description of Artificial Sequence: Synthetic oligonucleotide
  Sense strand starting at position 3865 of SEQ ID NO: 914643
ggguuguguggucaagaga

SEQ ID NO: 1019771 - RNA, 19 nt, Artificial Sequence
  Description of Artificial Sequence: Synthetic oligonucleotide
  Antisense strand to SEQ ID NO: 1019770
ucucuugaccacacaaccc

SEQ ID NO: 1019772 - RNA, 19 nt, Artificial Sequence
  Description of Artificial Sequence: Synthetic oligonucleotide
  Sense strand starting at position 3868 of SEQ ID NO: 914643
uuguguggucaagagauag

SEQ ID NO: 1019773 - RNA, 19 nt, Artificial Sequence
  Description of Artificial Sequence: Synthetic oligonucleotide
  Antisense strand to SEQ ID NO: 1019772
cuaucucuugaccacacaa

SEQ ID NO: 1019774 - RNA, 19 nt, Artificial Sequence
  Description of Artificial Sequence: Synthetic oligonucleotide
  Sense strand starting at position 141 of SEQ ID NO: 914644
cucaguccuuaaucaaagu

SEQ ID NO: 1019775 - RNA, 19 nt, Artificial Sequence
  Description of Artificial Sequence: Synthetic oligonucleotide
  Antisense strand to SEQ ID NO: 1019774
acuuugauuaaggacugag

SEQ ID NO: 1019776 - RNA, 19 nt, Artificial Sequence
  Description of Artificial Sequence: Synthetic oligonucleotide
  Sense strand starting at position 156 of SEQ ID NO: 914644
aaguuaccagcaggugaau

SEQ ID NO: 1019777 - RNA, 19 nt, Artificial Sequence
  Description of Artificial Sequence: Synthetic oligonucleotide
  Antisense strand to SEQ ID NO: 1019776
auucaccugcugguaacuu

SEQ ID NO: 1019778 - RNA, 19 nt, Artificial Sequence
  Description of Artificial Sequence: Synthetic oligonucleotide
  Sense strand starting at position 286 of SEQ ID NO: 914644
gugaaaggcaacugaauau

SEQ ID NO: 1019779 - RNA, 19 nt, Artificial Sequence
  Description of Artificial Sequence: Synthetic oligonucleotide
  Antisense strand to SEQ ID NO: 1019778
auauucaguugccuuucac

SEQ ID NO: 1019780 - RNA, 19 nt, Artificial Sequence
  Description of Artificial Sequence: Synthetic oligonucleotide
  Sense strand starting at position 369 of SEQ ID NO: 914644
uuugauucucuugggauua

SEQ ID NO: 1019781 - RNA, 19 nt, Artificial Sequence
  Description of Artificial Sequence: Synthetic oligonucleotide
  Antisense strand to SEQ ID NO: 1019780
uaaucccaagagaaucaaa

SEQ ID NO: 1019782 - RNA, 19 nt, Artificial Sequence
  Description of Artificial Sequence: Synthetic oligonucleotide
  Sense strand starting at position 545 of SEQ ID NO: 914644
cuuuauugacuguaagcca

SEQ ID NO: 1019783 - RNA, 19 nt, Artificial Sequence
  Description of Artificial Sequence: Synthetic oligonucleotide
  Antisense strand to SEQ ID NO: 1019782
uggcuuacagucaauaaag

SEQ ID NO: 1019784 - RNA, 19 nt, Artificial Sequence
  Description of Artificial Sequence: Synthetic oligonucleotide
  Sense strand starting at position 644 of SEQ ID NO: 914644
ggcacucaaguugaucaaa

SEQ ID NO: 1019785 - RNA, 19 nt, Artificial Sequence
  Description of Artificial Sequence: Synthetic oligonucleotide
  Antisense strand to SEQ ID NO: 1019784
uuugaucaacuugagugcc

SEQ ID NO: 1019786 - RNA, 19 nt, Artificial Sequence
  Description of Artificial Sequence: Synthetic oligonucleotide
  Sense strand starting at position 663 of SEQ ID NO: 914644
agacaagcuugccuaagau

SEQ ID NO: 1019787 - RNA, 19 nt, Artificial Sequence
  Description of Artificial Sequence: Synthetic oligonucleotide
  Antisense strand to SEQ ID NO: 1019786
aucuuaggcaagcuugucu

SEQ ID NO: 1019788 - RNA, 19 nt, Artificial Sequence
  Description of Artificial Sequence: Synthetic oligonucleotide
  Sense strand starting at position 928 of SEQ ID NO: 914644
aacaauguuuggcuacuga

SEQ ID NO: 1019789 - RNA, 19 nt, Artificial Sequence
  Description of Artificial Sequence: Synthetic oligonucleotide
  Antisense strand to SEQ ID NO: 1019788
ucaguagccaaacauuguu

SEQ ID NO: 1019790 - RNA, 19 nt, Artificial Sequence
  Description of Artificial Sequence: Synthetic oligonucleotide
  Sense strand starting at position 1095 of SEQ ID NO: 914644
agauaccagccuugaaaga

SEQ ID NO: 1019791 - RNA, 19 nt, Artificial Sequence
  Description of Artificial Sequence: Synthetic oligonucleotide
  Antisense strand to SEQ ID NO: 1019790
ucuuucaaggcugguaucu

SEQ ID NO: 1019792 - RNA, 19 nt, Artificial Sequence
  Description of Artificial Sequence: Synthetic oligonucleotide
  Sense strand starting at position 1228 of SEQ ID NO: 914644
gagggaauugcuuaguucu

SEQ ID NO: 1019793 - RNA, 19 nt, Artificial Sequence
  Description of Artificial Sequence: Synthetic oligonucleotide
  Antisense strand to SEQ ID NO: 1019792
agaacuaagcaauucccuc

SEQ ID NO: 1019794 - RNA, 19 nt, Artificial Sequence
  Description of Artificial Sequence: Synthetic oligonucleotide
  Sense strand starting at position 1230 of SEQ ID NO: 914644
gggaauugcuuaguucuau

SEQ ID NO: 1019795 - RNA, 19 nt, Artificial Sequence
  Description of Artificial Sequence: Synthetic oligonucleotide
  Antisense strand to SEQ ID NO: 1019794
auagaacuaagcaauuccc

SEQ ID NO: 1019796 - RNA, 19 nt, Artificial Sequence
  Description of Artificial Sequence: Synthetic oligonucleotide
  Sense strand starting at position 1343 of SEQ ID NO: 914644
ugcagaggaucucucugau

SEQ ID NO: 1019797 - RNA, 19 nt, Artificial Sequence
  Description of Artificial Sequence: Synthetic oligonucleotide
  Antisense strand to SEQ ID NO: 1019796
aucagagagauccucugca

SEQ ID NO: 1019798 - RNA, 19 nt, Artificial Sequence
  Description of Artificial Sequence: Synthetic oligonucleotide
  Sense strand starting at position 1346 of SEQ ID NO: 914644
agaggaucucucugauggu

SEQ ID NO: 1019799 - RNA, 19 nt, Artificial Sequence
  Description of Artificial Sequence: Synthetic oligonucleotide
  Antisense strand to SEQ ID NO: 1019798
accaucagagagauccucu

SEQ ID NO: 1019800 - RNA, 19 nt, Artificial Sequence
  Description of Artificial Sequence: Synthetic oligonucleotide
  Sense strand starting at position 1350 of SEQ ID NO: 914644
gaucucucugaugguuacu

SEQ ID NO: 1019801 - RNA, 19 nt, Artificial Sequence
  Description of Artificial Sequence: Synthetic oligonucleotide
  Antisense strand to SEQ ID NO: 1019800
aguaaccaucagagagauc

SEQ ID NO: 1019802 - RNA, 19 nt, Artificial Sequence
  Description of Artificial Sequence: Synthetic oligonucleotide
  Sense strand starting at position 1530 of SEQ ID NO: 914644
uuauccggccauuacaaua

SEQ ID NO: 1019803 - RNA, 19 nt, Artificial Sequence
  Description of Artificial Sequence: Synthetic oligonucleotide
  Antisense strand to SEQ ID NO: 1019802
uauuguaauggccggauaa

SEQ ID NO: 1019804 - RNA, 19 nt, Artificial Sequence
  Description of Artificial Sequence: Synthetic oligonucleotide
  Sense strand starting at position 1580 of SEQ ID NO: 914644
uuaccaagugucuacuaga

SEQ ID NO: 1019805 - RNA, 19 nt, Artificial Sequence
  Description of Artificial Sequence: Synthetic oligonucleotide
  Antisense strand to SEQ ID NO: 1019804
ucuaguagacacuugguaa

SEQ ID NO: 1019806 - RNA, 19 nt, Artificial Sequence
  Description of Artificial Sequence: Synthetic oligonucleotide
  Sense strand starting at position 1615 of SEQ ID NO: 914644
aggugcuggcgauacaaua

SEQ ID NO: 1019807 - RNA, 19 nt, Artificial Sequence
  Description of Artificial Sequence: Synthetic oligonucleotide
  Antisense strand to SEQ ID NO: 1019806
uauuguaucgccagcaccu

SEQ ID NO: 1019808 - RNA, 19 nt, Artificial Sequence
  Description of Artificial Sequence: Synthetic oligonucleotide
  Sense strand starting at position 1623 of SEQ ID NO: 914644
gcgauacaauaguuaacaa

SEQ ID NO: 1019809 - RNA, 19 nt, Artificial Sequence
  Description of Artificial Sequence: Synthetic oligonucleotide
  Antisense strand to SEQ ID NO: 1019808
uuguuaacuauuguaucgc

SEQ ID NO: 1019810 - RNA, 19 nt, Artificial Sequence
  Description of Artificial Sequence: Synthetic oligonucleotide
  Sense strand starting at position 1740 of SEQ ID NO: 914644
uccuguugugaauggaaug

SEQ ID NO: 1019811 - RNA, 19 nt, Artificial Sequence
  Description of Artificial Sequence: Synthetic oligonucleotide
  Antisense strand to SEQ ID NO: 1019810
cauuccauucacaacagga

SEQ ID NO: 1019812 - RNA, 19 nt, Artificial Sequence
  Description of Artificial Sequence: Synthetic oligonucleotide
  Sense strand starting at position 2028 of SEQ ID NO: 914644
gagacaaugguguguuuau

SEQ ID NO: 1019813 - RNA, 19 nt, Artificial Sequence
  Description of Artificial Sequence: Synthetic oligonucleotide
  Antisense strand to SEQ ID NO: 1019812
auaaacacaccauugucuc

SEQ ID NO: 1019814 - RNA, 19 nt, Artificial Sequence
  Description of Artificial Sequence: Synthetic oligonucleotide
  Sense strand starting at position 2029 of SEQ ID NO: 914644
agacaaugguguguuuaug

SEQ ID NO: 1019815 - RNA, 19 nt, Artificial Sequence
  Description of Artificial Sequence: Synthetic oligonucleotide
  Antisense strand to SEQ ID NO: 1019814
cauaaacacaccauugucu

SEQ ID NO: 1019816 - RNA, 19 nt, Artificial Sequence
  Description of Artificial Sequence: Synthetic oligonucleotide
  Sense strand starting at position 2060 of SEQ ID NO: 914644
aggagcagguuguuaacau

SEQ ID NO: 1019817 - RNA, 19 nt, Artificial Sequence
  Description of Artificial Sequence: Synthetic oligonucleotide
  Antisense strand to SEQ ID NO: 1019816
auguuaacaaccugcuccu

SEQ ID NO: 1019818 - RNA, 19 nt, Artificial Sequence
  Description of Artificial Sequence: Synthetic oligonucleotide
  Sense strand starting at position 2153 of SEQ ID NO: 914644
ggguauaagcccuaccuuu

SEQ ID NO: 1019819 - RNA, 19 nt, Artificial Sequence
  Description of Artificial Sequence: Synthetic oligonucleotide
  Antisense strand to SEQ ID NO: 1019818
aaagguagggcuuauaccc

SEQ ID NO: 1019820 - RNA, 19 nt, Artificial Sequence
  Description of Artificial Sequence: Synthetic oligonucleotide
  Sense strand starting at position 2208 of SEQ ID NO: 914644
uguugcucugcuccgauaa

SEQ ID NO: 1019821 - RNA, 19 nt, Artificial Sequence
  Description of Artificial Sequence: Synthetic oligonucleotide
  Antisense strand to SEQ ID NO: 1019820
uuaucggagcagagcaaca

SEQ ID NO: 1019822 - RNA, 19 nt, Artificial Sequence
  Description of Artificial Sequence: Synthetic oligonucleotide
  Sense strand starting at position 2220 of SEQ ID NO: 914644
ccgauaacaacgcaguuaa

SEQ ID NO: 1019823 - RNA, 19 nt, Artificial Sequence
  Description of Artificial Sequence: Synthetic oligonucleotide
  Antisense strand to SEQ ID NO: 1019822
uuaacugcguuguuaucgg

SEQ ID NO: 1019824 - RNA, 19 nt, Artificial Sequence
  Description of Artificial Sequence: Synthetic oligonucleotide
  Sense strand starting at position 2231 of SEQ ID NO: 914644
gcaguuaagcauugauuug

SEQ ID NO: 1019825 - RNA, 19 nt, Artificial Sequence
  Description of Artificial Sequence: Synthetic oligonucleotide
  Antisense strand to SEQ ID NO: 1019824
caaaucaaugcuuaacugc

SEQ ID NO: 1019826 - RNA, 19 nt, Artificial Sequence
  Description of Artificial Sequence: Synthetic oligonucleotide
  Sense strand starting at position 2238 of SEQ ID NO: 914644
agcauugauuuguaggaaa

SEQ ID NO: 1019827 - RNA, 19 nt, Artificial Sequence
  Description of Artificial Sequence: Synthetic oligonucleotide
  Antisense strand to SEQ ID NO: 1019826
uuuccuacaaaucaaugcu

SEQ ID NO: 1019828 - RNA, 19 nt, Artificial Sequence
  Description of Artificial Sequence: Synthetic oligonucleotide
  Sense strand starting at position 2624 of SEQ ID NO: 914644
cuaaaugguugacuuccaa

SEQ ID NO: 1019829 - RNA, 19 nt, Artificial Sequence
  Description of Artificial Sequence: Synthetic oligonucleotide
  Antisense strand to SEQ ID NO: 1019828
uuggaagucaaccauuuag

SEQ ID NO: 1019830 - RNA, 19 nt, Artificial Sequence
  Description of Artificial Sequence: Synthetic oligonucleotide
  Sense strand starting at position 2665 of SEQ ID NO: 914644
agguguagucucuagguua

SEQ ID NO: 1019831 - RNA, 19 nt, Artificial Sequence
  Description of Artificial Sequence: Synthetic oligonucleotide
  Antisense strand to SEQ ID NO: 1019830
uaaccuagagacuacaccu

SEQ ID NO: 1019832 - RNA, 19 nt, Artificial Sequence
  Description of Artificial Sequence: Synthetic oligonucleotide
  Sense strand starting at position 2802 of SEQ ID NO: 914644
uuucccaucgcauaaauga

SEQ ID NO: 1019833 - RNA, 19 nt, Artificial Sequence
  Description of Artificial Sequence: Synthetic oligonucleotide
  Antisense strand to SEQ ID NO: 1019832
ucauuuaugcgaugggaaa

SEQ ID NO: 1019834 - RNA, 19 nt, Artificial Sequence
  Description of Artificial Sequence: Synthetic oligonucleotide
  Sense strand starting at position 2901 of SEQ ID NO: 914644
guggaaagggccugagaug

SEQ ID NO: 1019835 - RNA, 19 nt, Artificial Sequence
  Description of Artificial Sequence: Synthetic oligonucleotide
  Antisense strand to SEQ ID NO: 1019834
caucucaggcccuuuccac

SEQ ID NO: 1019836 - RNA, 19 nt, Artificial Sequence
  Description of Artificial Sequence: Synthetic oligonucleotide
  Sense strand starting at position 2913 of SEQ ID NO: 914644
ugagauguccuagauguga

SEQ ID NO: 1019837 - RNA, 19 nt, Artificial Sequence
  Description of Artificial Sequence: Synthetic oligonucleotide
  Antisense strand to SEQ ID NO: 1019836
ucacaucuaggacaucuca

SEQ ID NO: 1019838 - RNA, 19 nt, Artificial Sequence
  Description of Artificial Sequence: Synthetic oligonucleotide
  Sense strand starting at position 2915 of SEQ ID NO: 914644
agauguccuagaugugauu

SEQ ID NO: 1019839 - RNA, 19 nt, Artificial Sequence
  Description of Artificial Sequence: Synthetic oligonucleotide
  Antisense strand to SEQ ID NO: 1019838
aaucacaucuaggacaucu

SEQ ID NO: 1019840 - RNA, 19 nt, Artificial Sequence
  Description of Artificial Sequence: Synthetic oligonucleotide
  Sense strand starting at position 2927 of SEQ ID NO: 914644
ugugauuucuguccuaauc

SEQ ID NO: 1019841 - RNA, 19 nt, Artificial Sequence
  Description of Artificial Sequence: Synthetic oligonucleotide
  Antisense strand to SEQ ID NO: 1019840
gauuaggacagaaaucaca

SEQ ID NO: 1019842 - RNA, 19 nt, Artificial Sequence
  Description of Artificial Sequence: Synthetic oligonucleotide
  Sense strand starting at position 3215 of SEQ ID NO: 914644
agaccaauguaguuaauau

SEQ ID NO: 1019843 - RNA, 19 nt, Artificial Sequence
  Description of Artificial Sequence: Synthetic oligonucleotide
  Antisense strand to SEQ ID NO: 1019842
auauuaacuacauuggucu

SEQ ID NO: 1019844 - RNA, 19 nt, Artificial Sequence
  Description of Artificial Sequence: Synthetic oligonucleotide
  Sense strand starting at position 3655 of SEQ ID NO: 914644
gagggauauggcugacuga

SEQ ID NO: 1019845 - RNA, 19 nt, Artificial Sequence
  Description of Artificial Sequence: Synthetic oligonucleotide
  Antisense strand to SEQ ID NO: 1019844
ucagucagccauaucccuc

SEQ ID NO: 1019846 - RNA, 19 nt, Artificial Sequence
  Description of Artificial Sequence: Synthetic oligonucleotide
  Sense strand starting at position 3681 of SEQ ID NO: 914644
caggcauucuuguuaugag

SEQ ID NO: 1019847 - RNA, 19 nt, Artificial Sequence
  Description of Artificial Sequence: Synthetic oligonucleotide
  Antisense strand to SEQ ID NO: 1019846
cucauaacaagaaugccug

SEQ ID NO: 1019848 - RNA, 19 nt, Artificial Sequence
  Description of Artificial Sequence: Synthetic oligonucleotide
  Sense strand starting at position 3763 of SEQ ID NO: 914644
acccuuaguugacugauaa

SEQ ID NO: 1019849 - RNA, 19 nt, Artificial Sequence
  Description of Artificial Sequence: Synthetic oligonucleotide
  Antisense strand to SEQ ID NO: 1019848
uuaucagucaacuaagggu

SEQ ID NO: 1019850 - RNA, 19 nt, Artificial Sequence
  Description of Artificial Sequence: Synthetic oligonucleotide
  Sense strand starting at position 3764 of SEQ ID NO: 914644
cccuuaguugacugauaaa

SEQ ID NO: 1019851 - RNA, 19 nt, Artificial Sequence
  Description of Artificial Sequence: Synthetic oligonucleotide
  Antisense strand to SEQ ID NO: 1019850
uuuaucagucaacuaaggg

SEQ ID NO: 1019852 - RNA, 19 nt, Artificial Sequence
  Description of Artificial Sequence: Synthetic oligonucleotide
  Sense strand starting at position 3890 of SEQ ID NO: 914644
agagucaaguuuccuccua

SEQ ID NO: 1019853 - RNA, 19 nt, Artificial Sequence
  Description of Artificial Sequence: Synthetic oligonucleotide
  Antisense strand to SEQ ID NO: 1019852
uaggaggaaacuugacucu

SEQ ID NO: 1019854 - RNA, 19 nt, Artificial Sequence
  Description of Artificial Sequence: Synthetic oligonucleotide
  Sense strand starting at position 131 of SEQ ID NO: 914645
cucaguuuaagagguauga

SEQ ID NO: 1019855 - RNA, 19 nt, Artificial Sequence
  Description of Artificial Sequence: Synthetic oligonucleotide
  Antisense strand to SEQ ID NO: 1019854
ucauaccucuuaaacugag

SEQ ID NO: 1019856 - RNA, 19 nt, Artificial Sequence
  Description of Artificial Sequence: Synthetic oligonucleotide
  Sense strand starting at position 135 of SEQ ID NO: 914645
guuuaagagguaugaccau

SEQ ID NO: 1019857 - RNA, 19 nt, Artificial Sequence
  Description of Artificial Sequence: Synthetic oligonucleotide
  Antisense strand to SEQ ID NO: 1019856
auggucauaccucuuaaac

SEQ ID NO: 1019858 - RNA, 19 nt, Artificial Sequence
  Description of Artificial Sequence: Synthetic oligonucleotide
  Sense strand starting at position 376 of SEQ ID NO: 914645
gcucacuucggauagaagu

SEQ ID NO: 1019859 - RNA, 19 nt, Artificial Sequence
  Description of Artificial Sequence: Synthetic oligonucleotide
  Antisense strand to SEQ ID NO: 1019858
acuucuauccgaagugagc

SEQ ID NO: 1019860 - RNA, 19 nt, Artificial Sequence
  Description of Artificial Sequence: Synthetic oligonucleotide
  Sense strand starting at position 512 of SEQ ID NO: 914645
gcagcugagcuagauaacu

SEQ ID NO: 1019861 - RNA, 19 nt, Artificial Sequence
  Description of Artificial Sequence: Synthetic oligonucleotide
  Antisense strand to SEQ ID NO: 1019860
aguuaucuagcucagcugc

SEQ ID NO: 1019862 - RNA, 19 nt, Artificial Sequence
  Description of Artificial Sequence: Synthetic oligonucleotide
  Sense strand starting at position 529 of SEQ ID NO: 914645
cuagcaaaggcucagugau

SEQ ID NO: 1019863 - RNA, 19 nt, Artificial Sequence
  Description of Artificial Sequence: Synthetic oligonucleotide
  Antisense strand to SEQ ID NO: 1019862
aucacugagccuuugcuag

SEQ ID NO: 1019864 - RNA, 19 nt, Artificial Sequence
  Description of Artificial Sequence: Synthetic oligonucleotide
  Sense strand starting at position 531 of SEQ ID NO: 914645
agcaaaggcucagugauau

SEQ ID NO: 1019865 - RNA, 19 nt, Artificial Sequence
  Description of Artificial Sequence: Synthetic oligonucleotide
  Antisense strand to SEQ ID NO: 1019864
auaucacugagccuuugcu

SEQ ID NO: 1019866 - RNA, 19 nt, Artificial Sequence
  Description of Artificial Sequence: Synthetic oligonucleotide
  Sense strand starting at position 539 of SEQ ID NO: 914645
cucagugauaugcacgaca

SEQ ID NO: 1019867 - RNA, 19 nt, Artificial Sequence
  Description of Artificial Sequence: Synthetic oligonucleotide
  Antisense strand to SEQ ID NO: 1019866
ugucgugcauaucacugag

SEQ ID NO: 1019868 - RNA, 19 nt, Artificial Sequence
  Description of Artificial Sequence: Synthetic oligonucleotide
  Sense strand starting at position 542 of SEQ ID NO: 914645
agugauaugcacgacacua

SEQ ID NO: 1019869 - RNA, 19 nt, Artificial Sequence
  Description of Artificial Sequence: Synthetic oligonucleotide
  Antisense strand to SEQ ID NO: 1019868
uagugucgugcauaucacu

SEQ ID NO: 1019870 - RNA, 19 nt, Artificial Sequence
  Description of Artificial Sequence: Synthetic oligonucleotide
  Sense strand starting at position 553 of SEQ ID NO: 914645
cgacacuaguuuguaaaga

SEQ ID NO: 1019871 - RNA, 19 nt, Artificial Sequence
  Description of Artificial Sequence: Synthetic oligonucleotide
  Antisense strand to SEQ ID NO: 1019870
ucuuuacaaacuagugucg

SEQ ID NO: 1019872 - RNA, 19 nt, Artificial Sequence
  Description of Artificial Sequence: Synthetic oligonucleotide
  Sense strand starting at position 753 of SEQ ID NO: 914645
cuggauuucucacagggaa

SEQ ID NO: 1019873 - RNA, 19 nt, Artificial Sequence
  Description of Artificial Sequence: Synthetic oligonucleotide
  Antisense strand to SEQ ID NO: 1019872
uucccugugagaaauccag

SEQ ID NO: 1019874 - RNA, 19 nt, Artificial Sequence
  Description of Artificial Sequence: Synthetic oligonucleotide
  Sense strand starting at position 809 of SEQ ID NO: 914645
acagcugugucauuugauc

SEQ ID NO: 1019875 - RNA, 19 nt, Artificial Sequence
  Description of Artificial Sequence: Synthetic oligonucleotide
  Antisense strand to SEQ ID NO: 1019874
gaucaaaugacacagcugu

SEQ ID NO: 1019876 - RNA, 19 nt, Artificial Sequence
  Description of Artificial Sequence: Synthetic oligonucleotide
  Sense strand starting at position 877 of SEQ ID NO: 914645
uccuaagagugaccuauga

SEQ ID NO: 1019877 - RNA, 19 nt, Artificial Sequence
  Description of Artificial Sequence: Synthetic oligonucleotide
  Antisense strand to SEQ ID NO: 1019876
ucauaggucacucuuagga

SEQ ID NO: 1019878 - RNA, 19 nt, Artificial Sequence
  Description of Artificial Sequence: Synthetic oligonucleotide
  Sense strand starting at position 942 of SEQ ID NO: 914645
acaggaauauuuggugaau

SEQ ID NO: 1019879 - RNA, 19 nt, Artificial Sequence
  Description of Artificial Sequence: Synthetic oligonucleotide
  Antisense strand to SEQ ID NO: 1019878
auucaccaaauauuccugu

SEQ ID NO: 1019880 - RNA, 19 nt, Artificial Sequence
  Description of Artificial Sequence: Synthetic oligonucleotide
  Sense strand starting at position 970 of SEQ ID NO: 914645
ugacaaauagcugaggcau

SEQ ID NO: 1019881 - RNA, 19 nt, Artificial Sequence
  Description of Artificial Sequence: Synthetic oligonucleotide
  Antisense strand to SEQ ID NO: 1019880
augccucagcuauuuguca

SEQ ID NO: 1019882 - RNA, 19 nt, Artificial Sequence
  Description of Artificial Sequence: Synthetic oligonucleotide
  Sense strand starting at position 1004 of SEQ ID NO: 914645
gccacaauuugagaacaca

SEQ ID NO: 1019883 - RNA, 19 nt, Artificial Sequence
  Description of Artificial Sequence: Synthetic oligonucleotide
  Antisense strand to SEQ ID NO: 1019882
uguguucucaaauuguggc

SEQ ID NO: 1019884 - RNA, 19 nt, Artificial Sequence
  Description of Artificial Sequence: Synthetic oligonucleotide
  Sense strand starting at position 1072 of SEQ ID NO: 914645
ugaagaugcaucuggcuca

SEQ ID NO: 1019885 - RNA, 19 nt, Artificial Sequence
  Description of Artificial Sequence: Synthetic oligonucleotide
  Antisense strand to SEQ ID NO: 1019884
ugagccagaugcaucuuca

SEQ ID NO: 1019886 - RNA, 19 nt, Artificial Sequence
  Description of Artificial Sequence: Synthetic oligonucleotide
  Sense strand starting at position 1075 of SEQ ID NO: 914645
agaugcaucuggcucauuu

SEQ ID NO: 1019887 - RNA, 19 nt, Artificial Sequence
  Description of Artificial Sequence: Synthetic oligonucleotide
  Antisense strand to SEQ ID NO: 1019886
aaaugagccagaugcaucu

SEQ ID NO: 1019888 - RNA, 19 nt, Artificial Sequence
  Description of Artificial Sequence: Synthetic oligonucleotide
  Sense strand starting at position 1181 of SEQ ID NO: 914645
cgguguucuaacguuaccu

SEQ ID NO: 1019889 - RNA, 19 nt, Artificial Sequence
  Description of Artificial Sequence: Synthetic oligonucleotide
  Antisense strand to SEQ ID NO: 1019888
agguaacguuagaacaccg

SEQ ID NO: 1019890 - RNA, 19 nt, Artificial Sequence
  Description of Artificial Sequence: Synthetic oligonucleotide
  Sense strand starting at position 1253 of SEQ ID NO: 914645
cgagcaucccauggacaaa

SEQ ID NO: 1019891 - RNA, 19 nt, Artificial Sequence
  Description of Artificial Sequence: Synthetic oligonucleotide
  Antisense strand to SEQ ID NO: 1019890
uuuguccaugggaugcucg

SEQ ID NO: 1019892 - RNA, 19 nt, Artificial Sequence
  Description of Artificial Sequence: Synthetic oligonucleotide
  Sense strand starting at position 1309 of SEQ ID NO: 914645
ucccaacagucauuagaag

SEQ ID NO: 1019893 - RNA, 19 nt, Artificial Sequence
  Description of Artificial Sequence: Synthetic oligonucleotide
  Antisense strand to SEQ ID NO: 1019892
cuucuaaugacuguuggga

SEQ ID NO: 1019894 - RNA, 19 nt, Artificial Sequence
  Description of Artificial Sequence: Synthetic oligonucleotide
  Sense strand starting at position 1373 of SEQ ID NO: 914645
acccaagucucggcaaaca

SEQ ID NO: 1019895 - RNA, 19 nt, Artificial Sequence
  Description of Artificial Sequence: Synthetic oligonucleotide
  Antisense strand to SEQ ID NO: 1019894
uguuugccgagacuugggu

SEQ ID NO: 1019896 - RNA, 19 nt, Artificial Sequence
  Description of Artificial Sequence: Synthetic oligonucleotide
  Sense strand starting at position 1508 of SEQ ID NO: 914645
cuaggcaauucggcagaaa

SEQ ID NO: 1019897 - RNA, 19 nt, Artificial Sequence
  Description of Artificial Sequence: Synthetic oligonucleotide
  Antisense strand to SEQ ID NO: 1019896
uuucugccgaauugccuag

SEQ ID NO: 1019898 - RNA, 19 nt, Artificial Sequence
  Description of Artificial Sequence: Synthetic oligonucleotide
  Sense strand starting at position 2151 of SEQ ID NO: 914645
cgccgaucccguucucaca

SEQ ID NO: 1019899 - RNA, 19 nt, Artificial Sequence
  Description of Artificial Sequence: Synthetic oligonucleotide
  Antisense strand to SEQ ID NO: 1019898
ugugagaacgggaucggcg

SEQ ID NO: 1019900 - RNA, 19 nt, Artificial Sequence
  Description of Artificial Sequence: Synthetic oligonucleotide
  Sense strand starting at position 2167 of SEQ ID NO: 914645
acagaucucuccuccuguu

SEQ ID NO: 1019901 - RNA, 19 nt, Artificial Sequence
  Description of Artificial Sequence: Synthetic oligonucleotide
  Antisense strand to SEQ ID NO: 1019900
aacaggaggagagaucugu

SEQ ID NO: 1019902 - RNA, 19 nt, Artificial Sequence
  Description of Artificial Sequence: Synthetic oligonucleotide
  Sense strand starting at position 2213 of SEQ ID NO: 914645
cgcugcuugcguuucuaaa

SEQ ID NO: 1019903 - RNA, 19 nt, Artificial Sequence
  Description of Artificial Sequence: Synthetic oligonucleotide
  Antisense strand to SEQ ID NO: 1019902
uuuagaaacgcaagcagcg

SEQ ID NO: 1019904 - RNA, 19 nt, Artificial Sequence
  Description of Artificial Sequence: Synthetic oligonucleotide
  Sense strand starting at position 2246 of SEQ ID NO: 914645
guaacaggaugccuuuaau

SEQ ID NO: 1019905 - RNA, 19 nt, Artificial Sequence
  Description of Artificial Sequence: Synthetic oligonucleotide
  Antisense strand to SEQ ID NO: 1019904
auuaaaggcauccuguuac

SEQ ID NO: 1019906 - RNA, 19 nt, Artificial Sequence
  Description of Artificial Sequence: Synthetic oligonucleotide
  Sense strand starting at position 2727 of SEQ ID NO: 914645
ucggcuaaggaaugagaau

SEQ ID NO: 1019907 - RNA, 19 nt, Artificial Sequence
  Description of Artificial Sequence: Synthetic oligonucleotide
  Antisense strand to SEQ ID NO: 1019906
auucucauuccuuagccga

SEQ ID NO: 1019908 - RNA, 19 nt, Artificial Sequence
  Description of Artificial Sequence: Synthetic oligonucleotide
  Sense strand starting at position 2923 of SEQ ID NO: 914645
agaccuaagugguuuaaug

SEQ ID NO: 1019909 - RNA, 19 nt, Artificial Sequence
  Description of Artificial Sequence: Synthetic oligonucleotide
  Antisense strand to SEQ ID NO: 1019908
cauuaaaccacuuaggucu

SEQ ID NO: 1019910 - RNA, 19 nt, Artificial Sequence
  Description of Artificial Sequence: Synthetic oligonucleotide
  Sense strand starting at position 2925 of SEQ ID NO: 914645
accuaagugguuuaaugac

SEQ ID NO: 1019911 - RNA, 19 nt, Artificial Sequence
  Description of Artificial Sequence: Synthetic oligonucleotide
  Antisense strand to SEQ ID NO: 1019910
gucauuaaaccacuuaggu

SEQ ID NO: 1019912 - RNA, 19 nt, Artificial Sequence
  Description of Artificial Sequence: Synthetic oligonucleotide
  Sense strand starting at position 2939 of SEQ ID NO: 914645
augacaaacugauuauugu

SEQ ID NO: 1019913 - RNA, 19 nt, Artificial Sequence
  Description of Artificial Sequence: Synthetic oligonucleotide
  Antisense strand to SEQ ID NO: 1019912
acaauaaucaguuugucau

SEQ ID NO: 1019914 - RNA, 19 nt, Artificial Sequence
  Description of Artificial Sequence: Synthetic oligonucleotide
  Sense strand starting at position 2946 of SEQ ID NO: 914645
acugauuauugugcuauua

SEQ ID NO: 1019915 - RNA, 19 nt, Artificial Sequence
  Description of Artificial Sequence: Synthetic oligonucleotide
  Antisense strand to SEQ ID NO: 1019914
uaauagcacaauaaucagu

SEQ ID NO: 1019916 - RNA, 19 nt, Artificial Sequence
  Description of Artificial Sequence: Synthetic oligonucleotide
  Sense strand starting at position 2995 of SEQ ID NO: 914645
auucuuucucaagaguguc

SEQ ID NO: 1019917 - RNA, 19 nt, Artificial Sequence
  Description of Artificial Sequence: Synthetic oligonucleotide
  Antisense strand to SEQ ID NO: 1019916
gacacucuugagaaagaau

SEQ ID NO: 1019918 - RNA, 19 nt, Artificial Sequence
  Description of Artificial Sequence: Synthetic oligonucleotide
  Sense strand starting at position 2998 of SEQ ID NO: 914645
cuuucucaagagugucaau

SEQ ID NO: 1019919 - RNA, 19 nt, Artificial Sequence
  Description of Artificial Sequence: Synthetic oligonucleotide
  Antisense strand to SEQ ID NO: 1019918
auugacacucuugagaaag

SEQ ID NO: 1019920 - RNA, 19 nt, Artificial Sequence
  Description of Artificial Sequence: Synthetic oligonucleotide
  Sense strand starting at position 3032 of SEQ ID NO: 914645
gaaagaauuuaguagguau

SEQ ID NO: 1019921 - RNA, 19 nt, Artificial Sequence
  Description of Artificial Sequence: Synthetic oligonucleotide
  Antisense strand to SEQ ID NO: 1019920
auaccuacuaaauucuuuc

SEQ ID NO: 1019922 - RNA, 19 nt, Artificial Sequence
  Description of Artificial Sequence: Synthetic oligonucleotide
  Sense strand starting at position 3062 of SEQ ID NO: 914645
ggcuuacuucaugggagga

SEQ ID NO: 1019923 - RNA, 19 nt, Artificial Sequence
  Description of Artificial Sequence: Synthetic oligonucleotide
  Antisense strand to SEQ ID NO: 1019922
uccucccaugaaguaagcc

SEQ ID NO: 1019924 - RNA, 19 nt, Artificial Sequence
  Description of Artificial Sequence: Synthetic oligonucleotide
  Sense strand starting at position 3472 of SEQ ID NO: 914645
cucucacaugcuuauguau

SEQ ID NO: 1019925 - RNA, 19 nt, Artificial Sequence
  Description of Artificial Sequence: Synthetic oligonucleotide
  Antisense strand to SEQ ID NO: 1019924
auacauaagcaugugagag

SEQ ID NO: 1019926 - RNA, 19 nt, Artificial Sequence
  Description of Artificial Sequence: Synthetic oligonucleotide
  Sense strand starting at position 3478 of SEQ ID NO: 914645
caugcuuauguaugauuag

SEQ ID NO: 1019927 - RNA, 19 nt, Artificial Sequence
  Description of Artificial Sequence: Synthetic oligonucleotide
  Antisense strand to SEQ ID NO: 1019926
cuaaucauacauaagcaug

SEQ ID NO: 1019928 - RNA, 19 nt, Artificial Sequence
  Description of Artificial Sequence: Synthetic oligonucleotide
  Sense strand starting at position 3481 of SEQ ID NO: 914645
gcuuauguaugauuagaug

SEQ ID NO: 1019929 - RNA, 19 nt, Artificial Sequence
  Description of Artificial Sequence: Synthetic oligonucleotide
  Antisense strand to SEQ ID NO: 1019928
caucuaaucauacauaagc

SEQ ID NO: 1019930 - RNA, 19 nt, Artificial Sequence
  Description of Artificial Sequence: Synthetic oligonucleotide
  Sense strand starting at position 3558 of SEQ ID NO: 914645
ggcagagcacuuugagaag

SEQ ID NO: 1019931 - RNA, 19 nt, Artificial Sequence
  Description of Artificial Sequence: Synthetic oligonucleotide
  Antisense strand to SEQ ID NO: 1019930
cuucucaaagugcucugcc

SEQ ID NO: 1019932 - RNA, 19 nt, Artificial Sequence
  Description of Artificial Sequence: Synthetic oligonucleotide
  Sense strand starting at position 3635 of SEQ ID NO: 914645
gagacagugucucucuauc

SEQ ID NO: 1019933 - RNA, 19 nt, Artificial Sequence
  Description of Artificial Sequence: Synthetic oligonucleotide
  Antisense strand to SEQ ID NO: 1019932
gauagagagacacugucuc

SEQ ID NO: 1019934 - RNA, 19 nt, Artificial Sequence
  Description of Artificial Sequence: Synthetic oligonucleotide
  Sense strand starting at position 18 of SEQ ID NO: 914646
ucagucucaucagucagau

SEQ ID NO: 1019935 - RNA, 19 nt, Artificial Sequence
  Description of Artificial Sequence: Synthetic oligonucleotide
  Antisense strand to SEQ ID NO: 1019934
aucugacugaugagacuga

SEQ ID NO: 1019936 - RNA, 19 nt, Artificial Sequence
  Description of Artificial Sequence: Synthetic oligonucleotide
  Sense strand starting at position 127 of SEQ ID NO: 914646
cgccacucacccugacaau

SEQ ID NO: 1019937 - RNA, 19 nt, Artificial Sequence
  Description of Artificial Sequence: Synthetic oligonucleotide
  Antisense strand to SEQ ID NO: 1019936
auugucagggugaguggcg

SEQ ID NO: 1019938 - RNA, 19 nt, Artificial Sequence
  Description of Artificial Sequence: Synthetic oligonucleotide
  Sense strand starting at position 211 of SEQ ID NO: 914646
uggccugagacaugcugaa

SEQ ID NO: 1019939 - RNA, 19 nt, Artificial Sequence
  Description of Artificial Sequence: Synthetic oligonucleotide
  Antisense strand to SEQ ID NO: 1019938
uucagcaugucucaggcca

SEQ ID NO: 1019940 - RNA, 19 nt, Artificial Sequence
  Description of Artificial Sequence: Synthetic oligonucleotide
  Sense strand starting at position 233 of SEQ ID NO: 914646
gucccacacugguuaggaa

SEQ ID NO: 1019941 - RNA, 19 nt, Artificial Sequence
  Description of Artificial Sequence: Synthetic oligonucleotide
  Antisense strand to SEQ ID NO: 1019940
uuccuaaccagugugggac

SEQ ID NO: 1019942 - RNA, 19 nt, Artificial Sequence
  Description of Artificial Sequence: Synthetic oligonucleotide
  Sense strand starting at position 276 of SEQ ID NO: 914646
cugaguuccuuggauggca

SEQ ID NO: 1019943 - RNA, 19 nt, Artificial Sequence
  Description of Artificial Sequence: Synthetic oligonucleotide
  Antisense strand to SEQ ID NO: 1019942
ugccauccaaggaacucag

SEQ ID NO: 1019944 - RNA, 19 nt, Artificial Sequence
  Description of Artificial Sequence: Synthetic oligonucleotide
  Sense strand starting at position 305 of SEQ ID NO: 914646
ccaggacuguucugaagau

SEQ ID NO: 1019945 - RNA, 19 nt, Artificial Sequence
  Description of Artificial Sequence: Synthetic oligonucleotide
  Antisense strand to SEQ ID NO: 1019944
aucuucagaacaguccugg

SEQ ID NO: 1019946 - RNA, 19 nt, Artificial Sequence
  Description of Artificial Sequence: Synthetic oligonucleotide
  Sense strand starting at position 351 of SEQ ID NO: 914646
cacggugucuugguuaaga

SEQ ID NO: 1019947 - RNA, 19 nt, Artificial Sequence
  Description of Artificial Sequence: Synthetic oligonucleotide
  Antisense strand to SEQ ID NO: 1019946
ucuuaaccaagacaccgug

SEQ ID NO: 1019948 - RNA, 19 nt, Artificial Sequence
  Description of Artificial Sequence: Synthetic oligonucleotide
  Sense strand starting at position 353 of SEQ ID NO: 914646
cggugucuugguuaagaac

SEQ ID NO: 1019949 - RNA, 19 nt, Artificial Sequence
  Description of Artificial Sequence: Synthetic oligonucleotide
  Antisense strand to SEQ ID NO: 1019948
guucuuaaccaagacaccg

SEQ ID NO: 1019950 - RNA, 19 nt, Artificial Sequence
  Description of Artificial Sequence: Synthetic oligonucleotide
  Sense strand starting at position 368 of SEQ ID NO: 914646
gaacauggguucugaaguc

SEQ ID NO: 1019951 - RNA, 19 nt, Artificial Sequence
  Description of Artificial Sequence: Synthetic oligonucleotide
  Antisense strand to SEQ ID NO: 1019950
gacuucagaacccauguuc

SEQ ID NO: 1019952 - RNA, 19 nt, Artificial Sequence
  Description of Artificial Sequence: Synthetic oligonucleotide
  Sense strand starting at position 952 of SEQ ID NO: 914646
aggaguucugucugcgacu

SEQ ID NO: 1019953 - RNA, 19 nt, Artificial Sequence
  Description of Artificial Sequence: Synthetic oligonucleotide
  Antisense strand to SEQ ID NO: 1019952
agucgcagacagaacuccu

SEQ ID NO: 1019954 - RNA, 19 nt, Artificial Sequence
  Description of Artificial Sequence: Synthetic oligonucleotide
  Sense strand starting at position 953 of SEQ ID NO: 914646
ggaguucugucugcgacuc

SEQ ID NO: 1019955 - RNA, 19 nt, Artificial Sequence
  Description of Artificial Sequence: Synthetic oligonucleotide
  Antisense strand to SEQ ID NO: 1019954
gagucgcagacagaacucc

SEQ ID NO: 1019956 - RNA, 19 nt, Artificial Sequence
  Description of Artificial Sequence: Synthetic oligonucleotide
  Sense strand starting at position 965 of SEQ ID NO: 914646
gcgacucguccugcuacaa

SEQ ID NO: 1019957 - RNA, 19 nt, Artificial Sequence
  Description of Artificial Sequence: Synthetic oligonucleotide
  Antisense strand to SEQ ID NO: 1019956
uuguagcaggacgagucgc

SEQ ID NO: 1019958 - RNA, 19 nt, Artificial Sequence
  Description of Artificial Sequence: Synthetic oligonucleotide
  Sense strand starting at position 1367 of SEQ ID NO: 914646
auacgcaugcuccagagaa

SEQ ID NO: 1019959 - RNA, 19 nt, Artificial Sequence
  Description of Artificial Sequence: Synthetic oligonucleotide
  Antisense strand to SEQ ID NO: 1019958
uucucuggagcaugcguau

SEQ ID NO: 1019960 - RNA, 19 nt, Artificial Sequence
  Description of Artificial Sequence: Synthetic oligonucleotide
  Sense strand starting at position 1369 of SEQ ID NO: 914646
acgcaugcuccagagaagu

SEQ ID NO: 1019961 - RNA, 19 nt, Artificial Sequence
  Description of Artificial Sequence: Synthetic oligonucleotide
  Antisense strand to SEQ ID NO: 1019960
acuucucuggagcaugcgu

SEQ ID NO: 1019962 - RNA, 19 nt, Artificial Sequence
  Description of Artificial Sequence: Synthetic oligonucleotide
  Sense strand starting at position 1371 of SEQ ID NO: 914646
gcaugcuccagagaaguca

SEQ ID NO: 1019963 - RNA, 19 nt, Artificial Sequence
  Description of Artificial Sequence: Synthetic oligonucleotide
  Antisense strand to SEQ ID NO: 1019962
ugacuucucuggagcaugc

SEQ ID NO: 1019964 - RNA, 19 nt, Artificial Sequence
  Description of Artificial Sequence: Synthetic oligonucleotide
  Sense strand starting at position 1416 of SEQ ID NO: 914646
ugaaauaaaccguaucuuu

SEQ ID NO: 1019965 - RNA, 19 nt, Artificial Sequence
  Description of Artificial Sequence: Synthetic oligonucleotide
  Antisense strand to SEQ ID NO: 1019964
aaagauacgguuuauuuca

SEQ ID NO: 1019966 - RNA, 19 nt, Artificial Sequence
  Description of Artificial Sequence: Synthetic oligonucleotide
  Sense strand starting at position 1576 of SEQ ID NO: 914646
gcaggcuugucugcgacau

SEQ ID NO: 1019967 - RNA, 19 nt, Artificial Sequence
  Description of Artificial Sequence: Synthetic oligonucleotide
  Antisense strand to SEQ ID NO: 1019966
augucgcagacaagccugc

SEQ ID NO: 1019968 - RNA, 19 nt, Artificial Sequence
  Description of Artificial Sequence: Synthetic oligonucleotide
  Sense strand starting at position 1577 of SEQ ID NO: 914646
caggcuugucugcgacauu

SEQ ID NO: 1019969 - RNA, 19 nt, Artificial Sequence
  Description of Artificial Sequence: Synthetic oligonucleotide
  Antisense strand to SEQ ID NO: 1019968
aaugucgcagacaagccug

SEQ ID NO: 1019970 - RNA, 19 nt, Artificial Sequence
  Description of Artificial Sequence: Synthetic oligonucleotide
  Sense strand starting at position 1578 of SEQ ID NO: 914646
aggcuugucugcgacauuu

SEQ ID NO: 1019971 - RNA, 19 nt, Artificial Sequence
  Description of Artificial Sequence: Synthetic oligonucleotide
  Antisense strand to SEQ ID NO: 1019970
aaaugucgcagacaagccu

SEQ ID NO: 1019972 - RNA, 19 nt, Artificial Sequence
  Description of Artificial Sequence: Synthetic oligonucleotide
  Sense strand starting at position 1584 of SEQ ID NO: 914646
gucugcgacauuugcauau

SEQ ID NO: 1019973 - RNA, 19 nt, Artificial Sequence
  Description of Artificial Sequence: Synthetic oligonucleotide
  Antisense strand to SEQ ID NO: 1019972
auaugcaaaugucgcagac

SEQ ID NO: 1019974 - RNA, 19 nt, Artificial Sequence
  Description of Artificial Sequence: Synthetic oligonucleotide
  Sense strand starting at position 1586 of SEQ ID NO: 914646
cugcgacauuugcauauuu

SEQ ID NO: 1019975 - RNA, 19 nt, Artificial Sequence
  Description of Artificial Sequence: Synthetic oligonucleotide
  Antisense strand to SEQ ID NO: 1019974
aaauaugcaaaugucgcag

SEQ ID NO: 1019976 - RNA, 19 nt, Artificial Sequence
  Description of Artificial Sequence: Synthetic oligonucleotide
  Sense strand starting at position 1597 of SEQ ID NO: 914646
gcauauuucugacuugcgu

SEQ ID NO: 1019977 - RNA, 19 nt, Artificial Sequence
  Description of Artificial Sequence: Synthetic oligonucleotide
  Antisense strand to SEQ ID NO: 1019976
acgcaagucagaaauaugc

SEQ ID NO: 1019978 - RNA, 19 nt, Artificial Sequence
  Description of Artificial Sequence: Synthetic oligonucleotide
  Sense strand starting at position 1606 of SEQ ID NO: 914646
ugacuugcguacuuagaag

SEQ ID NO: 1019979 - RNA, 19 nt, Artificial Sequence
  Description of Artificial Sequence: Synthetic oligonucleotide
  Antisense strand to SEQ ID NO: 1019978
cuucuaaguacgcaaguca

SEQ ID NO: 1019980 - RNA, 19 nt, Artificial Sequence
  Description of Artificial Sequence: Synthetic oligonucleotide
  Sense strand starting at position 1639 of SEQ ID NO: 914646
ccuuaagacugaugguuuc

SEQ ID NO: 1019981 - RNA, 19 nt, Artificial Sequence
  Description of Artificial Sequence: Synthetic oligonucleotide
  Antisense strand to SEQ ID NO: 1019980
gaaaccaucagucuuaagg

SEQ ID NO: 1019982 - RNA, 19 nt, Artificial Sequence
  Description of Artificial Sequence: Synthetic oligonucleotide
  Sense strand starting at position 1645 of SEQ ID NO: 914646
gacugaugguuuccgaaag

SEQ ID NO: 1019983 - RNA, 19 nt, Artificial Sequence
  Description of Artificial Sequence: Synthetic oligonucleotide
  Antisense strand to SEQ ID NO: 1019982
cuuucggaaaccaucaguc

SEQ ID NO: 1019984 - RNA, 19 nt, Artificial Sequence
  Description of Artificial Sequence: Synthetic oligonucleotide
  Sense strand starting at position 1646 of SEQ ID NO: 914646
acugaugguuuccgaaaga

SEQ ID NO: 1019985 - RNA, 19 nt, Artificial Sequence
  Description of Artificial Sequence: Synthetic oligonucleotide
  Antisense strand to SEQ ID NO: 1019984
ucuuucggaaaccaucagu

SEQ ID NO: 1019986 - RNA, 19 nt, Artificial Sequence
  Description of Artificial Sequence: Synthetic oligonucleotide
  Sense strand starting at position 1703 of SEQ ID NO: 914646
ccugucuaucccggagaaa

SEQ ID NO: 1019987 - RNA, 19 nt, Artificial Sequence
  Description of Artificial Sequence: Synthetic oligonucleotide
  Antisense strand to SEQ ID NO: 1019986
uuucuccgggauagacagg

SEQ ID NO: 1019988 - RNA, 19 nt, Artificial Sequence
  Description of Artificial Sequence: Synthetic oligonucleotide
  Sense strand starting at position 1884 of SEQ ID NO: 914646
gacgguagcgucaguuaga

SEQ ID NO: 1019989 - RNA, 19 nt, Artificial Sequence
  Description of Artificial Sequence: Synthetic oligonucleotide
  Antisense strand to SEQ ID NO: 1019988
ucuaacugacgcuaccguc

SEQ ID NO: 1019990 - RNA, 19 nt, Artificial Sequence
  Description of Artificial Sequence: Synthetic oligonucleotide
  Sense strand starting at position 1885 of SEQ ID NO: 914646
acgguagcgucaguuagaa

SEQ ID NO: 1019991 - RNA, 19 nt, Artificial Sequence
  Description of Artificial Sequence: Synthetic oligonucleotide
  Antisense strand to SEQ ID NO: 1019990
uucuaacugacgcuaccgu

SEQ ID NO: 1019992 - RNA, 19 nt, Artificial Sequence
  Description of Artificial Sequence: Synthetic oligonucleotide
  Sense strand starting at position 1887 of SEQ ID NO: 914646
gguagcgucaguuagaaau

SEQ ID NO: 1019993 - RNA, 19 nt, Artificial Sequence
  Description of Artificial Sequence: Synthetic oligonucleotide
  Antisense strand to SEQ ID NO: 1019992
auuucuaacugacgcuacc

SEQ ID NO: 1019994 - RNA, 19 nt, Artificial Sequence
  Description of Artificial Sequence: Synthetic oligonucleotide
  Sense strand starting at position 1901 of SEQ ID NO: 914646
gaaaucaggucuccagugu

SEQ ID NO: 1019995 - RNA, 19 nt, Artificial Sequence
  Description of Artificial Sequence: Synthetic oligonucleotide
  Antisense strand to SEQ ID NO: 1019994
acacuggagaccugauuuc

SEQ ID NO: 1019996 - RNA, 19 nt, Artificial Sequence
  Description of Artificial Sequence: Synthetic oligonucleotide
  Sense strand starting at position 1902 of SEQ ID NO: 914646
aaaucaggucuccaguguu

SEQ ID NO: 1019997 - RNA, 19 nt, Artificial Sequence
  Description of Artificial Sequence: Synthetic oligonucleotide
  Antisense strand to SEQ ID NO: 1019996
aacacuggagaccugauuu

SEQ ID NO: 1019998 - RNA, 19 nt, Artificial Sequence
  Description of Artificial Sequence: Synthetic oligonucleotide
  Sense strand starting at position 2760 of SEQ ID NO: 914646
gagugauagcuuccgcgca

SEQ ID NO: 1019999 - RNA, 19 nt, Artificial Sequence
  Description of Artificial Sequence: Synthetic oligonucleotide
  Antisense strand to SEQ ID NO: 1019998
ugcgcggaagcuaucacuc

SEQ ID NO: 1020000 - RNA, 19 nt, Artificial Sequence
  Description of Artificial Sequence: Synthetic oligonucleotide
  Sense strand starting at position 2909 of SEQ ID NO: 914646
ggaagagucucccuggaac

SEQ ID NO: 1020001 - RNA, 19 nt, Artificial Sequence
  Description of Artificial Sequence: Synthetic oligonucleotide
  Antisense strand to SEQ ID NO: 1020000
guuccagggagacucuucc

SEQ ID NO: 1020002 - RNA, 19 nt, Artificial Sequence
  Description of Artificial Sequence: Synthetic oligonucleotide
  Sense strand starting at position 2984 of SEQ ID NO: 914646
gcuuccucuuacuaugaga

SEQ ID NO: 1020003 - RNA, 19 nt, Artificial Sequence
  Description of Artificial Sequence: Synthetic oligonucleotide
  Antisense strand to SEQ ID NO: 1020002
ucucauaguaagaggaagc

SEQ ID NO: 1020004 - RNA, 19 nt, Artificial Sequence
  Description of Artificial Sequence: Synthetic oligonucleotide
  Sense strand starting at position 2987 of SEQ ID NO: 914646
uccucuuacuaugagauug

SEQ ID NO: 1020005 - RNA, 19 nt, Artificial Sequence
  Description of Artificial Sequence: Synthetic oligonucleotide
  Antisense strand to SEQ ID NO: 1020004
caaucucauaguaagagga

SEQ ID NO: 1020006 - RNA, 19 nt, Artificial Sequence
  Description of Artificial Sequence: Synthetic oligonucleotide
  Sense strand starting at position 3065 of SEQ ID NO: 914646
cuagauuaagccugaucaa

SEQ ID NO: 1020007 - RNA, 19 nt, Artificial Sequence
  Description of Artificial Sequence: Synthetic oligonucleotide
  Antisense strand to SEQ ID NO: 1020006
uugaucaggcuuaaucuag

SEQ ID NO: 1020008 - RNA, 19 nt, Artificial Sequence
  Description of Artificial Sequence: Synthetic oligonucleotide
  Sense strand starting at position 3275 of SEQ ID NO: 914646
gauggacaguaagguauaa

SEQ ID NO: 1020009 - RNA, 19 nt, Artificial Sequence
  Description of Artificial Sequence: Synthetic oligonucleotide
  Antisense strand to SEQ ID NO: 1020008
uuauaccuuacuguccauc

SEQ ID NO: 1020010 - RNA, 19 nt, Artificial Sequence
  Description of Artificial Sequence: Synthetic oligonucleotide
  Sense strand starting at position 3363 of SEQ ID NO: 914646
gggcuugugugcucugaau

SEQ ID NO: 1020011 - RNA, 19 nt, Artificial Sequence
  Description of Artificial Sequence: Synthetic oligonucleotide
  Antisense strand to SEQ ID NO: 1020010
auucagagcacacaagccc

SEQ ID NO: 1020012 - RNA, 19 nt, Artificial Sequence
  Description of Artificial Sequence: Synthetic oligonucleotide
  Sense strand starting at position 3369 of SEQ ID NO: 914646
gugugcucugaauggcaca

SEQ ID NO: 1020013 - RNA, 19 nt, Artificial Sequence
  Description of Artificial Sequence: Synthetic oligonucleotide
  Antisense strand to SEQ ID NO: 1020012
ugugccauucagagcacac

SEQ ID NO: 1020014 - RNA, 19 nt, Artificial Sequence
  Description of Artificial Sequence: Synthetic oligonucleotide
  Sense strand starting at position 74 of SEQ ID NO: 914647
aguauuugcugagugucaa

SEQ ID NO: 1020015 - RNA, 19 nt, Artificial Sequence
  Description of Artificial Sequence: Synthetic oligonucleotide
  Antisense strand to SEQ ID NO: 1020014
uugacacucagcaaauacu

SEQ ID NO: 1020016 - RNA, 19 nt, Artificial Sequence
  Description of Artificial Sequence: Synthetic oligonucleotide
  Sense strand starting at position 75 of SEQ ID NO: 914647
guauuugcugagugucaag

SEQ ID NO: 1020017 - RNA, 19 nt, Artificial Sequence
  Description of Artificial Sequence: Synthetic oligonucleotide
  Antisense strand to SEQ ID NO: 1020016
cuugacacucagcaaauac

SEQ ID NO: 1020018 - RNA, 19 nt, Artificial Sequence
  Description of Artificial Sequence: Synthetic oligonucleotide
  Sense strand starting at position 242 of SEQ ID NO: 914647
guagguagagcuuaaacaa

SEQ ID NO: 1020019 - RNA, 19 nt, Artificial Sequence
  Description of Artificial Sequence: Synthetic oligonucleotide
  Antisense strand to SEQ ID NO: 1020018
uuguuuaagcucuaccuac

SEQ ID NO: 1020020 - RNA, 19 nt, Artificial Sequence
  Description of Artificial Sequence: Synthetic oligonucleotide
  Sense strand starting at position 364 of SEQ ID NO: 914647
augcuauaccgucaaagau

SEQ ID NO: 1020021 - RNA, 19 nt, Artificial Sequence
  Description of Artificial Sequence: Synthetic oligonucleotide
  Antisense strand to SEQ ID NO: 1020020
aucuuugacgguauagcau

SEQ ID NO: 1020022 - RNA, 19 nt, Artificial Sequence
  Description of Artificial Sequence: Synthetic oligonucleotide
  Sense strand starting at position 627 of SEQ ID NO: 914647
ucuucuaugguguaagaac

SEQ ID NO: 1020023 - RNA, 19 nt, Artificial Sequence
  Description of Artificial Sequence: Synthetic oligonucleotide
  Antisense strand to SEQ ID NO: 1020022
guucuuacaccauagaaga

SEQ ID NO: 1020024 - RNA, 19 nt, Artificial Sequence
  Description of Artificial Sequence: Synthetic oligonucleotide
  Sense strand starting at position 634 of SEQ ID NO: 914647
ugguguaagaacuaguaga

SEQ ID NO: 1020025 - RNA, 19 nt, Artificial Sequence
  Description of Artificial Sequence: Synthetic oligonucleotide
  Antisense strand to SEQ ID NO: 1020024
ucuacuaguucuuacacca

SEQ ID NO: 1020026 - RNA, 19 nt, Artificial Sequence
  Description of Artificial Sequence: Synthetic oligonucleotide
  Sense strand starting at position 648 of SEQ ID NO: 914647
guagauguucaagaguaug

SEQ ID NO: 1020027 - RNA, 19 nt, Artificial Sequence
  Description of Artificial Sequence: Synthetic oligonucleotide
  Antisense strand to SEQ ID NO: 1020026
cauacucuugaacaucuac

SEQ ID NO: 1020028 - RNA, 19 nt, Artificial Sequence
  Description of Artificial Sequence: Synthetic oligonucleotide
  Sense strand starting at position 670 of SEQ ID NO: 914647
gagaaagaaugcuuguaaa

SEQ ID NO: 1020029 - RNA, 19 nt, Artificial Sequence
  Description of Artificial Sequence: Synthetic oligonucleotide
  Antisense strand to SEQ ID NO: 1020028
uuuacaagcauucuuucuc

SEQ ID NO: 1020030 - RNA, 19 nt, Artificial Sequence
  Description of Artificial Sequence: Synthetic oligonucleotide
  Sense strand starting at position 755 of SEQ ID NO: 914647
ccagcauagucuccagaaa

SEQ ID NO: 1020031 - RNA, 19 nt, Artificial Sequence
  Description of Artificial Sequence: Synthetic oligonucleotide
  Antisense strand to SEQ ID NO: 1020030
uuucuggagacuaugcugg

SEQ ID NO: 1020032 - RNA, 19 nt, Artificial Sequence
  Description of Artificial Sequence: Synthetic oligonucleotide
  Sense strand starting at position 756 of SEQ ID NO: 914647
cagcauagucuccagaaag

SEQ ID NO: 1020033 - RNA, 19 nt, Artificial Sequence
  Description of Artificial Sequence: Synthetic oligonucleotide
  Antisense strand to SEQ ID NO: 1020032
cuuucuggagacuaugcug

SEQ ID NO: 1020034 - RNA, 19 nt, Artificial Sequence
  Description of Artificial Sequence: Synthetic oligonucleotide
  Sense strand starting at position 953 of SEQ ID NO: 914647
ggaacaggguuucucacau

SEQ ID NO: 1020035 - RNA, 19 nt, Artificial Sequence
  Description of Artificial Sequence: Synthetic oligonucleotide
  Antisense strand to SEQ ID NO: 1020034
augugagaaacccuguucc

SEQ ID NO: 1020036 - RNA, 19 nt, Artificial Sequence
  Description of Artificial Sequence: Synthetic oligonucleotide
  Sense strand starting at position 1011 of SEQ ID NO: 914647
ggcucagacguuuaggaca

SEQ ID NO: 1020037 - RNA, 19 nt, Artificial Sequence
  Description of Artificial Sequence: Synthetic oligonucleotide
  Antisense strand to SEQ ID NO: 1020036
uguccuaaacgucugagcc

SEQ ID NO: 1020038 - RNA, 19 nt, Artificial Sequence
  Description of Artificial Sequence: Synthetic oligonucleotide
  Sense strand starting at position 1016 of SEQ ID NO: 914647
agacguuuaggacagcaga

SEQ ID NO: 1020039 - RNA, 19 nt, Artificial Sequence
  Description of Artificial Sequence: Synthetic oligonucleotide
  Antisense strand to SEQ ID NO: 1020038
ucugcuguccuaaacgucu

SEQ ID NO: 1020040 - RNA, 19 nt, Artificial Sequence
  Description of Artificial Sequence: Synthetic oligonucleotide
  Sense strand starting at position 1070 of SEQ ID NO: 914647
gguuuacuuguugggagga

SEQ ID NO: 1020041 - RNA, 19 nt, Artificial Sequence
  Description of Artificial Sequence: Synthetic oligonucleotide
  Antisense strand to SEQ ID NO: 1020040
uccucccaacaaguaaacc

SEQ ID NO: 1020042 - RNA, 19 nt, Artificial Sequence
  Description of Artificial Sequence: Synthetic oligonucleotide
  Sense strand starting at position 1075 of SEQ ID NO: 914647
acuuguugggaggaauguu

SEQ ID NO: 1020043 - RNA, 19 nt, Artificial Sequence
  Description of Artificial Sequence: Synthetic oligonucleotide
  Antisense strand to SEQ ID NO: 1020042
aacauuccucccaacaagu

SEQ ID NO: 1020044 - RNA, 19 nt, Artificial Sequence
  Description of Artificial Sequence: Synthetic oligonucleotide
  Sense strand starting at position 1116 of SEQ ID NO: 914647
uuugacaacugguuagaaa

SEQ ID NO: 1020045 - RNA, 19 nt, Artificial Sequence
  Description of Artificial Sequence: Synthetic oligonucleotide
  Antisense strand to SEQ ID NO: 1020044
uuucuaaccaguugucaaa

SEQ ID NO: 1020046 - RNA, 19 nt, Artificial Sequence
  Description of Artificial Sequence: Synthetic oligonucleotide
  Sense strand starting at position 1136 of SEQ ID NO: 914647
cuuugucaauaccuggaaa

SEQ ID NO: 1020047 - RNA, 19 nt, Artificial Sequence
  Description of Artificial Sequence: Synthetic oligonucleotide
  Antisense strand to SEQ ID NO: 1020046
uuuccagguauugacaaag

SEQ ID NO: 1020048 - RNA, 19 nt, Artificial Sequence
  Description of Artificial Sequence: Synthetic oligonucleotide
  Sense strand starting at position 1180 of SEQ ID NO: 914647
gggagaaauauguggucac

SEQ ID NO: 1020049 - RNA, 19 nt, Artificial Sequence
  Description of Artificial Sequence: Synthetic oligonucleotide
  Antisense strand to SEQ ID NO: 1020048
gugaccacauauuucuccc

SEQ ID NO: 1020050 - RNA, 19 nt, Artificial Sequence
  Description of Artificial Sequence: Synthetic oligonucleotide
  Sense strand starting at position 1184 of SEQ ID NO: 914647
gaaauauguggucacuggu

SEQ ID NO: 1020051 - RNA, 19 nt, Artificial Sequence
  Description of Artificial Sequence: Synthetic oligonucleotide
  Antisense strand to SEQ ID NO: 1020050
accagugaccacauauuuc

SEQ ID NO: 1020052 - RNA, 19 nt, Artificial Sequence
  Description of Artificial Sequence: Synthetic oligonucleotide
  Sense strand starting at position 1422 of SEQ ID NO: 914647
augcaagugcuugagaaga

SEQ ID NO: 1020053 - RNA, 19 nt, Artificial Sequence
  Description of Artificial Sequence: Synthetic oligonucleotide
  Antisense strand to SEQ ID NO: 1020052
ucuucucaagcacuugcau

SEQ ID NO: 1020054 - RNA, 19 nt, Artificial Sequence
  Description of Artificial Sequence: Synthetic oligonucleotide
  Sense strand starting at position 1427 of SEQ ID NO: 914647
agugcuugagaagauaagu

SEQ ID NO: 1020055 - RNA, 19 nt, Artificial Sequence
  Description of Artificial Sequence: Synthetic oligonucleotide
  Antisense strand to SEQ ID NO: 1020054
acuuaucuucucaagcacu

SEQ ID NO: 1020056 - RNA, 19 nt, Artificial Sequence
  Description of Artificial Sequence: Synthetic oligonucleotide
  Sense strand starting at position 2025 of SEQ ID NO: 914647
gcuugauaggcugaauaua

SEQ ID NO: 1020057 - RNA, 19 nt, Artificial Sequence
  Description of Artificial Sequence: Synthetic oligonucleotide
  Antisense strand to SEQ ID NO: 1020056
uauauucagccuaucaagc

SEQ ID NO: 1020058 - RNA, 19 nt, Artificial Sequence
  Description of Artificial Sequence: Synthetic oligonucleotide
  Sense strand starting at position 2072 of SEQ ID NO: 914647
uugguuacuggugauacuu

SEQ ID NO: 1020059 - RNA, 19 nt, Artificial Sequence
  Description of Artificial Sequence: Synthetic oligonucleotide
  Antisense strand to SEQ ID NO: 1020058
aaguaucaccaguaaccaa

SEQ ID NO: 1020060 - RNA, 19 nt, Artificial Sequence
  Description of Artificial Sequence: Synthetic oligonucleotide
  Sense strand starting at position 2439 of SEQ ID NO: 914647
aggagaacuuagcuggauu

SEQ ID NO: 1020061 - RNA, 19 nt, Artificial Sequence
  Description of Artificial Sequence: Synthetic oligonucleotide
  Antisense strand to SEQ ID NO: 1020060
aauccagcuaaguucuccu

SEQ ID NO: 1020062 - RNA, 19 nt, Artificial Sequence
  Description of Artificial Sequence: Synthetic oligonucleotide
  Sense strand starting at position 2552 of SEQ ID NO: 914647
uagguaaucuaagugagag

SEQ ID NO: 1020063 - RNA, 19 nt, Artificial Sequence
  Description of Artificial Sequence: Synthetic oligonucleotide
  Antisense strand to SEQ ID NO: 1020062
cucucacuuagauuaccua

SEQ ID NO: 1020064 - RNA, 19 nt, Artificial Sequence
  Description of Artificial Sequence: Synthetic oligonucleotide
  Sense strand starting at position 2651 of SEQ ID NO: 914647
ucaauaggguuuccugaga

SEQ ID NO: 1020065 - RNA, 19 nt, Artificial Sequence
  Description of Artificial Sequence: Synthetic oligonucleotide
  Antisense strand to SEQ ID NO: 1020064
ucucaggaaacccuauuga

SEQ ID NO: 1020066 - RNA, 19 nt, Artificial Sequence
  Description of Artificial Sequence: Synthetic oligonucleotide
  Sense strand starting at position 2674 of SEQ ID NO: 914647
guauaugaggugugaaaga

SEQ ID NO: 1020067 - RNA, 19 nt, Artificial Sequence
  Description of Artificial Sequence: Synthetic oligonucleotide
  Antisense strand to SEQ ID NO: 1020066
ucuuucacaccucauauac

SEQ ID NO: 1020068 - RNA, 19 nt, Artificial Sequence
  Description of Artificial Sequence: Synthetic oligonucleotide
  Sense strand starting at position 2738 of SEQ ID NO: 914647
gagcgauuaguaggaugaa

SEQ ID NO: 1020069 - RNA, 19 nt, Artificial Sequence
  Description of Artificial Sequence: Synthetic oligonucleotide
  Antisense strand to SEQ ID NO: 1020068
uucauccuacuaaucgcuc

SEQ ID NO: 1020070 - RNA, 19 nt, Artificial Sequence
  Description of Artificial Sequence: Synthetic oligonucleotide
  Sense strand starting at position 2840 of SEQ ID NO: 914647
cuuugagauguccauuaca

SEQ ID NO: 1020071 - RNA, 19 nt, Artificial Sequence
  Description of Artificial Sequence: Synthetic oligonucleotide
  Antisense strand to SEQ ID NO: 1020070
uguaauggacaucucaaag

SEQ ID NO: 1020072 - RNA, 19 nt, Artificial Sequence
  Description of Artificial Sequence: Synthetic oligonucleotide
  Sense strand starting at position 2873 of SEQ ID NO: 914647
uguaauaagguguauaaac

SEQ ID NO: 1020073 - RNA, 19 nt, Artificial Sequence
  Description of Artificial Sequence: Synthetic oligonucleotide
  Antisense strand to SEQ ID NO: 1020072
guuuauacaccuuauuaca

SEQ ID NO: 1020074 - RNA, 19 nt, Artificial Sequence
  Description of Artificial Sequence: Synthetic oligonucleotide
  Sense strand starting at position 2892 of SEQ ID NO: 914647
uagucuguacuuuaggaga

SEQ ID NO: 1020075 - RNA, 19 nt, Artificial Sequence
  Description of Artificial Sequence: Synthetic oligonucleotide
  Antisense strand to SEQ ID NO: 1020074
ucuccuaaaguacagacua

SEQ ID NO: 1020076 - RNA, 19 nt, Artificial Sequence
  Description of Artificial Sequence: Synthetic oligonucleotide
  Sense strand starting at position 2952 of SEQ ID NO: 914647
ccugauauacaguaguuau

SEQ ID NO: 1020077 - RNA, 19 nt, Artificial Sequence
  Description of Artificial Sequence: Synthetic oligonucleotide
  Antisense strand to SEQ ID NO: 1020076
auaacuacuguauaucagg

SEQ ID NO: 1020078 - RNA, 19 nt, Artificial Sequence
  Description of Artificial Sequence: Synthetic oligonucleotide
  Sense strand starting at position 2979 of SEQ ID NO: 914647
agcuauuaucacuauguga

SEQ ID NO: 1020079 - RNA, 19 nt, Artificial Sequence
  Description of Artificial Sequence: Synthetic oligonucleotide
  Antisense strand to SEQ ID NO: 1020078
ucacauagugauaauagcu

SEQ ID NO: 1020080 - RNA, 19 nt, Artificial Sequence
  Description of Artificial Sequence: Synthetic oligonucleotide
  Sense strand starting at position 2981 of SEQ ID NO: 914647
cuauuaucacuaugugaug

SEQ ID NO: 1020081 - RNA, 19 nt, Artificial Sequence
  Description of Artificial Sequence: Synthetic oligonucleotide
  Antisense strand to SEQ ID NO: 1020080
caucacauagugauaauag

SEQ ID NO: 1020082 - RNA, 19 nt, Artificial Sequence
  Description of Artificial Sequence: Synthetic oligonucleotide
  Sense strand starting at position 2987 of SEQ ID NO: 914647
ucacuaugugauggaggga

SEQ ID NO: 1020083 - RNA, 19 nt, Artificial Sequence
  Description of Artificial Sequence: Synthetic oligonucleotide
  Antisense strand to SEQ ID NO: 1020082
ucccuccaucacauaguga

SEQ ID NO: 1020084 - RNA, 19 nt, Artificial Sequence
  Description of Artificial Sequence: Synthetic oligonucleotide
  Sense strand starting at position 3284 of SEQ ID NO: 914647
aaaugcucuguguagacau

SEQ ID NO: 1020085 - RNA, 19 nt, Artificial Sequence
  Description of Artificial Sequence: Synthetic oligonucleotide
  Antisense strand to SEQ ID NO: 1020084
augucuacacagagcauuu

SEQ ID NO: 1020086 - RNA, 19 nt, Artificial Sequence
  Description of Artificial Sequence: Synthetic oligonucleotide
  Sense strand starting at position 3371 of SEQ ID NO: 914647
uuugaugaccuggagucuu

SEQ ID NO: 1020087 - RNA, 19 nt, Artificial Sequence
  Description of Artificial Sequence: Synthetic oligonucleotide
  Antisense strand to SEQ ID NO: 1020086
aagacuccaggucaucaaa

SEQ ID NO: 1020088 - RNA, 19 nt, Artificial Sequence
  Description of Artificial Sequence: Synthetic oligonucleotide
  Sense strand starting at position 3447 of SEQ ID NO: 914647
agaaaucuggugugagaga

SEQ ID NO: 1020089 - RNA, 19 nt, Artificial Sequence
  Description of Artificial Sequence: Synthetic oligonucleotide
  Antisense strand to SEQ ID NO: 1020088
ucucucacaccagauuucu

SEQ ID NO: 1020090 - RNA, 19 nt, Artificial Sequence
  Description of Artificial Sequence: Synthetic oligonucleotide
  Sense strand starting at position 3532 of SEQ ID NO: 914647
ggagacauuuaaggaaaua

SEQ ID NO: 1020091 - RNA, 19 nt, Artificial Sequence
  Description of Artificial Sequence: Synthetic oligonucleotide
  Antisense strand to SEQ ID NO: 1020090
uauuuccuuaaaugucucc

SEQ ID NO: 1020092 - RNA, 19 nt, Artificial Sequence
  Description of Artificial Sequence: Synthetic oligonucleotide
  Sense strand starting at position 3815 of SEQ ID NO: 914647
guccauugagaucaucuca

SEQ ID NO: 1020093 - RNA, 19 nt, Artificial Sequence
  Description of Artificial Sequence: Synthetic oligonucleotide
  Antisense strand to SEQ ID NO: 1020092
ugagaugaucucaauggac

SEQ ID NO: 1020094 - RNA, 19 nt, Artificial Sequence
  Description of Artificial Sequence: Synthetic oligonucleotide
  Sense strand starting at position 39 of SEQ ID NO: 914648
cauagaagaguugguauua

SEQ ID NO: 1020095 - RNA, 19 nt, Artificial Sequence
  Description of Artificial Sequence: Synthetic oligonucleotide
  Antisense strand to SEQ ID NO: 1020094
uaauaccaacucuucuaug

SEQ ID NO: 1020096 - RNA, 19 nt, Artificial Sequence
  Description of Artificial Sequence: Synthetic oligonucleotide
  Sense strand starting at position 40 of SEQ ID NO: 914648
auagaagaguugguauuau

SEQ ID NO: 1020097 - RNA, 19 nt, Artificial Sequence
  Description of Artificial Sequence: Synthetic oligonucleotide
  Antisense strand to SEQ ID NO: 1020096
auaauaccaacucuucuau

SEQ ID NO: 1020098 - RNA, 19 nt, Artificial Sequence
  Description of Artificial Sequence: Synthetic oligonucleotide
  Sense strand starting at position 132 of SEQ ID NO: 914648
caugcuucucuauggagga

SEQ ID NO: 1020099 - RNA, 19 nt, Artificial Sequence
  Description of Artificial Sequence: Synthetic oligonucleotide
  Antisense strand to SEQ ID NO: 1020098
uccuccauagagaagcaug

SEQ ID NO: 1020100 - RNA, 19 nt, Artificial Sequence
  Description of Artificial Sequence: Synthetic oligonucleotide
  Sense strand starting at position 220 of SEQ ID NO: 914648
gccacaagugguuguggaa

SEQ ID NO: 1020101 - RNA, 19 nt, Artificial Sequence
  Description of Artificial Sequence: Synthetic oligonucleotide
  Antisense strand to SEQ ID NO: 1020100
uuccacaaccacuuguggc

SEQ ID NO: 1020102 - RNA, 19 nt, Artificial Sequence
  Description of Artificial Sequence: Synthetic oligonucleotide
  Sense strand starting at position 353 of SEQ ID NO: 914648
gacugucuacagcgauacu

SEQ ID NO: 1020103 - RNA, 19 nt, Artificial Sequence
  Description of Artificial Sequence: Synthetic oligonucleotide
  Antisense strand to SEQ ID NO: 1020102
aguaucgcuguagacaguc

SEQ ID NO: 1020104 - RNA, 19 nt, Artificial Sequence
  Description of Artificial Sequence: Synthetic oligonucleotide
  Sense strand starting at position 356 of SEQ ID NO: 914648
ugucuacagcgauacugau

SEQ ID NO: 1020105 - RNA, 19 nt, Artificial Sequence
  Description of Artificial Sequence: Synthetic oligonucleotide
  Antisense strand to SEQ ID NO: 1020104
aucaguaucgcuguagaca

SEQ ID NO: 1020106 - RNA, 19 nt, Artificial Sequence
  Description of Artificial Sequence: Synthetic oligonucleotide
  Sense strand starting at position 386 of SEQ ID NO: 914648
agaagcagagccugagaaa

SEQ ID NO: 1020107 - RNA, 19 nt, Artificial Sequence
  Description of Artificial Sequence: Synthetic oligonucleotide
  Antisense strand to SEQ ID NO: 1020106
uuucucaggcucugcuucu

SEQ ID NO: 1020108 - RNA, 19 nt, Artificial Sequence
  Description of Artificial Sequence: Synthetic oligonucleotide
  Sense strand starting at position 501 of SEQ ID NO: 914648
agccaacuguugguaacau

SEQ ID NO: 1020109 - RNA, 19 nt, Artificial Sequence
  Description of Artificial Sequence: Synthetic oligonucleotide
  Antisense strand to SEQ ID NO: 1020108
auguuaccaacaguuggcu

SEQ ID NO: 1020110 - RNA, 19 nt, Artificial Sequence
  Description of Artificial Sequence: Synthetic oligonucleotide
  Sense strand starting at position 510 of SEQ ID NO: 914648
uugguaacaugcuuccauu

SEQ ID NO: 1020111 - RNA, 19 nt, Artificial Sequence
  Description of Artificial Sequence: Synthetic oligonucleotide
  Antisense strand to SEQ ID NO: 1020110
aauggaagcauguuaccaa

SEQ ID NO: 1020112 - RNA, 19 nt, Artificial Sequence
  Description of Artificial Sequence: Synthetic oligonucleotide
  Sense strand starting at position 695 of SEQ ID NO: 914648
cccgcaauucuguaaguug

SEQ ID NO: 1020113 - RNA, 19 nt, Artificial Sequence
  Description of Artificial Sequence: Synthetic oligonucleotide
  Antisense strand to SEQ ID NO: 1020112
caacuuacagaauugcggg

SEQ ID NO: 1020114 - RNA, 19 nt, Artificial Sequence
  Description of Artificial Sequence: Synthetic oligonucleotide
  Sense strand starting at position 702 of SEQ ID NO: 914648
uucuguaaguugucuuaga

SEQ ID NO: 1020115 - RNA, 19 nt, Artificial Sequence
  Description of Artificial Sequence: Synthetic oligonucleotide
  Antisense strand to SEQ ID NO: 1020114
ucuaagacaacuuacagaa

SEQ ID NO: 1020116 - RNA, 19 nt, Artificial Sequence
  Description of Artificial Sequence: Synthetic oligonucleotide
  Sense strand starting at position 703 of SEQ ID NO: 914648
ucuguaaguugucuuagac

SEQ ID NO: 1020117 - RNA, 19 nt, Artificial Sequence
  Description of Artificial Sequence: Synthetic oligonucleotide
  Antisense strand to SEQ ID NO: 1020116
gucuaagacaacuuacaga

SEQ ID NO: 1020118 - RNA, 19 nt, Artificial Sequence
  Description of Artificial Sequence: Synthetic oligonucleotide
  Sense strand starting at position 723 of SEQ ID NO: 914648
aguaaacuuccaugcgaag

SEQ ID NO: 1020119 - RNA, 19 nt, Artificial Sequence
  Description of Artificial Sequence: Synthetic oligonucleotide
  Antisense strand to SEQ ID NO: 1020118
cuucgcauggaaguuuacu

SEQ ID NO: 1020120 - RNA, 19 nt, Artificial Sequence
  Description of Artificial Sequence: Synthetic oligonucleotide
  Sense strand starting at position 732 of SEQ ID NO: 914648
ccaugcgaaguuuaugaua

SEQ ID NO: 1020121 - RNA, 19 nt, Artificial Sequence
  Description of Artificial Sequence: Synthetic oligonucleotide
  Antisense strand to SEQ ID NO: 1020120
uaucauaaacuucgcaugg

SEQ ID NO: 1020122 - RNA, 19 nt, Artificial Sequence
  Description of Artificial Sequence: Synthetic oligonucleotide
  Sense strand starting at position 750 of SEQ ID NO: 914648
auccaaucauuuggaaguu

SEQ ID NO: 1020123 - RNA, 19 nt, Artificial Sequence
  Description of Artificial Sequence: Synthetic oligonucleotide
  Antisense strand to SEQ ID NO: 1020122
aacuuccaaaugauuggau

SEQ ID NO: 1020124 - RNA, 19 nt, Artificial Sequence
  Description of Artificial Sequence: Synthetic oligonucleotide
  Sense strand starting at position 751 of SEQ ID NO: 914648
uccaaucauuuggaaguua

SEQ ID NO: 1020125 - RNA, 19 nt, Artificial Sequence
  Description of Artificial Sequence: Synthetic oligonucleotide
  Antisense strand to SEQ ID NO: 1020124
uaacuuccaaaugauugga

SEQ ID NO: 1020126 - RNA, 19 nt, Artificial Sequence
  Description of Artificial Sequence: Synthetic oligonucleotide
  Sense strand starting at position 775 of SEQ ID NO: 914648
guguuaguggaguaacaga

SEQ ID NO: 1020127 - RNA, 19 nt, Artificial Sequence
  Description of Artificial Sequence: Synthetic oligonucleotide
  Antisense strand to SEQ ID NO: 1020126
ucuguuacuccacuaacac

SEQ ID NO: 1020128 - RNA, 19 nt, Artificial Sequence
  Description of Artificial Sequence: Synthetic oligonucleotide
  Sense strand starting at position 987 of SEQ ID NO: 914648
agguguaugccucacagaa

SEQ ID NO: 1020129 - RNA, 19 nt, Artificial Sequence
  Description of Artificial Sequence: Synthetic oligonucleotide
  Antisense strand to SEQ ID NO: 1020128
uucugugaggcauacaccu

SEQ ID NO: 1020130 - RNA, 19 nt, Artificial Sequence
  Description of Artificial Sequence: Synthetic oligonucleotide
  Sense strand starting at position 1095 of SEQ ID NO: 914648
ggucgucuucgccugugau

SEQ ID NO: 1020131 - RNA, 19 nt, Artificial Sequence
  Description of Artificial Sequence: Synthetic oligonucleotide
  Antisense strand to SEQ ID NO: 1020130
aucacaggcgaagacgacc

SEQ ID NO: 1020132 - RNA, 19 nt, Artificial Sequence
  Description of Artificial Sequence: Synthetic oligonucleotide
  Sense strand starting at position 1484 of SEQ ID NO: 914648
ugcuuaugcuaacuacaga

SEQ ID NO: 1020133 - RNA, 19 nt, Artificial Sequence
  Description of Artificial Sequence: Synthetic oligonucleotide
  Antisense strand to SEQ ID NO: 1020132
ucuguaguuagcauaagca

SEQ ID NO: 1020134 - RNA, 19 nt, Artificial Sequence
  Description of Artificial Sequence: Synthetic oligonucleotide
  Sense strand starting at position 1575 of SEQ ID NO: 914648
aguacuaugucgucagaaa

SEQ ID NO: 1020135 - RNA, 19 nt, Artificial Sequence
  Description of Artificial Sequence: Synthetic oligonucleotide
  Antisense strand to SEQ ID NO: 1020134
uuucugacgacauaguacu

SEQ ID NO: 1020136 - RNA, 19 nt, Artificial Sequence
  Description of Artificial Sequence: Synthetic oligonucleotide
  Sense strand starting at position 1576 of SEQ ID NO: 914648
guacuaugucgucagaaau

SEQ ID NO: 1020137 - RNA, 19 nt, Artificial Sequence
  Description of Artificial Sequence: Synthetic oligonucleotide
  Antisense strand to SEQ ID NO: 1020136
auuucugacgacauaguac

SEQ ID NO: 1020138 - RNA, 19 nt, Artificial Sequence
  Description of Artificial Sequence: Synthetic oligonucleotide
  Sense strand starting at position 2154 of SEQ ID NO: 914648
agcuaacugcauugauguu

SEQ ID NO: 1020139 - RNA, 19 nt, Artificial Sequence
  Description of Artificial Sequence: Synthetic oligonucleotide
  Antisense strand to SEQ ID NO: 1020138
aacaucaaugcaguuagcu

SEQ ID NO: 1020140 - RNA, 19 nt, Artificial Sequence
  Description of Artificial Sequence: Synthetic oligonucleotide
  Sense strand starting at position 2228 of SEQ ID NO: 914648
ggucuuaccaaguauggau

SEQ ID NO: 1020141 - RNA, 19 nt, Artificial Sequence
  Description of Artificial Sequence: Synthetic oligonucleotide
  Antisense strand to SEQ ID NO: 1020140
auccauacuugguaagacc

SEQ ID NO: 1020142 - RNA, 19 nt, Artificial Sequence
  Description of Artificial Sequence: Synthetic oligonucleotide
  Sense strand starting at position 2241 of SEQ ID NO: 914648
auggauggguuuguguaga

SEQ ID NO: 1020143 - RNA, 19 nt, Artificial Sequence
  Description of Artificial Sequence: Synthetic oligonucleotide
  Antisense strand to SEQ ID NO: 1020142
ucuacacaaacccauccau

SEQ ID NO: 1020144 - RNA, 19 nt, Artificial Sequence
  Description of Artificial Sequence: Synthetic oligonucleotide
  Sense strand starting at position 2382 of SEQ ID NO: 914648
aacuguauguccguacaaa

SEQ ID NO: 1020145 - RNA, 19 nt, Artificial Sequence
  Description of Artificial Sequence: Synthetic oligonucleotide
  Antisense strand to SEQ ID NO: 1020144
uuuguacggacauacaguu

SEQ ID NO: 1020146 - RNA, 19 nt, Artificial Sequence
  Description of Artificial Sequence: Synthetic oligonucleotide
  Sense strand starting at position 2383 of SEQ ID NO: 914648
acuguauguccguacaaag

SEQ ID NO: 1020147 - RNA, 19 nt, Artificial Sequence
  Description of Artificial Sequence: Synthetic oligonucleotide
  Antisense strand to SEQ ID NO: 1020146
cuuuguacggacauacagu

SEQ ID NO: 1020148 - RNA, 19 nt, Artificial Sequence
  Description of Artificial Sequence: Synthetic oligonucleotide
  Sense strand starting at position 3047 of SEQ ID NO: 914648
aauauugcauuguuaugga

SEQ ID NO: 1020149 - RNA, 19 nt, Artificial Sequence
  Description of Artificial Sequence: Synthetic oligonucleotide
  Antisense strand to SEQ ID NO: 1020148
uccauaacaaugcaauauu

SEQ ID NO: 1020150 - RNA, 19 nt, Artificial Sequence
  Description of Artificial Sequence: Synthetic oligonucleotide
  Sense strand starting at position 3139 of SEQ ID NO: 914648
uaauguuuccaugaacguu

SEQ ID NO: 1020151 - RNA, 19 nt, Artificial Sequence
  Description of Artificial Sequence: Synthetic oligonucleotide
  Antisense strand to SEQ ID NO: 1020150
aacguucauggaaacauua

SEQ ID NO: 1020152 - RNA, 19 nt, Artificial Sequence
  Description of Artificial Sequence: Synthetic oligonucleotide
  Sense strand starting at position 3152 of SEQ ID NO: 914648
aacguuagugcacaagauu

SEQ ID NO: 1020153 - RNA, 19 nt, Artificial Sequence
  Description of Artificial Sequence: Synthetic oligonucleotide
  Antisense strand to SEQ ID NO: 1020152
aaucuugugcacuaacguu

SEQ ID NO: 1020154 - RNA, 19 nt, Artificial Sequence
  Description of Artificial Sequence: Synthetic oligonucleotide
  Sense strand starting at position 3179 of SEQ ID NO: 914648
acguauauuucucuuaggu

SEQ ID NO: 1020155 - RNA, 19 nt, Artificial Sequence
  Description of Artificial Sequence: Synthetic oligonucleotide
  Antisense strand to SEQ ID NO: 1020154
accuaagagaaauauacgu

SEQ ID NO: 1020156 - RNA, 19 nt, Artificial Sequence
  Description of Artificial Sequence: Synthetic oligonucleotide
  Sense strand starting at position 3209 of SEQ ID NO: 914648
agaggaaucaguggcuuau

SEQ ID NO: 1020157 - RNA, 19 nt, Artificial Sequence
  Description of Artificial Sequence: Synthetic oligonucleotide
  Antisense strand to SEQ ID NO: 1020156
auaagccacugauuccucu

SEQ ID NO: 1020158 - RNA, 19 nt, Artificial Sequence
  Description of Artificial Sequence: Synthetic oligonucleotide
  Sense strand starting at position 3215 of SEQ ID NO: 914648
aucaguggcuuauuuagua

SEQ ID NO: 1020159 - RNA, 19 nt, Artificial Sequence
  Description of Artificial Sequence: Synthetic oligonucleotide
  Antisense strand to SEQ ID NO: 1020158
uacuaaauaagccacugau

SEQ ID NO: 1020160 - RNA, 19 nt, Artificial Sequence
  Description of Artificial Sequence: Synthetic oligonucleotide
  Sense strand starting at position 3374 of SEQ ID NO: 914648
ggaauacugcugugcaaca

SEQ ID NO: 1020161 - RNA, 19 nt, Artificial Sequence
  Description of Artificial Sequence: Synthetic oligonucleotide
  Antisense strand to SEQ ID NO: 1020160
uguugcacagcaguauucc

SEQ ID NO: 1020162 - RNA, 19 nt, Artificial Sequence
  Description of Artificial Sequence: Synthetic oligonucleotide
  Sense strand starting at position 3623 of SEQ ID NO: 914648
agcauuauagauugcuguu

SEQ ID NO: 1020163 - RNA, 19 nt, Artificial Sequence
  Description of Artificial Sequence: Synthetic oligonucleotide
  Antisense strand to SEQ ID NO: 1020162
aacagcaaucuauaaugcu

SEQ ID NO: 1020164 - RNA, 19 nt, Artificial Sequence
  Description of Artificial Sequence: Synthetic oligonucleotide
  Sense strand starting at position 3711 of SEQ ID NO: 914648
gguuauggauguguucauu

SEQ ID NO: 1020165 - RNA, 19 nt, Artificial Sequence
  Description of Artificial Sequence: Synthetic oligonucleotide
  Antisense strand to SEQ ID NO: 1020164
aaugaacacauccauaacc

SEQ ID NO: 1020166 - RNA, 19 nt, Artificial Sequence
  Description of Artificial Sequence: Synthetic oligonucleotide
  Sense strand starting at position 3735 of SEQ ID NO: 914648
gacugugauugugucauga

SEQ ID NO: 1020167 - RNA, 19 nt, Artificial Sequence
  Description of Artificial Sequence: Synthetic oligonucleotide
  Antisense strand to SEQ ID NO: 1020166
ucaugacacaaucacaguc

SEQ ID NO: 1020168 - RNA, 19 nt, Artificial Sequence
  Description of Artificial Sequence: Synthetic oligonucleotide
  Sense strand starting at position 3743 of SEQ ID NO: 914648
uugugucaugauuguauac

SEQ ID NO: 1020169 - RNA, 19 nt, Artificial Sequence
  Description of Artificial Sequence: Synthetic oligonucleotide
  Antisense strand to SEQ ID NO: 1020168
guauacaaucaugacacaa

SEQ ID NO: 1020170 - RNA, 19 nt, Artificial Sequence
  Description of Artificial Sequence: Synthetic oligonucleotide
  Sense strand starting at position 3936 of SEQ ID NO: 914648
gccuuaacaauguggaaag

SEQ ID NO: 1020171 - RNA, 19 nt, Artificial Sequence
  Description of Artificial Sequence: Synthetic oligonucleotide
  Antisense strand to SEQ ID NO: 1020170
cuuuccacauuguuaaggc

SEQ ID NO: 1020172 - RNA, 19 nt, Artificial Sequence
  Description of Artificial Sequence: Synthetic oligonucleotide
  Sense strand starting at position 3967 of SEQ ID NO: 914648
cagggaaccugugucaugu

SEQ ID NO: 1020173 - RNA, 19 nt, Artificial Sequence
  Description of Artificial Sequence: Synthetic oligonucleotide
  Antisense strand to SEQ ID NO: 1020172
acaugacacagguucccug

SEQ ID NO: 1020174 - RNA, 19 nt, Artificial Sequence
  Description of Artificial Sequence: Synthetic oligonucleotide
  Sense strand starting at position 80 of SEQ ID NO: 914649
uucuuagaaggcugucaau

SEQ ID NO: 1020175 - RNA, 19 nt, Artificial Sequence
  Description of Artificial Sequence: Synthetic oligonucleotide
  Antisense strand to SEQ ID NO: 1020174
auugacagccuucuaagaa

SEQ ID NO: 1020176 - RNA, 19 nt, Artificial Sequence
  Description of Artificial Sequence: Synthetic oligonucleotide
  Sense strand starting at position 146 of SEQ ID NO: 914649
acuuauuugcuguguuaac

SEQ ID NO: 1020177 - RNA, 19 nt, Artificial Sequence
  Description of Artificial Sequence: Synthetic oligonucleotide
  Antisense strand to SEQ ID NO: 1020176
guuaacacagcaaauaagu

SEQ ID NO: 1020178 - RNA, 19 nt, Artificial Sequence
  Description of Artificial Sequence: Synthetic oligonucleotide
  Sense strand starting at position 147 of SEQ ID NO: 914649
cuuauuugcuguguuaacu

SEQ ID NO: 1020179 - RNA, 19 nt, Artificial Sequence
  Description of Artificial Sequence: Synthetic oligonucleotide
  Antisense strand to SEQ ID NO: 1020178
aguuaacacagcaaauaag

SEQ ID NO: 1020180 - RNA, 19 nt, Artificial Sequence
  Description of Artificial Sequence: Synthetic oligonucleotide
  Sense strand starting at position 265 of SEQ ID NO: 914649
gcggcuugacaacgaagaa

SEQ ID NO: 1020181 - RNA, 19 nt, Artificial Sequence
  Description of Artificial Sequence: Synthetic oligonucleotide
  Antisense strand to SEQ ID NO: 1020180
uucuucguugucaagccgc

SEQ ID NO: 1020182 - RNA, 19 nt, Artificial Sequence
  Description of Artificial Sequence: Synthetic oligonucleotide
  Sense strand starting at position 266 of SEQ ID NO: 914649
cggcuugacaacgaagaau

SEQ ID NO: 1020183 - RNA, 19 nt, Artificial Sequence
  Description of Artificial Sequence: Synthetic oligonucleotide
  Antisense strand to SEQ ID NO: 1020182
auucuucguugucaagccg

SEQ ID NO: 1020184 - RNA, 19 nt, Artificial Sequence
  Description of Artificial Sequence: Synthetic oligonucleotide
  Sense strand starting at position 447 of SEQ ID NO: 914649
auugcagaucuguaagacu

SEQ ID NO: 1020185 - RNA, 19 nt, Artificial Sequence
  Description of Artificial Sequence: Synthetic oligonucleotide
  Antisense strand to SEQ ID NO: 1020184
agucuuacagaucugcaau

SEQ ID NO: 1020186 - RNA, 19 nt, Artificial Sequence
  Description of Artificial Sequence: Synthetic oligonucleotide
  Sense strand starting at position 541 of SEQ ID NO: 914649
caaagagacuucguagaac

SEQ ID NO: 1020187 - RNA, 19 nt, Artificial Sequence
  Description of Artificial Sequence: Synthetic oligonucleotide
  Antisense strand to SEQ ID NO: 1020186
guucuacgaagucucuuug

SEQ ID NO: 1020188 - RNA, 19 nt, Artificial Sequence
  Description of Artificial Sequence: Synthetic oligonucleotide
  Sense strand starting at position 682 of SEQ ID NO: 914649
aaaugucugcccuaggaau

SEQ ID NO: 1020189 - RNA, 19 nt, Artificial Sequence
  Description of Artificial Sequence: Synthetic oligonucleotide
  Antisense strand to SEQ ID NO: 1020188
auuccuagggcagacauuu

SEQ ID NO: 1020190 - RNA, 19 nt, Artificial Sequence
  Description of Artificial Sequence: Synthetic oligonucleotide
  Sense strand starting at position 793 of SEQ ID NO: 914649
uggagagcucguggaaaga

SEQ ID NO: 1020191 - RNA, 19 nt, Artificial Sequence
  Description of Artificial Sequence: Synthetic oligonucleotide
  Antisense strand to SEQ ID NO: 1020190
ucuuuccacgagcucucca

SEQ ID NO: 1020192 - RNA, 19 nt, Artificial Sequence
  Description of Artificial Sequence: Synthetic oligonucleotide
  Sense strand starting at position 900 of SEQ ID NO: 914649
uuucccuuccugggaacaa

SEQ ID NO: 1020193 - RNA, 19 nt, Artificial Sequence
  Description of Artificial Sequence: Synthetic oligonucleotide
  Antisense strand to SEQ ID NO: 1020192
uuguucccaggaagggaaa

SEQ ID NO: 1020194 - RNA, 19 nt, Artificial Sequence
  Description of Artificial Sequence: Synthetic oligonucleotide
  Sense strand starting at position 1172 of SEQ ID NO: 914649
ggcagaaaucaucacucuc

SEQ ID NO: 1020195 - RNA, 19 nt, Artificial Sequence
  Description of Artificial Sequence: Synthetic oligonucleotide
  Antisense strand to SEQ ID NO: 1020194
gagagugaugauuucugcc

SEQ ID NO: 1020196 - RNA, 19 nt, Artificial Sequence
  Description of Artificial Sequence: Synthetic oligonucleotide
  Sense strand starting at position 1506 of SEQ ID NO: 914649
agccaagacuuuccaggua

SEQ ID NO: 1020197 - RNA, 19 nt, Artificial Sequence
  Description of Artificial Sequence: Synthetic oligonucleotide
  Antisense strand to SEQ ID NO: 1020196
uaccuggaaagucuuggcu

SEQ ID NO: 1020198 - RNA, 19 nt, Artificial Sequence
  Description of Artificial Sequence: Synthetic oligonucleotide
  Sense strand starting at position 1588 of SEQ ID NO: 914649
uuuguaccacucgagaaga

SEQ ID NO: 1020199 - RNA, 19 nt, Artificial Sequence
  Description of Artificial Sequence: Synthetic oligonucleotide
  Antisense strand to SEQ ID NO: 1020198
ucuucucgagugguacaaa

SEQ ID NO: 1020200 - RNA, 19 nt, Artificial Sequence
  Description of Artificial Sequence: Synthetic oligonucleotide
  Sense strand starting at position 1890 of SEQ ID NO: 914649
gcgcuaaggcgugucugaa

SEQ ID NO: 1020201 - RNA, 19 nt, Artificial Sequence
  Description of Artificial Sequence: Synthetic oligonucleotide
  Antisense strand to SEQ ID NO: 1020200
uucagacacgccuuagcgc

SEQ ID NO: 1020202 - RNA, 19 nt, Artificial Sequence
  Description of Artificial Sequence: Synthetic oligonucleotide
  Sense strand starting at position 1900 of SEQ ID NO: 914649
gugucugaagccgaacuua

SEQ ID NO: 1020203 - RNA, 19 nt, Artificial Sequence
  Description of Artificial Sequence: Synthetic oligonucleotide
  Antisense strand to SEQ ID NO: 1020202
uaaguucggcuucagacac

SEQ ID NO: 1020204 - RNA, 19 nt, Artificial Sequence
  Description of Artificial Sequence: Synthetic oligonucleotide
  Sense strand starting at position 2124 of SEQ ID NO: 914649
cgccgagcgcugucgagau

SEQ ID NO: 1020205 - RNA, 19 nt, Artificial Sequence
  Description of Artificial Sequence: Synthetic oligonucleotide
  Antisense strand to SEQ ID NO: 1020204
aucucgacagcgcucggcg

SEQ ID NO: 1020206 - RNA, 19 nt, Artificial Sequence
  Description of Artificial Sequence: Synthetic oligonucleotide
  Sense strand starting at position 2142 of SEQ ID NO: 914649
ugaggguugcgugcguaaa

SEQ ID NO: 1020207 - RNA, 19 nt, Artificial Sequence
  Description of Artificial Sequence: Synthetic oligonucleotide
  Antisense strand to SEQ ID NO: 1020206
uuuacgcacgcaacccuca

SEQ ID NO: 1020208 - RNA, 19 nt, Artificial Sequence
  Description of Artificial Sequence: Synthetic oligonucleotide
  Sense strand starting at position 2237 of SEQ ID NO: 914649
ugccaugcuccaguuguau

SEQ ID NO: 1020209 - RNA, 19 nt, Artificial Sequence
  Description of Artificial Sequence: Synthetic oligonucleotide
  Antisense strand to SEQ ID NO: 1020208
auacaacuggagcauggca

SEQ ID NO: 1020210 - RNA, 19 nt, Artificial Sequence
  Description of Artificial Sequence: Synthetic oligonucleotide
  Sense strand starting at position 2715 of SEQ ID NO: 914649
gcggguguuuggaggauuu

SEQ ID NO: 1020211 - RNA, 19 nt, Artificial Sequence
  Description of Artificial Sequence: Synthetic oligonucleotide
  Antisense strand to SEQ ID NO: 1020210
aaauccuccaaacacccgc

SEQ ID NO: 1020212 - RNA, 19 nt, Artificial Sequence
  Description of Artificial Sequence: Synthetic oligonucleotide
  Sense strand starting at position 2773 of SEQ ID NO: 914649
uuaagugcacguuaaacau

SEQ ID NO: 1020213 - RNA, 19 nt, Artificial Sequence
  Description of Artificial Sequence: Synthetic oligonucleotide
  Antisense strand to SEQ ID NO: 1020212
auguuuaacgugcacuuaa

SEQ ID NO: 1020214 - RNA, 19 nt, Artificial Sequence
  Description of Artificial Sequence: Synthetic oligonucleotide
  Sense strand starting at position 2874 of SEQ ID NO: 914649
uuauacuuaccagguaaug

SEQ ID NO: 1020215 - RNA, 19 nt, Artificial Sequence
  Description of Artificial Sequence: Synthetic oligonucleotide
  Antisense strand to SEQ ID NO: 1020214
cauuaccugguaaguauaa

SEQ ID NO: 1020216 - RNA, 19 nt, Artificial Sequence
  Description of Artificial Sequence: Synthetic oligonucleotide
  Sense strand starting at position 2885 of SEQ ID NO: 914649
agguaauguauugaugagu

SEQ ID NO: 1020217 - RNA, 19 nt, Artificial Sequence
  Description of Artificial Sequence: Synthetic oligonucleotide
  Antisense strand to SEQ ID NO: 1020216
acucaucaauacauuaccu

SEQ ID NO: 1020218 - RNA, 19 nt, Artificial Sequence
  Description of Artificial Sequence: Synthetic oligonucleotide
  Sense strand starting at position 2890 of SEQ ID NO: 914649
auguauugaugaguaccuu

SEQ ID NO: 1020219 - RNA, 19 nt, Artificial Sequence
  Description of Artificial Sequence: Synthetic oligonucleotide
  Antisense strand to SEQ ID NO: 1020218
aagguacucaucaauacau

SEQ ID NO: 1020220 - RNA, 19 nt, Artificial Sequence
  Description of Artificial Sequence: Synthetic oligonucleotide
  Sense strand starting at position 2891 of SEQ ID NO: 914649
uguauugaugaguaccuua

SEQ ID NO: 1020221 - RNA, 19 nt, Artificial Sequence
  Description of Artificial Sequence: Synthetic oligonucleotide
  Antisense strand to SEQ ID NO: 1020220
uaagguacucaucaauaca

SEQ ID NO: 1020222 - RNA, 19 nt, Artificial Sequence
  Description of Artificial Sequence: Synthetic oligonucleotide
  Sense strand starting at position 2896 of SEQ ID NO: 914649
ugaugaguaccuuauucca

SEQ ID NO: 1020223 - RNA, 19 nt, Artificial Sequence
  Description of Artificial Sequence: Synthetic oligonucleotide
  Antisense strand to SEQ ID NO: 1020222
uggaauaagguacucauca

SEQ ID NO: 1020224 - RNA, 19 nt, Artificial Sequence
  Description of Artificial Sequence: Synthetic oligonucleotide
  Sense strand starting at position 2917 of SEQ ID NO: 914649
guuugcgacauuguagcua

SEQ ID NO: 1020225 - RNA, 19 nt, Artificial Sequence
  Description of Artificial Sequence: Synthetic oligonucleotide
  Antisense strand to SEQ ID NO: 1020224
uagcuacaaugucgcaaac

SEQ ID NO: 1020226 - RNA, 19 nt, Artificial Sequence
  Description of Artificial Sequence: Synthetic oligonucleotide
  Sense strand starting at position 3017 of SEQ ID NO: 914649
uguauagucaaaggcaaga

SEQ ID NO: 1020227 - RNA, 19 nt, Artificial Sequence
  Description of Artificial Sequence: Synthetic oligonucleotide
  Antisense strand to SEQ ID NO: 1020226
ucuugccuuugacuauaca

SEQ ID NO: 1020228 - RNA, 19 nt, Artificial Sequence
  Description of Artificial Sequence: Synthetic oligonucleotide
  Sense strand starting at position 3143 of SEQ ID NO: 914649
gcaccugguccuuaauaca

SEQ ID NO: 1020229 - RNA, 19 nt, Artificial Sequence
  Description of Artificial Sequence: Synthetic oligonucleotide
  Antisense strand to SEQ ID NO: 1020228
uguauuaaggaccaggugc

SEQ ID NO: 1020230 - RNA, 19 nt, Artificial Sequence
  Description of Artificial Sequence: Synthetic oligonucleotide
  Sense strand starting at position 3252 of SEQ ID NO: 914649
aucuguagaucuuugcuau

SEQ ID NO: 1020231 - RNA, 19 nt, Artificial Sequence
  Description of Artificial Sequence: Synthetic oligonucleotide
  Antisense strand to SEQ ID NO: 1020230
auagcaaagaucuacagau

SEQ ID NO: 1020232 - RNA, 19 nt, Artificial Sequence
  Description of Artificial Sequence: Synthetic oligonucleotide
  Sense strand starting at position 3255 of SEQ ID NO: 914649
uguagaucuuugcuauaga

SEQ ID NO: 1020233 - RNA, 19 nt, Artificial Sequence
  Description of Artificial Sequence: Synthetic oligonucleotide
  Antisense strand to SEQ ID NO: 1020232
ucuauagcaaagaucuaca

SEQ ID NO: 1020234 - RNA, 19 nt, Artificial Sequence
  Description of Artificial Sequence: Synthetic oligonucleotide
  Sense strand starting at position 3266 of SEQ ID NO: 914649
gcuauagaauagucaccau

SEQ ID NO: 1020235 - RNA, 19 nt, Artificial Sequence
  Description of Artificial Sequence: Synthetic oligonucleotide
  Antisense strand to SEQ ID NO: 1020234
auggugacuauucuauagc

SEQ ID NO: 1020236 - RNA, 19 nt, Artificial Sequence
  Description of Artificial Sequence: Synthetic oligonucleotide
  Sense strand starting at position 3471 of SEQ ID NO: 914649
cgagaauaauguuucuuua

SEQ ID NO: 1020237 - RNA, 19 nt, Artificial Sequence
  Description of Artificial Sequence: Synthetic oligonucleotide
  Antisense strand to SEQ ID NO: 1020236
uaaagaaacauuauucucg

SEQ ID NO: 1020238 - RNA, 19 nt, Artificial Sequence
  Description of Artificial Sequence: Synthetic oligonucleotide
  Sense strand starting at position 3520 of SEQ ID NO: 914649
aaugcauuaguauauguga

SEQ ID NO: 1020239 - RNA, 19 nt, Artificial Sequence
  Description of Artificial Sequence: Synthetic oligonucleotide
  Antisense strand to SEQ ID NO: 1020238
ucacauauacuaaugcauu

SEQ ID NO: 1020240 - RNA, 19 nt, Artificial Sequence
  Description of Artificial Sequence: Synthetic oligonucleotide
  Sense strand starting at position 3523 of SEQ ID NO: 914649
gcauuaguauaugugauau

SEQ ID NO: 1020241 - RNA, 19 nt, Artificial Sequence
  Description of Artificial Sequence: Synthetic oligonucleotide
  Antisense strand to SEQ ID NO: 1020240
auaucacauauacuaaugc

SEQ ID NO: 1020242 - RNA, 19 nt, Artificial Sequence
  Description of Artificial Sequence: Synthetic oligonucleotide
  Sense strand starting at position 3583 of SEQ ID NO: 914649
cgaauacauuaguuuacua

SEQ ID NO: 1020243 - RNA, 19 nt, Artificial Sequence
  Description of Artificial Sequence: Synthetic oligonucleotide
  Antisense strand to SEQ ID NO: 1020242
uaguaaacuaauguauucg

SEQ ID NO: 1020244 - RNA, 19 nt, Artificial Sequence
  Description of Artificial Sequence: Synthetic oligonucleotide
  Sense strand starting at position 3662 of SEQ ID NO: 914649
aaagucggauguucuuaua

SEQ ID NO: 1020245 - RNA, 19 nt, Artificial Sequence
  Description of Artificial Sequence: Synthetic oligonucleotide
  Antisense strand to SEQ ID NO: 1020244
uauaagaacauccgacuuu

SEQ ID NO: 1020246 - RNA, 19 nt, Artificial Sequence
  Description of Artificial Sequence: Synthetic oligonucleotide
  Sense strand starting at position 3772 of SEQ ID NO: 914649
augggcuuugcagauauga

SEQ ID NO: 1020247 - RNA, 19 nt, Artificial Sequence
  Description of Artificial Sequence: Synthetic oligonucleotide
  Antisense strand to SEQ ID NO: 1020246
ucauaucugcaaagcccau

SEQ ID NO: 1020248 - RNA, 19 nt, Artificial Sequence
  Description of Artificial Sequence: Synthetic oligonucleotide
  Sense strand starting at position 3774 of SEQ ID NO: 914649
gggcuuugcagauaugagu

SEQ ID NO: 1020249 - RNA, 19 nt, Artificial Sequence
  Description of Artificial Sequence: Synthetic oligonucleotide
  Antisense strand to SEQ ID NO: 1020248
acucauaucugcaaagccc

SEQ ID NO: 1020250 - RNA, 19 nt, Artificial Sequence
  Description of Artificial Sequence: Synthetic oligonucleotide
  Sense strand starting at position 3903 of SEQ ID NO: 914649
uugaaaucguaccugcaaa

SEQ ID NO: 1020251 - RNA, 19 nt, Artificial Sequence
  Description of Artificial Sequence: Synthetic oligonucleotide
  Antisense strand to SEQ ID NO: 1020250
uuugcagguacgauuucaa

SEQ ID NO: 1020252 - RNA, 19 nt, Artificial Sequence
  Description of Artificial Sequence: Synthetic oligonucleotide
  Sense strand starting at position 3904 of SEQ ID NO: 914649
ugaaaucguaccugcaaag

SEQ ID NO: 1020253 - RNA, 19 nt, Artificial Sequence
  Description of Artificial Sequence: Synthetic oligonucleotide
  Antisense strand to SEQ ID NO: 1020252
cuuugcagguacgauuuca

SEQ ID NO: 1020254 - RNA, 19 nt, Artificial Sequence
  Description of Artificial Sequence: Synthetic oligonucleotide
  Sense strand starting at position 41 of SEQ ID NO: 914650
ccaggaacucgcugauuaa

SEQ ID NO: 1020255 - RNA, 19 nt, Artificial Sequence
  Description of Artificial Sequence: Synthetic oligonucleotide
  Antisense strand to SEQ ID NO: 1020254
uuaaucagcgaguuccugg

SEQ ID NO: 1020256 - RNA, 19 nt, Artificial Sequence
  Description of Artificial Sequence: Synthetic oligonucleotide
  Sense strand starting at position 42 of SEQ ID NO: 914650
caggaacucgcugauuaau

SEQ ID NO: 1020257 - RNA, 19 nt, Artificial Sequence
  Description of Artificial Sequence: Synthetic oligonucleotide
  Antisense strand to SEQ ID NO: 1020256
auuaaucagcgaguuccug

SEQ ID NO: 1020258 - RNA, 19 nt, Artificial Sequence
  Description of Artificial Sequence: Synthetic oligonucleotide
  Sense strand starting at position 44 of SEQ ID NO: 914650
ggaacucgcugauuaauaa

SEQ ID NO: 1020259 - RNA, 19 nt, Artificial Sequence
  Description of Artificial Sequence: Synthetic oligonucleotide
  Antisense strand to SEQ ID NO: 1020258
uuauuaaucagcgaguucc

SEQ ID NO: 1020260 - RNA, 19 nt, Artificial Sequence
  Description of Artificial Sequence: Synthetic oligonucleotide
  Sense strand starting at position 176 of SEQ ID NO: 914650
ggaaauuagugcuucugga

SEQ ID NO: 1020261 - RNA, 19 nt, Artificial Sequence
  Description of Artificial Sequence: Synthetic oligonucleotide
  Antisense strand to SEQ ID NO: 1020260
uccagaagcacuaauuucc

SEQ ID NO: 1020262 - RNA, 19 nt, Artificial Sequence
  Description of Artificial Sequence: Synthetic oligonucleotide
  Sense strand starting at position 194 of SEQ ID NO: 914650
aacaguagugugcaucaga

SEQ ID NO: 1020263 - RNA, 19 nt, Artificial Sequence
  Description of Artificial Sequence: Synthetic oligonucleotide
  Antisense strand to SEQ ID NO: 1020262
ucugaugcacacuacuguu

SEQ ID NO: 1020264 - RNA, 19 nt, Artificial Sequence
  Description of Artificial Sequence: Synthetic oligonucleotide
  Sense strand starting at position 216 of SEQ ID NO: 914650
accugaagggcuuguuaau

SEQ ID NO: 1020265 - RNA, 19 nt, Artificial Sequence
  Description of Artificial Sequence: Synthetic oligonucleotide
  Antisense strand to SEQ ID NO: 1020264
auuaacaagcccuucaggu

SEQ ID NO: 1020266 - RNA, 19 nt, Artificial Sequence
  Description of Artificial Sequence: Synthetic oligonucleotide
  Sense strand starting at position 316 of SEQ ID NO: 914650
caguaucaacgcuguggaa

SEQ ID NO: 1020267 - RNA, 19 nt, Artificial Sequence
  Description of Artificial Sequence: Synthetic oligonucleotide
  Antisense strand to SEQ ID NO: 1020266
uuccacagcguugauacug

SEQ ID NO: 1020268 - RNA, 19 nt, Artificial Sequence
  Description of Artificial Sequence: Synthetic oligonucleotide
  Sense strand starting at position 441 of SEQ ID NO: 914650
aaaguuguuguugggauua

SEQ ID NO: 1020269 - RNA, 19 nt, Artificial Sequence
  Description of Artificial Sequence: Synthetic oligonucleotide
  Antisense strand to SEQ ID NO: 1020268
uaaucccaacaacaacuuu

SEQ ID NO: 1020270 - RNA, 19 nt, Artificial Sequence
  Description of Artificial Sequence: Synthetic oligonucleotide
  Sense strand starting at position 524 of SEQ ID NO: 914650
ugcguacuacuuuacuaau

SEQ ID NO: 1020271 - RNA, 19 nt, Artificial Sequence
  Description of Artificial Sequence: Synthetic oligonucleotide
  Antisense strand to SEQ ID NO: 1020270
auuaguaaaguaguacgca

SEQ ID NO: 1020272 - RNA, 19 nt, Artificial Sequence
  Description of Artificial Sequence: Synthetic oligonucleotide
  Sense strand starting at position 671 of SEQ ID NO: 914650
aggaacugauauucuguau

SEQ ID NO: 1020273 - RNA, 19 nt, Artificial Sequence
  Description of Artificial Sequence: Synthetic oligonucleotide
  Antisense strand to SEQ ID NO: 1020272
auacagaauaucaguuccu

SEQ ID NO: 1020274 - RNA, 19 nt, Artificial Sequence
  Description of Artificial Sequence: Synthetic oligonucleotide
  Sense strand starting at position 726 of SEQ ID NO: 914650
aggagucuugauggcuauu

SEQ ID NO: 1020275 - RNA, 19 nt, Artificial Sequence
  Description of Artificial Sequence: Synthetic oligonucleotide
  Antisense strand to SEQ ID NO: 1020274
aauagccaucaagacuccu

SEQ ID NO: 1020276 - RNA, 19 nt, Artificial Sequence
  Description of Artificial Sequence: Synthetic oligonucleotide
  Sense strand starting at position 737 of SEQ ID NO: 914650
uggcuauugccuuaauuau

SEQ ID NO: 1020277 - RNA, 19 nt, Artificial Sequence
  Description of Artificial Sequence: Synthetic oligonucleotide
  Antisense strand to SEQ ID NO: 1020276
auaauuaaggcaauagcca

SEQ ID NO: 1020278 - RNA, 19 nt, Artificial Sequence
  Description of Artificial Sequence: Synthetic oligonucleotide
  Sense strand starting at position 1119 of SEQ ID NO: 914650
uucuuagaaggcugucaau

SEQ ID NO: 1020279 - RNA, 19 nt, Artificial Sequence
  Description of Artificial Sequence: Synthetic oligonucleotide
  Antisense strand to SEQ ID NO: 1020278
auugacagccuucuaagaa

SEQ ID NO: 1020280 - RNA, 19 nt, Artificial Sequence
  Description of Artificial Sequence: Synthetic oligonucleotide
  Sense strand starting at position 1185 of SEQ ID NO: 914650
acuuauuugcuguguuaac

SEQ ID NO: 1020281 - RNA, 19 nt, Artificial Sequence
  Description of Artificial Sequence: Synthetic oligonucleotide
  Antisense strand to SEQ ID NO: 1020280
guuaacacagcaaauaagu

SEQ ID NO: 1020282 - RNA, 19 nt, Artificial Sequence
  Description of Artificial Sequence: Synthetic oligonucleotide
  Sense strand starting at position 1186 of SEQ ID NO: 914650
cuuauuugcuguguuaacu

SEQ ID NO: 1020283 - RNA, 19 nt, Artificial Sequence
  Description of Artificial Sequence: Synthetic oligonucleotide
  Antisense strand to SEQ ID NO: 1020282
aguuaacacagcaaauaag

SEQ ID NO: 1020284 - RNA, 19 nt, Artificial Sequence
  Description of Artificial Sequence: Synthetic oligonucleotide
  Sense strand starting at position 1304 of SEQ ID NO: 914650
gcggcuugacaacgaagaa

SEQ ID NO: 1020285 - RNA, 19 nt, Artificial Sequence
  Description of Artificial Sequence: Synthetic oligonucleotide
  Antisense strand to SEQ ID NO: 1020284
uucuucguugucaagccgc

SEQ ID NO: 1020286 - RNA, 19 nt, Artificial Sequence
  Description of Artificial Sequence: Synthetic oligonucleotide
  Sense strand starting at position 1305 of SEQ ID NO: 914650
cggcuugacaacgaagaau

SEQ ID NO: 1020287 - RNA, 19 nt, Artificial Sequence
  Description of Artificial Sequence: Synthetic oligonucleotide
  Antisense strand to SEQ ID NO: 1020286
auucuucguugucaagccg

SEQ ID NO: 1020288 - RNA, 19 nt, Artificial Sequence
  Description of Artificial Sequence: Synthetic oligonucleotide
  Sense strand starting at position 1486 of SEQ ID NO: 914650
auugcagaucuguaagacu

SEQ ID NO: 1020289 - RNA, 19 nt, Artificial Sequence
  Description of Artificial Sequence: Synthetic oligonucleotide
  Antisense strand to SEQ ID NO: 1020288
agucuuacagaucugcaau

SEQ ID NO: 1020290 - RNA, 19 nt, Artificial Sequence
  Description of Artificial Sequence: Synthetic oligonucleotide
  Sense strand starting at position 1580 of SEQ ID NO: 914650
caaagagacuucguagaac

SEQ ID NO: 1020291 - RNA, 19 nt, Artificial Sequence
  Description of Artificial Sequence: Synthetic oligonucleotide
  Antisense strand to SEQ ID NO: 1020290
guucuacgaagucucuuug

SEQ ID NO: 1020292 - RNA, 19 nt, Artificial Sequence
  Description of Artificial Sequence: Synthetic oligonucleotide
  Sense strand starting at position 1721 of SEQ ID NO: 914650
aaaugucugcccuaggaau

SEQ ID NO: 1020293 - RNA, 19 nt, Artificial Sequence
  Description of Artificial Sequence: Synthetic oligonucleotide
  Antisense strand to SEQ ID NO: 1020292
auuccuagggcagacauuu

SEQ ID NO: 1020294 - RNA, 19 nt, Artificial Sequence
  Description of Artificial Sequence: Synthetic oligonucleotide
  Sense strand starting at position 1832 of SEQ ID NO: 914650
uggagagcucguggaaaga

SEQ ID NO: 1020295 - RNA, 19 nt, Artificial Sequence
  Description of Artificial Sequence: Synthetic oligonucleotide
  Antisense strand to SEQ ID NO: 1020294
ucuuuccacgagcucucca

SEQ ID NO: 1020296 - RNA, 19 nt, Artificial Sequence
  Description of Artificial Sequence: Synthetic oligonucleotide
  Sense strand starting at position 1939 of SEQ ID NO: 914650
uuucccuuccugggaacaa

SEQ ID NO: 1020297 - RNA, 19 nt, Artificial Sequence
  Description of Artificial Sequence: Synthetic oligonucleotide
  Antisense strand to SEQ ID NO: 1020296
uuguucccaggaagggaaa

SEQ ID NO: 1020298 - RNA, 19 nt, Artificial Sequence
  Description of Artificial Sequence: Synthetic oligonucleotide
  Sense strand starting at position 2211 of SEQ ID NO: 914650
ggcagaaaucaucacucuc

SEQ ID NO: 1020299 - RNA, 19 nt, Artificial Sequence
  Description of Artificial Sequence: Synthetic oligonucleotide
  Antisense strand to SEQ ID NO: 1020298
gagagugaugauuucugcc

SEQ ID NO: 1020300 - RNA, 19 nt, Artificial Sequence
  Description of Artificial Sequence: Synthetic oligonucleotide
  Sense strand starting at position 2545 of SEQ ID NO: 914650
agccaagacuuuccaggua

SEQ ID NO: 1020301 - RNA, 19 nt, Artificial Sequence
  Description of Artificial Sequence: Synthetic oligonucleotide
  Antisense strand to SEQ ID NO: 1020300
uaccuggaaagucuuggcu

SEQ ID NO: 1020302 - RNA, 19 nt, Artificial Sequence
  Description of Artificial Sequence: Synthetic oligonucleotide
  Sense strand starting at position 2627 of SEQ ID NO: 914650
uuuguaccacucgagaaga

SEQ ID NO: 1020303 - RNA, 19 nt, Artificial Sequence
  Description of Artificial Sequence: Synthetic oligonucleotide
  Antisense strand to SEQ ID NO: 1020302
ucuucucgagugguacaaa

SEQ ID NO: 1020304 - RNA, 19 nt, Artificial Sequence
  Description of Artificial Sequence: Synthetic oligonucleotide
  Sense strand starting at position 2929 of SEQ ID NO: 914650
gcgcuaaggcgugucugaa

SEQ ID NO: 1020305 - RNA, 19 nt, Artificial Sequence
  Description of Artificial Sequence: Synthetic oligonucleotide
  Antisense strand to SEQ ID NO: 1020304
uucagacacgccuuagcgc

SEQ ID NO: 1020306 - RNA, 19 nt, Artificial Sequence
  Description of Artificial Sequence: Synthetic oligonucleotide
  Sense strand starting at position 2939 of SEQ ID NO: 914650
gugucugaagccgaacuua

SEQ ID NO: 1020307 - RNA, 19 nt, Artificial Sequence
  Description of Artificial Sequence: Synthetic oligonucleotide
  Antisense strand to SEQ ID NO: 1020306
uaaguucggcuucagacac

SEQ ID NO: 1020308 - RNA, 19 nt, Artificial Sequence
  Description of Artificial Sequence: Synthetic oligonucleotide
  Sense strand starting at position 3163 of SEQ ID NO: 914650
cgccgagcgcugucgagau

SEQ ID NO: 1020309 - RNA, 19 nt, Artificial Sequence
  Description of Artificial Sequence: Synthetic oligonucleotide
  Antisense strand to SEQ ID NO: 1020308
aucucgacagcgcucggcg

SEQ ID NO: 1020310 - RNA, 19 nt, Artificial Sequence
  Description of Artificial Sequence: Synthetic oligonucleotide
  Sense strand starting at position 3181 of SEQ ID NO: 914650
ugaggguugcgugcguaaa

SEQ ID NO: 1020311 - RNA, 19 nt, Artificial Sequence
  Description of Artificial Sequence: Synthetic oligonucleotide
  Antisense strand to SEQ ID NO: 1020310
uuuacgcacgcaacccuca

SEQ ID NO: 1020312 - RNA, 19 nt, Artificial Sequence
  Description of Artificial Sequence: Synthetic oligonucleotide
  Sense strand starting at position 3276 of SEQ ID NO: 914650
ugccaugcuccaguuguau

SEQ ID NO: 1020313 - RNA, 19 nt, Artificial Sequence
  Description of Artificial Sequence: Synthetic oligonucleotide
  Antisense strand to SEQ ID NO: 1020312
auacaacuggagcauggca

SEQ ID NO: 1020314 - RNA, 19 nt, Artificial Sequence
  Description of Artificial Sequence: Synthetic oligonucleotide
  Sense strand starting at position 3754 of SEQ ID NO: 914650
gcggguguuuggaggauuu

SEQ ID NO: 1020315 - RNA, 19 nt, Artificial Sequence
  Description of Artificial Sequence: Synthetic oligonucleotide
  Antisense strand to SEQ ID NO: 1020314
aaauccuccaaacacccgc

SEQ ID NO: 1020316 - RNA, 19 nt, Artificial Sequence
  Description of Artificial Sequence: Synthetic oligonucleotide
  Sense strand starting at position 3812 of SEQ ID NO: 914650
uuaagugcacguuaaacau

SEQ ID NO: 1020317 - RNA, 19 nt, Artificial Sequence
  Description of Artificial Sequence: Synthetic oligonucleotide
  Antisense strand to SEQ ID NO: 1020316
auguuuaacgugcacuuaa

SEQ ID NO: 1020318 - RNA, 19 nt, Artificial Sequence
  Description of Artificial Sequence: Synthetic oligonucleotide
  Sense strand starting at position 3819 of SEQ ID NO: 914650
cacguuaaacauugucagu

SEQ ID NO: 1020319 - RNA, 19 nt, Artificial Sequence
  Description of Artificial Sequence: Synthetic oligonucleotide
  Antisense strand to SEQ ID NO: 1020318
acugacaauguuuaacgug

SEQ ID NO: 1020320 - RNA, 19 nt, Artificial Sequence
  Description of Artificial Sequence: Synthetic oligonucleotide
  Sense strand starting at position 3824 of SEQ ID NO: 914650
uaaacauugucaguugugu

SEQ ID NO: 1020321 - RNA, 19 nt, Artificial Sequence
  Description of Artificial Sequence: Synthetic oligonucleotide
  Antisense strand to SEQ ID NO: 1020320
acacaacugacaauguuua

SEQ ID NO: 1020322 - RNA, 19 nt, Artificial Sequence
  Description of Artificial Sequence: Synthetic oligonucleotide
  Sense strand starting at position 3913 of SEQ ID NO: 914650
uuauacuuaccagguaaug

SEQ ID NO: 1020323 - RNA, 19 nt, Artificial Sequence
  Description of Artificial Sequence: Synthetic oligonucleotide
  Antisense strand to SEQ ID NO: 1020322
cauuaccugguaaguauaa

SEQ ID NO: 1020324 - RNA, 19 nt, Artificial Sequence
  Description of Artificial Sequence: Synthetic oligonucleotide
  Sense strand starting at position 3924 of SEQ ID NO: 914650
agguaauguauugaugagu

SEQ ID NO: 1020325 - RNA, 19 nt, Artificial Sequence
  Description of Artificial Sequence: Synthetic oligonucleotide
  Antisense strand to SEQ ID NO: 1020324
acucaucaauacauuaccu

SEQ ID NO: 1020326 - RNA, 19 nt, Artificial Sequence
  Description of Artificial Sequence: Synthetic oligonucleotide
  Sense strand starting at position 3929 of SEQ ID NO: 914650
auguauugaugaguaccuu

SEQ ID NO: 1020327 - RNA, 19 nt, Artificial Sequence
  Description of Artificial Sequence: Synthetic oligonucleotide
  Antisense strand to SEQ ID NO: 1020326
aagguacucaucaauacau

SEQ ID NO: 1020328 - RNA, 19 nt, Artificial Sequence
  Description of Artificial Sequence: Synthetic oligonucleotide
  Sense strand starting at position 3930 of SEQ ID NO: 914650
uguauugaugaguaccuua

SEQ ID NO: 1020329 - RNA, 19 nt, Artificial Sequence
  Description of Artificial Sequence: Synthetic oligonucleotide
  Antisense strand to SEQ ID NO: 1020328
uaagguacucaucaauaca

SEQ ID NO: 1020330 - RNA, 19 nt, Artificial Sequence
  Description of Artificial Sequence: Synthetic oligonucleotide
  Sense strand starting at position 3935 of SEQ ID NO: 914650
ugaugaguaccuuauucca

SEQ ID NO: 1020331 - RNA, 19 nt, Artificial Sequence
  Description of Artificial Sequence: Synthetic oligonucleotide
  Antisense strand to SEQ ID NO: 1020330
uggaauaagguacucauca

SEQ ID NO: 1020332 - RNA, 19 nt, Artificial Sequence
  Description of Artificial Sequence: Synthetic oligonucleotide
  Sense strand starting at position 3956 of SEQ ID NO: 914650
guuugcgacauuguagcua

SEQ ID NO: 1020333 - RNA, 19 nt, Artificial Sequence
  Description of Artificial Sequence: Synthetic oligonucleotide
  Antisense strand to SEQ ID NO: 1020332
uagcuacaaugucgcaaac

SEQ ID NO: 1020334 - RNA, 19 nt, Artificial Sequence
  Description of Artificial Sequence: Synthetic oligonucleotide
  Sense strand starting at position 5 of SEQ ID NO: 914651
caguuugccagaggaggaa

SEQ ID NO: 1020335 - RNA, 19 nt, Artificial Sequence
  Description of Artificial Sequence: Synthetic oligonucleotide
  Antisense strand to SEQ ID NO: 1020334
uuccuccucuggcaaacug

SEQ ID NO: 1020336 - RNA, 19 nt, Artificial Sequence
  Description of Artificial Sequence: Synthetic oligonucleotide
  Sense strand starting at position 110 of SEQ ID NO: 914651
cuguuuacgggccaaauca

SEQ ID NO: 1020337 - RNA, 19 nt, Artificial Sequence
  Description of Artificial Sequence: Synthetic oligonucleotide
  Antisense strand to SEQ ID NO: 1020336
ugauuuggcccguaaacag

SEQ ID NO: 1020338 - RNA, 19 nt, Artificial Sequence
  Description of Artificial Sequence: Synthetic oligonucleotide
  Sense strand starting at position 209 of SEQ ID NO: 914651
agugguaucauugggaaga

SEQ ID NO: 1020339 - RNA, 19 nt, Artificial Sequence
  Description of Artificial Sequence: Synthetic oligonucleotide
  Antisense strand to SEQ ID NO: 1020338
ucuucccaaugauaccacu

SEQ ID NO: 1020340 - RNA, 19 nt, Artificial Sequence
  Description of Artificial Sequence: Synthetic oligonucleotide
  Sense strand starting at position 242 of SEQ ID NO: 914651
uccuuaaagccucagugau

SEQ ID NO: 1020341 - RNA, 19 nt, Artificial Sequence
  Description of Artificial Sequence: Synthetic oligonucleotide
  Antisense strand to SEQ ID NO: 1020340
aucacugaggcuuuaagga

SEQ ID NO: 1020342 - RNA, 19 nt, Artificial Sequence
  Description of Artificial Sequence: Synthetic oligonucleotide
  Sense strand starting at position 244 of SEQ ID NO: 914651
cuuaaagccucagugauac

SEQ ID NO: 1020343 - RNA, 19 nt, Artificial Sequence
  Description of Artificial Sequence: Synthetic oligonucleotide
  Antisense strand to SEQ ID NO: 1020342
guaucacugaggcuuuaag

SEQ ID NO: 1020344 - RNA, 19 nt, Artificial Sequence
  Description of Artificial Sequence: Synthetic oligonucleotide
  Sense strand starting at position 348 of SEQ ID NO: 914651
aggagaacccaguggagua

SEQ ID NO: 1020345 - RNA, 19 nt, Artificial Sequence
  Description of Artificial Sequence: Synthetic oligonucleotide
  Antisense strand to SEQ ID NO: 1020344
uacuccacuggguucuccu

SEQ ID NO: 1020346 - RNA, 19 nt, Artificial Sequence
  Description of Artificial Sequence: Synthetic oligonucleotide
  Sense strand starting at position 410 of SEQ ID NO: 914651
gaggguuuguucuucugag

SEQ ID NO: 1020347 - RNA, 19 nt, Artificial Sequence
  Description of Artificial Sequence: Synthetic oligonucleotide
  Antisense strand to SEQ ID NO: 1020346
cucagaagaacaaacccuc

SEQ ID NO: 1020348 - RNA, 19 nt, Artificial Sequence
  Description of Artificial Sequence: Synthetic oligonucleotide
  Sense strand starting at position 411 of SEQ ID NO: 914651
aggguuuguucuucugaga

SEQ ID NO: 1020349 - RNA, 19 nt, Artificial Sequence
  Description of Artificial Sequence: Synthetic oligonucleotide
  Antisense strand to SEQ ID NO: 1020348
ucucagaagaacaaacccu

SEQ ID NO: 1020350 - RNA, 19 nt, Artificial Sequence
  Description of Artificial Sequence: Synthetic oligonucleotide
  Sense strand starting at position 948 of SEQ ID NO: 914651
gcccgagaauaccuuagau

SEQ ID NO: 1020351 - RNA, 19 nt, Artificial Sequence
  Description of Artificial Sequence: Synthetic oligonucleotide
  Antisense strand to SEQ ID NO: 1020350
aucuaagguauucucgggc

SEQ ID NO: 1020352 - RNA, 19 nt, Artificial Sequence
  Description of Artificial Sequence: Synthetic oligonucleotide
  Sense strand starting at position 1141 of SEQ ID NO: 914651
ccuagugaugucugacaca

SEQ ID NO: 1020353 - RNA, 19 nt, Artificial Sequence
  Description of Artificial Sequence: Synthetic oligonucleotide
  Antisense strand to SEQ ID NO: 1020352
ugugucagacaucacuagg

SEQ ID NO: 1020354 - RNA, 19 nt, Artificial Sequence
  Description of Artificial Sequence: Synthetic oligonucleotide
  Sense strand starting at position 1423 of SEQ ID NO: 914651
gggaguucucuguaucgag

SEQ ID NO: 1020355 - RNA, 19 nt, Artificial Sequence
  Description of Artificial Sequence: Synthetic oligonucleotide
  Antisense strand to SEQ ID NO: 1020354
cucgauacagagaacuccc

SEQ ID NO: 1020356 - RNA, 19 nt, Artificial Sequence
  Description of Artificial Sequence: Synthetic oligonucleotide
  Sense strand starting at position 1512 of SEQ ID NO: 914651
uuccuugaagcugaauauu

SEQ ID NO: 1020357 - RNA, 19 nt, Artificial Sequence
  Description of Artificial Sequence: Synthetic oligonucleotide
  Antisense strand to SEQ ID NO: 1020356
aauauucagcuucaaggaa

SEQ ID NO: 1020358 - RNA, 19 nt, Artificial Sequence
  Description of Artificial Sequence: Synthetic oligonucleotide
  Sense strand starting at position 1596 of SEQ ID NO: 914651
gggcgcguucucuuaauuc

SEQ ID NO: 1020359 - RNA, 19 nt, Artificial Sequence
  Description of Artificial Sequence: Synthetic oligonucleotide
  Antisense strand to SEQ ID NO: 1020358
gaauuaagagaacgcgccc

SEQ ID NO: 1020360 - RNA, 19 nt, Artificial Sequence
  Description of Artificial Sequence: Synthetic oligonucleotide
  Sense strand starting at position 1906 of SEQ ID NO: 914651
ggaggcuuucaaggcaaga

SEQ ID NO: 1020361 - RNA, 19 nt, Artificial Sequence
  Description of Artificial Sequence: Synthetic oligonucleotide
  Antisense strand to SEQ ID NO: 1020360
ucuugccuugaaagccucc

SEQ ID NO: 1020362 - RNA, 19 nt, Artificial Sequence
  Description of Artificial Sequence: Synthetic oligonucleotide
  Sense strand starting at position 2038 of SEQ ID NO: 914651
cccuuugaugacggugaca

SEQ ID NO: 1020363 - RNA, 19 nt, Artificial Sequence
  Description of Artificial Sequence: Synthetic oligonucleotide
  Antisense strand to SEQ ID NO: 1020362
ugucaccgucaucaaaggg

SEQ ID NO: 1020364 - RNA, 19 nt, Artificial Sequence
  Description of Artificial Sequence: Synthetic oligonucleotide
  Sense strand starting at position 2050 of SEQ ID NO: 914651
ggugacauacagugugaca

SEQ ID NO: 1020365 - RNA, 19 nt, Artificial Sequence
  Description of Artificial Sequence: Synthetic oligonucleotide
  Antisense strand to SEQ ID NO: 1020364
ugucacacuguaugucacc

SEQ ID NO: 1020366 - RNA, 19 nt, Artificial Sequence
  Description of Artificial Sequence: Synthetic oligonucleotide
  Sense strand starting at position 2085 of SEQ ID NO: 914651
gggaaaugguucucauaug

SEQ ID NO: 1020367 - RNA, 19 nt, Artificial Sequence
  Description of Artificial Sequence: Synthetic oligonucleotide
  Antisense strand to SEQ ID NO: 1020366
cauaugagaaccauuuccc

SEQ ID NO: 1020368 - RNA, 19 nt, Artificial Sequence
  Description of Artificial Sequence: Synthetic oligonucleotide
  Sense strand starting at position 2091 of SEQ ID NO: 914651
ugguucucauaugcagaaa

SEQ ID NO: 1020369 - RNA, 19 nt, Artificial Sequence
  Description of Artificial Sequence: Synthetic oligonucleotide
  Antisense strand to SEQ ID NO: 1020368
uuucugcauaugagaacca

SEQ ID NO: 1020370 - RNA, 19 nt, Artificial Sequence
  Description of Artificial Sequence: Synthetic oligonucleotide
  Sense strand starting at position 2092 of SEQ ID NO: 914651
gguucucauaugcagaaag

SEQ ID NO: 1020371 - RNA, 19 nt, Artificial Sequence
  Description of Artificial Sequence: Synthetic oligonucleotide
  Antisense strand to SEQ ID NO: 1020370
cuuucugcauaugagaacc

SEQ ID NO: 1020372 - RNA, 19 nt, Artificial Sequence
  Description of Artificial Sequence: Synthetic oligonucleotide
  Sense strand starting at position 2094 of SEQ ID NO: 914651
uucucauaugcagaaaguu

SEQ ID NO: 1020373 - RNA, 19 nt, Artificial Sequence
  Description of Artificial Sequence: Synthetic oligonucleotide
  Antisense strand to SEQ ID NO: 1020372
aacuuucugcauaugagaa

SEQ ID NO: 1020374 - RNA, 19 nt, Artificial Sequence
  Description of Artificial Sequence: Synthetic oligonucleotide
  Sense strand starting at position 2229 of SEQ ID NO: 914651
gugcguuuggugaggaauu

SEQ ID NO: 1020375 - RNA, 19 nt, Artificial Sequence
  Description of Artificial Sequence: Synthetic oligonucleotide
  Antisense strand to SEQ ID NO: 1020374
aauuccucaccaaacgcac

SEQ ID NO: 1020376 - RNA, 19 nt, Artificial Sequence
  Description of Artificial Sequence: Synthetic oligonucleotide
  Sense strand starting at position 2342 of SEQ ID NO: 914651
guaagaucaugucuuucuc

SEQ ID NO: 1020377 - RNA, 19 nt, Artificial Sequence
  Description of Artificial Sequence: Synthetic oligonucleotide
  Antisense strand to SEQ ID NO: 1020376
gagaaagacaugaucuuac

SEQ ID NO: 1020378 - RNA, 19 nt, Artificial Sequence
  Description of Artificial Sequence: Synthetic oligonucleotide
  Sense strand starting at position 2403 of SEQ ID NO: 914651
guguuaagaccucagguuu

SEQ ID NO: 1020379 - RNA, 19 nt, Artificial Sequence
  Description of Artificial Sequence: Synthetic oligonucleotide
  Antisense strand to SEQ ID NO: 1020378
aaaccugaggucuuaacac

SEQ ID NO: 1020380 - RNA, 19 nt, Artificial Sequence
  Description of Artificial Sequence: Synthetic oligonucleotide
  Sense strand starting at position 2511 of SEQ ID NO: 914651
augaguguaauguaaguga

SEQ ID NO: 1020381 - RNA, 19 nt, Artificial Sequence
  Description of Artificial Sequence: Synthetic oligonucleotide
  Antisense strand to SEQ ID NO: 1020380
ucacuuacauuacacucau

SEQ ID NO: 1020382 - RNA, 19 nt, Artificial Sequence
  Description of Artificial Sequence: Synthetic oligonucleotide
  Sense strand starting at position 2563 of SEQ ID NO: 914651
ggugucucgcugagaacug

SEQ ID NO: 1020383 - RNA, 19 nt, Artificial Sequence
  Description of Artificial Sequence: Synthetic oligonucleotide
  Antisense strand to SEQ ID NO: 1020382
caguucucagcgagacacc

SEQ ID NO: 1020384 - RNA, 19 nt, Artificial Sequence
  Description of Artificial Sequence: Synthetic oligonucleotide
  Sense strand starting at position 2593 of SEQ ID NO: 914651
guacuucuucgugacaaca

SEQ ID NO: 1020385 - RNA, 19 nt, Artificial Sequence
  Description of Artificial Sequence: Synthetic oligonucleotide
  Antisense strand to SEQ ID NO: 1020384
uguugucacgaagaaguac

SEQ ID NO: 1020386 - RNA, 19 nt, Artificial Sequence
  Description of Artificial Sequence: Synthetic oligonucleotide
  Sense strand starting at position 2619 of SEQ ID NO: 914651
ugccuaauuuaggcugcaa

SEQ ID NO: 1020387 - RNA, 19 nt, Artificial Sequence
  Description of Artificial Sequence: Synthetic oligonucleotide
  Antisense strand to SEQ ID NO: 1020386
uugcagccuaaauuaggca

SEQ ID NO: 1020388 - RNA, 19 nt, Artificial Sequence
  Description of Artificial Sequence: Synthetic oligonucleotide
  Sense strand starting at position 2645 of SEQ ID NO: 914651
ugucccaggucaucuauga

SEQ ID NO: 1020389 - RNA, 19 nt, Artificial Sequence
  Description of Artificial Sequence: Synthetic oligonucleotide
  Antisense strand to SEQ ID NO: 1020388
ucauagaugaccugggaca

SEQ ID NO: 1020390 - RNA, 19 nt, Artificial Sequence
  Description of Artificial Sequence: Synthetic oligonucleotide
  Sense strand starting at position 2649 of SEQ ID NO: 914651
ccaggucaucuaugagaca

SEQ ID NO: 1020391 - RNA, 19 nt, Artificial Sequence
  Description of Artificial Sequence: Synthetic oligonucleotide
  Antisense strand to SEQ ID NO: 1020390
ugucucauagaugaccugg

SEQ ID NO: 1020392 - RNA, 19 nt, Artificial Sequence
  Description of Artificial Sequence: Synthetic oligonucleotide
  Sense strand starting at position 2835 of SEQ ID NO: 914651
gcauauagucugcagaaac

SEQ ID NO: 1020393 - RNA, 19 nt, Artificial Sequence
  Description of Artificial Sequence: Synthetic oligonucleotide
  Antisense strand to SEQ ID NO: 1020392
guuucugcagacuauaugc

SEQ ID NO: 1020394 - RNA, 19 nt, Artificial Sequence
  Description of Artificial Sequence: Synthetic oligonucleotide
  Sense strand starting at position 3104 of SEQ ID NO: 914651
uggguuaggcucuagacca

SEQ ID NO: 1020395 - RNA, 19 nt, Artificial Sequence
  Description of Artificial Sequence: Synthetic oligonucleotide
  Antisense strand to SEQ ID NO: 1020394
uggucuagagccuaaccca

SEQ ID NO: 1020396 - RNA, 19 nt, Artificial Sequence
  Description of Artificial Sequence: Synthetic oligonucleotide
  Sense strand starting at position 3165 of SEQ ID NO: 914651
auaaaucuuccggguaaga

SEQ ID NO: 1020397 - RNA, 19 nt, Artificial Sequence
  Description of Artificial Sequence: Synthetic oligonucleotide
  Antisense strand to SEQ ID NO: 1020396
ucuuacccggaagauuuau

SEQ ID NO: 1020398 - RNA, 19 nt, Artificial Sequence
  Description of Artificial Sequence: Synthetic oligonucleotide
  Sense strand starting at position 3167 of SEQ ID NO: 914651
aaaucuuccggguaagauu

SEQ ID NO: 1020399 - RNA, 19 nt, Artificial Sequence
  Description of Artificial Sequence: Synthetic oligonucleotide
  Antisense strand to SEQ ID NO: 1020398
aaucuuacccggaagauuu

SEQ ID NO: 1020400 - RNA, 19 nt, Artificial Sequence
  Description of Artificial Sequence: Synthetic oligonucleotide
  Sense strand starting at position 3210 of SEQ ID NO: 914651
uuagaaaggguuugcaagu

SEQ ID NO: 1020401 - RNA, 19 nt, Artificial Sequence
  Description of Artificial Sequence: Synthetic oligonucleotide
  Antisense strand to SEQ ID NO: 1020400
acuugcaaacccuuucuaa

SEQ ID NO: 1020402 - RNA, 19 nt, Artificial Sequence
  Description of Artificial Sequence: Synthetic oligonucleotide
  Sense strand starting at position 3211 of SEQ ID NO: 914651
uagaaaggguuugcaagua

SEQ ID NO: 1020403 - RNA, 19 nt, Artificial Sequence
  Description of Artificial Sequence: Synthetic oligonucleotide
  Antisense strand to SEQ ID NO: 1020402
uacuugcaaacccuuucua

SEQ ID NO: 1020404 - RNA, 19 nt, Artificial Sequence
  Description of Artificial Sequence: Synthetic oligonucleotide
  Sense strand starting at position 3386 of SEQ ID NO: 914651
accaguguuucuuucugaa

SEQ ID NO: 1020405 - RNA, 19 nt, Artificial Sequence
  Description of Artificial Sequence: Synthetic oligonucleotide
  Antisense strand to SEQ ID NO: 1020404
uucagaaagaaacacuggu

SEQ ID NO: 1020406 - RNA, 19 nt, Artificial Sequence
  Description of Artificial Sequence: Synthetic oligonucleotide
  Sense strand starting at position 3410 of SEQ ID NO: 914651
acauucuucucaguggaga

SEQ ID NO: 1020407 - RNA, 19 nt, Artificial Sequence
  Description of Artificial Sequence: Synthetic oligonucleotide
  Antisense strand to SEQ ID NO: 1020406
ucuccacugagaagaaugu

SEQ ID NO: 1020408 - RNA, 19 nt, Artificial Sequence
  Description of Artificial Sequence: Synthetic oligonucleotide
  Sense strand starting at position 3411 of SEQ ID NO: 914651
cauucuucucaguggagag

SEQ ID NO: 1020409 - RNA, 19 nt, Artificial Sequence
  Description of Artificial Sequence: Synthetic oligonucleotide
  Antisense strand to SEQ ID NO: 1020408
cucuccacugagaagaaug

SEQ ID NO: 1020410 - RNA, 19 nt, Artificial Sequence
  Description of Artificial Sequence: Synthetic oligonucleotide
  Sense strand starting at position 3874 of SEQ ID NO: 914651
gucuucugacaauggaugu

SEQ ID NO: 1020411 - RNA, 19 nt, Artificial Sequence
  Description of Artificial Sequence: Synthetic oligonucleotide
  Antisense strand to SEQ ID NO: 1020410
acauccauugucagaagac

SEQ ID NO: 1020412 - RNA, 19 nt, Artificial Sequence
  Description of Artificial Sequence: Synthetic oligonucleotide
  Sense strand starting at position 3973 of SEQ ID NO: 914651
gcuucuggaucaguggaua

SEQ ID NO: 1020413 - RNA, 19 nt, Artificial Sequence
  Description of Artificial Sequence: Synthetic oligonucleotide
  Antisense strand to SEQ ID NO: 1020412
uauccacugauccagaagc

SEQ ID NO: 1020414 - RNA, 19 nt, Artificial Sequence
  Description of Artificial Sequence: Synthetic oligonucleotide
  Sense strand starting at position 25 of SEQ ID NO: 914652
ccuucuuuggguugggaga

SEQ ID NO: 1020415 - RNA, 19 nt, Artificial Sequence
  Description of Artificial Sequence: Synthetic oligonucleotide
  Antisense strand to SEQ ID NO: 1020414
ucucccaacccaaagaagg

SEQ ID NO: 1020416 - RNA, 19 nt, Artificial Sequence
  Description of Artificial Sequence: Synthetic oligonucleotide
  Sense strand starting at position 26 of SEQ ID NO: 914652
cuucuuuggguugggagaa

SEQ ID NO: 1020417 - RNA, 19 nt, Artificial Sequence
  Description of Artificial Sequence: Synthetic oligonucleotide
  Antisense strand to SEQ ID NO: 1020416
uucucccaacccaaagaag

SEQ ID NO: 1020418 - RNA, 19 nt, Artificial Sequence
  Description of Artificial Sequence: Synthetic oligonucleotide
  Sense strand starting at position 52 of SEQ ID NO: 914652
gugaauuccacacggaaga

SEQ ID NO: 1020419 - RNA, 19 nt, Artificial Sequence
  Description of Artificial Sequence: Synthetic oligonucleotide
  Antisense strand to SEQ ID NO: 1020418
ucuuccguguggaauucac

SEQ ID NO: 1020420 - RNA, 19 nt, Artificial Sequence
  Description of Artificial Sequence: Synthetic oligonucleotide
  Sense strand starting at position 216 of SEQ ID NO: 914652
ugguaaauugaauggcauu

SEQ ID NO: 1020421 - RNA, 19 nt, Artificial Sequence
  Description of Artificial Sequence: Synthetic oligonucleotide
  Antisense strand to SEQ ID NO: 1020420
aaugccauucaauuuacca

SEQ ID NO: 1020422 - RNA, 19 nt, Artificial Sequence
  Description of Artificial Sequence: Synthetic oligonucleotide
  Sense strand starting at position 217 of SEQ ID NO: 914652
gguaaauugaauggcauua

SEQ ID NO: 1020423 - RNA, 19 nt, Artificial Sequence
  Description of Artificial Sequence: Synthetic oligonucleotide
  Antisense strand to SEQ ID NO: 1020422
uaaugccauucaauuuacc

SEQ ID NO: 1020424 - RNA, 19 nt, Artificial Sequence
  Description of Artificial Sequence: Synthetic oligonucleotide
  Sense strand starting at position 364 of SEQ ID NO: 914652
ucugauucccuuugguaau

SEQ ID NO: 1020425 - RNA, 19 nt, Artificial Sequence
  Description of Artificial Sequence: Synthetic oligonucleotide
  Antisense strand to SEQ ID NO: 1020424
auuaccaaagggaaucaga

SEQ ID NO: 1020426 - RNA, 19 nt, Artificial Sequence
  Description of Artificial Sequence: Synthetic oligonucleotide
  Sense strand starting at position 374 of SEQ ID NO: 914652
uuugguaauuccuucuaag

SEQ ID NO: 1020427 - RNA, 19 nt, Artificial Sequence
  Description of Artificial Sequence: Synthetic oligonucleotide
  Antisense strand to SEQ ID NO: 1020426
cuuagaaggaauuaccaaa

SEQ ID NO: 1020428 - RNA, 19 nt, Artificial Sequence
  Description of Artificial Sequence: Synthetic oligonucleotide
  Sense strand starting at position 599 of SEQ ID NO: 914652
gcaguaggugugagaguuc

SEQ ID NO: 1020429 - RNA, 19 nt, Artificial Sequence
  Description of Artificial Sequence: Synthetic oligonucleotide
  Antisense strand to SEQ ID NO: 1020428
gaacucucacaccuacugc

SEQ ID NO: 1020430 - RNA, 19 nt, Artificial Sequence
  Description of Artificial Sequence: Synthetic oligonucleotide
  Sense strand starting at position 664 of SEQ ID NO: 914652
cucuaagguccuugcaaua

SEQ ID NO: 1020431 - RNA, 19 nt, Artificial Sequence
  Description of Artificial Sequence: Synthetic oligonucleotide
  Antisense strand to SEQ ID NO: 1020430
uauugcaaggaccuuagag

SEQ ID NO: 1020432 - RNA, 19 nt, Artificial Sequence
  Description of Artificial Sequence: Synthetic oligonucleotide
  Sense strand starting at position 669 of SEQ ID NO: 914652
agguccuugcaauaauuga

SEQ ID NO: 1020433 - RNA, 19 nt, Artificial Sequence
  Description of Artificial Sequence: Synthetic oligonucleotide
  Antisense strand to SEQ ID NO: 1020432
ucaauuauugcaaggaccu

SEQ ID NO: 1020434 - RNA, 19 nt, Artificial Sequence
  Description of Artificial Sequence: Synthetic oligonucleotide
  Sense strand starting at position 705 of SEQ ID NO: 914652
gacuucuuuaguggaggua

SEQ ID NO: 1020435 - RNA, 19 nt, Artificial Sequence
  Description of Artificial Sequence: Synthetic oligonucleotide
  Antisense strand to SEQ ID NO: 1020434
uaccuccacuaaagaaguc

SEQ ID NO: 1020436 - RNA, 19 nt, Artificial Sequence
  Description of Artificial Sequence: Synthetic oligonucleotide
  Sense strand starting at position 778 of SEQ ID NO: 914652
cacugaggcccagggauau

SEQ ID NO: 1020437 - RNA, 19 nt, Artificial Sequence
  Description of Artificial Sequence: Synthetic oligonucleotide
  Antisense strand to SEQ ID NO: 1020436
auaucccugggccucagug

SEQ ID NO: 1020438 - RNA, 19 nt, Artificial Sequence
  Description of Artificial Sequence: Synthetic oligonucleotide
  Sense strand starting at position 893 of SEQ ID NO: 914652
cugaguuauuaauuacagu

SEQ ID NO: 1020439 - RNA, 19 nt, Artificial Sequence
  Description of Artificial Sequence: Synthetic oligonucleotide
  Antisense strand to SEQ ID NO: 1020438
acuguaauuaauaacucag

SEQ ID NO: 1020440 - RNA, 19 nt, Artificial Sequence
  Description of Artificial Sequence: Synthetic oligonucleotide
  Sense strand starting at position 922 of SEQ ID NO: 914652
gcuccaaaggucuacagua

SEQ ID NO: 1020441 - RNA, 19 nt, Artificial Sequence
  Description of Artificial Sequence: Synthetic oligonucleotide
  Antisense strand to SEQ ID NO: 1020440
uacuguagaccuuuggagc

SEQ ID NO: 1020442 - RNA, 19 nt, Artificial Sequence
  Description of Artificial Sequence: Synthetic oligonucleotide
  Sense strand starting at position 935 of SEQ ID NO: 914652
acaguagauguauaguuua

SEQ ID NO: 1020443 - RNA, 19 nt, Artificial Sequence
  Description of Artificial Sequence: Synthetic oligonucleotide
  Antisense strand to SEQ ID NO: 1020442
uaaacuauacaucuacugu

SEQ ID NO: 1020444 - RNA, 19 nt, Artificial Sequence
  Description of Artificial Sequence: Synthetic oligonucleotide
  Sense strand starting at position 938 of SEQ ID NO: 914652
guagauguauaguuuaucu

SEQ ID NO: 1020445 - RNA, 19 nt, Artificial Sequence
  Description of Artificial Sequence: Synthetic oligonucleotide
  Antisense strand to SEQ ID NO: 1020444
agauaaacuauacaucuac

SEQ ID NO: 1020446 - RNA, 19 nt, Artificial Sequence
  Description of Artificial Sequence: Synthetic oligonucleotide
  Sense strand starting at position 940 of SEQ ID NO: 914652
agauguauaguuuaucucu

SEQ ID NO: 1020447 - RNA, 19 nt, Artificial Sequence
  Description of Artificial Sequence: Synthetic oligonucleotide
  Antisense strand to SEQ ID NO: 1020446
agagauaaacuauacaucu

SEQ ID NO: 1020448 - RNA, 19 nt, Artificial Sequence
  Description of Artificial Sequence: Synthetic oligonucleotide
  Sense strand starting at position 1009 of SEQ ID NO: 914652
guguccuuaggagaaguga

SEQ ID NO: 1020449 - RNA, 19 nt, Artificial Sequence
  Description of Artificial Sequence: Synthetic oligonucleotide
  Antisense strand to SEQ ID NO: 1020448
ucacuucuccuaaggacac

SEQ ID NO: 1020450 - RNA, 19 nt, Artificial Sequence
  Description of Artificial Sequence: Synthetic oligonucleotide
  Sense strand starting at position 1063 of SEQ ID NO: 914652
ccuagugucagcgccagua

SEQ ID NO: 1020451 - RNA, 19 nt, Artificial Sequence
  Description of Artificial Sequence: Synthetic oligonucleotide
  Antisense strand to SEQ ID NO: 1020450
uacuggcgcugacacuagg

SEQ ID NO: 1020452 - RNA, 19 nt, Artificial Sequence
  Description of Artificial Sequence: Synthetic oligonucleotide
  Sense strand starting at position 1114 of SEQ ID NO: 914652
ugcuguucuggacauacuu

SEQ ID NO: 1020453 - RNA, 19 nt, Artificial Sequence
  Description of Artificial Sequence: Synthetic oligonucleotide
  Antisense strand to SEQ ID NO: 1020452
aaguauguccagaacagca

SEQ ID NO: 1020454 - RNA, 19 nt, Artificial Sequence
  Description of Artificial Sequence: Synthetic oligonucleotide
  Sense strand starting at position 1176 of SEQ ID NO: 914652
ugggccuggaguuaugauu

SEQ ID NO: 1020455 - RNA, 19 nt, Artificial Sequence
  Description of Artificial Sequence: Synthetic oligonucleotide
  Antisense strand to SEQ ID NO: 1020454
aaucauaacuccaggccca

SEQ ID NO: 1020456 - RNA, 19 nt, Artificial Sequence
  Description of Artificial Sequence: Synthetic oligonucleotide
  Sense strand starting at position 1280 of SEQ ID NO: 914652
cugugacuuucugcagaca

SEQ ID NO: 1020457 - RNA, 19 nt, Artificial Sequence
  Description of Artificial Sequence: Synthetic oligonucleotide
  Antisense strand to SEQ ID NO: 1020456
ugucugcagaaagucacag

SEQ ID NO: 1020458 - RNA, 19 nt, Artificial Sequence
  Description of Artificial Sequence: Synthetic oligonucleotide
  Sense strand starting at position 1529 of SEQ ID NO: 914652
acuggauauucuuugccca

SEQ ID NO: 1020459 - RNA, 19 nt, Artificial Sequence
  Description of Artificial Sequence: Synthetic oligonucleotide
  Antisense strand to SEQ ID NO: 1020458
ugggcaaagaauauccagu

SEQ ID NO: 1020460 - RNA, 19 nt, Artificial Sequence
  Description of Artificial Sequence: Synthetic oligonucleotide
  Sense strand starting at position 1592 of SEQ ID NO: 914652
caccgauagauccguggaa

SEQ ID NO: 1020461 - RNA, 19 nt, Artificial Sequence
  Description of Artificial Sequence: Synthetic oligonucleotide
  Antisense strand to SEQ ID NO: 1020460
uuccacggaucuaucggug

SEQ ID NO: 1020462 - RNA, 19 nt, Artificial Sequence
  Description of Artificial Sequence: Synthetic oligonucleotide
  Sense strand starting at position 1650 of SEQ ID NO: 914652
cugccuaguaaguaggaaa

SEQ ID NO: 1020463 - RNA, 19 nt, Artificial Sequence
  Description of Artificial Sequence: Synthetic oligonucleotide
  Antisense strand to SEQ ID NO: 1020462
uuuccuacuuacuaggcag

SEQ ID NO: 1020464 - RNA, 19 nt, Artificial Sequence
  Description of Artificial Sequence: Synthetic oligonucleotide
  Sense strand starting at position 1670 of SEQ ID NO: 914652
gcucaagaaugauuaacac

SEQ ID NO: 1020465 - RNA, 19 nt, Artificial Sequence
  Description of Artificial Sequence: Synthetic oligonucleotide
  Antisense strand to SEQ ID NO: 1020464
guguuaaucauucuugagc

SEQ ID NO: 1020466 - RNA, 19 nt, Artificial Sequence
  Description of Artificial Sequence: Synthetic oligonucleotide
  Sense strand starting at position 2006 of SEQ ID NO: 914652
caguuugccagaggaggaa

SEQ ID NO: 1020467 - RNA, 19 nt, Artificial Sequence
  Description of Artificial Sequence: Synthetic oligonucleotide
  Antisense strand to SEQ ID NO: 1020466
uuccuccucuggcaaacug

SEQ ID NO: 1020468 - RNA, 19 nt, Artificial Sequence
  Description of Artificial Sequence: Synthetic oligonucleotide
  Sense strand starting at position 2111 of SEQ ID NO: 914652
cuguuuacgggccaaauca

SEQ ID NO: 1020469 - RNA, 19 nt, Artificial Sequence
  Description of Artificial Sequence: Synthetic oligonucleotide
  Antisense strand to SEQ ID NO: 1020468
ugauuuggcccguaaacag

SEQ ID NO: 1020470 - RNA, 19 nt, Artificial Sequence
  Description of Artificial Sequence: Synthetic oligonucleotide
  Sense strand starting at position 2210 of SEQ ID NO: 914652
agugguaucauugggaaga

SEQ ID NO: 1020471 - RNA, 19 nt, Artificial Sequence
  Description of Artificial Sequence: Synthetic oligonucleotide
  Antisense strand to SEQ ID NO: 1020470
ucuucccaaugauaccacu

SEQ ID NO: 1020472 - RNA, 19 nt, Artificial Sequence
  Description of Artificial Sequence: Synthetic oligonucleotide
  Sense strand starting at position 2243 of SEQ ID NO: 914652
uccuuaaagccucagugau

SEQ ID NO: 1020473 - RNA, 19 nt, Artificial Sequence
  Description of Artificial Sequence: Synthetic oligonucleotide
  Antisense strand to SEQ ID NO: 1020472
aucacugaggcuuuaagga

SEQ ID NO: 1020474 - RNA, 19 nt, Artificial Sequence
  Description of Artificial Sequence: Synthetic oligonucleotide
  Sense strand starting at position 2245 of SEQ ID NO: 914652
cuuaaagccucagugauac

SEQ ID NO: 1020475 - RNA, 19 nt, Artificial Sequence
  Description of Artificial Sequence: Synthetic oligonucleotide
  Antisense strand to SEQ ID NO: 1020474
guaucacugaggcuuuaag

SEQ ID NO: 1020476 - RNA, 19 nt, Artificial Sequence
  Description of Artificial Sequence: Synthetic oligonucleotide
  Sense strand starting at position 2349 of SEQ ID NO: 914652
aggagaacccaguggagua

SEQ ID NO: 1020477 - RNA, 19 nt, Artificial Sequence
  Description of Artificial Sequence: Synthetic oligonucleotide
  Antisense strand to SEQ ID NO: 1020476
uacuccacuggguucuccu

SEQ ID NO: 1020478 - RNA, 19 nt, Artificial Sequence
  Description of Artificial Sequence: Synthetic oligonucleotide
  Sense strand starting at position 2411 of SEQ ID NO: 914652
gaggguuuguucuucugag

SEQ ID NO: 1020479 - RNA, 19 nt, Artificial Sequence
  Description of Artificial Sequence: Synthetic oligonucleotide
  Antisense strand to SEQ ID NO: 1020478
cucagaagaacaaacccuc

SEQ ID NO: 1020480 - RNA, 19 nt, Artificial Sequence
  Description of Artificial Sequence: Synthetic oligonucleotide
  Sense strand starting at position 2412 of SEQ ID NO: 914652
aggguuuguucuucugaga

SEQ ID NO: 1020481 - RNA, 19 nt, Artificial Sequence
  Description of Artificial Sequence: Synthetic oligonucleotide
  Antisense strand to SEQ ID NO: 1020480
ucucagaagaacaaacccu

SEQ ID NO: 1020482 - RNA, 19 nt, Artificial Sequence
  Description of Artificial Sequence: Synthetic oligonucleotide
  Sense strand starting at position 2949 of SEQ ID NO: 914652
gcccgagaauaccuuagau

SEQ ID NO: 1020483 - RNA, 19 nt, Artificial Sequence
  Description of Artificial Sequence: Synthetic oligonucleotide
  Antisense strand to SEQ ID NO: 1020482
aucuaagguauucucgggc

SEQ ID NO: 1020484 - RNA, 19 nt, Artificial Sequence
  Description of Artificial Sequence: Synthetic oligonucleotide
  Sense strand starting at position 3142 of SEQ ID NO: 914652
ccuagugaugucugacaca

SEQ ID NO: 1020485 - RNA, 19 nt, Artificial Sequence
  Description of Artificial Sequence: Synthetic oligonucleotide
  Antisense strand to SEQ ID NO: 1020484
ugugucagacaucacuagg

SEQ ID NO: 1020486 - RNA, 19 nt, Artificial Sequence
  Description of Artificial Sequence: Synthetic oligonucleotide
  Sense strand starting at position 3424 of SEQ ID NO: 914652
gggaguucucuguaucgag

SEQ ID NO: 1020487 - RNA, 19 nt, Artificial Sequence
  Description of Artificial Sequence: Synthetic oligonucleotide
  Antisense strand to SEQ ID NO: 1020486
cucgauacagagaacuccc

SEQ ID NO: 1020488 - RNA, 19 nt, Artificial Sequence
  Description of Artificial Sequence: Synthetic oligonucleotide
  Sense strand starting at position 3513 of SEQ ID NO: 914652
uuccuugaagcugaauauu

SEQ ID NO: 1020489 - RNA, 19 nt, Artificial Sequence
  Description of Artificial Sequence: Synthetic oligonucleotide
  Antisense strand to SEQ ID NO: 1020488
aauauucagcuucaaggaa

SEQ ID NO: 1020490 - RNA, 19 nt, Artificial Sequence
  Description of Artificial Sequence: Synthetic oligonucleotide
  Sense strand starting at position 3597 of SEQ ID NO: 914652
gggcgcguucucuuaauuc

SEQ ID NO: 1020491 - RNA, 19 nt, Artificial Sequence
  Description of Artificial Sequence: Synthetic oligonucleotide
  Antisense strand to SEQ ID NO: 1020490
gaauuaagagaacgcgccc

SEQ ID NO: 1020492 - RNA, 19 nt, Artificial Sequence
  Description of Artificial Sequence: Synthetic oligonucleotide
  Sense strand starting at position 3907 of SEQ ID NO: 914652
ggaggcuuucaaggcaaga

SEQ ID NO: 1020493 - RNA, 19 nt, Artificial Sequence
  Description of Artificial Sequence: Synthetic oligonucleotide
  Antisense strand to SEQ ID NO: 1020492
ucuugccuugaaagccucc

SEQ ID NO: 1020494 - RNA, 19 nt, Artificial Sequence
  Description of Artificial Sequence: Synthetic oligonucleotide
  Sense strand starting at position 412 of SEQ ID NO: 914653
agauuaagaugagagaaau

SEQ ID NO: 1020495 - RNA, 19 nt, Artificial Sequence
  Description of Artificial Sequence: Synthetic oligonucleotide
  Antisense strand to SEQ ID NO: 1020494
auuucucucaucuuaaucu

SEQ ID NO: 1020496 - RNA, 19 nt, Artificial Sequence
  Description of Artificial Sequence: Synthetic oligonucleotide
  Sense strand starting at position 444 of SEQ ID NO: 914653
gauacaagagugugccuuu

SEQ ID NO: 1020497 - RNA, 19 nt, Artificial Sequence
  Description of Artificial Sequence: Synthetic oligonucleotide
  Antisense strand to SEQ ID NO: 1020496
aaaggcacacucuuguauc

SEQ ID NO: 1020498 - RNA, 19 nt, Artificial Sequence
  Description of Artificial Sequence: Synthetic oligonucleotide
  Sense strand starting at position 511 of SEQ ID NO: 914653
aaugacuaagucugcugua

SEQ ID NO: 1020499 - RNA, 19 nt, Artificial Sequence
  Description of Artificial Sequence: Synthetic oligonucleotide
  Antisense strand to SEQ ID NO: 1020498
uacagcagacuuagucauu

SEQ ID NO: 1020500 - RNA, 19 nt, Artificial Sequence
  Description of Artificial Sequence: Synthetic oligonucleotide
  Sense strand starting at position 512 of SEQ ID NO: 914653
augacuaagucugcuguaa

SEQ ID NO: 1020501 - RNA, 19 nt, Artificial Sequence
  Description of Artificial Sequence: Synthetic oligonucleotide
  Antisense strand to SEQ ID NO: 1020500
uuacagcagacuuagucau

SEQ ID NO: 1020502 - RNA, 19 nt, Artificial Sequence
  Description of Artificial Sequence: Synthetic oligonucleotide
  Sense strand starting at position 529 of SEQ ID NO: 914653
aacuacguguugucauaau

SEQ ID NO: 1020503 - RNA, 19 nt, Artificial Sequence
  Description of Artificial Sequence: Synthetic oligonucleotide
  Antisense strand to SEQ ID NO: 1020502
auuaugacaacacguaguu

SEQ ID NO: 1020504 - RNA, 19 nt, Artificial Sequence
  Description of Artificial Sequence: Synthetic oligonucleotide
  Sense strand starting at position 538 of SEQ ID NO: 914653
uugucauaauagguuaaug

SEQ ID NO: 1020505 - RNA, 19 nt, Artificial Sequence
  Description of Artificial Sequence: Synthetic oligonucleotide
  Antisense strand to SEQ ID NO: 1020504
cauuaaccuauuaugacaa

SEQ ID NO: 1020506 - RNA, 19 nt, Artificial Sequence
  Description of Artificial Sequence: Synthetic oligonucleotide
  Sense strand starting at position 879 of SEQ ID NO: 914653
gaggucguuccugaaauau

SEQ ID NO: 1020507 - RNA, 19 nt, Artificial Sequence
  Description of Artificial Sequence: Synthetic oligonucleotide
  Antisense strand to SEQ ID NO: 1020506
auauuucaggaacgaccuc

SEQ ID NO: 1020508 - RNA, 19 nt, Artificial Sequence
  Description of Artificial Sequence: Synthetic oligonucleotide
  Sense strand starting at position 901 of SEQ ID NO: 914653
uaagauguguuaccgaacu

SEQ ID NO: 1020509 - RNA, 19 nt, Artificial Sequence
  Description of Artificial Sequence: Synthetic oligonucleotide
  Antisense strand to SEQ ID NO: 1020508
aguucgguaacacaucuua

SEQ ID NO: 1020510 - RNA, 19 nt, Artificial Sequence
  Description of Artificial Sequence: Synthetic oligonucleotide
  Sense strand starting at position 923 of SEQ ID NO: 914653
cgcuuagagguugagcaua

SEQ ID NO: 1020511 - RNA, 19 nt, Artificial Sequence
  Description of Artificial Sequence: Synthetic oligonucleotide
  Antisense strand to SEQ ID NO: 1020510
uaugcucaaccucuaagcg

SEQ ID NO: 1020512 - RNA, 19 nt, Artificial Sequence
  Description of Artificial Sequence: Synthetic oligonucleotide
  Sense strand starting at position 925 of SEQ ID NO: 914653
cuuagagguugagcauaaa

SEQ ID NO: 1020513 - RNA, 19 nt, Artificial Sequence
  Description of Artificial Sequence: Synthetic oligonucleotide
  Antisense strand to SEQ ID NO: 1020512
uuuaugcucaaccucuaag

SEQ ID NO: 1020514 - RNA, 19 nt, Artificial Sequence
  Description of Artificial Sequence: Synthetic oligonucleotide
  Sense strand starting at position 935 of SEQ ID NO: 914653
gagcauaaacacugaguca

SEQ ID NO: 1020515 - RNA, 19 nt, Artificial Sequence
  Description of Artificial Sequence: Synthetic oligonucleotide
  Antisense strand to SEQ ID NO: 1020514
ugacucaguguuuaugcuc

SEQ ID NO: 1020516 - RNA, 19 nt, Artificial Sequence
  Description of Artificial Sequence: Synthetic oligonucleotide
  Sense strand starting at position 1433 of SEQ ID NO: 914653
gcagccucucggguguuaa

SEQ ID NO: 1020517 - RNA, 19 nt, Artificial Sequence
  Description of Artificial Sequence: Synthetic oligonucleotide
  Antisense strand to SEQ ID NO: 1020516
uuaacacccgagaggcugc

SEQ ID NO: 1020518 - RNA, 19 nt, Artificial Sequence
  Description of Artificial Sequence: Synthetic oligonucleotide
  Sense strand starting at position 2202 of SEQ ID NO: 914653
augaccugucaaugggauu

SEQ ID NO: 1020519 - RNA, 19 nt, Artificial Sequence
  Description of Artificial Sequence: Synthetic oligonucleotide
  Antisense strand to SEQ ID NO: 1020518
aaucccauugacaggucau

SEQ ID NO: 1020520 - RNA, 19 nt, Artificial Sequence
  Description of Artificial Sequence: Synthetic oligonucleotide
  Sense strand starting at position 2251 of SEQ ID NO: 914653
gcccucucccuggauaauu

SEQ ID NO: 1020521 - RNA, 19 nt, Artificial Sequence
  Description of Artificial Sequence: Synthetic oligonucleotide
  Antisense strand to SEQ ID NO: 1020520
aauuauccagggagagggc

SEQ ID NO: 1020522 - RNA, 19 nt, Artificial Sequence
  Description of Artificial Sequence: Synthetic oligonucleotide
  Sense strand starting at position 2259 of SEQ ID NO: 914653
ccuggauaauuguccagaa

SEQ ID NO: 1020523 - RNA, 19 nt, Artificial Sequence
  Description of Artificial Sequence: Synthetic oligonucleotide
  Antisense strand to SEQ ID NO: 1020522
uucuggacaauuauccagg

SEQ ID NO: 1020524 - RNA, 19 nt, Artificial Sequence
  Description of Artificial Sequence: Synthetic oligonucleotide
  Sense strand starting at position 2260 of SEQ ID NO: 914653
cuggauaauuguccagaag

SEQ ID NO: 1020525 - RNA, 19 nt, Artificial Sequence
  Description of Artificial Sequence: Synthetic oligonucleotide
  Antisense strand to SEQ ID NO: 1020524
cuucuggacaauuauccag

SEQ ID NO: 1020526 - RNA, 19 nt, Artificial Sequence
  Description of Artificial Sequence: Synthetic oligonucleotide
  Sense strand starting at position 2439 of SEQ ID NO: 914653
cgggucagauucucaaaga

SEQ ID NO: 1020527 - RNA, 19 nt, Artificial Sequence
  Description of Artificial Sequence: Synthetic oligonucleotide
  Antisense strand to SEQ ID NO: 1020526
ucuuugagaaucugacccg

SEQ ID NO: 1020528 - RNA, 19 nt, Artificial Sequence
  Description of Artificial Sequence: Synthetic oligonucleotide
  Sense strand starting at position 2455 of SEQ ID NO: 914653
agagccagcucuuuaauua

SEQ ID NO: 1020529 - RNA, 19 nt, Artificial Sequence
  Description of Artificial Sequence: Synthetic oligonucleotide
  Antisense strand to SEQ ID NO: 1020528
uaauuaaagagcuggcucu

SEQ ID NO: 1020530 - RNA, 19 nt, Artificial Sequence
  Description of Artificial Sequence: Synthetic oligonucleotide
  Sense strand starting at position 2463 of SEQ ID NO: 914653
cucuuuaauuagguguaau

SEQ ID NO: 1020531 - RNA, 19 nt, Artificial Sequence
  Description of Artificial Sequence: Synthetic oligonucleotide
  Antisense strand to SEQ ID NO: 1020530
auuacaccuaauuaaagag

SEQ ID NO: 1020532 - RNA, 19 nt, Artificial Sequence
  Description of Artificial Sequence: Synthetic oligonucleotide
  Sense strand starting at position 2475 of SEQ ID NO: 914653
guguaauugagagaucgug

SEQ ID NO: 1020533 - RNA, 19 nt, Artificial Sequence
  Description of Artificial Sequence: Synthetic oligonucleotide
  Antisense strand to SEQ ID NO: 1020532
cacgaucucucaauuacac

SEQ ID NO: 1020534 - RNA, 19 nt, Artificial Sequence
  Description of Artificial Sequence: Synthetic oligonucleotide
  Sense strand starting at position 2754 of SEQ ID NO: 914653
gagagaaaccugugccuuc

SEQ ID NO: 1020535 - RNA, 19 nt, Artificial Sequence
  Description of Artificial Sequence: Synthetic oligonucleotide
  Antisense strand to SEQ ID NO: 1020534
gaaggcacagguuucucuc

SEQ ID NO: 1020536 - RNA, 19 nt, Artificial Sequence
  Description of Artificial Sequence: Synthetic oligonucleotide
  Sense strand starting at position 2765 of SEQ ID NO: 914653
gugccuuccggauugcauu

SEQ ID NO: 1020537 - RNA, 19 nt, Artificial Sequence
  Description of Artificial Sequence: Synthetic oligonucleotide
  Antisense strand to SEQ ID NO: 1020536
aaugcaauccggaaggcac

SEQ ID NO: 1020538 - RNA, 19 nt, Artificial Sequence
  Description of Artificial Sequence: Synthetic oligonucleotide
  Sense strand starting at position 2786 of SEQ ID NO: 914653
auguuugaugaagaacguu

SEQ ID NO: 1020539 - RNA, 19 nt, Artificial Sequence
  Description of Artificial Sequence: Synthetic oligonucleotide
  Antisense strand to SEQ ID NO: 1020538
aacguucuucaucaaacau

SEQ ID NO: 1020540 - RNA, 19 nt, Artificial Sequence
  Description of Artificial Sequence: Synthetic oligonucleotide
  Sense strand starting at position 2986 of SEQ ID NO: 914653
cgggcuguugugaggauua

SEQ ID NO: 1020541 - RNA, 19 nt, Artificial Sequence
  Description of Artificial Sequence: Synthetic oligonucleotide
  Antisense strand to SEQ ID NO: 1020540
uaauccucacaacagcccg

SEQ ID NO: 1020542 - RNA, 19 nt, Artificial Sequence
  Description of Artificial Sequence: Synthetic oligonucleotide
  Sense strand starting at position 3061 of SEQ ID NO: 914653
aguggauguucccugaaua

SEQ ID NO: 1020543 - RNA, 19 nt, Artificial Sequence
  Description of Artificial Sequence: Synthetic oligonucleotide
  Antisense strand to SEQ ID NO: 1020542
uauucagggaacauccacu

SEQ ID NO: 1020544 - RNA, 19 nt, Artificial Sequence
  Description of Artificial Sequence: Synthetic oligonucleotide
  Sense strand starting at position 3062 of SEQ ID NO: 914653
guggauguucccugaauaa

SEQ ID NO: 1020545 - RNA, 19 nt, Artificial Sequence
  Description of Artificial Sequence: Synthetic oligonucleotide
  Antisense strand to SEQ ID NO: 1020544
uuauucagggaacauccac

SEQ ID NO: 1020546 - RNA, 19 nt, Artificial Sequence
  Description of Artificial Sequence: Synthetic oligonucleotide
  Sense strand starting at position 3100 of SEQ ID NO: 914653
cuccacuauucuguguuua

SEQ ID NO: 1020547 - RNA, 19 nt, Artificial Sequence
  Description of Artificial Sequence: Synthetic oligonucleotide
  Antisense strand to SEQ ID NO: 1020546
uaaacacagaauaguggag

SEQ ID NO: 1020548 - RNA, 19 nt, Artificial Sequence
  Description of Artificial Sequence: Synthetic oligonucleotide
  Sense strand starting at position 3102 of SEQ ID NO: 914653
ccacuauucuguguuuaug

SEQ ID NO: 1020549 - RNA, 19 nt, Artificial Sequence
  Description of Artificial Sequence: Synthetic oligonucleotide
  Antisense strand to SEQ ID NO: 1020548
cauaaacacagaauagugg

SEQ ID NO: 1020550 - RNA, 19 nt, Artificial Sequence
  Description of Artificial Sequence: Synthetic oligonucleotide
  Sense strand starting at position 3104 of SEQ ID NO: 914653
acuauucuguguuuaugaa

SEQ ID NO: 1020551 - RNA, 19 nt, Artificial Sequence
  Description of Artificial Sequence: Synthetic oligonucleotide
  Antisense strand to SEQ ID NO: 1020550
uucauaaacacagaauagu

SEQ ID NO: 1020552 - RNA, 19 nt, Artificial Sequence
  Description of Artificial Sequence: Synthetic oligonucleotide
  Sense strand starting at position 3105 of SEQ ID NO: 914653
cuauucuguguuuaugaaa

SEQ ID NO: 1020553 - RNA, 19 nt, Artificial Sequence
  Description of Artificial Sequence: Synthetic oligonucleotide
  Antisense strand to SEQ ID NO: 1020552
uuucauaaacacagaauag

SEQ ID NO: 1020554 - RNA, 19 nt, Artificial Sequence
  Description of Artificial Sequence: Synthetic oligonucleotide
  Sense strand starting at position 3122 of SEQ ID NO: 914653
aaaguuggguuagugauaa

SEQ ID NO: 1020555 - RNA, 19 nt, Artificial Sequence
  Description of Artificial Sequence: Synthetic oligonucleotide
  Antisense strand to SEQ ID NO: 1020554
uuaucacuaacccaacuuu

SEQ ID NO: 1020556 - RNA, 19 nt, Artificial Sequence
  Description of Artificial Sequence: Synthetic oligonucleotide
  Sense strand starting at position 3133 of SEQ ID NO: 914653
agugauaauccuuaaaugc

SEQ ID NO: 1020557 - RNA, 19 nt, Artificial Sequence
  Description of Artificial Sequence: Synthetic oligonucleotide
  Antisense strand to SEQ ID NO: 1020556
gcauuuaaggauuaucacu

SEQ ID NO: 1020558 - RNA, 19 nt, Artificial Sequence
  Description of Artificial Sequence: Synthetic oligonucleotide
  Sense strand starting at position 3402 of SEQ ID NO: 914653
acguaauuugcuugcaucu

SEQ ID NO: 1020559 - RNA, 19 nt, Artificial Sequence
  Description of Artificial Sequence: Synthetic oligonucleotide
  Antisense strand to SEQ ID NO: 1020558
agaugcaagcaaauuacgu

SEQ ID NO: 1020560 - RNA, 19 nt, Artificial Sequence
  Description of Artificial Sequence: Synthetic oligonucleotide
  Sense strand starting at position 3439 of SEQ ID NO: 914653
acaacuauugcaugaagua

SEQ ID NO: 1020561 - RNA, 19 nt, Artificial Sequence
  Description of Artificial Sequence: Synthetic oligonucleotide
  Antisense strand to SEQ ID NO: 1020560
uacuucaugcaauaguugu

SEQ ID NO: 1020562 - RNA, 19 nt, Artificial Sequence
  Description of Artificial Sequence: Synthetic oligonucleotide
  Sense strand starting at position 3452 of SEQ ID NO: 914653
gaaguaauguaugccugua

SEQ ID NO: 1020563 - RNA, 19 nt, Artificial Sequence
  Description of Artificial Sequence: Synthetic oligonucleotide
  Antisense strand to SEQ ID NO: 1020562
uacaggcauacauuacuuc

SEQ ID NO: 1020564 - RNA, 19 nt, Artificial Sequence
  Description of Artificial Sequence: Synthetic oligonucleotide
  Sense strand starting at position 3457 of SEQ ID NO: 914653
aauguaugccuguauggaa

SEQ ID NO: 1020565 - RNA, 19 nt, Artificial Sequence
  Description of Artificial Sequence: Synthetic oligonucleotide
  Antisense strand to SEQ ID NO: 1020564
uuccauacaggcauacauu

SEQ ID NO: 1020566 - RNA, 19 nt, Artificial Sequence
  Description of Artificial Sequence: Synthetic oligonucleotide
  Sense strand starting at position 3464 of SEQ ID NO: 914653
gccuguauggaaggaaauu

SEQ ID NO: 1020567 - RNA, 19 nt, Artificial Sequence
  Description of Artificial Sequence: Synthetic oligonucleotide
  Antisense strand to SEQ ID NO: 1020566
aauuuccuuccauacaggc

SEQ ID NO: 1020568 - RNA, 19 nt, Artificial Sequence
  Description of Artificial Sequence: Synthetic oligonucleotide
  Sense strand starting at position 3775 of SEQ ID NO: 914653
cugcuaucacaguacucau

SEQ ID NO: 1020569 - RNA, 19 nt, Artificial Sequence
  Description of Artificial Sequence: Synthetic oligonucleotide
  Antisense strand to SEQ ID NO: 1020568
augaguacugugauagcag

SEQ ID NO: 1020570 - RNA, 19 nt, Artificial Sequence
  Description of Artificial Sequence: Synthetic oligonucleotide
  Sense strand starting at position 3914 of SEQ ID NO: 914653
gaacuuacagucuaguuga

SEQ ID NO: 1020571 - RNA, 19 nt, Artificial Sequence
  Description of Artificial Sequence: Synthetic oligonucleotide
  Antisense strand to SEQ ID NO: 1020570
ucaacuagacuguaaguuc

SEQ ID NO: 1020572 - RNA, 19 nt, Artificial Sequence
  Description of Artificial Sequence: Synthetic oligonucleotide
  Sense strand starting at position 3980 of SEQ ID NO: 914653
gaagucuaguaauucuguu

SEQ ID NO: 1020573 - RNA, 19 nt, Artificial Sequence
  Description of Artificial Sequence: Synthetic oligonucleotide
  Antisense strand to SEQ ID NO: 1020572
aacagaauuacuagacuuc

SEQ ID NO: 1020574 - RNA, 19 nt, Artificial Sequence
  Description of Artificial Sequence: Synthetic oligonucleotide
  Sense strand starting at position 722 of SEQ ID NO: 914654
agaaaugucaaacgaagua

SEQ ID NO: 1020575 - RNA, 19 nt, Artificial Sequence
  Description of Artificial Sequence: Synthetic oligonucleotide
  Antisense strand to SEQ ID NO: 1020574
uacuucguuugacauuucu

SEQ ID NO: 1020576 - RNA, 19 nt, Artificial Sequence
  Description of Artificial Sequence: Synthetic oligonucleotide
  Sense strand starting at position 909 of SEQ ID NO: 914654
ucuggucauuccuuugaau

SEQ ID NO: 1020577 - RNA, 19 nt, Artificial Sequence
  Description of Artificial Sequence: Synthetic oligonucleotide
  Antisense strand to SEQ ID NO: 1020576
auucaaaggaaugaccaga

SEQ ID NO: 1020578 - RNA, 19 nt, Artificial Sequence
  Description of Artificial Sequence: Synthetic oligonucleotide
  Sense strand starting at position 1041 of SEQ ID NO: 914654
aaagaugucguauggaaug

SEQ ID NO: 1020579 - RNA, 19 nt, Artificial Sequence
  Description of Artificial Sequence: Synthetic oligonucleotide
  Antisense strand to SEQ ID NO: 1020578
cauuccauacgacaucuuu

SEQ ID NO: 1020580 - RNA, 19 nt, Artificial Sequence
  Description of Artificial Sequence: Synthetic oligonucleotide
  Sense strand starting at position 1043 of SEQ ID NO: 914654
agaugucguauggaaugua

SEQ ID NO: 1020581 - RNA, 19 nt, Artificial Sequence
  Description of Artificial Sequence: Synthetic oligonucleotide
  Antisense strand to SEQ ID NO: 1020580
uacauuccauacgacaucu

SEQ ID NO: 1020582 - RNA, 19 nt, Artificial Sequence
  Description of Artificial Sequence: Synthetic oligonucleotide
  Sense strand starting at position 1127 of SEQ ID NO: 914654
cgcagacacuaucuaaaua

SEQ ID NO: 1020583 - RNA, 19 nt, Artificial Sequence
  Description of Artificial Sequence: Synthetic oligonucleotide
  Antisense strand to SEQ ID NO: 1020582
uauuuagauagugucugcg

SEQ ID NO: 1020584 - RNA, 19 nt, Artificial Sequence
  Description of Artificial Sequence: Synthetic oligonucleotide
  Sense strand starting at position 1166 of SEQ ID NO: 914654
cuuuauaaggauuaugugu

SEQ ID NO: 1020585 - RNA, 19 nt, Artificial Sequence
  Description of Artificial Sequence: Synthetic oligonucleotide
  Antisense strand to SEQ ID NO: 1020584
acacauaauccuuauaaag

SEQ ID NO: 1020586 - RNA, 19 nt, Artificial Sequence
  Description of Artificial Sequence: Synthetic oligonucleotide
  Sense strand starting at position 1171 of SEQ ID NO: 914654
uaaggauuaugugucaaca

SEQ ID NO: 1020587 - RNA, 19 nt, Artificial Sequence
  Description of Artificial Sequence: Synthetic oligonucleotide
  Antisense strand to SEQ ID NO: 1020586
uguugacacauaauccuua

SEQ ID NO: 1020588 - RNA, 19 nt, Artificial Sequence
  Description of Artificial Sequence: Synthetic oligonucleotide
  Sense strand starting at position 1302 of SEQ ID NO: 914654
ugaagucugucucucacaa

SEQ ID NO: 1020589 - RNA, 19 nt, Artificial Sequence
  Description of Artificial Sequence: Synthetic oligonucleotide
  Antisense strand to SEQ ID NO: 1020588
uugugagagacagacuuca

SEQ ID NO: 1020590 - RNA, 19 nt, Artificial Sequence
  Description of Artificial Sequence: Synthetic oligonucleotide
  Sense strand starting at position 1418 of SEQ ID NO: 914654
augucuucccuugacuaga

SEQ ID NO: 1020591 - RNA, 19 nt, Artificial Sequence
  Description of Artificial Sequence: Synthetic oligonucleotide
  Antisense strand to SEQ ID NO: 1020590
ucuagucaagggaagacau

SEQ ID NO: 1020592 - RNA, 19 nt, Artificial Sequence
  Description of Artificial Sequence: Synthetic oligonucleotide
  Sense strand starting at position 1420 of SEQ ID NO: 914654
gucuucccuugacuagaaa

SEQ ID NO: 1020593 - RNA, 19 nt, Artificial Sequence
  Description of Artificial Sequence: Synthetic oligonucleotide
  Antisense strand to SEQ ID NO: 1020592
uuucuagucaagggaagac

SEQ ID NO: 1020594 - RNA, 19 nt, Artificial Sequence
  Description of Artificial Sequence: Synthetic oligonucleotide
  Sense strand starting at position 1463 of SEQ ID NO: 914654
cgaauuccuccguaauaug

SEQ ID NO: 1020595 - RNA, 19 nt, Artificial Sequence
  Description of Artificial Sequence: Synthetic oligonucleotide
  Antisense strand to SEQ ID NO: 1020594
cauauuacggaggaauucg

SEQ ID NO: 1020596 - RNA, 19 nt, Artificial Sequence
  Description of Artificial Sequence: Synthetic oligonucleotide
  Sense strand starting at position 2047 of SEQ ID NO: 914654
ucucguaaccaauaggacu

SEQ ID NO: 1020597 - RNA, 19 nt, Artificial Sequence
  Description of Artificial Sequence: Synthetic oligonucleotide
  Antisense strand to SEQ ID NO: 1020596
aguccuauugguuacgaga

SEQ ID NO: 1020598 - RNA, 19 nt, Artificial Sequence
  Description of Artificial Sequence: Synthetic oligonucleotide
  Sense strand starting at position 2205 of SEQ ID NO: 914654
gcccgagguagguaauauc

SEQ ID NO: 1020599 - RNA, 19 nt, Artificial Sequence
  Description of Artificial Sequence: Synthetic oligonucleotide
  Antisense strand to SEQ ID NO: 1020598
gauauuaccuaccucgggc

SEQ ID NO: 1020600 - RNA, 19 nt, Artificial Sequence
  Description of Artificial Sequence: Synthetic oligonucleotide
  Sense strand starting at position 2449 of SEQ ID NO: 914654
ugggaucucuuaccuuaau

SEQ ID NO: 1020601 - RNA, 19 nt, Artificial Sequence
  Description of Artificial Sequence: Synthetic oligonucleotide
  Antisense strand to SEQ ID NO: 1020600
auuaagguaagagauccca

SEQ ID NO: 1020602 - RNA, 19 nt, Artificial Sequence
  Description of Artificial Sequence: Synthetic oligonucleotide
  Sense strand starting at position 2450 of SEQ ID NO: 914654
gggaucucuuaccuuaaug

SEQ ID NO: 1020603 - RNA, 19 nt, Artificial Sequence
  Description of Artificial Sequence: Synthetic oligonucleotide
  Antisense strand to SEQ ID NO: 1020602
cauuaagguaagagauccc

SEQ ID NO: 1020604 - RNA, 19 nt, Artificial Sequence
  Description of Artificial Sequence: Synthetic oligonucleotide
  Sense strand starting at position 2517 of SEQ ID NO: 914654
gugguuuggaauuaaaccu

SEQ ID NO: 1020605 - RNA, 19 nt, Artificial Sequence
  Description of Artificial Sequence: Synthetic oligonucleotide
  Antisense strand to SEQ ID NO: 1020604
agguuuaauuccaaaccac

SEQ ID NO: 1020606 - RNA, 19 nt, Artificial Sequence
  Description of Artificial Sequence: Synthetic oligonucleotide
  Sense strand starting at position 2589 of SEQ ID NO: 914654
acuauagcucucugacaag

SEQ ID NO: 1020607 - RNA, 19 nt, Artificial Sequence
  Description of Artificial Sequence: Synthetic oligonucleotide
  Antisense strand to SEQ ID NO: 1020606
cuugucagagagcuauagu

SEQ ID NO: 1020608 - RNA, 19 nt, Artificial Sequence
  Description of Artificial Sequence: Synthetic oligonucleotide
  Sense strand starting at position 2632 of SEQ ID NO: 914654
uuuaauuaguguuucugga

SEQ ID NO: 1020609 - RNA, 19 nt, Artificial Sequence
  Description of Artificial Sequence: Synthetic oligonucleotide
  Antisense strand to SEQ ID NO: 1020608
uccagaaacacuaauuaaa

SEQ ID NO: 1020610 - RNA, 19 nt, Artificial Sequence
  Description of Artificial Sequence: Synthetic oligonucleotide
  Sense strand starting at position 2634 of SEQ ID NO: 914654
uaauuaguguuucuggaag

SEQ ID NO: 1020611 - RNA, 19 nt, Artificial Sequence
  Description of Artificial Sequence: Synthetic oligonucleotide
  Antisense strand to SEQ ID NO: 1020610
cuuccagaaacacuaauua

SEQ ID NO: 1020612 - RNA, 19 nt, Artificial Sequence
  Description of Artificial Sequence: Synthetic oligonucleotide
  Sense strand starting at position 2648 of SEQ ID NO: 914654
ggaagucuuggaugucuuu

SEQ ID NO: 1020613 - RNA, 19 nt, Artificial Sequence
  Description of Artificial Sequence: Synthetic oligonucleotide
  Antisense strand to SEQ ID NO: 1020612
aaagacauccaagacuucc

SEQ ID NO: 1020614 - RNA, 19 nt, Artificial Sequence
  Description of Artificial Sequence: Synthetic oligonucleotide
  Sense strand starting at position 2666 of SEQ ID NO: 914654
uccuaagcgguguaaauga

SEQ ID NO: 1020615 - RNA, 19 nt, Artificial Sequence
  Description of Artificial Sequence: Synthetic oligonucleotide
  Antisense strand to SEQ ID NO: 1020614
ucauuuacaccgcuuagga

SEQ ID NO: 1020616 - RNA, 19 nt, Artificial Sequence
  Description of Artificial Sequence: Synthetic oligonucleotide
  Sense strand starting at position 2722 of SEQ ID NO: 914654
ugucguuugcuguuaaagc

SEQ ID NO: 1020617 - RNA, 19 nt, Artificial Sequence
  Description of Artificial Sequence: Synthetic oligonucleotide
  Antisense strand to SEQ ID NO: 1020616
gcuuuaacagcaaacgaca

SEQ ID NO: 1020618 - RNA, 19 nt, Artificial Sequence
  Description of Artificial Sequence: Synthetic oligonucleotide
  Sense strand starting at position 2958 of SEQ ID NO: 914654
ggcaaucaugauugacaaa

SEQ ID NO: 1020619 - RNA, 19 nt, Artificial Sequence
  Description of Artificial Sequence: Synthetic oligonucleotide
  Antisense strand to SEQ ID NO: 1020618
uuugucaaucaugauugcc

SEQ ID NO: 1020620 - RNA, 19 nt, Artificial Sequence
  Description of Artificial Sequence: Synthetic oligonucleotide
  Sense strand starting at position 3013 of SEQ ID NO: 914654
acuacugaguuauugacuu

SEQ ID NO: 1020621 - RNA, 19 nt, Artificial Sequence
  Description of Artificial Sequence: Synthetic oligonucleotide
  Antisense strand to SEQ ID NO: 1020620
aagucaauaacucaguagu

SEQ ID NO: 1020622 - RNA, 19 nt, Artificial Sequence
  Description of Artificial Sequence: Synthetic oligonucleotide
  Sense strand starting at position 3017 of SEQ ID NO: 914654
cugaguuauugacuuugac

SEQ ID NO: 1020623 - RNA, 19 nt, Artificial Sequence
  Description of Artificial Sequence: Synthetic oligonucleotide
  Antisense strand to SEQ ID NO: 1020622
gucaaagucaauaacucag

SEQ ID NO: 1020624 - RNA, 19 nt, Artificial Sequence
  Description of Artificial Sequence: Synthetic oligonucleotide
  Sense strand starting at position 3020 of SEQ ID NO: 914654
aguuauugacuuugacagu

SEQ ID NO: 1020625 - RNA, 19 nt, Artificial Sequence
  Description of Artificial Sequence: Synthetic oligonucleotide
  Antisense strand to SEQ ID NO: 1020624
acugucaaagucaauaacu

SEQ ID NO: 1020626 - RNA, 19 nt, Artificial Sequence
  Description of Artificial Sequence: Synthetic oligonucleotide
  Sense strand starting at position 3026 of SEQ ID NO: 914654
ugacuuugacagugaucug

SEQ ID NO: 1020627 - RNA, 19 nt, Artificial Sequence
  Description of Artificial Sequence: Synthetic oligonucleotide
  Antisense strand to SEQ ID NO: 1020626
cagaucacugucaaaguca

SEQ ID NO: 1020628 - RNA, 19 nt, Artificial Sequence
  Description of Artificial Sequence: Synthetic oligonucleotide
  Sense strand starting at position 3033 of SEQ ID NO: 914654
gacagugaucugugauacc

SEQ ID NO: 1020629 - RNA, 19 nt, Artificial Sequence
  Description of Artificial Sequence: Synthetic oligonucleotide
  Antisense strand to SEQ ID NO: 1020628
gguaucacagaucacuguc

SEQ ID NO: 1020630 - RNA, 19 nt, Artificial Sequence
  Description of Artificial Sequence: Synthetic oligonucleotide
  Sense strand starting at position 3129 of SEQ ID NO: 914654
ggcugauucuguuugauaa

SEQ ID NO: 1020631 - RNA, 19 nt, Artificial Sequence
  Description of Artificial Sequence: Synthetic oligonucleotide
  Antisense strand to SEQ ID NO: 1020630
uuaucaaacagaaucagcc

SEQ ID NO: 1020632 - RNA, 19 nt, Artificial Sequence
  Description of Artificial Sequence: Synthetic oligonucleotide
  Sense strand starting at position 3130 of SEQ ID NO: 914654
gcugauucuguuugauaaa

SEQ ID NO: 1020633 - RNA, 19 nt, Artificial Sequence
  Description of Artificial Sequence: Synthetic oligonucleotide
  Antisense strand to SEQ ID NO: 1020632
uuuaucaaacagaaucagc

SEQ ID NO: 1020634 - RNA, 19 nt, Artificial Sequence
  Description of Artificial Sequence: Synthetic oligonucleotide
  Sense strand starting at position 3163 of SEQ ID NO: 914654
gcuaaauagugacuggagu

SEQ ID NO: 1020635 - RNA, 19 nt, Artificial Sequence
  Description of Artificial Sequence: Synthetic oligonucleotide
  Antisense strand to SEQ ID NO: 1020634
acuccagucacuauuuagc

SEQ ID NO: 1020636 - RNA, 19 nt, Artificial Sequence
  Description of Artificial Sequence: Synthetic oligonucleotide
  Sense strand starting at position 3164 of SEQ ID NO: 914654
cuaaauagugacuggaguu

SEQ ID NO: 1020637 - RNA, 19 nt, Artificial Sequence
  Description of Artificial Sequence: Synthetic oligonucleotide
  Antisense strand to SEQ ID NO: 1020636
aacuccagucacuauuuag

SEQ ID NO: 1020638 - RNA, 19 nt, Artificial Sequence
  Description of Artificial Sequence: Synthetic oligonucleotide
  Sense strand starting at position 3221 of SEQ ID NO: 914654
uuagaaucauguuuaggaa

SEQ ID NO: 1020639 - RNA, 19 nt, Artificial Sequence
  Description of Artificial Sequence: Synthetic oligonucleotide
  Antisense strand to SEQ ID NO: 1020638
uuccuaaacaugauucuaa

SEQ ID NO: 1020640 - RNA, 19 nt, Artificial Sequence
  Description of Artificial Sequence: Synthetic oligonucleotide
  Sense strand starting at position 3264 of SEQ ID NO: 914654
acuggaaagcuuugaucaa

SEQ ID NO: 1020641 - RNA, 19 nt, Artificial Sequence
  Description of Artificial Sequence: Synthetic oligonucleotide
  Antisense strand to SEQ ID NO: 1020640
uugaucaaagcuuuccagu

SEQ ID NO: 1020642 - RNA, 19 nt, Artificial Sequence
  Description of Artificial Sequence: Synthetic oligonucleotide
  Sense strand starting at position 3268 of SEQ ID NO: 914654
gaaagcuuugaucaagguu

SEQ ID NO: 1020643 - RNA, 19 nt, Artificial Sequence
  Description of Artificial Sequence: Synthetic oligonucleotide
  Antisense strand to SEQ ID NO: 1020642
aaccuugaucaaagcuuuc

SEQ ID NO: 1020644 - RNA, 19 nt, Artificial Sequence
  Description of Artificial Sequence: Synthetic oligonucleotide
  Sense strand starting at position 3317 of SEQ ID NO: 914654
uaaauagcuguugagugau

SEQ ID NO: 1020645 - RNA, 19 nt, Artificial Sequence
  Description of Artificial Sequence: Synthetic oligonucleotide
  Antisense strand to SEQ ID NO: 1020644
aucacucaacagcuauuua

SEQ ID NO: 1020646 - RNA, 19 nt, Artificial Sequence
  Description of Artificial Sequence: Synthetic oligonucleotide
  Sense strand starting at position 3319 of SEQ ID NO: 914654
aauagcuguugagugauua

SEQ ID NO: 1020647 - RNA, 19 nt, Artificial Sequence
  Description of Artificial Sequence: Synthetic oligonucleotide
  Antisense strand to SEQ ID NO: 1020646
uaaucacucaacagcuauu

SEQ ID NO: 1020648 - RNA, 19 nt, Artificial Sequence
  Description of Artificial Sequence: Synthetic oligonucleotide
  Sense strand starting at position 3389 of SEQ ID NO: 914654
gucucaccuggaggagaua

SEQ ID NO: 1020649 - RNA, 19 nt, Artificial Sequence
  Description of Artificial Sequence: Synthetic oligonucleotide
  Antisense strand to SEQ ID NO: 1020648
uaucuccuccaggugagac

SEQ ID NO: 1020650 - RNA, 19 nt, Artificial Sequence
  Description of Artificial Sequence: Synthetic oligonucleotide
  Sense strand starting at position 3811 of SEQ ID NO: 914654
uaugaaguguauguacauu

SEQ ID NO: 1020651 - RNA, 19 nt, Artificial Sequence
  Description of Artificial Sequence: Synthetic oligonucleotide
  Antisense strand to SEQ ID NO: 1020650
aauguacauacacuucaua

SEQ ID NO: 1020652 - RNA, 19 nt, Artificial Sequence
  Description of Artificial Sequence: Synthetic oligonucleotide
  Sense strand starting at position 3825 of SEQ ID NO: 914654
acauuccggaaucguuaaa

SEQ ID NO: 1020653 - RNA, 19 nt, Artificial Sequence
  Description of Artificial Sequence: Synthetic oligonucleotide
  Antisense strand to SEQ ID NO: 1020652
uuuaacgauuccggaaugu

SEQ ID NO: 1020654 - RNA, 19 nt, Artificial Sequence
  Description of Artificial Sequence: Synthetic oligonucleotide
  Sense strand starting at position 153 of SEQ ID NO: 914655
gagauugccuuccuggaga

SEQ ID NO: 1020655 - RNA, 19 nt, Artificial Sequence
  Description of Artificial Sequence: Synthetic oligonucleotide
  Antisense strand to SEQ ID NO: 1020654
ucuccaggaaggcaaucuc

SEQ ID NO: 1020656 - RNA, 19 nt, Artificial Sequence
  Description of Artificial Sequence: Synthetic oligonucleotide
  Sense strand starting at position 235 of SEQ ID NO: 914655
gggcauagugaaggucauu

SEQ ID NO: 1020657 - RNA, 19 nt, Artificial Sequence
  Description of Artificial Sequence: Synthetic oligonucleotide
  Antisense strand to SEQ ID NO: 1020656
aaugaccuucacuaugccc

SEQ ID NO: 1020658 - RNA, 19 nt, Artificial Sequence
  Description of Artificial Sequence: Synthetic oligonucleotide
  Sense strand starting at position 247 of SEQ ID NO: 914655
ggucauucccuccaacugu

SEQ ID NO: 1020659 - RNA, 19 nt, Artificial Sequence
  Description of Artificial Sequence: Synthetic oligonucleotide
  Antisense strand to SEQ ID NO: 1020658
acaguuggagggaaugacc

SEQ ID NO: 1020660 - RNA, 19 nt, Artificial Sequence
  Description of Artificial Sequence: Synthetic oligonucleotide
  Sense strand starting at position 574 of SEQ ID NO: 914655
gcaagacugcuggagagau

SEQ ID NO: 1020661 - RNA, 19 nt, Artificial Sequence
  Description of Artificial Sequence: Synthetic oligonucleotide
  Antisense strand to SEQ ID NO: 1020660
aucucuccagcagucuugc

SEQ ID NO: 1020662 - RNA, 19 nt, Artificial Sequence
  Description of Artificial Sequence: Synthetic oligonucleotide
  Sense strand starting at position 911 of SEQ ID NO: 914655
uuacauguguccgguagga

SEQ ID NO: 1020663 - RNA, 19 nt, Artificial Sequence
  Description of Artificial Sequence: Synthetic oligonucleotide
  Antisense strand to SEQ ID NO: 1020662
uccuaccggacacauguaa

SEQ ID NO: 1020664 - RNA, 19 nt, Artificial Sequence
  Description of Artificial Sequence: Synthetic oligonucleotide
  Sense strand starting at position 913 of SEQ ID NO: 914655
acauguguccgguaggacu

SEQ ID NO: 1020665 - RNA, 19 nt, Artificial Sequence
  Description of Artificial Sequence: Synthetic oligonucleotide
  Antisense strand to SEQ ID NO: 1020664
aguccuaccggacacaugu

SEQ ID NO: 1020666 - RNA, 19 nt, Artificial Sequence
  Description of Artificial Sequence: Synthetic oligonucleotide
  Sense strand starting at position 954 of SEQ ID NO: 914655
cuugaaugcucguccagag

SEQ ID NO: 1020667 - RNA, 19 nt, Artificial Sequence
  Description of Artificial Sequence: Synthetic oligonucleotide
  Antisense strand to SEQ ID NO: 1020666
cucuggacgagcauucaag

SEQ ID NO: 1020668 - RNA, 19 nt, Artificial Sequence
  Description of Artificial Sequence: Synthetic oligonucleotide
  Sense strand starting at position 1019 of SEQ ID NO: 914655
aggcgagaaaccuggcaaa

SEQ ID NO: 1020669 - RNA, 19 nt, Artificial Sequence
  Description of Artificial Sequence: Synthetic oligonucleotide
  Antisense strand to SEQ ID NO: 1020668
uuugccagguuucucgccu

SEQ ID NO: 1020670 - RNA, 19 nt, Artificial Sequence
  Description of Artificial Sequence: Synthetic oligonucleotide
  Sense strand starting at position 1074 of SEQ ID NO: 914655
cugggaguaccauggagua

SEQ ID NO: 1020671 - RNA, 19 nt, Artificial Sequence
  Description of Artificial Sequence: Synthetic oligonucleotide
  Antisense strand to SEQ ID NO: 1020670
uacuccaugguacucccag

SEQ ID NO: 1020672 - RNA, 19 nt, Artificial Sequence
  Description of Artificial Sequence: Synthetic oligonucleotide
  Sense strand starting at position 1211 of SEQ ID NO: 914655
gcgaaagcugaguaacuga

SEQ ID NO: 1020673 - RNA, 19 nt, Artificial Sequence
  Description of Artificial Sequence: Synthetic oligonucleotide
  Antisense strand to SEQ ID NO: 1020672
ucaguuacucagcuuucgc

SEQ ID NO: 1020674 - RNA, 19 nt, Artificial Sequence
  Description of Artificial Sequence: Synthetic oligonucleotide
  Sense strand starting at position 1270 of SEQ ID NO: 914655
gagucauacugaggaccca

SEQ ID NO: 1020675 - RNA, 19 nt, Artificial Sequence
  Description of Artificial Sequence: Synthetic oligonucleotide
  Antisense strand to SEQ ID NO: 1020674
uggguccucaguaugacuc

SEQ ID NO: 1020676 - RNA, 19 nt, Artificial Sequence
  Description of Artificial Sequence: Synthetic oligonucleotide
  Sense strand starting at position 3098 of SEQ ID NO: 914655
uguggcugagugagugauu

SEQ ID NO: 1020677 - RNA, 19 nt, Artificial Sequence
  Description of Artificial Sequence: Synthetic oligonucleotide
  Antisense strand to SEQ ID NO: 1020676
aaucacucacucagccaca

SEQ ID NO: 1020678 - RNA, 19 nt, Artificial Sequence
  Description of Artificial Sequence: Synthetic oligonucleotide
  Sense strand starting at position 3099 of SEQ ID NO: 914655
guggcugagugagugauuu

SEQ ID NO: 1020679 - RNA, 19 nt, Artificial Sequence
  Description of Artificial Sequence: Synthetic oligonucleotide
  Antisense strand to SEQ ID NO: 1020678
aaaucacucacucagccac

SEQ ID NO: 1020680 - RNA, 19 nt, Artificial Sequence
  Description of Artificial Sequence: Synthetic oligonucleotide
  Sense strand starting at position 3105 of SEQ ID NO: 914655
gagugagugauuugcgucu

SEQ ID NO: 1020681 - RNA, 19 nt, Artificial Sequence
  Description of Artificial Sequence: Synthetic oligonucleotide
  Antisense strand to SEQ ID NO: 1020680
agacgcaaaucacucacuc

SEQ ID NO: 1020682 - RNA, 19 nt, Artificial Sequence
  Description of Artificial Sequence: Synthetic oligonucleotide
  Sense strand starting at position 3205 of SEQ ID NO: 914655
gaacauaguggcugagaga

SEQ ID NO: 1020683 - RNA, 19 nt, Artificial Sequence
  Description of Artificial Sequence: Synthetic oligonucleotide
  Antisense strand to SEQ ID NO: 1020682
ucucucagccacuauguuc

SEQ ID NO: 1020684 - RNA, 19 nt, Artificial Sequence
  Description of Artificial Sequence: Synthetic oligonucleotide
  Sense strand starting at position 3214 of SEQ ID NO: 914655
ggcugagagacugguuaca

SEQ ID NO: 1020685 - RNA, 19 nt, Artificial Sequence
  Description of Artificial Sequence: Synthetic oligonucleotide
  Antisense strand to SEQ ID NO: 1020684
uguaaccagucucucagcc

SEQ ID NO: 1020686 - RNA, 19 nt, Artificial Sequence
  Description of Artificial Sequence: Synthetic oligonucleotide
  Sense strand starting at position 3225 of SEQ ID NO: 914655
ugguuacagcucugccauu

SEQ ID NO: 1020687 - RNA, 19 nt, Artificial Sequence
  Description of Artificial Sequence: Synthetic oligonucleotide
  Antisense strand to SEQ ID NO: 1020686
aauggcagagcuguaacca

SEQ ID NO: 1020688 - RNA, 19 nt, Artificial Sequence
  Description of Artificial Sequence: Synthetic oligonucleotide
  Sense strand starting at position 3226 of SEQ ID NO: 914655
gguuacagcucugccauuu

SEQ ID NO: 1020689 - RNA, 19 nt, Artificial Sequence
  Description of Artificial Sequence: Synthetic oligonucleotide
  Antisense strand to SEQ ID NO: 1020688
aaauggcagagcuguaacc

SEQ ID NO: 1020690 - RNA, 19 nt, Artificial Sequence
  Description of Artificial Sequence: Synthetic oligonucleotide
  Sense strand starting at position 3317 of SEQ ID NO: 914655
uaguacuuaucugauagag

SEQ ID NO: 1020691 - RNA, 19 nt, Artificial Sequence
  Description of Artificial Sequence: Synthetic oligonucleotide
  Antisense strand to SEQ ID NO: 1020690
cucuaucagauaaguacua

SEQ ID NO: 1020692 - RNA, 19 nt, Artificial Sequence
  Description of Artificial Sequence: Synthetic oligonucleotide
  Sense strand starting at position 3319 of SEQ ID NO: 914655
guacuuaucugauagaguu

SEQ ID NO: 1020693 - RNA, 19 nt, Artificial Sequence
  Description of Artificial Sequence: Synthetic oligonucleotide
  Antisense strand to SEQ ID NO: 1020692
aacucuaucagauaaguac

SEQ ID NO: 1020694 - RNA, 19 nt, Artificial Sequence
  Description of Artificial Sequence: Synthetic oligonucleotide
  Sense strand starting at position 3327 of SEQ ID NO: 914655
cugauagaguuguugugaa

SEQ ID NO: 1020695 - RNA, 19 nt, Artificial Sequence
  Description of Artificial Sequence: Synthetic oligonucleotide
  Antisense strand to SEQ ID NO: 1020694
uucacaacaacucuaucag

SEQ ID NO: 1020696 - RNA, 19 nt, Artificial Sequence
  Description of Artificial Sequence: Synthetic oligonucleotide
  Sense strand starting at position 3334 of SEQ ID NO: 914655
aguuguugugaagauguga

SEQ ID NO: 1020697 - RNA, 19 nt, Artificial Sequence
  Description of Artificial Sequence: Synthetic oligonucleotide
  Antisense strand to SEQ ID NO: 1020696
ucacaucuucacaacaacu

SEQ ID NO: 1020698 - RNA, 19 nt, Artificial Sequence
  Description of Artificial Sequence: Synthetic oligonucleotide
  Sense strand starting at position 3351 of SEQ ID NO: 914655
gaauuaugcuuggcuggca

SEQ ID NO: 1020699 - RNA, 19 nt, Artificial Sequence
  Description of Artificial Sequence: Synthetic oligonucleotide
  Antisense strand to SEQ ID NO: 1020698
ugccagccaagcauaauuc

SEQ ID NO: 1020700 - RNA, 19 nt, Artificial Sequence
  Description of Artificial Sequence: Synthetic oligonucleotide
  Sense strand starting at position 3446 of SEQ ID NO: 914655
ggccucuaucuccagacau

SEQ ID NO: 1020701 - RNA, 19 nt, Artificial Sequence
  Description of Artificial Sequence: Synthetic oligonucleotide
  Antisense strand to SEQ ID NO: 1020700
augucuggagauagaggcc

SEQ ID NO: 1020702 - RNA, 19 nt, Artificial Sequence
  Description of Artificial Sequence: Synthetic oligonucleotide
  Sense strand starting at position 57 of SEQ ID NO: 914656
ucagaucucuuggucccaa

SEQ ID NO: 1020703 - RNA, 19 nt, Artificial Sequence
  Description of Artificial Sequence: Synthetic oligonucleotide
  Antisense strand to SEQ ID NO: 1020702
uugggaccaagagaucuga

SEQ ID NO: 1020704 - RNA, 19 nt, Artificial Sequence
  Description of Artificial Sequence: Synthetic oligonucleotide
  Sense strand starting at position 177 of SEQ ID NO: 914656
ccaagcuguccaugagauc

SEQ ID NO: 1020705 - RNA, 19 nt, Artificial Sequence
  Description of Artificial Sequence: Synthetic oligonucleotide
  Antisense strand to SEQ ID NO: 1020704
gaucucauggacagcuugg

SEQ ID NO: 1020706 - RNA, 19 nt, Artificial Sequence
  Description of Artificial Sequence: Synthetic oligonucleotide
  Sense strand starting at position 178 of SEQ ID NO: 914656
caagcuguccaugagauca

SEQ ID NO: 1020707 - RNA, 19 nt, Artificial Sequence
  Description of Artificial Sequence: Synthetic oligonucleotide
  Antisense strand to SEQ ID NO: 1020706
ugaucucauggacagcuug

SEQ ID NO: 1020708 - RNA, 19 nt, Artificial Sequence
  Description of Artificial Sequence: Synthetic oligonucleotide
  Sense strand starting at position 313 of SEQ ID NO: 914656
auuuaaaugugucuugugu

SEQ ID NO: 1020709 - RNA, 19 nt, Artificial Sequence
  Description of Artificial Sequence: Synthetic oligonucleotide
  Antisense strand to SEQ ID NO: 1020708
acacaagacacauuuaaau

SEQ ID NO: 1020710 - RNA, 19 nt, Artificial Sequence
  Description of Artificial Sequence: Synthetic oligonucleotide
  Sense strand starting at position 357 of SEQ ID NO: 914656
augccugaucucgacaagu

SEQ ID NO: 1020711 - RNA, 19 nt, Artificial Sequence
  Description of Artificial Sequence: Synthetic oligonucleotide
  Antisense strand to SEQ ID NO: 1020710
acuugucgagaucaggcau

SEQ ID NO: 1020712 - RNA, 19 nt, Artificial Sequence
  Description of Artificial Sequence: Synthetic oligonucleotide
  Sense strand starting at position 368 of SEQ ID NO: 914656
cgacaaguguuaucaacag

SEQ ID NO: 1020713 - RNA, 19 nt, Artificial Sequence
  Description of Artificial Sequence: Synthetic oligonucleotide
  Antisense strand to SEQ ID NO: 1020712
cuguugauaacacuugucg

SEQ ID NO: 1020714 - RNA, 19 nt, Artificial Sequence
  Description of Artificial Sequence: Synthetic oligonucleotide
  Sense strand starting at position 372 of SEQ ID NO: 914656
aaguguuaucaacaguuga

SEQ ID NO: 1020715 - RNA, 19 nt, Artificial Sequence
  Description of Artificial Sequence: Synthetic oligonucleotide
  Antisense strand to SEQ ID NO: 1020714
ucaacuguugauaacacuu

SEQ ID NO: 1020716 - RNA, 19 nt, Artificial Sequence
  Description of Artificial Sequence: Synthetic oligonucleotide
  Sense strand starting at position 376 of SEQ ID NO: 914656
guuaucaacaguugaggua

SEQ ID NO: 1020717 - RNA, 19 nt, Artificial Sequence
  Description of Artificial Sequence: Synthetic oligonucleotide
  Antisense strand to SEQ ID NO: 1020716
uaccucaacuguugauaac

SEQ ID NO: 1020718 - RNA, 19 nt, Artificial Sequence
  Description of Artificial Sequence: Synthetic oligonucleotide
  Sense strand starting at position 426 of SEQ ID NO: 914656
aggugcagauuguuugaga

SEQ ID NO: 1020719 - RNA, 19 nt, Artificial Sequence
  Description of Artificial Sequence: Synthetic oligonucleotide
  Antisense strand to SEQ ID NO: 1020718
ucucaaacaaucugcaccu

SEQ ID NO: 1020720 - RNA, 19 nt, Artificial Sequence
  Description of Artificial Sequence: Synthetic oligonucleotide
  Sense strand starting at position 435 of SEQ ID NO: 914656
uuguuugagaccuggccaa

SEQ ID NO: 1020721 - RNA, 19 nt, Artificial Sequence
  Description of Artificial Sequence: Synthetic oligonucleotide
  Antisense strand to SEQ ID NO: 1020720
uuggccaggucucaaacaa

SEQ ID NO: 1020722 - RNA, 19 nt, Artificial Sequence
  Description of Artificial Sequence: Synthetic oligonucleotide
  Sense strand starting at position 489 of SEQ ID NO: 914656
acccacaggcucugaauaa

SEQ ID NO: 1020723 - RNA, 19 nt, Artificial Sequence
  Description of Artificial Sequence: Synthetic oligonucleotide
  Antisense strand to SEQ ID NO: 1020722
uuauucagagccugugggu

SEQ ID NO: 1020724 - RNA, 19 nt, Artificial Sequence
  Description of Artificial Sequence: Synthetic oligonucleotide
  Sense strand starting at position 736 of SEQ ID NO: 914656
uuuggucaccuuuaccaga

SEQ ID NO: 1020725 - RNA, 19 nt, Artificial Sequence
  Description of Artificial Sequence: Synthetic oligonucleotide
  Antisense strand to SEQ ID NO: 1020724
ucugguaaaggugaccaaa

SEQ ID NO: 1020726 - RNA, 19 nt, Artificial Sequence
  Description of Artificial Sequence: Synthetic oligonucleotide
  Sense strand starting at position 782 of SEQ ID NO: 914656
cgauuuccuagugguauga

SEQ ID NO: 1020727 - RNA, 19 nt, Artificial Sequence
  Description of Artificial Sequence: Synthetic oligonucleotide
  Antisense strand to SEQ ID NO: 1020726
ucauaccacuaggaaaucg

SEQ ID NO: 1020728 - RNA, 19 nt, Artificial Sequence
  Description of Artificial Sequence: Synthetic oligonucleotide
  Sense strand starting at position 786 of SEQ ID NO: 914656
uuccuagugguaugauaau

SEQ ID NO: 1020729 - RNA, 19 nt, Artificial Sequence
  Description of Artificial Sequence: Synthetic oligonucleotide
  Antisense strand to SEQ ID NO: 1020728
auuaucauaccacuaggaa

SEQ ID NO: 1020730 - RNA, 19 nt, Artificial Sequence
  Description of Artificial Sequence: Synthetic oligonucleotide
  Sense strand starting at position 839 of SEQ ID NO: 914656
uuuccaucaguuggaggua

SEQ ID NO: 1020731 - RNA, 19 nt, Artificial Sequence
  Description of Artificial Sequence: Synthetic oligonucleotide
  Antisense strand to SEQ ID NO: 1020730
uaccuccaacugauggaaa

SEQ ID NO: 1020732 - RNA, 19 nt, Artificial Sequence
  Description of Artificial Sequence: Synthetic oligonucleotide
  Sense strand starting at position 844 of SEQ ID NO: 914656
aucaguuggagguagucaa

SEQ ID NO: 1020733 - RNA, 19 nt, Artificial Sequence
  Description of Artificial Sequence: Synthetic oligonucleotide
  Antisense strand to SEQ ID NO: 1020732
uugacuaccuccaacugau

SEQ ID NO: 1020734 - RNA, 19 nt, Artificial Sequence
  Description of Artificial Sequence: Synthetic oligonucleotide
  Sense strand starting at position 848 of SEQ ID NO: 914656
guuggagguagucaauguu

SEQ ID NO: 1020735 - RNA, 19 nt, Artificial Sequence
  Description of Artificial Sequence: Synthetic oligonucleotide
  Antisense strand to SEQ ID NO: 1020734
aacauugacuaccuccaac

SEQ ID NO: 1020736 - RNA, 19 nt, Artificial Sequence
  Description of Artificial Sequence: Synthetic oligonucleotide
  Sense strand starting at position 857 of SEQ ID NO: 914656
agucaauguuucccuauca

SEQ ID NO: 1020737 - RNA, 19 nt, Artificial Sequence
  Description of Artificial Sequence: Synthetic oligonucleotide
  Antisense strand to SEQ ID NO: 1020736
ugauagggaaacauugacu

SEQ ID NO: 1020738 - RNA, 19 nt, Artificial Sequence
  Description of Artificial Sequence: Synthetic oligonucleotide
  Sense strand starting at position 991 of SEQ ID NO: 914656
uaggaugagcucugcagaa

SEQ ID NO: 1020739 - RNA, 19 nt, Artificial Sequence
  Description of Artificial Sequence: Synthetic oligonucleotide
  Antisense strand to SEQ ID NO: 1020738
uucugcagagcucauccua

SEQ ID NO: 1020740 - RNA, 19 nt, Artificial Sequence
  Description of Artificial Sequence: Synthetic oligonucleotide
  Sense strand starting at position 993 of SEQ ID NO: 914656
ggaugagcucugcagaaga

SEQ ID NO: 1020741 - RNA, 19 nt, Artificial Sequence
  Description of Artificial Sequence: Synthetic oligonucleotide
  Antisense strand to SEQ ID NO: 1020740
ucuucugcagagcucaucc

SEQ ID NO: 1020742 - RNA, 19 nt, Artificial Sequence
  Description of Artificial Sequence: Synthetic oligonucleotide
  Sense strand starting at position 1009 of SEQ ID NO: 914656
agagaagcuuuacuuagua

SEQ ID NO: 1020743 - RNA, 19 nt, Artificial Sequence
  Description of Artificial Sequence: Synthetic oligonucleotide
  Antisense strand to SEQ ID NO: 1020742
uacuaaguaaagcuucucu

SEQ ID NO: 1020744 - RNA, 19 nt, Artificial Sequence
  Description of Artificial Sequence: Synthetic oligonucleotide
  Sense strand starting at position 1077 of SEQ ID NO: 914656
gguagucuuccauaugucu

SEQ ID NO: 1020745 - RNA, 19 nt, Artificial Sequence
  Description of Artificial Sequence: Synthetic oligonucleotide
  Antisense strand to SEQ ID NO: 1020744
agacauauggaagacuacc

SEQ ID NO: 1020746 - RNA, 19 nt, Artificial Sequence
  Description of Artificial Sequence: Synthetic oligonucleotide
  Sense strand starting at position 1162 of SEQ ID NO: 914656
aaaugagugcuauggcaau

SEQ ID NO: 1020747 - RNA, 19 nt, Artificial Sequence
  Description of Artificial Sequence: Synthetic oligonucleotide
  Antisense strand to SEQ ID NO: 1020746
auugccauagcacucauuu

SEQ ID NO: 1020748 - RNA, 19 nt, Artificial Sequence
  Description of Artificial Sequence: Synthetic oligonucleotide
  Sense strand starting at position 1308 of SEQ ID NO: 914656
gggagaaccuccucccaca

SEQ ID NO: 1020749 - RNA, 19 nt, Artificial Sequence
  Description of Artificial Sequence: Synthetic oligonucleotide
  Antisense strand to SEQ ID NO: 1020748
ugugggaggagguucuccc

SEQ ID NO: 1020750 - RNA, 19 nt, Artificial Sequence
  Description of Artificial Sequence: Synthetic oligonucleotide
  Sense strand starting at position 2265 of SEQ ID NO: 914656
gagauagucgcauggacug

SEQ ID NO: 1020751 - RNA, 19 nt, Artificial Sequence
  Description of Artificial Sequence: Synthetic oligonucleotide
  Antisense strand to SEQ ID NO: 1020750
caguccaugcgacuaucuc

SEQ ID NO: 1020752 - RNA, 19 nt, Artificial Sequence
  Description of Artificial Sequence: Synthetic oligonucleotide
  Sense strand starting at position 2713 of SEQ ID NO: 914656
ugagauaggcacuggauua

SEQ ID NO: 1020753 - RNA, 19 nt, Artificial Sequence
  Description of Artificial Sequence: Synthetic oligonucleotide
  Antisense strand to SEQ ID NO: 1020752
uaauccagugccuaucuca

SEQ ID NO: 1020754 - RNA, 19 nt, Artificial Sequence
  Description of Artificial Sequence: Synthetic oligonucleotide
  Sense strand starting at position 2781 of SEQ ID NO: 914656
gugggaaaguuugucauua

SEQ ID NO: 1020755 - RNA, 19 nt, Artificial Sequence
  Description of Artificial Sequence: Synthetic oligonucleotide
  Antisense strand to SEQ ID NO: 1020754
uaaugacaaacuuucccac

SEQ ID NO: 1020756 - RNA, 19 nt, Artificial Sequence
  Description of Artificial Sequence: Synthetic oligonucleotide
  Sense strand starting at position 2782 of SEQ ID NO: 914656
ugggaaaguuugucauuaa

SEQ ID NO: 1020757 - RNA, 19 nt, Artificial Sequence
  Description of Artificial Sequence: Synthetic oligonucleotide
  Antisense strand to SEQ ID NO: 1020756
uuaaugacaaacuuuccca

SEQ ID NO: 1020758 - RNA, 19 nt, Artificial Sequence
  Description of Artificial Sequence: Synthetic oligonucleotide
  Sense strand starting at position 2785 of SEQ ID NO: 914656
gaaaguuugucauuaaccg

SEQ ID NO: 1020759 - RNA, 19 nt, Artificial Sequence
  Description of Artificial Sequence: Synthetic oligonucleotide
  Antisense strand to SEQ ID NO: 1020758
cgguuaaugacaaacuuuc

SEQ ID NO: 1020760 - RNA, 19 nt, Artificial Sequence
  Description of Artificial Sequence: Synthetic oligonucleotide
  Sense strand starting at position 2786 of SEQ ID NO: 914656
aaaguuugucauuaaccga

SEQ ID NO: 1020761 - RNA, 19 nt, Artificial Sequence
  Description of Artificial Sequence: Synthetic oligonucleotide
  Antisense strand to SEQ ID NO: 1020760
ucgguuaaugacaaacuuu

SEQ ID NO: 1020762 - RNA, 19 nt, Artificial Sequence
  Description of Artificial Sequence: Synthetic oligonucleotide
  Sense strand starting at position 2789 of SEQ ID NO: 914656
guuugucauuaaccgagga

SEQ ID NO: 1020763 - RNA, 19 nt, Artificial Sequence
  Description of Artificial Sequence: Synthetic oligonucleotide
  Antisense strand to SEQ ID NO: 1020762
uccucgguuaaugacaaac

SEQ ID NO: 1020764 - RNA, 19 nt, Artificial Sequence
  Description of Artificial Sequence: Synthetic oligonucleotide
  Sense strand starting at position 2790 of SEQ ID NO: 914656
uuugucauuaaccgaggaa

SEQ ID NO: 1020765 - RNA, 19 nt, Artificial Sequence
  Description of Artificial Sequence: Synthetic oligonucleotide
  Antisense strand to SEQ ID NO: 1020764
uuccucgguuaaugacaaa

SEQ ID NO: 1020766 - RNA, 19 nt, Artificial Sequence
  Description of Artificial Sequence: Synthetic oligonucleotide
  Sense strand starting at position 2793 of SEQ ID NO: 914656
gucauuaaccgaggaaaca

SEQ ID NO: 1020767 - RNA, 19 nt, Artificial Sequence
  Description of Artificial Sequence: Synthetic oligonucleotide
  Antisense strand to SEQ ID NO: 1020766
uguuuccucgguuaaugac

SEQ ID NO: 1020768 - RNA, 19 nt, Artificial Sequence
  Description of Artificial Sequence: Synthetic oligonucleotide
  Sense strand starting at position 2878 of SEQ ID NO: 914656
ggauguaauccgggaaggu

SEQ ID NO: 1020769 - RNA, 19 nt, Artificial Sequence
  Description of Artificial Sequence: Synthetic oligonucleotide
  Antisense strand to SEQ ID NO: 1020768
accuucccggauuacaucc

SEQ ID NO: 1020770 - RNA, 19 nt, Artificial Sequence
  Description of Artificial Sequence: Synthetic oligonucleotide
  Sense strand starting at position 2879 of SEQ ID NO: 914656
gauguaauccgggaagguu

SEQ ID NO: 1020771 - RNA, 19 nt, Artificial Sequence
  Description of Artificial Sequence: Synthetic oligonucleotide
  Antisense strand to SEQ ID NO: 1020770
aaccuucccggauuacauc

SEQ ID NO: 1020772 - RNA, 19 nt, Artificial Sequence
  Description of Artificial Sequence: Synthetic oligonucleotide
  Sense strand starting at position 3090 of SEQ ID NO: 914656
gggucauauuacucagguu

SEQ ID NO: 1020773 - RNA, 19 nt, Artificial Sequence
  Description of Artificial Sequence: Synthetic oligonucleotide
  Antisense strand to SEQ ID NO: 1020772
aaccugaguaauaugaccc

SEQ ID NO: 1020774 - RNA, 19 nt, Artificial Sequence
  Description of Artificial Sequence: Synthetic oligonucleotide
  Sense strand starting at position 3255 of SEQ ID NO: 914656
acuaaauuguuucuaugag

SEQ ID NO: 1020775 - RNA, 19 nt, Artificial Sequence
  Description of Artificial Sequence: Synthetic oligonucleotide
  Antisense strand to SEQ ID NO: 1020774
cucauagaaacaauuuagu

SEQ ID NO: 1020776 - RNA, 19 nt, Artificial Sequence
  Description of Artificial Sequence: Synthetic oligonucleotide
  Sense strand starting at position 3384 of SEQ ID NO: 914656
gguagauugaaguggcaca

SEQ ID NO: 1020777 - RNA, 19 nt, Artificial Sequence
  Description of Artificial Sequence: Synthetic oligonucleotide
  Antisense strand to SEQ ID NO: 1020776
ugugccacuucaaucuacc

SEQ ID NO: 1020778 - RNA, 19 nt, Artificial Sequence
  Description of Artificial Sequence: Synthetic oligonucleotide
  Sense strand starting at position 3402 of SEQ ID NO: 914656
agaauaaauggguggcuca

SEQ ID NO: 1020779 - RNA, 19 nt, Artificial Sequence
  Description of Artificial Sequence: Synthetic oligonucleotide
  Antisense strand to SEQ ID NO: 1020778
ugagccacccauuuauucu

SEQ ID NO: 1020780 - RNA, 19 nt, Artificial Sequence
  Description of Artificial Sequence: Synthetic oligonucleotide
  Sense strand starting at position 3815 of SEQ ID NO: 914656
gccugugcucaucuuacga

SEQ ID NO: 1020781 - RNA, 19 nt, Artificial Sequence
  Description of Artificial Sequence: Synthetic oligonucleotide
  Antisense strand to SEQ ID NO: 1020780
ucguaagaugagcacaggc

SEQ ID NO: 1020782 - RNA, 19 nt, Artificial Sequence
  Description of Artificial Sequence: Synthetic oligonucleotide
  Sense strand starting at position 38 of SEQ ID NO: 914657
ccgggacuuucugguuuga

SEQ ID NO: 1020783 - RNA, 19 nt, Artificial Sequence
  Description of Artificial Sequence: Synthetic oligonucleotide
  Antisense strand to SEQ ID NO: 1020782
ucaaaccagaaagucccgg

SEQ ID NO: 1020784 - RNA, 19 nt, Artificial Sequence
  Description of Artificial Sequence: Synthetic oligonucleotide
  Sense strand starting at position 151 of SEQ ID NO: 914657
auccaucuauccguggaga

SEQ ID NO: 1020785 - RNA, 19 nt, Artificial Sequence
  Description of Artificial Sequence: Synthetic oligonucleotide
  Antisense strand to SEQ ID NO: 1020784
ucuccacggauagauggau

SEQ ID NO: 1020786 - RNA, 19 nt, Artificial Sequence
  Description of Artificial Sequence: Synthetic oligonucleotide
  Sense strand starting at position 152 of SEQ ID NO: 914657
uccaucuauccguggagaa

SEQ ID NO: 1020787 - RNA, 19 nt, Artificial Sequence
  Description of Artificial Sequence: Synthetic oligonucleotide
  Antisense strand to SEQ ID NO: 1020786
uucuccacggauagaugga

SEQ ID NO: 1020788 - RNA, 19 nt, Artificial Sequence
  Description of Artificial Sequence: Synthetic oligonucleotide
  Sense strand starting at position 153 of SEQ ID NO: 914657
ccaucuauccguggagaau

SEQ ID NO: 1020789 - RNA, 19 nt, Artificial Sequence
  Description of Artificial Sequence: Synthetic oligonucleotide
  Antisense strand to SEQ ID NO: 1020788
auucuccacggauagaugg

SEQ ID NO: 1020790 - RNA, 19 nt, Artificial Sequence
  Description of Artificial Sequence: Synthetic oligonucleotide
  Sense strand starting at position 154 of SEQ ID NO: 914657
caucuauccguggagaaug

SEQ ID NO: 1020791 - RNA, 19 nt, Artificial Sequence
  Description of Artificial Sequence: Synthetic oligonucleotide
  Antisense strand to SEQ ID NO: 1020790
cauucuccacggauagaug

SEQ ID NO: 1020792 - RNA, 19 nt, Artificial Sequence
  Description of Artificial Sequence: Synthetic oligonucleotide
  Sense strand starting at position 162 of SEQ ID NO: 914657
cguggagaaugucuggaau

SEQ ID NO: 1020793 - RNA, 19 nt, Artificial Sequence
  Description of Artificial Sequence: Synthetic oligonucleotide
  Antisense strand to SEQ ID NO: 1020792
auuccagacauucuccacg

SEQ ID NO: 1020794 - RNA, 19 nt, Artificial Sequence
  Description of Artificial Sequence: Synthetic oligonucleotide
  Sense strand starting at position 164 of SEQ ID NO: 914657
uggagaaugucuggaaugu

SEQ ID NO: 1020795 - RNA, 19 nt, Artificial Sequence
  Description of Artificial Sequence: Synthetic oligonucleotide
  Antisense strand to SEQ ID NO: 1020794
acauuccagacauucucca

SEQ ID NO: 1020796 - RNA, 19 nt, Artificial Sequence
  Description of Artificial Sequence: Synthetic oligonucleotide
  Sense strand starting at position 199 of SEQ ID NO: 914657
gagccugaguguuugcuua

SEQ ID NO: 1020797 - RNA, 19 nt, Artificial Sequence
  Description of Artificial Sequence: Synthetic oligonucleotide
  Antisense strand to SEQ ID NO: 1020796
uaagcaaacacucaggcuc

SEQ ID NO: 1020798 - RNA, 19 nt, Artificial Sequence
  Description of Artificial Sequence: Synthetic oligonucleotide
  Sense strand starting at position 201 of SEQ ID NO: 914657
gccugaguguuugcuuaau

SEQ ID NO: 1020799 - RNA, 19 nt, Artificial Sequence
  Description of Artificial Sequence: Synthetic oligonucleotide
  Antisense strand to SEQ ID NO: 1020798
auuaagcaaacacucaggc

SEQ ID NO: 1020800 - RNA, 19 nt, Artificial Sequence
  Description of Artificial Sequence: Synthetic oligonucleotide
  Sense strand starting at position 207 of SEQ ID NO: 914657
guguuugcuuaaugggauu

SEQ ID NO: 1020801 - RNA, 19 nt, Artificial Sequence
  Description of Artificial Sequence: Synthetic oligonucleotide
  Antisense strand to SEQ ID NO: 1020800
aaucccauuaagcaaacac

SEQ ID NO: 1020802 - RNA, 19 nt, Artificial Sequence
  Description of Artificial Sequence: Synthetic oligonucleotide
  Sense strand starting at position 447 of SEQ ID NO: 914657
guguggugucugggucuga

SEQ ID NO: 1020803 - RNA, 19 nt, Artificial Sequence
  Description of Artificial Sequence: Synthetic oligonucleotide
  Antisense strand to SEQ ID NO: 1020802
ucagacccagacaccacac

SEQ ID NO: 1020804 - RNA, 19 nt, Artificial Sequence
  Description of Artificial Sequence: Synthetic oligonucleotide
  Sense strand starting at position 448 of SEQ ID NO: 914657
uguggugucugggucugaa

SEQ ID NO: 1020805 - RNA, 19 nt, Artificial Sequence
  Description of Artificial Sequence: Synthetic oligonucleotide
  Antisense strand to SEQ ID NO: 1020804
uucagacccagacaccaca

SEQ ID NO: 1020806 - RNA, 19 nt, Artificial Sequence
  Description of Artificial Sequence: Synthetic oligonucleotide
  Sense strand starting at position 460 of SEQ ID NO: 914657
gucugaagcacauggguau

SEQ ID NO: 1020807 - RNA, 19 nt, Artificial Sequence
  Description of Artificial Sequence: Synthetic oligonucleotide
  Antisense strand to SEQ ID NO: 1020806
auacccaugugcuucagac

SEQ ID NO: 1020808 - RNA, 19 nt, Artificial Sequence
  Description of Artificial Sequence: Synthetic oligonucleotide
  Sense strand starting at position 572 of SEQ ID NO: 914657
cacuuuguacuguggucau

SEQ ID NO: 1020809 - RNA, 19 nt, Artificial Sequence
  Description of Artificial Sequence: Synthetic oligonucleotide
  Antisense strand to SEQ ID NO: 1020808
augaccacaguacaaagug

SEQ ID NO: 1020810 - RNA, 19 nt, Artificial Sequence
  Description of Artificial Sequence: Synthetic oligonucleotide
  Sense strand starting at position 818 of SEQ ID NO: 914657
uguccuuguuuggaagcua

SEQ ID NO: 1020811 - RNA, 19 nt, Artificial Sequence
  Description of Artificial Sequence: Synthetic oligonucleotide
  Antisense strand to SEQ ID NO: 1020810
uagcuuccaaacaaggaca

SEQ ID NO: 1020812 - RNA, 19 nt, Artificial Sequence
  Description of Artificial Sequence: Synthetic oligonucleotide
  Sense strand starting at position 830 of SEQ ID NO: 914657
gaagcuauggcuugaggga

SEQ ID NO: 1020813 - RNA, 19 nt, Artificial Sequence
  Description of Artificial Sequence: Synthetic oligonucleotide
  Antisense strand to SEQ ID NO: 1020812
ucccucaagccauagcuuc

SEQ ID NO: 1020814 - RNA, 19 nt, Artificial Sequence
  Description of Artificial Sequence: Synthetic oligonucleotide
  Sense strand starting at position 3974 of SEQ ID NO: 914657
uggccauaauuaggagaau

SEQ ID NO: 1020815 - RNA, 19 nt, Artificial Sequence
  Description of Artificial Sequence: Synthetic oligonucleotide
  Antisense strand to SEQ ID NO: 1020814
auucuccuaauuauggcca

SEQ ID NO: 1020816 - RNA, 19 nt, Artificial Sequence
  Description of Artificial Sequence: Synthetic oligonucleotide
  Sense strand starting at position 3975 of SEQ ID NO: 914657
ggccauaauuaggagaauu

SEQ ID NO: 1020817 - RNA, 19 nt, Artificial Sequence
  Description of Artificial Sequence: Synthetic oligonucleotide
  Antisense strand to SEQ ID NO: 1020816
aauucuccuaauuauggcc

SEQ ID NO: 1020818 - RNA, 19 nt, Artificial Sequence
  Description of Artificial Sequence: Synthetic oligonucleotide
  Sense strand starting at position 266 of SEQ ID NO: 914658
ggucaccagugccauuuaa

SEQ ID NO: 1020819 - RNA, 19 nt, Artificial Sequence
  Description of Artificial Sequence: Synthetic oligonucleotide
  Antisense strand to SEQ ID NO: 1020818
uuaaauggcacuggugacc

SEQ ID NO: 1020820 - RNA, 19 nt, Artificial Sequence
  Description of Artificial Sequence: Synthetic oligonucleotide
  Sense strand starting at position 539 of SEQ ID NO: 914658
ugaaguugaaguugggaaa

SEQ ID NO: 1020821 - RNA, 19 nt, Artificial Sequence
  Description of Artificial Sequence: Synthetic oligonucleotide
  Antisense strand to SEQ ID NO: 1020820
uuucccaacuucaacuuca

SEQ ID NO: 1020822 - RNA, 19 nt, Artificial Sequence
  Description of Artificial Sequence: Synthetic oligonucleotide
  Sense strand starting at position 734 of SEQ ID NO: 914658
uggugauccucaucucugu

SEQ ID NO: 1020823 - RNA, 19 nt, Artificial Sequence
  Description of Artificial Sequence: Synthetic oligonucleotide
  Antisense strand to SEQ ID NO: 1020822
acagagaugaggaucacca

SEQ ID NO: 1020824 - RNA, 19 nt, Artificial Sequence
  Description of Artificial Sequence: Synthetic oligonucleotide
  Sense strand starting at position 789 of SEQ ID NO: 914658
ggccuuacuuguccugaca

SEQ ID NO: 1020825 - RNA, 19 nt, Artificial Sequence
  Description of Artificial Sequence: Synthetic oligonucleotide
  Antisense strand to SEQ ID NO: 1020824
ugucaggacaaguaaggcc

SEQ ID NO: 1020826 - RNA, 19 nt, Artificial Sequence
  Description of Artificial Sequence: Synthetic oligonucleotide
  Sense strand starting at position 809 of SEQ ID NO: 914658
ccuccaaccugagaaauga

SEQ ID NO: 1020827 - RNA, 19 nt, Artificial Sequence
  Description of Artificial Sequence: Synthetic oligonucleotide
  Antisense strand to SEQ ID NO: 1020826
ucauuucucagguuggagg

SEQ ID NO: 1020828 - RNA, 19 nt, Artificial Sequence
  Description of Artificial Sequence: Synthetic oligonucleotide
  Sense strand starting at position 827 of SEQ ID NO: 914658
aguuaaagucaauauagcu

SEQ ID NO: 1020829 - RNA, 19 nt, Artificial Sequence
  Description of Artificial Sequence: Synthetic oligonucleotide
  Antisense strand to SEQ ID NO: 1020828
agcuauauugacuuuaacu

SEQ ID NO: 1020830 - RNA, 19 nt, Artificial Sequence
  Description of Artificial Sequence: Synthetic oligonucleotide
  Sense strand starting at position 1340 of SEQ ID NO: 914658
ggaucuuccucaucagcuu

SEQ ID NO: 1020831 - RNA, 19 nt, Artificial Sequence
  Description of Artificial Sequence: Synthetic oligonucleotide
  Antisense strand to SEQ ID NO: 1020830
aagcugaugaggaagaucc

SEQ ID NO: 1020832 - RNA, 19 nt, Artificial Sequence
  Description of Artificial Sequence: Synthetic oligonucleotide
  Sense strand starting at position 1388 of SEQ ID NO: 914658
agaguuaaguccuuaagcu

SEQ ID NO: 1020833 - RNA, 19 nt, Artificial Sequence
  Description of Artificial Sequence: Synthetic oligonucleotide
  Antisense strand to SEQ ID NO: 1020832
agcuuaaggacuuaacucu

SEQ ID NO: 1020834 - RNA, 19 nt, Artificial Sequence
  Description of Artificial Sequence: Synthetic oligonucleotide
  Sense strand starting at position 1389 of SEQ ID NO: 914658
gaguuaaguccuuaagcuc

SEQ ID NO: 1020835 - RNA, 19 nt, Artificial Sequence
  Description of Artificial Sequence: Synthetic oligonucleotide
  Antisense strand to SEQ ID NO: 1020834
gagcuuaaggacuuaacuc

SEQ ID NO: 1020836 - RNA, 19 nt, Artificial Sequence
  Description of Artificial Sequence: Synthetic oligonucleotide
  Sense strand starting at position 1477 of SEQ ID NO: 914658
ggugaggaaugguuccgau

SEQ ID NO: 1020837 - RNA, 19 nt, Artificial Sequence
  Description of Artificial Sequence: Synthetic oligonucleotide
  Antisense strand to SEQ ID NO: 1020836
aucggaaccauuccucacc

SEQ ID NO: 1020838 - RNA, 19 nt, Artificial Sequence
  Description of Artificial Sequence: Synthetic oligonucleotide
  Sense strand starting at position 1510 of SEQ ID NO: 914658
guauccaggucuuccgaga

SEQ ID NO: 1020839 - RNA, 19 nt, Artificial Sequence
  Description of Artificial Sequence: Synthetic oligonucleotide
  Antisense strand to SEQ ID NO: 1020838
ucucggaagaccuggauac

SEQ ID NO: 1020840 - RNA, 19 nt, Artificial Sequence
  Description of Artificial Sequence: Synthetic oligonucleotide
  Sense strand starting at position 2209 of SEQ ID NO: 914658
gaacuauccugagccguaa

SEQ ID NO: 1020841 - RNA, 19 nt, Artificial Sequence
  Description of Artificial Sequence: Synthetic oligonucleotide
  Antisense strand to SEQ ID NO: 1020840
uuacggcucaggauaguuc

SEQ ID NO: 1020842 - RNA, 19 nt, Artificial Sequence
  Description of Artificial Sequence: Synthetic oligonucleotide
  Sense strand starting at position 2264 of SEQ ID NO: 914658
caggaagggugggaaauuu

SEQ ID NO: 1020843 - RNA, 19 nt, Artificial Sequence
  Description of Artificial Sequence: Synthetic oligonucleotide
  Antisense strand to SEQ ID NO: 1020842
aaauuucccacccuuccug

SEQ ID NO: 1020844 - RNA, 19 nt, Artificial Sequence
  Description of Artificial Sequence: Synthetic oligonucleotide
  Sense strand starting at position 2336 of SEQ ID NO: 914658
gggcucuggcuccaaacuu

SEQ ID NO: 1020845 - RNA, 19 nt, Artificial Sequence
  Description of Artificial Sequence: Synthetic oligonucleotide
  Antisense strand to SEQ ID NO: 1020844
aaguuuggagccagagccc

SEQ ID NO: 1020846 - RNA, 19 nt, Artificial Sequence
  Description of Artificial Sequence: Synthetic oligonucleotide
  Sense strand starting at position 2385 of SEQ ID NO: 914658
cggucuuccugaaggagga

SEQ ID NO: 1020847 - RNA, 19 nt, Artificial Sequence
  Description of Artificial Sequence: Synthetic oligonucleotide
  Antisense strand to SEQ ID NO: 1020846
uccuccuucaggaagaccg

SEQ ID NO: 1020848 - RNA, 19 nt, Artificial Sequence
  Description of Artificial Sequence: Synthetic oligonucleotide
  Sense strand starting at position 2899 of SEQ ID NO: 914658
gcgcgcucugauccuuuaa

SEQ ID NO: 1020849 - RNA, 19 nt, Artificial Sequence
  Description of Artificial Sequence: Synthetic oligonucleotide
  Antisense strand to SEQ ID NO: 1020848
uuaaaggaucagagcgcgc

SEQ ID NO: 1020850 - RNA, 19 nt, Artificial Sequence
  Description of Artificial Sequence: Synthetic oligonucleotide
  Sense strand starting at position 2900 of SEQ ID NO: 914658
cgcgcucugauccuuuaau

SEQ ID NO: 1020851 - RNA, 19 nt, Artificial Sequence
  Description of Artificial Sequence: Synthetic oligonucleotide
  Antisense strand to SEQ ID NO: 1020850
auuaaaggaucagagcgcg

SEQ ID NO: 1020852 - RNA, 19 nt, Artificial Sequence
  Description of Artificial Sequence: Synthetic oligonucleotide
  Sense strand starting at position 2911 of SEQ ID NO: 914658
ccuuuaauucccgagacua

SEQ ID NO: 1020853 - RNA, 19 nt, Artificial Sequence
  Description of Artificial Sequence: Synthetic oligonucleotide
  Antisense strand to SEQ ID NO: 1020852
uagucucgggaauuaaagg

SEQ ID NO: 1020854 - RNA, 19 nt, Artificial Sequence
  Description of Artificial Sequence: Synthetic oligonucleotide
  Sense strand starting at position 2929 of SEQ ID NO: 914658
agaucuuggucgcugugaa

SEQ ID NO: 1020855 - RNA, 19 nt, Artificial Sequence
  Description of Artificial Sequence: Synthetic oligonucleotide
  Antisense strand to SEQ ID NO: 1020854
uucacagcgaccaagaucu

SEQ ID NO: 1020856 - RNA, 19 nt, Artificial Sequence
  Description of Artificial Sequence: Synthetic oligonucleotide
  Sense strand starting at position 2930 of SEQ ID NO: 914658
gaucuuggucgcugugaau

SEQ ID NO: 1020857 - RNA, 19 nt, Artificial Sequence
  Description of Artificial Sequence: Synthetic oligonucleotide
  Antisense strand to SEQ ID NO: 1020856
auucacagcgaccaagauc

SEQ ID NO: 1020858 - RNA, 19 nt, Artificial Sequence
  Description of Artificial Sequence: Synthetic oligonucleotide
  Sense strand starting at position 2937 of SEQ ID NO: 914658
gucgcugugaauugaauuu

SEQ ID NO: 1020859 - RNA, 19 nt, Artificial Sequence
  Description of Artificial Sequence: Synthetic oligonucleotide
  Antisense strand to SEQ ID NO: 1020858
aaauucaauucacagcgac

SEQ ID NO: 1020860 - RNA, 19 nt, Artificial Sequence
  Description of Artificial Sequence: Synthetic oligonucleotide
  Sense strand starting at position 3192 of SEQ ID NO: 914658
cagagcugucugggaagaa

SEQ ID NO: 1020861 - RNA, 19 nt, Artificial Sequence
  Description of Artificial Sequence: Synthetic oligonucleotide
  Antisense strand to SEQ ID NO: 1020860
uucuucccagacagcucug

SEQ ID NO: 1020862 - RNA, 19 nt, Artificial Sequence
  Description of Artificial Sequence: Synthetic oligonucleotide
  Sense strand starting at position 3390 of SEQ ID NO: 914658
ggcuuugagaaaugccuau

SEQ ID NO: 1020863 - RNA, 19 nt, Artificial Sequence
  Description of Artificial Sequence: Synthetic oligonucleotide
  Antisense strand to SEQ ID NO: 1020862
auaggcauuucucaaagcc

SEQ ID NO: 1020864 - RNA, 19 nt, Artificial Sequence
  Description of Artificial Sequence: Synthetic oligonucleotide
  Sense strand starting at position 3394 of SEQ ID NO: 914658
uugagaaaugccuaugcaa

SEQ ID NO: 1020865 - RNA, 19 nt, Artificial Sequence
  Description of Artificial Sequence: Synthetic oligonucleotide
  Antisense strand to SEQ ID NO: 1020864
uugcauaggcauuucucaa

SEQ ID NO: 1020866 - RNA, 19 nt, Artificial Sequence
  Description of Artificial Sequence: Synthetic oligonucleotide
  Sense strand starting at position 3397 of SEQ ID NO: 914658
agaaaugccuaugcaaaca

SEQ ID NO: 1020867 - RNA, 19 nt, Artificial Sequence
  Description of Artificial Sequence: Synthetic oligonucleotide
  Antisense strand to SEQ ID NO: 1020866
uguuugcauaggcauuucu

SEQ ID NO: 1020868 - RNA, 19 nt, Artificial Sequence
  Description of Artificial Sequence: Synthetic oligonucleotide
  Sense strand starting at position 3479 of SEQ ID NO: 914658
ggaagagauaccugccagu

SEQ ID NO: 1020869 - RNA, 19 nt, Artificial Sequence
  Description of Artificial Sequence: Synthetic oligonucleotide
  Antisense strand to SEQ ID NO: 1020868
acuggcagguaucucuucc

SEQ ID NO: 1020870 - RNA, 19 nt, Artificial Sequence
  Description of Artificial Sequence: Synthetic oligonucleotide
  Sense strand starting at position 3610 of SEQ ID NO: 914658
ggcuuuagucugcauugca

SEQ ID NO: 1020871 - RNA, 19 nt, Artificial Sequence
  Description of Artificial Sequence: Synthetic oligonucleotide
  Antisense strand to SEQ ID NO: 1020870
ugcaaugcagacuaaagcc

SEQ ID NO: 1020872 - RNA, 19 nt, Artificial Sequence
  Description of Artificial Sequence: Synthetic oligonucleotide
  Sense strand starting at position 3649 of SEQ ID NO: 914658
ccuccuuuguuuccagaca

SEQ ID NO: 1020873 - RNA, 19 nt, Artificial Sequence
  Description of Artificial Sequence: Synthetic oligonucleotide
  Antisense strand to SEQ ID NO: 1020872
ugucuggaaacaaaggagg

SEQ ID NO: 1020874 - RNA, 19 nt, Artificial Sequence
  Description of Artificial Sequence: Synthetic oligonucleotide
  Sense strand starting at position 3682 of SEQ ID NO: 914658
aguaacuccuuccaagaga

SEQ ID NO: 1020875 - RNA, 19 nt, Artificial Sequence
  Description of Artificial Sequence: Synthetic oligonucleotide
  Antisense strand to SEQ ID NO: 1020874
ucucuuggaaggaguuacu

SEQ ID NO: 1020876 - RNA, 19 nt, Artificial Sequence
  Description of Artificial Sequence: Synthetic oligonucleotide
  Sense strand starting at position 3759 of SEQ ID NO: 914658
ugugcuuauccugaucaag

SEQ ID NO: 1020877 - RNA, 19 nt, Artificial Sequence
  Description of Artificial Sequence: Synthetic oligonucleotide
  Antisense strand to SEQ ID NO: 1020876
cuugaucaggauaagcaca

SEQ ID NO: 1020878 - RNA, 19 nt, Artificial Sequence
  Description of Artificial Sequence: Synthetic oligonucleotide
  Sense strand starting at position 3761 of SEQ ID NO: 914658
ugcuuauccugaucaagug

SEQ ID NO: 1020879 - RNA, 19 nt, Artificial Sequence
  Description of Artificial Sequence: Synthetic oligonucleotide
  Antisense strand to SEQ ID NO: 1020878
cacuugaucaggauaagca

SEQ ID NO: 1020880 - RNA, 19 nt, Artificial Sequence
  Description of Artificial Sequence: Synthetic oligonucleotide
  Sense strand starting at position 3848 of SEQ ID NO: 914658
ugacuugugacaugggaag

SEQ ID NO: 1020881 - RNA, 19 nt, Artificial Sequence
  Description of Artificial Sequence: Synthetic oligonucleotide
  Antisense strand to SEQ ID NO: 1020880
cuucccaugucacaaguca

SEQ ID NO: 1020882 - RNA, 19 nt, Artificial Sequence
  Description of Artificial Sequence: Synthetic oligonucleotide
  Sense strand starting at position 3850 of SEQ ID NO: 914658
acuugugacaugggaagua

SEQ ID NO: 1020883 - RNA, 19 nt, Artificial Sequence
  Description of Artificial Sequence: Synthetic oligonucleotide
  Antisense strand to SEQ ID NO: 1020882
uacuucccaugucacaagu

SEQ ID NO: 1020884 - RNA, 19 nt, Artificial Sequence
  Description of Artificial Sequence: Synthetic oligonucleotide
  Sense strand starting at position 3884 of SEQ ID NO: 914658
auuuguagucagugaaugu

SEQ ID NO: 1020885 - RNA, 19 nt, Artificial Sequence
  Description of Artificial Sequence: Synthetic oligonucleotide
  Antisense strand to SEQ ID NO: 1020884
acauucacugacuacaaau

SEQ ID NO: 1020886 - RNA, 19 nt, Artificial Sequence
  Description of Artificial Sequence: Synthetic oligonucleotide
  Sense strand starting at position 3885 of SEQ ID NO: 914658
uuuguagucagugaauguc

SEQ ID NO: 1020887 - RNA, 19 nt, Artificial Sequence
  Description of Artificial Sequence: Synthetic oligonucleotide
  Antisense strand to SEQ ID NO: 1020886
gacauucacugacuacaaa

SEQ ID NO: 1020888 - RNA, 19 nt, Artificial Sequence
  Description of Artificial Sequence: Synthetic oligonucleotide
  Sense strand starting at position 3893 of SEQ ID NO: 914658
cagugaaugucuccaugug

SEQ ID NO: 1020889 - RNA, 19 nt, Artificial Sequence
  Description of Artificial Sequence: Synthetic oligonucleotide
  Antisense strand to SEQ ID NO: 1020888
cacauggagacauucacug

SEQ ID NO: 1020890 - RNA, 19 nt, Artificial Sequence
  Description of Artificial Sequence: Synthetic oligonucleotide
  Sense strand starting at position 3894 of SEQ ID NO: 914658
agugaaugucuccauguga

SEQ ID NO: 1020891 - RNA, 19 nt, Artificial Sequence
  Description of Artificial Sequence: Synthetic oligonucleotide
  Antisense strand to SEQ ID NO: 1020890
ucacauggagacauucacu

SEQ ID NO: 1020892 - RNA, 19 nt, Artificial Sequence
  Description of Artificial Sequence: Synthetic oligonucleotide
  Sense strand starting at position 3931 of SEQ ID NO: 914658
aagauucuuugaccguaaa

SEQ ID NO: 1020893 - RNA, 19 nt, Artificial Sequence
  Description of Artificial Sequence: Synthetic oligonucleotide
  Antisense strand to SEQ ID NO: 1020892
uuuacggucaaagaaucuu

SEQ ID NO: 1020894 - RNA, 19 nt, Artificial Sequence
  Description of Artificial Sequence: Synthetic oligonucleotide
  Sense strand starting at position 3932 of SEQ ID NO: 914658
agauucuuugaccguaaag

SEQ ID NO: 1020895 - RNA, 19 nt, Artificial Sequence
  Description of Artificial Sequence: Synthetic oligonucleotide
  Antisense strand to SEQ ID NO: 1020894
cuuuacggucaaagaaucu

SEQ ID NO: 1020896 - RNA, 19 nt, Artificial Sequence
  Description of Artificial Sequence: Synthetic oligonucleotide
  Sense strand starting at position 3934 of SEQ ID NO: 914658
auucuuugaccguaaagaa

SEQ ID NO: 1020897 - RNA, 19 nt, Artificial Sequence
  Description of Artificial Sequence: Synthetic oligonucleotide
  Antisense strand to SEQ ID NO: 1020896
uucuuuacggucaaagaau

SEQ ID NO: 1020898 - RNA, 19 nt, Artificial Sequence
  Description of Artificial Sequence: Synthetic oligonucleotide
  Sense strand starting at position 11 of SEQ ID NO: 914659
uuuaaaguugggugcuaaa

SEQ ID NO: 1020899 - RNA, 19 nt, Artificial Sequence
  Description of Artificial Sequence: Synthetic oligonucleotide
  Antisense strand to SEQ ID NO: 1020898
uuuagcacccaacuuuaaa

SEQ ID NO: 1020900 - RNA, 19 nt, Artificial Sequence
  Description of Artificial Sequence: Synthetic oligonucleotide
  Sense strand starting at position 14 of SEQ ID NO: 914659
aaaguugggugcuaaacua

SEQ ID NO: 1020901 - RNA, 19 nt, Artificial Sequence
  Description of Artificial Sequence: Synthetic oligonucleotide
  Antisense strand to SEQ ID NO: 1020900
uaguuuagcacccaacuuu

SEQ ID NO: 1020902 - RNA, 19 nt, Artificial Sequence
  Description of Artificial Sequence: Synthetic oligonucleotide
  Sense strand starting at position 21 of SEQ ID NO: 914659
ggugcuaaacuaugaugua

SEQ ID NO: 1020903 - RNA, 19 nt, Artificial Sequence
  Description of Artificial Sequence: Synthetic oligonucleotide
  Antisense strand to SEQ ID NO: 1020902
uacaucauaguuuagcacc

SEQ ID NO: 1020904 - RNA, 19 nt, Artificial Sequence
  Description of Artificial Sequence: Synthetic oligonucleotide
  Sense strand starting at position 22 of SEQ ID NO: 914659
gugcuaaacuaugauguag

SEQ ID NO: 1020905 - RNA, 19 nt, Artificial Sequence
  Description of Artificial Sequence: Synthetic oligonucleotide
  Antisense strand to SEQ ID NO: 1020904
cuacaucauaguuuagcac

SEQ ID NO: 1020906 - RNA, 19 nt, Artificial Sequence
  Description of Artificial Sequence: Synthetic oligonucleotide
  Sense strand starting at position 561 of SEQ ID NO: 914659
uuaccauacuucucaggga

SEQ ID NO: 1020907 - RNA, 19 nt, Artificial Sequence
  Description of Artificial Sequence: Synthetic oligonucleotide
  Antisense strand to SEQ ID NO: 1020906
ucccugagaaguaugguaa

SEQ ID NO: 1020908 - RNA, 19 nt, Artificial Sequence
  Description of Artificial Sequence: Synthetic oligonucleotide
  Sense strand starting at position 564 of SEQ ID NO: 914659
ccauacuucucagggaaag

SEQ ID NO: 1020909 - RNA, 19 nt, Artificial Sequence
  Description of Artificial Sequence: Synthetic oligonucleotide
  Antisense strand to SEQ ID NO: 1020908
cuuucccugagaaguaugg

SEQ ID NO: 1020910 - RNA, 19 nt, Artificial Sequence
  Description of Artificial Sequence: Synthetic oligonucleotide
  Sense strand starting at position 614 of SEQ ID NO: 914659
accagauuguuagccucaa

SEQ ID NO: 1020911 - RNA, 19 nt, Artificial Sequence
  Description of Artificial Sequence: Synthetic oligonucleotide
  Antisense strand to SEQ ID NO: 1020910
uugaggcuaacaaucuggu

SEQ ID NO: 1020912 - RNA, 19 nt, Artificial Sequence
  Description of Artificial Sequence: Synthetic oligonucleotide
  Sense strand starting at position 615 of SEQ ID NO: 914659
ccagauuguuagccucaag

SEQ ID NO: 1020913 - RNA, 19 nt, Artificial Sequence
  Description of Artificial Sequence: Synthetic oligonucleotide
  Antisense strand to SEQ ID NO: 1020912
cuugaggcuaacaaucugg

SEQ ID NO: 1020914 - RNA, 19 nt, Artificial Sequence
  Description of Artificial Sequence: Synthetic oligonucleotide
  Sense strand starting at position 1074 of SEQ ID NO: 914659
cccauagguucgcaggaaa

SEQ ID NO: 1020915 - RNA, 19 nt, Artificial Sequence
  Description of Artificial Sequence: Synthetic oligonucleotide
  Antisense strand to SEQ ID NO: 1020914
uuuccugcgaaccuauggg

SEQ ID NO: 1020916 - RNA, 19 nt, Artificial Sequence
  Description of Artificial Sequence: Synthetic oligonucleotide
  Sense strand starting at position 1234 of SEQ ID NO: 914659
agcuguugccauggaaaca

SEQ ID NO: 1020917 - RNA, 19 nt, Artificial Sequence
  Description of Artificial Sequence: Synthetic oligonucleotide
  Antisense strand to SEQ ID NO: 1020916
uguuuccauggcaacagcu

SEQ ID NO: 1020918 - RNA, 19 nt, Artificial Sequence
  Description of Artificial Sequence: Synthetic oligonucleotide
  Sense strand starting at position 1401 of SEQ ID NO: 914659
gcaggauacuucccaguuu

SEQ ID NO: 1020919 - RNA, 19 nt, Artificial Sequence
  Description of Artificial Sequence: Synthetic oligonucleotide
  Antisense strand to SEQ ID NO: 1020918
aaacugggaaguauccugc

SEQ ID NO: 1020920 - RNA, 19 nt, Artificial Sequence
  Description of Artificial Sequence: Synthetic oligonucleotide
  Sense strand starting at position 1460 of SEQ ID NO: 914659
cuggguauucugcauugga

SEQ ID NO: 1020921 - RNA, 19 nt, Artificial Sequence
  Description of Artificial Sequence: Synthetic oligonucleotide
  Antisense strand to SEQ ID NO: 1020920
uccaaugcagaauacccag

SEQ ID NO: 1020922 - RNA, 19 nt, Artificial Sequence
  Description of Artificial Sequence: Synthetic oligonucleotide
  Sense strand starting at position 1463 of SEQ ID NO: 914659
gguauucugcauuggagag

SEQ ID NO: 1020923 - RNA, 19 nt, Artificial Sequence
  Description of Artificial Sequence: Synthetic oligonucleotide
  Antisense strand to SEQ ID NO: 1020922
cucuccaaugcagaauacc

SEQ ID NO: 1020924 - RNA, 19 nt, Artificial Sequence
  Description of Artificial Sequence: Synthetic oligonucleotide
  Sense strand starting at position 1631 of SEQ ID NO: 914659
ucacacuugugcucacaca

SEQ ID NO: 1020925 - RNA, 19 nt, Artificial Sequence
  Description of Artificial Sequence: Synthetic oligonucleotide
  Antisense strand to SEQ ID NO: 1020924
ugugugagcacaaguguga

SEQ ID NO: 1020926 - RNA, 19 nt, Artificial Sequence
  Description of Artificial Sequence: Synthetic oligonucleotide
  Sense strand starting at position 1991 of SEQ ID NO: 914659
ggagaccucuaccagguua

SEQ ID NO: 1020927 - RNA, 19 nt, Artificial Sequence
  Description of Artificial Sequence: Synthetic oligonucleotide
  Antisense strand to SEQ ID NO: 1020926
uaaccugguagaggucucc

SEQ ID NO: 1020928 - RNA, 19 nt, Artificial Sequence
  Description of Artificial Sequence: Synthetic oligonucleotide
  Sense strand starting at position 2188 of SEQ ID NO: 914659
cggcaaaugcgggauugaa

SEQ ID NO: 1020929 - RNA, 19 nt, Artificial Sequence
  Description of Artificial Sequence: Synthetic oligonucleotide
  Antisense strand to SEQ ID NO: 1020928
uucaaucccgcauuugccg

SEQ ID NO: 1020930 - RNA, 19 nt, Artificial Sequence
  Description of Artificial Sequence: Synthetic oligonucleotide
  Sense strand starting at position 2964 of SEQ ID NO: 914659
gccagaagcgcucuuucgu

SEQ ID NO: 1020931 - RNA, 19 nt, Artificial Sequence
  Description of Artificial Sequence: Synthetic oligonucleotide
  Antisense strand to SEQ ID NO: 1020930
acgaaagagcgcuucuggc

SEQ ID NO: 1020932 - RNA, 19 nt, Artificial Sequence
  Description of Artificial Sequence: Synthetic oligonucleotide
  Sense strand starting at position 2965 of SEQ ID NO: 914659
ccagaagcgcucuuucgua

SEQ ID NO: 1020933 - RNA, 19 nt, Artificial Sequence
  Description of Artificial Sequence: Synthetic oligonucleotide
  Antisense strand to SEQ ID NO: 1020932
uacgaaagagcgcuucugg

SEQ ID NO: 1020934 - RNA, 19 nt, Artificial Sequence
  Description of Artificial Sequence: Synthetic oligonucleotide
  Sense strand starting at position 2970 of SEQ ID NO: 914659
agcgcucuuucguaacgga

SEQ ID NO: 1020935 - RNA, 19 nt, Artificial Sequence
  Description of Artificial Sequence: Synthetic oligonucleotide
  Antisense strand to SEQ ID NO: 1020934
uccguuacgaaagagcgcu

SEQ ID NO: 1020936 - RNA, 19 nt, Artificial Sequence
  Description of Artificial Sequence: Synthetic oligonucleotide
  Sense strand starting at position 2973 of SEQ ID NO: 914659
gcucuuucguaacggagga

SEQ ID NO: 1020937 - RNA, 19 nt, Artificial Sequence
  Description of Artificial Sequence: Synthetic oligonucleotide
  Antisense strand to SEQ ID NO: 1020936
uccuccguuacgaaagagc

SEQ ID NO: 1020938 - RNA, 19 nt, Artificial Sequence
  Description of Artificial Sequence: Synthetic oligonucleotide
  Sense strand starting at position 3256 of SEQ ID NO: 914659
gugggugaagccgacuuaa

SEQ ID NO: 1020939 - RNA, 19 nt, Artificial Sequence
  Description of Artificial Sequence: Synthetic oligonucleotide
  Antisense strand to SEQ ID NO: 1020938
uuaagucggcuucacccac

SEQ ID NO: 1020940 - RNA, 19 nt, Artificial Sequence
  Description of Artificial Sequence: Synthetic oligonucleotide
  Sense strand starting at position 3279 of SEQ ID NO: 914659
ugcaauaaguccuggauug

SEQ ID NO: 1020941 - RNA, 19 nt, Artificial Sequence
  Description of Artificial Sequence: Synthetic oligonucleotide
  Antisense strand to SEQ ID NO: 1020940
caauccaggacuuauugca

SEQ ID NO: 1020942 - RNA, 19 nt, Artificial Sequence
  Description of Artificial Sequence: Synthetic oligonucleotide
  Sense strand starting at position 3295 of SEQ ID NO: 914659
uugcgagucccggaaggua

SEQ ID NO: 1020943 - RNA, 19 nt, Artificial Sequence
  Description of Artificial Sequence: Synthetic oligonucleotide
  Antisense strand to SEQ ID NO: 1020942
uaccuuccgggacucgcaa

SEQ ID NO: 1020944 - RNA, 19 nt, Artificial Sequence
  Description of Artificial Sequence: Synthetic oligonucleotide
  Sense strand starting at position 3334 of SEQ ID NO: 914659
gagaaagcucaaggucacu

SEQ ID NO: 1020945 - RNA, 19 nt, Artificial Sequence
  Description of Artificial Sequence: Synthetic oligonucleotide
  Antisense strand to SEQ ID NO: 1020944
agugaccuugagcuuucuc

SEQ ID NO: 1020946 - RNA, 19 nt, Artificial Sequence
  Description of Artificial Sequence: Synthetic oligonucleotide
  Sense strand starting at position 3753 of SEQ ID NO: 914659
gcaugugugauucgaggaa

SEQ ID NO: 1020947 - RNA, 19 nt, Artificial Sequence
  Description of Artificial Sequence: Synthetic oligonucleotide
  Antisense strand to SEQ ID NO: 1020946
uuccucgaaucacacaugc

SEQ ID NO: 1020948 - RNA, 19 nt, Artificial Sequence
  Description of Artificial Sequence: Synthetic oligonucleotide
  Sense strand starting at position 3765 of SEQ ID NO: 914659
cgaggaaccgcagaugauu

SEQ ID NO: 1020949 - RNA, 19 nt, Artificial Sequence
  Description of Artificial Sequence: Synthetic oligonucleotide
  Antisense strand to SEQ ID NO: 1020948
aaucaucugcgguuccucg

SEQ ID NO: 1020950 - RNA, 19 nt, Artificial Sequence
  Description of Artificial Sequence: Synthetic oligonucleotide
  Sense strand starting at position 3777 of SEQ ID NO: 914659
gaugauucgagguagcagu

SEQ ID NO: 1020951 - RNA, 19 nt, Artificial Sequence
  Description of Artificial Sequence: Synthetic oligonucleotide
  Antisense strand to SEQ ID NO: 1020950
acugcuaccucgaaucauc

SEQ ID NO: 1020952 - RNA, 19 nt, Artificial Sequence
  Description of Artificial Sequence: Synthetic oligonucleotide
  Sense strand starting at position 3803 of SEQ ID NO: 914659
ggcacucaggucuguguua

SEQ ID NO: 1020953 - RNA, 19 nt, Artificial Sequence
  Description of Artificial Sequence: Synthetic oligonucleotide
  Antisense strand to SEQ ID NO: 1020952
uaacacagaccugagugcc

SEQ ID NO: 1020954 - RNA, 19 nt, Artificial Sequence
  Description of Artificial Sequence: Synthetic oligonucleotide
  Sense strand starting at position 3853 of SEQ ID NO: 914659
gaguguuaagguggaggau

SEQ ID NO: 1020955 - RNA, 19 nt, Artificial Sequence
  Description of Artificial Sequence: Synthetic oligonucleotide
  Antisense strand to SEQ ID NO: 1020954
auccuccaccuuaacacuc

SEQ ID NO: 1020956 - RNA, 19 nt, Artificial Sequence
  Description of Artificial Sequence: Synthetic oligonucleotide
  Sense strand starting at position 375 of SEQ ID NO: 914660
cccauagguucgcaggaaa

SEQ ID NO: 1020957 - RNA, 19 nt, Artificial Sequence
  Description of Artificial Sequence: Synthetic oligonucleotide
  Antisense strand to SEQ ID NO: 1020956
uuuccugcgaaccuauggg

SEQ ID NO: 1020958 - RNA, 19 nt, Artificial Sequence
  Description of Artificial Sequence: Synthetic oligonucleotide
  Sense strand starting at position 535 of SEQ ID NO: 914660
agcuguugccauggaaaca

SEQ ID NO: 1020959 - RNA, 19 nt, Artificial Sequence
  Description of Artificial Sequence: Synthetic oligonucleotide
  Antisense strand to SEQ ID NO: 1020958
uguuuccauggcaacagcu

SEQ ID NO: 1020960 - RNA, 19 nt, Artificial Sequence
  Description of Artificial Sequence: Synthetic oligonucleotide
  Sense strand starting at position 702 of SEQ ID NO: 914660
gcaggauacuucccaguuu

SEQ ID NO: 1020961 - RNA, 19 nt, Artificial Sequence
  Description of Artificial Sequence: Synthetic oligonucleotide
  Antisense strand to SEQ ID NO: 1020960
aaacugggaaguauccugc

SEQ ID NO: 1020962 - RNA, 19 nt, Artificial Sequence
  Description of Artificial Sequence: Synthetic oligonucleotide
  Sense strand starting at position 761 of SEQ ID NO: 914660
cuggguauucugcauugga

SEQ ID NO: 1020963 - RNA, 19 nt, Artificial Sequence
  Description of Artificial Sequence: Synthetic oligonucleotide
  Antisense strand to SEQ ID NO: 1020962
uccaaugcagaauacccag

SEQ ID NO: 1020964 - RNA, 19 nt, Artificial Sequence
  Description of Artificial Sequence: Synthetic oligonucleotide
  Sense strand starting at position 764 of SEQ ID NO: 914660
gguauucugcauuggagag

SEQ ID NO: 1020965 - RNA, 19 nt, Artificial Sequence
  Description of Artificial Sequence: Synthetic oligonucleotide
  Antisense strand to SEQ ID NO: 1020964
cucuccaaugcagaauacc

SEQ ID NO: 1020966 - RNA, 19 nt, Artificial Sequence
  Description of Artificial Sequence: Synthetic oligonucleotide
  Sense strand starting at position 932 of SEQ ID NO: 914660
ucacacuugugcucacaca

SEQ ID NO: 1020967 - RNA, 19 nt, Artificial Sequence
  Description of Artificial Sequence: Synthetic oligonucleotide
  Antisense strand to SEQ ID NO: 1020966
ugugugagcacaaguguga

SEQ ID NO: 1020968 - RNA, 19 nt, Artificial Sequence
  Description of Artificial Sequence: Synthetic oligonucleotide
  Sense strand starting at position 1292 of SEQ ID NO: 914660
ggagaccucuaccagguua

SEQ ID NO: 1020969 - RNA, 19 nt, Artificial Sequence
  Description of Artificial Sequence: Synthetic oligonucleotide
  Antisense strand to SEQ ID NO: 1020968
uaaccugguagaggucucc

SEQ ID NO: 1020970 - RNA, 19 nt, Artificial Sequence
  Description of Artificial Sequence: Synthetic oligonucleotide
  Sense strand starting at position 1489 of SEQ ID NO: 914660
cggcaaaugcgggauugaa

SEQ ID NO: 1020971 - RNA, 19 nt, Artificial Sequence
  Description of Artificial Sequence: Synthetic oligonucleotide
  Antisense strand to SEQ ID NO: 1020970
uucaaucccgcauuugccg

SEQ ID NO: 1020972 - RNA, 19 nt, Artificial Sequence
  Description of Artificial Sequence: Synthetic oligonucleotide
  Sense strand starting at position 2265 of SEQ ID NO: 914660
gccagaagcgcucuuucgu

SEQ ID NO: 1020973 - RNA, 19 nt, Artificial Sequence
  Description of Artificial Sequence: Synthetic oligonucleotide
  Antisense strand to SEQ ID NO: 1020972
acgaaagagcgcuucuggc

SEQ ID NO: 1020974 - RNA, 19 nt, Artificial Sequence
  Description of Artificial Sequence: Synthetic oligonucleotide
  Sense strand starting at position 2266 of SEQ ID NO: 914660
ccagaagcgcucuuucgua

SEQ ID NO: 1020975 - RNA, 19 nt, Artificial Sequence
  Description of Artificial Sequence: Synthetic oligonucleotide
  Antisense strand to SEQ ID NO: 1020974
uacgaaagagcgcuucugg

SEQ ID NO: 1020976 - RNA, 19 nt, Artificial Sequence
  Description of Artificial Sequence: Synthetic oligonucleotide
  Sense strand starting at position 2271 of SEQ ID NO: 914660
agcgcucuuucguaacgga

SEQ ID NO: 1020977 - RNA, 19 nt, Artificial Sequence
  Description of Artificial Sequence: Synthetic oligonucleotide
  Antisense strand to SEQ ID NO: 1020976
uccguuacgaaagagcgcu

SEQ ID NO: 1020978 - RNA, 19 nt, Artificial Sequence
  Description of Artificial Sequence: Synthetic oligonucleotide
  Sense strand starting at position 2274 of SEQ ID NO: 914660
gcucuuucguaacggagga

SEQ ID NO: 1020979 - RNA, 19 nt, Artificial Sequence
  Description of Artificial Sequence: Synthetic oligonucleotide
  Antisense strand to SEQ ID NO: 1020978
uccuccguuacgaaagagc

SEQ ID NO: 1020980 - RNA, 19 nt, Artificial Sequence
  Description of Artificial Sequence: Synthetic oligonucleotide
  Sense strand starting at position 2557 of SEQ ID NO: 914660
gugggugaagccgacuuaa

SEQ ID NO: 1020981 - RNA, 19 nt, Artificial Sequence
  Description of Artificial Sequence: Synthetic oligonucleotide
  Antisense strand to SEQ ID NO: 1020980
uuaagucggcuucacccac

SEQ ID NO: 1020982 - RNA, 19 nt, Artificial Sequence
  Description of Artificial Sequence: Synthetic oligonucleotide
  Sense strand starting at position 2580 of SEQ ID NO: 914660
ugcaauaaguccuggauug

SEQ ID NO: 1020983 - RNA, 19 nt, Artificial Sequence
  Description of Artificial Sequence: Synthetic oligonucleotide
  Antisense strand to SEQ ID NO: 1020982
caauccaggacuuauugca

SEQ ID NO: 1020984 - RNA, 19 nt, Artificial Sequence
  Description of Artificial Sequence: Synthetic oligonucleotide
  Sense strand starting at position 2596 of SEQ ID NO: 914660
uugcgagucccggaaggua

SEQ ID NO: 1020985 - RNA, 19 nt, Artificial Sequence
  Description of Artificial Sequence: Synthetic oligonucleotide
  Antisense strand to SEQ ID NO: 1020984
uaccuuccgggacucgcaa

SEQ ID NO: 1020986 - RNA, 19 nt, Artificial Sequence
  Description of Artificial Sequence: Synthetic oligonucleotide
  Sense strand starting at position 2635 of SEQ ID NO: 914660
gagaaagcucaaggucacu

SEQ ID NO: 1020987 - RNA, 19 nt, Artificial Sequence
  Description of Artificial Sequence: Synthetic oligonucleotide
  Antisense strand to SEQ ID NO: 1020986
agugaccuugagcuuucuc

SEQ ID NO: 1020988 - RNA, 19 nt, Artificial Sequence
  Description of Artificial Sequence: Synthetic oligonucleotide
  Sense strand starting at position 3054 of SEQ ID NO: 914660
gcaugugugauucgaggaa

SEQ ID NO: 1020989 - RNA, 19 nt, Artificial Sequence
  Description of Artificial Sequence: Synthetic oligonucleotide
  Antisense strand to SEQ ID NO: 1020988
uuccucgaaucacacaugc

SEQ ID NO: 1020990 - RNA, 19 nt, Artificial Sequence
  Description of Artificial Sequence: Synthetic oligonucleotide
  Sense strand starting at position 3066 of SEQ ID NO: 914660
cgaggaaccgcagaugauu

SEQ ID NO: 1020991 - RNA, 19 nt, Artificial Sequence
  Description of Artificial Sequence: Synthetic oligonucleotide
  Antisense strand to SEQ ID NO: 1020990
aaucaucugcgguuccucg

SEQ ID NO: 1020992 - RNA, 19 nt, Artificial Sequence
  Description of Artificial Sequence: Synthetic oligonucleotide
  Sense strand starting at position 3078 of SEQ ID NO: 914660
gaugauucgagguagcagu

SEQ ID NO: 1020993 - RNA, 19 nt, Artificial Sequence
  Description of Artificial Sequence: Synthetic oligonucleotide
  Antisense strand to SEQ ID NO: 1020992
acugcuaccucgaaucauc

SEQ ID NO: 1020994 - RNA, 19 nt, Artificial Sequence
  Description of Artificial Sequence: Synthetic oligonucleotide
  Sense strand starting at position 3104 of SEQ ID NO: 914660
ggcacucaggucuguguua

SEQ ID NO: 1020995 - RNA, 19 nt, Artificial Sequence
  Description of Artificial Sequence: Synthetic oligonucleotide
  Antisense strand to SEQ ID NO: 1020994
uaacacagaccugagugcc

SEQ ID NO: 1020996 - RNA, 19 nt, Artificial Sequence
  Description of Artificial Sequence: Synthetic oligonucleotide
  Sense strand starting at position 3154 of SEQ ID NO: 914660
gaguguuaagguggaggau

SEQ ID NO: 1020997 - RNA, 19 nt, Artificial Sequence
  Description of Artificial Sequence: Synthetic oligonucleotide
  Antisense strand to SEQ ID NO: 1020996
auccuccaccuuaacacuc

SEQ ID NO: 1020998 - RNA, 19 nt, Artificial Sequence
  Description of Artificial Sequence: Synthetic oligonucleotide
  Sense strand starting at position 3559 of SEQ ID NO: 914660
gaauacuugugagugccaa

SEQ ID NO: 1020999 - RNA, 19 nt, Artificial Sequence
  Description of Artificial Sequence: Synthetic oligonucleotide
  Antisense strand to SEQ ID NO: 1020998
uuggcacucacaaguauuc

SEQ ID NO: 1021000 - RNA, 19 nt, Artificial Sequence
  Description of Artificial Sequence: Synthetic oligonucleotide
  Sense strand starting at position 3644 of SEQ ID NO: 914660
accagaaucugucguggga

SEQ ID NO: 1021001 - RNA, 19 nt, Artificial Sequence
  Description of Artificial Sequence: Synthetic oligonucleotide
  Antisense strand to SEQ ID NO: 1021000
ucccacgacagauucuggu

SEQ ID NO: 1021002 - RNA, 19 nt, Artificial Sequence
  Description of Artificial Sequence: Synthetic oligonucleotide
  Sense strand starting at position 3646 of SEQ ID NO: 914660
cagaaucugucgugggagu

SEQ ID NO: 1021003 - RNA, 19 nt, Artificial Sequence
  Description of Artificial Sequence: Synthetic oligonucleotide
  Antisense strand to SEQ ID NO: 1021002
acucccacgacagauucug

SEQ ID NO: 1021004 - RNA, 19 nt, Artificial Sequence
  Description of Artificial Sequence: Synthetic oligonucleotide
  Sense strand starting at position 3647 of SEQ ID NO: 914660
agaaucugucgugggaguu

SEQ ID NO: 1021005 - RNA, 19 nt, Artificial Sequence
  Description of Artificial Sequence: Synthetic oligonucleotide
  Antisense strand to SEQ ID NO: 1021004
aacucccacgacagauucu

SEQ ID NO: 1021006 - RNA, 19 nt, Artificial Sequence
  Description of Artificial Sequence: Synthetic oligonucleotide
  Sense strand starting at position 3648 of SEQ ID NO: 914660
gaaucugucgugggaguuc

SEQ ID NO: 1021007 - RNA, 19 nt, Artificial Sequence
  Description of Artificial Sequence: Synthetic oligonucleotide
  Antisense strand to SEQ ID NO: 1021006
gaacucccacgacagauuc

SEQ ID NO: 1021008 - RNA, 19 nt, Artificial Sequence
  Description of Artificial Sequence: Synthetic oligonucleotide
  Sense strand starting at position 1 of SEQ ID NO: 914661
gauuauuuguuugcagugu

SEQ ID NO: 1021009 - RNA, 19 nt, Artificial Sequence
  Description of Artificial Sequence: Synthetic oligonucleotide
  Antisense strand to SEQ ID NO: 1021008
acacugcaaacaaauaauc

SEQ ID NO: 1021010 - RNA, 19 nt, Artificial Sequence
  Description of Artificial Sequence: Synthetic oligonucleotide
  Sense strand starting at position 596 of SEQ ID NO: 914661
ccugaacuguuuguuauuu

SEQ ID NO: 1021011 - RNA, 19 nt, Artificial Sequence
  Description of Artificial Sequence: Synthetic oligonucleotide
  Antisense strand to SEQ ID NO: 1021010
aaauaacaaacaguucagg

SEQ ID NO: 1021012 - RNA, 19 nt, Artificial Sequence
  Description of Artificial Sequence: Synthetic oligonucleotide
  Sense strand starting at position 616 of SEQ ID NO: 914661
acuauugaguuggcaagga

SEQ ID NO: 1021013 - RNA, 19 nt, Artificial Sequence
  Description of Artificial Sequence: Synthetic oligonucleotide
  Antisense strand to SEQ ID NO: 1021012
uccuugccaacucaauagu

SEQ ID NO: 1021014 - RNA, 19 nt, Artificial Sequence
  Description of Artificial Sequence: Synthetic oligonucleotide
  Sense strand starting at position 620 of SEQ ID NO: 914661
uugaguuggcaaggaugga

SEQ ID NO: 1021015 - RNA, 19 nt, Artificial Sequence
  Description of Artificial Sequence: Synthetic oligonucleotide
  Antisense strand to SEQ ID NO: 1021014
uccauccuugccaacucaa

SEQ ID NO: 1021016 - RNA, 19 nt, Artificial Sequence
  Description of Artificial Sequence: Synthetic oligonucleotide
  Sense strand starting at position 956 of SEQ ID NO: 914661
agcugauggaguuaucauu

SEQ ID NO: 1021017 - RNA, 19 nt, Artificial Sequence
  Description of Artificial Sequence: Synthetic oligonucleotide
  Antisense strand to SEQ ID NO: 1021016
aaugauaacuccaucagcu

SEQ ID NO: 1021018 - RNA, 19 nt, Artificial Sequence
  Description of Artificial Sequence: Synthetic oligonucleotide
  Sense strand starting at position 1024 of SEQ ID NO: 914661
auggcaguggucuaaagua

SEQ ID NO: 1021019 - RNA, 19 nt, Artificial Sequence
  Description of Artificial Sequence: Synthetic oligonucleotide
  Antisense strand to SEQ ID NO: 1021018
uacuuuagaccacugccau

SEQ ID NO: 1021020 - RNA, 19 nt, Artificial Sequence
  Description of Artificial Sequence: Synthetic oligonucleotide
  Sense strand starting at position 1143 of SEQ ID NO: 914661
uuaaguuugccugaagaaa

SEQ ID NO: 1021021 - RNA, 19 nt, Artificial Sequence
  Description of Artificial Sequence: Synthetic oligonucleotide
  Antisense strand to SEQ ID NO: 1021020
uuucuucaggcaaacuuaa

SEQ ID NO: 1021022 - RNA, 19 nt, Artificial Sequence
  Description of Artificial Sequence: Synthetic oligonucleotide
  Sense strand starting at position 1220 of SEQ ID NO: 914661
aagugucacggccagauaa

SEQ ID NO: 1021023 - RNA, 19 nt, Artificial Sequence
  Description of Artificial Sequence: Synthetic oligonucleotide
  Antisense strand to SEQ ID NO: 1021022
uuaucuggccgugacacuu

SEQ ID NO: 1021024 - RNA, 19 nt, Artificial Sequence
  Description of Artificial Sequence: Synthetic oligonucleotide
  Sense strand starting at position 1254 of SEQ ID NO: 914661
aggaauugccaucgacauc

SEQ ID NO: 1021025 - RNA, 19 nt, Artificial Sequence
  Description of Artificial Sequence: Synthetic oligonucleotide
  Antisense strand to SEQ ID NO: 1021024
gaugucgauggcaauuccu

SEQ ID NO: 1021026 - RNA, 19 nt, Artificial Sequence
  Description of Artificial Sequence: Synthetic oligonucleotide
  Sense strand starting at position 1255 of SEQ ID NO: 914661
ggaauugccaucgacaucu

SEQ ID NO: 1021027 - RNA, 19 nt, Artificial Sequence
  Description of Artificial Sequence: Synthetic oligonucleotide
  Antisense strand to SEQ ID NO: 1021026
agaugucgauggcaauucc

SEQ ID NO: 1021028 - RNA, 19 nt, Artificial Sequence
  Description of Artificial Sequence: Synthetic oligonucleotide
  Sense strand starting at position 1377 of SEQ ID NO: 914661
acuuguagaucuuuggaca

SEQ ID NO: 1021029 - RNA, 19 nt, Artificial Sequence
  Description of Artificial Sequence: Synthetic oligonucleotide
  Antisense strand to SEQ ID NO: 1021028
uguccaaagaucuacaagu

SEQ ID NO: 1021030 - RNA, 19 nt, Artificial Sequence
  Description of Artificial Sequence: Synthetic oligonucleotide
  Sense strand starting at position 1378 of SEQ ID NO: 914661
cuuguagaucuuuggacaa

SEQ ID NO: 1021031 - RNA, 19 nt, Artificial Sequence
  Description of Artificial Sequence: Synthetic oligonucleotide
  Antisense strand to SEQ ID NO: 1021030
uuguccaaagaucuacaag

SEQ ID NO: 1021032 - RNA, 19 nt, Artificial Sequence
  Description of Artificial Sequence: Synthetic oligonucleotide
  Sense strand starting at position 1529 of SEQ ID NO: 914661
uagauuuacuaggagugaa

SEQ ID NO: 1021033 - RNA, 19 nt, Artificial Sequence
  Description of Artificial Sequence: Synthetic oligonucleotide
  Antisense strand to SEQ ID NO: 1021032
uucacuccuaguaaaucua

SEQ ID NO: 1021034 - RNA, 19 nt, Artificial Sequence
  Description of Artificial Sequence: Synthetic oligonucleotide
  Sense strand starting at position 1582 of SEQ ID NO: 914661
gcuuuauuucuuuggaagu

SEQ ID NO: 1021035 - RNA, 19 nt, Artificial Sequence
  Description of Artificial Sequence: Synthetic oligonucleotide
  Antisense strand to SEQ ID NO: 1021034
acuuccaaagaaauaaagc

SEQ ID NO: 1021036 - RNA, 19 nt, Artificial Sequence
  Description of Artificial Sequence: Synthetic oligonucleotide
  Sense strand starting at position 1628 of SEQ ID NO: 914661
aaaucaggguuucugacaa

SEQ ID NO: 1021037 - RNA, 19 nt, Artificial Sequence
  Description of Artificial Sequence: Synthetic oligonucleotide
  Antisense strand to SEQ ID NO: 1021036
uugucagaaacccugauuu

SEQ ID NO: 1021038 - RNA, 19 nt, Artificial Sequence
  Description of Artificial Sequence: Synthetic oligonucleotide
  Sense strand starting at position 1647 of SEQ ID NO: 914661
guaaucuacggguaucuaa

SEQ ID NO: 1021039 - RNA, 19 nt, Artificial Sequence
  Description of Artificial Sequence: Synthetic oligonucleotide
  Antisense strand to SEQ ID NO: 1021038
uuagauacccguagauuac

SEQ ID NO: 1021040 - RNA, 19 nt, Artificial Sequence
  Description of Artificial Sequence: Synthetic oligonucleotide
  Sense strand starting at position 1728 of SEQ ID NO: 914661
gacuauucugacgagguua

SEQ ID NO: 1021041 - RNA, 19 nt, Artificial Sequence
  Description of Artificial Sequence: Synthetic oligonucleotide
  Antisense strand to SEQ ID NO: 1021040
uaaccucgucagaauaguc

SEQ ID NO: 1021042 - RNA, 19 nt, Artificial Sequence
  Description of Artificial Sequence: Synthetic oligonucleotide
  Sense strand starting at position 2036 of SEQ ID NO: 914661
augcaaagaccauaauguu

SEQ ID NO: 1021043 - RNA, 19 nt, Artificial Sequence
  Description of Artificial Sequence: Synthetic oligonucleotide
  Antisense strand to SEQ ID NO: 1021042
aacauuauggucuuugcau

SEQ ID NO: 1021044 - RNA, 19 nt, Artificial Sequence
  Description of Artificial Sequence: Synthetic oligonucleotide
  Sense strand starting at position 2167 of SEQ ID NO: 914661
acagcagucuagguggaaa

SEQ ID NO: 1021045 - RNA, 19 nt, Artificial Sequence
  Description of Artificial Sequence: Synthetic oligonucleotide
  Antisense strand to SEQ ID NO: 1021044
uuuccaccuagacugcugu

SEQ ID NO: 1021046 - RNA, 19 nt, Artificial Sequence
  Description of Artificial Sequence: Synthetic oligonucleotide
  Sense strand starting at position 2303 of SEQ ID NO: 914661
ggaacuaguucagugggau

SEQ ID NO: 1021047 - RNA, 19 nt, Artificial Sequence
  Description of Artificial Sequence: Synthetic oligonucleotide
  Antisense strand to SEQ ID NO: 1021046
aucccacugaacuaguucc

SEQ ID NO: 1021048 - RNA, 19 nt, Artificial Sequence
  Description of Artificial Sequence: Synthetic oligonucleotide
  Sense strand starting at position 2315 of SEQ ID NO: 914661
gugggauaacacuguaucu

SEQ ID NO: 1021049 - RNA, 19 nt, Artificial Sequence
  Description of Artificial Sequence: Synthetic oligonucleotide
  Antisense strand to SEQ ID NO: 1021048
agauacaguguuaucccac

SEQ ID NO: 1021050 - RNA, 19 nt, Artificial Sequence
  Description of Artificial Sequence: Synthetic oligonucleotide
  Sense strand starting at position 2352 of SEQ ID NO: 914661
ugcauuuacucucugcuga

SEQ ID NO: 1021051 - RNA, 19 nt, Artificial Sequence
  Description of Artificial Sequence: Synthetic oligonucleotide
  Antisense strand to SEQ ID NO: 1021050
ucagcagagaguaaaugca

SEQ ID NO: 1021052 - RNA, 19 nt, Artificial Sequence
  Description of Artificial Sequence: Synthetic oligonucleotide
  Sense strand starting at position 2353 of SEQ ID NO: 914661
gcauuuacucucugcugaa

SEQ ID NO: 1021053 - RNA, 19 nt, Artificial Sequence
  Description of Artificial Sequence: Synthetic oligonucleotide
  Antisense strand to SEQ ID NO: 1021052
uucagcagagaguaaaugc

SEQ ID NO: 1021054 - RNA, 19 nt, Artificial Sequence
  Description of Artificial Sequence: Synthetic oligonucleotide
  Sense strand starting at position 2360 of SEQ ID NO: 914661
cucucugcugaauauguaa

SEQ ID NO: 1021055 - RNA, 19 nt, Artificial Sequence
  Description of Artificial Sequence: Synthetic oligonucleotide
  Antisense strand to SEQ ID NO: 1021054
uuacauauucagcagagag

SEQ ID NO: 1021056 - RNA, 19 nt, Artificial Sequence
  Description of Artificial Sequence: Synthetic oligonucleotide
  Sense strand starting at position 2363 of SEQ ID NO: 914661
ucugcugaauauguaaaua

SEQ ID NO: 1021057 - RNA, 19 nt, Artificial Sequence
  Description of Artificial Sequence: Synthetic oligonucleotide
  Antisense strand to SEQ ID NO: 1021056
uauuuacauauucagcaga

SEQ ID NO: 1021058 - RNA, 19 nt, Artificial Sequence
  Description of Artificial Sequence: Synthetic oligonucleotide
  Sense strand starting at position 2447 of SEQ ID NO: 914661
agggaaagggauugcuuua

SEQ ID NO: 1021059 - RNA, 19 nt, Artificial Sequence
  Description of Artificial Sequence: Synthetic oligonucleotide
  Antisense strand to SEQ ID NO: 1021058
uaaagcaaucccuuucccu

SEQ ID NO: 1021060 - RNA, 19 nt, Artificial Sequence
  Description of Artificial Sequence: Synthetic oligonucleotide
  Sense strand starting at position 2852 of SEQ ID NO: 914661
ucucauuucuaugaaugga

SEQ ID NO: 1021061 - RNA, 19 nt, Artificial Sequence
  Description of Artificial Sequence: Synthetic oligonucleotide
  Antisense strand to SEQ ID NO: 1021060
uccauucauagaaaugaga

SEQ ID NO: 1021062 - RNA, 19 nt, Artificial Sequence
  Description of Artificial Sequence: Synthetic oligonucleotide
  Sense strand starting at position 2895 of SEQ ID NO: 914661
ucaguauuuggcugcuuaa

SEQ ID NO: 1021063 - RNA, 19 nt, Artificial Sequence
  Description of Artificial Sequence: Synthetic oligonucleotide
  Antisense strand to SEQ ID NO: 1021062
uuaagcagccaaauacuga

SEQ ID NO: 1021064 - RNA, 19 nt, Artificial Sequence
  Description of Artificial Sequence: Synthetic oligonucleotide
  Sense strand starting at position 2898 of SEQ ID NO: 914661
guauuuggcugcuuaaucu

SEQ ID NO: 1021065 - RNA, 19 nt, Artificial Sequence
  Description of Artificial Sequence: Synthetic oligonucleotide
  Antisense strand to SEQ ID NO: 1021064
agauuaagcagccaaauac

SEQ ID NO: 1021066 - RNA, 19 nt, Artificial Sequence
  Description of Artificial Sequence: Synthetic oligonucleotide
  Sense strand starting at position 3087 of SEQ ID NO: 914661
uggcaaugcaguuaagaug

SEQ ID NO: 1021067 - RNA, 19 nt, Artificial Sequence
  Description of Artificial Sequence: Synthetic oligonucleotide
  Antisense strand to SEQ ID NO: 1021066
caucuuaacugcauugcca

SEQ ID NO: 1021068 - RNA, 19 nt, Artificial Sequence
  Description of Artificial Sequence: Synthetic oligonucleotide
  Sense strand starting at position 3150 of SEQ ID NO: 914661
gcacauuaacuuggaagua

SEQ ID NO: 1021069 - RNA, 19 nt, Artificial Sequence
  Description of Artificial Sequence: Synthetic oligonucleotide
  Antisense strand to SEQ ID NO: 1021068
uacuuccaaguuaaugugc

SEQ ID NO: 1021070 - RNA, 19 nt, Artificial Sequence
  Description of Artificial Sequence: Synthetic oligonucleotide
  Sense strand starting at position 3254 of SEQ ID NO: 914661
uugcauuguagugaggaga

SEQ ID NO: 1021071 - RNA, 19 nt, Artificial Sequence
  Description of Artificial Sequence: Synthetic oligonucleotide
  Antisense strand to SEQ ID NO: 1021070
ucuccucacuacaaugcaa

SEQ ID NO: 1021072 - RNA, 19 nt, Artificial Sequence
  Description of Artificial Sequence: Synthetic oligonucleotide
  Sense strand starting at position 3451 of SEQ ID NO: 914661
cuauguuugcaggauaauu

SEQ ID NO: 1021073 - RNA, 19 nt, Artificial Sequence
  Description of Artificial Sequence: Synthetic oligonucleotide
  Antisense strand to SEQ ID NO: 1021072
aauuauccugcaaacauag

SEQ ID NO: 1021074 - RNA, 19 nt, Artificial Sequence
  Description of Artificial Sequence: Synthetic oligonucleotide
  Sense strand starting at position 3453 of SEQ ID NO: 914661
auguuugcaggauaauuga

SEQ ID NO: 1021075 - RNA, 19 nt, Artificial Sequence
  Description of Artificial Sequence: Synthetic oligonucleotide
  Antisense strand to SEQ ID NO: 1021074
ucaauuauccugcaaacau

SEQ ID NO: 1021076 - RNA, 19 nt, Artificial Sequence
  Description of Artificial Sequence: Synthetic oligonucleotide
  Sense strand starting at position 3495 of SEQ ID NO: 914661
ggauucuugcucuauaagg

SEQ ID NO: 1021077 - RNA, 19 nt, Artificial Sequence
  Description of Artificial Sequence: Synthetic oligonucleotide
  Antisense strand to SEQ ID NO: 1021076
ccuuauagagcaagaaucc

SEQ ID NO: 1021078 - RNA, 19 nt, Artificial Sequence
  Description of Artificial Sequence: Synthetic oligonucleotide
  Sense strand starting at position 3497 of SEQ ID NO: 914661
auucuugcucuauaagggu

SEQ ID NO: 1021079 - RNA, 19 nt, Artificial Sequence
  Description of Artificial Sequence: Synthetic oligonucleotide
  Antisense strand to SEQ ID NO: 1021078
acccuuauagagcaagaau

SEQ ID NO: 1021080 - RNA, 19 nt, Artificial Sequence
  Description of Artificial Sequence: Synthetic oligonucleotide
  Sense strand starting at position 3538 of SEQ ID NO: 914661
uucugaagucuggaguugu

SEQ ID NO: 1021081 - RNA, 19 nt, Artificial Sequence
  Description of Artificial Sequence: Synthetic oligonucleotide
  Antisense strand to SEQ ID NO: 1021080
acaacuccagacuucagaa

SEQ ID NO: 1021082 - RNA, 19 nt, Artificial Sequence
  Description of Artificial Sequence: Synthetic oligonucleotide
  Sense strand starting at position 3678 of SEQ ID NO: 914661
gucauaaauugccuagaga

SEQ ID NO: 1021083 - RNA, 19 nt, Artificial Sequence
  Description of Artificial Sequence: Synthetic oligonucleotide
  Antisense strand to SEQ ID NO: 1021082
ucucuaggcaauuuaugac

SEQ ID NO: 1021084 - RNA, 19 nt, Artificial Sequence
  Description of Artificial Sequence: Synthetic oligonucleotide
  Sense strand starting at position 3751 of SEQ ID NO: 914661
uuagauggguauccacaua

SEQ ID NO: 1021085 - RNA, 19 nt, Artificial Sequence
  Description of Artificial Sequence: Synthetic oligonucleotide
  Antisense strand to SEQ ID NO: 1021084
uauguggauacccaucuaa

SEQ ID NO: 1021086 - RNA, 19 nt, Artificial Sequence
  Description of Artificial Sequence: Synthetic oligonucleotide
  Sense strand starting at position 3911 of SEQ ID NO: 914661
augauuuccugggauauga

SEQ ID NO: 1021087 - RNA, 19 nt, Artificial Sequence
  Description of Artificial Sequence: Synthetic oligonucleotide
  Antisense strand to SEQ ID NO: 1021086
ucauaucccaggaaaucau

SEQ ID NO: 1021088 - RNA, 19 nt, Artificial Sequence
  Description of Artificial Sequence: Synthetic oligonucleotide
  Sense strand starting at position 6 of SEQ ID NO: 914662
gaugaaagaucccuuguag

SEQ ID NO: 1021089 - RNA, 19 nt, Artificial Sequence
  Description of Artificial Sequence: Synthetic oligonucleotide
  Antisense strand to SEQ ID NO: 1021088
cuacaagggaucuuucauc

SEQ ID NO: 1021090 - RNA, 19 nt, Artificial Sequence
  Description of Artificial Sequence: Synthetic oligonucleotide
  Sense strand starting at position 23 of SEQ ID NO: 914662
agguauguggacugacaua

SEQ ID NO: 1021091 - RNA, 19 nt, Artificial Sequence
  Description of Artificial Sequence: Synthetic oligonucleotide
  Antisense strand to SEQ ID NO: 1021090
uaugucaguccacauaccu

SEQ ID NO: 1021092 - RNA, 19 nt, Artificial Sequence
  Description of Artificial Sequence: Synthetic oligonucleotide
  Sense strand starting at position 34 of SEQ ID NO: 914662
cugacauaucgacacgaua

SEQ ID NO: 1021093 - RNA, 19 nt, Artificial Sequence
  Description of Artificial Sequence: Synthetic oligonucleotide
  Antisense strand to SEQ ID NO: 1021092
uaucgugucgauaugucag

SEQ ID NO: 1021094 - RNA, 19 nt, Artificial Sequence
  Description of Artificial Sequence: Synthetic oligonucleotide
  Sense strand starting at position 46 of SEQ ID NO: 914662
cacgauauuucccagauga

SEQ ID NO: 1021095 - RNA, 19 nt, Artificial Sequence
  Description of Artificial Sequence: Synthetic oligonucleotide
  Antisense strand to SEQ ID NO: 1021094
ucaucugggaaauaucgug

SEQ ID NO: 1021096 - RNA, 19 nt, Artificial Sequence
  Description of Artificial Sequence: Synthetic oligonucleotide
  Sense strand starting at position 130 of SEQ ID NO: 914662
aggaccuauuaguugaguu

SEQ ID NO: 1021097 - RNA, 19 nt, Artificial Sequence
  Description of Artificial Sequence: Synthetic oligonucleotide
  Antisense strand to SEQ ID NO: 1021096
aacucaacuaauagguccu

SEQ ID NO: 1021098 - RNA, 19 nt, Artificial Sequence
  Description of Artificial Sequence: Synthetic oligonucleotide
  Sense strand starting at position 131 of SEQ ID NO: 914662
ggaccuauuaguugaguuu

SEQ ID NO: 1021099 - RNA, 19 nt, Artificial Sequence
  Description of Artificial Sequence: Synthetic oligonucleotide
  Antisense strand to SEQ ID NO: 1021098
aaacucaacuaauaggucc

SEQ ID NO: 1021100 - RNA, 19 nt, Artificial Sequence
  Description of Artificial Sequence: Synthetic oligonucleotide
  Sense strand starting at position 132 of SEQ ID NO: 914662
gaccuauuaguugaguuua

SEQ ID NO: 1021101 - RNA, 19 nt, Artificial Sequence
  Description of Artificial Sequence: Synthetic oligonucleotide
  Antisense strand to SEQ ID NO: 1021100
uaaacucaacuaauagguc

SEQ ID NO: 1021102 - RNA, 19 nt, Artificial Sequence
  Description of Artificial Sequence: Synthetic oligonucleotide
  Sense strand starting at position 134 of SEQ ID NO: 914662
ccuauuaguugaguuuaua

SEQ ID NO: 1021103 - RNA, 19 nt, Artificial Sequence
  Description of Artificial Sequence: Synthetic oligonucleotide
  Antisense strand to SEQ ID NO: 1021102
uauaaacucaacuaauagg

SEQ ID NO: 1021104 - RNA, 19 nt, Artificial Sequence
  Description of Artificial Sequence: Synthetic oligonucleotide
  Sense strand starting at position 144 of SEQ ID NO: 914662
gaguuuauaucuuugaugu

SEQ ID NO: 1021105 - RNA, 19 nt, Artificial Sequence
  Description of Artificial Sequence: Synthetic oligonucleotide
  Antisense strand to SEQ ID NO: 1021104
acaucaaagauauaaacuc

SEQ ID NO: 1021106 - RNA, 19 nt, Artificial Sequence
  Description of Artificial Sequence: Synthetic oligonucleotide
  Sense strand starting at position 287 of SEQ ID NO: 914662
cuuaaaugucuccaugguu

SEQ ID NO: 1021107 - RNA, 19 nt, Artificial Sequence
  Description of Artificial Sequence: Synthetic oligonucleotide
  Antisense strand to SEQ ID NO: 1021106
aaccauggagacauuuaag

SEQ ID NO: 1021108 - RNA, 19 nt, Artificial Sequence
  Description of Artificial Sequence: Synthetic oligonucleotide
  Sense strand starting at position 339 of SEQ ID NO: 914662
ucauccuugcgaggagaca

SEQ ID NO: 1021109 - RNA, 19 nt, Artificial Sequence
  Description of Artificial Sequence: Synthetic oligonucleotide
  Antisense strand to SEQ ID NO: 1021108
ugucuccucgcaaggauga

SEQ ID NO: 1021110 - RNA, 19 nt, Artificial Sequence
  Description of Artificial Sequence: Synthetic oligonucleotide
  Sense strand starting at position 424 of SEQ ID NO: 914662
ugaccuacaugucuuuauu

SEQ ID NO: 1021111 - RNA, 19 nt, Artificial Sequence
  Description of Artificial Sequence: Synthetic oligonucleotide
  Antisense strand to SEQ ID NO: 1021110
aauaaagacauguagguca

SEQ ID NO: 1021112 - RNA, 19 nt, Artificial Sequence
  Description of Artificial Sequence: Synthetic oligonucleotide
  Sense strand starting at position 440 of SEQ ID NO: 914662
auuaauauuucugaaggac

SEQ ID NO: 1021113 - RNA, 19 nt, Artificial Sequence
  Description of Artificial Sequence: Synthetic oligonucleotide
  Antisense strand to SEQ ID NO: 1021112
guccuucagaaauauuaau

SEQ ID NO: 1021114 - RNA, 19 nt, Artificial Sequence
  Description of Artificial Sequence: Synthetic oligonucleotide
  Sense strand starting at position 503 of SEQ ID NO: 914662
cagcguaagaaaggguuaa

SEQ ID NO: 1021115 - RNA, 19 nt, Artificial Sequence
  Description of Artificial Sequence: Synthetic oligonucleotide
  Antisense strand to SEQ ID NO: 1021114
uuaacccuuucuuacgcug

SEQ ID NO: 1021116 - RNA, 19 nt, Artificial Sequence
  Description of Artificial Sequence: Synthetic oligonucleotide
  Sense strand starting at position 504 of SEQ ID NO: 914662
agcguaagaaaggguuaaa

SEQ ID NO: 1021117 - RNA, 19 nt, Artificial Sequence
  Description of Artificial Sequence: Synthetic oligonucleotide
  Antisense strand to SEQ ID NO: 1021116
uuuaacccuuucuuacgcu

SEQ ID NO: 1021118 - RNA, 19 nt, Artificial Sequence
  Description of Artificial Sequence: Synthetic oligonucleotide
  Sense strand starting at position 515 of SEQ ID NO: 914662
ggguuaaaguaagcaauaa

SEQ ID NO: 1021119 - RNA, 19 nt, Artificial Sequence
  Description of Artificial Sequence: Synthetic oligonucleotide
  Antisense strand to SEQ ID NO: 1021118
uuauugcuuacuuuaaccc

SEQ ID NO: 1021120 - RNA, 19 nt, Artificial Sequence
  Description of Artificial Sequence: Synthetic oligonucleotide
  Sense strand starting at position 604 of SEQ ID NO: 914662
agaggagccuguucuugaa

SEQ ID NO: 1021121 - RNA, 19 nt, Artificial Sequence
  Description of Artificial Sequence: Synthetic oligonucleotide
  Antisense strand to SEQ ID NO: 1021120
uucaagaacaggcuccucu

SEQ ID NO: 1021122 - RNA, 19 nt, Artificial Sequence
  Description of Artificial Sequence: Synthetic oligonucleotide
  Sense strand starting at position 606 of SEQ ID NO: 914662
aggagccuguucuugaaau

SEQ ID NO: 1021123 - RNA, 19 nt, Artificial Sequence
  Description of Artificial Sequence: Synthetic oligonucleotide
  Antisense strand to SEQ ID NO: 1021122
auuucaagaacaggcuccu

SEQ ID NO: 1021124 - RNA, 19 nt, Artificial Sequence
  Description of Artificial Sequence: Synthetic oligonucleotide
  Sense strand starting at position 608 of SEQ ID NO: 914662
gagccuguucuugaaauua

SEQ ID NO: 1021125 - RNA, 19 nt, Artificial Sequence
  Description of Artificial Sequence: Synthetic oligonucleotide
  Antisense strand to SEQ ID NO: 1021124
uaauuucaagaacaggcuc

SEQ ID NO: 1021126 - RNA, 19 nt, Artificial Sequence
  Description of Artificial Sequence: Synthetic oligonucleotide
  Sense strand starting at position 777 of SEQ ID NO: 914662
aggccagacucucuuaagu

SEQ ID NO: 1021127 - RNA, 19 nt, Artificial Sequence
  Description of Artificial Sequence: Synthetic oligonucleotide
  Antisense strand to SEQ ID NO: 1021126
acuuaagagagucuggccu

SEQ ID NO: 1021128 - RNA, 19 nt, Artificial Sequence
  Description of Artificial Sequence: Synthetic oligonucleotide
  Sense strand starting at position 914 of SEQ ID NO: 914662
gucacauuuggguguuuga

SEQ ID NO: 1021129 - RNA, 19 nt, Artificial Sequence
  Description of Artificial Sequence: Synthetic oligonucleotide
  Antisense strand to SEQ ID NO: 1021128
ucaaacacccaaaugugac

SEQ ID NO: 1021130 - RNA, 19 nt, Artificial Sequence
  Description of Artificial Sequence: Synthetic oligonucleotide
  Sense strand starting at position 983 of SEQ ID NO: 914662
uuagaaacauggguaaagu

SEQ ID NO: 1021131 - RNA, 19 nt, Artificial Sequence
  Description of Artificial Sequence: Synthetic oligonucleotide
  Antisense strand to SEQ ID NO: 1021130
acuuuacccauguuucuaa

SEQ ID NO: 1021132 - RNA, 19 nt, Artificial Sequence
  Description of Artificial Sequence: Synthetic oligonucleotide
  Sense strand starting at position 1225 of SEQ ID NO: 914662
gaugauguccucugaggca

SEQ ID NO: 1021133 - RNA, 19 nt, Artificial Sequence
  Description of Artificial Sequence: Synthetic oligonucleotide
  Antisense strand to SEQ ID NO: 1021132
ugccucagaggacaucauc

SEQ ID NO: 1021134 - RNA, 19 nt, Artificial Sequence
  Description of Artificial Sequence: Synthetic oligonucleotide
  Sense strand starting at position 1283 of SEQ ID NO: 914662
gguucucgcucauuuggga

SEQ ID NO: 1021135 - RNA, 19 nt, Artificial Sequence
  Description of Artificial Sequence: Synthetic oligonucleotide
  Antisense strand to SEQ ID NO: 1021134
ucccaaaugagcgagaacc

SEQ ID NO: 1021136 - RNA, 19 nt, Artificial Sequence
  Description of Artificial Sequence: Synthetic oligonucleotide
  Sense strand starting at position 1327 of SEQ ID NO: 914662
cuggaaauucuauaagcuu

SEQ ID NO: 1021137 - RNA, 19 nt, Artificial Sequence
  Description of Artificial Sequence: Synthetic oligonucleotide
  Antisense strand to SEQ ID NO: 1021136
aagcuuauagaauuuccag

SEQ ID NO: 1021138 - RNA, 19 nt, Artificial Sequence
  Description of Artificial Sequence: Synthetic oligonucleotide
  Sense strand starting at position 1717 of SEQ ID NO: 914662
gcaaguuugcaguuacugu

SEQ ID NO: 1021139 - RNA, 19 nt, Artificial Sequence
  Description of Artificial Sequence: Synthetic oligonucleotide
  Antisense strand to SEQ ID NO: 1021138
acaguaacugcaaacuugc

SEQ ID NO: 1021140 - RNA, 19 nt, Artificial Sequence
  Description of Artificial Sequence: Synthetic oligonucleotide
  Sense strand starting at position 2546 of SEQ ID NO: 914662
gggcuuuaggaguauugga

SEQ ID NO: 1021141 - RNA, 19 nt, Artificial Sequence
  Description of Artificial Sequence: Synthetic oligonucleotide
  Antisense strand to SEQ ID NO: 1021140
uccaauacuccuaaagccc

SEQ ID NO: 1021142 - RNA, 19 nt, Artificial Sequence
  Description of Artificial Sequence: Synthetic oligonucleotide
  Sense strand starting at position 2630 of SEQ ID NO: 914662
cauguaaugcuccugcguu

SEQ ID NO: 1021143 - RNA, 19 nt, Artificial Sequence
  Description of Artificial Sequence: Synthetic oligonucleotide
  Antisense strand to SEQ ID NO: 1021142
aacgcaggagcauuacaug

SEQ ID NO: 1021144 - RNA, 19 nt, Artificial Sequence
  Description of Artificial Sequence: Synthetic oligonucleotide
  Sense strand starting at position 3010 of SEQ ID NO: 914662
augguuugccacuaauaca

SEQ ID NO: 1021145 - RNA, 19 nt, Artificial Sequence
  Description of Artificial Sequence: Synthetic oligonucleotide
  Antisense strand to SEQ ID NO: 1021144
uguauuaguggcaaaccau

SEQ ID NO: 1021146 - RNA, 19 nt, Artificial Sequence
  Description of Artificial Sequence: Synthetic oligonucleotide
  Sense strand starting at position 3020 of SEQ ID NO: 914662
acuaauacauugguuguaa

SEQ ID NO: 1021147 - RNA, 19 nt, Artificial Sequence
  Description of Artificial Sequence: Synthetic oligonucleotide
  Antisense strand to SEQ ID NO: 1021146
uuacaaccaauguauuagu

SEQ ID NO: 1021148 - RNA, 19 nt, Artificial Sequence
  Description of Artificial Sequence: Synthetic oligonucleotide
  Sense strand starting at position 3021 of SEQ ID NO: 914662
cuaauacauugguuguaau

SEQ ID NO: 1021149 - RNA, 19 nt, Artificial Sequence
  Description of Artificial Sequence: Synthetic oligonucleotide
  Antisense strand to SEQ ID NO: 1021148
auuacaaccaauguauuag

SEQ ID NO: 1021150 - RNA, 19 nt, Artificial Sequence
  Description of Artificial Sequence: Synthetic oligonucleotide
  Sense strand starting at position 3031 of SEQ ID NO: 914662
gguuguaauagagauaguu

SEQ ID NO: 1021151 - RNA, 19 nt, Artificial Sequence
  Description of Artificial Sequence: Synthetic oligonucleotide
  Antisense strand to SEQ ID NO: 1021150
aacuaucucuauuacaacc

SEQ ID NO: 1021152 - RNA, 19 nt, Artificial Sequence
  Description of Artificial Sequence: Synthetic oligonucleotide
  Sense strand starting at position 3039 of SEQ ID NO: 914662
uagagauaguuuguccuaa

SEQ ID NO: 1021153 - RNA, 19 nt, Artificial Sequence
  Description of Artificial Sequence: Synthetic oligonucleotide
  Antisense strand to SEQ ID NO: 1021152
uuaggacaaacuaucucua

SEQ ID NO: 1021154 - RNA, 19 nt, Artificial Sequence
  Description of Artificial Sequence: Synthetic oligonucleotide
  Sense strand starting at position 3040 of SEQ ID NO: 914662
agagauaguuuguccuaau

SEQ ID NO: 1021155 - RNA, 19 nt, Artificial Sequence
  Description of Artificial Sequence: Synthetic oligonucleotide
  Antisense strand to SEQ ID NO: 1021154
auuaggacaaacuaucucu

SEQ ID NO: 1021156 - RNA, 19 nt, Artificial Sequence
  Description of Artificial Sequence: Synthetic oligonucleotide
  Sense strand starting at position 3041 of SEQ ID NO: 914662
gagauaguuuguccuaauu

SEQ ID NO: 1021157 - RNA, 19 nt, Artificial Sequence
  Description of Artificial Sequence: Synthetic oligonucleotide
  Antisense strand to SEQ ID NO: 1021156
aauuaggacaaacuaucuc

SEQ ID NO: 1021158 - RNA, 19 nt, Artificial Sequence
  Description of Artificial Sequence: Synthetic oligonucleotide
  Sense strand starting at position 3113 of SEQ ID NO: 914662
ugagcuccaucuuugauua

SEQ ID NO: 1021159 - RNA, 19 nt, Artificial Sequence
  Description of Artificial Sequence: Synthetic oligonucleotide
  Antisense strand to SEQ ID NO: 1021158
uaaucaaagauggagcuca

SEQ ID NO: 1021160 - RNA, 19 nt, Artificial Sequence
  Description of Artificial Sequence: Synthetic oligonucleotide
  Sense strand starting at position 3188 of SEQ ID NO: 914662
guuuccugauuucuaagca

SEQ ID NO: 1021161 - RNA, 19 nt, Artificial Sequence
  Description of Artificial Sequence: Synthetic oligonucleotide
  Antisense strand to SEQ ID NO: 1021160
ugcuuagaaaucaggaaac

SEQ ID NO: 1021162 - RNA, 19 nt, Artificial Sequence
  Description of Artificial Sequence: Synthetic oligonucleotide
  Sense strand starting at position 3310 of SEQ ID NO: 914662
cuuaguaauuugcagauuu

SEQ ID NO: 1021163 - RNA, 19 nt, Artificial Sequence
  Description of Artificial Sequence: Synthetic oligonucleotide
  Antisense strand to SEQ ID NO: 1021162
aaaucugcaaauuacuaag

SEQ ID NO: 1021164 - RNA, 19 nt, Artificial Sequence
  Description of Artificial Sequence: Synthetic oligonucleotide
  Sense strand starting at position 3466 of SEQ ID NO: 914662
guugcaauccagcuguguu

SEQ ID NO: 1021165 - RNA, 19 nt, Artificial Sequence
  Description of Artificial Sequence: Synthetic oligonucleotide
  Antisense strand to SEQ ID NO: 1021164
aacacagcuggauugcaac

SEQ ID NO: 1021166 - RNA, 19 nt, Artificial Sequence
  Description of Artificial Sequence: Synthetic oligonucleotide
  Sense strand starting at position 3919 of SEQ ID NO: 914662
ccacucuagcaaugaggaa

SEQ ID NO: 1021167 - RNA, 19 nt, Artificial Sequence
  Description of Artificial Sequence: Synthetic oligonucleotide
  Antisense strand to SEQ ID NO: 1021166
uuccucauugcuagagugg

SEQ ID NO: 1021168 - RNA, 19 nt, Artificial Sequence
  Description of Artificial Sequence: Synthetic oligonucleotide
  Sense strand starting at position 362 of SEQ ID NO: 914663
uggaauaugcacugaaauu

SEQ ID NO: 1021169 - RNA, 19 nt, Artificial Sequence
  Description of Artificial Sequence: Synthetic oligonucleotide
  Antisense strand to SEQ ID NO: 1021168
aauuucagugcauauucca

SEQ ID NO: 1021170 - RNA, 19 nt, Artificial Sequence
  Description of Artificial Sequence: Synthetic oligonucleotide
  Sense strand starting at position 485 of SEQ ID NO: 914663
uacuguucuccugaaggca

SEQ ID NO: 1021171 - RNA, 19 nt, Artificial Sequence
  Description of Artificial Sequence: Synthetic oligonucleotide
  Antisense strand to SEQ ID NO: 1021170
ugccuucaggagaacagua

SEQ ID NO: 1021172 - RNA, 19 nt, Artificial Sequence
  Description of Artificial Sequence: Synthetic oligonucleotide
  Sense strand starting at position 784 of SEQ ID NO: 914663
uagcaagcaguugaucaua

SEQ ID NO: 1021173 - RNA, 19 nt, Artificial Sequence
  Description of Artificial Sequence: Synthetic oligonucleotide
  Antisense strand to SEQ ID NO: 1021172
uaugaucaacugcuugcua

SEQ ID NO: 1021174 - RNA, 19 nt, Artificial Sequence
  Description of Artificial Sequence: Synthetic oligonucleotide
  Sense strand starting at position 853 of SEQ ID NO: 914663
gagugauguccugaauucc

SEQ ID NO: 1021175 - RNA, 19 nt, Artificial Sequence
  Description of Artificial Sequence: Synthetic oligonucleotide
  Antisense strand to SEQ ID NO: 1021174
ggaauucaggacaucacuc

SEQ ID NO: 1021176 - RNA, 19 nt, Artificial Sequence
  Description of Artificial Sequence: Synthetic oligonucleotide
  Sense strand starting at position 873 of SEQ ID NO: 914663
uuccacaguuaucuagaga

SEQ ID NO: 1021177 - RNA, 19 nt, Artificial Sequence
  Description of Artificial Sequence: Synthetic oligonucleotide
  Antisense strand to SEQ ID NO: 1021176
ucucuagauaacuguggaa

SEQ ID NO: 1021178 - RNA, 19 nt, Artificial Sequence
  Description of Artificial Sequence: Synthetic oligonucleotide
  Sense strand starting at position 985 of SEQ ID NO: 914663
aauguacauccuggguaau

SEQ ID NO: 1021179 - RNA, 19 nt, Artificial Sequence
  Description of Artificial Sequence: Synthetic oligonucleotide
  Antisense strand to SEQ ID NO: 1021178
auuacccaggauguacauu

SEQ ID NO: 1021180 - RNA, 19 nt, Artificial Sequence
  Description of Artificial Sequence: Synthetic oligonucleotide
  Sense strand starting at position 987 of SEQ ID NO: 914663
uguacauccuggguaauua

SEQ ID NO: 1021181 - RNA, 19 nt, Artificial Sequence
  Description of Artificial Sequence: Synthetic oligonucleotide
  Antisense strand to SEQ ID NO: 1021180
uaauuacccaggauguaca

SEQ ID NO: 1021182 - RNA, 19 nt, Artificial Sequence
  Description of Artificial Sequence: Synthetic oligonucleotide
  Sense strand starting at position 988 of SEQ ID NO: 914663
guacauccuggguaauuau

SEQ ID NO: 1021183 - RNA, 19 nt, Artificial Sequence
  Description of Artificial Sequence: Synthetic oligonucleotide
  Antisense strand to SEQ ID NO: 1021182
auaauuacccaggauguac

SEQ ID NO: 1021184 - RNA, 19 nt, Artificial Sequence
  Description of Artificial Sequence: Synthetic oligonucleotide
  Sense strand starting at position 1047 of SEQ ID NO: 914663
ccuacaacaguguauagua

SEQ ID NO: 1021185 - RNA, 19 nt, Artificial Sequence
  Description of Artificial Sequence: Synthetic oligonucleotide
  Antisense strand to SEQ ID NO: 1021184
uacuauacacuguuguagg

SEQ ID NO: 1021186 - RNA, 19 nt, Artificial Sequence
  Description of Artificial Sequence: Synthetic oligonucleotide
  Sense strand starting at position 1834 of SEQ ID NO: 914663
cuggccucuucgucauuua

SEQ ID NO: 1021187 - RNA, 19 nt, Artificial Sequence
  Description of Artificial Sequence: Synthetic oligonucleotide
  Antisense strand to SEQ ID NO: 1021186
uaaaugacgaagaggccag

SEQ ID NO: 1021188 - RNA, 19 nt, Artificial Sequence
  Description of Artificial Sequence: Synthetic oligonucleotide
  Sense strand starting at position 1835 of SEQ ID NO: 914663
uggccucuucgucauuuaa

SEQ ID NO: 1021189 - RNA, 19 nt, Artificial Sequence
  Description of Artificial Sequence: Synthetic oligonucleotide
  Antisense strand to SEQ ID NO: 1021188
uuaaaugacgaagaggcca

SEQ ID NO: 1021190 - RNA, 19 nt, Artificial Sequence
  Description of Artificial Sequence: Synthetic oligonucleotide
  Sense strand starting at position 1837 of SEQ ID NO: 914663
gccucuucgucauuuaaga

SEQ ID NO: 1021191 - RNA, 19 nt, Artificial Sequence
  Description of Artificial Sequence: Synthetic oligonucleotide
  Antisense strand to SEQ ID NO: 1021190
ucuuaaaugacgaagaggc

SEQ ID NO: 1021192 - RNA, 19 nt, Artificial Sequence
  Description of Artificial Sequence: Synthetic oligonucleotide
  Sense strand starting at position 2351 of SEQ ID NO: 914663
ugcuguuugcucgcagaac

SEQ ID NO: 1021193 - RNA, 19 nt, Artificial Sequence
  Description of Artificial Sequence: Synthetic oligonucleotide
  Antisense strand to SEQ ID NO: 1021192
guucugcgagcaaacagca

SEQ ID NO: 1021194 - RNA, 19 nt, Artificial Sequence
  Description of Artificial Sequence: Synthetic oligonucleotide
  Sense strand starting at position 2365 of SEQ ID NO: 914663
agaacuugagcuugauuag

SEQ ID NO: 1021195 - RNA, 19 nt, Artificial Sequence
  Description of Artificial Sequence: Synthetic oligonucleotide
  Antisense strand to SEQ ID NO: 1021194
cuaaucaagcucaaguucu

SEQ ID NO: 1021196 - RNA, 19 nt, Artificial Sequence
  Description of Artificial Sequence: Synthetic oligonucleotide
  Sense strand starting at position 2366 of SEQ ID NO: 914663
gaacuugagcuugauuagu

SEQ ID NO: 1021197 - RNA, 19 nt, Artificial Sequence
  Description of Artificial Sequence: Synthetic oligonucleotide
  Antisense strand to SEQ ID NO: 1021196
acuaaucaagcucaaguuc

SEQ ID NO: 1021198 - RNA, 19 nt, Artificial Sequence
  Description of Artificial Sequence: Synthetic oligonucleotide
  Sense strand starting at position 2368 of SEQ ID NO: 914663
acuugagcuugauuaguaa

SEQ ID NO: 1021199 - RNA, 19 nt, Artificial Sequence
  Description of Artificial Sequence: Synthetic oligonucleotide
  Antisense strand to SEQ ID NO: 1021198
uuacuaaucaagcucaagu

SEQ ID NO: 1021200 - RNA, 19 nt, Artificial Sequence
  Description of Artificial Sequence: Synthetic oligonucleotide
  Sense strand starting at position 2376 of SEQ ID NO: 914663
uugauuaguaaaggaguga

SEQ ID NO: 1021201 - RNA, 19 nt, Artificial Sequence
  Description of Artificial Sequence: Synthetic oligonucleotide
  Antisense strand to SEQ ID NO: 1021200
ucacuccuuuacuaaucaa

SEQ ID NO: 1021202 - RNA, 19 nt, Artificial Sequence
  Description of Artificial Sequence: Synthetic oligonucleotide
  Sense strand starting at position 2480 of SEQ ID NO: 914663
aaggguuacuuaucugaaa

SEQ ID NO: 1021203 - RNA, 19 nt, Artificial Sequence
  Description of Artificial Sequence: Synthetic oligonucleotide
  Antisense strand to SEQ ID NO: 1021202
uuucagauaaguaacccuu

SEQ ID NO: 1021204 - RNA, 19 nt, Artificial Sequence
  Description of Artificial Sequence: Synthetic oligonucleotide
  Sense strand starting at position 2481 of SEQ ID NO: 914663
aggguuacuuaucugaaag

SEQ ID NO: 1021205 - RNA, 19 nt, Artificial Sequence
  Description of Artificial Sequence: Synthetic oligonucleotide
  Antisense strand to SEQ ID NO: 1021204
cuuucagauaaguaacccu

SEQ ID NO: 1021206 - RNA, 19 nt, Artificial Sequence
  Description of Artificial Sequence: Synthetic oligonucleotide
  Sense strand starting at position 2482 of SEQ ID NO: 914663
ggguuacuuaucugaaaga

SEQ ID NO: 1021207 - RNA, 19 nt, Artificial Sequence
  Description of Artificial Sequence: Synthetic oligonucleotide
  Antisense strand to SEQ ID NO: 1021206
ucuuucagauaaguaaccc

SEQ ID NO: 1021208 - RNA, 19 nt, Artificial Sequence
  Description of Artificial Sequence: Synthetic oligonucleotide
  Sense strand starting at position 2547 of SEQ ID NO: 914663
ggcugaagggcggaaauua

SEQ ID NO: 1021209 - RNA, 19 nt, Artificial Sequence
  Description of Artificial Sequence: Synthetic oligonucleotide
  Antisense strand to SEQ ID NO: 1021208
uaauuuccgcccuucagcc

SEQ ID NO: 1021210 - RNA, 19 nt, Artificial Sequence
  Description of Artificial Sequence: Synthetic oligonucleotide
  Sense strand starting at position 2557 of SEQ ID NO: 914663
cggaaauuaguguauccuu

SEQ ID NO: 1021211 - RNA, 19 nt, Artificial Sequence
  Description of Artificial Sequence: Synthetic oligonucleotide
  Antisense strand to SEQ ID NO: 1021210
aaggauacacuaauuuccg

SEQ ID NO: 1021212 - RNA, 19 nt, Artificial Sequence
  Description of Artificial Sequence: Synthetic oligonucleotide
  Sense strand starting at position 2560 of SEQ ID NO: 914663
aaauuaguguauccuugga

SEQ ID NO: 1021213 - RNA, 19 nt, Artificial Sequence
  Description of Artificial Sequence: Synthetic oligonucleotide
  Antisense strand to SEQ ID NO: 1021212
uccaaggauacacuaauuu

SEQ ID NO: 1021214 - RNA, 19 nt, Artificial Sequence
  Description of Artificial Sequence: Synthetic oligonucleotide
  Sense strand starting at position 2562 of SEQ ID NO: 914663
auuaguguauccuuggaaa

SEQ ID NO: 1021215 - RNA, 19 nt, Artificial Sequence
  Description of Artificial Sequence: Synthetic oligonucleotide
  Antisense strand to SEQ ID NO: 1021214
uuuccaaggauacacuaau

SEQ ID NO: 1021216 - RNA, 19 nt, Artificial Sequence
  Description of Artificial Sequence: Synthetic oligonucleotide
  Sense strand starting at position 2826 of SEQ ID NO: 914663
ggugaaagcaaaugguaau

SEQ ID NO: 1021217 - RNA, 19 nt, Artificial Sequence
  Description of Artificial Sequence: Synthetic oligonucleotide
  Antisense strand to SEQ ID NO: 1021216
auuaccauuugcuuucacc

SEQ ID NO: 1021218 - RNA, 19 nt, Artificial Sequence
  Description of Artificial Sequence: Synthetic oligonucleotide
  Sense strand starting at position 2858 of SEQ ID NO: 914663
agaaauagcuuuccuagaa

SEQ ID NO: 1021219 - RNA, 19 nt, Artificial Sequence
  Description of Artificial Sequence: Synthetic oligonucleotide
  Antisense strand to SEQ ID NO: 1021218
uucuaggaaagcuauuucu

SEQ ID NO: 1021220 - RNA, 19 nt, Artificial Sequence
  Description of Artificial Sequence: Synthetic oligonucleotide
  Sense strand starting at position 2862 of SEQ ID NO: 914663
auagcuuuccuagaaaguc

SEQ ID NO: 1021221 - RNA, 19 nt, Artificial Sequence
  Description of Artificial Sequence: Synthetic oligonucleotide
  Antisense strand to SEQ ID NO: 1021220
gacuuucuaggaaagcuau

SEQ ID NO: 1021222 - RNA, 19 nt, Artificial Sequence
  Description of Artificial Sequence: Synthetic oligonucleotide
  Sense strand starting at position 3066 of SEQ ID NO: 914663
gguggugaugauuacuaac

SEQ ID NO: 1021223 - RNA, 19 nt, Artificial Sequence
  Description of Artificial Sequence: Synthetic oligonucleotide
  Antisense strand to SEQ ID NO: 1021222
guuaguaaucaucaccacc

SEQ ID NO: 1021224 - RNA, 19 nt, Artificial Sequence
  Description of Artificial Sequence: Synthetic oligonucleotide
  Sense strand starting at position 3068 of SEQ ID NO: 914663
uggugaugauuacuaacau

SEQ ID NO: 1021225 - RNA, 19 nt, Artificial Sequence
  Description of Artificial Sequence: Synthetic oligonucleotide
  Antisense strand to SEQ ID NO: 1021224
auguuaguaaucaucacca

SEQ ID NO: 1021226 - RNA, 19 nt, Artificial Sequence
  Description of Artificial Sequence: Synthetic oligonucleotide
  Sense strand starting at position 3145 of SEQ ID NO: 914663
uuuguaucuguacaagaac

SEQ ID NO: 1021227 - RNA, 19 nt, Artificial Sequence
  Description of Artificial Sequence: Synthetic oligonucleotide
  Antisense strand to SEQ ID NO: 1021226
guucuuguacagauacaaa

SEQ ID NO: 1021228 - RNA, 19 nt, Artificial Sequence
  Description of Artificial Sequence: Synthetic oligonucleotide
  Sense strand starting at position 3275 of SEQ ID NO: 914663
cuguuauuugugugaacca

SEQ ID NO: 1021229 - RNA, 19 nt, Artificial Sequence
  Description of Artificial Sequence: Synthetic oligonucleotide
  Antisense strand to SEQ ID NO: 1021228
ugguucacacaaauaacag

SEQ ID NO: 1021230 - RNA, 19 nt, Artificial Sequence
  Description of Artificial Sequence: Synthetic oligonucleotide
  Sense strand starting at position 3477 of SEQ ID NO: 914663
uccaguauaucagugaacu

SEQ ID NO: 1021231 - RNA, 19 nt, Artificial Sequence
  Description of Artificial Sequence: Synthetic oligonucleotide
  Antisense strand to SEQ ID NO: 1021230
aguucacugauauacugga

SEQ ID NO: 1021232 - RNA, 19 nt, Artificial Sequence
  Description of Artificial Sequence: Synthetic oligonucleotide
  Sense strand starting at position 3478 of SEQ ID NO: 914663
ccaguauaucagugaacug

SEQ ID NO: 1021233 - RNA, 19 nt, Artificial Sequence
  Description of Artificial Sequence: Synthetic oligonucleotide
  Antisense strand to SEQ ID NO: 1021232
caguucacugauauacugg

SEQ ID NO: 1021234 - RNA, 19 nt, Artificial Sequence
  Description of Artificial Sequence: Synthetic oligonucleotide
  Sense strand starting at position 3557 of SEQ ID NO: 914663
aguccuugucuuuagaaag

SEQ ID NO: 1021235 - RNA, 19 nt, Artificial Sequence
  Description of Artificial Sequence: Synthetic oligonucleotide
  Antisense strand to SEQ ID NO: 1021234
cuuucuaaagacaaggacu

SEQ ID NO: 1021236 - RNA, 19 nt, Artificial Sequence
  Description of Artificial Sequence: Synthetic oligonucleotide
  Sense strand starting at position 3571 of SEQ ID NO: 914663
gaaaguuuguaauccagug

SEQ ID NO: 1021237 - RNA, 19 nt, Artificial Sequence
  Description of Artificial Sequence: Synthetic oligonucleotide
  Antisense strand to SEQ ID NO: 1021236
cacuggauuacaaacuuuc

SEQ ID NO: 1021238 - RNA, 19 nt, Artificial Sequence
  Description of Artificial Sequence: Synthetic oligonucleotide
  Sense strand starting at position 3576 of SEQ ID NO: 914663
uuuguaauccagugggaga

SEQ ID NO: 1021239 - RNA, 19 nt, Artificial Sequence
  Description of Artificial Sequence: Synthetic oligonucleotide
  Antisense strand to SEQ ID NO: 1021238
ucucccacuggauuacaaa

SEQ ID NO: 1021240 - RNA, 19 nt, Artificial Sequence
  Description of Artificial Sequence: Synthetic oligonucleotide
  Sense strand starting at position 3577 of SEQ ID NO: 914663
uuguaauccagugggagag

SEQ ID NO: 1021241 - RNA, 19 nt, Artificial Sequence
  Description of Artificial Sequence: Synthetic oligonucleotide
  Antisense strand to SEQ ID NO: 1021240
cucucccacuggauuacaa

SEQ ID NO: 1021242 - RNA, 19 nt, Artificial Sequence
  Description of Artificial Sequence: Synthetic oligonucleotide
  Sense strand starting at position 3765 of SEQ ID NO: 914663
ggaggagaugugugagucu

SEQ ID NO: 1021243 - RNA, 19 nt, Artificial Sequence
  Description of Artificial Sequence: Synthetic oligonucleotide
  Antisense strand to SEQ ID NO: 1021242
agacucacacaucuccucc

SEQ ID NO: 1021244 - RNA, 19 nt, Artificial Sequence
  Description of Artificial Sequence: Synthetic oligonucleotide
  Sense strand starting at position 3913 of SEQ ID NO: 914663
auggauuguuaagugaucu

SEQ ID NO: 1021245 - RNA, 19 nt, Artificial Sequence
  Description of Artificial Sequence: Synthetic oligonucleotide
  Antisense strand to SEQ ID NO: 1021244
agaucacuuaacaauccau

SEQ ID NO: 1021246 - RNA, 19 nt, Artificial Sequence
  Description of Artificial Sequence: Synthetic oligonucleotide
  Sense strand starting at position 3914 of SEQ ID NO: 914663
uggauuguuaagugaucug

SEQ ID NO: 1021247 - RNA, 19 nt, Artificial Sequence
  Description of Artificial Sequence: Synthetic oligonucleotide
  Antisense strand to SEQ ID NO: 1021246
cagaucacuuaacaaucca

SEQ ID NO: 1021248 - RNA, 19 nt, Artificial Sequence
  Description of Artificial Sequence: Synthetic oligonucleotide
  Sense strand starting at position 64 of SEQ ID NO: 914664
ggaaucuucuacuaaugaa

SEQ ID NO: 1021249 - RNA, 19 nt, Artificial Sequence
  Description of Artificial Sequence: Synthetic oligonucleotide
  Antisense strand to SEQ ID NO: 1021248
uucauuaguagaagauucc

SEQ ID NO: 1021250 - RNA, 19 nt, Artificial Sequence
  Description of Artificial Sequence: Synthetic oligonucleotide
  Sense strand starting at position 71 of SEQ ID NO: 914664
ucuacuaaugaagguuuau

SEQ ID NO: 1021251 - RNA, 19 nt, Artificial Sequence
  Description of Artificial Sequence: Synthetic oligonucleotide
  Antisense strand to SEQ ID NO: 1021250
auaaaccuucauuaguaga

SEQ ID NO: 1021252 - RNA, 19 nt, Artificial Sequence
  Description of Artificial Sequence: Synthetic oligonucleotide
  Sense strand starting at position 181 of SEQ ID NO: 914664
acuggaaucaucuggcuag

SEQ ID NO: 1021253 - RNA, 19 nt, Artificial Sequence
  Description of Artificial Sequence: Synthetic oligonucleotide
  Antisense strand to SEQ ID NO: 1021252
cuagccagaugauuccagu

SEQ ID NO: 1021254 - RNA, 19 nt, Artificial Sequence
  Description of Artificial Sequence: Synthetic oligonucleotide
  Sense strand starting at position 185 of SEQ ID NO: 914664
gaaucaucuggcuagcugu

SEQ ID NO: 1021255 - RNA, 19 nt, Artificial Sequence
  Description of Artificial Sequence: Synthetic oligonucleotide
  Antisense strand to SEQ ID NO: 1021254
acagcuagccagaugauuc

SEQ ID NO: 1021256 - RNA, 19 nt, Artificial Sequence
  Description of Artificial Sequence: Synthetic oligonucleotide
  Sense strand starting at position 206 of SEQ ID NO: 914664
agcacugagucacuggaaa

SEQ ID NO: 1021257 - RNA, 19 nt, Artificial Sequence
  Description of Artificial Sequence: Synthetic oligonucleotide
  Antisense strand to SEQ ID NO: 1021256
uuuccagugacucagugcu

SEQ ID NO: 1021258 - RNA, 19 nt, Artificial Sequence
  Description of Artificial Sequence: Synthetic oligonucleotide
  Sense strand starting at position 301 of SEQ ID NO: 914664
ugaauaaucuuuccuuggu

SEQ ID NO: 1021259 - RNA, 19 nt, Artificial Sequence
  Description of Artificial Sequence: Synthetic oligonucleotide
  Antisense strand to SEQ ID NO: 1021258
accaaggaaagauuauuca

SEQ ID NO: 1021260 - RNA, 19 nt, Artificial Sequence
  Description of Artificial Sequence: Synthetic oligonucleotide
  Sense strand starting at position 302 of SEQ ID NO: 914664
gaauaaucuuuccuuggug

SEQ ID NO: 1021261 - RNA, 19 nt, Artificial Sequence
  Description of Artificial Sequence: Synthetic oligonucleotide
  Antisense strand to SEQ ID NO: 1021260
caccaaggaaagauuauuc

SEQ ID NO: 1021262 - RNA, 19 nt, Artificial Sequence
  Description of Artificial Sequence: Synthetic oligonucleotide
  Sense strand starting at position 681 of SEQ ID NO: 914664
gcgccuggccucuucuuaa

SEQ ID NO: 1021263 - RNA, 19 nt, Artificial Sequence
  Description of Artificial Sequence: Synthetic oligonucleotide
  Antisense strand to SEQ ID NO: 1021262
uuaagaagaggccaggcgc

SEQ ID NO: 1021264 - RNA, 19 nt, Artificial Sequence
  Description of Artificial Sequence: Synthetic oligonucleotide
  Sense strand starting at position 917 of SEQ ID NO: 914664
ugggaauuauaccauaaga

SEQ ID NO: 1021265 - RNA, 19 nt, Artificial Sequence
  Description of Artificial Sequence: Synthetic oligonucleotide
  Antisense strand to SEQ ID NO: 1021264
ucuuaugguauaauuccca

SEQ ID NO: 1021266 - RNA, 19 nt, Artificial Sequence
  Description of Artificial Sequence: Synthetic oligonucleotide
  Sense strand starting at position 931 of SEQ ID NO: 914664
uaagacaaugugugucauu

SEQ ID NO: 1021267 - RNA, 19 nt, Artificial Sequence
  Description of Artificial Sequence: Synthetic oligonucleotide
  Antisense strand to SEQ ID NO: 1021266
aaugacacacauugucuua

SEQ ID NO: 1021268 - RNA, 19 nt, Artificial Sequence
  Description of Artificial Sequence: Synthetic oligonucleotide
  Sense strand starting at position 1105 of SEQ ID NO: 914664
uuaaguaccuggcccaaua

SEQ ID NO: 1021269 - RNA, 19 nt, Artificial Sequence
  Description of Artificial Sequence: Synthetic oligonucleotide
  Antisense strand to SEQ ID NO: 1021268
uauugggccagguacuuaa

SEQ ID NO: 1021270 - RNA, 19 nt, Artificial Sequence
  Description of Artificial Sequence: Synthetic oligonucleotide
  Sense strand starting at position 1264 of SEQ ID NO: 914664
gugaauagccuuugaguuc

SEQ ID NO: 1021271 - RNA, 19 nt, Artificial Sequence
  Description of Artificial Sequence: Synthetic oligonucleotide
  Antisense strand to SEQ ID NO: 1021270
gaacucaaaggcuauucac

SEQ ID NO: 1021272 - RNA, 19 nt, Artificial Sequence
  Description of Artificial Sequence: Synthetic oligonucleotide
  Sense strand starting at position 1341 of SEQ ID NO: 914664
aguuaagacuuacaagaau

SEQ ID NO: 1021273 - RNA, 19 nt, Artificial Sequence
  Description of Artificial Sequence: Synthetic oligonucleotide
  Antisense strand to SEQ ID NO: 1021272
auucuuguaagucuuaacu

SEQ ID NO: 1021274 - RNA, 19 nt, Artificial Sequence
  Description of Artificial Sequence: Synthetic oligonucleotide
  Sense strand starting at position 1414 of SEQ ID NO: 914664
cuagauuagcauugcccaa

SEQ ID NO: 1021275 - RNA, 19 nt, Artificial Sequence
  Description of Artificial Sequence: Synthetic oligonucleotide
  Antisense strand to SEQ ID NO: 1021274
uugggcaaugcuaaucuag

SEQ ID NO: 1021276 - RNA, 19 nt, Artificial Sequence
  Description of Artificial Sequence: Synthetic oligonucleotide
  Sense strand starting at position 1558 of SEQ ID NO: 914664
ccaccuagucccgagacua

SEQ ID NO: 1021277 - RNA, 19 nt, Artificial Sequence
  Description of Artificial Sequence: Synthetic oligonucleotide
  Antisense strand to SEQ ID NO: 1021276
uagucucgggacuaggugg

SEQ ID NO: 1021278 - RNA, 19 nt, Artificial Sequence
  Description of Artificial Sequence: Synthetic oligonucleotide
  Sense strand starting at position 1643 of SEQ ID NO: 914664
caaucuaguccgcagucua

SEQ ID NO: 1021279 - RNA, 19 nt, Artificial Sequence
  Description of Artificial Sequence: Synthetic oligonucleotide
  Antisense strand to SEQ ID NO: 1021278
uagacugcggacuagauug

SEQ ID NO: 1021280 - RNA, 19 nt, Artificial Sequence
  Description of Artificial Sequence: Synthetic oligonucleotide
  Sense strand starting at position 2738 of SEQ ID NO: 914664
aucaguucuggugagcgua

SEQ ID NO: 1021281 - RNA, 19 nt, Artificial Sequence
  Description of Artificial Sequence: Synthetic oligonucleotide
  Antisense strand to SEQ ID NO: 1021280
uacgcucaccagaacugau

SEQ ID NO: 1021282 - RNA, 19 nt, Artificial Sequence
  Description of Artificial Sequence: Synthetic oligonucleotide
  Sense strand starting at position 2741 of SEQ ID NO: 914664
aguucuggugagcguauaa

SEQ ID NO: 1021283 - RNA, 19 nt, Artificial Sequence
  Description of Artificial Sequence: Synthetic oligonucleotide
  Antisense strand to SEQ ID NO: 1021282
uuauacgcucaccagaacu

SEQ ID NO: 1021284 - RNA, 19 nt, Artificial Sequence
  Description of Artificial Sequence: Synthetic oligonucleotide
  Sense strand starting at position 2772 of SEQ ID NO: 914664
gcaauuugguacuauccau

SEQ ID NO: 1021285 - RNA, 19 nt, Artificial Sequence
  Description of Artificial Sequence: Synthetic oligonucleotide
  Antisense strand to SEQ ID NO: 1021284
auggauaguaccaaauugc

SEQ ID NO: 1021286 - RNA, 19 nt, Artificial Sequence
  Description of Artificial Sequence: Synthetic oligonucleotide
  Sense strand starting at position 2836 of SEQ ID NO: 914664
cggaguuugcccuauggau

SEQ ID NO: 1021287 - RNA, 19 nt, Artificial Sequence
  Description of Artificial Sequence: Synthetic oligonucleotide
  Antisense strand to SEQ ID NO: 1021286
auccauagggcaaacuccg

SEQ ID NO: 1021288 - RNA, 19 nt, Artificial Sequence
  Description of Artificial Sequence: Synthetic oligonucleotide
  Sense strand starting at position 2838 of SEQ ID NO: 914664
gaguuugcccuauggauau

SEQ ID NO: 1021289 - RNA, 19 nt, Artificial Sequence
  Description of Artificial Sequence: Synthetic oligonucleotide
  Antisense strand to SEQ ID NO: 1021288
auauccauagggcaaacuc

SEQ ID NO: 1021290 - RNA, 19 nt, Artificial Sequence
  Description of Artificial Sequence: Synthetic oligonucleotide
  Sense strand starting at position 2879 of SEQ ID NO: 914664
guuccaugacagcauucuu

SEQ ID NO: 1021291 - RNA, 19 nt, Artificial Sequence
  Description of Artificial Sequence: Synthetic oligonucleotide
  Antisense strand to SEQ ID NO: 1021290
aagaaugcugucauggaac

SEQ ID NO: 1021292 - RNA, 19 nt, Artificial Sequence
  Description of Artificial Sequence: Synthetic oligonucleotide
  Sense strand starting at position 2907 of SEQ ID NO: 914664
agcgaaaugcuagacacaa

SEQ ID NO: 1021293 - RNA, 19 nt, Artificial Sequence
  Description of Artificial Sequence: Synthetic oligonucleotide
  Antisense strand to SEQ ID NO: 1021292
uugugucuagcauuucgcu

SEQ ID NO: 1021294 - RNA, 19 nt, Artificial Sequence
  Description of Artificial Sequence: Synthetic oligonucleotide
  Sense strand starting at position 2950 of SEQ ID NO: 914664
ugauuugaguaaugugaga

SEQ ID NO: 1021295 - RNA, 19 nt, Artificial Sequence
  Description of Artificial Sequence: Synthetic oligonucleotide
  Antisense strand to SEQ ID NO: 1021294
ucucacauuacucaaauca

SEQ ID NO: 1021296 - RNA, 19 nt, Artificial Sequence
  Description of Artificial Sequence: Synthetic oligonucleotide
  Sense strand starting at position 2957 of SEQ ID NO: 914664
aguaaugugagauagugca

SEQ ID NO: 1021297 - RNA, 19 nt, Artificial Sequence
  Description of Artificial Sequence: Synthetic oligonucleotide
  Antisense strand to SEQ ID NO: 1021296
ugcacuaucucacauuacu

SEQ ID NO: 1021298 - RNA, 19 nt, Artificial Sequence
  Description of Artificial Sequence: Synthetic oligonucleotide
  Sense strand starting at position 2978 of SEQ ID NO: 914664
auauuuggguaaggaaaua

SEQ ID NO: 1021299 - RNA, 19 nt, Artificial Sequence
  Description of Artificial Sequence: Synthetic oligonucleotide
  Antisense strand to SEQ ID NO: 1021298
uauuuccuuacccaaauau

SEQ ID NO: 1021300 - RNA, 19 nt, Artificial Sequence
  Description of Artificial Sequence: Synthetic oligonucleotide
  Sense strand starting at position 3057 of SEQ ID NO: 914664
guaaacuaugcauaugcaa

SEQ ID NO: 1021301 - RNA, 19 nt, Artificial Sequence
  Description of Artificial Sequence: Synthetic oligonucleotide
  Antisense strand to SEQ ID NO: 1021300
uugcauaugcauaguuuac

SEQ ID NO: 1021302 - RNA, 19 nt, Artificial Sequence
  Description of Artificial Sequence: Synthetic oligonucleotide
  Sense strand starting at position 3096 of SEQ ID NO: 914664
uaaaguaggugcuuauauu

SEQ ID NO: 1021303 - RNA, 19 nt, Artificial Sequence
  Description of Artificial Sequence: Synthetic oligonucleotide
  Antisense strand to SEQ ID NO: 1021302
aauauaagcaccuacuuua

SEQ ID NO: 1021304 - RNA, 19 nt, Artificial Sequence
  Description of Artificial Sequence: Synthetic oligonucleotide
  Sense strand starting at position 3115 of SEQ ID NO: 914664
caggcauguguauaacuuu

SEQ ID NO: 1021305 - RNA, 19 nt, Artificial Sequence
  Description of Artificial Sequence: Synthetic oligonucleotide
  Antisense strand to SEQ ID NO: 1021304
aaaguuauacacaugccug

SEQ ID NO: 1021306 - RNA, 19 nt, Artificial Sequence
  Description of Artificial Sequence: Synthetic oligonucleotide
  Sense strand starting at position 3199 of SEQ ID NO: 914664
aagcauuuauggcgaggaa

SEQ ID NO: 1021307 - RNA, 19 nt, Artificial Sequence
  Description of Artificial Sequence: Synthetic oligonucleotide
  Antisense strand to SEQ ID NO: 1021306
uuccucgccauaaaugcuu

SEQ ID NO: 1021308 - RNA, 19 nt, Artificial Sequence
  Description of Artificial Sequence: Synthetic oligonucleotide
  Sense strand starting at position 3625 of SEQ ID NO: 914664
agcgauguuauugagaggu

SEQ ID NO: 1021309 - RNA, 19 nt, Artificial Sequence
  Description of Artificial Sequence: Synthetic oligonucleotide
  Antisense strand to SEQ ID NO: 1021308
accucucaauaacaucgcu

SEQ ID NO: 1021310 - RNA, 19 nt, Artificial Sequence
  Description of Artificial Sequence: Synthetic oligonucleotide
  Sense strand starting at position 3629 of SEQ ID NO: 914664
auguuauugagagguuaau

SEQ ID NO: 1021311 - RNA, 19 nt, Artificial Sequence
  Description of Artificial Sequence: Synthetic oligonucleotide
  Antisense strand to SEQ ID NO: 1021310
auuaaccucucaauaacau

SEQ ID NO: 1021312 - RNA, 19 nt, Artificial Sequence
  Description of Artificial Sequence: Synthetic oligonucleotide
  Sense strand starting at position 3668 of SEQ ID NO: 914664
gauguugguuugguagagu

SEQ ID NO: 1021313 - RNA, 19 nt, Artificial Sequence
  Description of Artificial Sequence: Synthetic oligonucleotide
  Antisense strand to SEQ ID NO: 1021312
acucuaccaaaccaacauc

SEQ ID NO: 1021314 - RNA, 19 nt, Artificial Sequence
  Description of Artificial Sequence: Synthetic oligonucleotide
  Sense strand starting at position 3671 of SEQ ID NO: 914664
guugguuugguagaguugu

SEQ ID NO: 1021315 - RNA, 19 nt, Artificial Sequence
  Description of Artificial Sequence: Synthetic oligonucleotide
  Antisense strand to SEQ ID NO: 1021314
acaacucuaccaaaccaac

SEQ ID NO: 1021316 - RNA, 19 nt, Artificial Sequence
  Description of Artificial Sequence: Synthetic oligonucleotide
  Sense strand starting at position 3750 of SEQ ID NO: 914664
ggaaguugucacugauagc

SEQ ID NO: 1021317 - RNA, 19 nt, Artificial Sequence
  Description of Artificial Sequence: Synthetic oligonucleotide
  Antisense strand to SEQ ID NO: 1021316
gcuaucagugacaacuucc

SEQ ID NO: 1021318 - RNA, 19 nt, Artificial Sequence
  Description of Artificial Sequence: Synthetic oligonucleotide
  Sense strand starting at position 3756 of SEQ ID NO: 914664
ugucacugauagcuuaaau

SEQ ID NO: 1021319 - RNA, 19 nt, Artificial Sequence
  Description of Artificial Sequence: Synthetic oligonucleotide
  Antisense strand to SEQ ID NO: 1021318
auuuaagcuaucagugaca

SEQ ID NO: 1021320 - RNA, 19 nt, Artificial Sequence
  Description of Artificial Sequence: Synthetic oligonucleotide
  Sense strand starting at position 3781 of SEQ ID NO: 914664
agugaugauucugagacua

SEQ ID NO: 1021321 - RNA, 19 nt, Artificial Sequence
  Description of Artificial Sequence: Synthetic oligonucleotide
  Antisense strand to SEQ ID NO: 1021320
uagucucagaaucaucacu

SEQ ID NO: 1021322 - RNA, 19 nt, Artificial Sequence
  Description of Artificial Sequence: Synthetic oligonucleotide
  Sense strand starting at position 3783 of SEQ ID NO: 914664
ugaugauucugagacuaga

SEQ ID NO: 1021323 - RNA, 19 nt, Artificial Sequence
  Description of Artificial Sequence: Synthetic oligonucleotide
  Antisense strand to SEQ ID NO: 1021322
ucuagucucagaaucauca

SEQ ID NO: 1021324 - RNA, 19 nt, Artificial Sequence
  Description of Artificial Sequence: Synthetic oligonucleotide
  Sense strand starting at position 3827 of SEQ ID NO: 914664
ccucgauuccagggauauu

SEQ ID NO: 1021325 - RNA, 19 nt, Artificial Sequence
  Description of Artificial Sequence: Synthetic oligonucleotide
  Antisense strand to SEQ ID NO: 1021324
aauaucccuggaaucgagg

SEQ ID NO: 1021326 - RNA, 19 nt, Artificial Sequence
  Description of Artificial Sequence: Synthetic oligonucleotide
  Sense strand starting at position 3856 of SEQ ID NO: 914664
aaugccugcuugucacaga

SEQ ID NO: 1021327 - RNA, 19 nt, Artificial Sequence
  Description of Artificial Sequence: Synthetic oligonucleotide
  Antisense strand to SEQ ID NO: 1021326
ucugugacaagcaggcauu

SEQ ID NO: 1021328 - RNA, 19 nt, Artificial Sequence
  Description of Artificial Sequence: Synthetic oligonucleotide
  Sense strand starting at position 33 of SEQ ID NO: 914665
gcgccuggccucuucuuaa

SEQ ID NO: 1021329 - RNA, 19 nt, Artificial Sequence
  Description of Artificial Sequence: Synthetic oligonucleotide
  Antisense strand to SEQ ID NO: 1021328
uuaagaagaggccaggcgc

SEQ ID NO: 1021330 - RNA, 19 nt, Artificial Sequence
  Description of Artificial Sequence: Synthetic oligonucleotide
  Sense strand starting at position 269 of SEQ ID NO: 914665
ugggaauuauaccauaaga

SEQ ID NO: 1021331 - RNA, 19 nt, Artificial Sequence
  Description of Artificial Sequence: Synthetic oligonucleotide
  Antisense strand to SEQ ID NO: 1021330
ucuuaugguauaauuccca

SEQ ID NO: 1021332 - RNA, 19 nt, Artificial Sequence
  Description of Artificial Sequence: Synthetic oligonucleotide
  Sense strand starting at position 283 of SEQ ID NO: 914665
uaagacaaugugugucauu

SEQ ID NO: 1021333 - RNA, 19 nt, Artificial Sequence
  Description of Artificial Sequence: Synthetic oligonucleotide
  Antisense strand to SEQ ID NO: 1021332
aaugacacacauugucuua

SEQ ID NO: 1021334 - RNA, 19 nt, Artificial Sequence
  Description of Artificial Sequence: Synthetic oligonucleotide
  Sense strand starting at position 457 of SEQ ID NO: 914665
uuaaguaccuggcccaaua

SEQ ID NO: 1021335 - RNA, 19 nt, Artificial Sequence
  Description of Artificial Sequence: Synthetic oligonucleotide
  Antisense strand to SEQ ID NO: 1021334
uauugggccagguacuuaa

SEQ ID NO: 1021336 - RNA, 19 nt, Artificial Sequence
  Description of Artificial Sequence: Synthetic oligonucleotide
  Sense strand starting at position 766 of SEQ ID NO: 914665
cuagauuagcauugcccaa

SEQ ID NO: 1021337 - RNA, 19 nt, Artificial Sequence
  Description of Artificial Sequence: Synthetic oligonucleotide
  Antisense strand to SEQ ID NO: 1021336
uugggcaaugcuaaucuag

SEQ ID NO: 1021338 - RNA, 19 nt, Artificial Sequence
  Description of Artificial Sequence: Synthetic oligonucleotide
  Sense strand starting at position 910 of SEQ ID NO: 914665
ccaccuagucccgagacua

SEQ ID NO: 1021339 - RNA, 19 nt, Artificial Sequence
  Description of Artificial Sequence: Synthetic oligonucleotide
  Antisense strand to SEQ ID NO: 1021338
uagucucgggacuaggugg

SEQ ID NO: 1021340 - RNA, 19 nt, Artificial Sequence
  Description of Artificial Sequence: Synthetic oligonucleotide
  Sense strand starting at position 995 of SEQ ID NO: 914665
caaucuaguccgcagucua

SEQ ID NO: 1021341 - RNA, 19 nt, Artificial Sequence
  Description of Artificial Sequence: Synthetic oligonucleotide
  Antisense strand to SEQ ID NO: 1021340
uagacugcggacuagauug

SEQ ID NO: 1021342 - RNA, 19 nt, Artificial Sequence
  Description of Artificial Sequence: Synthetic oligonucleotide
  Sense strand starting at position 2188 of SEQ ID NO: 914665
cggaguuugcccuauggau

SEQ ID NO: 1021343 - RNA, 19 nt, Artificial Sequence
  Description of Artificial Sequence: Synthetic oligonucleotide
  Antisense strand to SEQ ID NO: 1021342
auccauagggcaaacuccg

SEQ ID NO: 1021344 - RNA, 19 nt, Artificial Sequence
  Description of Artificial Sequence: Synthetic oligonucleotide
  Sense strand starting at position 2190 of SEQ ID NO: 914665
gaguuugcccuauggauau

SEQ ID NO: 1021345 - RNA, 19 nt, Artificial Sequence
  Description of Artificial Sequence: Synthetic oligonucleotide
  Antisense strand to SEQ ID NO: 1021344
auauccauagggcaaacuc

SEQ ID NO: 1021346 - RNA, 19 nt, Artificial Sequence
  Description of Artificial Sequence: Synthetic oligonucleotide
  Sense strand starting at position 2231 of SEQ ID NO: 914665
guuccaugacagcauucuu

SEQ ID NO: 1021347 - RNA, 19 nt, Artificial Sequence
  Description of Artificial Sequence: Synthetic oligonucleotide
  Antisense strand to SEQ ID NO: 1021346
aagaaugcugucauggaac

SEQ ID NO: 1021348 - RNA, 19 nt, Artificial Sequence
  Description of Artificial Sequence: Synthetic oligonucleotide
  Sense strand starting at position 2259 of SEQ ID NO: 914665
agcgaaaugcuagacacaa

SEQ ID NO: 1021349 - RNA, 19 nt, Artificial Sequence
  Description of Artificial Sequence: Synthetic oligonucleotide
  Antisense strand to SEQ ID NO: 1021348
uugugucuagcauuucgcu

SEQ ID NO: 1021350 - RNA, 19 nt, Artificial Sequence
  Description of Artificial Sequence: Synthetic oligonucleotide
  Sense strand starting at position 2302 of SEQ ID NO: 914665
ugauuugaguaaugugaga

SEQ ID NO: 1021351 - RNA, 19 nt, Artificial Sequence
  Description of Artificial Sequence: Synthetic oligonucleotide
  Antisense strand to SEQ ID NO: 1021350
ucucacauuacucaaauca

SEQ ID NO: 1021352 - RNA, 19 nt, Artificial Sequence
  Description of Artificial Sequence: Synthetic oligonucleotide
  Sense strand starting at position 2309 of SEQ ID NO: 914665
aguaaugugagauagugca

SEQ ID NO: 1021353 - RNA, 19 nt, Artificial Sequence
  Description of Artificial Sequence: Synthetic oligonucleotide
  Antisense strand to SEQ ID NO: 1021352
ugcacuaucucacauuacu

SEQ ID NO: 1021354 - RNA, 19 nt, Artificial Sequence
  Description of Artificial Sequence: Synthetic oligonucleotide
  Sense strand starting at position 2330 of SEQ ID NO: 914665
auauuuggguaaggaaaua

SEQ ID NO: 1021355 - RNA, 19 nt, Artificial Sequence
  Description of Artificial Sequence: Synthetic oligonucleotide
  Antisense strand to SEQ ID NO: 1021354
uauuuccuuacccaaauau

SEQ ID NO: 1021356 - RNA, 19 nt, Artificial Sequence
  Description of Artificial Sequence: Synthetic oligonucleotide
  Sense strand starting at position 2409 of SEQ ID NO: 914665
guaaacuaugcauaugcaa

SEQ ID NO: 1021357 - RNA, 19 nt, Artificial Sequence
  Description of Artificial Sequence: Synthetic oligonucleotide
  Antisense strand to SEQ ID NO: 1021356
uugcauaugcauaguuuac

SEQ ID NO: 1021358 - RNA, 19 nt, Artificial Sequence
  Description of Artificial Sequence: Synthetic oligonucleotide
  Sense strand starting at position 2448 of SEQ ID NO: 914665
uaaaguaggugcuuauauu

SEQ ID NO: 1021359 - RNA, 19 nt, Artificial Sequence
  Description of Artificial Sequence: Synthetic oligonucleotide
  Antisense strand to SEQ ID NO: 1021358
aauauaagcaccuacuuua

SEQ ID NO: 1021360 - RNA, 19 nt, Artificial Sequence
  Description of Artificial Sequence: Synthetic oligonucleotide
  Sense strand starting at position 2467 of SEQ ID NO: 914665
caggcauguguauaacuuu

SEQ ID NO: 1021361 - RNA, 19 nt, Artificial Sequence
  Description of Artificial Sequence: Synthetic oligonucleotide
  Antisense strand to SEQ ID NO: 1021360
aaaguuauacacaugccug

SEQ ID NO: 1021362 - RNA, 19 nt, Artificial Sequence
  Description of Artificial Sequence: Synthetic oligonucleotide
  Sense strand starting at position 2977 of SEQ ID NO: 914665
agcgauguuauugagaggu

SEQ ID NO: 1021363 - RNA, 19 nt, Artificial Sequence
  Description of Artificial Sequence: Synthetic oligonucleotide
  Antisense strand to SEQ ID NO: 1021362
accucucaauaacaucgcu

SEQ ID NO: 1021364 - RNA, 19 nt, Artificial Sequence
  Description of Artificial Sequence: Synthetic oligonucleotide
  Sense strand starting at position 2981 of SEQ ID NO: 914665
auguuauugagagguuaau

SEQ ID NO: 1021365 - RNA, 19 nt, Artificial Sequence
  Description of Artificial Sequence: Synthetic oligonucleotide
  Antisense strand to SEQ ID NO: 1021364
auuaaccucucaauaacau

SEQ ID NO: 1021366 - RNA, 19 nt, Artificial Sequence
  Description of Artificial Sequence: Synthetic oligonucleotide
  Sense strand starting at position 3020 of SEQ ID NO: 914665
gauguugguuugguagagu

SEQ ID NO: 1021367 - RNA, 19 nt, Artificial Sequence
  Description of Artificial Sequence: Synthetic oligonucleotide
  Antisense strand to SEQ ID NO: 1021366
acucuaccaaaccaacauc

SEQ ID NO: 1021368 - RNA, 19 nt, Artificial Sequence
  Description of Artificial Sequence: Synthetic oligonucleotide
  Sense strand starting at position 3102 of SEQ ID NO: 914665
ggaaguugucacugauagc

SEQ ID NO: 1021369 - RNA, 19 nt, Artificial Sequence
  Description of Artificial Sequence: Synthetic oligonucleotide
  Antisense strand to SEQ ID NO: 1021368
gcuaucagugacaacuucc

SEQ ID NO: 1021370 - RNA, 19 nt, Artificial Sequence
  Description of Artificial Sequence: Synthetic oligonucleotide
  Sense strand starting at position 3108 of SEQ ID NO: 914665
ugucacugauagcuuaaau

SEQ ID NO: 1021371 - RNA, 19 nt, Artificial Sequence
  Description of Artificial Sequence: Synthetic oligonucleotide
  Antisense strand to SEQ ID NO: 1021370
auuuaagcuaucagugaca

SEQ ID NO: 1021372 - RNA, 19 nt, Artificial Sequence
  Description of Artificial Sequence: Synthetic oligonucleotide
  Sense strand starting at position 3179 of SEQ ID NO: 914665
ccucgauuccagggauauu

SEQ ID NO: 1021373 - RNA, 19 nt, Artificial Sequence
  Description of Artificial Sequence: Synthetic oligonucleotide
  Antisense strand to SEQ ID NO: 1021372
aauaucccuggaaucgagg

SEQ ID NO: 1021374 - RNA, 19 nt, Artificial Sequence
  Description of Artificial Sequence: Synthetic oligonucleotide
  Sense strand starting at position 3380 of SEQ ID NO: 914665
gguggagagcagugacaau

SEQ ID NO: 1021375 - RNA, 19 nt, Artificial Sequence
  Description of Artificial Sequence: Synthetic oligonucleotide
  Antisense strand to SEQ ID NO: 1021374
auugucacugcucuccacc

SEQ ID NO: 1021376 - RNA, 19 nt, Artificial Sequence
  Description of Artificial Sequence: Synthetic oligonucleotide
  Sense strand starting at position 3404 of SEQ ID NO: 914665
cuggaacuguauccaaauu

SEQ ID NO: 1021377 - RNA, 19 nt, Artificial Sequence
  Description of Artificial Sequence: Synthetic oligonucleotide
  Antisense strand to SEQ ID NO: 1021376
aauuuggauacaguuccag

SEQ ID NO: 1021378 - RNA, 19 nt, Artificial Sequence
  Description of Artificial Sequence: Synthetic oligonucleotide
  Sense strand starting at position 3424 of SEQ ID NO: 914665
aucuuaucccagggaauau

SEQ ID NO: 1021379 - RNA, 19 nt, Artificial Sequence
  Description of Artificial Sequence: Synthetic oligonucleotide
  Antisense strand to SEQ ID NO: 1021378
auauucccugggauaagau

SEQ ID NO: 1021380 - RNA, 19 nt, Artificial Sequence
  Description of Artificial Sequence: Synthetic oligonucleotide
  Sense strand starting at position 3471 of SEQ ID NO: 914665
auagcuaucuggucuggaa

SEQ ID NO: 1021381 - RNA, 19 nt, Artificial Sequence
  Description of Artificial Sequence: Synthetic oligonucleotide
  Antisense strand to SEQ ID NO: 1021380
uuccagaccagauagcuau

SEQ ID NO: 1021382 - RNA, 19 nt, Artificial Sequence
  Description of Artificial Sequence: Synthetic oligonucleotide
  Sense strand starting at position 3473 of SEQ ID NO: 914665
agcuaucuggucuggaaga

SEQ ID NO: 1021383 - RNA, 19 nt, Artificial Sequence
  Description of Artificial Sequence: Synthetic oligonucleotide
  Antisense strand to SEQ ID NO: 1021382
ucuuccagaccagauagcu

SEQ ID NO: 1021384 - RNA, 19 nt, Artificial Sequence
  Description of Artificial Sequence: Synthetic oligonucleotide
  Sense strand starting at position 3486 of SEQ ID NO: 914665
ggaagauuguggccucuuu

SEQ ID NO: 1021385 - RNA, 19 nt, Artificial Sequence
  Description of Artificial Sequence: Synthetic oligonucleotide
  Antisense strand to SEQ ID NO: 1021384
aaagaggccacaaucuucc

SEQ ID NO: 1021386 - RNA, 19 nt, Artificial Sequence
  Description of Artificial Sequence: Synthetic oligonucleotide
  Sense strand starting at position 3576 of SEQ ID NO: 914665
gagaauuugccguguuaaa

SEQ ID NO: 1021387 - RNA, 19 nt, Artificial Sequence
  Description of Artificial Sequence: Synthetic oligonucleotide
  Antisense strand to SEQ ID NO: 1021386
uuuaacacggcaaauucuc

SEQ ID NO: 1021388 - RNA, 19 nt, Artificial Sequence
  Description of Artificial Sequence: Synthetic oligonucleotide
  Sense strand starting at position 3587 of SEQ ID NO: 914665
guguuaaagaacuguguga

SEQ ID NO: 1021389 - RNA, 19 nt, Artificial Sequence
  Description of Artificial Sequence: Synthetic oligonucleotide
  Antisense strand to SEQ ID NO: 1021388
ucacacaguucuuuaacac

SEQ ID NO: 1021390 - RNA, 19 nt, Artificial Sequence
  Description of Artificial Sequence: Synthetic oligonucleotide
  Sense strand starting at position 3591 of SEQ ID NO: 914665
uaaagaacugugugaggca

SEQ ID NO: 1021391 - RNA, 19 nt, Artificial Sequence
  Description of Artificial Sequence: Synthetic oligonucleotide
  Antisense strand to SEQ ID NO: 1021390
ugccucacacaguucuuua

SEQ ID NO: 1021392 - RNA, 19 nt, Artificial Sequence
  Description of Artificial Sequence: Synthetic oligonucleotide
  Sense strand starting at position 3673 of SEQ ID NO: 914665
gcauauaguuaauugcuca

SEQ ID NO: 1021393 - RNA, 19 nt, Artificial Sequence
  Description of Artificial Sequence: Synthetic oligonucleotide
  Antisense strand to SEQ ID NO: 1021392
ugagcaauuaacuauaugc

SEQ ID NO: 1021394 - RNA, 19 nt, Artificial Sequence
  Description of Artificial Sequence: Synthetic oligonucleotide
  Sense strand starting at position 3696 of SEQ ID NO: 914665
auaguuguugaauggagaa

SEQ ID NO: 1021395 - RNA, 19 nt, Artificial Sequence
  Description of Artificial Sequence: Synthetic oligonucleotide
  Antisense strand to SEQ ID NO: 1021394
uucuccauucaacaacuau

SEQ ID NO: 1021396 - RNA, 19 nt, Artificial Sequence
  Description of Artificial Sequence: Synthetic oligonucleotide
  Sense strand starting at position 3786 of SEQ ID NO: 914665
guggcauagaagcauauaa

SEQ ID NO: 1021397 - RNA, 19 nt, Artificial Sequence
  Description of Artificial Sequence: Synthetic oligonucleotide
  Antisense strand to SEQ ID NO: 1021396
uuauaugcuucuaugccac

SEQ ID NO: 1021398 - RNA, 19 nt, Artificial Sequence
  Description of Artificial Sequence: Synthetic oligonucleotide
  Sense strand starting at position 3881 of SEQ ID NO: 914665
guugauaucuuuguuuauc

SEQ ID NO: 1021399 - RNA, 19 nt, Artificial Sequence
  Description of Artificial Sequence: Synthetic oligonucleotide
  Antisense strand to SEQ ID NO: 1021398
gauaaacaaagauaucaac

SEQ ID NO: 1021400 - RNA, 19 nt, Artificial Sequence
  Description of Artificial Sequence: Synthetic oligonucleotide
  Sense strand starting at position 3883 of SEQ ID NO: 914665
ugauaucuuuguuuauccu

SEQ ID NO: 1021401 - RNA, 19 nt, Artificial Sequence
  Description of Artificial Sequence: Synthetic oligonucleotide
  Antisense strand to SEQ ID NO: 1021400
aggauaaacaaagauauca

SEQ ID NO: 1021402 - RNA, 19 nt, Artificial Sequence
  Description of Artificial Sequence: Synthetic oligonucleotide
  Sense strand starting at position 3890 of SEQ ID NO: 914665
uuuguuuauccuggaggac

SEQ ID NO: 1021403 - RNA, 19 nt, Artificial Sequence
  Description of Artificial Sequence: Synthetic oligonucleotide
  Antisense strand to SEQ ID NO: 1021402
guccuccaggauaaacaaa

SEQ ID NO: 1021404 - RNA, 19 nt, Artificial Sequence
  Description of Artificial Sequence: Synthetic oligonucleotide
  Sense strand starting at position 3961 of SEQ ID NO: 914665
gaaagucaugagcaugugu

SEQ ID NO: 1021405 - RNA, 19 nt, Artificial Sequence
  Description of Artificial Sequence: Synthetic oligonucleotide
  Antisense strand to SEQ ID NO: 1021404
acacaugcucaugacuuuc

SEQ ID NO: 1021406 - RNA, 19 nt, Artificial Sequence
  Description of Artificial Sequence: Synthetic oligonucleotide
  Sense strand starting at position 3966 of SEQ ID NO: 914665
ucaugagcauguguuaaag

SEQ ID NO: 1021407 - RNA, 19 nt, Artificial Sequence
  Description of Artificial Sequence: Synthetic oligonucleotide
  Antisense strand to SEQ ID NO: 1021406
cuuuaacacaugcucauga

SEQ ID NO: 1021408 - RNA, 19 nt, Artificial Sequence
  Description of Artificial Sequence: Synthetic oligonucleotide
  Sense strand starting at position 419 of SEQ ID NO: 914666
gguguuuaccuuugggauu

SEQ ID NO: 1021409 - RNA, 19 nt, Artificial Sequence
  Description of Artificial Sequence: Synthetic oligonucleotide
  Antisense strand to SEQ ID NO: 1021408
aaucccaaagguaaacacc

SEQ ID NO: 1021410 - RNA, 19 nt, Artificial Sequence
  Description of Artificial Sequence: Synthetic oligonucleotide
  Sense strand starting at position 472 of SEQ ID NO: 914666
augggauguuggugagaaa

SEQ ID NO: 1021411 - RNA, 19 nt, Artificial Sequence
  Description of Artificial Sequence: Synthetic oligonucleotide
  Antisense strand to SEQ ID NO: 1021410
uuucucaccaacaucccau

SEQ ID NO: 1021412 - RNA, 19 nt, Artificial Sequence
  Description of Artificial Sequence: Synthetic oligonucleotide
  Sense strand starting at position 558 of SEQ ID NO: 914666
cuaggugcagcagaagauu

SEQ ID NO: 1021413 - RNA, 19 nt, Artificial Sequence
  Description of Artificial Sequence: Synthetic oligonucleotide
  Antisense strand to SEQ ID NO: 1021412
aaucuucugcugcaccuag

SEQ ID NO: 1021414 - RNA, 19 nt, Artificial Sequence
  Description of Artificial Sequence: Synthetic oligonucleotide
  Sense strand starting at position 567 of SEQ ID NO: 914666
gcagaagauucucugggua

SEQ ID NO: 1021415 - RNA, 19 nt, Artificial Sequence
  Description of Artificial Sequence: Synthetic oligonucleotide
  Antisense strand to SEQ ID NO: 1021414
uacccagagaaucuucugc

SEQ ID NO: 1021416 - RNA, 19 nt, Artificial Sequence
  Description of Artificial Sequence: Synthetic oligonucleotide
  Sense strand starting at position 569 of SEQ ID NO: 914666
agaagauucucuggguaga

SEQ ID NO: 1021417 - RNA, 19 nt, Artificial Sequence
  Description of Artificial Sequence: Synthetic oligonucleotide
  Antisense strand to SEQ ID NO: 1021416
ucuacccagagaaucuucu

SEQ ID NO: 1021418 - RNA, 19 nt, Artificial Sequence
  Description of Artificial Sequence: Synthetic oligonucleotide
  Sense strand starting at position 571 of SEQ ID NO: 914666
aagauucucuggguagaau

SEQ ID NO: 1021419 - RNA, 19 nt, Artificial Sequence
  Description of Artificial Sequence: Synthetic oligonucleotide
  Antisense strand to SEQ ID NO: 1021418
auucuacccagagaaucuu

SEQ ID NO: 1021420 - RNA, 19 nt, Artificial Sequence
  Description of Artificial Sequence: Synthetic oligonucleotide
  Sense strand starting at position 580 of SEQ ID NO: 914666
uggguagaauucucucacu

SEQ ID NO: 1021421 - RNA, 19 nt, Artificial Sequence
  Description of Artificial Sequence: Synthetic oligonucleotide
  Antisense strand to SEQ ID NO: 1021420
agugagagaauucuaccca

SEQ ID NO: 1021422 - RNA, 19 nt, Artificial Sequence
  Description of Artificial Sequence: Synthetic oligonucleotide
  Sense strand starting at position 638 of SEQ ID NO: 914666
ggugcucaccuguguacuu

SEQ ID NO: 1021423 - RNA, 19 nt, Artificial Sequence
  Description of Artificial Sequence: Synthetic oligonucleotide
  Antisense strand to SEQ ID NO: 1021422
aaguacacaggugagcacc

SEQ ID NO: 1021424 - RNA, 19 nt, Artificial Sequence
  Description of Artificial Sequence: Synthetic oligonucleotide
  Sense strand starting at position 791 of SEQ ID NO: 914666
ggagguuuguggcagaguu

SEQ ID NO: 1021425 - RNA, 19 nt, Artificial Sequence
  Description of Artificial Sequence: Synthetic oligonucleotide
  Antisense strand to SEQ ID NO: 1021424
aacucugccacaaaccucc

SEQ ID NO: 1021426 - RNA, 19 nt, Artificial Sequence
  Description of Artificial Sequence: Synthetic oligonucleotide
  Sense strand starting at position 799 of SEQ ID NO: 914666
guggcagaguuuccuacuu

SEQ ID NO: 1021427 - RNA, 19 nt, Artificial Sequence
  Description of Artificial Sequence: Synthetic oligonucleotide
  Antisense strand to SEQ ID NO: 1021426
aaguaggaaacucugccac

SEQ ID NO: 1021428 - RNA, 19 nt, Artificial Sequence
  Description of Artificial Sequence: Synthetic oligonucleotide
  Sense strand starting at position 1080 of SEQ ID NO: 914666
gcagguggaugucugaaga

SEQ ID NO: 1021429 - RNA, 19 nt, Artificial Sequence
  Description of Artificial Sequence: Synthetic oligonucleotide
  Antisense strand to SEQ ID NO: 1021428
ucuucagacauccaccugc

SEQ ID NO: 1021430 - RNA, 19 nt, Artificial Sequence
  Description of Artificial Sequence: Synthetic oligonucleotide
  Sense strand starting at position 1257 of SEQ ID NO: 914666
cuugcuucucuguggaagu

SEQ ID NO: 1021431 - RNA, 19 nt, Artificial Sequence
  Description of Artificial Sequence: Synthetic oligonucleotide
  Antisense strand to SEQ ID NO: 1021430
acuuccacagagaagcaag

SEQ ID NO: 1021432 - RNA, 19 nt, Artificial Sequence
  Description of Artificial Sequence: Synthetic oligonucleotide
  Sense strand starting at position 1267 of SEQ ID NO: 914666
uguggaagugucuagaguu

SEQ ID NO: 1021433 - RNA, 19 nt, Artificial Sequence
  Description of Artificial Sequence: Synthetic oligonucleotide
  Antisense strand to SEQ ID NO: 1021432
aacucuagacacuuccaca

SEQ ID NO: 1021434 - RNA, 19 nt, Artificial Sequence
  Description of Artificial Sequence: Synthetic oligonucleotide
  Sense strand starting at position 1268 of SEQ ID NO: 914666
guggaagugucuagaguug

SEQ ID NO: 1021435 - RNA, 19 nt, Artificial Sequence
  Description of Artificial Sequence: Synthetic oligonucleotide
  Antisense strand to SEQ ID NO: 1021434
caacucuagacacuuccac

SEQ ID NO: 1021436 - RNA, 19 nt, Artificial Sequence
  Description of Artificial Sequence: Synthetic oligonucleotide
  Sense strand starting at position 1681 of SEQ ID NO: 914666
gccugcucccuauauugga

SEQ ID NO: 1021437 - RNA, 19 nt, Artificial Sequence
  Description of Artificial Sequence: Synthetic oligonucleotide
  Antisense strand to SEQ ID NO: 1021436
uccaauauagggagcaggc

SEQ ID NO: 1021438 - RNA, 19 nt, Artificial Sequence
  Description of Artificial Sequence: Synthetic oligonucleotide
  Sense strand starting at position 1686 of SEQ ID NO: 914666
cucccuauauuggaagaga

SEQ ID NO: 1021439 - RNA, 19 nt, Artificial Sequence
  Description of Artificial Sequence: Synthetic oligonucleotide
  Antisense strand to SEQ ID NO: 1021438
ucucuuccaauauagggag

SEQ ID NO: 1021440 - RNA, 19 nt, Artificial Sequence
  Description of Artificial Sequence: Synthetic oligonucleotide
  Sense strand starting at position 2006 of SEQ ID NO: 914666
cuggguuaauguugaacua

SEQ ID NO: 1021441 - RNA, 19 nt, Artificial Sequence
  Description of Artificial Sequence: Synthetic oligonucleotide
  Antisense strand to SEQ ID NO: 1021440
uaguucaacauuaacccag

SEQ ID NO: 1021442 - RNA, 19 nt, Artificial Sequence
  Description of Artificial Sequence: Synthetic oligonucleotide
  Sense strand starting at position 2083 of SEQ ID NO: 914666
gguagauaguccuccuguc

SEQ ID NO: 1021443 - RNA, 19 nt, Artificial Sequence
  Description of Artificial Sequence: Synthetic oligonucleotide
  Antisense strand to SEQ ID NO: 1021442
gacaggaggacuaucuacc

SEQ ID NO: 1021444 - RNA, 19 nt, Artificial Sequence
  Description of Artificial Sequence: Synthetic oligonucleotide
  Sense strand starting at position 2237 of SEQ ID NO: 914666
cuaugagacuuuccuggag

SEQ ID NO: 1021445 - RNA, 19 nt, Artificial Sequence
  Description of Artificial Sequence: Synthetic oligonucleotide
  Antisense strand to SEQ ID NO: 1021444
cuccaggaaagucucauag

SEQ ID NO: 1021446 - RNA, 19 nt, Artificial Sequence
  Description of Artificial Sequence: Synthetic oligonucleotide
  Sense strand starting at position 2239 of SEQ ID NO: 914666
augagacuuuccuggagcu

SEQ ID NO: 1021447 - RNA, 19 nt, Artificial Sequence
  Description of Artificial Sequence: Synthetic oligonucleotide
  Antisense strand to SEQ ID NO: 1021446
agcuccaggaaagucucau

SEQ ID NO: 1021448 - RNA, 19 nt, Artificial Sequence
  Description of Artificial Sequence: Synthetic oligonucleotide
  Sense strand starting at position 2283 of SEQ ID NO: 914666
gguugcuugucaucucugu

SEQ ID NO: 1021449 - RNA, 19 nt, Artificial Sequence
  Description of Artificial Sequence: Synthetic oligonucleotide
  Antisense strand to SEQ ID NO: 1021448
acagagaugacaagcaacc

SEQ ID NO: 1021450 - RNA, 19 nt, Artificial Sequence
  Description of Artificial Sequence: Synthetic oligonucleotide
  Sense strand starting at position 2330 of SEQ ID NO: 914666
ggaauaauacuuuguugug

SEQ ID NO: 1021451 - RNA, 19 nt, Artificial Sequence
  Description of Artificial Sequence: Synthetic oligonucleotide
  Antisense strand to SEQ ID NO: 1021450
cacaacaaaguauuauucc

SEQ ID NO: 1021452 - RNA, 19 nt, Artificial Sequence
  Description of Artificial Sequence: Synthetic oligonucleotide
  Sense strand starting at position 2331 of SEQ ID NO: 914666
gaauaauacuuuguuguga

SEQ ID NO: 1021453 - RNA, 19 nt, Artificial Sequence
  Description of Artificial Sequence: Synthetic oligonucleotide
  Antisense strand to SEQ ID NO: 1021452
ucacaacaaaguauuauuc

SEQ ID NO: 1021454 - RNA, 19 nt, Artificial Sequence
  Description of Artificial Sequence: Synthetic oligonucleotide
  Sense strand starting at position 2336 of SEQ ID NO: 914666
auacuuuguugugaggacu

SEQ ID NO: 1021455 - RNA, 19 nt, Artificial Sequence
  Description of Artificial Sequence: Synthetic oligonucleotide
  Antisense strand to SEQ ID NO: 1021454
aguccucacaacaaaguau

SEQ ID NO: 1021456 - RNA, 19 nt, Artificial Sequence
  Description of Artificial Sequence: Synthetic oligonucleotide
  Sense strand starting at position 2370 of SEQ ID NO: 914666
uggaauguccauggaauau

SEQ ID NO: 1021457 - RNA, 19 nt, Artificial Sequence
  Description of Artificial Sequence: Synthetic oligonucleotide
  Antisense strand to SEQ ID NO: 1021456
auauuccauggacauucca

SEQ ID NO: 1021458 - RNA, 19 nt, Artificial Sequence
  Description of Artificial Sequence: Synthetic oligonucleotide
  Sense strand starting at position 2379 of SEQ ID NO: 914666
cauggaauaucguaaguuc

SEQ ID NO: 1021459 - RNA, 19 nt, Artificial Sequence
  Description of Artificial Sequence: Synthetic oligonucleotide
  Antisense strand to SEQ ID NO: 1021458
gaacuuacgauauuccaug

SEQ ID NO: 1021460 - RNA, 19 nt, Artificial Sequence
  Description of Artificial Sequence: Synthetic oligonucleotide
  Sense strand starting at position 2382 of SEQ ID NO: 914666
ggaauaucguaaguucuua

SEQ ID NO: 1021461 - RNA, 19 nt, Artificial Sequence
  Description of Artificial Sequence: Synthetic oligonucleotide
  Antisense strand to SEQ ID NO: 1021460
uaagaacuuacgauauucc

SEQ ID NO: 1021462 - RNA, 19 nt, Artificial Sequence
  Description of Artificial Sequence: Synthetic oligonucleotide
  Sense strand starting at position 2387 of SEQ ID NO: 914666
aucguaaguucuuaaucag

SEQ ID NO: 1021463 - RNA, 19 nt, Artificial Sequence
  Description of Artificial Sequence: Synthetic oligonucleotide
  Antisense strand to SEQ ID NO: 1021462
cugauuaagaacuuacgau

SEQ ID NO: 1021464 - RNA, 19 nt, Artificial Sequence
  Description of Artificial Sequence: Synthetic oligonucleotide
  Sense strand starting at position 2390 of SEQ ID NO: 914666
guaaguucuuaaucagauc

SEQ ID NO: 1021465 - RNA, 19 nt, Artificial Sequence
  Description of Artificial Sequence: Synthetic oligonucleotide
  Antisense strand to SEQ ID NO: 1021464
gaucugauuaagaacuuac

SEQ ID NO: 1021466 - RNA, 19 nt, Artificial Sequence
  Description of Artificial Sequence: Synthetic oligonucleotide
  Sense strand starting at position 2430 of SEQ ID NO: 914666
ggguuuguauaaucauaau

SEQ ID NO: 1021467 - RNA, 19 nt, Artificial Sequence
  Description of Artificial Sequence: Synthetic oligonucleotide
  Antisense strand to SEQ ID NO: 1021466
auuaugauuauacaaaccc

SEQ ID NO: 1021468 - RNA, 19 nt, Artificial Sequence
  Description of Artificial Sequence: Synthetic oligonucleotide
  Sense strand starting at position 2479 of SEQ ID NO: 914666
aaagguguggccugaugga

SEQ ID NO: 1021469 - RNA, 19 nt, Artificial Sequence
  Description of Artificial Sequence: Synthetic oligonucleotide
  Antisense strand to SEQ ID NO: 1021468
uccaucaggccacaccuuu

SEQ ID NO: 1021470 - RNA, 19 nt, Artificial Sequence
  Description of Artificial Sequence: Synthetic oligonucleotide
  Sense strand starting at position 2608 of SEQ ID NO: 914666
uggagguguguuugugugu

SEQ ID NO: 1021471 - RNA, 19 nt, Artificial Sequence
  Description of Artificial Sequence: Synthetic oligonucleotide
  Antisense strand to SEQ ID NO: 1021470
acacacaaacacaccucca

SEQ ID NO: 1021472 - RNA, 19 nt, Artificial Sequence
  Description of Artificial Sequence: Synthetic oligonucleotide
  Sense strand starting at position 2723 of SEQ ID NO: 914666
uacugaaaucccugggucu

SEQ ID NO: 1021473 - RNA, 19 nt, Artificial Sequence
  Description of Artificial Sequence: Synthetic oligonucleotide
  Antisense strand to SEQ ID NO: 1021472
agacccagggauuucagua

SEQ ID NO: 1021474 - RNA, 19 nt, Artificial Sequence
  Description of Artificial Sequence: Synthetic oligonucleotide
  Sense strand starting at position 2841 of SEQ ID NO: 914666
ccauuuccuguuugcagua

SEQ ID NO: 1021475 - RNA, 19 nt, Artificial Sequence
  Description of Artificial Sequence: Synthetic oligonucleotide
  Antisense strand to SEQ ID NO: 1021474
uacugcaaacaggaaaugg

SEQ ID NO: 1021476 - RNA, 19 nt, Artificial Sequence
  Description of Artificial Sequence: Synthetic oligonucleotide
  Sense strand starting at position 2865 of SEQ ID NO: 914666
ggcaaauauuagucuaagu

SEQ ID NO: 1021477 - RNA, 19 nt, Artificial Sequence
  Description of Artificial Sequence: Synthetic oligonucleotide
  Antisense strand to SEQ ID NO: 1021476
acuuagacuaauauuugcc

SEQ ID NO: 1021478 - RNA, 19 nt, Artificial Sequence
  Description of Artificial Sequence: Synthetic oligonucleotide
  Sense strand starting at position 2993 of SEQ ID NO: 914666
cagggaguguuggcagaaa

SEQ ID NO: 1021479 - RNA, 19 nt, Artificial Sequence
  Description of Artificial Sequence: Synthetic oligonucleotide
  Antisense strand to SEQ ID NO: 1021478
uuucugccaacacucccug

SEQ ID NO: 1021480 - RNA, 19 nt, Artificial Sequence
  Description of Artificial Sequence: Synthetic oligonucleotide
  Sense strand starting at position 3362 of SEQ ID NO: 914666
guaagauccuguuucuuuc

SEQ ID NO: 1021481 - RNA, 19 nt, Artificial Sequence
  Description of Artificial Sequence: Synthetic oligonucleotide
  Antisense strand to SEQ ID NO: 1021480
gaaagaaacaggaucuuac

SEQ ID NO: 1021482 - RNA, 19 nt, Artificial Sequence
  Description of Artificial Sequence: Synthetic oligonucleotide
  Sense strand starting at position 3705 of SEQ ID NO: 914666
ugagaccuguuccuagaaa

SEQ ID NO: 1021483 - RNA, 19 nt, Artificial Sequence
  Description of Artificial Sequence: Synthetic oligonucleotide
  Antisense strand to SEQ ID NO: 1021482
uuucuaggaacaggucuca

SEQ ID NO: 1021484 - RNA, 19 nt, Artificial Sequence
  Description of Artificial Sequence: Synthetic oligonucleotide
  Sense strand starting at position 50 of SEQ ID NO: 914667
cuguguuaccaugacugua

SEQ ID NO: 1021485 - RNA, 19 nt, Artificial Sequence
  Description of Artificial Sequence: Synthetic oligonucleotide
  Antisense strand to SEQ ID NO: 1021484
uacagucaugguaacacag

SEQ ID NO: 1021486 - RNA, 19 nt, Artificial Sequence
  Description of Artificial Sequence: Synthetic oligonucleotide
  Sense strand starting at position 52 of SEQ ID NO: 914667
guguuaccaugacuguaca

SEQ ID NO: 1021487 - RNA, 19 nt, Artificial Sequence
  Description of Artificial Sequence: Synthetic oligonucleotide
  Antisense strand to SEQ ID NO: 1021486
uguacagucaugguaacac

SEQ ID NO: 1021488 - RNA, 19 nt, Artificial Sequence
  Description of Artificial Sequence: Synthetic oligonucleotide
  Sense strand starting at position 102 of SEQ ID NO: 914667
ggacauuccugagaucgug

SEQ ID NO: 1021489 - RNA, 19 nt, Artificial Sequence
  Description of Artificial Sequence: Synthetic oligonucleotide
  Antisense strand to SEQ ID NO: 1021488
cacgaucucaggaaugucc

SEQ ID NO: 1021490 - RNA, 19 nt, Artificial Sequence
  Description of Artificial Sequence: Synthetic oligonucleotide
  Sense strand starting at position 283 of SEQ ID NO: 914667
guaacuacaugacgauaua

SEQ ID NO: 1021491 - RNA, 19 nt, Artificial Sequence
  Description of Artificial Sequence: Synthetic oligonucleotide
  Antisense strand to SEQ ID NO: 1021490
uauaucgucauguaguuac

SEQ ID NO: 1021492 - RNA, 19 nt, Artificial Sequence
  Description of Artificial Sequence: Synthetic oligonucleotide
  Sense strand starting at position 324 of SEQ ID NO: 914667
ucucaaaugucagcuaugu

SEQ ID NO: 1021493 - RNA, 19 nt, Artificial Sequence
  Description of Artificial Sequence: Synthetic oligonucleotide
  Antisense strand to SEQ ID NO: 1021492
acauagcugacauuugaga

SEQ ID NO: 1021494 - RNA, 19 nt, Artificial Sequence
  Description of Artificial Sequence: Synthetic oligonucleotide
  Sense strand starting at position 330 of SEQ ID NO: 914667
augucagcuauguuucgua

SEQ ID NO: 1021495 - RNA, 19 nt, Artificial Sequence
  Description of Artificial Sequence: Synthetic oligonucleotide
  Antisense strand to SEQ ID NO: 1021494
uacgaaacauagcugacau

SEQ ID NO: 1021496 - RNA, 19 nt, Artificial Sequence
  Description of Artificial Sequence: Synthetic oligonucleotide
  Sense strand starting at position 512 of SEQ ID NO: 914667
aggcaccagucuuuacaga

SEQ ID NO: 1021497 - RNA, 19 nt, Artificial Sequence
  Description of Artificial Sequence: Synthetic oligonucleotide
  Antisense strand to SEQ ID NO: 1021496
ucuguaaagacuggugccu

SEQ ID NO: 1021498 - RNA, 19 nt, Artificial Sequence
  Description of Artificial Sequence: Synthetic oligonucleotide
  Sense strand starting at position 529 of SEQ ID NO: 914667
gagugaaacccauggugac

SEQ ID NO: 1021499 - RNA, 19 nt, Artificial Sequence
  Description of Artificial Sequence: Synthetic oligonucleotide
  Antisense strand to SEQ ID NO: 1021498
gucaccauggguuucacuc

SEQ ID NO: 1021500 - RNA, 19 nt, Artificial Sequence
  Description of Artificial Sequence: Synthetic oligonucleotide
  Sense strand starting at position 530 of SEQ ID NO: 914667
agugaaacccauggugaca

SEQ ID NO: 1021501 - RNA, 19 nt, Artificial Sequence
  Description of Artificial Sequence: Synthetic oligonucleotide
  Antisense strand to SEQ ID NO: 1021500
ugucaccauggguuucacu

SEQ ID NO: 1021502 - RNA, 19 nt, Artificial Sequence
  Description of Artificial Sequence: Synthetic oligonucleotide
  Sense strand starting at position 555 of SEQ ID NO: 914667
ggcccuaucugauugguga

SEQ ID NO: 1021503 - RNA, 19 nt, Artificial Sequence
  Description of Artificial Sequence: Synthetic oligonucleotide
  Antisense strand to SEQ ID NO: 1021502
ucaccaaucagauagggcc

SEQ ID NO: 1021504 - RNA, 19 nt, Artificial Sequence
  Description of Artificial Sequence: Synthetic oligonucleotide
  Sense strand starting at position 556 of SEQ ID NO: 914667
gcccuaucugauuggugac

SEQ ID NO: 1021505 - RNA, 19 nt, Artificial Sequence
  Description of Artificial Sequence: Synthetic oligonucleotide
  Antisense strand to SEQ ID NO: 1021504
gucaccaaucagauagggc

SEQ ID NO: 1021506 - RNA, 19 nt, Artificial Sequence
  Description of Artificial Sequence: Synthetic oligonucleotide
  Sense strand starting at position 671 of SEQ ID NO: 914667
cugagaaacucugcuguac

SEQ ID NO: 1021507 - RNA, 19 nt, Artificial Sequence
  Description of Artificial Sequence: Synthetic oligonucleotide
  Antisense strand to SEQ ID NO: 1021506
guacagcagaguuucucag

SEQ ID NO: 1021508 - RNA, 19 nt, Artificial Sequence
  Description of Artificial Sequence: Synthetic oligonucleotide
  Sense strand starting at position 850 of SEQ ID NO: 914667
agccuagcuccgucaguua

SEQ ID NO: 1021509 - RNA, 19 nt, Artificial Sequence
  Description of Artificial Sequence: Synthetic oligonucleotide
  Antisense strand to SEQ ID NO: 1021508
uaacugacggagcuaggcu

SEQ ID NO: 1021510 - RNA, 19 nt, Artificial Sequence
  Description of Artificial Sequence: Synthetic oligonucleotide
  Sense strand starting at position 861 of SEQ ID NO: 914667
gucaguuaucggcugcgca

SEQ ID NO: 1021511 - RNA, 19 nt, Artificial Sequence
  Description of Artificial Sequence: Synthetic oligonucleotide
  Antisense strand to SEQ ID NO: 1021510
ugcgcagccgauaacugac

SEQ ID NO: 1021512 - RNA, 19 nt, Artificial Sequence
  Description of Artificial Sequence: Synthetic oligonucleotide
  Sense strand starting at position 863 of SEQ ID NO: 914667
caguuaucggcugcgcauu

SEQ ID NO: 1021513 - RNA, 19 nt, Artificial Sequence
  Description of Artificial Sequence: Synthetic oligonucleotide
  Antisense strand to SEQ ID NO: 1021512
aaugcgcagccgauaacug

SEQ ID NO: 1021514 - RNA, 19 nt, Artificial Sequence
  Description of Artificial Sequence: Synthetic oligonucleotide
  Sense strand starting at position 891 of SEQ ID NO: 914667
ccacuuaaccugugagcca

SEQ ID NO: 1021515 - RNA, 19 nt, Artificial Sequence
  Description of Artificial Sequence: Synthetic oligonucleotide
  Antisense strand to SEQ ID NO: 1021514
uggcucacagguuaagugg

SEQ ID NO: 1021516 - RNA, 19 nt, Artificial Sequence
  Description of Artificial Sequence: Synthetic oligonucleotide
  Sense strand starting at position 909 of SEQ ID NO: 914667
acaguccuguccucuguaa

SEQ ID NO: 1021517 - RNA, 19 nt, Artificial Sequence
  Description of Artificial Sequence: Synthetic oligonucleotide
  Antisense strand to SEQ ID NO: 1021516
uuacagaggacaggacugu

SEQ ID NO: 1021518 - RNA, 19 nt, Artificial Sequence
  Description of Artificial Sequence: Synthetic oligonucleotide
  Sense strand starting at position 930 of SEQ ID NO: 914667
ugggaacagugauagcuaa

SEQ ID NO: 1021519 - RNA, 19 nt, Artificial Sequence
  Description of Artificial Sequence: Synthetic oligonucleotide
  Antisense strand to SEQ ID NO: 1021518
uuagcuaucacuguuccca

SEQ ID NO: 1021520 - RNA, 19 nt, Artificial Sequence
  Description of Artificial Sequence: Synthetic oligonucleotide
  Sense strand starting at position 1053 of SEQ ID NO: 914667
cucucagacagccgugaaa

SEQ ID NO: 1021521 - RNA, 19 nt, Artificial Sequence
  Description of Artificial Sequence: Synthetic oligonucleotide
  Antisense strand to SEQ ID NO: 1021520
uuucacggcugucugagag

SEQ ID NO: 1021522 - RNA, 19 nt, Artificial Sequence
  Description of Artificial Sequence: Synthetic oligonucleotide
  Sense strand starting at position 1070 of SEQ ID NO: 914667
aaagcauauuccgagacag

SEQ ID NO: 1021523 - RNA, 19 nt, Artificial Sequence
  Description of Artificial Sequence: Synthetic oligonucleotide
  Antisense strand to SEQ ID NO: 1021522
cugucucggaauaugcuuu

SEQ ID NO: 1021524 - RNA, 19 nt, Artificial Sequence
  Description of Artificial Sequence: Synthetic oligonucleotide
  Sense strand starting at position 1229 of SEQ ID NO: 914667
ugcaaccucgaauaaguua

SEQ ID NO: 1021525 - RNA, 19 nt, Artificial Sequence
  Description of Artificial Sequence: Synthetic oligonucleotide
  Antisense strand to SEQ ID NO: 1021524
uaacuuauucgagguugca

SEQ ID NO: 1021526 - RNA, 19 nt, Artificial Sequence
  Description of Artificial Sequence: Synthetic oligonucleotide
  Sense strand starting at position 2023 of SEQ ID NO: 914667
ggccuuggguguccugaga

SEQ ID NO: 1021527 - RNA, 19 nt, Artificial Sequence
  Description of Artificial Sequence: Synthetic oligonucleotide
  Antisense strand to SEQ ID NO: 1021526
ucucaggacacccaaggcc

SEQ ID NO: 1021528 - RNA, 19 nt, Artificial Sequence
  Description of Artificial Sequence: Synthetic oligonucleotide
  Sense strand starting at position 2091 of SEQ ID NO: 914667
gaguccaccuguuugcaaa

SEQ ID NO: 1021529 - RNA, 19 nt, Artificial Sequence
  Description of Artificial Sequence: Synthetic oligonucleotide
  Antisense strand to SEQ ID NO: 1021528
uuugcaaacagguggacuc

SEQ ID NO: 1021530 - RNA, 19 nt, Artificial Sequence
  Description of Artificial Sequence: Synthetic oligonucleotide
  Sense strand starting at position 2198 of SEQ ID NO: 914667
uuacuuaugcauuaacguu

SEQ ID NO: 1021531 - RNA, 19 nt, Artificial Sequence
  Description of Artificial Sequence: Synthetic oligonucleotide
  Antisense strand to SEQ ID NO: 1021530
aacguuaaugcauaaguaa

SEQ ID NO: 1021532 - RNA, 19 nt, Artificial Sequence
  Description of Artificial Sequence: Synthetic oligonucleotide
  Sense strand starting at position 2208 of SEQ ID NO: 914667
auuaacguuuagggacaaa

SEQ ID NO: 1021533 - RNA, 19 nt, Artificial Sequence
  Description of Artificial Sequence: Synthetic oligonucleotide
  Antisense strand to SEQ ID NO: 1021532
uuugucccuaaacguuaau

SEQ ID NO: 1021534 - RNA, 19 nt, Artificial Sequence
  Description of Artificial Sequence: Synthetic oligonucleotide
  Sense strand starting at position 2286 of SEQ ID NO: 914667
ucagaaguuuaugugcguu

SEQ ID NO: 1021535 - RNA, 19 nt, Artificial Sequence
  Description of Artificial Sequence: Synthetic oligonucleotide
  Antisense strand to SEQ ID NO: 1021534
aacgcacauaaacuucuga

SEQ ID NO: 1021536 - RNA, 19 nt, Artificial Sequence
  Description of Artificial Sequence: Synthetic oligonucleotide
  Sense strand starting at position 2288 of SEQ ID NO: 914667
agaaguuuaugugcguuua

SEQ ID NO: 1021537 - RNA, 19 nt, Artificial Sequence
  Description of Artificial Sequence: Synthetic oligonucleotide
  Antisense strand to SEQ ID NO: 1021536
uaaacgcacauaaacuucu

SEQ ID NO: 1021538 - RNA, 19 nt, Artificial Sequence
  Description of Artificial Sequence: Synthetic oligonucleotide
  Sense strand starting at position 2289 of SEQ ID NO: 914667
gaaguuuaugugcguuuaa

SEQ ID NO: 1021539 - RNA, 19 nt, Artificial Sequence
  Description of Artificial Sequence: Synthetic oligonucleotide
  Antisense strand to SEQ ID NO: 1021538
uuaaacgcacauaaacuuc

SEQ ID NO: 1021540 - RNA, 19 nt, Artificial Sequence
  Description of Artificial Sequence: Synthetic oligonucleotide
  Sense strand starting at position 2290 of SEQ ID NO: 914667
aaguuuaugugcguuuaaa

SEQ ID NO: 1021541 - RNA, 19 nt, Artificial Sequence
  Description of Artificial Sequence: Synthetic oligonucleotide
  Antisense strand to SEQ ID NO: 1021540
uuuaaacgcacauaaacuu

SEQ ID NO: 1021542 - RNA, 19 nt, Artificial Sequence
  Description of Artificial Sequence: Synthetic oligonucleotide
  Sense strand starting at position 2299 of SEQ ID NO: 914667
ugcguuuaaacaugugauu

SEQ ID NO: 1021543 - RNA, 19 nt, Artificial Sequence
  Description of Artificial Sequence: Synthetic oligonucleotide
  Antisense strand to SEQ ID NO: 1021542
aaucacauguuuaaacgca

SEQ ID NO: 1021544 - RNA, 19 nt, Artificial Sequence
  Description of Artificial Sequence: Synthetic oligonucleotide
  Sense strand starting at position 2375 of SEQ ID NO: 914667
ccuacugugccagguagua

SEQ ID NO: 1021545 - RNA, 19 nt, Artificial Sequence
  Description of Artificial Sequence: Synthetic oligonucleotide
  Antisense strand to SEQ ID NO: 1021544
uacuaccuggcacaguagg

SEQ ID NO: 1021546 - RNA, 19 nt, Artificial Sequence
  Description of Artificial Sequence: Synthetic oligonucleotide
  Sense strand starting at position 2442 of SEQ ID NO: 914667
cggaguuuacaucauaauu

SEQ ID NO: 1021547 - RNA, 19 nt, Artificial Sequence
  Description of Artificial Sequence: Synthetic oligonucleotide
  Antisense strand to SEQ ID NO: 1021546
aauuaugauguaaacuccg

SEQ ID NO: 1021548 - RNA, 19 nt, Artificial Sequence
  Description of Artificial Sequence: Synthetic oligonucleotide
  Sense strand starting at position 2637 of SEQ ID NO: 914667
aaucguauaguaugccaga

SEQ ID NO: 1021549 - RNA, 19 nt, Artificial Sequence
  Description of Artificial Sequence: Synthetic oligonucleotide
  Antisense strand to SEQ ID NO: 1021548
ucuggcauacuauacgauu

SEQ ID NO: 1021550 - RNA, 19 nt, Artificial Sequence
  Description of Artificial Sequence: Synthetic oligonucleotide
  Sense strand starting at position 2638 of SEQ ID NO: 914667
aucguauaguaugccagaa

SEQ ID NO: 1021551 - RNA, 19 nt, Artificial Sequence
  Description of Artificial Sequence: Synthetic oligonucleotide
  Antisense strand to SEQ ID NO: 1021550
uucuggcauacuauacgau

SEQ ID NO: 1021552 - RNA, 19 nt, Artificial Sequence
  Description of Artificial Sequence: Synthetic oligonucleotide
  Sense strand starting at position 2950 of SEQ ID NO: 914667
gcugaugccagcugaguuu

SEQ ID NO: 1021553 - RNA, 19 nt, Artificial Sequence
  Description of Artificial Sequence: Synthetic oligonucleotide
  Antisense strand to SEQ ID NO: 1021552
aaacucagcuggcaucagc

SEQ ID NO: 1021554 - RNA, 19 nt, Artificial Sequence
  Description of Artificial Sequence: Synthetic oligonucleotide
  Sense strand starting at position 3067 of SEQ ID NO: 914667
gcugucuaacuuuaggaca

SEQ ID NO: 1021555 - RNA, 19 nt, Artificial Sequence
  Description of Artificial Sequence: Synthetic oligonucleotide
  Antisense strand to SEQ ID NO: 1021554
uguccuaaaguuagacagc

SEQ ID NO: 1021556 - RNA, 19 nt, Artificial Sequence
  Description of Artificial Sequence: Synthetic oligonucleotide
  Sense strand starting at position 3070 of SEQ ID NO: 914667
gucuaacuuuaggacauuu

SEQ ID NO: 1021557 - RNA, 19 nt, Artificial Sequence
  Description of Artificial Sequence: Synthetic oligonucleotide
  Antisense strand to SEQ ID NO: 1021556
aaauguccuaaaguuagac

SEQ ID NO: 1021558 - RNA, 19 nt, Artificial Sequence
  Description of Artificial Sequence: Synthetic oligonucleotide
  Sense strand starting at position 3507 of SEQ ID NO: 914667
ggacauuccauguguacag

SEQ ID NO: 1021559 - RNA, 19 nt, Artificial Sequence
  Description of Artificial Sequence: Synthetic oligonucleotide
  Antisense strand to SEQ ID NO: 1021558
cuguacacauggaaugucc

SEQ ID NO: 1021560 - RNA, 19 nt, Artificial Sequence
  Description of Artificial Sequence: Synthetic oligonucleotide
  Sense strand starting at position 3508 of SEQ ID NO: 914667
gacauuccauguguacaga

SEQ ID NO: 1021561 - RNA, 19 nt, Artificial Sequence
  Description of Artificial Sequence: Synthetic oligonucleotide
  Antisense strand to SEQ ID NO: 1021560
ucuguacacauggaauguc

SEQ ID NO: 1021562 - RNA, 19 nt, Artificial Sequence
  Description of Artificial Sequence: Synthetic oligonucleotide
  Sense strand starting at position 3509 of SEQ ID NO: 914667
acauuccauguguacagaa

SEQ ID NO: 1021563 - RNA, 19 nt, Artificial Sequence
  Description of Artificial Sequence: Synthetic oligonucleotide
  Antisense strand to SEQ ID NO: 1021562
uucuguacacauggaaugu

SEQ ID NO: 1021564 - RNA, 19 nt, Artificial Sequence
  Description of Artificial Sequence: Synthetic oligonucleotide
  Sense strand starting at position 12 of SEQ ID NO: 914668
gcuacuuuggguugugcaa

SEQ ID NO: 1021565 - RNA, 19 nt, Artificial Sequence
  Description of Artificial Sequence: Synthetic oligonucleotide
  Antisense strand to SEQ ID NO: 1021564
uugcacaacccaaaguagc

SEQ ID NO: 1021566 - RNA, 19 nt, Artificial Sequence
  Description of Artificial Sequence: Synthetic oligonucleotide
  Sense strand starting at position 30 of SEQ ID NO: 914668
agguaagguccauggcgau

SEQ ID NO: 1021567 - RNA, 19 nt, Artificial Sequence
  Description of Artificial Sequence: Synthetic oligonucleotide
  Antisense strand to SEQ ID NO: 1021566
aucgccauggaccuuaccu

SEQ ID NO: 1021568 - RNA, 19 nt, Artificial Sequence
  Description of Artificial Sequence: Synthetic oligonucleotide
  Sense strand starting at position 36 of SEQ ID NO: 914668
gguccauggcgauaagauu

SEQ ID NO: 1021569 - RNA, 19 nt, Artificial Sequence
  Description of Artificial Sequence: Synthetic oligonucleotide
  Antisense strand to SEQ ID NO: 1021568
aaucuuaucgccauggacc

SEQ ID NO: 1021570 - RNA, 19 nt, Artificial Sequence
  Description of Artificial Sequence: Synthetic oligonucleotide
  Sense strand starting at position 624 of SEQ ID NO: 914668
agggcuguggucuagaaag

SEQ ID NO: 1021571 - RNA, 19 nt, Artificial Sequence
  Description of Artificial Sequence: Synthetic oligonucleotide
  Antisense strand to SEQ ID NO: 1021570
cuuucuagaccacagcccu

SEQ ID NO: 1021572 - RNA, 19 nt, Artificial Sequence
  Description of Artificial Sequence: Synthetic oligonucleotide
  Sense strand starting at position 1074 of SEQ ID NO: 914668
ucuccuagccaucgagaca

SEQ ID NO: 1021573 - RNA, 19 nt, Artificial Sequence
  Description of Artificial Sequence: Synthetic oligonucleotide
  Antisense strand to SEQ ID NO: 1021572
ugucucgauggcuaggaga

SEQ ID NO: 1021574 - RNA, 19 nt, Artificial Sequence
  Description of Artificial Sequence: Synthetic oligonucleotide
  Sense strand starting at position 1629 of SEQ ID NO: 914668
ccucgucccaggugaagua

SEQ ID NO: 1021575 - RNA, 19 nt, Artificial Sequence
  Description of Artificial Sequence: Synthetic oligonucleotide
  Antisense strand to SEQ ID NO: 1021574
uacuucaccugggacgagg

SEQ ID NO: 1021576 - RNA, 19 nt, Artificial Sequence
  Description of Artificial Sequence: Synthetic oligonucleotide
  Sense strand starting at position 2293 of SEQ ID NO: 914668
gccaauugugcugcccgaa

SEQ ID NO: 1021577 - RNA, 19 nt, Artificial Sequence
  Description of Artificial Sequence: Synthetic oligonucleotide
  Antisense strand to SEQ ID NO: 1021576
uucgggcagcacaauuggc

SEQ ID NO: 1021578 - RNA, 19 nt, Artificial Sequence
  Description of Artificial Sequence: Synthetic oligonucleotide
  Sense strand starting at position 2296 of SEQ ID NO: 914668
aauugugcugcccgaagua

SEQ ID NO: 1021579 - RNA, 19 nt, Artificial Sequence
  Description of Artificial Sequence: Synthetic oligonucleotide
  Antisense strand to SEQ ID NO: 1021578
uacuucgggcagcacaauu

SEQ ID NO: 1021580 - RNA, 19 nt, Artificial Sequence
  Description of Artificial Sequence: Synthetic oligonucleotide
  Sense strand starting at position 2320 of SEQ ID NO: 914668
cugagagcccuugaaaguu

SEQ ID NO: 1021581 - RNA, 19 nt, Artificial Sequence
  Description of Artificial Sequence: Synthetic oligonucleotide
  Antisense strand to SEQ ID NO: 1021580
aacuuucaagggcucucag

SEQ ID NO: 1021582 - RNA, 19 nt, Artificial Sequence
  Description of Artificial Sequence: Synthetic oligonucleotide
  Sense strand starting at position 2335 of SEQ ID NO: 914668
aguugcaguuaucuuguga

SEQ ID NO: 1021583 - RNA, 19 nt, Artificial Sequence
  Description of Artificial Sequence: Synthetic oligonucleotide
  Antisense strand to SEQ ID NO: 1021582
ucacaagauaacugcaacu

SEQ ID NO: 1021584 - RNA, 19 nt, Artificial Sequence
  Description of Artificial Sequence: Synthetic oligonucleotide
  Sense strand starting at position 2343 of SEQ ID NO: 914668
uuaucuugugaacagcaua

SEQ ID NO: 1021585 - RNA, 19 nt, Artificial Sequence
  Description of Artificial Sequence: Synthetic oligonucleotide
  Antisense strand to SEQ ID NO: 1021584
uaugcuguucacaagauaa

SEQ ID NO: 1021586 - RNA, 19 nt, Artificial Sequence
  Description of Artificial Sequence: Synthetic oligonucleotide
  Sense strand starting at position 2398 of SEQ ID NO: 914668
ggcuguuaaugcuuuaauu

SEQ ID NO: 1021587 - RNA, 19 nt, Artificial Sequence
  Description of Artificial Sequence: Synthetic oligonucleotide
  Antisense strand to SEQ ID NO: 1021586
aauuaaagcauuaacagcc

SEQ ID NO: 1021588 - RNA, 19 nt, Artificial Sequence
  Description of Artificial Sequence: Synthetic oligonucleotide
  Sense strand starting at position 2509 of SEQ ID NO: 914668
ugggauccuugagugauga

SEQ ID NO: 1021589 - RNA, 19 nt, Artificial Sequence
  Description of Artificial Sequence: Synthetic oligonucleotide
  Antisense strand to SEQ ID NO: 1021588
ucaucacucaaggauccca

SEQ ID NO: 1021590 - RNA, 19 nt, Artificial Sequence
  Description of Artificial Sequence: Synthetic oligonucleotide
  Sense strand starting at position 2510 of SEQ ID NO: 914668
gggauccuugagugaugau

SEQ ID NO: 1021591 - RNA, 19 nt, Artificial Sequence
  Description of Artificial Sequence: Synthetic oligonucleotide
  Antisense strand to SEQ ID NO: 1021590
aucaucacucaaggauccc

SEQ ID NO: 1021592 - RNA, 19 nt, Artificial Sequence
  Description of Artificial Sequence: Synthetic oligonucleotide
  Sense strand starting at position 2718 of SEQ ID NO: 914668
uguugcaguccugaagaga

SEQ ID NO: 1021593 - RNA, 19 nt, Artificial Sequence
  Description of Artificial Sequence: Synthetic oligonucleotide
  Antisense strand to SEQ ID NO: 1021592
ucucuucaggacugcaaca

SEQ ID NO: 1021594 - RNA, 19 nt, Artificial Sequence
  Description of Artificial Sequence: Synthetic oligonucleotide
  Sense strand starting at position 2737 of SEQ ID NO: 914668
cccagaguuuagguccaaa

SEQ ID NO: 1021595 - RNA, 19 nt, Artificial Sequence
  Description of Artificial Sequence: Synthetic oligonucleotide
  Antisense strand to SEQ ID NO: 1021594
uuuggaccuaaacucuggg

SEQ ID NO: 1021596 - RNA, 19 nt, Artificial Sequence
  Description of Artificial Sequence: Synthetic oligonucleotide
  Sense strand starting at position 2848 of SEQ ID NO: 914668
cuaacaacccuaugagguu

SEQ ID NO: 1021597 - RNA, 19 nt, Artificial Sequence
  Description of Artificial Sequence: Synthetic oligonucleotide
  Antisense strand to SEQ ID NO: 1021596
aaccucauaggguuguuag

SEQ ID NO: 1021598 - RNA, 19 nt, Artificial Sequence
  Description of Artificial Sequence: Synthetic oligonucleotide
  Sense strand starting at position 2994 of SEQ ID NO: 914668
uucucauuacacugguauu

SEQ ID NO: 1021599 - RNA, 19 nt, Artificial Sequence
  Description of Artificial Sequence: Synthetic oligonucleotide
  Antisense strand to SEQ ID NO: 1021598
aauaccaguguaaugagaa

SEQ ID NO: 1021600 - RNA, 19 nt, Artificial Sequence
  Description of Artificial Sequence: Synthetic oligonucleotide
  Sense strand starting at position 3058 of SEQ ID NO: 914668
gcuagauucugagcacgua

SEQ ID NO: 1021601 - RNA, 19 nt, Artificial Sequence
  Description of Artificial Sequence: Synthetic oligonucleotide
  Antisense strand to SEQ ID NO: 1021600
uacgugcucagaaucuagc

SEQ ID NO: 1021602 - RNA, 19 nt, Artificial Sequence
  Description of Artificial Sequence: Synthetic oligonucleotide
  Sense strand starting at position 3109 of SEQ ID NO: 914668
ggugaaauauggcuagauu

SEQ ID NO: 1021603 - RNA, 19 nt, Artificial Sequence
  Description of Artificial Sequence: Synthetic oligonucleotide
  Antisense strand to SEQ ID NO: 1021602
aaucuagccauauuucacc

SEQ ID NO: 1021604 - RNA, 19 nt, Artificial Sequence
  Description of Artificial Sequence: Synthetic oligonucleotide
  Sense strand starting at position 3118 of SEQ ID NO: 914668
uggcuagauuucugguaga

SEQ ID NO: 1021605 - RNA, 19 nt, Artificial Sequence
  Description of Artificial Sequence: Synthetic oligonucleotide
  Antisense strand to SEQ ID NO: 1021604
ucuaccagaaaucuagcca

SEQ ID NO: 1021606 - RNA, 19 nt, Artificial Sequence
  Description of Artificial Sequence: Synthetic oligonucleotide
  Sense strand starting at position 3230 of SEQ ID NO: 914668
aaguuuagauguccugacu

SEQ ID NO: 1021607 - RNA, 19 nt, Artificial Sequence
  Description of Artificial Sequence: Synthetic oligonucleotide
  Antisense strand to SEQ ID NO: 1021606
agucaggacaucuaaacuu

SEQ ID NO: 1021608 - RNA, 19 nt, Artificial Sequence
  Description of Artificial Sequence: Synthetic oligonucleotide
  Sense strand starting at position 3241 of SEQ ID NO: 914668
uccugacuuccagguaaga

SEQ ID NO: 1021609 - RNA, 19 nt, Artificial Sequence
  Description of Artificial Sequence: Synthetic oligonucleotide
  Antisense strand to SEQ ID NO: 1021608
ucuuaccuggaagucagga

SEQ ID NO: 1021610 - RNA, 19 nt, Artificial Sequence
  Description of Artificial Sequence: Synthetic oligonucleotide
  Sense strand starting at position 3358 of SEQ ID NO: 914668
cagugucuaaugcgagcua

SEQ ID NO: 1021611 - RNA, 19 nt, Artificial Sequence
  Description of Artificial Sequence: Synthetic oligonucleotide
  Antisense strand to SEQ ID NO: 1021610
uagcucgcauuagacacug

SEQ ID NO: 1021612 - RNA, 19 nt, Artificial Sequence
  Description of Artificial Sequence: Synthetic oligonucleotide
  Sense strand starting at position 3427 of SEQ ID NO: 914668
gggagacugugcaaagaug

SEQ ID NO: 1021613 - RNA, 19 nt, Artificial Sequence
  Description of Artificial Sequence: Synthetic oligonucleotide
  Antisense strand to SEQ ID NO: 1021612
caucuuugcacagucuccc

SEQ ID NO: 1021614 - RNA, 19 nt, Artificial Sequence
  Description of Artificial Sequence: Synthetic oligonucleotide
  Sense strand starting at position 3434 of SEQ ID NO: 914668
ugugcaaagaugcagaaau

SEQ ID NO: 1021615 - RNA, 19 nt, Artificial Sequence
  Description of Artificial Sequence: Synthetic oligonucleotide
  Antisense strand to SEQ ID NO: 1021614
auuucugcaucuuugcaca

SEQ ID NO: 1021616 - RNA, 19 nt, Artificial Sequence
  Description of Artificial Sequence: Synthetic oligonucleotide
  Sense strand starting at position 3521 of SEQ ID NO: 914668
gggaucuguuaacacaaug

SEQ ID NO: 1021617 - RNA, 19 nt, Artificial Sequence
  Description of Artificial Sequence: Synthetic oligonucleotide
  Antisense strand to SEQ ID NO: 1021616
cauuguguuaacagauccc

SEQ ID NO: 1021618 - RNA, 19 nt, Artificial Sequence
  Description of Artificial Sequence: Synthetic oligonucleotide
  Sense strand starting at position 3563 of SEQ ID NO: 914668
uggcuagaaugugaacuau

SEQ ID NO: 1021619 - RNA, 19 nt, Artificial Sequence
  Description of Artificial Sequence: Synthetic oligonucleotide
  Antisense strand to SEQ ID NO: 1021618
auaguucacauucuagcca

SEQ ID NO: 1021620 - RNA, 19 nt, Artificial Sequence
  Description of Artificial Sequence: Synthetic oligonucleotide
  Sense strand starting at position 3572 of SEQ ID NO: 914668
ugugaacuauauugauaga

SEQ ID NO: 1021621 - RNA, 19 nt, Artificial Sequence
  Description of Artificial Sequence: Synthetic oligonucleotide
  Antisense strand to SEQ ID NO: 1021620
ucuaucaauauaguucaca

SEQ ID NO: 1021622 - RNA, 19 nt, Artificial Sequence
  Description of Artificial Sequence: Synthetic oligonucleotide
  Sense strand starting at position 3628 of SEQ ID NO: 914668
guaguauggguucgcugau

SEQ ID NO: 1021623 - RNA, 19 nt, Artificial Sequence
  Description of Artificial Sequence: Synthetic oligonucleotide
  Antisense strand to SEQ ID NO: 1021622
aucagcgaacccauacuac

SEQ ID NO: 1021624 - RNA, 19 nt, Artificial Sequence
  Description of Artificial Sequence: Synthetic oligonucleotide
  Sense strand starting at position 3629 of SEQ ID NO: 914668
uaguauggguucgcugauu

SEQ ID NO: 1021625 - RNA, 19 nt, Artificial Sequence
  Description of Artificial Sequence: Synthetic oligonucleotide
  Antisense strand to SEQ ID NO: 1021624
aaucagcgaacccauacua

SEQ ID NO: 1021626 - RNA, 19 nt, Artificial Sequence
  Description of Artificial Sequence: Synthetic oligonucleotide
  Sense strand starting at position 3634 of SEQ ID NO: 914668
uggguucgcugauuacaac

SEQ ID NO: 1021627 - RNA, 19 nt, Artificial Sequence
  Description of Artificial Sequence: Synthetic oligonucleotide
  Antisense strand to SEQ ID NO: 1021626
guuguaaucagcgaaccca

SEQ ID NO: 1021628 - RNA, 19 nt, Artificial Sequence
  Description of Artificial Sequence: Synthetic oligonucleotide
  Sense strand starting at position 3635 of SEQ ID NO: 914668
ggguucgcugauuacaacu

SEQ ID NO: 1021629 - RNA, 19 nt, Artificial Sequence
  Description of Artificial Sequence: Synthetic oligonucleotide
  Antisense strand to SEQ ID NO: 1021628
aguuguaaucagcgaaccc

SEQ ID NO: 1021630 - RNA, 19 nt, Artificial Sequence
  Description of Artificial Sequence: Synthetic oligonucleotide
  Sense strand starting at position 3670 of SEQ ID NO: 914668
gguauuaaauaacagaaga

SEQ ID NO: 1021631 - RNA, 19 nt, Artificial Sequence
  Description of Artificial Sequence: Synthetic oligonucleotide
  Antisense strand to SEQ ID NO: 1021630
ucuucuguuauuuaauacc

SEQ ID NO: 1021632 - RNA, 19 nt, Artificial Sequence
  Description of Artificial Sequence: Synthetic oligonucleotide
  Sense strand starting at position 3719 of SEQ ID NO: 914668
gugacugugcagugggaua

SEQ ID NO: 1021633 - RNA, 19 nt, Artificial Sequence
  Description of Artificial Sequence: Synthetic oligonucleotide
  Antisense strand to SEQ ID NO: 1021632
uaucccacugcacagucac

SEQ ID NO: 1021634 - RNA, 19 nt, Artificial Sequence
  Description of Artificial Sequence: Synthetic oligonucleotide
  Sense strand starting at position 3721 of SEQ ID NO: 914668
gacugugcagugggauaaa

SEQ ID NO: 1021635 - RNA, 19 nt, Artificial Sequence
  Description of Artificial Sequence: Synthetic oligonucleotide
  Antisense strand to SEQ ID NO: 1021634
uuuaucccacugcacaguc

SEQ ID NO: 1021636 - RNA, 19 nt, Artificial Sequence
  Description of Artificial Sequence: Synthetic oligonucleotide
  Sense strand starting at position 3743 of SEQ ID NO: 914668
ucucauacugcugguagaa

SEQ ID NO: 1021637 - RNA, 19 nt, Artificial Sequence
  Description of Artificial Sequence: Synthetic oligonucleotide
  Antisense strand to SEQ ID NO: 1021636
uucuaccagcaguaugaga

SEQ ID NO: 1021638 - RNA, 19 nt, Artificial Sequence
  Description of Artificial Sequence: Synthetic oligonucleotide
  Sense strand starting at position 3756 of SEQ ID NO: 914668
guagaaguguaaguugauu

SEQ ID NO: 1021639 - RNA, 19 nt, Artificial Sequence
  Description of Artificial Sequence: Synthetic oligonucleotide
  Antisense strand to SEQ ID NO: 1021638
aaucaacuuacacuucuac

SEQ ID NO: 1021640 - RNA, 19 nt, Artificial Sequence
  Description of Artificial Sequence: Synthetic oligonucleotide
  Sense strand starting at position 3758 of SEQ ID NO: 914668
agaaguguaaguugauuaa

SEQ ID NO: 1021641 - RNA, 19 nt, Artificial Sequence
  Description of Artificial Sequence: Synthetic oligonucleotide
  Antisense strand to SEQ ID NO: 1021640
uuaaucaacuuacacuucu

SEQ ID NO: 1021642 - RNA, 19 nt, Artificial Sequence
  Description of Artificial Sequence: Synthetic oligonucleotide
  Sense strand starting at position 3761 of SEQ ID NO: 914668
aguguaaguugauuaaacu

SEQ ID NO: 1021643 - RNA, 19 nt, Artificial Sequence
  Description of Artificial Sequence: Synthetic oligonucleotide
  Antisense strand to SEQ ID NO: 1021642
aguuuaaucaacuuacacu

SEQ ID NO: 1021644 - RNA, 19 nt, Artificial Sequence
  Description of Artificial Sequence: Synthetic oligonucleotide
  Sense strand starting at position 66 of SEQ ID NO: 914669
acuccuacgugcucagaau

SEQ ID NO: 1021645 - RNA, 19 nt, Artificial Sequence
  Description of Artificial Sequence: Synthetic oligonucleotide
  Antisense strand to SEQ ID NO: 1021644
auucugagcacguaggagu

SEQ ID NO: 1021646 - RNA, 19 nt, Artificial Sequence
  Description of Artificial Sequence: Synthetic oligonucleotide
  Sense strand starting at position 91 of SEQ ID NO: 914669
cagugcuugggacaguuau

SEQ ID NO: 1021647 - RNA, 19 nt, Artificial Sequence
  Description of Artificial Sequence: Synthetic oligonucleotide
  Antisense strand to SEQ ID NO: 1021646
auaacugucccaagcacug

SEQ ID NO: 1021648 - RNA, 19 nt, Artificial Sequence
  Description of Artificial Sequence: Synthetic oligonucleotide
  Sense strand starting at position 131 of SEQ ID NO: 914669
cccaaauaccaguguaaug

SEQ ID NO: 1021649 - RNA, 19 nt, Artificial Sequence
  Description of Artificial Sequence: Synthetic oligonucleotide
  Antisense strand to SEQ ID NO: 1021648
cauuacacugguauuuggg

SEQ ID NO: 1021650 - RNA, 19 nt, Artificial Sequence
  Description of Artificial Sequence: Synthetic oligonucleotide
  Sense strand starting at position 136 of SEQ ID NO: 914669
auaccaguguaaugagaaa

SEQ ID NO: 1021651 - RNA, 19 nt, Artificial Sequence
  Description of Artificial Sequence: Synthetic oligonucleotide
  Antisense strand to SEQ ID NO: 1021650
uuucucauuacacugguau

SEQ ID NO: 1021652 - RNA, 19 nt, Artificial Sequence
  Description of Artificial Sequence: Synthetic oligonucleotide
  Sense strand starting at position 210 of SEQ ID NO: 914669
cuuacaagcugugugacaa

SEQ ID NO: 1021653 - RNA, 19 nt, Artificial Sequence
  Description of Artificial Sequence: Synthetic oligonucleotide
  Antisense strand to SEQ ID NO: 1021652
uugucacacagcuuguaag

SEQ ID NO: 1021654 - RNA, 19 nt, Artificial Sequence
  Description of Artificial Sequence: Synthetic oligonucleotide
  Sense strand starting at position 211 of SEQ ID NO: 914669
uuacaagcugugugacaaa

SEQ ID NO: 1021655 - RNA, 19 nt, Artificial Sequence
  Description of Artificial Sequence: Synthetic oligonucleotide
  Antisense strand to SEQ ID NO: 1021654
uuugucacacagcuuguaa

SEQ ID NO: 1021656 - RNA, 19 nt, Artificial Sequence
  Description of Artificial Sequence: Synthetic oligonucleotide
  Sense strand starting at position 268 of SEQ ID NO: 914669
gguuaauuguuccaaccuc

SEQ ID NO: 1021657 - RNA, 19 nt, Artificial Sequence
  Description of Artificial Sequence: Synthetic oligonucleotide
  Antisense strand to SEQ ID NO: 1021656
gagguuggaacaauuaacc

SEQ ID NO: 1021658 - RNA, 19 nt, Artificial Sequence
  Description of Artificial Sequence: Synthetic oligonucleotide
  Sense strand starting at position 354 of SEQ ID NO: 914669
guaagugcuuuauaaagug

SEQ ID NO: 1021659 - RNA, 19 nt, Artificial Sequence
  Description of Artificial Sequence: Synthetic oligonucleotide
  Antisense strand to SEQ ID NO: 1021658
cacuuuauaaagcacuuac

SEQ ID NO: 1021660 - RNA, 19 nt, Artificial Sequence
  Description of Artificial Sequence: Synthetic oligonucleotide
  Sense strand starting at position 359 of SEQ ID NO: 914669
ugcuuuauaaaguguuugu

SEQ ID NO: 1021661 - RNA, 19 nt, Artificial Sequence
  Description of Artificial Sequence: Synthetic oligonucleotide
  Antisense strand to SEQ ID NO: 1021660
acaaacacuuuauaaagca

SEQ ID NO: 1021662 - RNA, 19 nt, Artificial Sequence
  Description of Artificial Sequence: Synthetic oligonucleotide
  Sense strand starting at position 422 of SEQ ID NO: 914669
cugcaacagcuuuguaacu

SEQ ID NO: 1021663 - RNA, 19 nt, Artificial Sequence
  Description of Artificial Sequence: Synthetic oligonucleotide
  Antisense strand to SEQ ID NO: 1021662
aguuacaaagcuguugcag

SEQ ID NO: 1021664 - RNA, 19 nt, Artificial Sequence
  Description of Artificial Sequence: Synthetic oligonucleotide
  Sense strand starting at position 458 of SEQ ID NO: 914669
gugcguucccacuccucua

SEQ ID NO: 1021665 - RNA, 19 nt, Artificial Sequence
  Description of Artificial Sequence: Synthetic oligonucleotide
  Antisense strand to SEQ ID NO: 1021664
uagaggagugggaacgcac

SEQ ID NO: 1021666 - RNA, 19 nt, Artificial Sequence
  Description of Artificial Sequence: Synthetic oligonucleotide
  Sense strand starting at position 551 of SEQ ID NO: 914669
acagaaaugccucagcuug

SEQ ID NO: 1021667 - RNA, 19 nt, Artificial Sequence
  Description of Artificial Sequence: Synthetic oligonucleotide
  Antisense strand to SEQ ID NO: 1021666
caagcugaggcauuucugu

SEQ ID NO: 1021668 - RNA, 19 nt, Artificial Sequence
  Description of Artificial Sequence: Synthetic oligonucleotide
  Sense strand starting at position 553 of SEQ ID NO: 914669
agaaaugccucagcuugaa

SEQ ID NO: 1021669 - RNA, 19 nt, Artificial Sequence
  Description of Artificial Sequence: Synthetic oligonucleotide
  Antisense strand to SEQ ID NO: 1021668
uucaagcugaggcauuucu

SEQ ID NO: 1021670 - RNA, 19 nt, Artificial Sequence
  Description of Artificial Sequence: Synthetic oligonucleotide
  Sense strand starting at position 625 of SEQ ID NO: 914669
acucaaggaucccagugaa

SEQ ID NO: 1021671 - RNA, 19 nt, Artificial Sequence
  Description of Artificial Sequence: Synthetic oligonucleotide
  Antisense strand to SEQ ID NO: 1021670
uucacugggauccuugagu

SEQ ID NO: 1021672 - RNA, 19 nt, Artificial Sequence
  Description of Artificial Sequence: Synthetic oligonucleotide
  Sense strand starting at position 923 of SEQ ID NO: 914669
gcauccacagccuaaagau

SEQ ID NO: 1021673 - RNA, 19 nt, Artificial Sequence
  Description of Artificial Sequence: Synthetic oligonucleotide
  Antisense strand to SEQ ID NO: 1021672
aucuuuaggcuguggaugc

SEQ ID NO: 1021674 - RNA, 19 nt, Artificial Sequence
  Description of Artificial Sequence: Synthetic oligonucleotide
  Sense strand starting at position 1207 of SEQ ID NO: 914669
ccagcugugaguugcccaa

SEQ ID NO: 1021675 - RNA, 19 nt, Artificial Sequence
  Description of Artificial Sequence: Synthetic oligonucleotide
  Antisense strand to SEQ ID NO: 1021674
uugggcaacucacagcugg

SEQ ID NO: 1021676 - RNA, 19 nt, Artificial Sequence
  Description of Artificial Sequence: Synthetic oligonucleotide
  Sense strand starting at position 1209 of SEQ ID NO: 914669
agcugugaguugcccaaga

SEQ ID NO: 1021677 - RNA, 19 nt, Artificial Sequence
  Description of Artificial Sequence: Synthetic oligonucleotide
  Antisense strand to SEQ ID NO: 1021676
ucuugggcaacucacagcu

SEQ ID NO: 1021678 - RNA, 19 nt, Artificial Sequence
  Description of Artificial Sequence: Synthetic oligonucleotide
  Sense strand starting at position 2575 of SEQ ID NO: 914669
guccuagggacucgaaagu

SEQ ID NO: 1021679 - RNA, 19 nt, Artificial Sequence
  Description of Artificial Sequence: Synthetic oligonucleotide
  Antisense strand to SEQ ID NO: 1021678
acuuucgagucccuaggac

SEQ ID NO: 1021680 - RNA, 19 nt, Artificial Sequence
  Description of Artificial Sequence: Synthetic oligonucleotide
  Sense strand starting at position 2681 of SEQ ID NO: 914669
gcgugaugcccuccacugu

SEQ ID NO: 1021681 - RNA, 19 nt, Artificial Sequence
  Description of Artificial Sequence: Synthetic oligonucleotide
  Antisense strand to SEQ ID NO: 1021680
acaguggagggcaucacgc

SEQ ID NO: 1021682 - RNA, 19 nt, Artificial Sequence
  Description of Artificial Sequence: Synthetic oligonucleotide
  Sense strand starting at position 2937 of SEQ ID NO: 914669
ggagcuucccgcaguguga

SEQ ID NO: 1021683 - RNA, 19 nt, Artificial Sequence
  Description of Artificial Sequence: Synthetic oligonucleotide
  Antisense strand to SEQ ID NO: 1021682
ucacacugcgggaagcucc

SEQ ID NO: 1021684 - RNA, 19 nt, Artificial Sequence
  Description of Artificial Sequence: Synthetic oligonucleotide
  Sense strand starting at position 2938 of SEQ ID NO: 914669
gagcuucccgcagugugau

SEQ ID NO: 1021685 - RNA, 19 nt, Artificial Sequence
  Description of Artificial Sequence: Synthetic oligonucleotide
  Antisense strand to SEQ ID NO: 1021684
aucacacugcgggaagcuc

SEQ ID NO: 1021686 - RNA, 19 nt, Artificial Sequence
  Description of Artificial Sequence: Synthetic oligonucleotide
  Sense strand starting at position 2984 of SEQ ID NO: 914669
cggcgauugguccguaugu

SEQ ID NO: 1021687 - RNA, 19 nt, Artificial Sequence
  Description of Artificial Sequence: Synthetic oligonucleotide
  Antisense strand to SEQ ID NO: 1021686
acauacggaccaaucgccg

SEQ ID NO: 1021688 - RNA, 19 nt, Artificial Sequence
  Description of Artificial Sequence: Synthetic oligonucleotide
  Sense strand starting at position 2986 of SEQ ID NO: 914669
gcgauugguccguaugugu

SEQ ID NO: 1021689 - RNA, 19 nt, Artificial Sequence
  Description of Artificial Sequence: Synthetic oligonucleotide
  Antisense strand to SEQ ID NO: 1021688
acacauacggaccaaucgc

SEQ ID NO: 1021690 - RNA, 19 nt, Artificial Sequence
  Description of Artificial Sequence: Synthetic oligonucleotide
  Sense strand starting at position 3088 of SEQ ID NO: 914669
acgugaaucuuaucgccau

SEQ ID NO: 1021691 - RNA, 19 nt, Artificial Sequence
  Description of Artificial Sequence: Synthetic oligonucleotide
  Antisense strand to SEQ ID NO: 1021690
auggcgauaagauucacgu

SEQ ID NO: 1021692 - RNA, 19 nt, Artificial Sequence
  Description of Artificial Sequence: Synthetic oligonucleotide
  Sense strand starting at position 3091 of SEQ ID NO: 914669
ugaaucuuaucgccaugga

SEQ ID NO: 1021693 - RNA, 19 nt, Artificial Sequence
  Description of Artificial Sequence: Synthetic oligonucleotide
  Antisense strand to SEQ ID NO: 1021692
uccauggcgauaagauuca

SEQ ID NO: 1021694 - RNA, 19 nt, Artificial Sequence
  Description of Artificial Sequence: Synthetic oligonucleotide
  Sense strand starting at position 3092 of SEQ ID NO: 914669
gaaucuuaucgccauggac

SEQ ID NO: 1021695 - RNA, 19 nt, Artificial Sequence
  Description of Artificial Sequence: Synthetic oligonucleotide
  Antisense strand to SEQ ID NO: 1021694
guccauggcgauaagauuc

SEQ ID NO: 1021696 - RNA, 19 nt, Artificial Sequence
  Description of Artificial Sequence: Synthetic oligonucleotide
  Sense strand starting at position 3157 of SEQ ID NO: 914669
cagagugcuuagggaaaug

SEQ ID NO: 1021697 - RNA, 19 nt, Artificial Sequence
  Description of Artificial Sequence: Synthetic oligonucleotide
  Antisense strand to SEQ ID NO: 1021696
cauuucccuaagcacucug

SEQ ID NO: 1021698 - RNA, 19 nt, Artificial Sequence
  Description of Artificial Sequence: Synthetic oligonucleotide
  Sense strand starting at position 3331 of SEQ ID NO: 914669
ucucauagcccugagaggu

SEQ ID NO: 1021699 - RNA, 19 nt, Artificial Sequence
  Description of Artificial Sequence: Synthetic oligonucleotide
  Antisense strand to SEQ ID NO: 1021698
accucucagggcuaugaga

SEQ ID NO: 1021700 - RNA, 19 nt, Artificial Sequence
  Description of Artificial Sequence: Synthetic oligonucleotide
  Sense strand starting at position 3359 of SEQ ID NO: 914669
uggaguugaugggucgaau

SEQ ID NO: 1021701 - RNA, 19 nt, Artificial Sequence
  Description of Artificial Sequence: Synthetic oligonucleotide
  Antisense strand to SEQ ID NO: 1021700
auucgacccaucaacucca

SEQ ID NO: 1021702 - RNA, 19 nt, Artificial Sequence
  Description of Artificial Sequence: Synthetic oligonucleotide
  Sense strand starting at position 3396 of SEQ ID NO: 914669
ucuguaucuagagguuugu

SEQ ID NO: 1021703 - RNA, 19 nt, Artificial Sequence
  Description of Artificial Sequence: Synthetic oligonucleotide
  Antisense strand to SEQ ID NO: 1021702
acaaaccucuagauacaga

SEQ ID NO: 1021704 - RNA, 19 nt, Artificial Sequence
  Description of Artificial Sequence: Synthetic oligonucleotide
  Sense strand starting at position 3632 of SEQ ID NO: 914669
uucuuugggucugcaaaga

SEQ ID NO: 1021705 - RNA, 19 nt, Artificial Sequence
  Description of Artificial Sequence: Synthetic oligonucleotide
  Antisense strand to SEQ ID NO: 1021704
ucuuugcagacccaaagaa

SEQ ID NO: 1021706 - RNA, 19 nt, Artificial Sequence
  Description of Artificial Sequence: Synthetic oligonucleotide
  Sense strand starting at position 3640 of SEQ ID NO: 914669
gucugcaaagaguguuauu

SEQ ID NO: 1021707 - RNA, 19 nt, Artificial Sequence
  Description of Artificial Sequence: Synthetic oligonucleotide
  Antisense strand to SEQ ID NO: 1021706
aauaacacucuuugcagac

SEQ ID NO: 1021708 - RNA, 19 nt, Artificial Sequence
  Description of Artificial Sequence: Synthetic oligonucleotide
  Sense strand starting at position 3649 of SEQ ID NO: 914669
gaguguuauuccuuuaaga

SEQ ID NO: 1021709 - RNA, 19 nt, Artificial Sequence
  Description of Artificial Sequence: Synthetic oligonucleotide
  Antisense strand to SEQ ID NO: 1021708
ucuuaaaggaauaacacuc

SEQ ID NO: 1021710 - RNA, 19 nt, Artificial Sequence
  Description of Artificial Sequence: Synthetic oligonucleotide
  Sense strand starting at position 3651 of SEQ ID NO: 914669
guguuauuccuuuaagagc

SEQ ID NO: 1021711 - RNA, 19 nt, Artificial Sequence
  Description of Artificial Sequence: Synthetic oligonucleotide
  Antisense strand to SEQ ID NO: 1021710
gcucuuaaaggaauaacac

SEQ ID NO: 1021712 - RNA, 19 nt, Artificial Sequence
  Description of Artificial Sequence: Synthetic oligonucleotide
  Sense strand starting at position 3781 of SEQ ID NO: 914669
acugaaauucuugggcaaa

SEQ ID NO: 1021713 - RNA, 19 nt, Artificial Sequence
  Description of Artificial Sequence: Synthetic oligonucleotide
  Antisense strand to SEQ ID NO: 1021712
uuugcccaagaauuucagu

SEQ ID NO: 1021714 - RNA, 19 nt, Artificial Sequence
  Description of Artificial Sequence: Synthetic oligonucleotide
  Sense strand starting at position 3903 of SEQ ID NO: 914669
agagcagauacucggugau

SEQ ID NO: 1021715 - RNA, 19 nt, Artificial Sequence
  Description of Artificial Sequence: Synthetic oligonucleotide
  Antisense strand to SEQ ID NO: 1021714
aucaccgaguaucugcucu

SEQ ID NO: 1021716 - RNA, 19 nt, Artificial Sequence
  Description of Artificial Sequence: Synthetic oligonucleotide
  Sense strand starting at position 3905 of SEQ ID NO: 914669
agcagauacucggugaucu

SEQ ID NO: 1021717 - RNA, 19 nt, Artificial Sequence
  Description of Artificial Sequence: Synthetic oligonucleotide
  Antisense strand to SEQ ID NO: 1021716
agaucaccgaguaucugcu

SEQ ID NO: 1021718 - RNA, 19 nt, Artificial Sequence
  Description of Artificial Sequence: Synthetic oligonucleotide
  Sense strand starting at position 3906 of SEQ ID NO: 914669
gcagauacucggugaucuu

SEQ ID NO: 1021719 - RNA, 19 nt, Artificial Sequence
  Description of Artificial Sequence: Synthetic oligonucleotide
  Antisense strand to SEQ ID NO: 1021718
aagaucaccgaguaucugc

SEQ ID NO: 1021720 - RNA, 19 nt, Artificial Sequence
  Description of Artificial Sequence: Synthetic oligonucleotide
  Sense strand starting at position 3907 of SEQ ID NO: 914669
cagauacucggugaucuua

SEQ ID NO: 1021721 - RNA, 19 nt, Artificial Sequence
  Description of Artificial Sequence: Synthetic oligonucleotide
  Antisense strand to SEQ ID NO: 1021720
uaagaucaccgaguaucug

SEQ ID NO: 1021722 - RNA, 19 nt, Artificial Sequence
  Description of Artificial Sequence: Synthetic oligonucleotide
  Sense strand starting at position 3909 of SEQ ID NO: 914669
gauacucggugaucuuaaa

SEQ ID NO: 1021723 - RNA, 19 nt, Artificial Sequence
  Description of Artificial Sequence: Synthetic oligonucleotide
  Antisense strand to SEQ ID NO: 1021722
uuuaagaucaccgaguauc

SEQ ID NO: 1021724 - RNA, 19 nt, Artificial Sequence
  Description of Artificial Sequence: Synthetic oligonucleotide
  Sense strand starting at position 18 of SEQ ID NO: 914670
aaggaauauuggcuguaca

SEQ ID NO: 1021725 - RNA, 19 nt, Artificial Sequence
  Description of Artificial Sequence: Synthetic oligonucleotide
  Antisense strand to SEQ ID NO: 1021724
uguacagccaauauuccuu

SEQ ID NO: 1021726 - RNA, 19 nt, Artificial Sequence
  Description of Artificial Sequence: Synthetic oligonucleotide
  Sense strand starting at position 19 of SEQ ID NO: 914670
aggaauauuggcuguacag

SEQ ID NO: 1021727 - RNA, 19 nt, Artificial Sequence
  Description of Artificial Sequence: Synthetic oligonucleotide
  Antisense strand to SEQ ID NO: 1021726
cuguacagccaauauuccu

SEQ ID NO: 1021728 - RNA, 19 nt, Artificial Sequence
  Description of Artificial Sequence: Synthetic oligonucleotide
  Sense strand starting at position 44 of SEQ ID NO: 914670
agcuguguggaccaucauu

SEQ ID NO: 1021729 - RNA, 19 nt, Artificial Sequence
  Description of Artificial Sequence: Synthetic oligonucleotide
  Antisense strand to SEQ ID NO: 1021728
aaugaugguccacacagcu

SEQ ID NO: 1021730 - RNA, 19 nt, Artificial Sequence
  Description of Artificial Sequence: Synthetic oligonucleotide
  Sense strand starting at position 75 of SEQ ID NO: 914670
ccaauagccuggcaucuua

SEQ ID NO: 1021731 - RNA, 19 nt, Artificial Sequence
  Description of Artificial Sequence: Synthetic oligonucleotide
  Antisense strand to SEQ ID NO: 1021730
uaagaugccaggcuauugg

SEQ ID NO: 1021732 - RNA, 19 nt, Artificial Sequence
  Description of Artificial Sequence: Synthetic oligonucleotide
  Sense strand starting at position 86 of SEQ ID NO: 914670
gcaucuuaccuggaaguca

SEQ ID NO: 1021733 - RNA, 19 nt, Artificial Sequence
  Description of Artificial Sequence: Synthetic oligonucleotide
  Antisense strand to SEQ ID NO: 1021732
ugacuuccagguaagaugc

SEQ ID NO: 1021734 - RNA, 19 nt, Artificial Sequence
  Description of Artificial Sequence: Synthetic oligonucleotide
  Sense strand starting at position 267 of SEQ ID NO: 914670
acuccuacgugcucagaau

SEQ ID NO: 1021735 - RNA, 19 nt, Artificial Sequence
  Description of Artificial Sequence: Synthetic oligonucleotide
  Antisense strand to SEQ ID NO: 1021734
auucugagcacguaggagu

SEQ ID NO: 1021736 - RNA, 19 nt, Artificial Sequence
  Description of Artificial Sequence: Synthetic oligonucleotide
  Sense strand starting at position 292 of SEQ ID NO: 914670
cagugcuugggacaguuau

SEQ ID NO: 1021737 - RNA, 19 nt, Artificial Sequence
  Description of Artificial Sequence: Synthetic oligonucleotide
  Antisense strand to SEQ ID NO: 1021736
auaacugucccaagcacug

SEQ ID NO: 1021738 - RNA, 19 nt, Artificial Sequence
  Description of Artificial Sequence: Synthetic oligonucleotide
  Sense strand starting at position 332 of SEQ ID NO: 914670
cccaaauaccaguguaaug

SEQ ID NO: 1021739 - RNA, 19 nt, Artificial Sequence
  Description of Artificial Sequence: Synthetic oligonucleotide
  Antisense strand to SEQ ID NO: 1021738
cauuacacugguauuuggg

SEQ ID NO: 1021740 - RNA, 19 nt, Artificial Sequence
  Description of Artificial Sequence: Synthetic oligonucleotide
  Sense strand starting at position 337 of SEQ ID NO: 914670
auaccaguguaaugagaaa

SEQ ID NO: 1021741 - RNA, 19 nt, Artificial Sequence
  Description of Artificial Sequence: Synthetic oligonucleotide
  Antisense strand to SEQ ID NO: 1021740
uuucucauuacacugguau

SEQ ID NO: 1021742 - RNA, 19 nt, Artificial Sequence
  Description of Artificial Sequence: Synthetic oligonucleotide
  Sense strand starting at position 411 of SEQ ID NO: 914670
cuuacaagcugugugacaa

SEQ ID NO: 1021743 - RNA, 19 nt, Artificial Sequence
  Description of Artificial Sequence: Synthetic oligonucleotide
  Antisense strand to SEQ ID NO: 1021742
uugucacacagcuuguaag

SEQ ID NO: 1021744 - RNA, 19 nt, Artificial Sequence
  Description of Artificial Sequence: Synthetic oligonucleotide
  Sense strand starting at position 412 of SEQ ID NO: 914670
uuacaagcugugugacaaa

SEQ ID NO: 1021745 - RNA, 19 nt, Artificial Sequence
  Description of Artificial Sequence: Synthetic oligonucleotide
  Antisense strand to SEQ ID NO: 1021744
uuugucacacagcuuguaa

SEQ ID NO: 1021746 - RNA, 19 nt, Artificial Sequence
  Description of Artificial Sequence: Synthetic oligonucleotide
  Sense strand starting at position 469 of SEQ ID NO: 914670
gguuaauuguuccaaccuc

SEQ ID NO: 1021747 - RNA, 19 nt, Artificial Sequence
  Description of Artificial Sequence: Synthetic oligonucleotide
  Antisense strand to SEQ ID NO: 1021746
gagguuggaacaauuaacc

SEQ ID NO: 1021748 - RNA, 19 nt, Artificial Sequence
  Description of Artificial Sequence: Synthetic oligonucleotide
  Sense strand starting at position 555 of SEQ ID NO: 914670
guaagugcuuuauaaagug

SEQ ID NO: 1021749 - RNA, 19 nt, Artificial Sequence
  Description of Artificial Sequence: Synthetic oligonucleotide
  Antisense strand to SEQ ID NO: 1021748
cacuuuauaaagcacuuac

SEQ ID NO: 1021750 - RNA, 19 nt, Artificial Sequence
  Description of Artificial Sequence: Synthetic oligonucleotide
  Sense strand starting at position 560 of SEQ ID NO: 914670
ugcuuuauaaaguguuugu

SEQ ID NO: 1021751 - RNA, 19 nt, Artificial Sequence
  Description of Artificial Sequence: Synthetic oligonucleotide
  Antisense strand to SEQ ID NO: 1021750
acaaacacuuuauaaagca

SEQ ID NO: 1021752 - RNA, 19 nt, Artificial Sequence
  Description of Artificial Sequence: Synthetic oligonucleotide
  Sense strand starting at position 623 of SEQ ID NO: 914670
cugcaacagcuuuguaacu

SEQ ID NO: 1021753 - RNA, 19 nt, Artificial Sequence
  Description of Artificial Sequence: Synthetic oligonucleotide
  Antisense strand to SEQ ID NO: 1021752
aguuacaaagcuguugcag

SEQ ID NO: 1021754 - RNA, 19 nt, Artificial Sequence
  Description of Artificial Sequence: Synthetic oligonucleotide
  Sense strand starting at position 659 of SEQ ID NO: 914670
gugcguucccacuccucua

SEQ ID NO: 1021755 - RNA, 19 nt, Artificial Sequence
  Description of Artificial Sequence: Synthetic oligonucleotide
  Antisense strand to SEQ ID NO: 1021754
uagaggagugggaacgcac

SEQ ID NO: 1021756 - RNA, 19 nt, Artificial Sequence
  Description of Artificial Sequence: Synthetic oligonucleotide
  Sense strand starting at position 752 of SEQ ID NO: 914670
acagaaaugccucagcuug

SEQ ID NO: 1021757 - RNA, 19 nt, Artificial Sequence
  Description of Artificial Sequence: Synthetic oligonucleotide
  Antisense strand to SEQ ID NO: 1021756
caagcugaggcauuucugu

SEQ ID NO: 1021758 - RNA, 19 nt, Artificial Sequence
  Description of Artificial Sequence: Synthetic oligonucleotide
  Sense strand starting at position 754 of SEQ ID NO: 914670
agaaaugccucagcuugaa

SEQ ID NO: 1021759 - RNA, 19 nt, Artificial Sequence
  Description of Artificial Sequence: Synthetic oligonucleotide
  Antisense strand to SEQ ID NO: 1021758
uucaagcugaggcauuucu

SEQ ID NO: 1021760 - RNA, 19 nt, Artificial Sequence
  Description of Artificial Sequence: Synthetic oligonucleotide
  Sense strand starting at position 826 of SEQ ID NO: 914670
acucaaggaucccagugaa

SEQ ID NO: 1021761 - RNA, 19 nt, Artificial Sequence
  Description of Artificial Sequence: Synthetic oligonucleotide
  Antisense strand to SEQ ID NO: 1021760
uucacugggauccuugagu

SEQ ID NO: 1021762 - RNA, 19 nt, Artificial Sequence
  Description of Artificial Sequence: Synthetic oligonucleotide
  Sense strand starting at position 1124 of SEQ ID NO: 914670
gcauccacagccuaaagau

SEQ ID NO: 1021763 - RNA, 19 nt, Artificial Sequence
  Description of Artificial Sequence: Synthetic oligonucleotide
  Antisense strand to SEQ ID NO: 1021762
aucuuuaggcuguggaugc

SEQ ID NO: 1021764 - RNA, 19 nt, Artificial Sequence
  Description of Artificial Sequence: Synthetic oligonucleotide
  Sense strand starting at position 1408 of SEQ ID NO: 914670
ccagcugugaguugcccaa

SEQ ID NO: 1021765 - RNA, 19 nt, Artificial Sequence
  Description of Artificial Sequence: Synthetic oligonucleotide
  Antisense strand to SEQ ID NO: 1021764
uugggcaacucacagcugg

SEQ ID NO: 1021766 - RNA, 19 nt, Artificial Sequence
  Description of Artificial Sequence: Synthetic oligonucleotide
  Sense strand starting at position 1410 of SEQ ID NO: 914670
agcugugaguugcccaaga

SEQ ID NO: 1021767 - RNA, 19 nt, Artificial Sequence
  Description of Artificial Sequence: Synthetic oligonucleotide
  Antisense strand to SEQ ID NO: 1021766
ucuugggcaacucacagcu

SEQ ID NO: 1021768 - RNA, 19 nt, Artificial Sequence
  Description of Artificial Sequence: Synthetic oligonucleotide
  Sense strand starting at position 2776 of SEQ ID NO: 914670
guccuagggacucgaaagu

SEQ ID NO: 1021769 - RNA, 19 nt, Artificial Sequence
  Description of Artificial Sequence: Synthetic oligonucleotide
  Antisense strand to SEQ ID NO: 1021768
acuuucgagucccuaggac

SEQ ID NO: 1021770 - RNA, 19 nt, Artificial Sequence
  Description of Artificial Sequence: Synthetic oligonucleotide
  Sense strand starting at position 2882 of SEQ ID NO: 914670
gcgugaugcccuccacugu

SEQ ID NO: 1021771 - RNA, 19 nt, Artificial Sequence
  Description of Artificial Sequence: Synthetic oligonucleotide
  Antisense strand to SEQ ID NO: 1021770
acaguggagggcaucacgc

SEQ ID NO: 1021772 - RNA, 19 nt, Artificial Sequence
  Description of Artificial Sequence: Synthetic oligonucleotide
  Sense strand starting at position 3138 of SEQ ID NO: 914670
ggagcuucccgcaguguga

SEQ ID NO: 1021773 - RNA, 19 nt, Artificial Sequence
  Description of Artificial Sequence: Synthetic oligonucleotide
  Antisense strand to SEQ ID NO: 1021772
ucacacugcgggaagcucc

SEQ ID NO: 1021774 - RNA, 19 nt, Artificial Sequence
  Description of Artificial Sequence: Synthetic oligonucleotide
  Sense strand starting at position 3139 of SEQ ID NO: 914670
gagcuucccgcagugugau

SEQ ID NO: 1021775 - RNA, 19 nt, Artificial Sequence
  Description of Artificial Sequence: Synthetic oligonucleotide
  Antisense strand to SEQ ID NO: 1021774
aucacacugcgggaagcuc

SEQ ID NO: 1021776 - RNA, 19 nt, Artificial Sequence
  Description of Artificial Sequence: Synthetic oligonucleotide
  Sense strand starting at position 3185 of SEQ ID NO: 914670
cggcgauugguccguaugu

SEQ ID NO: 1021777 - RNA, 19 nt, Artificial Sequence
  Description of Artificial Sequence: Synthetic oligonucleotide
  Antisense strand to SEQ ID NO: 1021776
acauacggaccaaucgccg

SEQ ID NO: 1021778 - RNA, 19 nt, Artificial Sequence
  Description of Artificial Sequence: Synthetic oligonucleotide
  Sense strand starting at position 3187 of SEQ ID NO: 914670
gcgauugguccguaugugu

SEQ ID NO: 1021779 - RNA, 19 nt, Artificial Sequence
  Description of Artificial Sequence: Synthetic oligonucleotide
  Antisense strand to SEQ ID NO: 1021778
acacauacggaccaaucgc

SEQ ID NO: 1021780 - RNA, 19 nt, Artificial Sequence
  Description of Artificial Sequence: Synthetic oligonucleotide
  Sense strand starting at position 3289 of SEQ ID NO: 914670
acgugaaucuuaucgccau

SEQ ID NO: 1021781 - RNA, 19 nt, Artificial Sequence
  Description of Artificial Sequence: Synthetic oligonucleotide
  Antisense strand to SEQ ID NO: 1021780
auggcgauaagauucacgu

SEQ ID NO: 1021782 - RNA, 19 nt, Artificial Sequence
  Description of Artificial Sequence: Synthetic oligonucleotide
  Sense strand starting at position 3292 of SEQ ID NO: 914670
ugaaucuuaucgccaugga

SEQ ID NO: 1021783 - RNA, 19 nt, Artificial Sequence
  Description of Artificial Sequence: Synthetic oligonucleotide
  Antisense strand to SEQ ID NO: 1021782
uccauggcgauaagauuca

SEQ ID NO: 1021784 - RNA, 19 nt, Artificial Sequence
  Description of Artificial Sequence: Synthetic oligonucleotide
  Sense strand starting at position 3293 of SEQ ID NO: 914670
gaaucuuaucgccauggac

SEQ ID NO: 1021785 - RNA, 19 nt, Artificial Sequence
  Description of Artificial Sequence: Synthetic oligonucleotide
  Antisense strand to SEQ ID NO: 1021784
guccauggcgauaagauuc

SEQ ID NO: 1021786 - RNA, 19 nt, Artificial Sequence
  Description of Artificial Sequence: Synthetic oligonucleotide
  Sense strand starting at position 3358 of SEQ ID NO: 914670
cagagugcuuagggaaaug

SEQ ID NO: 1021787 - RNA, 19 nt, Artificial Sequence
  Description of Artificial Sequence: Synthetic oligonucleotide
  Antisense strand to SEQ ID NO: 1021786
cauuucccuaagcacucug

SEQ ID NO: 1021788 - RNA, 19 nt, Artificial Sequence
  Description of Artificial Sequence: Synthetic oligonucleotide
  Sense strand starting at position 3532 of SEQ ID NO: 914670
ucucauagcccugagaggu

SEQ ID NO: 1021789 - RNA, 19 nt, Artificial Sequence
  Description of Artificial Sequence: Synthetic oligonucleotide
  Antisense strand to SEQ ID NO: 1021788
accucucagggcuaugaga

SEQ ID NO: 1021790 - RNA, 19 nt, Artificial Sequence
  Description of Artificial Sequence: Synthetic oligonucleotide
  Sense strand starting at position 3560 of SEQ ID NO: 914670
uggaguugaugggucgaau

SEQ ID NO: 1021791 - RNA, 19 nt, Artificial Sequence
  Description of Artificial Sequence: Synthetic oligonucleotide
  Antisense strand to SEQ ID NO: 1021790
auucgacccaucaacucca

SEQ ID NO: 1021792 - RNA, 19 nt, Artificial Sequence
  Description of Artificial Sequence: Synthetic oligonucleotide
  Sense strand starting at position 3597 of SEQ ID NO: 914670
ucuguaucuagagguuugu

SEQ ID NO: 1021793 - RNA, 19 nt, Artificial Sequence
  Description of Artificial Sequence: Synthetic oligonucleotide
  Antisense strand to SEQ ID NO: 1021792
acaaaccucuagauacaga

SEQ ID NO: 1021794 - RNA, 19 nt, Artificial Sequence
  Description of Artificial Sequence: Synthetic oligonucleotide
  Sense strand starting at position 3833 of SEQ ID NO: 914670
uucuuugggucugcaaaga

SEQ ID NO: 1021795 - RNA, 19 nt, Artificial Sequence
  Description of Artificial Sequence: Synthetic oligonucleotide
  Antisense strand to SEQ ID NO: 1021794
ucuuugcagacccaaagaa

SEQ ID NO: 1021796 - RNA, 19 nt, Artificial Sequence
  Description of Artificial Sequence: Synthetic oligonucleotide
  Sense strand starting at position 3841 of SEQ ID NO: 914670
gucugcaaagaguguuauu

SEQ ID NO: 1021797 - RNA, 19 nt, Artificial Sequence
  Description of Artificial Sequence: Synthetic oligonucleotide
  Antisense strand to SEQ ID NO: 1021796
aauaacacucuuugcagac

SEQ ID NO: 1021798 - RNA, 19 nt, Artificial Sequence
  Description of Artificial Sequence: Synthetic oligonucleotide
  Sense strand starting at position 3850 of SEQ ID NO: 914670
gaguguuauuccuuuaaga

SEQ ID NO: 1021799 - RNA, 19 nt, Artificial Sequence
  Description of Artificial Sequence: Synthetic oligonucleotide
  Antisense strand to SEQ ID NO: 1021798
ucuuaaaggaauaacacuc

SEQ ID NO: 1021800 - RNA, 19 nt, Artificial Sequence
  Description of Artificial Sequence: Synthetic oligonucleotide
  Sense strand starting at position 3852 of SEQ ID NO: 914670
guguuauuccuuuaagagc

SEQ ID NO: 1021801 - RNA, 19 nt, Artificial Sequence
  Description of Artificial Sequence: Synthetic oligonucleotide
  Antisense strand to SEQ ID NO: 1021800
gcucuuaaaggaauaacac

SEQ ID NO: 1021802 - RNA, 19 nt, Artificial Sequence
  Description of Artificial Sequence: Synthetic oligonucleotide
  Sense strand starting at position 3982 of SEQ ID NO: 914670
acugaaauucuugggcaaa

SEQ ID NO: 1021803 - RNA, 19 nt, Artificial Sequence
  Description of Artificial Sequence: Synthetic oligonucleotide
  Antisense strand to SEQ ID NO: 1021802
uuugcccaagaauuucagu

SEQ ID NO: 1021804 - RNA, 19 nt, Artificial Sequence
  Description of Artificial Sequence: Synthetic oligonucleotide
  Sense strand starting at position 51 of SEQ ID NO: 914671
cugaaagcuguagggaauu

SEQ ID NO: 1021805 - RNA, 19 nt, Artificial Sequence
  Description of Artificial Sequence: Synthetic oligonucleotide
  Antisense strand to SEQ ID NO: 1021804
aauucccuacagcuuucag

SEQ ID NO: 1021806 - RNA, 19 nt, Artificial Sequence
  Description of Artificial Sequence: Synthetic oligonucleotide
  Sense strand starting at position 176 of SEQ ID NO: 914671
uaggccugucuccaugaga

SEQ ID NO: 1021807 - RNA, 19 nt, Artificial Sequence
  Description of Artificial Sequence: Synthetic oligonucleotide
  Antisense strand to SEQ ID NO: 1021806
ucucauggagacaggccua

SEQ ID NO: 1021808 - RNA, 19 nt, Artificial Sequence
  Description of Artificial Sequence: Synthetic oligonucleotide
  Sense strand starting at position 183 of SEQ ID NO: 914671
gucuccaugagaugcaaga

SEQ ID NO: 1021809 - RNA, 19 nt, Artificial Sequence
  Description of Artificial Sequence: Synthetic oligonucleotide
  Antisense strand to SEQ ID NO: 1021808
ucuugcaucucauggagac

SEQ ID NO: 1021810 - RNA, 19 nt, Artificial Sequence
  Description of Artificial Sequence: Synthetic oligonucleotide
  Sense strand starting at position 279 of SEQ ID NO: 914671
gguggaaugaucuacguca

SEQ ID NO: 1021811 - RNA, 19 nt, Artificial Sequence
  Description of Artificial Sequence: Synthetic oligonucleotide
  Antisense strand to SEQ ID NO: 1021810
ugacguagaucauuccacc

SEQ ID NO: 1021812 - RNA, 19 nt, Artificial Sequence
  Description of Artificial Sequence: Synthetic oligonucleotide
  Sense strand starting at position 281 of SEQ ID NO: 914671
uggaaugaucuacgucaag

SEQ ID NO: 1021813 - RNA, 19 nt, Artificial Sequence
  Description of Artificial Sequence: Synthetic oligonucleotide
  Antisense strand to SEQ ID NO: 1021812
cuugacguagaucauucca

SEQ ID NO: 1021814 - RNA, 19 nt, Artificial Sequence
  Description of Artificial Sequence: Synthetic oligonucleotide
  Sense strand starting at position 341 of SEQ ID NO: 914671
auuucuguaucccaucaga

SEQ ID NO: 1021815 - RNA, 19 nt, Artificial Sequence
  Description of Artificial Sequence: Synthetic oligonucleotide
  Antisense strand to SEQ ID NO: 1021814
ucugaugggauacagaaau

SEQ ID NO: 1021816 - RNA, 19 nt, Artificial Sequence
  Description of Artificial Sequence: Synthetic oligonucleotide
  Sense strand starting at position 445 of SEQ ID NO: 914671
auucgaauccaugggauac

SEQ ID NO: 1021817 - RNA, 19 nt, Artificial Sequence
  Description of Artificial Sequence: Synthetic oligonucleotide
  Antisense strand to SEQ ID NO: 1021816
guaucccauggauucgaau

SEQ ID NO: 1021818 - RNA, 19 nt, Artificial Sequence
  Description of Artificial Sequence: Synthetic oligonucleotide
  Sense strand starting at position 475 of SEQ ID NO: 914671
uuaaauaaaugccaggauu

SEQ ID NO: 1021819 - RNA, 19 nt, Artificial Sequence
  Description of Artificial Sequence: Synthetic oligonucleotide
  Antisense strand to SEQ ID NO: 1021818
aauccuggcauuuauuuaa

SEQ ID NO: 1021820 - RNA, 19 nt, Artificial Sequence
  Description of Artificial Sequence: Synthetic oligonucleotide
  Sense strand starting at position 595 of SEQ ID NO: 914671
aaccuuuaggagugcaaga

SEQ ID NO: 1021821 - RNA, 19 nt, Artificial Sequence
  Description of Artificial Sequence: Synthetic oligonucleotide
  Antisense strand to SEQ ID NO: 1021820
ucuugcacuccuaaagguu

SEQ ID NO: 1021822 - RNA, 19 nt, Artificial Sequence
  Description of Artificial Sequence: Synthetic oligonucleotide
  Sense strand starting at position 624 of SEQ ID NO: 914671
guguucuuggcaggauuua

SEQ ID NO: 1021823 - RNA, 19 nt, Artificial Sequence
  Description of Artificial Sequence: Synthetic oligonucleotide
  Antisense strand to SEQ ID NO: 1021822
uaaauccugccaagaacac

SEQ ID NO: 1021824 - RNA, 19 nt, Artificial Sequence
  Description of Artificial Sequence: Synthetic oligonucleotide
  Sense strand starting at position 660 of SEQ ID NO: 914671
aguugaacgcccgagagua

SEQ ID NO: 1021825 - RNA, 19 nt, Artificial Sequence
  Description of Artificial Sequence: Synthetic oligonucleotide
  Antisense strand to SEQ ID NO: 1021824
uacucucgggcguucaacu

SEQ ID NO: 1021826 - RNA, 19 nt, Artificial Sequence
  Description of Artificial Sequence: Synthetic oligonucleotide
  Sense strand starting at position 661 of SEQ ID NO: 914671
guugaacgcccgagaguaa

SEQ ID NO: 1021827 - RNA, 19 nt, Artificial Sequence
  Description of Artificial Sequence: Synthetic oligonucleotide
  Antisense strand to SEQ ID NO: 1021826
uuacucucgggcguucaac

SEQ ID NO: 1021828 - RNA, 19 nt, Artificial Sequence
  Description of Artificial Sequence: Synthetic oligonucleotide
  Sense strand starting at position 672 of SEQ ID NO: 914671
gagaguaaccucgagugca

SEQ ID NO: 1021829 - RNA, 19 nt, Artificial Sequence
  Description of Artificial Sequence: Synthetic oligonucleotide
  Antisense strand to SEQ ID NO: 1021828
ugcacucgagguuacucuc

SEQ ID NO: 1021830 - RNA, 19 nt, Artificial Sequence
  Description of Artificial Sequence: Synthetic oligonucleotide
  Sense strand starting at position 708 of SEQ ID NO: 914671
gccagucuagugcugcuaa

SEQ ID NO: 1021831 - RNA, 19 nt, Artificial Sequence
  Description of Artificial Sequence: Synthetic oligonucleotide
  Antisense strand to SEQ ID NO: 1021830
uuagcagcacuagacuggc

SEQ ID NO: 1021832 - RNA, 19 nt, Artificial Sequence
  Description of Artificial Sequence: Synthetic oligonucleotide
  Sense strand starting at position 841 of SEQ ID NO: 914671
uagauaaucccuggagcgu

SEQ ID NO: 1021833 - RNA, 19 nt, Artificial Sequence
  Description of Artificial Sequence: Synthetic oligonucleotide
  Antisense strand to SEQ ID NO: 1021832
acgcuccagggauuaucua

SEQ ID NO: 1021834 - RNA, 19 nt, Artificial Sequence
  Description of Artificial Sequence: Synthetic oligonucleotide
  Sense strand starting at position 900 of SEQ ID NO: 914671
ugaggaacuucuuagacaa

SEQ ID NO: 1021835 - RNA, 19 nt, Artificial Sequence
  Description of Artificial Sequence: Synthetic oligonucleotide
  Antisense strand to SEQ ID NO: 1021834
uugucuaagaaguuccuca

SEQ ID NO: 1021836 - RNA, 19 nt, Artificial Sequence
  Description of Artificial Sequence: Synthetic oligonucleotide
  Sense strand starting at position 902 of SEQ ID NO: 914671
aggaacuucuuagacaaga

SEQ ID NO: 1021837 - RNA, 19 nt, Artificial Sequence
  Description of Artificial Sequence: Synthetic oligonucleotide
  Antisense strand to SEQ ID NO: 1021836
ucuugucuaagaaguuccu

SEQ ID NO: 1021838 - RNA, 19 nt, Artificial Sequence
  Description of Artificial Sequence: Synthetic oligonucleotide
  Sense strand starting at position 1173 of SEQ ID NO: 914671
gguagaugcuugcccuguu

SEQ ID NO: 1021839 - RNA, 19 nt, Artificial Sequence
  Description of Artificial Sequence: Synthetic oligonucleotide
  Antisense strand to SEQ ID NO: 1021838
aacagggcaagcaucuacc

SEQ ID NO: 1021840 - RNA, 19 nt, Artificial Sequence
  Description of Artificial Sequence: Synthetic oligonucleotide
  Sense strand starting at position 1288 of SEQ ID NO: 914671
ggguacgagugcaauagau

SEQ ID NO: 1021841 - RNA, 19 nt, Artificial Sequence
  Description of Artificial Sequence: Synthetic oligonucleotide
  Antisense strand to SEQ ID NO: 1021840
aucuauugcacucguaccc

SEQ ID NO: 1021842 - RNA, 19 nt, Artificial Sequence
  Description of Artificial Sequence: Synthetic oligonucleotide
  Sense strand starting at position 2094 of SEQ ID NO: 914671
ccaggaggaucuuucgaag

SEQ ID NO: 1021843 - RNA, 19 nt, Artificial Sequence
  Description of Artificial Sequence: Synthetic oligonucleotide
  Antisense strand to SEQ ID NO: 1021842
cuucgaaagauccuccugg

SEQ ID NO: 1021844 - RNA, 19 nt, Artificial Sequence
  Description of Artificial Sequence: Synthetic oligonucleotide
  Sense strand starting at position 2561 of SEQ ID NO: 914671
ugaacccucuagucagaca

SEQ ID NO: 1021845 - RNA, 19 nt, Artificial Sequence
  Description of Artificial Sequence: Synthetic oligonucleotide
  Antisense strand to SEQ ID NO: 1021844
ugucugacuagaggguuca

SEQ ID NO: 1021846 - RNA, 19 nt, Artificial Sequence
  Description of Artificial Sequence: Synthetic oligonucleotide
  Sense strand starting at position 2710 of SEQ ID NO: 914671
ucaguaagcucagucucuu

SEQ ID NO: 1021847 - RNA, 19 nt, Artificial Sequence
  Description of Artificial Sequence: Synthetic oligonucleotide
  Antisense strand to SEQ ID NO: 1021846
aagagacugagcuuacuga

SEQ ID NO: 1021848 - RNA, 19 nt, Artificial Sequence
  Description of Artificial Sequence: Synthetic oligonucleotide
  Sense strand starting at position 2716 of SEQ ID NO: 914671
agcucagucucuuugggaa

SEQ ID NO: 1021849 - RNA, 19 nt, Artificial Sequence
  Description of Artificial Sequence: Synthetic oligonucleotide
  Antisense strand to SEQ ID NO: 1021848
uucccaaagagacugagcu

SEQ ID NO: 1021850 - RNA, 19 nt, Artificial Sequence
  Description of Artificial Sequence: Synthetic oligonucleotide
  Sense strand starting at position 2724 of SEQ ID NO: 914671
cucuuugggaaucguggaa

SEQ ID NO: 1021851 - RNA, 19 nt, Artificial Sequence
  Description of Artificial Sequence: Synthetic oligonucleotide
  Antisense strand to SEQ ID NO: 1021850
uuccacgauucccaaagag

SEQ ID NO: 1021852 - RNA, 19 nt, Artificial Sequence
  Description of Artificial Sequence: Synthetic oligonucleotide
  Sense strand starting at position 2729 of SEQ ID NO: 914671
ugggaaucguggaagcaga

SEQ ID NO: 1021853 - RNA, 19 nt, Artificial Sequence
  Description of Artificial Sequence: Synthetic oligonucleotide
  Antisense strand to SEQ ID NO: 1021852
ucugcuuccacgauuccca

SEQ ID NO: 1021854 - RNA, 19 nt, Artificial Sequence
  Description of Artificial Sequence: Synthetic oligonucleotide
  Sense strand starting at position 2748 of SEQ ID NO: 914671
cacaucauugggcagugau

SEQ ID NO: 1021855 - RNA, 19 nt, Artificial Sequence
  Description of Artificial Sequence: Synthetic oligonucleotide
  Antisense strand to SEQ ID NO: 1021854
aucacugcccaaugaugug

SEQ ID NO: 1021856 - RNA, 19 nt, Artificial Sequence
  Description of Artificial Sequence: Synthetic oligonucleotide
  Sense strand starting at position 2751 of SEQ ID NO: 914671
aucauugggcagugauguu

SEQ ID NO: 1021857 - RNA, 19 nt, Artificial Sequence
  Description of Artificial Sequence: Synthetic oligonucleotide
  Antisense strand to SEQ ID NO: 1021856
aacaucacugcccaaugau

SEQ ID NO: 1021858 - RNA, 19 nt, Artificial Sequence
  Description of Artificial Sequence: Synthetic oligonucleotide
  Sense strand starting at position 2760 of SEQ ID NO: 914671
cagugauguugugcagacu

SEQ ID NO: 1021859 - RNA, 19 nt, Artificial Sequence
  Description of Artificial Sequence: Synthetic oligonucleotide
  Antisense strand to SEQ ID NO: 1021858
agucugcacaacaucacug

SEQ ID NO: 1021860 - RNA, 19 nt, Artificial Sequence
  Description of Artificial Sequence: Synthetic oligonucleotide
  Sense strand starting at position 2771 of SEQ ID NO: 914671
ugcagacuccagcaaauaa

SEQ ID NO: 1021861 - RNA, 19 nt, Artificial Sequence
  Description of Artificial Sequence: Synthetic oligonucleotide
  Antisense strand to SEQ ID NO: 1021860
uuauuugcuggagucugca

SEQ ID NO: 1021862 - RNA, 19 nt, Artificial Sequence
  Description of Artificial Sequence: Synthetic oligonucleotide
  Sense strand starting at position 2787 of SEQ ID NO: 914671
uaaagacugccguaucgaa

SEQ ID NO: 1021863 - RNA, 19 nt, Artificial Sequence
  Description of Artificial Sequence: Synthetic oligonucleotide
  Antisense strand to SEQ ID NO: 1021862
uucgauacggcagucuuua

SEQ ID NO: 1021864 - RNA, 19 nt, Artificial Sequence
  Description of Artificial Sequence: Synthetic oligonucleotide
  Sense strand starting at position 2812 of SEQ ID NO: 914671
ggaggaggguuaggucuuu

SEQ ID NO: 1021865 - RNA, 19 nt, Artificial Sequence
  Description of Artificial Sequence: Synthetic oligonucleotide
  Antisense strand to SEQ ID NO: 1021864
aaagaccuaacccuccucc

SEQ ID NO: 1021866 - RNA, 19 nt, Artificial Sequence
  Description of Artificial Sequence: Synthetic oligonucleotide
  Sense strand starting at position 3090 of SEQ ID NO: 914671
guaaacaggacgcauauua

SEQ ID NO: 1021867 - RNA, 19 nt, Artificial Sequence
  Description of Artificial Sequence: Synthetic oligonucleotide
  Antisense strand to SEQ ID NO: 1021866
uaauaugcguccuguuuac

SEQ ID NO: 1021868 - RNA, 19 nt, Artificial Sequence
  Description of Artificial Sequence: Synthetic oligonucleotide
  Sense strand starting at position 3307 of SEQ ID NO: 914671
uggugucagcccugagcau

SEQ ID NO: 1021869 - RNA, 19 nt, Artificial Sequence
  Description of Artificial Sequence: Synthetic oligonucleotide
  Antisense strand to SEQ ID NO: 1021868
augcucagggcugacacca

SEQ ID NO: 1021870 - RNA, 19 nt, Artificial Sequence
  Description of Artificial Sequence: Synthetic oligonucleotide
  Sense strand starting at position 3458 of SEQ ID NO: 914671
ggccuugaggacugucaaa

SEQ ID NO: 1021871 - RNA, 19 nt, Artificial Sequence
  Description of Artificial Sequence: Synthetic oligonucleotide
  Antisense strand to SEQ ID NO: 1021870
uuugacaguccucaaggcc

SEQ ID NO: 1021872 - RNA, 19 nt, Artificial Sequence
  Description of Artificial Sequence: Synthetic oligonucleotide
  Sense strand starting at position 3519 of SEQ ID NO: 914671
ggauuaacauaccauauag

SEQ ID NO: 1021873 - RNA, 19 nt, Artificial Sequence
  Description of Artificial Sequence: Synthetic oligonucleotide
  Antisense strand to SEQ ID NO: 1021872
cuauaugguauguuaaucc

SEQ ID NO: 1021874 - RNA, 19 nt, Artificial Sequence
  Description of Artificial Sequence: Synthetic oligonucleotide
  Sense strand starting at position 3908 of SEQ ID NO: 914671
cuuggacauccguaaagca

SEQ ID NO: 1021875 - RNA, 19 nt, Artificial Sequence
  Description of Artificial Sequence: Synthetic oligonucleotide
  Antisense strand to SEQ ID NO: 1021874
ugcuuuacggauguccaag

SEQ ID NO: 1021876 - RNA, 19 nt, Artificial Sequence
  Description of Artificial Sequence: Synthetic oligonucleotide
  Sense strand starting at position 3924 of SEQ ID NO: 914671
gcagguguacugugaucag

SEQ ID NO: 1021877 - RNA, 19 nt, Artificial Sequence
  Description of Artificial Sequence: Synthetic oligonucleotide
  Antisense strand to SEQ ID NO: 1021876
cugaucacaguacaccugc

SEQ ID NO: 1021878 - RNA, 19 nt, Artificial Sequence
  Description of Artificial Sequence: Synthetic oligonucleotide
  Sense strand starting at position 3927 of SEQ ID NO: 914671
gguguacugugaucagauc

SEQ ID NO: 1021879 - RNA, 19 nt, Artificial Sequence
  Description of Artificial Sequence: Synthetic oligonucleotide
  Antisense strand to SEQ ID NO: 1021878
gaucugaucacaguacacc

SEQ ID NO: 1021880 - RNA, 19 nt, Artificial Sequence
  Description of Artificial Sequence: Synthetic oligonucleotide
  Sense strand starting at position 3936 of SEQ ID NO: 914671
ugaucagauccauggugua

SEQ ID NO: 1021881 - RNA, 19 nt, Artificial Sequence
  Description of Artificial Sequence: Synthetic oligonucleotide
  Antisense strand to SEQ ID NO: 1021880
uacaccauggaucugauca

SEQ ID NO: 1021882 - RNA, 19 nt, Artificial Sequence
  Description of Artificial Sequence: Synthetic oligonucleotide
  Sense strand starting at position 3939 of SEQ ID NO: 914671
ucagauccaugguguagaa

SEQ ID NO: 1021883 - RNA, 19 nt, Artificial Sequence
  Description of Artificial Sequence: Synthetic oligonucleotide
  Antisense strand to SEQ ID NO: 1021882
uucuacaccauggaucuga

SEQ ID NO: 1021884 - RNA, 19 nt, Artificial Sequence
  Description of Artificial Sequence: Synthetic oligonucleotide
  Sense strand starting at position 138 of SEQ ID NO: 914672
acuguccucuagguuacaa

SEQ ID NO: 1021885 - RNA, 19 nt, Artificial Sequence
  Description of Artificial Sequence: Synthetic oligonucleotide
  Antisense strand to SEQ ID NO: 1021884
uuguaaccuagaggacagu

SEQ ID NO: 1021886 - RNA, 19 nt, Artificial Sequence
  Description of Artificial Sequence: Synthetic oligonucleotide
  Sense strand starting at position 605 of SEQ ID NO: 914672
ucaggaggauucuuauucu

SEQ ID NO: 1021887 - RNA, 19 nt, Artificial Sequence
  Description of Artificial Sequence: Synthetic oligonucleotide
  Antisense strand to SEQ ID NO: 1021886
agaauaagaauccuccuga

SEQ ID NO: 1021888 - RNA, 19 nt, Artificial Sequence
  Description of Artificial Sequence: Synthetic oligonucleotide
  Sense strand starting at position 608 of SEQ ID NO: 914672
ggaggauucuuauucucac

SEQ ID NO: 1021889 - RNA, 19 nt, Artificial Sequence
  Description of Artificial Sequence: Synthetic oligonucleotide
  Antisense strand to SEQ ID NO: 1021888
gugagaauaagaauccucc

SEQ ID NO: 1021890 - RNA, 19 nt, Artificial Sequence
  Description of Artificial Sequence: Synthetic oligonucleotide
  Sense strand starting at position 660 of SEQ ID NO: 914672
gggcuuucuuccucaaaga

SEQ ID NO: 1021891 - RNA, 19 nt, Artificial Sequence
  Description of Artificial Sequence: Synthetic oligonucleotide
  Antisense strand to SEQ ID NO: 1021890
ucuuugaggaagaaagccc

SEQ ID NO: 1021892 - RNA, 19 nt, Artificial Sequence
  Description of Artificial Sequence: Synthetic oligonucleotide
  Sense strand starting at position 661 of SEQ ID NO: 914672
ggcuuucuuccucaaagag

SEQ ID NO: 1021893 - RNA, 19 nt, Artificial Sequence
  Description of Artificial Sequence: Synthetic oligonucleotide
  Antisense strand to SEQ ID NO: 1021892
cucuuugaggaagaaagcc

SEQ ID NO: 1021894 - RNA, 19 nt, Artificial Sequence
  Description of Artificial Sequence: Synthetic oligonucleotide
  Sense strand starting at position 673 of SEQ ID NO: 914672
caaagaguccagugaagau

SEQ ID NO: 1021895 - RNA, 19 nt, Artificial Sequence
  Description of Artificial Sequence: Synthetic oligonucleotide
  Antisense strand to SEQ ID NO: 1021894
aucuucacuggacucuuug

SEQ ID NO: 1021896 - RNA, 19 nt, Artificial Sequence
  Description of Artificial Sequence: Synthetic oligonucleotide
  Sense strand starting at position 680 of SEQ ID NO: 914672
uccagugaagauuguccaa

SEQ ID NO: 1021897 - RNA, 19 nt, Artificial Sequence
  Description of Artificial Sequence: Synthetic oligonucleotide
  Antisense strand to SEQ ID NO: 1021896
uuggacaaucuucacugga

SEQ ID NO: 1021898 - RNA, 19 nt, Artificial Sequence
  Description of Artificial Sequence: Synthetic oligonucleotide
  Sense strand starting at position 682 of SEQ ID NO: 914672
cagugaagauuguccaaca

SEQ ID NO: 1021899 - RNA, 19 nt, Artificial Sequence
  Description of Artificial Sequence: Synthetic oligonucleotide
  Antisense strand to SEQ ID NO: 1021898
uguuggacaaucuucacug

SEQ ID NO: 1021900 - RNA, 19 nt, Artificial Sequence
  Description of Artificial Sequence: Synthetic oligonucleotide
  Sense strand starting at position 683 of SEQ ID NO: 914672
agugaagauuguccaacau

SEQ ID NO: 1021901 - RNA, 19 nt, Artificial Sequence
  Description of Artificial Sequence: Synthetic oligonucleotide
  Antisense strand to SEQ ID NO: 1021900
auguuggacaaucuucacu

SEQ ID NO: 1021902 - RNA, 19 nt, Artificial Sequence
  Description of Artificial Sequence: Synthetic oligonucleotide
  Sense strand starting at position 904 of SEQ ID NO: 914672
cuauuaugcagguggguaa

SEQ ID NO: 1021903 - RNA, 19 nt, Artificial Sequence
  Description of Artificial Sequence: Synthetic oligonucleotide
  Antisense strand to SEQ ID NO: 1021902
uuacccaccugcauaauag

SEQ ID NO: 1021904 - RNA, 19 nt, Artificial Sequence
  Description of Artificial Sequence: Synthetic oligonucleotide
  Sense strand starting at position 1152 of SEQ ID NO: 914672
cccugagcccuuuacagaa

SEQ ID NO: 1021905 - RNA, 19 nt, Artificial Sequence
  Description of Artificial Sequence: Synthetic oligonucleotide
  Antisense strand to SEQ ID NO: 1021904
uucuguaaagggcucaggg

SEQ ID NO: 1021906 - RNA, 19 nt, Artificial Sequence
  Description of Artificial Sequence: Synthetic oligonucleotide
  Sense strand starting at position 1164 of SEQ ID NO: 914672
uacagaagcucuugggaaa

SEQ ID NO: 1021907 - RNA, 19 nt, Artificial Sequence
  Description of Artificial Sequence: Synthetic oligonucleotide
  Antisense strand to SEQ ID NO: 1021906
uuucccaagagcuucugua

SEQ ID NO: 1021908 - RNA, 19 nt, Artificial Sequence
  Description of Artificial Sequence: Synthetic oligonucleotide
  Sense strand starting at position 2408 of SEQ ID NO: 914672
gcguccugcaacgucaaau

SEQ ID NO: 1021909 - RNA, 19 nt, Artificial Sequence
  Description of Artificial Sequence: Synthetic oligonucleotide
  Antisense strand to SEQ ID NO: 1021908
auuugacguugcaggacgc

SEQ ID NO: 1021910 - RNA, 19 nt, Artificial Sequence
  Description of Artificial Sequence: Synthetic oligonucleotide
  Sense strand starting at position 2673 of SEQ ID NO: 914672
gacaccugugcuuguuacu

SEQ ID NO: 1021911 - RNA, 19 nt, Artificial Sequence
  Description of Artificial Sequence: Synthetic oligonucleotide
  Antisense strand to SEQ ID NO: 1021910
aguaacaagcacagguguc

SEQ ID NO: 1021912 - RNA, 19 nt, Artificial Sequence
  Description of Artificial Sequence: Synthetic oligonucleotide
  Sense strand starting at position 2789 of SEQ ID NO: 914672
auccuaagcucaggagaua

SEQ ID NO: 1021913 - RNA, 19 nt, Artificial Sequence
  Description of Artificial Sequence: Synthetic oligonucleotide
  Antisense strand to SEQ ID NO: 1021912
uaucuccugagcuuaggau

SEQ ID NO: 1021914 - RNA, 19 nt, Artificial Sequence
  Description of Artificial Sequence: Synthetic oligonucleotide
  Sense strand starting at position 3064 of SEQ ID NO: 914672
cccuaauugcuucggauuu

SEQ ID NO: 1021915 - RNA, 19 nt, Artificial Sequence
  Description of Artificial Sequence: Synthetic oligonucleotide
  Antisense strand to SEQ ID NO: 1021914
aaauccgaagcaauuaggg

SEQ ID NO: 1021916 - RNA, 19 nt, Artificial Sequence
  Description of Artificial Sequence: Synthetic oligonucleotide
  Sense strand starting at position 3076 of SEQ ID NO: 914672
cggauuucuuugugauaaa

SEQ ID NO: 1021917 - RNA, 19 nt, Artificial Sequence
  Description of Artificial Sequence: Synthetic oligonucleotide
  Antisense strand to SEQ ID NO: 1021916
uuuaucacaaagaaauccg

SEQ ID NO: 1021918 - RNA, 19 nt, Artificial Sequence
  Description of Artificial Sequence: Synthetic oligonucleotide
  Sense strand starting at position 3077 of SEQ ID NO: 914672
ggauuucuuugugauaaau

SEQ ID NO: 1021919 - RNA, 19 nt, Artificial Sequence
  Description of Artificial Sequence: Synthetic oligonucleotide
  Antisense strand to SEQ ID NO: 1021918
auuuaucacaaagaaaucc

SEQ ID NO: 1021920 - RNA, 19 nt, Artificial Sequence
  Description of Artificial Sequence: Synthetic oligonucleotide
  Sense strand starting at position 3146 of SEQ ID NO: 914672
ggcuaaaguuacuuccaga

SEQ ID NO: 1021921 - RNA, 19 nt, Artificial Sequence
  Description of Artificial Sequence: Synthetic oligonucleotide
  Antisense strand to SEQ ID NO: 1021920
ucuggaaguaacuuuagcc

SEQ ID NO: 1021922 - RNA, 19 nt, Artificial Sequence
  Description of Artificial Sequence: Synthetic oligonucleotide
  Sense strand starting at position 3163 of SEQ ID NO: 914672
gagcgcuggucgucaaucu

SEQ ID NO: 1021923 - RNA, 19 nt, Artificial Sequence
  Description of Artificial Sequence: Synthetic oligonucleotide
  Antisense strand to SEQ ID NO: 1021922
agauugacgaccagcgcuc

SEQ ID NO: 1021924 - RNA, 19 nt, Artificial Sequence
  Description of Artificial Sequence: Synthetic oligonucleotide
  Sense strand starting at position 3170 of SEQ ID NO: 914672
ggucgucaaucuuccauca

SEQ ID NO: 1021925 - RNA, 19 nt, Artificial Sequence
  Description of Artificial Sequence: Synthetic oligonucleotide
  Antisense strand to SEQ ID NO: 1021924
ugauggaagauugacgacc

SEQ ID NO: 1021926 - RNA, 19 nt, Artificial Sequence
  Description of Artificial Sequence: Synthetic oligonucleotide
  Sense strand starting at position 3172 of SEQ ID NO: 914672
ucgucaaucuuccaucaga

SEQ ID NO: 1021927 - RNA, 19 nt, Artificial Sequence
  Description of Artificial Sequence: Synthetic oligonucleotide
  Antisense strand to SEQ ID NO: 1021926
ucugauggaagauugacga

SEQ ID NO: 1021928 - RNA, 19 nt, Artificial Sequence
  Description of Artificial Sequence: Synthetic oligonucleotide
  Sense strand starting at position 3196 of SEQ ID NO: 914672
cugaaaggcuuccaucaga

SEQ ID NO: 1021929 - RNA, 19 nt, Artificial Sequence
  Description of Artificial Sequence: Synthetic oligonucleotide
  Antisense strand to SEQ ID NO: 1021928
ucugauggaagccuuucag

SEQ ID NO: 1021930 - RNA, 19 nt, Artificial Sequence
  Description of Artificial Sequence: Synthetic oligonucleotide
  Sense strand starting at position 3225 of SEQ ID NO: 914672
aggguuauucggugggucu

SEQ ID NO: 1021931 - RNA, 19 nt, Artificial Sequence
  Description of Artificial Sequence: Synthetic oligonucleotide
  Antisense strand to SEQ ID NO: 1021930
agacccaccgaauaacccu

SEQ ID NO: 1021932 - RNA, 19 nt, Artificial Sequence
  Description of Artificial Sequence: Synthetic oligonucleotide
  Sense strand starting at position 3326 of SEQ ID NO: 914672
guauauuucucugauaugc

SEQ ID NO: 1021933 - RNA, 19 nt, Artificial Sequence
  Description of Artificial Sequence: Synthetic oligonucleotide
  Antisense strand to SEQ ID NO: 1021932
gcauaucagagaaauauac

SEQ ID NO: 1021934 - RNA, 19 nt, Artificial Sequence
  Description of Artificial Sequence: Synthetic oligonucleotide
  Sense strand starting at position 3351 of SEQ ID NO: 914672
uuugucuuggucuaaagag

SEQ ID NO: 1021935 - RNA, 19 nt, Artificial Sequence
  Description of Artificial Sequence: Synthetic oligonucleotide
  Antisense strand to SEQ ID NO: 1021934
cucuuuagaccaagacaaa

SEQ ID NO: 1021936 - RNA, 19 nt, Artificial Sequence
  Description of Artificial Sequence: Synthetic oligonucleotide
  Sense strand starting at position 3398 of SEQ ID NO: 914672
gcgaguucucccugguacc

SEQ ID NO: 1021937 - RNA, 19 nt, Artificial Sequence
  Description of Artificial Sequence: Synthetic oligonucleotide
  Antisense strand to SEQ ID NO: 1021936
gguaccagggagaacucgc

SEQ ID NO: 1021938 - RNA, 19 nt, Artificial Sequence
  Description of Artificial Sequence: Synthetic oligonucleotide
  Sense strand starting at position 3399 of SEQ ID NO: 914672
cgaguucucccugguacca

SEQ ID NO: 1021939 - RNA, 19 nt, Artificial Sequence
  Description of Artificial Sequence: Synthetic oligonucleotide
  Antisense strand to SEQ ID NO: 1021938
ugguaccagggagaacucg

SEQ ID NO: 1021940 - RNA, 19 nt, Artificial Sequence
  Description of Artificial Sequence: Synthetic oligonucleotide
  Sense strand starting at position 3427 of SEQ ID NO: 914672
gccuuugcuugucaggaca

SEQ ID NO: 1021941 - RNA, 19 nt, Artificial Sequence
  Description of Artificial Sequence: Synthetic oligonucleotide
  Antisense strand to SEQ ID NO: 1021940
uguccugacaagcaaaggc

SEQ ID NO: 1021942 - RNA, 19 nt, Artificial Sequence
  Description of Artificial Sequence: Synthetic oligonucleotide
  Sense strand starting at position 3731 of SEQ ID NO: 914672
gucagauguggccauccua

SEQ ID NO: 1021943 - RNA, 19 nt, Artificial Sequence
  Description of Artificial Sequence: Synthetic oligonucleotide
  Antisense strand to SEQ ID NO: 1021942
uaggauggccacaucugac

SEQ ID NO: 1021944 - RNA, 19 nt, Artificial Sequence
  Description of Artificial Sequence: Synthetic oligonucleotide
  Sense strand starting at position 3881 of SEQ ID NO: 914672
gccacagaaucaugcaaga

SEQ ID NO: 1021945 - RNA, 19 nt, Artificial Sequence
  Description of Artificial Sequence: Synthetic oligonucleotide
  Antisense strand to SEQ ID NO: 1021944
ucuugcaugauucuguggc

SEQ ID NO: 1021946 - RNA, 19 nt, Artificial Sequence
  Description of Artificial Sequence: Synthetic oligonucleotide
  Sense strand starting at position 3892 of SEQ ID NO: 914672
augcaagagccgugaguga

SEQ ID NO: 1021947 - RNA, 19 nt, Artificial Sequence
  Description of Artificial Sequence: Synthetic oligonucleotide
  Antisense strand to SEQ ID NO: 1021946
ucacucacggcucuugcau

SEQ ID NO: 1021948 - RNA, 19 nt, Artificial Sequence
  Description of Artificial Sequence: Synthetic oligonucleotide
  Sense strand starting at position 3970 of SEQ ID NO: 914672
ggcggagcuccucagaaug

SEQ ID NO: 1021949 - RNA, 19 nt, Artificial Sequence
  Description of Artificial Sequence: Synthetic oligonucleotide
  Antisense strand to SEQ ID NO: 1021948
cauucugaggagcuccgcc

SEQ ID NO: 1021950 - RNA, 19 nt, Artificial Sequence
  Description of Artificial Sequence: Synthetic oligonucleotide
  Sense strand starting at position 3981 of SEQ ID NO: 914672
ucagaaugcuccucaggaa

SEQ ID NO: 1021951 - RNA, 19 nt, Artificial Sequence
  Description of Artificial Sequence: Synthetic oligonucleotide
  Antisense strand to SEQ ID NO: 1021950
uuccugaggagcauucuga

SEQ ID NO: 1021952 - RNA, 19 nt, Artificial Sequence
  Description of Artificial Sequence: Synthetic oligonucleotide
  Sense strand starting at position 145 of SEQ ID NO: 914673
gugccucuuccggccuaaa

SEQ ID NO: 1021953 - RNA, 19 nt, Artificial Sequence
  Description of Artificial Sequence: Synthetic oligonucleotide
  Antisense strand to SEQ ID NO: 1021952
uuuaggccggaagaggcac

SEQ ID NO: 1021954 - RNA, 19 nt, Artificial Sequence
  Description of Artificial Sequence: Synthetic oligonucleotide
  Sense strand starting at position 186 of SEQ ID NO: 914673
guacuugacgcuguguuua

SEQ ID NO: 1021955 - RNA, 19 nt, Artificial Sequence
  Description of Artificial Sequence: Synthetic oligonucleotide
  Antisense strand to SEQ ID NO: 1021954
uaaacacagcgucaaguac

SEQ ID NO: 1021956 - RNA, 19 nt, Artificial Sequence
  Description of Artificial Sequence: Synthetic oligonucleotide
  Sense strand starting at position 263 of SEQ ID NO: 914673
cagcgugagaaguagacuu

SEQ ID NO: 1021957 - RNA, 19 nt, Artificial Sequence
  Description of Artificial Sequence: Synthetic oligonucleotide
  Antisense strand to SEQ ID NO: 1021956
aagucuacuucucacgcug

SEQ ID NO: 1021958 - RNA, 19 nt, Artificial Sequence
  Description of Artificial Sequence: Synthetic oligonucleotide
  Sense strand starting at position 344 of SEQ ID NO: 914673
acaagucguaguguugcua

SEQ ID NO: 1021959 - RNA, 19 nt, Artificial Sequence
  Description of Artificial Sequence: Synthetic oligonucleotide
  Antisense strand to SEQ ID NO: 1021958
uagcaacacuacgacuugu

SEQ ID NO: 1021960 - RNA, 19 nt, Artificial Sequence
  Description of Artificial Sequence: Synthetic oligonucleotide
  Sense strand starting at position 350 of SEQ ID NO: 914673
cguaguguugcuagugaua

SEQ ID NO: 1021961 - RNA, 19 nt, Artificial Sequence
  Description of Artificial Sequence: Synthetic oligonucleotide
  Antisense strand to SEQ ID NO: 1021960
uaucacuagcaacacuacg

SEQ ID NO: 1021962 - RNA, 19 nt, Artificial Sequence
  Description of Artificial Sequence: Synthetic oligonucleotide
  Sense strand starting at position 443 of SEQ ID NO: 914673
ucuuuaugccuagggacaa

SEQ ID NO: 1021963 - RNA, 19 nt, Artificial Sequence
  Description of Artificial Sequence: Synthetic oligonucleotide
  Antisense strand to SEQ ID NO: 1021962
uugucccuaggcauaaaga

SEQ ID NO: 1021964 - RNA, 19 nt, Artificial Sequence
  Description of Artificial Sequence: Synthetic oligonucleotide
  Sense strand starting at position 586 of SEQ ID NO: 914673
cacugauucugaguugagg

SEQ ID NO: 1021965 - RNA, 19 nt, Artificial Sequence
  Description of Artificial Sequence: Synthetic oligonucleotide
  Antisense strand to SEQ ID NO: 1021964
ccucaacucagaaucagug

SEQ ID NO: 1021966 - RNA, 19 nt, Artificial Sequence
  Description of Artificial Sequence: Synthetic oligonucleotide
  Sense strand starting at position 652 of SEQ ID NO: 914673
guuggcucccaguaauauc

SEQ ID NO: 1021967 - RNA, 19 nt, Artificial Sequence
  Description of Artificial Sequence: Synthetic oligonucleotide
  Antisense strand to SEQ ID NO: 1021966
gauauuacugggagccaac

SEQ ID NO: 1021968 - RNA, 19 nt, Artificial Sequence
  Description of Artificial Sequence: Synthetic oligonucleotide
  Sense strand starting at position 769 of SEQ ID NO: 914673
gagcaaguuugggcuauau

SEQ ID NO: 1021969 - RNA, 19 nt, Artificial Sequence
  Description of Artificial Sequence: Synthetic oligonucleotide
  Antisense strand to SEQ ID NO: 1021968
auauagcccaaacuugcuc

SEQ ID NO: 1021970 - RNA, 19 nt, Artificial Sequence
  Description of Artificial Sequence: Synthetic oligonucleotide
  Sense strand starting at position 773 of SEQ ID NO: 914673
aaguuugggcuauauguau

SEQ ID NO: 1021971 - RNA, 19 nt, Artificial Sequence
  Description of Artificial Sequence: Synthetic oligonucleotide
  Antisense strand to SEQ ID NO: 1021970
auacauauagcccaaacuu

SEQ ID NO: 1021972 - RNA, 19 nt, Artificial Sequence
  Description of Artificial Sequence: Synthetic oligonucleotide
  Sense strand starting at position 837 of SEQ ID NO: 914673
auugguuagaauugaguca

SEQ ID NO: 1021973 - RNA, 19 nt, Artificial Sequence
  Description of Artificial Sequence: Synthetic oligonucleotide
  Antisense strand to SEQ ID NO: 1021972
ugacucaauucuaaccaau

SEQ ID NO: 1021974 - RNA, 19 nt, Artificial Sequence
  Description of Artificial Sequence: Synthetic oligonucleotide
  Sense strand starting at position 930 of SEQ ID NO: 914673
uguaaacuguucuuugaug

SEQ ID NO: 1021975 - RNA, 19 nt, Artificial Sequence
  Description of Artificial Sequence: Synthetic oligonucleotide
  Antisense strand to SEQ ID NO: 1021974
caucaaagaacaguuuaca

SEQ ID NO: 1021976 - RNA, 19 nt, Artificial Sequence
  Description of Artificial Sequence: Synthetic oligonucleotide
  Sense strand starting at position 955 of SEQ ID NO: 914673
auugaagagugguuggauc

SEQ ID NO: 1021977 - RNA, 19 nt, Artificial Sequence
  Description of Artificial Sequence: Synthetic oligonucleotide
  Antisense strand to SEQ ID NO: 1021976
gauccaaccacucuucaau

SEQ ID NO: 1021978 - RNA, 19 nt, Artificial Sequence
  Description of Artificial Sequence: Synthetic oligonucleotide
  Sense strand starting at position 957 of SEQ ID NO: 914673
ugaagagugguuggaucuu

SEQ ID NO: 1021979 - RNA, 19 nt, Artificial Sequence
  Description of Artificial Sequence: Synthetic oligonucleotide
  Antisense strand to SEQ ID NO: 1021978
aagauccaaccacucuuca

SEQ ID NO: 1021980 - RNA, 19 nt, Artificial Sequence
  Description of Artificial Sequence: Synthetic oligonucleotide
  Sense strand starting at position 963 of SEQ ID NO: 914673
gugguuggaucuuugaaga

SEQ ID NO: 1021981 - RNA, 19 nt, Artificial Sequence
  Description of Artificial Sequence: Synthetic oligonucleotide
  Antisense strand to SEQ ID NO: 1021980
ucuucaaagauccaaccac

SEQ ID NO: 1021982 - RNA, 19 nt, Artificial Sequence
  Description of Artificial Sequence: Synthetic oligonucleotide
  Sense strand starting at position 1086 of SEQ ID NO: 914673
agguuaauguaguuggcaa

SEQ ID NO: 1021983 - RNA, 19 nt, Artificial Sequence
  Description of Artificial Sequence: Synthetic oligonucleotide
  Antisense strand to SEQ ID NO: 1021982
uugccaacuacauuaaccu

SEQ ID NO: 1021984 - RNA, 19 nt, Artificial Sequence
  Description of Artificial Sequence: Synthetic oligonucleotide
  Sense strand starting at position 1102 of SEQ ID NO: 914673
caagcuaugugaguguaga

SEQ ID NO: 1021985 - RNA, 19 nt, Artificial Sequence
  Description of Artificial Sequence: Synthetic oligonucleotide
  Antisense strand to SEQ ID NO: 1021984
ucuacacucacauagcuug

SEQ ID NO: 1021986 - RNA, 19 nt, Artificial Sequence
  Description of Artificial Sequence: Synthetic oligonucleotide
  Sense strand starting at position 1217 of SEQ ID NO: 914673
cgcacuugagaugauguuu

SEQ ID NO: 1021987 - RNA, 19 nt, Artificial Sequence
  Description of Artificial Sequence: Synthetic oligonucleotide
  Antisense strand to SEQ ID NO: 1021986
aaacaucaucucaagugcg

SEQ ID NO: 1021988 - RNA, 19 nt, Artificial Sequence
  Description of Artificial Sequence: Synthetic oligonucleotide
  Sense strand starting at position 1230 of SEQ ID NO: 914673
auguuugcugcacacagaa

SEQ ID NO: 1021989 - RNA, 19 nt, Artificial Sequence
  Description of Artificial Sequence: Synthetic oligonucleotide
  Antisense strand to SEQ ID NO: 1021988
uucugugugcagcaaacau

SEQ ID NO: 1021990 - RNA, 19 nt, Artificial Sequence
  Description of Artificial Sequence: Synthetic oligonucleotide
  Sense strand starting at position 1251 of SEQ ID NO: 914673
cggacacagagaugugaau

SEQ ID NO: 1021991 - RNA, 19 nt, Artificial Sequence
  Description of Artificial Sequence: Synthetic oligonucleotide
  Antisense strand to SEQ ID NO: 1021990
auucacaucucuguguccg

SEQ ID NO: 1021992 - RNA, 19 nt, Artificial Sequence
  Description of Artificial Sequence: Synthetic oligonucleotide
  Sense strand starting at position 1262 of SEQ ID NO: 914673
augugaaucuccuuaggaa

SEQ ID NO: 1021993 - RNA, 19 nt, Artificial Sequence
  Description of Artificial Sequence: Synthetic oligonucleotide
  Antisense strand to SEQ ID NO: 1021992
uuccuaaggagauucacau

SEQ ID NO: 1021994 - RNA, 19 nt, Artificial Sequence
  Description of Artificial Sequence: Synthetic oligonucleotide
  Sense strand starting at position 1293 of SEQ ID NO: 914673
aguuaacauugggucuuaa

SEQ ID NO: 1021995 - RNA, 19 nt, Artificial Sequence
  Description of Artificial Sequence: Synthetic oligonucleotide
  Antisense strand to SEQ ID NO: 1021994
uuaagacccaauguuaacu

SEQ ID NO: 1021996 - RNA, 19 nt, Artificial Sequence
  Description of Artificial Sequence: Synthetic oligonucleotide
  Sense strand starting at position 2335 of SEQ ID NO: 914673
agaguaaacucccuuguca

SEQ ID NO: 1021997 - RNA, 19 nt, Artificial Sequence
  Description of Artificial Sequence: Synthetic oligonucleotide
  Antisense strand to SEQ ID NO: 1021996
ugacaagggaguuuacucu

SEQ ID NO: 1021998 - RNA, 19 nt, Artificial Sequence
  Description of Artificial Sequence: Synthetic oligonucleotide
  Sense strand starting at position 2337 of SEQ ID NO: 914673
aguaaacucccuugucaua

SEQ ID NO: 1021999 - RNA, 19 nt, Artificial Sequence
  Description of Artificial Sequence: Synthetic oligonucleotide
  Antisense strand to SEQ ID NO: 1021998
uaugacaagggaguuuacu

SEQ ID NO: 1022000 - RNA, 19 nt, Artificial Sequence
  Description of Artificial Sequence: Synthetic oligonucleotide
  Sense strand starting at position 2377 of SEQ ID NO: 914673
ucaauauguggagacguuu

SEQ ID NO: 1022001 - RNA, 19 nt, Artificial Sequence
  Description of Artificial Sequence: Synthetic oligonucleotide
  Antisense strand to SEQ ID NO: 1022000
aaacgucuccacauauuga

SEQ ID NO: 1022002 - RNA, 19 nt, Artificial Sequence
  Description of Artificial Sequence: Synthetic oligonucleotide
  Sense strand starting at position 2383 of SEQ ID NO: 914673
uguggagacguuuaugaua

SEQ ID NO: 1022003 - RNA, 19 nt, Artificial Sequence
  Description of Artificial Sequence: Synthetic oligonucleotide
  Antisense strand to SEQ ID NO: 1022002
uaucauaaacgucuccaca

SEQ ID NO: 1022004 - RNA, 19 nt, Artificial Sequence
  Description of Artificial Sequence: Synthetic oligonucleotide
  Sense strand starting at position 2421 of SEQ ID NO: 914673
gggcucuaggaauaugcau

SEQ ID NO: 1022005 - RNA, 19 nt, Artificial Sequence
  Description of Artificial Sequence: Synthetic oligonucleotide
  Antisense strand to SEQ ID NO: 1022004
augcauauuccuagagccc

SEQ ID NO: 1022006 - RNA, 19 nt, Artificial Sequence
  Description of Artificial Sequence: Synthetic oligonucleotide
  Sense strand starting at position 2442 of SEQ ID NO: 914673
caaagcugaugaucgaaga

SEQ ID NO: 1022007 - RNA, 19 nt, Artificial Sequence
  Description of Artificial Sequence: Synthetic oligonucleotide
  Antisense strand to SEQ ID NO: 1022006
ucuucgaucaucagcuuug

SEQ ID NO: 1022008 - RNA, 19 nt, Artificial Sequence
  Description of Artificial Sequence: Synthetic oligonucleotide
  Sense strand starting at position 2443 of SEQ ID NO: 914673
aaagcugaugaucgaagaa

SEQ ID NO: 1022009 - RNA, 19 nt, Artificial Sequence
  Description of Artificial Sequence: Synthetic oligonucleotide
  Antisense strand to SEQ ID NO: 1022008
uucuucgaucaucagcuuu

SEQ ID NO: 1022010 - RNA, 19 nt, Artificial Sequence
  Description of Artificial Sequence: Synthetic oligonucleotide
  Sense strand starting at position 2501 of SEQ ID NO: 914673
ccugcauucugaguagaug

SEQ ID NO: 1022011 - RNA, 19 nt, Artificial Sequence
  Description of Artificial Sequence: Synthetic oligonucleotide
  Antisense strand to SEQ ID NO: 1022010
caucuacucagaaugcagg

SEQ ID NO: 1022012 - RNA, 19 nt, Artificial Sequence
  Description of Artificial Sequence: Synthetic oligonucleotide
  Sense strand starting at position 2502 of SEQ ID NO: 914673
cugcauucugaguagaugu

SEQ ID NO: 1022013 - RNA, 19 nt, Artificial Sequence
  Description of Artificial Sequence: Synthetic oligonucleotide
  Antisense strand to SEQ ID NO: 1022012
acaucuacucagaaugcag

SEQ ID NO: 1022014 - RNA, 19 nt, Artificial Sequence
  Description of Artificial Sequence: Synthetic oligonucleotide
  Sense strand starting at position 2504 of SEQ ID NO: 914673
gcauucugaguagaugugu

SEQ ID NO: 1022015 - RNA, 19 nt, Artificial Sequence
  Description of Artificial Sequence: Synthetic oligonucleotide
  Antisense strand to SEQ ID NO: 1022014
acacaucuacucagaaugc

SEQ ID NO: 1022016 - RNA, 19 nt, Artificial Sequence
  Description of Artificial Sequence: Synthetic oligonucleotide
  Sense strand starting at position 2510 of SEQ ID NO: 914673
ugaguagauguguauugga

SEQ ID NO: 1022017 - RNA, 19 nt, Artificial Sequence
  Description of Artificial Sequence: Synthetic oligonucleotide
  Antisense strand to SEQ ID NO: 1022016
uccaauacacaucuacuca

SEQ ID NO: 1022018 - RNA, 19 nt, Artificial Sequence
  Description of Artificial Sequence: Synthetic oligonucleotide
  Sense strand starting at position 2532 of SEQ ID NO: 914673
ggcgauuacagucacaaag

SEQ ID NO: 1022019 - RNA, 19 nt, Artificial Sequence
  Description of Artificial Sequence: Synthetic oligonucleotide
  Antisense strand to SEQ ID NO: 1022018
cuuugugacuguaaucgcc

SEQ ID NO: 1022020 - RNA, 19 nt, Artificial Sequence
  Description of Artificial Sequence: Synthetic oligonucleotide
  Sense strand starting at position 2565 of SEQ ID NO: 914673
gcaauugacagaggacuau

SEQ ID NO: 1022021 - RNA, 19 nt, Artificial Sequence
  Description of Artificial Sequence: Synthetic oligonucleotide
  Antisense strand to SEQ ID NO: 1022020
auaguccucugucaauugc

SEQ ID NO: 1022022 - RNA, 19 nt, Artificial Sequence
  Description of Artificial Sequence: Synthetic oligonucleotide
  Sense strand starting at position 2610 of SEQ ID NO: 914673
aaagguguguugguaacua

SEQ ID NO: 1022023 - RNA, 19 nt, Artificial Sequence
  Description of Artificial Sequence: Synthetic oligonucleotide
  Antisense strand to SEQ ID NO: 1022022
uaguuaccaacacaccuuu

SEQ ID NO: 1022024 - RNA, 19 nt, Artificial Sequence
  Description of Artificial Sequence: Synthetic oligonucleotide
  Sense strand starting at position 2614 of SEQ ID NO: 914673
guguguugguaacuacaaa

SEQ ID NO: 1022025 - RNA, 19 nt, Artificial Sequence
  Description of Artificial Sequence: Synthetic oligonucleotide
  Antisense strand to SEQ ID NO: 1022024
uuuguaguuaccaacacac

SEQ ID NO: 1022026 - RNA, 19 nt, Artificial Sequence
  Description of Artificial Sequence: Synthetic oligonucleotide
  Sense strand starting at position 3775 of SEQ ID NO: 914673
uaauaccuugguggugaaa

SEQ ID NO: 1022027 - RNA, 19 nt, Artificial Sequence
  Description of Artificial Sequence: Synthetic oligonucleotide
  Antisense strand to SEQ ID NO: 1022026
uuucaccaccaagguauua

SEQ ID NO: 1022028 - RNA, 19 nt, Artificial Sequence
  Description of Artificial Sequence: Synthetic oligonucleotide
  Sense strand starting at position 3821 of SEQ ID NO: 914673
ugaguuuaucuauauagca

SEQ ID NO: 1022029 - RNA, 19 nt, Artificial Sequence
  Description of Artificial Sequence: Synthetic oligonucleotide
  Antisense strand to SEQ ID NO: 1022028
ugcuauauagauaaacuca

SEQ ID NO: 1022030 - RNA, 19 nt, Artificial Sequence
  Description of Artificial Sequence: Synthetic oligonucleotide
  Sense strand starting at position 3949 of SEQ ID NO: 914673
auuagugcacaaggagaua

SEQ ID NO: 1022031 - RNA, 19 nt, Artificial Sequence
  Description of Artificial Sequence: Synthetic oligonucleotide
  Antisense strand to SEQ ID NO: 1022030
uaucuccuugugcacuaau

SEQ ID NO: 1022032 - RNA, 19 nt, Artificial Sequence
  Description of Artificial Sequence: Synthetic oligonucleotide
  Sense strand starting at position 9 of SEQ ID NO: 914674
ucaugucauuguuuaacuu

SEQ ID NO: 1022033 - RNA, 19 nt, Artificial Sequence
  Description of Artificial Sequence: Synthetic oligonucleotide
  Antisense strand to SEQ ID NO: 1022032
aaguuaaacaaugacauga

SEQ ID NO: 1022034 - RNA, 19 nt, Artificial Sequence
  Description of Artificial Sequence: Synthetic oligonucleotide
  Sense strand starting at position 134 of SEQ ID NO: 914674
gucagucauugacuaggga

SEQ ID NO: 1022035 - RNA, 19 nt, Artificial Sequence
  Description of Artificial Sequence: Synthetic oligonucleotide
  Antisense strand to SEQ ID NO: 1022034
ucccuagucaaugacugac

SEQ ID NO: 1022036 - RNA, 19 nt, Artificial Sequence
  Description of Artificial Sequence: Synthetic oligonucleotide
  Sense strand starting at position 222 of SEQ ID NO: 914674
ugaauauggaagugcuaaa

SEQ ID NO: 1022037 - RNA, 19 nt, Artificial Sequence
  Description of Artificial Sequence: Synthetic oligonucleotide
  Antisense strand to SEQ ID NO: 1022036
uuuagcacuuccauauuca

SEQ ID NO: 1022038 - RNA, 19 nt, Artificial Sequence
  Description of Artificial Sequence: Synthetic oligonucleotide
  Sense strand starting at position 298 of SEQ ID NO: 914674
cugcaugaccuugggcaua

SEQ ID NO: 1022039 - RNA, 19 nt, Artificial Sequence
  Description of Artificial Sequence: Synthetic oligonucleotide
  Antisense strand to SEQ ID NO: 1022038
uaugcccaaggucaugcag

SEQ ID NO: 1022040 - RNA, 19 nt, Artificial Sequence
  Description of Artificial Sequence: Synthetic oligonucleotide
  Sense strand starting at position 300 of SEQ ID NO: 914674
gcaugaccuugggcauauu

SEQ ID NO: 1022041 - RNA, 19 nt, Artificial Sequence
  Description of Artificial Sequence: Synthetic oligonucleotide
  Antisense strand to SEQ ID NO: 1022040
aauaugcccaaggucaugc

SEQ ID NO: 1022042 - RNA, 19 nt, Artificial Sequence
  Description of Artificial Sequence: Synthetic oligonucleotide
  Sense strand starting at position 303 of SEQ ID NO: 914674
ugaccuugggcauauuaau

SEQ ID NO: 1022043 - RNA, 19 nt, Artificial Sequence
  Description of Artificial Sequence: Synthetic oligonucleotide
  Antisense strand to SEQ ID NO: 1022042
auuaauaugcccaagguca

SEQ ID NO: 1022044 - RNA, 19 nt, Artificial Sequence
  Description of Artificial Sequence: Synthetic oligonucleotide
  Sense strand starting at position 309 of SEQ ID NO: 914674
ugggcauauuaauuaacua

SEQ ID NO: 1022045 - RNA, 19 nt, Artificial Sequence
  Description of Artificial Sequence: Synthetic oligonucleotide
  Antisense strand to SEQ ID NO: 1022044
uaguuaauuaauaugccca

SEQ ID NO: 1022046 - RNA, 19 nt, Artificial Sequence
  Description of Artificial Sequence: Synthetic oligonucleotide
  Sense strand starting at position 357 of SEQ ID NO: 914674
gggaaucaaccuuguuaua

SEQ ID NO: 1022047 - RNA, 19 nt, Artificial Sequence
  Description of Artificial Sequence: Synthetic oligonucleotide
  Antisense strand to SEQ ID NO: 1022046
uauaacaagguugauuccc

SEQ ID NO: 1022048 - RNA, 19 nt, Artificial Sequence
  Description of Artificial Sequence: Synthetic oligonucleotide
  Sense strand starting at position 386 of SEQ ID NO: 914674
aauauauuguggucugggu

SEQ ID NO: 1022049 - RNA, 19 nt, Artificial Sequence
  Description of Artificial Sequence: Synthetic oligonucleotide
  Antisense strand to SEQ ID NO: 1022048
acccagaccacaauauauu

SEQ ID NO: 1022050 - RNA, 19 nt, Artificial Sequence
  Description of Artificial Sequence: Synthetic oligonucleotide
  Sense strand starting at position 998 of SEQ ID NO: 914674
guugcaacaucccuaaaug

SEQ ID NO: 1022051 - RNA, 19 nt, Artificial Sequence
  Description of Artificial Sequence: Synthetic oligonucleotide
  Antisense strand to SEQ ID NO: 1022050
cauuuagggauguugcaac

SEQ ID NO: 1022052 - RNA, 19 nt, Artificial Sequence
  Description of Artificial Sequence: Synthetic oligonucleotide
  Sense strand starting at position 1019 of SEQ ID NO: 914674
agaacuuguugcccaacua

SEQ ID NO: 1022053 - RNA, 19 nt, Artificial Sequence
  Description of Artificial Sequence: Synthetic oligonucleotide
  Antisense strand to SEQ ID NO: 1022052
uaguugggcaacaaguucu

SEQ ID NO: 1022054 - RNA, 19 nt, Artificial Sequence
  Description of Artificial Sequence: Synthetic oligonucleotide
  Sense strand starting at position 1082 of SEQ ID NO: 914674
ucuuacgaaguuugagaga

SEQ ID NO: 1022055 - RNA, 19 nt, Artificial Sequence
  Description of Artificial Sequence: Synthetic oligonucleotide
  Antisense strand to SEQ ID NO: 1022054
ucucucaaacuucguaaga

SEQ ID NO: 1022056 - RNA, 19 nt, Artificial Sequence
  Description of Artificial Sequence: Synthetic oligonucleotide
  Sense strand starting at position 1098 of SEQ ID NO: 914674
agaggauccgggugcuuua

SEQ ID NO: 1022057 - RNA, 19 nt, Artificial Sequence
  Description of Artificial Sequence: Synthetic oligonucleotide
  Antisense strand to SEQ ID NO: 1022056
uaaagcacccggauccucu

SEQ ID NO: 1022058 - RNA, 19 nt, Artificial Sequence
  Description of Artificial Sequence: Synthetic oligonucleotide
  Sense strand starting at position 1179 of SEQ ID NO: 914674
uugcauguacuugagcaau

SEQ ID NO: 1022059 - RNA, 19 nt, Artificial Sequence
  Description of Artificial Sequence: Synthetic oligonucleotide
  Antisense strand to SEQ ID NO: 1022058
auugcucaaguacaugcaa

SEQ ID NO: 1022060 - RNA, 19 nt, Artificial Sequence
  Description of Artificial Sequence: Synthetic oligonucleotide
  Sense strand starting at position 1191 of SEQ ID NO: 914674
gagcaaucacaguggaaag

SEQ ID NO: 1022061 - RNA, 19 nt, Artificial Sequence
  Description of Artificial Sequence: Synthetic oligonucleotide
  Antisense strand to SEQ ID NO: 1022060
cuuuccacugugauugcuc

SEQ ID NO: 1022062 - RNA, 19 nt, Artificial Sequence
  Description of Artificial Sequence: Synthetic oligonucleotide
  Sense strand starting at position 1337 of SEQ ID NO: 914674
acuugacaucaagguucua

SEQ ID NO: 1022063 - RNA, 19 nt, Artificial Sequence
  Description of Artificial Sequence: Synthetic oligonucleotide
  Antisense strand to SEQ ID NO: 1022062
uagaaccuugaugucaagu

SEQ ID NO: 1022064 - RNA, 19 nt, Artificial Sequence
  Description of Artificial Sequence: Synthetic oligonucleotide
  Sense strand starting at position 1349 of SEQ ID NO: 914674
gguucuacuuaccuaaaga

SEQ ID NO: 1022065 - RNA, 19 nt, Artificial Sequence
  Description of Artificial Sequence: Synthetic oligonucleotide
  Antisense strand to SEQ ID NO: 1022064
ucuuuagguaaguagaacc

SEQ ID NO: 1022066 - RNA, 19 nt, Artificial Sequence
  Description of Artificial Sequence: Synthetic oligonucleotide
  Sense strand starting at position 2079 of SEQ ID NO: 914674
gugccucuuccggccuaaa

SEQ ID NO: 1022067 - RNA, 19 nt, Artificial Sequence
  Description of Artificial Sequence: Synthetic oligonucleotide
  Antisense strand to SEQ ID NO: 1022066
uuuaggccggaagaggcac

SEQ ID NO: 1022068 - RNA, 19 nt, Artificial Sequence
  Description of Artificial Sequence: Synthetic oligonucleotide
  Sense strand starting at position 2120 of SEQ ID NO: 914674
guacuugacgcuguguuua

SEQ ID NO: 1022069 - RNA, 19 nt, Artificial Sequence
  Description of Artificial Sequence: Synthetic oligonucleotide
  Antisense strand to SEQ ID NO: 1022068
uaaacacagcgucaaguac

SEQ ID NO: 1022070 - RNA, 19 nt, Artificial Sequence
  Description of Artificial Sequence: Synthetic oligonucleotide
  Sense strand starting at position 2197 of SEQ ID NO: 914674
cagcgugagaaguagacuu

SEQ ID NO: 1022071 - RNA, 19 nt, Artificial Sequence
  Description of Artificial Sequence: Synthetic oligonucleotide
  Antisense strand to SEQ ID NO: 1022070
aagucuacuucucacgcug

SEQ ID NO: 1022072 - RNA, 19 nt, Artificial Sequence
  Description of Artificial Sequence: Synthetic oligonucleotide
  Sense strand starting at position 2278 of SEQ ID NO: 914674
acaagucguaguguugcua

SEQ ID NO: 1022073 - RNA, 19 nt, Artificial Sequence
  Description of Artificial Sequence: Synthetic oligonucleotide
  Antisense strand to SEQ ID NO: 1022072
uagcaacacuacgacuugu

SEQ ID NO: 1022074 - RNA, 19 nt, Artificial Sequence
  Description of Artificial Sequence: Synthetic oligonucleotide
  Sense strand starting at position 2284 of SEQ ID NO: 914674
cguaguguugcuagugaua

SEQ ID NO: 1022075 - RNA, 19 nt, Artificial Sequence
  Description of Artificial Sequence: Synthetic oligonucleotide
  Antisense strand to SEQ ID NO: 1022074
uaucacuagcaacacuacg

SEQ ID NO: 1022076 - RNA, 19 nt, Artificial Sequence
  Description of Artificial Sequence: Synthetic oligonucleotide
  Sense strand starting at position 2377 of SEQ ID NO: 914674
ucuuuaugccuagggacaa

SEQ ID NO: 1022077 - RNA, 19 nt, Artificial Sequence
  Description of Artificial Sequence: Synthetic oligonucleotide
  Antisense strand to SEQ ID NO: 1022076
uugucccuaggcauaaaga

SEQ ID NO: 1022078 - RNA, 19 nt, Artificial Sequence
  Description of Artificial Sequence: Synthetic oligonucleotide
  Sense strand starting at position 2520 of SEQ ID NO: 914674
cacugauucugaguugagg

SEQ ID NO: 1022079 - RNA, 19 nt, Artificial Sequence
  Description of Artificial Sequence: Synthetic oligonucleotide
  Antisense strand to SEQ ID NO: 1022078
ccucaacucagaaucagug

SEQ ID NO: 1022080 - RNA, 19 nt, Artificial Sequence
  Description of Artificial Sequence: Synthetic oligonucleotide
  Sense strand starting at position 2586 of SEQ ID NO: 914674
guuggcucccaguaauauc

SEQ ID NO: 1022081 - RNA, 19 nt, Artificial Sequence
  Description of Artificial Sequence: Synthetic oligonucleotide
  Antisense strand to SEQ ID NO: 1022080
gauauuacugggagccaac

SEQ ID NO: 1022082 - RNA, 19 nt, Artificial Sequence
  Description of Artificial Sequence: Synthetic oligonucleotide
  Sense strand starting at position 2703 of SEQ ID NO: 914674
gagcaaguuugggcuauau

SEQ ID NO: 1022083 - RNA, 19 nt, Artificial Sequence
  Description of Artificial Sequence: Synthetic oligonucleotide
  Antisense strand to SEQ ID NO: 1022082
auauagcccaaacuugcuc

SEQ ID NO: 1022084 - RNA, 19 nt, Artificial Sequence
  Description of Artificial Sequence: Synthetic oligonucleotide
  Sense strand starting at position 2707 of SEQ ID NO: 914674
aaguuugggcuauauguau

SEQ ID NO: 1022085 - RNA, 19 nt, Artificial Sequence
  Description of Artificial Sequence: Synthetic oligonucleotide
  Antisense strand to SEQ ID NO: 1022084
auacauauagcccaaacuu

SEQ ID NO: 1022086 - RNA, 19 nt, Artificial Sequence
  Description of Artificial Sequence: Synthetic oligonucleotide
  Sense strand starting at position 2771 of SEQ ID NO: 914674
auugguuagaauugaguca

SEQ ID NO: 1022087 - RNA, 19 nt, Artificial Sequence
  Description of Artificial Sequence: Synthetic oligonucleotide
  Antisense strand to SEQ ID NO: 1022086
ugacucaauucuaaccaau

SEQ ID NO: 1022088 - RNA, 19 nt, Artificial Sequence
  Description of Artificial Sequence: Synthetic oligonucleotide
  Sense strand starting at position 2864 of SEQ ID NO: 914674
uguaaacuguucuuugaug

SEQ ID NO: 1022089 - RNA, 19 nt, Artificial Sequence
  Description of Artificial Sequence: Synthetic oligonucleotide
  Antisense strand to SEQ ID NO: 1022088
caucaaagaacaguuuaca

SEQ ID NO: 1022090 - RNA, 19 nt, Artificial Sequence
  Description of Artificial Sequence: Synthetic oligonucleotide
  Sense strand starting at position 2889 of SEQ ID NO: 914674
auugaagagugguuggauc

SEQ ID NO: 1022091 - RNA, 19 nt, Artificial Sequence
  Description of Artificial Sequence: Synthetic oligonucleotide
  Antisense strand to SEQ ID NO: 1022090
gauccaaccacucuucaau

SEQ ID NO: 1022092 - RNA, 19 nt, Artificial Sequence
  Description of Artificial Sequence: Synthetic oligonucleotide
  Sense strand starting at position 2891 of SEQ ID NO: 914674
ugaagagugguuggaucuu

SEQ ID NO: 1022093 - RNA, 19 nt, Artificial Sequence
  Description of Artificial Sequence: Synthetic oligonucleotide
  Antisense strand to SEQ ID NO: 1022092
aagauccaaccacucuuca

SEQ ID NO: 1022094 - RNA, 19 nt, Artificial Sequence
  Description of Artificial Sequence: Synthetic oligonucleotide
  Sense strand starting at position 2897 of SEQ ID NO: 914674
gugguuggaucuuugaaga

SEQ ID NO: 1022095 - RNA, 19 nt, Artificial Sequence
  Description of Artificial Sequence: Synthetic oligonucleotide
  Antisense strand to SEQ ID NO: 1022094
ucuucaaagauccaaccac

SEQ ID NO: 1022096 - RNA, 19 nt, Artificial Sequence
  Description of Artificial Sequence: Synthetic oligonucleotide
  Sense strand starting at position 3020 of SEQ ID NO: 914674
agguuaauguaguuggcaa

SEQ ID NO: 1022097 - RNA, 19 nt, Artificial Sequence
  Description of Artificial Sequence: Synthetic oligonucleotide
  Antisense strand to SEQ ID NO: 1022096
uugccaacuacauuaaccu

SEQ ID NO: 1022098 - RNA, 19 nt, Artificial Sequence
  Description of Artificial Sequence: Synthetic oligonucleotide
  Sense strand starting at position 3036 of SEQ ID NO: 914674
caagcuaugugaguguaga

SEQ ID NO: 1022099 - RNA, 19 nt, Artificial Sequence
  Description of Artificial Sequence: Synthetic oligonucleotide
  Antisense strand to SEQ ID NO: 1022098
ucuacacucacauagcuug

SEQ ID NO: 1022100 - RNA, 19 nt, Artificial Sequence
  Description of Artificial Sequence: Synthetic oligonucleotide
  Sense strand starting at position 3150 of SEQ ID NO: 914674
acgcacuugagaugauguu

SEQ ID NO: 1022101 - RNA, 19 nt, Artificial Sequence
  Description of Artificial Sequence: Synthetic oligonucleotide
  Antisense strand to SEQ ID NO: 1022100
aacaucaucucaagugcgu

SEQ ID NO: 1022102 - RNA, 19 nt, Artificial Sequence
  Description of Artificial Sequence: Synthetic oligonucleotide
  Sense strand starting at position 3151 of SEQ ID NO: 914674
cgcacuugagaugauguuu

SEQ ID NO: 1022103 - RNA, 19 nt, Artificial Sequence
  Description of Artificial Sequence: Synthetic oligonucleotide
  Antisense strand to SEQ ID NO: 1022102
aaacaucaucucaagugcg

SEQ ID NO: 1022104 - RNA, 19 nt, Artificial Sequence
  Description of Artificial Sequence: Synthetic oligonucleotide
  Sense strand starting at position 3164 of SEQ ID NO: 914674
auguuugcugcacacagaa

SEQ ID NO: 1022105 - RNA, 19 nt, Artificial Sequence
  Description of Artificial Sequence: Synthetic oligonucleotide
  Antisense strand to SEQ ID NO: 1022104
uucugugugcagcaaacau

SEQ ID NO: 1022106 - RNA, 19 nt, Artificial Sequence
  Description of Artificial Sequence: Synthetic oligonucleotide
  Sense strand starting at position 3185 of SEQ ID NO: 914674
cggacacagagaugugaau

SEQ ID NO: 1022107 - RNA, 19 nt, Artificial Sequence
  Description of Artificial Sequence: Synthetic oligonucleotide
  Antisense strand to SEQ ID NO: 1022106
auucacaucucuguguccg

SEQ ID NO: 1022108 - RNA, 19 nt, Artificial Sequence
  Description of Artificial Sequence: Synthetic oligonucleotide
  Sense strand starting at position 3196 of SEQ ID NO: 914674
augugaaucuccuuaggaa

SEQ ID NO: 1022109 - RNA, 19 nt, Artificial Sequence
  Description of Artificial Sequence: Synthetic oligonucleotide
  Antisense strand to SEQ ID NO: 1022108
uuccuaaggagauucacau

SEQ ID NO: 1022110 - RNA, 19 nt, Artificial Sequence
  Description of Artificial Sequence: Synthetic oligonucleotide
  Sense strand starting at position 3227 of SEQ ID NO: 914674
aguuaacauugggucuuaa

SEQ ID NO: 1022111 - RNA, 19 nt, Artificial Sequence
  Description of Artificial Sequence: Synthetic oligonucleotide
  Antisense strand to SEQ ID NO: 1022110
uuaagacccaauguuaacu

SEQ ID NO: 1022112 - RNA, 19 nt, Artificial Sequence
  Description of Artificial Sequence: Synthetic oligonucleotide
  Sense strand starting at position 63 of SEQ ID NO: 914675
cauacaggacuguguauaa

SEQ ID NO: 1022113 - RNA, 19 nt, Artificial Sequence
  Description of Artificial Sequence: Synthetic oligonucleotide
  Antisense strand to SEQ ID NO: 1022112
uuauacacaguccuguaug

SEQ ID NO: 1022114 - RNA, 19 nt, Artificial Sequence
  Description of Artificial Sequence: Synthetic oligonucleotide
  Sense strand starting at position 131 of SEQ ID NO: 914675
cagggagacuacucugcaa

SEQ ID NO: 1022115 - RNA, 19 nt, Artificial Sequence
  Description of Artificial Sequence: Synthetic oligonucleotide
  Antisense strand to SEQ ID NO: 1022114
uugcagaguagucucccug

SEQ ID NO: 1022116 - RNA, 19 nt, Artificial Sequence
  Description of Artificial Sequence: Synthetic oligonucleotide
  Sense strand starting at position 134 of SEQ ID NO: 914675
ggagacuacucugcaaggu

SEQ ID NO: 1022117 - RNA, 19 nt, Artificial Sequence
  Description of Artificial Sequence: Synthetic oligonucleotide
  Antisense strand to SEQ ID NO: 1022116
accuugcagaguagucucc

SEQ ID NO: 1022118 - RNA, 19 nt, Artificial Sequence
  Description of Artificial Sequence: Synthetic oligonucleotide
  Sense strand starting at position 135 of SEQ ID NO: 914675
gagacuacucugcaaggua

SEQ ID NO: 1022119 - RNA, 19 nt, Artificial Sequence
  Description of Artificial Sequence: Synthetic oligonucleotide
  Antisense strand to SEQ ID NO: 1022118
uaccuugcagaguagucuc

SEQ ID NO: 1022120 - RNA, 19 nt, Artificial Sequence
  Description of Artificial Sequence: Synthetic oligonucleotide
  Sense strand starting at position 150 of SEQ ID NO: 914675
gguauuucuuccgcaguag

SEQ ID NO: 1022121 - RNA, 19 nt, Artificial Sequence
  Description of Artificial Sequence: Synthetic oligonucleotide
  Antisense strand to SEQ ID NO: 1022120
cuacugcggaagaaauacc

SEQ ID NO: 1022122 - RNA, 19 nt, Artificial Sequence
  Description of Artificial Sequence: Synthetic oligonucleotide
  Sense strand starting at position 559 of SEQ ID NO: 914675
augaaacaaugguuugcaa

SEQ ID NO: 1022123 - RNA, 19 nt, Artificial Sequence
  Description of Artificial Sequence: Synthetic oligonucleotide
  Antisense strand to SEQ ID NO: 1022122
uugcaaaccauuguuucau

SEQ ID NO: 1022124 - RNA, 19 nt, Artificial Sequence
  Description of Artificial Sequence: Synthetic oligonucleotide
  Sense strand starting at position 581 of SEQ ID NO: 914675
acuggacauuaugcaauua

SEQ ID NO: 1022125 - RNA, 19 nt, Artificial Sequence
  Description of Artificial Sequence: Synthetic oligonucleotide
  Antisense strand to SEQ ID NO: 1022124
uaauugcauaauguccagu

SEQ ID NO: 1022126 - RNA, 19 nt, Artificial Sequence
  Description of Artificial Sequence: Synthetic oligonucleotide
  Sense strand starting at position 639 of SEQ ID NO: 914675
agcagacuaccuugaggaa

SEQ ID NO: 1022127 - RNA, 19 nt, Artificial Sequence
  Description of Artificial Sequence: Synthetic oligonucleotide
  Antisense strand to SEQ ID NO: 1022126
uuccucaagguagucugcu

SEQ ID NO: 1022128 - RNA, 19 nt, Artificial Sequence
  Description of Artificial Sequence: Synthetic oligonucleotide
  Sense strand starting at position 651 of SEQ ID NO: 914675
ugaggaauuccaggccagu

SEQ ID NO: 1022129 - RNA, 19 nt, Artificial Sequence
  Description of Artificial Sequence: Synthetic oligonucleotide
  Antisense strand to SEQ ID NO: 1022128
acuggccuggaauuccuca

SEQ ID NO: 1022130 - RNA, 19 nt, Artificial Sequence
  Description of Artificial Sequence: Synthetic oligonucleotide
  Sense strand starting at position 834 of SEQ ID NO: 914675
cuguguacugaucagagca

SEQ ID NO: 1022131 - RNA, 19 nt, Artificial Sequence
  Description of Artificial Sequence: Synthetic oligonucleotide
  Antisense strand to SEQ ID NO: 1022130
ugcucugaucaguacacag

SEQ ID NO: 1022132 - RNA, 19 nt, Artificial Sequence
  Description of Artificial Sequence: Synthetic oligonucleotide
  Sense strand starting at position 900 of SEQ ID NO: 914675
gucauagucuaacuuucca

SEQ ID NO: 1022133 - RNA, 19 nt, Artificial Sequence
  Description of Artificial Sequence: Synthetic oligonucleotide
  Antisense strand to SEQ ID NO: 1022132
uggaaaguuagacuaugac

SEQ ID NO: 1022134 - RNA, 19 nt, Artificial Sequence
  Description of Artificial Sequence: Synthetic oligonucleotide
  Sense strand starting at position 972 of SEQ ID NO: 914675
uaaggacuuuggcucagau

SEQ ID NO: 1022135 - RNA, 19 nt, Artificial Sequence
  Description of Artificial Sequence: Synthetic oligonucleotide
  Antisense strand to SEQ ID NO: 1022134
aucugagccaaaguccuua

SEQ ID NO: 1022136 - RNA, 19 nt, Artificial Sequence
  Description of Artificial Sequence: Synthetic oligonucleotide
  Sense strand starting at position 1009 of SEQ ID NO: 914675
gugaauugguuccucuaag

SEQ ID NO: 1022137 - RNA, 19 nt, Artificial Sequence
  Description of Artificial Sequence: Synthetic oligonucleotide
  Antisense strand to SEQ ID NO: 1022136
cuuagaggaaccaauucac

SEQ ID NO: 1022138 - RNA, 19 nt, Artificial Sequence
  Description of Artificial Sequence: Synthetic oligonucleotide
  Sense strand starting at position 1206 of SEQ ID NO: 914675
cccagaaccuaugaaggua

SEQ ID NO: 1022139 - RNA, 19 nt, Artificial Sequence
  Description of Artificial Sequence: Synthetic oligonucleotide
  Antisense strand to SEQ ID NO: 1022138
uaccuucauagguucuggg

SEQ ID NO: 1022140 - RNA, 19 nt, Artificial Sequence
  Description of Artificial Sequence: Synthetic oligonucleotide
  Sense strand starting at position 1218 of SEQ ID NO: 914675
gaagguaaccugugcuuga

SEQ ID NO: 1022141 - RNA, 19 nt, Artificial Sequence
  Description of Artificial Sequence: Synthetic oligonucleotide
  Antisense strand to SEQ ID NO: 1022140
ucaagcacagguuaccuuc

SEQ ID NO: 1022142 - RNA, 19 nt, Artificial Sequence
  Description of Artificial Sequence: Synthetic oligonucleotide
  Sense strand starting at position 1324 of SEQ ID NO: 914675
ccugaauccuugcugauua

SEQ ID NO: 1022143 - RNA, 19 nt, Artificial Sequence
  Description of Artificial Sequence: Synthetic oligonucleotide
  Antisense strand to SEQ ID NO: 1022142
uaaucagcaaggauucagg

SEQ ID NO: 1022144 - RNA, 19 nt, Artificial Sequence
  Description of Artificial Sequence: Synthetic oligonucleotide
  Sense strand starting at position 1685 of SEQ ID NO: 914675
cccagaugaucucuaagua

SEQ ID NO: 1022145 - RNA, 19 nt, Artificial Sequence
  Description of Artificial Sequence: Synthetic oligonucleotide
  Antisense strand to SEQ ID NO: 1022144
uacuuagagaucaucuggg

SEQ ID NO: 1022146 - RNA, 19 nt, Artificial Sequence
  Description of Artificial Sequence: Synthetic oligonucleotide
  Sense strand starting at position 1726 of SEQ ID NO: 914675
ggccuuugaagcugagaca

SEQ ID NO: 1022147 - RNA, 19 nt, Artificial Sequence
  Description of Artificial Sequence: Synthetic oligonucleotide
  Antisense strand to SEQ ID NO: 1022146
ugucucagcuucaaaggcc

SEQ ID NO: 1022148 - RNA, 19 nt, Artificial Sequence
  Description of Artificial Sequence: Synthetic oligonucleotide
  Sense strand starting at position 2088 of SEQ ID NO: 914675
ucucucauuggauguaaau

SEQ ID NO: 1022149 - RNA, 19 nt, Artificial Sequence
  Description of Artificial Sequence: Synthetic oligonucleotide
  Antisense strand to SEQ ID NO: 1022148
auuuacauccaaugagaga

SEQ ID NO: 1022150 - RNA, 19 nt, Artificial Sequence
  Description of Artificial Sequence: Synthetic oligonucleotide
  Sense strand starting at position 2113 of SEQ ID NO: 914675
ucucucauccacuguggaa

SEQ ID NO: 1022151 - RNA, 19 nt, Artificial Sequence
  Description of Artificial Sequence: Synthetic oligonucleotide
  Antisense strand to SEQ ID NO: 1022150
uuccacaguggaugagaga

SEQ ID NO: 1022152 - RNA, 19 nt, Artificial Sequence
  Description of Artificial Sequence: Synthetic oligonucleotide
  Sense strand starting at position 2247 of SEQ ID NO: 914675
cccuauuugucuggaugac

SEQ ID NO: 1022153 - RNA, 19 nt, Artificial Sequence
  Description of Artificial Sequence: Synthetic oligonucleotide
  Antisense strand to SEQ ID NO: 1022152
gucauccagacaaauaggg

SEQ ID NO: 1022154 - RNA, 19 nt, Artificial Sequence
  Description of Artificial Sequence: Synthetic oligonucleotide
  Sense strand starting at position 2318 of SEQ ID NO: 914675
ucccgugucccaggauaaa

SEQ ID NO: 1022155 - RNA, 19 nt, Artificial Sequence
  Description of Artificial Sequence: Synthetic oligonucleotide
  Antisense strand to SEQ ID NO: 1022154
uuuauccugggacacggga

SEQ ID NO: 1022156 - RNA, 19 nt, Artificial Sequence
  Description of Artificial Sequence: Synthetic oligonucleotide
  Sense strand starting at position 2515 of SEQ ID NO: 914675
gcgaauagcccgccaaguu

SEQ ID NO: 1022157 - RNA, 19 nt, Artificial Sequence
  Description of Artificial Sequence: Synthetic oligonucleotide
  Antisense strand to SEQ ID NO: 1022156
aacuuggcgggcuauucgc

SEQ ID NO: 1022158 - RNA, 19 nt, Artificial Sequence
  Description of Artificial Sequence: Synthetic oligonucleotide
  Sense strand starting at position 2633 of SEQ ID NO: 914675
agagcuccacccggauaau

SEQ ID NO: 1022159 - RNA, 19 nt, Artificial Sequence
  Description of Artificial Sequence: Synthetic oligonucleotide
  Antisense strand to SEQ ID NO: 1022158
auuauccggguggagcucu

SEQ ID NO: 1022160 - RNA, 19 nt, Artificial Sequence
  Description of Artificial Sequence: Synthetic oligonucleotide
  Sense strand starting at position 2701 of SEQ ID NO: 914675
cgcgucugcgugaaaucua

SEQ ID NO: 1022161 - RNA, 19 nt, Artificial Sequence
  Description of Artificial Sequence: Synthetic oligonucleotide
  Antisense strand to SEQ ID NO: 1022160
uagauuucacgcagacgcg

SEQ ID NO: 1022162 - RNA, 19 nt, Artificial Sequence
  Description of Artificial Sequence: Synthetic oligonucleotide
  Sense strand starting at position 2722 of SEQ ID NO: 914675
gggacuuggccugaucaca

SEQ ID NO: 1022163 - RNA, 19 nt, Artificial Sequence
  Description of Artificial Sequence: Synthetic oligonucleotide
  Antisense strand to SEQ ID NO: 1022162
ugugaucaggccaaguccc

SEQ ID NO: 1022164 - RNA, 19 nt, Artificial Sequence
  Description of Artificial Sequence: Synthetic oligonucleotide
  Sense strand starting at position 2840 of SEQ ID NO: 914675
uacugagugcuguacuuua

SEQ ID NO: 1022165 - RNA, 19 nt, Artificial Sequence
  Description of Artificial Sequence: Synthetic oligonucleotide
  Antisense strand to SEQ ID NO: 1022164
uaaaguacagcacucagua

SEQ ID NO: 1022166 - RNA, 19 nt, Artificial Sequence
  Description of Artificial Sequence: Synthetic oligonucleotide
  Sense strand starting at position 2958 of SEQ ID NO: 914675
acgucuuacugucugagaa

SEQ ID NO: 1022167 - RNA, 19 nt, Artificial Sequence
  Description of Artificial Sequence: Synthetic oligonucleotide
  Antisense strand to SEQ ID NO: 1022166
uucucagacaguaagacgu

SEQ ID NO: 1022168 - RNA, 19 nt, Artificial Sequence
  Description of Artificial Sequence: Synthetic oligonucleotide
  Sense strand starting at position 2959 of SEQ ID NO: 914675
cgucuuacugucugagaag

SEQ ID NO: 1022169 - RNA, 19 nt, Artificial Sequence
  Description of Artificial Sequence: Synthetic oligonucleotide
  Antisense strand to SEQ ID NO: 1022168
cuucucagacaguaagacg

SEQ ID NO: 1022170 - RNA, 19 nt, Artificial Sequence
  Description of Artificial Sequence: Synthetic oligonucleotide
  Sense strand starting at position 2987 of SEQ ID NO: 914675
augagaugccaucaguauu

SEQ ID NO: 1022171 - RNA, 19 nt, Artificial Sequence
  Description of Artificial Sequence: Synthetic oligonucleotide
  Antisense strand to SEQ ID NO: 1022170
aauacugauggcaucucau

SEQ ID NO: 1022172 - RNA, 19 nt, Artificial Sequence
  Description of Artificial Sequence: Synthetic oligonucleotide
  Sense strand starting at position 2997 of SEQ ID NO: 914675
aucaguauuggguguuauu

SEQ ID NO: 1022173 - RNA, 19 nt, Artificial Sequence
  Description of Artificial Sequence: Synthetic oligonucleotide
  Antisense strand to SEQ ID NO: 1022172
aauaacacccaauacugau

SEQ ID NO: 1022174 - RNA, 19 nt, Artificial Sequence
  Description of Artificial Sequence: Synthetic oligonucleotide
  Sense strand starting at position 3203 of SEQ ID NO: 914675
ucuugagguguucggaaag

SEQ ID NO: 1022175 - RNA, 19 nt, Artificial Sequence
  Description of Artificial Sequence: Synthetic oligonucleotide
  Antisense strand to SEQ ID NO: 1022174
cuuuccgaacaccucaaga

SEQ ID NO: 1022176 - RNA, 19 nt, Artificial Sequence
  Description of Artificial Sequence: Synthetic oligonucleotide
  Sense strand starting at position 3293 of SEQ ID NO: 914675
uuucuuaaaucgcuguuau

SEQ ID NO: 1022177 - RNA, 19 nt, Artificial Sequence
  Description of Artificial Sequence: Synthetic oligonucleotide
  Antisense strand to SEQ ID NO: 1022176
auaacagcgauuuaagaaa

SEQ ID NO: 1022178 - RNA, 19 nt, Artificial Sequence
  Description of Artificial Sequence: Synthetic oligonucleotide
  Sense strand starting at position 3294 of SEQ ID NO: 914675
uucuuaaaucgcuguuauu

SEQ ID NO: 1022179 - RNA, 19 nt, Artificial Sequence
  Description of Artificial Sequence: Synthetic oligonucleotide
  Antisense strand to SEQ ID NO: 1022178
aauaacagcgauuuaagaa

SEQ ID NO: 1022180 - RNA, 19 nt, Artificial Sequence
  Description of Artificial Sequence: Synthetic oligonucleotide
  Sense strand starting at position 3450 of SEQ ID NO: 914675
aaugguguugucgaaauug

SEQ ID NO: 1022181 - RNA, 19 nt, Artificial Sequence
  Description of Artificial Sequence: Synthetic oligonucleotide
  Antisense strand to SEQ ID NO: 1022180
caauuucgacaacaccauu

SEQ ID NO: 1022182 - RNA, 19 nt, Artificial Sequence
  Description of Artificial Sequence: Synthetic oligonucleotide
  Sense strand starting at position 3458 of SEQ ID NO: 914675
ugucgaaauugccugacau

SEQ ID NO: 1022183 - RNA, 19 nt, Artificial Sequence
  Description of Artificial Sequence: Synthetic oligonucleotide
  Antisense strand to SEQ ID NO: 1022182
augucaggcaauuucgaca

SEQ ID NO: 1022184 - RNA, 19 nt, Artificial Sequence
  Description of Artificial Sequence: Synthetic oligonucleotide
  Sense strand starting at position 3459 of SEQ ID NO: 914675
gucgaaauugccugacauc

SEQ ID NO: 1022185 - RNA, 19 nt, Artificial Sequence
  Description of Artificial Sequence: Synthetic oligonucleotide
  Antisense strand to SEQ ID NO: 1022184
gaugucaggcaauuucgac

SEQ ID NO: 1022186 - RNA, 19 nt, Artificial Sequence
  Description of Artificial Sequence: Synthetic oligonucleotide
  Sense strand starting at position 3460 of SEQ ID NO: 914675
ucgaaauugccugacauca

SEQ ID NO: 1022187 - RNA, 19 nt, Artificial Sequence
  Description of Artificial Sequence: Synthetic oligonucleotide
  Antisense strand to SEQ ID NO: 1022186
ugaugucaggcaauuucga

SEQ ID NO: 1022188 - RNA, 19 nt, Artificial Sequence
  Description of Artificial Sequence: Synthetic oligonucleotide
  Sense strand starting at position 3633 of SEQ ID NO: 914675
gguaauauacccugacaua

SEQ ID NO: 1022189 - RNA, 19 nt, Artificial Sequence
  Description of Artificial Sequence: Synthetic oligonucleotide
  Antisense strand to SEQ ID NO: 1022188
uaugucaggguauauuacc

SEQ ID NO: 1022190 - RNA, 19 nt, Artificial Sequence
  Description of Artificial Sequence: Synthetic oligonucleotide
  Sense strand starting at position 3831 of SEQ ID NO: 914675
gggccagcccuuggaauuu

SEQ ID NO: 1022191 - RNA, 19 nt, Artificial Sequence
  Description of Artificial Sequence: Synthetic oligonucleotide
  Antisense strand to SEQ ID NO: 1022190
aaauuccaagggcuggccc

SEQ ID NO: 1022192 - RNA, 19 nt, Artificial Sequence
  Description of Artificial Sequence: Synthetic oligonucleotide
  Sense strand starting at position 18 of SEQ ID NO: 914676
ucuugaaugccauaagguu

SEQ ID NO: 1022193 - RNA, 19 nt, Artificial Sequence
  Description of Artificial Sequence: Synthetic oligonucleotide
  Antisense strand to SEQ ID NO: 1022192
aaccuuauggcauucaaga

SEQ ID NO: 1022194 - RNA, 19 nt, Artificial Sequence
  Description of Artificial Sequence: Synthetic oligonucleotide
  Sense strand starting at position 386 of SEQ ID NO: 914676
ugccuuauaagagaaacgu

SEQ ID NO: 1022195 - RNA, 19 nt, Artificial Sequence
  Description of Artificial Sequence: Synthetic oligonucleotide
  Antisense strand to SEQ ID NO: 1022194
acguuucucuuauaaggca

SEQ ID NO: 1022196 - RNA, 19 nt, Artificial Sequence
  Description of Artificial Sequence: Synthetic oligonucleotide
  Sense strand starting at position 547 of SEQ ID NO: 914676
agauaucgaguuuacuaug

SEQ ID NO: 1022197 - RNA, 19 nt, Artificial Sequence
  Description of Artificial Sequence: Synthetic oligonucleotide
  Antisense strand to SEQ ID NO: 1022196
cauaguaaacucgauaucu

SEQ ID NO: 1022198 - RNA, 19 nt, Artificial Sequence
  Description of Artificial Sequence: Synthetic oligonucleotide
  Sense strand starting at position 912 of SEQ ID NO: 914676
uugagucuucuaugaguag

SEQ ID NO: 1022199 - RNA, 19 nt, Artificial Sequence
  Description of Artificial Sequence: Synthetic oligonucleotide
  Antisense strand to SEQ ID NO: 1022198
cuacucauagaagacucaa

SEQ ID NO: 1022200 - RNA, 19 nt, Artificial Sequence
  Description of Artificial Sequence: Synthetic oligonucleotide
  Sense strand starting at position 981 of SEQ ID NO: 914676
cccuuuaggagguguagaa

SEQ ID NO: 1022201 - RNA, 19 nt, Artificial Sequence
  Description of Artificial Sequence: Synthetic oligonucleotide
  Antisense strand to SEQ ID NO: 1022200
uucuacaccuccuaaaggg

SEQ ID NO: 1022202 - RNA, 19 nt, Artificial Sequence
  Description of Artificial Sequence: Synthetic oligonucleotide
  Sense strand starting at position 1076 of SEQ ID NO: 914676
uccuucuaucgucacagau

SEQ ID NO: 1022203 - RNA, 19 nt, Artificial Sequence
  Description of Artificial Sequence: Synthetic oligonucleotide
  Antisense strand to SEQ ID NO: 1022202
aucugugacgauagaagga

SEQ ID NO: 1022204 - RNA, 19 nt, Artificial Sequence
  Description of Artificial Sequence: Synthetic oligonucleotide
  Sense strand starting at position 1105 of SEQ ID NO: 914676
ucaggacauucuuucugaa

SEQ ID NO: 1022205 - RNA, 19 nt, Artificial Sequence
  Description of Artificial Sequence: Synthetic oligonucleotide
  Antisense strand to SEQ ID NO: 1022204
uucagaaagaauguccuga

SEQ ID NO: 1022206 - RNA, 19 nt, Artificial Sequence
  Description of Artificial Sequence: Synthetic oligonucleotide
  Sense strand starting at position 1107 of SEQ ID NO: 914676
aggacauucuuucugaacu

SEQ ID NO: 1022207 - RNA, 19 nt, Artificial Sequence
  Description of Artificial Sequence: Synthetic oligonucleotide
  Antisense strand to SEQ ID NO: 1022206
aguucagaaagaauguccu

SEQ ID NO: 1022208 - RNA, 19 nt, Artificial Sequence
  Description of Artificial Sequence: Synthetic oligonucleotide
  Sense strand starting at position 1144 of SEQ ID NO: 914676
uaacaaauggcagguauau

SEQ ID NO: 1022209 - RNA, 19 nt, Artificial Sequence
  Description of Artificial Sequence: Synthetic oligonucleotide
  Antisense strand to SEQ ID NO: 1022208
auauaccugccauuuguua

SEQ ID NO: 1022210 - RNA, 19 nt, Artificial Sequence
  Description of Artificial Sequence: Synthetic oligonucleotide
  Sense strand starting at position 1452 of SEQ ID NO: 914676
gugcuuccuaaguaggaaa

SEQ ID NO: 1022211 - RNA, 19 nt, Artificial Sequence
  Description of Artificial Sequence: Synthetic oligonucleotide
  Antisense strand to SEQ ID NO: 1022210
uuuccuacuuaggaagcac

SEQ ID NO: 1022212 - RNA, 19 nt, Artificial Sequence
  Description of Artificial Sequence: Synthetic oligonucleotide
  Sense strand starting at position 1454 of SEQ ID NO: 914676
gcuuccuaaguaggaaaua

SEQ ID NO: 1022213 - RNA, 19 nt, Artificial Sequence
  Description of Artificial Sequence: Synthetic oligonucleotide
  Antisense strand to SEQ ID NO: 1022212
uauuuccuacuuaggaagc

SEQ ID NO: 1022214 - RNA, 19 nt, Artificial Sequence
  Description of Artificial Sequence: Synthetic oligonucleotide
  Sense strand starting at position 1501 of SEQ ID NO: 914676
ggccgucauccuuaggaga

SEQ ID NO: 1022215 - RNA, 19 nt, Artificial Sequence
  Description of Artificial Sequence: Synthetic oligonucleotide
  Antisense strand to SEQ ID NO: 1022214
ucuccuaaggaugacggcc

SEQ ID NO: 1022216 - RNA, 19 nt, Artificial Sequence
  Description of Artificial Sequence: Synthetic oligonucleotide
  Sense strand starting at position 1776 of SEQ ID NO: 914676
ggagaaacguuucucagac

SEQ ID NO: 1022217 - RNA, 19 nt, Artificial Sequence
  Description of Artificial Sequence: Synthetic oligonucleotide
  Antisense strand to SEQ ID NO: 1022216
gucugagaaacguuucucc

SEQ ID NO: 1022218 - RNA, 19 nt, Artificial Sequence
  Description of Artificial Sequence: Synthetic oligonucleotide
  Sense strand starting at position 2203 of SEQ ID NO: 914676
ggccauaaaugcccagaga

SEQ ID NO: 1022219 - RNA, 19 nt, Artificial Sequence
  Description of Artificial Sequence: Synthetic oligonucleotide
  Antisense strand to SEQ ID NO: 1022218
ucucugggcauuuauggcc

SEQ ID NO: 1022220 - RNA, 19 nt, Artificial Sequence
  Description of Artificial Sequence: Synthetic oligonucleotide
  Sense strand starting at position 2204 of SEQ ID NO: 914676
gccauaaaugcccagagau

SEQ ID NO: 1022221 - RNA, 19 nt, Artificial Sequence
  Description of Artificial Sequence: Synthetic oligonucleotide
  Antisense strand to SEQ ID NO: 1022220
aucucugggcauuuauggc

SEQ ID NO: 1022222 - RNA, 19 nt, Artificial Sequence
  Description of Artificial Sequence: Synthetic oligonucleotide
  Sense strand starting at position 2347 of SEQ ID NO: 914676
aggguccucugagugaaag

SEQ ID NO: 1022223 - RNA, 19 nt, Artificial Sequence
  Description of Artificial Sequence: Synthetic oligonucleotide
  Antisense strand to SEQ ID NO: 1022222
cuuucacucagaggacccu

SEQ ID NO: 1022224 - RNA, 19 nt, Artificial Sequence
  Description of Artificial Sequence: Synthetic oligonucleotide
  Sense strand starting at position 2506 of SEQ ID NO: 914676
agguuagacagauggguau

SEQ ID NO: 1022225 - RNA, 19 nt, Artificial Sequence
  Description of Artificial Sequence: Synthetic oligonucleotide
  Antisense strand to SEQ ID NO: 1022224
auacccaucugucuaaccu

SEQ ID NO: 1022226 - RNA, 19 nt, Artificial Sequence
  Description of Artificial Sequence: Synthetic oligonucleotide
  Sense strand starting at position 2557 of SEQ ID NO: 914676
gucugaugcaaagauaguc

SEQ ID NO: 1022227 - RNA, 19 nt, Artificial Sequence
  Description of Artificial Sequence: Synthetic oligonucleotide
  Antisense strand to SEQ ID NO: 1022226
gacuaucuuugcaucagac

SEQ ID NO: 1022228 - RNA, 19 nt, Artificial Sequence
  Description of Artificial Sequence: Synthetic oligonucleotide
  Sense strand starting at position 2573 of SEQ ID NO: 914676
gucauucccuacucagauu

SEQ ID NO: 1022229 - RNA, 19 nt, Artificial Sequence
  Description of Artificial Sequence: Synthetic oligonucleotide
  Antisense strand to SEQ ID NO: 1022228
aaucugaguagggaaugac

SEQ ID NO: 1022230 - RNA, 19 nt, Artificial Sequence
  Description of Artificial Sequence: Synthetic oligonucleotide
  Sense strand starting at position 2791 of SEQ ID NO: 914676
agaaccuuguggucaucaa

SEQ ID NO: 1022231 - RNA, 19 nt, Artificial Sequence
  Description of Artificial Sequence: Synthetic oligonucleotide
  Antisense strand to SEQ ID NO: 1022230
uugaugaccacaagguucu

SEQ ID NO: 1022232 - RNA, 19 nt, Artificial Sequence
  Description of Artificial Sequence: Synthetic oligonucleotide
  Sense strand starting at position 2792 of SEQ ID NO: 914676
gaaccuuguggucaucaau

SEQ ID NO: 1022233 - RNA, 19 nt, Artificial Sequence
  Description of Artificial Sequence: Synthetic oligonucleotide
  Antisense strand to SEQ ID NO: 1022232
auugaugaccacaagguuc

SEQ ID NO: 1022234 - RNA, 19 nt, Artificial Sequence
  Description of Artificial Sequence: Synthetic oligonucleotide
  Sense strand starting at position 2795 of SEQ ID NO: 914676
ccuuguggucaucaauaag

SEQ ID NO: 1022235 - RNA, 19 nt, Artificial Sequence
  Description of Artificial Sequence: Synthetic oligonucleotide
  Antisense strand to SEQ ID NO: 1022234
cuuauugaugaccacaagg

SEQ ID NO: 1022236 - RNA, 19 nt, Artificial Sequence
  Description of Artificial Sequence: Synthetic oligonucleotide
  Sense strand starting at position 3049 of SEQ ID NO: 914676
guagaauacgcugugugca

SEQ ID NO: 1022237 - RNA, 19 nt, Artificial Sequence
  Description of Artificial Sequence: Synthetic oligonucleotide
  Antisense strand to SEQ ID NO: 1022236
ugcacacagcguauucuac

SEQ ID NO: 1022238 - RNA, 19 nt, Artificial Sequence
  Description of Artificial Sequence: Synthetic oligonucleotide
  Sense strand starting at position 3073 of SEQ ID NO: 914676
cagggaucgcuguagagau

SEQ ID NO: 1022239 - RNA, 19 nt, Artificial Sequence
  Description of Artificial Sequence: Synthetic oligonucleotide
  Antisense strand to SEQ ID NO: 1022238
aucucuacagcgaucccug

SEQ ID NO: 1022240 - RNA, 19 nt, Artificial Sequence
  Description of Artificial Sequence: Synthetic oligonucleotide
  Sense strand starting at position 3075 of SEQ ID NO: 914676
gggaucgcuguagagauau

SEQ ID NO: 1022241 - RNA, 19 nt, Artificial Sequence
  Description of Artificial Sequence: Synthetic oligonucleotide
  Antisense strand to SEQ ID NO: 1022240
auaucucuacagcgauccc

SEQ ID NO: 1022242 - RNA, 19 nt, Artificial Sequence
  Description of Artificial Sequence: Synthetic oligonucleotide
  Sense strand starting at position 3105 of SEQ ID NO: 914676
gugguucuagacuaaaggu

SEQ ID NO: 1022243 - RNA, 19 nt, Artificial Sequence
  Description of Artificial Sequence: Synthetic oligonucleotide
  Antisense strand to SEQ ID NO: 1022242
accuuuagucuagaaccac

SEQ ID NO: 1022244 - RNA, 19 nt, Artificial Sequence
  Description of Artificial Sequence: Synthetic oligonucleotide
  Sense strand starting at position 3208 of SEQ ID NO: 914676
uauguuggaguauauguaa

SEQ ID NO: 1022245 - RNA, 19 nt, Artificial Sequence
  Description of Artificial Sequence: Synthetic oligonucleotide
  Antisense strand to SEQ ID NO: 1022244
uuacauauacuccaacaua

SEQ ID NO: 1022246 - RNA, 19 nt, Artificial Sequence
  Description of Artificial Sequence: Synthetic oligonucleotide
  Sense strand starting at position 3211 of SEQ ID NO: 914676
guuggaguauauguaacau

SEQ ID NO: 1022247 - RNA, 19 nt, Artificial Sequence
  Description of Artificial Sequence: Synthetic oligonucleotide
  Antisense strand to SEQ ID NO: 1022246
auguuacauauacuccaac

SEQ ID NO: 1022248 - RNA, 19 nt, Artificial Sequence
  Description of Artificial Sequence: Synthetic oligonucleotide
  Sense strand starting at position 3337 of SEQ ID NO: 914676
aaaugcauuugugaaagag

SEQ ID NO: 1022249 - RNA, 19 nt, Artificial Sequence
  Description of Artificial Sequence: Synthetic oligonucleotide
  Antisense strand to SEQ ID NO: 1022248
cucuuucacaaaugcauuu

SEQ ID NO: 1022250 - RNA, 19 nt, Artificial Sequence
  Description of Artificial Sequence: Synthetic oligonucleotide
  Sense strand starting at position 3405 of SEQ ID NO: 914676
cggagauaguuguucacaa

SEQ ID NO: 1022251 - RNA, 19 nt, Artificial Sequence
  Description of Artificial Sequence: Synthetic oligonucleotide
  Antisense strand to SEQ ID NO: 1022250
uugugaacaacuaucuccg

SEQ ID NO: 1022252 - RNA, 19 nt, Artificial Sequence
  Description of Artificial Sequence: Synthetic oligonucleotide
  Sense strand starting at position 3566 of SEQ ID NO: 914676
agagaaguaauguguccaa

SEQ ID NO: 1022253 - RNA, 19 nt, Artificial Sequence
  Description of Artificial Sequence: Synthetic oligonucleotide
  Antisense strand to SEQ ID NO: 1022252
uuggacacauuacuucucu

SEQ ID NO: 1022254 - RNA, 19 nt, Artificial Sequence
  Description of Artificial Sequence: Synthetic oligonucleotide
  Sense strand starting at position 3664 of SEQ ID NO: 914676
cuuauuuaaugcuucucga

SEQ ID NO: 1022255 - RNA, 19 nt, Artificial Sequence
  Description of Artificial Sequence: Synthetic oligonucleotide
  Antisense strand to SEQ ID NO: 1022254
ucgagaagcauuaaauaag

SEQ ID NO: 1022256 - RNA, 19 nt, Artificial Sequence
  Description of Artificial Sequence: Synthetic oligonucleotide
  Sense strand starting at position 3720 of SEQ ID NO: 914676
ccacaugcucuagaauggu

SEQ ID NO: 1022257 - RNA, 19 nt, Artificial Sequence
  Description of Artificial Sequence: Synthetic oligonucleotide
  Antisense strand to SEQ ID NO: 1022256
accauucuagagcaugugg

SEQ ID NO: 1022258 - RNA, 19 nt, Artificial Sequence
  Description of Artificial Sequence: Synthetic oligonucleotide
  Sense strand starting at position 3788 of SEQ ID NO: 914676
ugcagauucugacugagua

SEQ ID NO: 1022259 - RNA, 19 nt, Artificial Sequence
  Description of Artificial Sequence: Synthetic oligonucleotide
  Antisense strand to SEQ ID NO: 1022258
uacucagucagaaucugca

SEQ ID NO: 1022260 - RNA, 19 nt, Artificial Sequence
  Description of Artificial Sequence: Synthetic oligonucleotide
  Sense strand starting at position 3789 of SEQ ID NO: 914676
gcagauucugacugaguag

SEQ ID NO: 1022261 - RNA, 19 nt, Artificial Sequence
  Description of Artificial Sequence: Synthetic oligonucleotide
  Antisense strand to SEQ ID NO: 1022260
cuacucagucagaaucugc

SEQ ID NO: 1022262 - RNA, 19 nt, Artificial Sequence
  Description of Artificial Sequence: Synthetic oligonucleotide
  Sense strand starting at position 3792 of SEQ ID NO: 914676
gauucugacugaguagucu

SEQ ID NO: 1022263 - RNA, 19 nt, Artificial Sequence
  Description of Artificial Sequence: Synthetic oligonucleotide
  Antisense strand to SEQ ID NO: 1022262
agacuacucagucagaauc

SEQ ID NO: 1022264 - RNA, 19 nt, Artificial Sequence
  Description of Artificial Sequence: Synthetic oligonucleotide
  Sense strand starting at position 3798 of SEQ ID NO: 914676
gacugaguagucuagguug

SEQ ID NO: 1022265 - RNA, 19 nt, Artificial Sequence
  Description of Artificial Sequence: Synthetic oligonucleotide
  Antisense strand to SEQ ID NO: 1022264
caaccuagacuacucaguc

SEQ ID NO: 1022266 - RNA, 19 nt, Artificial Sequence
  Description of Artificial Sequence: Synthetic oligonucleotide
  Sense strand starting at position 3801 of SEQ ID NO: 914676
ugaguagucuagguugaga

SEQ ID NO: 1022267 - RNA, 19 nt, Artificial Sequence
  Description of Artificial Sequence: Synthetic oligonucleotide
  Antisense strand to SEQ ID NO: 1022266
ucucaaccuagacuacuca

SEQ ID NO: 1022268 - RNA, 19 nt, Artificial Sequence
  Description of Artificial Sequence: Synthetic oligonucleotide
  Sense strand starting at position 3812 of SEQ ID NO: 914676
gguugagagccugagauuc

SEQ ID NO: 1022269 - RNA, 19 nt, Artificial Sequence
  Description of Artificial Sequence: Synthetic oligonucleotide
  Antisense strand to SEQ ID NO: 1022268
gaaucucaggcucucaacc

SEQ ID NO: 1022270 - RNA, 19 nt, Artificial Sequence
  Description of Artificial Sequence: Synthetic oligonucleotide
  Sense strand starting at position 3907 of SEQ ID NO: 914676
auugacaguuuauccauua

SEQ ID NO: 1022271 - RNA, 19 nt, Artificial Sequence
  Description of Artificial Sequence: Synthetic oligonucleotide
  Antisense strand to SEQ ID NO: 1022270
uaauggauaaacugucaau

SEQ ID NO: 1022272 - RNA, 19 nt, Artificial Sequence
  Description of Artificial Sequence: Synthetic oligonucleotide
  Sense strand starting at position 172 of SEQ ID NO: 914677
ccauuacugcaucaacgaa

SEQ ID NO: 1022273 - RNA, 19 nt, Artificial Sequence
  Description of Artificial Sequence: Synthetic oligonucleotide
  Antisense strand to SEQ ID NO: 1022272
uucguugaugcaguaaugg

SEQ ID NO: 1022274 - RNA, 19 nt, Artificial Sequence
  Description of Artificial Sequence: Synthetic oligonucleotide
  Sense strand starting at position 378 of SEQ ID NO: 914677
gcaaguugccaaguguucu

SEQ ID NO: 1022275 - RNA, 19 nt, Artificial Sequence
  Description of Artificial Sequence: Synthetic oligonucleotide
  Antisense strand to SEQ ID NO: 1022274
agaacacuuggcaacuugc

SEQ ID NO: 1022276 - RNA, 19 nt, Artificial Sequence
  Description of Artificial Sequence: Synthetic oligonucleotide
  Sense strand starting at position 390 of SEQ ID NO: 914677
guguucuaccaauauggag

SEQ ID NO: 1022277 - RNA, 19 nt, Artificial Sequence
  Description of Artificial Sequence: Synthetic oligonucleotide
  Antisense strand to SEQ ID NO: 1022276
cuccauauugguagaacac

SEQ ID NO: 1022278 - RNA, 19 nt, Artificial Sequence
  Description of Artificial Sequence: Synthetic oligonucleotide
  Sense strand starting at position 497 of SEQ ID NO: 914677
gacugaggcugucuaauuc

SEQ ID NO: 1022279 - RNA, 19 nt, Artificial Sequence
  Description of Artificial Sequence: Synthetic oligonucleotide
  Antisense strand to SEQ ID NO: 1022278
gaauuagacagccucaguc

SEQ ID NO: 1022280 - RNA, 19 nt, Artificial Sequence
  Description of Artificial Sequence: Synthetic oligonucleotide
  Sense strand starting at position 504 of SEQ ID NO: 914677
gcugucuaauucucaggaa

SEQ ID NO: 1022281 - RNA, 19 nt, Artificial Sequence
  Description of Artificial Sequence: Synthetic oligonucleotide
  Antisense strand to SEQ ID NO: 1022280
uuccugagaauuagacagc

SEQ ID NO: 1022282 - RNA, 19 nt, Artificial Sequence
  Description of Artificial Sequence: Synthetic oligonucleotide
  Sense strand starting at position 557 of SEQ ID NO: 914677
agacuuaacucuuucugag

SEQ ID NO: 1022283 - RNA, 19 nt, Artificial Sequence
  Description of Artificial Sequence: Synthetic oligonucleotide
  Antisense strand to SEQ ID NO: 1022282
cucagaaagaguuaagucu

SEQ ID NO: 1022284 - RNA, 19 nt, Artificial Sequence
  Description of Artificial Sequence: Synthetic oligonucleotide
  Sense strand starting at position 639 of SEQ ID NO: 914677
ugugaaaguggccauuauc

SEQ ID NO: 1022285 - RNA, 19 nt, Artificial Sequence
  Description of Artificial Sequence: Synthetic oligonucleotide
  Antisense strand to SEQ ID NO: 1022284
gauaauggccacuuucaca

SEQ ID NO: 1022286 - RNA, 19 nt, Artificial Sequence
  Description of Artificial Sequence: Synthetic oligonucleotide
  Sense strand starting at position 642 of SEQ ID NO: 914677
gaaaguggccauuaucacu

SEQ ID NO: 1022287 - RNA, 19 nt, Artificial Sequence
  Description of Artificial Sequence: Synthetic oligonucleotide
  Antisense strand to SEQ ID NO: 1022286
agugauaauggccacuuuc

SEQ ID NO: 1022288 - RNA, 19 nt, Artificial Sequence
  Description of Artificial Sequence: Synthetic oligonucleotide
  Sense strand starting at position 647 of SEQ ID NO: 914677
uggccauuaucacugaaug

SEQ ID NO: 1022289 - RNA, 19 nt, Artificial Sequence
  Description of Artificial Sequence: Synthetic oligonucleotide
  Antisense strand to SEQ ID NO: 1022288
cauucagugauaauggcca

SEQ ID NO: 1022290 - RNA, 19 nt, Artificial Sequence
  Description of Artificial Sequence: Synthetic oligonucleotide
  Sense strand starting at position 801 of SEQ ID NO: 914677
guaucuugagacugaugau

SEQ ID NO: 1022291 - RNA, 19 nt, Artificial Sequence
  Description of Artificial Sequence: Synthetic oligonucleotide
  Antisense strand to SEQ ID NO: 1022290
aucaucagucucaagauac

SEQ ID NO: 1022292 - RNA, 19 nt, Artificial Sequence
  Description of Artificial Sequence: Synthetic oligonucleotide
  Sense strand starting at position 1057 of SEQ ID NO: 914677
ggaauaagguuguccagaa

SEQ ID NO: 1022293 - RNA, 19 nt, Artificial Sequence
  Description of Artificial Sequence: Synthetic oligonucleotide
  Antisense strand to SEQ ID NO: 1022292
uucuggacaaccuuauucc

SEQ ID NO: 1022294 - RNA, 19 nt, Artificial Sequence
  Description of Artificial Sequence: Synthetic oligonucleotide
  Sense strand starting at position 1058 of SEQ ID NO: 914677
gaauaagguuguccagaag

SEQ ID NO: 1022295 - RNA, 19 nt, Artificial Sequence
  Description of Artificial Sequence: Synthetic oligonucleotide
  Antisense strand to SEQ ID NO: 1022294
cuucuggacaaccuuauuc

SEQ ID NO: 1022296 - RNA, 19 nt, Artificial Sequence
  Description of Artificial Sequence: Synthetic oligonucleotide
  Sense strand starting at position 1061 of SEQ ID NO: 914677
uaagguuguccagaagcaa

SEQ ID NO: 1022297 - RNA, 19 nt, Artificial Sequence
  Description of Artificial Sequence: Synthetic oligonucleotide
  Antisense strand to SEQ ID NO: 1022296
uugcuucuggacaaccuua

SEQ ID NO: 1022298 - RNA, 19 nt, Artificial Sequence
  Description of Artificial Sequence: Synthetic oligonucleotide
  Sense strand starting at position 1170 of SEQ ID NO: 914677
acugaaguuucugugauua

SEQ ID NO: 1022299 - RNA, 19 nt, Artificial Sequence
  Description of Artificial Sequence: Synthetic oligonucleotide
  Antisense strand to SEQ ID NO: 1022298
uaaucacagaaacuucagu

SEQ ID NO: 1022300 - RNA, 19 nt, Artificial Sequence
  Description of Artificial Sequence: Synthetic oligonucleotide
  Sense strand starting at position 1180 of SEQ ID NO: 914677
cugugauuacucuguugaa

SEQ ID NO: 1022301 - RNA, 19 nt, Artificial Sequence
  Description of Artificial Sequence: Synthetic oligonucleotide
  Antisense strand to SEQ ID NO: 1022300
uucaacagaguaaucacag

SEQ ID NO: 1022302 - RNA, 19 nt, Artificial Sequence
  Description of Artificial Sequence: Synthetic oligonucleotide
  Sense strand starting at position 1181 of SEQ ID NO: 914677
ugugauuacucuguugaag

SEQ ID NO: 1022303 - RNA, 19 nt, Artificial Sequence
  Description of Artificial Sequence: Synthetic oligonucleotide
  Antisense strand to SEQ ID NO: 1022302
cuucaacagaguaaucaca

SEQ ID NO: 1022304 - RNA, 19 nt, Artificial Sequence
  Description of Artificial Sequence: Synthetic oligonucleotide
  Sense strand starting at position 1229 of SEQ ID NO: 914677
auaguacuauugccuauga

SEQ ID NO: 1022305 - RNA, 19 nt, Artificial Sequence
  Description of Artificial Sequence: Synthetic oligonucleotide
  Antisense strand to SEQ ID NO: 1022304
ucauaggcaauaguacuau

SEQ ID NO: 1022306 - RNA, 19 nt, Artificial Sequence
  Description of Artificial Sequence: Synthetic oligonucleotide
  Sense strand starting at position 1231 of SEQ ID NO: 914677
aguacuauugccuaugaca

SEQ ID NO: 1022307 - RNA, 19 nt, Artificial Sequence
  Description of Artificial Sequence: Synthetic oligonucleotide
  Antisense strand to SEQ ID NO: 1022306
ugucauaggcaauaguacu

SEQ ID NO: 1022308 - RNA, 19 nt, Artificial Sequence
  Description of Artificial Sequence: Synthetic oligonucleotide
  Sense strand starting at position 1257 of SEQ ID NO: 914677
uuucucguccuccagaaua

SEQ ID NO: 1022309 - RNA, 19 nt, Artificial Sequence
  Description of Artificial Sequence: Synthetic oligonucleotide
  Antisense strand to SEQ ID NO: 1022308
uauucuggaggacgagaaa

SEQ ID NO: 1022310 - RNA, 19 nt, Artificial Sequence
  Description of Artificial Sequence: Synthetic oligonucleotide
  Sense strand starting at position 1259 of SEQ ID NO: 914677
ucucguccuccagaauaug

SEQ ID NO: 1022311 - RNA, 19 nt, Artificial Sequence
  Description of Artificial Sequence: Synthetic oligonucleotide
  Antisense strand to SEQ ID NO: 1022310
cauauucuggaggacgaga

SEQ ID NO: 1022312 - RNA, 19 nt, Artificial Sequence
  Description of Artificial Sequence: Synthetic oligonucleotide
  Sense strand starting at position 1294 of SEQ ID NO: 914677
agaggagucaggugcacaa

SEQ ID NO: 1022313 - RNA, 19 nt, Artificial Sequence
  Description of Artificial Sequence: Synthetic oligonucleotide
  Antisense strand to SEQ ID NO: 1022312
uugugcaccugacuccucu

SEQ ID NO: 1022314 - RNA, 19 nt, Artificial Sequence
  Description of Artificial Sequence: Synthetic oligonucleotide
  Sense strand starting at position 2620 of SEQ ID NO: 914677
uugagcacuuagucaagga

SEQ ID NO: 1022315 - RNA, 19 nt, Artificial Sequence
  Description of Artificial Sequence: Synthetic oligonucleotide
  Antisense strand to SEQ ID NO: 1022314
uccuugacuaagugcucaa

SEQ ID NO: 1022316 - RNA, 19 nt, Artificial Sequence
  Description of Artificial Sequence: Synthetic oligonucleotide
  Sense strand starting at position 2728 of SEQ ID NO: 914677
guguaauaaguacauuacu

SEQ ID NO: 1022317 - RNA, 19 nt, Artificial Sequence
  Description of Artificial Sequence: Synthetic oligonucleotide
  Antisense strand to SEQ ID NO: 1022316
aguaauguacuuauuacac

SEQ ID NO: 1022318 - RNA, 19 nt, Artificial Sequence
  Description of Artificial Sequence: Synthetic oligonucleotide
  Sense strand starting at position 2771 of SEQ ID NO: 914677
uuagcaugauuugcaugua

SEQ ID NO: 1022319 - RNA, 19 nt, Artificial Sequence
  Description of Artificial Sequence: Synthetic oligonucleotide
  Antisense strand to SEQ ID NO: 1022318
uacaugcaaaucaugcuaa

SEQ ID NO: 1022320 - RNA, 19 nt, Artificial Sequence
  Description of Artificial Sequence: Synthetic oligonucleotide
  Sense strand starting at position 2774 of SEQ ID NO: 914677
gcaugauuugcauguauag

SEQ ID NO: 1022321 - RNA, 19 nt, Artificial Sequence
  Description of Artificial Sequence: Synthetic oligonucleotide
  Antisense strand to SEQ ID NO: 1022320
cuauacaugcaaaucaugc

SEQ ID NO: 1022322 - RNA, 19 nt, Artificial Sequence
  Description of Artificial Sequence: Synthetic oligonucleotide
  Sense strand starting at position 2826 of SEQ ID NO: 914677
ggaagacuuccgggaggug

SEQ ID NO: 1022323 - RNA, 19 nt, Artificial Sequence
  Description of Artificial Sequence: Synthetic oligonucleotide
  Antisense strand to SEQ ID NO: 1022322
caccucccggaagucuucc

SEQ ID NO: 1022324 - RNA, 19 nt, Artificial Sequence
  Description of Artificial Sequence: Synthetic oligonucleotide
  Sense strand starting at position 3290 of SEQ ID NO: 914677
aucauugugcuauaguuau

SEQ ID NO: 1022325 - RNA, 19 nt, Artificial Sequence
  Description of Artificial Sequence: Synthetic oligonucleotide
  Antisense strand to SEQ ID NO: 1022324
auaacuauagcacaaugau

SEQ ID NO: 1022326 - RNA, 19 nt, Artificial Sequence
  Description of Artificial Sequence: Synthetic oligonucleotide
  Sense strand starting at position 3329 of SEQ ID NO: 914677
gaagauggauaaggaauuu

SEQ ID NO: 1022327 - RNA, 19 nt, Artificial Sequence
  Description of Artificial Sequence: Synthetic oligonucleotide
  Antisense strand to SEQ ID NO: 1022326
aaauuccuuauccaucuuc

SEQ ID NO: 1022328 - RNA, 19 nt, Artificial Sequence
  Description of Artificial Sequence: Synthetic oligonucleotide
  Sense strand starting at position 3340 of SEQ ID NO: 914677
aggaauuuaugagaacucu

SEQ ID NO: 1022329 - RNA, 19 nt, Artificial Sequence
  Description of Artificial Sequence: Synthetic oligonucleotide
  Antisense strand to SEQ ID NO: 1022328
agaguucucauaaauuccu

SEQ ID NO: 1022330 - RNA, 19 nt, Artificial Sequence
  Description of Artificial Sequence: Synthetic oligonucleotide
  Sense strand starting at position 3346 of SEQ ID NO: 914677
uuaugagaacucuguauua

SEQ ID NO: 1022331 - RNA, 19 nt, Artificial Sequence
  Description of Artificial Sequence: Synthetic oligonucleotide
  Antisense strand to SEQ ID NO: 1022330
uaauacagaguucucauaa

SEQ ID NO: 1022332 - RNA, 19 nt, Artificial Sequence
  Description of Artificial Sequence: Synthetic oligonucleotide
  Sense strand starting at position 3619 of SEQ ID NO: 914677
uugggaugauagcuauaaa

SEQ ID NO: 1022333 - RNA, 19 nt, Artificial Sequence
  Description of Artificial Sequence: Synthetic oligonucleotide
  Antisense strand to SEQ ID NO: 1022332
uuuauagcuaucaucccaa

SEQ ID NO: 1022334 - RNA, 19 nt, Artificial Sequence
  Description of Artificial Sequence: Synthetic oligonucleotide
  Sense strand starting at position 3692 of SEQ ID NO: 914677
gcugauaaggcccaaacua

SEQ ID NO: 1022335 - RNA, 19 nt, Artificial Sequence
  Description of Artificial Sequence: Synthetic oligonucleotide
  Antisense strand to SEQ ID NO: 1022334
uaguuugggccuuaucagc

SEQ ID NO: 1022336 - RNA, 19 nt, Artificial Sequence
  Description of Artificial Sequence: Synthetic oligonucleotide
  Sense strand starting at position 3754 of SEQ ID NO: 914677
gguagaucaccaugguuug

SEQ ID NO: 1022337 - RNA, 19 nt, Artificial Sequence
  Description of Artificial Sequence: Synthetic oligonucleotide
  Antisense strand to SEQ ID NO: 1022336
caaaccauggugaucuacc

SEQ ID NO: 1022338 - RNA, 19 nt, Artificial Sequence
  Description of Artificial Sequence: Synthetic oligonucleotide
  Sense strand starting at position 3755 of SEQ ID NO: 914677
guagaucaccaugguuuga

SEQ ID NO: 1022339 - RNA, 19 nt, Artificial Sequence
  Description of Artificial Sequence: Synthetic oligonucleotide
  Antisense strand to SEQ ID NO: 1022338
ucaaaccauggugaucuac

SEQ ID NO: 1022340 - RNA, 19 nt, Artificial Sequence
  Description of Artificial Sequence: Synthetic oligonucleotide
  Sense strand starting at position 3759 of SEQ ID NO: 914677
aucaccaugguuugaugau

SEQ ID NO: 1022341 - RNA, 19 nt, Artificial Sequence
  Description of Artificial Sequence: Synthetic oligonucleotide
  Antisense strand to SEQ ID NO: 1022340
aucaucaaaccauggugau

SEQ ID NO: 1022342 - RNA, 19 nt, Artificial Sequence
  Description of Artificial Sequence: Synthetic oligonucleotide
  Sense strand starting at position 3769 of SEQ ID NO: 914677
uuugaugauuggguggaua

SEQ ID NO: 1022343 - RNA, 19 nt, Artificial Sequence
  Description of Artificial Sequence: Synthetic oligonucleotide
  Antisense strand to SEQ ID NO: 1022342
uauccacccaaucaucaaa

SEQ ID NO: 1022344 - RNA, 19 nt, Artificial Sequence
  Description of Artificial Sequence: Synthetic oligonucleotide
  Sense strand starting at position 3771 of SEQ ID NO: 914677
ugaugauuggguggauaua

SEQ ID NO: 1022345 - RNA, 19 nt, Artificial Sequence
  Description of Artificial Sequence: Synthetic oligonucleotide
  Antisense strand to SEQ ID NO: 1022344
uauauccacccaaucauca

SEQ ID NO: 1022346 - RNA, 19 nt, Artificial Sequence
  Description of Artificial Sequence: Synthetic oligonucleotide
  Sense strand starting at position 3876 of SEQ ID NO: 914677
ucaggauagugauuauucu

SEQ ID NO: 1022347 - RNA, 19 nt, Artificial Sequence
  Description of Artificial Sequence: Synthetic oligonucleotide
  Antisense strand to SEQ ID NO: 1022346
agaauaaucacuauccuga

SEQ ID NO: 1022348 - RNA, 19 nt, Artificial Sequence
  Description of Artificial Sequence: Synthetic oligonucleotide
  Sense strand starting at position 3880 of SEQ ID NO: 914677
gauagugauuauucuugga

SEQ ID NO: 1022349 - RNA, 19 nt, Artificial Sequence
  Description of Artificial Sequence: Synthetic oligonucleotide
  Antisense strand to SEQ ID NO: 1022348
uccaagaauaaucacuauc

SEQ ID NO: 1022350 - RNA, 19 nt, Artificial Sequence
  Description of Artificial Sequence: Synthetic oligonucleotide
  Sense strand starting at position 3882 of SEQ ID NO: 914677
uagugauuauucuuggaaa

SEQ ID NO: 1022351 - RNA, 19 nt, Artificial Sequence
  Description of Artificial Sequence: Synthetic oligonucleotide
  Antisense strand to SEQ ID NO: 1022350
uuuccaagaauaaucacua

SEQ ID NO: 1022352 - RNA, 19 nt, Artificial Sequence
  Description of Artificial Sequence: Synthetic oligonucleotide
  Sense strand starting at position 169 of SEQ ID NO: 914678
ccaccuuuaguuuggaagu

SEQ ID NO: 1022353 - RNA, 19 nt, Artificial Sequence
  Description of Artificial Sequence: Synthetic oligonucleotide
  Antisense strand to SEQ ID NO: 1022352
acuuccaaacuaaaggugg

SEQ ID NO: 1022354 - RNA, 19 nt, Artificial Sequence
  Description of Artificial Sequence: Synthetic oligonucleotide
  Sense strand starting at position 375 of SEQ ID NO: 914678
augagaaggucucuuccgu

SEQ ID NO: 1022355 - RNA, 19 nt, Artificial Sequence
  Description of Artificial Sequence: Synthetic oligonucleotide
  Antisense strand to SEQ ID NO: 1022354
acggaagagaccuucucau

SEQ ID NO: 1022356 - RNA, 19 nt, Artificial Sequence
  Description of Artificial Sequence: Synthetic oligonucleotide
  Sense strand starting at position 678 of SEQ ID NO: 914678
ccagcucaucuccgaaagu

SEQ ID NO: 1022357 - RNA, 19 nt, Artificial Sequence
  Description of Artificial Sequence: Synthetic oligonucleotide
  Antisense strand to SEQ ID NO: 1022356
acuuucggagaugagcugg

SEQ ID NO: 1022358 - RNA, 19 nt, Artificial Sequence
  Description of Artificial Sequence: Synthetic oligonucleotide
  Sense strand starting at position 687 of SEQ ID NO: 914678
cuccgaaaguccuucucca

SEQ ID NO: 1022359 - RNA, 19 nt, Artificial Sequence
  Description of Artificial Sequence: Synthetic oligonucleotide
  Antisense strand to SEQ ID NO: 1022358
uggagaaggacuuucggag

SEQ ID NO: 1022360 - RNA, 19 nt, Artificial Sequence
  Description of Artificial Sequence: Synthetic oligonucleotide
  Sense strand starting at position 719 of SEQ ID NO: 914678
caccuuggccaagggauau

SEQ ID NO: 1022361 - RNA, 19 nt, Artificial Sequence
  Description of Artificial Sequence: Synthetic oligonucleotide
  Antisense strand to SEQ ID NO: 1022360
auaucccuuggccaaggug

SEQ ID NO: 1022362 - RNA, 19 nt, Artificial Sequence
  Description of Artificial Sequence: Synthetic oligonucleotide
  Sense strand starting at position 794 of SEQ ID NO: 914678
aaagcagcccagugauguu

SEQ ID NO: 1022363 - RNA, 19 nt, Artificial Sequence
  Description of Artificial Sequence: Synthetic oligonucleotide
  Antisense strand to SEQ ID NO: 1022362
aacaucacugggcugcuuu

SEQ ID NO: 1022364 - RNA, 19 nt, Artificial Sequence
  Description of Artificial Sequence: Synthetic oligonucleotide
  Sense strand starting at position 859 of SEQ ID NO: 914678
cuuuccagugauuguaaga

SEQ ID NO: 1022365 - RNA, 19 nt, Artificial Sequence
  Description of Artificial Sequence: Synthetic oligonucleotide
  Antisense strand to SEQ ID NO: 1022364
ucuuacaaucacuggaaag

SEQ ID NO: 1022366 - RNA, 19 nt, Artificial Sequence
  Description of Artificial Sequence: Synthetic oligonucleotide
  Sense strand starting at position 1280 of SEQ ID NO: 914678
cucacucuccguugaaauc

SEQ ID NO: 1022367 - RNA, 19 nt, Artificial Sequence
  Description of Artificial Sequence: Synthetic oligonucleotide
  Antisense strand to SEQ ID NO: 1022366
gauuucaacggagagugag

SEQ ID NO: 1022368 - RNA, 19 nt, Artificial Sequence
  Description of Artificial Sequence: Synthetic oligonucleotide
  Sense strand starting at position 1281 of SEQ ID NO: 914678
ucacucuccguugaaauca

SEQ ID NO: 1022369 - RNA, 19 nt, Artificial Sequence
  Description of Artificial Sequence: Synthetic oligonucleotide
  Antisense strand to SEQ ID NO: 1022368
ugauuucaacggagaguga

SEQ ID NO: 1022370 - RNA, 19 nt, Artificial Sequence
  Description of Artificial Sequence: Synthetic oligonucleotide
  Sense strand starting at position 1486 of SEQ ID NO: 914678
uuggguuauucuccaucaa

SEQ ID NO: 1022371 - RNA, 19 nt, Artificial Sequence
  Description of Artificial Sequence: Synthetic oligonucleotide
  Antisense strand to SEQ ID NO: 1022370
uugauggagaauaacccaa

SEQ ID NO: 1022372 - RNA, 19 nt, Artificial Sequence
  Description of Artificial Sequence: Synthetic oligonucleotide
  Sense strand starting at position 1487 of SEQ ID NO: 914678
uggguuauucuccaucaaa

SEQ ID NO: 1022373 - RNA, 19 nt, Artificial Sequence
  Description of Artificial Sequence: Synthetic oligonucleotide
  Antisense strand to SEQ ID NO: 1022372
uuugauggagaauaaccca

SEQ ID NO: 1022374 - RNA, 19 nt, Artificial Sequence
  Description of Artificial Sequence: Synthetic oligonucleotide
  Sense strand starting at position 1789 of SEQ ID NO: 914678
uugucuucuccggaggcua

SEQ ID NO: 1022375 - RNA, 19 nt, Artificial Sequence
  Description of Artificial Sequence: Synthetic oligonucleotide
  Antisense strand to SEQ ID NO: 1022374
uagccuccggagaagacaa

SEQ ID NO: 1022376 - RNA, 19 nt, Artificial Sequence
  Description of Artificial Sequence: Synthetic oligonucleotide
  Sense strand starting at position 1887 of SEQ ID NO: 914678
cucugaauccucugcagua

SEQ ID NO: 1022377 - RNA, 19 nt, Artificial Sequence
  Description of Artificial Sequence: Synthetic oligonucleotide
  Antisense strand to SEQ ID NO: 1022376
uacugcagaggauucagag

SEQ ID NO: 1022378 - RNA, 19 nt, Artificial Sequence
  Description of Artificial Sequence: Synthetic oligonucleotide
  Sense strand starting at position 2171 of SEQ ID NO: 914678
caaccauccgcuggcgaau

SEQ ID NO: 1022379 - RNA, 19 nt, Artificial Sequence
  Description of Artificial Sequence: Synthetic oligonucleotide
  Antisense strand to SEQ ID NO: 1022378
auucgccagcggaugguug

SEQ ID NO: 1022380 - RNA, 19 nt, Artificial Sequence
  Description of Artificial Sequence: Synthetic oligonucleotide
  Sense strand starting at position 2474 of SEQ ID NO: 914678
cugcgaaaugcugggagau

SEQ ID NO: 1022381 - RNA, 19 nt, Artificial Sequence
  Description of Artificial Sequence: Synthetic oligonucleotide
  Antisense strand to SEQ ID NO: 1022380
aucucccagcauuucgcag

SEQ ID NO: 1022382 - RNA, 19 nt, Artificial Sequence
  Description of Artificial Sequence: Synthetic oligonucleotide
  Sense strand starting at position 2475 of SEQ ID NO: 914678
ugcgaaaugcugggagaug

SEQ ID NO: 1022383 - RNA, 19 nt, Artificial Sequence
  Description of Artificial Sequence: Synthetic oligonucleotide
  Antisense strand to SEQ ID NO: 1022382
caucucccagcauuucgca

SEQ ID NO: 1022384 - RNA, 19 nt, Artificial Sequence
  Description of Artificial Sequence: Synthetic oligonucleotide
  Sense strand starting at position 2490 of SEQ ID NO: 914678
gauggaguucucgguucuu

SEQ ID NO: 1022385 - RNA, 19 nt, Artificial Sequence
  Description of Artificial Sequence: Synthetic oligonucleotide
  Antisense strand to SEQ ID NO: 1022384
aagaaccgagaacuccauc

SEQ ID NO: 1022386 - RNA, 19 nt, Artificial Sequence
  Description of Artificial Sequence: Synthetic oligonucleotide
  Sense strand starting at position 2501 of SEQ ID NO: 914678
cgguucuuccuccauguua

SEQ ID NO: 1022387 - RNA, 19 nt, Artificial Sequence
  Description of Artificial Sequence: Synthetic oligonucleotide
  Antisense strand to SEQ ID NO: 1022386
uaacauggaggaagaaccg

SEQ ID NO: 1022388 - RNA, 19 nt, Artificial Sequence
  Description of Artificial Sequence: Synthetic oligonucleotide
  Sense strand starting at position 2503 of SEQ ID NO: 914678
guucuuccuccauguuaag

SEQ ID NO: 1022389 - RNA, 19 nt, Artificial Sequence
  Description of Artificial Sequence: Synthetic oligonucleotide
  Antisense strand to SEQ ID NO: 1022388
cuuaacauggaggaagaac

SEQ ID NO: 1022390 - RNA, 19 nt, Artificial Sequence
  Description of Artificial Sequence: Synthetic oligonucleotide
  Sense strand starting at position 2589 of SEQ ID NO: 914678
cuagaucaccugugauucu

SEQ ID NO: 1022391 - RNA, 19 nt, Artificial Sequence
  Description of Artificial Sequence: Synthetic oligonucleotide
  Antisense strand to SEQ ID NO: 1022390
agaaucacaggugaucuag

SEQ ID NO: 1022392 - RNA, 19 nt, Artificial Sequence
  Description of Artificial Sequence: Synthetic oligonucleotide
  Sense strand starting at position 2647 of SEQ ID NO: 914678
agaacuaaugccggagcuu

SEQ ID NO: 1022393 - RNA, 19 nt, Artificial Sequence
  Description of Artificial Sequence: Synthetic oligonucleotide
  Antisense strand to SEQ ID NO: 1022392
aagcuccggcauuaguucu

SEQ ID NO: 1022394 - RNA, 19 nt, Artificial Sequence
  Description of Artificial Sequence: Synthetic oligonucleotide
  Sense strand starting at position 2680 of SEQ ID NO: 914678
cugcaaauuugaggacgau

SEQ ID NO: 1022395 - RNA, 19 nt, Artificial Sequence
  Description of Artificial Sequence: Synthetic oligonucleotide
  Antisense strand to SEQ ID NO: 1022394
aucguccucaaauuugcag

SEQ ID NO: 1022396 - RNA, 19 nt, Artificial Sequence
  Description of Artificial Sequence: Synthetic oligonucleotide
  Sense strand starting at position 2726 of SEQ ID NO: 914678
ggcauauccucuucuugac

SEQ ID NO: 1022397 - RNA, 19 nt, Artificial Sequence
  Description of Artificial Sequence: Synthetic oligonucleotide
  Antisense strand to SEQ ID NO: 1022396
gucaagaagaggauaugcc

SEQ ID NO: 1022398 - RNA, 19 nt, Artificial Sequence
  Description of Artificial Sequence: Synthetic oligonucleotide
  Sense strand starting at position 2818 of SEQ ID NO: 914678
uguuauaugacguaguuaa

SEQ ID NO: 1022399 - RNA, 19 nt, Artificial Sequence
  Description of Artificial Sequence: Synthetic oligonucleotide
  Antisense strand to SEQ ID NO: 1022398
uuaacuacgucauauaaca

SEQ ID NO: 1022400 - RNA, 19 nt, Artificial Sequence
  Description of Artificial Sequence: Synthetic oligonucleotide
  Sense strand starting at position 2825 of SEQ ID NO: 914678
ugacguaguuaauuaugaa

SEQ ID NO: 1022401 - RNA, 19 nt, Artificial Sequence
  Description of Artificial Sequence: Synthetic oligonucleotide
  Antisense strand to SEQ ID NO: 1022400
uucauaauuaacuacguca

SEQ ID NO: 1022402 - RNA, 19 nt, Artificial Sequence
  Description of Artificial Sequence: Synthetic oligonucleotide
  Sense strand starting at position 2829 of SEQ ID NO: 914678
guaguuaauuaugaaggga

SEQ ID NO: 1022403 - RNA, 19 nt, Artificial Sequence
  Description of Artificial Sequence: Synthetic oligonucleotide
  Antisense strand to SEQ ID NO: 1022402
ucccuucauaauuaacuac

SEQ ID NO: 1022404 - RNA, 19 nt, Artificial Sequence
  Description of Artificial Sequence: Synthetic oligonucleotide
  Sense strand starting at position 2832 of SEQ ID NO: 914678
guuaauuaugaagggagua

SEQ ID NO: 1022405 - RNA, 19 nt, Artificial Sequence
  Description of Artificial Sequence: Synthetic oligonucleotide
  Antisense strand to SEQ ID NO: 1022404
uacucccuucauaauuaac

SEQ ID NO: 1022406 - RNA, 19 nt, Artificial Sequence
  Description of Artificial Sequence: Synthetic oligonucleotide
  Sense strand starting at position 2844 of SEQ ID NO: 914678
gggaguaaauguucaucga

SEQ ID NO: 1022407 - RNA, 19 nt, Artificial Sequence
  Description of Artificial Sequence: Synthetic oligonucleotide
  Antisense strand to SEQ ID NO: 1022406
ucgaugaacauuuacuccc

SEQ ID NO: 1022408 - RNA, 19 nt, Artificial Sequence
  Description of Artificial Sequence: Synthetic oligonucleotide
  Sense strand starting at position 2845 of SEQ ID NO: 914678
ggaguaaauguucaucgau

SEQ ID NO: 1022409 - RNA, 19 nt, Artificial Sequence
  Description of Artificial Sequence: Synthetic oligonucleotide
  Antisense strand to SEQ ID NO: 1022408
aucgaugaacauuuacucc

SEQ ID NO: 1022410 - RNA, 19 nt, Artificial Sequence
  Description of Artificial Sequence: Synthetic oligonucleotide
  Sense strand starting at position 2848 of SEQ ID NO: 914678
guaaauguucaucgauagg

SEQ ID NO: 1022411 - RNA, 19 nt, Artificial Sequence
  Description of Artificial Sequence: Synthetic oligonucleotide
  Antisense strand to SEQ ID NO: 1022410
ccuaucgaugaacauuuac

SEQ ID NO: 1022412 - RNA, 19 nt, Artificial Sequence
  Description of Artificial Sequence: Synthetic oligonucleotide
  Sense strand starting at position 2863 of SEQ ID NO: 914678
uagggugcugcuuaaauaa

SEQ ID NO: 1022413 - RNA, 19 nt, Artificial Sequence
  Description of Artificial Sequence: Synthetic oligonucleotide
  Antisense strand to SEQ ID NO: 1022412
uuauuuaagcagcacccua

SEQ ID NO: 1022414 - RNA, 19 nt, Artificial Sequence
  Description of Artificial Sequence: Synthetic oligonucleotide
  Sense strand starting at position 2872 of SEQ ID NO: 914678
gcuuaaauaagacgugaca

SEQ ID NO: 1022415 - RNA, 19 nt, Artificial Sequence
  Description of Artificial Sequence: Synthetic oligonucleotide
  Antisense strand to SEQ ID NO: 1022414
ugucacgucuuauuuaagc

SEQ ID NO: 1022416 - RNA, 19 nt, Artificial Sequence
  Description of Artificial Sequence: Synthetic oligonucleotide
  Sense strand starting at position 2994 of SEQ ID NO: 914678
acagcaugucuacacgagu

SEQ ID NO: 1022417 - RNA, 19 nt, Artificial Sequence
  Description of Artificial Sequence: Synthetic oligonucleotide
  Antisense strand to SEQ ID NO: 1022416
acucguguagacaugcugu

SEQ ID NO: 1022418 - RNA, 19 nt, Artificial Sequence
  Description of Artificial Sequence: Synthetic oligonucleotide
  Sense strand starting at position 3000 of SEQ ID NO: 914678
ugucuacacgagugcauuu

SEQ ID NO: 1022419 - RNA, 19 nt, Artificial Sequence
  Description of Artificial Sequence: Synthetic oligonucleotide
  Antisense strand to SEQ ID NO: 1022418
aaaugcacucguguagaca

SEQ ID NO: 1022420 - RNA, 19 nt, Artificial Sequence
  Description of Artificial Sequence: Synthetic oligonucleotide
  Sense strand starting at position 3010 of SEQ ID NO: 914678
agugcauuuaugugagguu

SEQ ID NO: 1022421 - RNA, 19 nt, Artificial Sequence
  Description of Artificial Sequence: Synthetic oligonucleotide
  Antisense strand to SEQ ID NO: 1022420
aaccucacauaaaugcacu

SEQ ID NO: 1022422 - RNA, 19 nt, Artificial Sequence
  Description of Artificial Sequence: Synthetic oligonucleotide
  Sense strand starting at position 3017 of SEQ ID NO: 914678
uuaugugagguuugacaca

SEQ ID NO: 1022423 - RNA, 19 nt, Artificial Sequence
  Description of Artificial Sequence: Synthetic oligonucleotide
  Antisense strand to SEQ ID NO: 1022422
ugugucaaaccucacauaa

SEQ ID NO: 1022424 - RNA, 19 nt, Artificial Sequence
  Description of Artificial Sequence: Synthetic oligonucleotide
  Sense strand starting at position 3062 of SEQ ID NO: 914678
aggaaagagguucgccaaa

SEQ ID NO: 1022425 - RNA, 19 nt, Artificial Sequence
  Description of Artificial Sequence: Synthetic oligonucleotide
  Antisense strand to SEQ ID NO: 1022424
uuuggcgaaccucuuuccu

SEQ ID NO: 1022426 - RNA, 19 nt, Artificial Sequence
  Description of Artificial Sequence: Synthetic oligonucleotide
  Sense strand starting at position 3103 of SEQ ID NO: 914678
gggaaagggugucagauug

SEQ ID NO: 1022427 - RNA, 19 nt, Artificial Sequence
  Description of Artificial Sequence: Synthetic oligonucleotide
  Antisense strand to SEQ ID NO: 1022426
caaucugacacccuuuccc

SEQ ID NO: 1022428 - RNA, 19 nt, Artificial Sequence
  Description of Artificial Sequence: Synthetic oligonucleotide
  Sense strand starting at position 3114 of SEQ ID NO: 914678
ucagauugcacguagguuu

SEQ ID NO: 1022429 - RNA, 19 nt, Artificial Sequence
  Description of Artificial Sequence: Synthetic oligonucleotide
  Antisense strand to SEQ ID NO: 1022428
aaaccuacgugcaaucuga

SEQ ID NO: 1022430 - RNA, 19 nt, Artificial Sequence
  Description of Artificial Sequence: Synthetic oligonucleotide
  Sense strand starting at position 3517 of SEQ ID NO: 914678
gacgucgucucacuauauu

SEQ ID NO: 1022431 - RNA, 19 nt, Artificial Sequence
  Description of Artificial Sequence: Synthetic oligonucleotide
  Antisense strand to SEQ ID NO: 1022430
aauauagugagacgacguc

SEQ ID NO: 1022432 - RNA, 19 nt, Artificial Sequence
  Description of Artificial Sequence: Synthetic oligonucleotide
  Sense strand starting at position 1122 of SEQ ID NO: 914679
aggcauagguccucugauc

SEQ ID NO: 1022433 - RNA, 19 nt, Artificial Sequence
  Description of Artificial Sequence: Synthetic oligonucleotide
  Antisense strand to SEQ ID NO: 1022432
gaucagaggaccuaugccu

SEQ ID NO: 1022434 - RNA, 19 nt, Artificial Sequence
  Description of Artificial Sequence: Synthetic oligonucleotide
  Sense strand starting at position 1162 of SEQ ID NO: 914679
caguuaccauguuggcaaa

SEQ ID NO: 1022435 - RNA, 19 nt, Artificial Sequence
  Description of Artificial Sequence: Synthetic oligonucleotide
  Antisense strand to SEQ ID NO: 1022434
uuugccaacaugguaacug

SEQ ID NO: 1022436 - RNA, 19 nt, Artificial Sequence
  Description of Artificial Sequence: Synthetic oligonucleotide
  Sense strand starting at position 1205 of SEQ ID NO: 914679
gcacaaugcccuuguuaaa

SEQ ID NO: 1022437 - RNA, 19 nt, Artificial Sequence
  Description of Artificial Sequence: Synthetic oligonucleotide
  Antisense strand to SEQ ID NO: 1022436
uuuaacaagggcauugugc

SEQ ID NO: 1022438 - RNA, 19 nt, Artificial Sequence
  Description of Artificial Sequence: Synthetic oligonucleotide
  Sense strand starting at position 1276 of SEQ ID NO: 914679
auagucaucugaggauaaa

SEQ ID NO: 1022439 - RNA, 19 nt, Artificial Sequence
  Description of Artificial Sequence: Synthetic oligonucleotide
  Antisense strand to SEQ ID NO: 1022438
uuuauccucagaugacuau

SEQ ID NO: 1022440 - RNA, 19 nt, Artificial Sequence
  Description of Artificial Sequence: Synthetic oligonucleotide
  Sense strand starting at position 1529 of SEQ ID NO: 914679
gccucacccuugcaauguu

SEQ ID NO: 1022441 - RNA, 19 nt, Artificial Sequence
  Description of Artificial Sequence: Synthetic oligonucleotide
  Antisense strand to SEQ ID NO: 1022440
aacauugcaagggugaggc

SEQ ID NO: 1022442 - RNA, 19 nt, Artificial Sequence
  Description of Artificial Sequence: Synthetic oligonucleotide
  Sense strand starting at position 1537 of SEQ ID NO: 914679
cuugcaauguuuguuccaa

SEQ ID NO: 1022443 - RNA, 19 nt, Artificial Sequence
  Description of Artificial Sequence: Synthetic oligonucleotide
  Antisense strand to SEQ ID NO: 1022442
uuggaacaaacauugcaag

SEQ ID NO: 1022444 - RNA, 19 nt, Artificial Sequence
  Description of Artificial Sequence: Synthetic oligonucleotide
  Sense strand starting at position 1538 of SEQ ID NO: 914679
uugcaauguuuguuccaag

SEQ ID NO: 1022445 - RNA, 19 nt, Artificial Sequence
  Description of Artificial Sequence: Synthetic oligonucleotide
  Antisense strand to SEQ ID NO: 1022444
cuuggaacaaacauugcaa

SEQ ID NO: 1022446 - RNA, 19 nt, Artificial Sequence
  Description of Artificial Sequence: Synthetic oligonucleotide
  Sense strand starting at position 1629 of SEQ ID NO: 914679
gggcuaucucccuaggugu

SEQ ID NO: 1022447 - RNA, 19 nt, Artificial Sequence
  Description of Artificial Sequence: Synthetic oligonucleotide
  Antisense strand to SEQ ID NO: 1022446
acaccuagggagauagccc

SEQ ID NO: 1022448 - RNA, 19 nt, Artificial Sequence
  Description of Artificial Sequence: Synthetic oligonucleotide
  Sense strand starting at position 1631 of SEQ ID NO: 914679
gcuaucucccuagguguca

SEQ ID NO: 1022449 - RNA, 19 nt, Artificial Sequence
  Description of Artificial Sequence: Synthetic oligonucleotide
  Antisense strand to SEQ ID NO: 1022448
ugacaccuagggagauagc

SEQ ID NO: 1022450 - RNA, 19 nt, Artificial Sequence
  Description of Artificial Sequence: Synthetic oligonucleotide
  Sense strand starting at position 2007 of SEQ ID NO: 914679
gcuccagagcucuguaaug

SEQ ID NO: 1022451 - RNA, 19 nt, Artificial Sequence
  Description of Artificial Sequence: Synthetic oligonucleotide
  Antisense strand to SEQ ID NO: 1022450
cauuacagagcucuggagc

SEQ ID NO: 1022452 - RNA, 19 nt, Artificial Sequence
  Description of Artificial Sequence: Synthetic oligonucleotide
  Sense strand starting at position 2016 of SEQ ID NO: 914679
cucuguaaugcgugucauu

SEQ ID NO: 1022453 - RNA, 19 nt, Artificial Sequence
  Description of Artificial Sequence: Synthetic oligonucleotide
  Antisense strand to SEQ ID NO: 1022452
aaugacacgcauuacagag

SEQ ID NO: 1022454 - RNA, 19 nt, Artificial Sequence
  Description of Artificial Sequence: Synthetic oligonucleotide
  Sense strand starting at position 2017 of SEQ ID NO: 914679
ucuguaaugcgugucauuc

SEQ ID NO: 1022455 - RNA, 19 nt, Artificial Sequence
  Description of Artificial Sequence: Synthetic oligonucleotide
  Antisense strand to SEQ ID NO: 1022454
gaaugacacgcauuacaga

SEQ ID NO: 1022456 - RNA, 19 nt, Artificial Sequence
  Description of Artificial Sequence: Synthetic oligonucleotide
  Sense strand starting at position 2018 of SEQ ID NO: 914679
cuguaaugcgugucauucu

SEQ ID NO: 1022457 - RNA, 19 nt, Artificial Sequence
  Description of Artificial Sequence: Synthetic oligonucleotide
  Antisense strand to SEQ ID NO: 1022456
agaaugacacgcauuacag

SEQ ID NO: 1022458 - RNA, 19 nt, Artificial Sequence
  Description of Artificial Sequence: Synthetic oligonucleotide
  Sense strand starting at position 2019 of SEQ ID NO: 914679
uguaaugcgugucauucuu

SEQ ID NO: 1022459 - RNA, 19 nt, Artificial Sequence
  Description of Artificial Sequence: Synthetic oligonucleotide
  Antisense strand to SEQ ID NO: 1022458
aagaaugacacgcauuaca

SEQ ID NO: 1022460 - RNA, 19 nt, Artificial Sequence
  Description of Artificial Sequence: Synthetic oligonucleotide
  Sense strand starting at position 2182 of SEQ ID NO: 914679
gcgguaugcuuaguuaaua

SEQ ID NO: 1022461 - RNA, 19 nt, Artificial Sequence
  Description of Artificial Sequence: Synthetic oligonucleotide
  Antisense strand to SEQ ID NO: 1022460
uauuaacuaagcauaccgc

SEQ ID NO: 1022462 - RNA, 19 nt, Artificial Sequence
  Description of Artificial Sequence: Synthetic oligonucleotide
  Sense strand starting at position 2183 of SEQ ID NO: 914679
cgguaugcuuaguuaauag

SEQ ID NO: 1022463 - RNA, 19 nt, Artificial Sequence
  Description of Artificial Sequence: Synthetic oligonucleotide
  Antisense strand to SEQ ID NO: 1022462
cuauuaacuaagcauaccg

SEQ ID NO: 1022464 - RNA, 19 nt, Artificial Sequence
  Description of Artificial Sequence: Synthetic oligonucleotide
  Sense strand starting at position 2187 of SEQ ID NO: 914679
augcuuaguuaauaggaaa

SEQ ID NO: 1022465 - RNA, 19 nt, Artificial Sequence
  Description of Artificial Sequence: Synthetic oligonucleotide
  Antisense strand to SEQ ID NO: 1022464
uuuccuauuaacuaagcau

SEQ ID NO: 1022466 - RNA, 19 nt, Artificial Sequence
  Description of Artificial Sequence: Synthetic oligonucleotide
  Sense strand starting at position 2205 of SEQ ID NO: 914679
aaagguguuugguagcaaa

SEQ ID NO: 1022467 - RNA, 19 nt, Artificial Sequence
  Description of Artificial Sequence: Synthetic oligonucleotide
  Antisense strand to SEQ ID NO: 1022466
uuugcuaccaaacaccuuu

SEQ ID NO: 1022468 - RNA, 19 nt, Artificial Sequence
  Description of Artificial Sequence: Synthetic oligonucleotide
  Sense strand starting at position 2208 of SEQ ID NO: 914679
gguguuugguagcaaauag

SEQ ID NO: 1022469 - RNA, 19 nt, Artificial Sequence
  Description of Artificial Sequence: Synthetic oligonucleotide
  Antisense strand to SEQ ID NO: 1022468
cuauuugcuaccaaacacc

SEQ ID NO: 1022470 - RNA, 19 nt, Artificial Sequence
  Description of Artificial Sequence: Synthetic oligonucleotide
  Sense strand starting at position 2383 of SEQ ID NO: 914679
gcugcaaagucuuccaacu

SEQ ID NO: 1022471 - RNA, 19 nt, Artificial Sequence
  Description of Artificial Sequence: Synthetic oligonucleotide
  Antisense strand to SEQ ID NO: 1022470
aguuggaagacuuugcagc

SEQ ID NO: 1022472 - RNA, 19 nt, Artificial Sequence
  Description of Artificial Sequence: Synthetic oligonucleotide
  Sense strand starting at position 3236 of SEQ ID NO: 914679
gggagauuccuguagccca

SEQ ID NO: 1022473 - RNA, 19 nt, Artificial Sequence
  Description of Artificial Sequence: Synthetic oligonucleotide
  Antisense strand to SEQ ID NO: 1022472
ugggcuacaggaaucuccc

SEQ ID NO: 1022474 - RNA, 19 nt, Artificial Sequence
  Description of Artificial Sequence: Synthetic oligonucleotide
  Sense strand starting at position 3244 of SEQ ID NO: 914679
ccuguagcccaagagugau

SEQ ID NO: 1022475 - RNA, 19 nt, Artificial Sequence
  Description of Artificial Sequence: Synthetic oligonucleotide
  Antisense strand to SEQ ID NO: 1022474
aucacucuugggcuacagg

SEQ ID NO: 1022476 - RNA, 19 nt, Artificial Sequence
  Description of Artificial Sequence: Synthetic oligonucleotide
  Sense strand starting at position 3250 of SEQ ID NO: 914679
gcccaagagugauuggcua

SEQ ID NO: 1022477 - RNA, 19 nt, Artificial Sequence
  Description of Artificial Sequence: Synthetic oligonucleotide
  Antisense strand to SEQ ID NO: 1022476
uagccaaucacucuugggc

SEQ ID NO: 1022478 - RNA, 19 nt, Artificial Sequence
  Description of Artificial Sequence: Synthetic oligonucleotide
  Sense strand starting at position 3254 of SEQ ID NO: 914679
aagagugauuggcuaccau

SEQ ID NO: 1022479 - RNA, 19 nt, Artificial Sequence
  Description of Artificial Sequence: Synthetic oligonucleotide
  Antisense strand to SEQ ID NO: 1022478
augguagccaaucacucuu

SEQ ID NO: 1022480 - RNA, 19 nt, Artificial Sequence
  Description of Artificial Sequence: Synthetic oligonucleotide
  Sense strand starting at position 3293 of SEQ ID NO: 914679
uguggacugugagaacuuu

SEQ ID NO: 1022481 - RNA, 19 nt, Artificial Sequence
  Description of Artificial Sequence: Synthetic oligonucleotide
  Antisense strand to SEQ ID NO: 1022480
aaaguucucacaguccaca

SEQ ID NO: 1022482 - RNA, 19 nt, Artificial Sequence
  Description of Artificial Sequence: Synthetic oligonucleotide
  Sense strand starting at position 196 of SEQ ID NO: 914680
cuaggacacuguuuagaag

SEQ ID NO: 1022483 - RNA, 19 nt, Artificial Sequence
  Description of Artificial Sequence: Synthetic oligonucleotide
  Antisense strand to SEQ ID NO: 1022482
cuucuaaacaguguccuag

SEQ ID NO: 1022484 - RNA, 19 nt, Artificial Sequence
  Description of Artificial Sequence: Synthetic oligonucleotide
  Sense strand starting at position 334 of SEQ ID NO: 914680
ugacuccucugguccagua

SEQ ID NO: 1022485 - RNA, 19 nt, Artificial Sequence
  Description of Artificial Sequence: Synthetic oligonucleotide
  Antisense strand to SEQ ID NO: 1022484
uacuggaccagaggaguca

SEQ ID NO: 1022486 - RNA, 19 nt, Artificial Sequence
  Description of Artificial Sequence: Synthetic oligonucleotide
  Sense strand starting at position 387 of SEQ ID NO: 914680
aacacuugagguugugauu

SEQ ID NO: 1022487 - RNA, 19 nt, Artificial Sequence
  Description of Artificial Sequence: Synthetic oligonucleotide
  Antisense strand to SEQ ID NO: 1022486
aaucacaaccucaaguguu

SEQ ID NO: 1022488 - RNA, 19 nt, Artificial Sequence
  Description of Artificial Sequence: Synthetic oligonucleotide
  Sense strand starting at position 548 of SEQ ID NO: 914680
cacagccgucucuaaugaa

SEQ ID NO: 1022489 - RNA, 19 nt, Artificial Sequence
  Description of Artificial Sequence: Synthetic oligonucleotide
  Antisense strand to SEQ ID NO: 1022488
uucauuagagacggcugug

SEQ ID NO: 1022490 - RNA, 19 nt, Artificial Sequence
  Description of Artificial Sequence: Synthetic oligonucleotide
  Sense strand starting at position 722 of SEQ ID NO: 914680
gggcgcagucuggaaagaa

SEQ ID NO: 1022491 - RNA, 19 nt, Artificial Sequence
  Description of Artificial Sequence: Synthetic oligonucleotide
  Antisense strand to SEQ ID NO: 1022490
uucuuuccagacugcgccc

SEQ ID NO: 1022492 - RNA, 19 nt, Artificial Sequence
  Description of Artificial Sequence: Synthetic oligonucleotide
  Sense strand starting at position 1157 of SEQ ID NO: 914680
gggacggcuccgugaagaa

SEQ ID NO: 1022493 - RNA, 19 nt, Artificial Sequence
  Description of Artificial Sequence: Synthetic oligonucleotide
  Antisense strand to SEQ ID NO: 1022492
uucuucacggagccguccc

SEQ ID NO: 1022494 - RNA, 19 nt, Artificial Sequence
  Description of Artificial Sequence: Synthetic oligonucleotide
  Sense strand starting at position 1369 of SEQ ID NO: 914680
gccagacuucggcuuugca

SEQ ID NO: 1022495 - RNA, 19 nt, Artificial Sequence
  Description of Artificial Sequence: Synthetic oligonucleotide
  Antisense strand to SEQ ID NO: 1022494
ugcaaagccgaagucuggc

SEQ ID NO: 1022496 - RNA, 19 nt, Artificial Sequence
  Description of Artificial Sequence: Synthetic oligonucleotide
  Sense strand starting at position 1653 of SEQ ID NO: 914680
gucaaugaagcugaguaga

SEQ ID NO: 1022497 - RNA, 19 nt, Artificial Sequence
  Description of Artificial Sequence: Synthetic oligonucleotide
  Antisense strand to SEQ ID NO: 1022496
ucuacucagcuucauugac

SEQ ID NO: 1022498 - RNA, 19 nt, Artificial Sequence
  Description of Artificial Sequence: Synthetic oligonucleotide
  Sense strand starting at position 1655 of SEQ ID NO: 914680
caaugaagcugaguagauc

SEQ ID NO: 1022499 - RNA, 19 nt, Artificial Sequence
  Description of Artificial Sequence: Synthetic oligonucleotide
  Antisense strand to SEQ ID NO: 1022498
gaucuacucagcuucauug

SEQ ID NO: 1022500 - RNA, 19 nt, Artificial Sequence
  Description of Artificial Sequence: Synthetic oligonucleotide
  Sense strand starting at position 1736 of SEQ ID NO: 914680
cggucucaucguccucgaa

SEQ ID NO: 1022501 - RNA, 19 nt, Artificial Sequence
  Description of Artificial Sequence: Synthetic oligonucleotide
  Antisense strand to SEQ ID NO: 1022500
uucgaggacgaugagaccg

SEQ ID NO: 1022502 - RNA, 19 nt, Artificial Sequence
  Description of Artificial Sequence: Synthetic oligonucleotide
  Sense strand starting at position 2349 of SEQ ID NO: 914680
ucaguccagcuguauaaca

SEQ ID NO: 1022503 - RNA, 19 nt, Artificial Sequence
  Description of Artificial Sequence: Synthetic oligonucleotide
  Antisense strand to SEQ ID NO: 1022502
uguuauacagcuggacuga

SEQ ID NO: 1022504 - RNA, 19 nt, Artificial Sequence
  Description of Artificial Sequence: Synthetic oligonucleotide
  Sense strand starting at position 2402 of SEQ ID NO: 914680
ggcgcuguccaucuauuau

SEQ ID NO: 1022505 - RNA, 19 nt, Artificial Sequence
  Description of Artificial Sequence: Synthetic oligonucleotide
  Antisense strand to SEQ ID NO: 1022504
auaauagauggacagcgcc

SEQ ID NO: 1022506 - RNA, 19 nt, Artificial Sequence
  Description of Artificial Sequence: Synthetic oligonucleotide
  Sense strand starting at position 2437 of SEQ ID NO: 914680
acaacagcccugugaauua

SEQ ID NO: 1022507 - RNA, 19 nt, Artificial Sequence
  Description of Artificial Sequence: Synthetic oligonucleotide
  Antisense strand to SEQ ID NO: 1022506
uaauucacagggcuguugu

SEQ ID NO: 1022508 - RNA, 19 nt, Artificial Sequence
  Description of Artificial Sequence: Synthetic oligonucleotide
  Sense strand starting at position 2504 of SEQ ID NO: 914680
cagugaguuggccaaaguc

SEQ ID NO: 1022509 - RNA, 19 nt, Artificial Sequence
  Description of Artificial Sequence: Synthetic oligonucleotide
  Antisense strand to SEQ ID NO: 1022508
gacuuuggccaacucacug

SEQ ID NO: 1022510 - RNA, 19 nt, Artificial Sequence
  Description of Artificial Sequence: Synthetic oligonucleotide
  Sense strand starting at position 2640 of SEQ ID NO: 914680
agcucuagaccugauccua

SEQ ID NO: 1022511 - RNA, 19 nt, Artificial Sequence
  Description of Artificial Sequence: Synthetic oligonucleotide
  Antisense strand to SEQ ID NO: 1022510
uaggaucaggucuagagcu

SEQ ID NO: 1022512 - RNA, 19 nt, Artificial Sequence
  Description of Artificial Sequence: Synthetic oligonucleotide
  Sense strand starting at position 2656 of SEQ ID NO: 914680
cuaagauucuaaccugagu

SEQ ID NO: 1022513 - RNA, 19 nt, Artificial Sequence
  Description of Artificial Sequence: Synthetic oligonucleotide
  Antisense strand to SEQ ID NO: 1022512
acucagguuagaaucuuag

SEQ ID NO: 1022514 - RNA, 19 nt, Artificial Sequence
  Description of Artificial Sequence: Synthetic oligonucleotide
  Sense strand starting at position 2727 of SEQ ID NO: 914680
gauuguuacgaguaacaau

SEQ ID NO: 1022515 - RNA, 19 nt, Artificial Sequence
  Description of Artificial Sequence: Synthetic oligonucleotide
  Antisense strand to SEQ ID NO: 1022514
auuguuacucguaacaauc

SEQ ID NO: 1022516 - RNA, 19 nt, Artificial Sequence
  Description of Artificial Sequence: Synthetic oligonucleotide
  Sense strand starting at position 2734 of SEQ ID NO: 914680
acgaguaacaauuggcuaa

SEQ ID NO: 1022517 - RNA, 19 nt, Artificial Sequence
  Description of Artificial Sequence: Synthetic oligonucleotide
  Antisense strand to SEQ ID NO: 1022516
uuagccaauuguuacucgu

SEQ ID NO: 1022518 - RNA, 19 nt, Artificial Sequence
  Description of Artificial Sequence: Synthetic oligonucleotide
  Sense strand starting at position 2738 of SEQ ID NO: 914680
guaacaauuggcuaacagu

SEQ ID NO: 1022519 - RNA, 19 nt, Artificial Sequence
  Description of Artificial Sequence: Synthetic oligonucleotide
  Antisense strand to SEQ ID NO: 1022518
acuguuagccaauuguuac

SEQ ID NO: 1022520 - RNA, 19 nt, Artificial Sequence
  Description of Artificial Sequence: Synthetic oligonucleotide
  Sense strand starting at position 2928 of SEQ ID NO: 914680
uuagguuaucccuggaauu

SEQ ID NO: 1022521 - RNA, 19 nt, Artificial Sequence
  Description of Artificial Sequence: Synthetic oligonucleotide
  Antisense strand to SEQ ID NO: 1022520
aauuccagggauaaccuaa

SEQ ID NO: 1022522 - RNA, 19 nt, Artificial Sequence
  Description of Artificial Sequence: Synthetic oligonucleotide
  Sense strand starting at position 2999 of SEQ ID NO: 914680
gggcaauccucuuugggau

SEQ ID NO: 1022523 - RNA, 19 nt, Artificial Sequence
  Description of Artificial Sequence: Synthetic oligonucleotide
  Antisense strand to SEQ ID NO: 1022522
aucccaaagaggauugccc

SEQ ID NO: 1022524 - RNA, 19 nt, Artificial Sequence
  Description of Artificial Sequence: Synthetic oligonucleotide
  Sense strand starting at position 3000 of SEQ ID NO: 914680
ggcaauccucuuugggaua

SEQ ID NO: 1022525 - RNA, 19 nt, Artificial Sequence
  Description of Artificial Sequence: Synthetic oligonucleotide
  Antisense strand to SEQ ID NO: 1022524
uaucccaaagaggauugcc

SEQ ID NO: 1022526 - RNA, 19 nt, Artificial Sequence
  Description of Artificial Sequence: Synthetic oligonucleotide
  Sense strand starting at position 3079 of SEQ ID NO: 914680
ggucuuagccaccacucaa

SEQ ID NO: 1022527 - RNA, 19 nt, Artificial Sequence
  Description of Artificial Sequence: Synthetic oligonucleotide
  Antisense strand to SEQ ID NO: 1022526
uugagugguggcuaagacc

SEQ ID NO: 1022528 - RNA, 19 nt, Artificial Sequence
  Description of Artificial Sequence: Synthetic oligonucleotide
  Sense strand starting at position 3104 of SEQ ID NO: 914680
caugacuuagguugaaauc

SEQ ID NO: 1022529 - RNA, 19 nt, Artificial Sequence
  Description of Artificial Sequence: Synthetic oligonucleotide
  Antisense strand to SEQ ID NO: 1022528
gauuucaaccuaagucaug

SEQ ID NO: 1022530 - RNA, 19 nt, Artificial Sequence
  Description of Artificial Sequence: Synthetic oligonucleotide
  Sense strand starting at position 3113 of SEQ ID NO: 914680
gguugaaauccuugcucug

SEQ ID NO: 1022531 - RNA, 19 nt, Artificial Sequence
  Description of Artificial Sequence: Synthetic oligonucleotide
  Antisense strand to SEQ ID NO: 1022530
cagagcaaggauuucaacc

SEQ ID NO: 1022532 - RNA, 19 nt, Artificial Sequence
  Description of Artificial Sequence: Synthetic oligonucleotide
  Sense strand starting at position 3135 of SEQ ID NO: 914680
agugcauggcuuuagacaa

SEQ ID NO: 1022533 - RNA, 19 nt, Artificial Sequence
  Description of Artificial Sequence: Synthetic oligonucleotide
  Antisense strand to SEQ ID NO: 1022532
uugucuaaagccaugcacu

SEQ ID NO: 1022534 - RNA, 19 nt, Artificial Sequence
  Description of Artificial Sequence: Synthetic oligonucleotide
  Sense strand starting at position 3167 of SEQ ID NO: 914680
cucuguuuagcuuacucau

SEQ ID NO: 1022535 - RNA, 19 nt, Artificial Sequence
  Description of Artificial Sequence: Synthetic oligonucleotide
  Antisense strand to SEQ ID NO: 1022534
augaguaagcuaaacagag

SEQ ID NO: 1022536 - RNA, 19 nt, Artificial Sequence
  Description of Artificial Sequence: Synthetic oligonucleotide
  Sense strand starting at position 3184 of SEQ ID NO: 914680
auguuaaaugcagguaaag

SEQ ID NO: 1022537 - RNA, 19 nt, Artificial Sequence
  Description of Artificial Sequence: Synthetic oligonucleotide
  Antisense strand to SEQ ID NO: 1022536
cuuuaccugcauuuaacau

SEQ ID NO: 1022538 - RNA, 19 nt, Artificial Sequence
  Description of Artificial Sequence: Synthetic oligonucleotide
  Sense strand starting at position 3186 of SEQ ID NO: 914680
guuaaaugcagguaaaguu

SEQ ID NO: 1022539 - RNA, 19 nt, Artificial Sequence
  Description of Artificial Sequence: Synthetic oligonucleotide
  Antisense strand to SEQ ID NO: 1022538
aacuuuaccugcauuuaac

SEQ ID NO: 1022540 - RNA, 19 nt, Artificial Sequence
  Description of Artificial Sequence: Synthetic oligonucleotide
  Sense strand starting at position 3236 of SEQ ID NO: 914680
augauacauuguuccauag

SEQ ID NO: 1022541 - RNA, 19 nt, Artificial Sequence
  Description of Artificial Sequence: Synthetic oligonucleotide
  Antisense strand to SEQ ID NO: 1022540
cuauggaacaauguaucau

SEQ ID NO: 1022542 - RNA, 19 nt, Artificial Sequence
  Description of Artificial Sequence: Synthetic oligonucleotide
  Sense strand starting at position 3247 of SEQ ID NO: 914680
uuccauagccuggaugagu

SEQ ID NO: 1022543 - RNA, 19 nt, Artificial Sequence
  Description of Artificial Sequence: Synthetic oligonucleotide
  Antisense strand to SEQ ID NO: 1022542
acucauccaggcuauggaa

SEQ ID NO: 1022544 - RNA, 19 nt, Artificial Sequence
  Description of Artificial Sequence: Synthetic oligonucleotide
  Sense strand starting at position 3299 of SEQ ID NO: 914680
gacuauaucccuuacgugu

SEQ ID NO: 1022545 - RNA, 19 nt, Artificial Sequence
  Description of Artificial Sequence: Synthetic oligonucleotide
  Antisense strand to SEQ ID NO: 1022544
acacguaagggauauaguc

SEQ ID NO: 1022546 - RNA, 19 nt, Artificial Sequence
  Description of Artificial Sequence: Synthetic oligonucleotide
  Sense strand starting at position 3312 of SEQ ID NO: 914680
acgugucuucuggaucaua

SEQ ID NO: 1022547 - RNA, 19 nt, Artificial Sequence
  Description of Artificial Sequence: Synthetic oligonucleotide
  Antisense strand to SEQ ID NO: 1022546
uaugauccagaagacacgu

SEQ ID NO: 1022548 - RNA, 19 nt, Artificial Sequence
  Description of Artificial Sequence: Synthetic oligonucleotide
  Sense strand starting at position 3322 of SEQ ID NO: 914680
uggaucauaggguguucau

SEQ ID NO: 1022549 - RNA, 19 nt, Artificial Sequence
  Description of Artificial Sequence: Synthetic oligonucleotide
  Antisense strand to SEQ ID NO: 1022548
augaacacccuaugaucca

SEQ ID NO: 1022550 - RNA, 19 nt, Artificial Sequence
  Description of Artificial Sequence: Synthetic oligonucleotide
  Sense strand starting at position 3331 of SEQ ID NO: 914680
ggguguucaugagcauuaa

SEQ ID NO: 1022551 - RNA, 19 nt, Artificial Sequence
  Description of Artificial Sequence: Synthetic oligonucleotide
  Antisense strand to SEQ ID NO: 1022550
uuaaugcucaugaacaccc

SEQ ID NO: 1022552 - RNA, 19 nt, Artificial Sequence
  Description of Artificial Sequence: Synthetic oligonucleotide
  Sense strand starting at position 3332 of SEQ ID NO: 914680
gguguucaugagcauuaag

SEQ ID NO: 1022553 - RNA, 19 nt, Artificial Sequence
  Description of Artificial Sequence: Synthetic oligonucleotide
  Antisense strand to SEQ ID NO: 1022552
cuuaaugcucaugaacacc

SEQ ID NO: 1022554 - RNA, 19 nt, Artificial Sequence
  Description of Artificial Sequence: Synthetic oligonucleotide
  Sense strand starting at position 3366 of SEQ ID NO: 914680
uucucaauuugugauagag

SEQ ID NO: 1022555 - RNA, 19 nt, Artificial Sequence
  Description of Artificial Sequence: Synthetic oligonucleotide
  Antisense strand to SEQ ID NO: 1022554
cucuaucacaaauugagaa

SEQ ID NO: 1022556 - RNA, 19 nt, Artificial Sequence
  Description of Artificial Sequence: Synthetic oligonucleotide
  Sense strand starting at position 3368 of SEQ ID NO: 914680
cucaauuugugauagagca

SEQ ID NO: 1022557 - RNA, 19 nt, Artificial Sequence
  Description of Artificial Sequence: Synthetic oligonucleotide
  Antisense strand to SEQ ID NO: 1022556
ugcucuaucacaaauugag

SEQ ID NO: 1022558 - RNA, 19 nt, Artificial Sequence
  Description of Artificial Sequence: Synthetic oligonucleotide
  Sense strand starting at position 3524 of SEQ ID NO: 914680
gugauaaaguguucucuaa

SEQ ID NO: 1022559 - RNA, 19 nt, Artificial Sequence
  Description of Artificial Sequence: Synthetic oligonucleotide
  Antisense strand to SEQ ID NO: 1022558
uuagagaacacuuuaucac

SEQ ID NO: 1022560 - RNA, 19 nt, Artificial Sequence
  Description of Artificial Sequence: Synthetic oligonucleotide
  Sense strand starting at position 3566 of SEQ ID NO: 914680
agagcuugcauaggagaga

SEQ ID NO: 1022561 - RNA, 19 nt, Artificial Sequence
  Description of Artificial Sequence: Synthetic oligonucleotide
  Antisense strand to SEQ ID NO: 1022560
ucucuccuaugcaagcucu

SEQ ID NO: 1022562 - RNA, 19 nt, Artificial Sequence
  Description of Artificial Sequence: Synthetic oligonucleotide
  Sense strand starting at position 204 of SEQ ID NO: 914681
uuggcuacuguccaacauu

SEQ ID NO: 1022563 - RNA, 19 nt, Artificial Sequence
  Description of Artificial Sequence: Synthetic oligonucleotide
  Antisense strand to SEQ ID NO: 1022562
aauguuggacaguagccaa

SEQ ID NO: 1022564 - RNA, 19 nt, Artificial Sequence
  Description of Artificial Sequence: Synthetic oligonucleotide
  Sense strand starting at position 269 of SEQ ID NO: 914681
ggcuacuuucuguauauac

SEQ ID NO: 1022565 - RNA, 19 nt, Artificial Sequence
  Description of Artificial Sequence: Synthetic oligonucleotide
  Antisense strand to SEQ ID NO: 1022564
guauauacagaaaguagcc

SEQ ID NO: 1022566 - RNA, 19 nt, Artificial Sequence
  Description of Artificial Sequence: Synthetic oligonucleotide
  Sense strand starting at position 276 of SEQ ID NO: 914681
uucuguauauacucucaga

SEQ ID NO: 1022567 - RNA, 19 nt, Artificial Sequence
  Description of Artificial Sequence: Synthetic oligonucleotide
  Antisense strand to SEQ ID NO: 1022566
ucugagaguauauacagaa

SEQ ID NO: 1022568 - RNA, 19 nt, Artificial Sequence
  Description of Artificial Sequence: Synthetic oligonucleotide
  Sense strand starting at position 500 of SEQ ID NO: 914681
ucauauaaagucuaacugu

SEQ ID NO: 1022569 - RNA, 19 nt, Artificial Sequence
  Description of Artificial Sequence: Synthetic oligonucleotide
  Antisense strand to SEQ ID NO: 1022568
acaguuagacuuuauauga

SEQ ID NO: 1022570 - RNA, 19 nt, Artificial Sequence
  Description of Artificial Sequence: Synthetic oligonucleotide
  Sense strand starting at position 717 of SEQ ID NO: 914681
uugaaauucugaucugcag

SEQ ID NO: 1022571 - RNA, 19 nt, Artificial Sequence
  Description of Artificial Sequence: Synthetic oligonucleotide
  Antisense strand to SEQ ID NO: 1022570
cugcagaucagaauuucaa

SEQ ID NO: 1022572 - RNA, 19 nt, Artificial Sequence
  Description of Artificial Sequence: Synthetic oligonucleotide
  Sense strand starting at position 765 of SEQ ID NO: 914681
ccgacauuccuguaauaag

SEQ ID NO: 1022573 - RNA, 19 nt, Artificial Sequence
  Description of Artificial Sequence: Synthetic oligonucleotide
  Antisense strand to SEQ ID NO: 1022572
cuuauuacaggaaugucgg

SEQ ID NO: 1022574 - RNA, 19 nt, Artificial Sequence
  Description of Artificial Sequence: Synthetic oligonucleotide
  Sense strand starting at position 784 of SEQ ID NO: 914681
acaauacauuagucaguau

SEQ ID NO: 1022575 - RNA, 19 nt, Artificial Sequence
  Description of Artificial Sequence: Synthetic oligonucleotide
  Antisense strand to SEQ ID NO: 1022574
auacugacuaauguauugu

SEQ ID NO: 1022576 - RNA, 19 nt, Artificial Sequence
  Description of Artificial Sequence: Synthetic oligonucleotide
  Sense strand starting at position 787 of SEQ ID NO: 914681
auacauuagucaguaucuu

SEQ ID NO: 1022577 - RNA, 19 nt, Artificial Sequence
  Description of Artificial Sequence: Synthetic oligonucleotide
  Antisense strand to SEQ ID NO: 1022576
aagauacugacuaauguau

SEQ ID NO: 1022578 - RNA, 19 nt, Artificial Sequence
  Description of Artificial Sequence: Synthetic oligonucleotide
  Sense strand starting at position 795 of SEQ ID NO: 914681
gucaguaucuuucugaaag

SEQ ID NO: 1022579 - RNA, 19 nt, Artificial Sequence
  Description of Artificial Sequence: Synthetic oligonucleotide
  Antisense strand to SEQ ID NO: 1022578
cuuucagaaagauacugac

SEQ ID NO: 1022580 - RNA, 19 nt, Artificial Sequence
  Description of Artificial Sequence: Synthetic oligonucleotide
  Sense strand starting at position 899 of SEQ ID NO: 914681
agaacuggaugcuuuauca

SEQ ID NO: 1022581 - RNA, 19 nt, Artificial Sequence
  Description of Artificial Sequence: Synthetic oligonucleotide
  Antisense strand to SEQ ID NO: 1022580
ugauaaagcauccaguucu

SEQ ID NO: 1022582 - RNA, 19 nt, Artificial Sequence
  Description of Artificial Sequence: Synthetic oligonucleotide
  Sense strand starting at position 903 of SEQ ID NO: 914681
cuggaugcuuuaucauaua

SEQ ID NO: 1022583 - RNA, 19 nt, Artificial Sequence
  Description of Artificial Sequence: Synthetic oligonucleotide
  Antisense strand to SEQ ID NO: 1022582
uauaugauaaagcauccag

SEQ ID NO: 1022584 - RNA, 19 nt, Artificial Sequence
  Description of Artificial Sequence: Synthetic oligonucleotide
  Sense strand starting at position 915 of SEQ ID NO: 914681
ucauauaaguggccaauca

SEQ ID NO: 1022585 - RNA, 19 nt, Artificial Sequence
  Description of Artificial Sequence: Synthetic oligonucleotide
  Antisense strand to SEQ ID NO: 1022584
ugauuggccacuuauauga

SEQ ID NO: 1022586 - RNA, 19 nt, Artificial Sequence
  Description of Artificial Sequence: Synthetic oligonucleotide
  Sense strand starting at position 1122 of SEQ ID NO: 914681
agagcauucuguucccaaa

SEQ ID NO: 1022587 - RNA, 19 nt, Artificial Sequence
  Description of Artificial Sequence: Synthetic oligonucleotide
  Antisense strand to SEQ ID NO: 1022586
uuugggaacagaaugcucu

SEQ ID NO: 1022588 - RNA, 19 nt, Artificial Sequence
  Description of Artificial Sequence: Synthetic oligonucleotide
  Sense strand starting at position 1170 of SEQ ID NO: 914681
gaaggaugccaucagcuuu

SEQ ID NO: 1022589 - RNA, 19 nt, Artificial Sequence
  Description of Artificial Sequence: Synthetic oligonucleotide
  Antisense strand to SEQ ID NO: 1022588
aaagcugauggcauccuuc

SEQ ID NO: 1022590 - RNA, 19 nt, Artificial Sequence
  Description of Artificial Sequence: Synthetic oligonucleotide
  Sense strand starting at position 1421 of SEQ ID NO: 914681
guccguucccagcuaaugu

SEQ ID NO: 1022591 - RNA, 19 nt, Artificial Sequence
  Description of Artificial Sequence: Synthetic oligonucleotide
  Antisense strand to SEQ ID NO: 1022590
acauuagcugggaacggac

SEQ ID NO: 1022592 - RNA, 19 nt, Artificial Sequence
  Description of Artificial Sequence: Synthetic oligonucleotide
  Sense strand starting at position 2134 of SEQ ID NO: 914681
agcucucagcgcgcgaaau

SEQ ID NO: 1022593 - RNA, 19 nt, Artificial Sequence
  Description of Artificial Sequence: Synthetic oligonucleotide
  Antisense strand to SEQ ID NO: 1022592
auuucgcgcgcugagagcu

SEQ ID NO: 1022594 - RNA, 19 nt, Artificial Sequence
  Description of Artificial Sequence: Synthetic oligonucleotide
  Sense strand starting at position 2144 of SEQ ID NO: 914681
gcgcgaaauccgcuuugaa

SEQ ID NO: 1022595 - RNA, 19 nt, Artificial Sequence
  Description of Artificial Sequence: Synthetic oligonucleotide
  Antisense strand to SEQ ID NO: 1022594
uucaaagcggauuucgcgc

SEQ ID NO: 1022596 - RNA, 19 nt, Artificial Sequence
  Description of Artificial Sequence: Synthetic oligonucleotide
  Sense strand starting at position 2145 of SEQ ID NO: 914681
cgcgaaauccgcuuugaac

SEQ ID NO: 1022597 - RNA, 19 nt, Artificial Sequence
  Description of Artificial Sequence: Synthetic oligonucleotide
  Antisense strand to SEQ ID NO: 1022596
guucaaagcggauuucgcg

SEQ ID NO: 1022598 - RNA, 19 nt, Artificial Sequence
  Description of Artificial Sequence: Synthetic oligonucleotide
  Sense strand starting at position 2303 of SEQ ID NO: 914681
uggacuaaaucguuaaguc

SEQ ID NO: 1022599 - RNA, 19 nt, Artificial Sequence
  Description of Artificial Sequence: Synthetic oligonucleotide
  Antisense strand to SEQ ID NO: 1022598
gacuuaacgauuuagucca

SEQ ID NO: 1022600 - RNA, 19 nt, Artificial Sequence
  Description of Artificial Sequence: Synthetic oligonucleotide
  Sense strand starting at position 2304 of SEQ ID NO: 914681
ggacuaaaucguuaagucc

SEQ ID NO: 1022601 - RNA, 19 nt, Artificial Sequence
  Description of Artificial Sequence: Synthetic oligonucleotide
  Antisense strand to SEQ ID NO: 1022600
ggacuuaacgauuuagucc

SEQ ID NO: 1022602 - RNA, 19 nt, Artificial Sequence
  Description of Artificial Sequence: Synthetic oligonucleotide
  Sense strand starting at position 2395 of SEQ ID NO: 914681
gcucucuccggcguuuaau

SEQ ID NO: 1022603 - RNA, 19 nt, Artificial Sequence
  Description of Artificial Sequence: Synthetic oligonucleotide
  Antisense strand to SEQ ID NO: 1022602
auuaaacgccggagagagc

SEQ ID NO: 1022604 - RNA, 19 nt, Artificial Sequence
  Description of Artificial Sequence: Synthetic oligonucleotide
  Sense strand starting at position 2407 of SEQ ID NO: 914681
guuuaauccgagggaacuc

SEQ ID NO: 1022605 - RNA, 19 nt, Artificial Sequence
  Description of Artificial Sequence: Synthetic oligonucleotide
  Antisense strand to SEQ ID NO: 1022604
gaguucccucggauuaaac

SEQ ID NO: 1022606 - RNA, 19 nt, Artificial Sequence
  Description of Artificial Sequence: Synthetic oligonucleotide
  Sense strand starting at position 2668 of SEQ ID NO: 914681
uuugauuggcuaggaaaga

SEQ ID NO: 1022607 - RNA, 19 nt, Artificial Sequence
  Description of Artificial Sequence: Synthetic oligonucleotide
  Antisense strand to SEQ ID NO: 1022606
ucuuuccuagccaaucaaa

SEQ ID NO: 1022608 - RNA, 19 nt, Artificial Sequence
  Description of Artificial Sequence: Synthetic oligonucleotide
  Sense strand starting at position 2943 of SEQ ID NO: 914681
cucacuugucgguaagaag

SEQ ID NO: 1022609 - RNA, 19 nt, Artificial Sequence
  Description of Artificial Sequence: Synthetic oligonucleotide
  Antisense strand to SEQ ID NO: 1022608
cuucuuaccgacaagugag

SEQ ID NO: 1022610 - RNA, 19 nt, Artificial Sequence
  Description of Artificial Sequence: Synthetic oligonucleotide
  Sense strand starting at position 3307 of SEQ ID NO: 914681
cuaggaaacucgccagauc

SEQ ID NO: 1022611 - RNA, 19 nt, Artificial Sequence
  Description of Artificial Sequence: Synthetic oligonucleotide
  Antisense strand to SEQ ID NO: 1022610
gaucuggcgaguuuccuag

SEQ ID NO: 1022612 - RNA, 19 nt, Artificial Sequence
  Description of Artificial Sequence: Synthetic oligonucleotide
  Sense strand starting at position 3308 of SEQ ID NO: 914681
uaggaaacucgccagauca

SEQ ID NO: 1022613 - RNA, 19 nt, Artificial Sequence
  Description of Artificial Sequence: Synthetic oligonucleotide
  Antisense strand to SEQ ID NO: 1022612
ugaucuggcgaguuuccua

SEQ ID NO: 1022614 - RNA, 19 nt, Artificial Sequence
  Description of Artificial Sequence: Synthetic oligonucleotide
  Sense strand starting at position 3334 of SEQ ID NO: 914681
cgcgccaguguguuuaaga

SEQ ID NO: 1022615 - RNA, 19 nt, Artificial Sequence
  Description of Artificial Sequence: Synthetic oligonucleotide
  Antisense strand to SEQ ID NO: 1022614
ucuuaaacacacuggcgcg

SEQ ID NO: 1022616 - RNA, 19 nt, Artificial Sequence
  Description of Artificial Sequence: Synthetic oligonucleotide
  Sense strand starting at position 3350 of SEQ ID NO: 914681
agagacguugcagaauagu

SEQ ID NO: 1022617 - RNA, 19 nt, Artificial Sequence
  Description of Artificial Sequence: Synthetic oligonucleotide
  Antisense strand to SEQ ID NO: 1022616
acuauucugcaacgucucu

SEQ ID NO: 1022618 - RNA, 19 nt, Artificial Sequence
  Description of Artificial Sequence: Synthetic oligonucleotide
  Sense strand starting at position 3377 of SEQ ID NO: 914681
gucucucgagcgcuuacua

SEQ ID NO: 1022619 - RNA, 19 nt, Artificial Sequence
  Description of Artificial Sequence: Synthetic oligonucleotide
  Antisense strand to SEQ ID NO: 1022618
uaguaagcgcucgagagac

SEQ ID NO: 1022620 - RNA, 19 nt, Artificial Sequence
  Description of Artificial Sequence: Synthetic oligonucleotide
  Sense strand starting at position 3455 of SEQ ID NO: 914681
ucguugugugaugcucgua

SEQ ID NO: 1022621 - RNA, 19 nt, Artificial Sequence
  Description of Artificial Sequence: Synthetic oligonucleotide
  Antisense strand to SEQ ID NO: 1022620
uacgagcaucacacaacga

SEQ ID NO: 1022622 - RNA, 19 nt, Artificial Sequence
  Description of Artificial Sequence: Synthetic oligonucleotide
  Sense strand starting at position 3617 of SEQ ID NO: 914681
acugguauuucucaaauug

SEQ ID NO: 1022623 - RNA, 19 nt, Artificial Sequence
  Description of Artificial Sequence: Synthetic oligonucleotide
  Antisense strand to SEQ ID NO: 1022622
caauuugagaaauaccagu

SEQ ID NO: 1022624 - RNA, 19 nt, Artificial Sequence
  Description of Artificial Sequence: Synthetic oligonucleotide
  Sense strand starting at position 3627 of SEQ ID NO: 914681
cucaaauuggagugucgaa

SEQ ID NO: 1022625 - RNA, 19 nt, Artificial Sequence
  Description of Artificial Sequence: Synthetic oligonucleotide
  Antisense strand to SEQ ID NO: 1022624
uucgacacuccaauuugag

SEQ ID NO: 1022626 - RNA, 19 nt, Artificial Sequence
  Description of Artificial Sequence: Synthetic oligonucleotide
  Sense strand starting at position 3703 of SEQ ID NO: 914681
agcucuuauuucuccaguu

SEQ ID NO: 1022627 - RNA, 19 nt, Artificial Sequence
  Description of Artificial Sequence: Synthetic oligonucleotide
  Antisense strand to SEQ ID NO: 1022626
aacuggagaaauaagagcu

SEQ ID NO: 1022628 - RNA, 19 nt, Artificial Sequence
  Description of Artificial Sequence: Synthetic oligonucleotide
  Sense strand starting at position 3776 of SEQ ID NO: 914681
cccugcuuugaaggagaaa

SEQ ID NO: 1022629 - RNA, 19 nt, Artificial Sequence
  Description of Artificial Sequence: Synthetic oligonucleotide
  Antisense strand to SEQ ID NO: 1022628
uuucuccuucaaagcaggg

SEQ ID NO: 1022630 - RNA, 19 nt, Artificial Sequence
  Description of Artificial Sequence: Synthetic oligonucleotide
  Sense strand starting at position 3853 of SEQ ID NO: 914681
gcuaccguaguagaauaau

SEQ ID NO: 1022631 - RNA, 19 nt, Artificial Sequence
  Description of Artificial Sequence: Synthetic oligonucleotide
  Antisense strand to SEQ ID NO: 1022630
auuauucuacuacgguagc

SEQ ID NO: 1022632 - RNA, 19 nt, Artificial Sequence
  Description of Artificial Sequence: Synthetic oligonucleotide
  Sense strand starting at position 3856 of SEQ ID NO: 914681
accguaguagaauaaucua

SEQ ID NO: 1022633 - RNA, 19 nt, Artificial Sequence
  Description of Artificial Sequence: Synthetic oligonucleotide
  Antisense strand to SEQ ID NO: 1022632
uagauuauucuacuacggu

SEQ ID NO: 1022634 - RNA, 19 nt, Artificial Sequence
  Description of Artificial Sequence: Synthetic oligonucleotide
  Sense strand starting at position 3859 of SEQ ID NO: 914681
guaguagaauaaucuagag

SEQ ID NO: 1022635 - RNA, 19 nt, Artificial Sequence
  Description of Artificial Sequence: Synthetic oligonucleotide
  Antisense strand to SEQ ID NO: 1022634
cucuagauuauucuacuac

SEQ ID NO: 1022636 - RNA, 19 nt, Artificial Sequence
  Description of Artificial Sequence: Synthetic oligonucleotide
  Sense strand starting at position 3884 of SEQ ID NO: 914681
gauuaacagugcuugggua

SEQ ID NO: 1022637 - RNA, 19 nt, Artificial Sequence
  Description of Artificial Sequence: Synthetic oligonucleotide
  Antisense strand to SEQ ID NO: 1022636
uacccaagcacuguuaauc

SEQ ID NO: 1022638 - RNA, 19 nt, Artificial Sequence
  Description of Artificial Sequence: Synthetic oligonucleotide
  Sense strand starting at position 3946 of SEQ ID NO: 914681
ugucgaaggaauugugauu

SEQ ID NO: 1022639 - RNA, 19 nt, Artificial Sequence
  Description of Artificial Sequence: Synthetic oligonucleotide
  Antisense strand to SEQ ID NO: 1022638
aaucacaauuccuucgaca

SEQ ID NO: 1022640 - RNA, 19 nt, Artificial Sequence
  Description of Artificial Sequence: Synthetic oligonucleotide
  Sense strand starting at position 3951 of SEQ ID NO: 914681
aaggaauugugauugcuug

SEQ ID NO: 1022641 - RNA, 19 nt, Artificial Sequence
  Description of Artificial Sequence: Synthetic oligonucleotide
  Antisense strand to SEQ ID NO: 1022640
caagcaaucacaauuccuu

SEQ ID NO: 1022642 - RNA, 19 nt, Artificial Sequence
  Description of Artificial Sequence: Synthetic oligonucleotide
  Sense strand starting at position 36 of SEQ ID NO: 914682
accaaaguuugaugggcuu

SEQ ID NO: 1022643 - RNA, 19 nt, Artificial Sequence
  Description of Artificial Sequence: Synthetic oligonucleotide
  Antisense strand to SEQ ID NO: 1022642
aagcccaucaaacuuuggu

SEQ ID NO: 1022644 - RNA, 19 nt, Artificial Sequence
  Description of Artificial Sequence: Synthetic oligonucleotide
  Sense strand starting at position 142 of SEQ ID NO: 914682
gaacuuuggcuccagaguu

SEQ ID NO: 1022645 - RNA, 19 nt, Artificial Sequence
  Description of Artificial Sequence: Synthetic oligonucleotide
  Antisense strand to SEQ ID NO: 1022644
aacucuggagccaaaguuc

SEQ ID NO: 1022646 - RNA, 19 nt, Artificial Sequence
  Description of Artificial Sequence: Synthetic oligonucleotide
  Sense strand starting at position 164 of SEQ ID NO: 914682
cagacugucucggcugaua

SEQ ID NO: 1022647 - RNA, 19 nt, Artificial Sequence
  Description of Artificial Sequence: Synthetic oligonucleotide
  Antisense strand to SEQ ID NO: 1022646
uaucagccgagacagucug

SEQ ID NO: 1022648 - RNA, 19 nt, Artificial Sequence
  Description of Artificial Sequence: Synthetic oligonucleotide
  Sense strand starting at position 166 of SEQ ID NO: 914682
gacugucucggcugauaug

SEQ ID NO: 1022649 - RNA, 19 nt, Artificial Sequence
  Description of Artificial Sequence: Synthetic oligonucleotide
  Antisense strand to SEQ ID NO: 1022648
cauaucagccgagacaguc

SEQ ID NO: 1022650 - RNA, 19 nt, Artificial Sequence
  Description of Artificial Sequence: Synthetic oligonucleotide
  Sense strand starting at position 173 of SEQ ID NO: 914682
ucggcugauaugugacaca

SEQ ID NO: 1022651 - RNA, 19 nt, Artificial Sequence
  Description of Artificial Sequence: Synthetic oligonucleotide
  Antisense strand to SEQ ID NO: 1022650
ugugucacauaucagccga

SEQ ID NO: 1022652 - RNA, 19 nt, Artificial Sequence
  Description of Artificial Sequence: Synthetic oligonucleotide
  Sense strand starting at position 369 of SEQ ID NO: 914682
ccacaaggccuuugcauau

SEQ ID NO: 1022653 - RNA, 19 nt, Artificial Sequence
  Description of Artificial Sequence: Synthetic oligonucleotide
  Antisense strand to SEQ ID NO: 1022652
auaugcaaaggccuugugg

SEQ ID NO: 1022654 - RNA, 19 nt, Artificial Sequence
  Description of Artificial Sequence: Synthetic oligonucleotide
  Sense strand starting at position 899 of SEQ ID NO: 914682
ggcugucuccuggguguga

SEQ ID NO: 1022655 - RNA, 19 nt, Artificial Sequence
  Description of Artificial Sequence: Synthetic oligonucleotide
  Antisense strand to SEQ ID NO: 1022654
ucacacccaggagacagcc

SEQ ID NO: 1022656 - RNA, 19 nt, Artificial Sequence
  Description of Artificial Sequence: Synthetic oligonucleotide
  Sense strand starting at position 900 of SEQ ID NO: 914682
gcugucuccugggugugaa

SEQ ID NO: 1022657 - RNA, 19 nt, Artificial Sequence
  Description of Artificial Sequence: Synthetic oligonucleotide
  Antisense strand to SEQ ID NO: 1022656
uucacacccaggagacagc

SEQ ID NO: 1022658 - RNA, 19 nt, Artificial Sequence
  Description of Artificial Sequence: Synthetic oligonucleotide
  Sense strand starting at position 952 of SEQ ID NO: 914682
ucugguuaaaugugaguga

SEQ ID NO: 1022659 - RNA, 19 nt, Artificial Sequence
  Description of Artificial Sequence: Synthetic oligonucleotide
  Antisense strand to SEQ ID NO: 1022658
ucacucacauuuaaccaga

SEQ ID NO: 1022660 - RNA, 19 nt, Artificial Sequence
  Description of Artificial Sequence: Synthetic oligonucleotide
  Sense strand starting at position 953 of SEQ ID NO: 914682
cugguuaaaugugagugau

SEQ ID NO: 1022661 - RNA, 19 nt, Artificial Sequence
  Description of Artificial Sequence: Synthetic oligonucleotide
  Antisense strand to SEQ ID NO: 1022660
aucacucacauuuaaccag

SEQ ID NO: 1022662 - RNA, 19 nt, Artificial Sequence
  Description of Artificial Sequence: Synthetic oligonucleotide
  Sense strand starting at position 955 of SEQ ID NO: 914682
gguuaaaugugagugauaa

SEQ ID NO: 1022663 - RNA, 19 nt, Artificial Sequence
  Description of Artificial Sequence: Synthetic oligonucleotide
  Antisense strand to SEQ ID NO: 1022662
uuaucacucacauuuaacc

SEQ ID NO: 1022664 - RNA, 19 nt, Artificial Sequence
  Description of Artificial Sequence: Synthetic oligonucleotide
  Sense strand starting at position 1027 of SEQ ID NO: 914682
cgggcaugugaacaauuau

SEQ ID NO: 1022665 - RNA, 19 nt, Artificial Sequence
  Description of Artificial Sequence: Synthetic oligonucleotide
  Antisense strand to SEQ ID NO: 1022664
auaauuguucacaugcccg

SEQ ID NO: 1022666 - RNA, 19 nt, Artificial Sequence
  Description of Artificial Sequence: Synthetic oligonucleotide
  Sense strand starting at position 1246 of SEQ ID NO: 914682
gagcucaccgcacaugaau

SEQ ID NO: 1022667 - RNA, 19 nt, Artificial Sequence
  Description of Artificial Sequence: Synthetic oligonucleotide
  Antisense strand to SEQ ID NO: 1022666
auucaugugcggugagcuc

SEQ ID NO: 1022668 - RNA, 19 nt, Artificial Sequence
  Description of Artificial Sequence: Synthetic oligonucleotide
  Sense strand starting at position 1325 of SEQ ID NO: 914682
augggccugugcugagaau

SEQ ID NO: 1022669 - RNA, 19 nt, Artificial Sequence
  Description of Artificial Sequence: Synthetic oligonucleotide
  Antisense strand to SEQ ID NO: 1022668
auucucagcacaggcccau

SEQ ID NO: 1022670 - RNA, 19 nt, Artificial Sequence
  Description of Artificial Sequence: Synthetic oligonucleotide
  Sense strand starting at position 1637 of SEQ ID NO: 914682
gcgcgugugccucccaaga

SEQ ID NO: 1022671 - RNA, 19 nt, Artificial Sequence
  Description of Artificial Sequence: Synthetic oligonucleotide
  Antisense strand to SEQ ID NO: 1022670
ucuugggaggcacacgcgc

SEQ ID NO: 1022672 - RNA, 19 nt, Artificial Sequence
  Description of Artificial Sequence: Synthetic oligonucleotide
  Sense strand starting at position 2117 of SEQ ID NO: 914682
gggccaggaugagaguuau

SEQ ID NO: 1022673 - RNA, 19 nt, Artificial Sequence
  Description of Artificial Sequence: Synthetic oligonucleotide
  Antisense strand to SEQ ID NO: 1022672
auaacucucauccuggccc

SEQ ID NO: 1022674 - RNA, 19 nt, Artificial Sequence
  Description of Artificial Sequence: Synthetic oligonucleotide
  Sense strand starting at position 2155 of SEQ ID NO: 914682
gggcuaggaugagcauuau

SEQ ID NO: 1022675 - RNA, 19 nt, Artificial Sequence
  Description of Artificial Sequence: Synthetic oligonucleotide
  Antisense strand to SEQ ID NO: 1022674
auaaugcucauccuagccc

SEQ ID NO: 1022676 - RNA, 19 nt, Artificial Sequence
  Description of Artificial Sequence: Synthetic oligonucleotide
  Sense strand starting at position 2216 of SEQ ID NO: 914682
gcagguccucgggagaguu

SEQ ID NO: 1022677 - RNA, 19 nt, Artificial Sequence
  Description of Artificial Sequence: Synthetic oligonucleotide
  Antisense strand to SEQ ID NO: 1022676
aacucucccgaggaccugc

SEQ ID NO: 1022678 - RNA, 19 nt, Artificial Sequence
  Description of Artificial Sequence: Synthetic oligonucleotide
  Sense strand starting at position 2491 of SEQ ID NO: 914682
gggcguuggcuaugucgua

SEQ ID NO: 1022679 - RNA, 19 nt, Artificial Sequence
  Description of Artificial Sequence: Synthetic oligonucleotide
  Antisense strand to SEQ ID NO: 1022678
uacgacauagccaacgccc

SEQ ID NO: 1022680 - RNA, 19 nt, Artificial Sequence
  Description of Artificial Sequence: Synthetic oligonucleotide
  Sense strand starting at position 2758 of SEQ ID NO: 914682
ggguccaaggugugagaaa

SEQ ID NO: 1022681 - RNA, 19 nt, Artificial Sequence
  Description of Artificial Sequence: Synthetic oligonucleotide
  Antisense strand to SEQ ID NO: 1022680
uuucucacaccuuggaccc

SEQ ID NO: 1022682 - RNA, 19 nt, Artificial Sequence
  Description of Artificial Sequence: Synthetic oligonucleotide
  Sense strand starting at position 3222 of SEQ ID NO: 914682
ugugucuggcaagggauau

SEQ ID NO: 1022683 - RNA, 19 nt, Artificial Sequence
  Description of Artificial Sequence: Synthetic oligonucleotide
  Antisense strand to SEQ ID NO: 1022682
auaucccuugccagacaca

SEQ ID NO: 1022684 - RNA, 19 nt, Artificial Sequence
  Description of Artificial Sequence: Synthetic oligonucleotide
  Sense strand starting at position 3228 of SEQ ID NO: 914682
uggcaagggauauguaaca

SEQ ID NO: 1022685 - RNA, 19 nt, Artificial Sequence
  Description of Artificial Sequence: Synthetic oligonucleotide
  Antisense strand to SEQ ID NO: 1022684
uguuacauaucccuugcca

SEQ ID NO: 1022686 - RNA, 19 nt, Artificial Sequence
  Description of Artificial Sequence: Synthetic oligonucleotide
  Sense strand starting at position 3350 of SEQ ID NO: 914682
agugauaucugccacgaag

SEQ ID NO: 1022687 - RNA, 19 nt, Artificial Sequence
  Description of Artificial Sequence: Synthetic oligonucleotide
  Antisense strand to SEQ ID NO: 1022686
cuucguggcagauaucacu

SEQ ID NO: 1022688 - RNA, 19 nt, Artificial Sequence
  Description of Artificial Sequence: Synthetic oligonucleotide
  Sense strand starting at position 3757 of SEQ ID NO: 914682
ccugcucagcugugagaau

SEQ ID NO: 1022689 - RNA, 19 nt, Artificial Sequence
  Description of Artificial Sequence: Synthetic oligonucleotide
  Antisense strand to SEQ ID NO: 1022688
auucucacagcugagcagg

SEQ ID NO: 1022690 - RNA, 19 nt, Artificial Sequence
  Description of Artificial Sequence: Synthetic oligonucleotide
  Sense strand starting at position 3758 of SEQ ID NO: 914682
cugcucagcugugagaaua

SEQ ID NO: 1022691 - RNA, 19 nt, Artificial Sequence
  Description of Artificial Sequence: Synthetic oligonucleotide
  Antisense strand to SEQ ID NO: 1022690
uauucucacagcugagcag

SEQ ID NO: 1022692 - RNA, 19 nt, Artificial Sequence
  Description of Artificial Sequence: Synthetic oligonucleotide
  Sense strand starting at position 3800 of SEQ ID NO: 914682
gaauacacguguucucuca

SEQ ID NO: 1022693 - RNA, 19 nt, Artificial Sequence
  Description of Artificial Sequence: Synthetic oligonucleotide
  Antisense strand to SEQ ID NO: 1022692
ugagagaacacguguauuc

SEQ ID NO: 1022694 - RNA, 19 nt, Artificial Sequence
  Description of Artificial Sequence: Synthetic oligonucleotide
  Sense strand starting at position 3963 of SEQ ID NO: 914682
guuucugggucugagaugu

SEQ ID NO: 1022695 - RNA, 19 nt, Artificial Sequence
  Description of Artificial Sequence: Synthetic oligonucleotide
  Antisense strand to SEQ ID NO: 1022694
acaucucagacccagaaac

SEQ ID NO: 1022696 - RNA, 19 nt, Artificial Sequence
  Description of Artificial Sequence: Synthetic oligonucleotide
  Sense strand starting at position 3967 of SEQ ID NO: 914682
cugggucugagauguugca

SEQ ID NO: 1022697 - RNA, 19 nt, Artificial Sequence
  Description of Artificial Sequence: Synthetic oligonucleotide
  Antisense strand to SEQ ID NO: 1022696
ugcaacaucucagacccag

SEQ ID NO: 1022698 - RNA, 19 nt, Artificial Sequence
  Description of Artificial Sequence: Synthetic oligonucleotide
  Sense strand starting at position 1225 of SEQ ID NO: 914683
gguaacuacugccauaauu

SEQ ID NO: 1022699 - RNA, 19 nt, Artificial Sequence
  Description of Artificial Sequence: Synthetic oligonucleotide
  Antisense strand to SEQ ID NO: 1022698
aauuauggcaguaguuacc

SEQ ID NO: 1022700 - RNA, 19 nt, Artificial Sequence
  Description of Artificial Sequence: Synthetic oligonucleotide
  Sense strand starting at position 1233 of SEQ ID NO: 914683
cugccauaauugguaacua

SEQ ID NO: 1022701 - RNA, 19 nt, Artificial Sequence
  Description of Artificial Sequence: Synthetic oligonucleotide
  Antisense strand to SEQ ID NO: 1022700
uaguuaccaauuauggcag

SEQ ID NO: 1022702 - RNA, 19 nt, Artificial Sequence
  Description of Artificial Sequence: Synthetic oligonucleotide
  Sense strand starting at position 1234 of SEQ ID NO: 914683
ugccauaauugguaacuau

SEQ ID NO: 1022703 - RNA, 19 nt, Artificial Sequence
  Description of Artificial Sequence: Synthetic oligonucleotide
  Antisense strand to SEQ ID NO: 1022702
auaguuaccaauuauggca

SEQ ID NO: 1022704 - RNA, 19 nt, Artificial Sequence
  Description of Artificial Sequence: Synthetic oligonucleotide
  Sense strand starting at position 1293 of SEQ ID NO: 914683
gccugcaaguccucugaga

SEQ ID NO: 1022705 - RNA, 19 nt, Artificial Sequence
  Description of Artificial Sequence: Synthetic oligonucleotide
  Antisense strand to SEQ ID NO: 1022704
ucucagaggacuugcaggc

SEQ ID NO: 1022706 - RNA, 19 nt, Artificial Sequence
  Description of Artificial Sequence: Synthetic oligonucleotide
  Sense strand starting at position 2067 of SEQ ID NO: 914683
ugaucuaacaguggaguca

SEQ ID NO: 1022707 - RNA, 19 nt, Artificial Sequence
  Description of Artificial Sequence: Synthetic oligonucleotide
  Antisense strand to SEQ ID NO: 1022706
ugacuccacuguuagauca

SEQ ID NO: 1022708 - RNA, 19 nt, Artificial Sequence
  Description of Artificial Sequence: Synthetic oligonucleotide
  Sense strand starting at position 2173 of SEQ ID NO: 914683
gugggcaugagaugggaua

SEQ ID NO: 1022709 - RNA, 19 nt, Artificial Sequence
  Description of Artificial Sequence: Synthetic oligonucleotide
  Antisense strand to SEQ ID NO: 1022708
uaucccaucucaugcccac

SEQ ID NO: 1022710 - RNA, 19 nt, Artificial Sequence
  Description of Artificial Sequence: Synthetic oligonucleotide
  Sense strand starting at position 2360 of SEQ ID NO: 914683
ggcuauggcuucuuccuua

SEQ ID NO: 1022711 - RNA, 19 nt, Artificial Sequence
  Description of Artificial Sequence: Synthetic oligonucleotide
  Antisense strand to SEQ ID NO: 1022710
uaaggaagaagccauagcc

SEQ ID NO: 1022712 - RNA, 19 nt, Artificial Sequence
  Description of Artificial Sequence: Synthetic oligonucleotide
  Sense strand starting at position 2364 of SEQ ID NO: 914683
auggcuucuuccuuagaaa

SEQ ID NO: 1022713 - RNA, 19 nt, Artificial Sequence
  Description of Artificial Sequence: Synthetic oligonucleotide
  Antisense strand to SEQ ID NO: 1022712
uuucuaaggaagaagccau

SEQ ID NO: 1022714 - RNA, 19 nt, Artificial Sequence
  Description of Artificial Sequence: Synthetic oligonucleotide
  Sense strand starting at position 3103 of SEQ ID NO: 914683
guaucacauuuaugcccua

SEQ ID NO: 1022715 - RNA, 19 nt, Artificial Sequence
  Description of Artificial Sequence: Synthetic oligonucleotide
  Antisense strand to SEQ ID NO: 1022714
uagggcauaaaugugauac

SEQ ID NO: 1022716 - RNA, 19 nt, Artificial Sequence
  Description of Artificial Sequence: Synthetic oligonucleotide
  Sense strand starting at position 3190 of SEQ ID NO: 914683
ggugcuuggugcucuuauu

SEQ ID NO: 1022717 - RNA, 19 nt, Artificial Sequence
  Description of Artificial Sequence: Synthetic oligonucleotide
  Antisense strand to SEQ ID NO: 1022716
aauaagagcaccaagcacc

SEQ ID NO: 1022718 - RNA, 19 nt, Artificial Sequence
  Description of Artificial Sequence: Synthetic oligonucleotide
  Sense strand starting at position 3196 of SEQ ID NO: 914683
uggugcucuuauugaguua

SEQ ID NO: 1022719 - RNA, 19 nt, Artificial Sequence
  Description of Artificial Sequence: Synthetic oligonucleotide
  Antisense strand to SEQ ID NO: 1022718
uaacucaauaagagcacca

SEQ ID NO: 1022720 - RNA, 19 nt, Artificial Sequence
  Description of Artificial Sequence: Synthetic oligonucleotide
  Sense strand starting at position 3197 of SEQ ID NO: 914683
ggugcucuuauugaguuaa

SEQ ID NO: 1022721 - RNA, 19 nt, Artificial Sequence
  Description of Artificial Sequence: Synthetic oligonucleotide
  Antisense strand to SEQ ID NO: 1022720
uuaacucaauaagagcacc

SEQ ID NO: 1022722 - RNA, 19 nt, Artificial Sequence
  Description of Artificial Sequence: Synthetic oligonucleotide
  Sense strand starting at position 3201 of SEQ ID NO: 914683
cucuuauugaguuaagggu

SEQ ID NO: 1022723 - RNA, 19 nt, Artificial Sequence
  Description of Artificial Sequence: Synthetic oligonucleotide
  Antisense strand to SEQ ID NO: 1022722
acccuuaacucaauaagag

SEQ ID NO: 1022724 - RNA, 19 nt, Artificial Sequence
  Description of Artificial Sequence: Synthetic oligonucleotide
  Sense strand starting at position 3210 of SEQ ID NO: 914683
aguuaaggguccucuuuag

SEQ ID NO: 1022725 - RNA, 19 nt, Artificial Sequence
  Description of Artificial Sequence: Synthetic oligonucleotide
  Antisense strand to SEQ ID NO: 1022724
cuaaagaggacccuuaacu

SEQ ID NO: 1022726 - RNA, 19 nt, Artificial Sequence
  Description of Artificial Sequence: Synthetic oligonucleotide
  Sense strand starting at position 3303 of SEQ ID NO: 914683
gggccucuaucaccacuua

SEQ ID NO: 1022727 - RNA, 19 nt, Artificial Sequence
  Description of Artificial Sequence: Synthetic oligonucleotide
  Antisense strand to SEQ ID NO: 1022726
uaaguggugauagaggccc

SEQ ID NO: 1022728 - RNA, 19 nt, Artificial Sequence
  Description of Artificial Sequence: Synthetic oligonucleotide
  Sense strand starting at position 3370 of SEQ ID NO: 914683
uuacucuuaccgggauuau

SEQ ID NO: 1022729 - RNA, 19 nt, Artificial Sequence
  Description of Artificial Sequence: Synthetic oligonucleotide
  Antisense strand to SEQ ID NO: 1022728
auaaucccgguaagaguaa

SEQ ID NO: 1022730 - RNA, 19 nt, Artificial Sequence
  Description of Artificial Sequence: Synthetic oligonucleotide
  Sense strand starting at position 3371 of SEQ ID NO: 914683
uacucuuaccgggauuauc

SEQ ID NO: 1022731 - RNA, 19 nt, Artificial Sequence
  Description of Artificial Sequence: Synthetic oligonucleotide
  Antisense strand to SEQ ID NO: 1022730
gauaaucccgguaagagua

SEQ ID NO: 1022732 - RNA, 19 nt, Artificial Sequence
  Description of Artificial Sequence: Synthetic oligonucleotide
  Sense strand starting at position 54 of SEQ ID NO: 914684
gagucagaauugcuugauc

SEQ ID NO: 1022733 - RNA, 19 nt, Artificial Sequence
  Description of Artificial Sequence: Synthetic oligonucleotide
  Antisense strand to SEQ ID NO: 1022732
gaucaagcaauucugacuc

SEQ ID NO: 1022734 - RNA, 19 nt, Artificial Sequence
  Description of Artificial Sequence: Synthetic oligonucleotide
  Sense strand starting at position 57 of SEQ ID NO: 914684
ucagaauugcuugauccug

SEQ ID NO: 1022735 - RNA, 19 nt, Artificial Sequence
  Description of Artificial Sequence: Synthetic oligonucleotide
  Antisense strand to SEQ ID NO: 1022734
caggaucaagcaauucuga

SEQ ID NO: 1022736 - RNA, 19 nt, Artificial Sequence
  Description of Artificial Sequence: Synthetic oligonucleotide
  Sense strand starting at position 212 of SEQ ID NO: 914684
ucguauuuacugugcuuua

SEQ ID NO: 1022737 - RNA, 19 nt, Artificial Sequence
  Description of Artificial Sequence: Synthetic oligonucleotide
  Antisense strand to SEQ ID NO: 1022736
uaaagcacaguaaauacga

SEQ ID NO: 1022738 - RNA, 19 nt, Artificial Sequence
  Description of Artificial Sequence: Synthetic oligonucleotide
  Sense strand starting at position 213 of SEQ ID NO: 914684
cguauuuacugugcuuuaa

SEQ ID NO: 1022739 - RNA, 19 nt, Artificial Sequence
  Description of Artificial Sequence: Synthetic oligonucleotide
  Antisense strand to SEQ ID NO: 1022738
uuaaagcacaguaaauacg

SEQ ID NO: 1022740 - RNA, 19 nt, Artificial Sequence
  Description of Artificial Sequence: Synthetic oligonucleotide
  Sense strand starting at position 232 of SEQ ID NO: 914684
acauuugucugugcgucaa

SEQ ID NO: 1022741 - RNA, 19 nt, Artificial Sequence
  Description of Artificial Sequence: Synthetic oligonucleotide
  Antisense strand to SEQ ID NO: 1022740
uugacgcacagacaaaugu

SEQ ID NO: 1022742 - RNA, 19 nt, Artificial Sequence
  Description of Artificial Sequence: Synthetic oligonucleotide
  Sense strand starting at position 240 of SEQ ID NO: 914684
cugugcgucaaugcuuuaa

SEQ ID NO: 1022743 - RNA, 19 nt, Artificial Sequence
  Description of Artificial Sequence: Synthetic oligonucleotide
  Antisense strand to SEQ ID NO: 1022742
uuaaagcauugacgcacag

SEQ ID NO: 1022744 - RNA, 19 nt, Artificial Sequence
  Description of Artificial Sequence: Synthetic oligonucleotide
  Sense strand starting at position 260 of SEQ ID NO: 914684
gggacauacuaugugguga

SEQ ID NO: 1022745 - RNA, 19 nt, Artificial Sequence
  Description of Artificial Sequence: Synthetic oligonucleotide
  Antisense strand to SEQ ID NO: 1022744
ucaccacauaguauguccc

SEQ ID NO: 1022746 - RNA, 19 nt, Artificial Sequence
  Description of Artificial Sequence: Synthetic oligonucleotide
  Sense strand starting at position 261 of SEQ ID NO: 914684
ggacauacuauguggugau

SEQ ID NO: 1022747 - RNA, 19 nt, Artificial Sequence
  Description of Artificial Sequence: Synthetic oligonucleotide
  Antisense strand to SEQ ID NO: 1022746
aucaccacauaguaugucc

SEQ ID NO: 1022748 - RNA, 19 nt, Artificial Sequence
  Description of Artificial Sequence: Synthetic oligonucleotide
  Sense strand starting at position 355 of SEQ ID NO: 914684
cugguuaacugguuagaau

SEQ ID NO: 1022749 - RNA, 19 nt, Artificial Sequence
  Description of Artificial Sequence: Synthetic oligonucleotide
  Antisense strand to SEQ ID NO: 1022748
auucuaaccaguuaaccag

SEQ ID NO: 1022750 - RNA, 19 nt, Artificial Sequence
  Description of Artificial Sequence: Synthetic oligonucleotide
  Sense strand starting at position 366 of SEQ ID NO: 914684
guuagaauacuagguuaac

SEQ ID NO: 1022751 - RNA, 19 nt, Artificial Sequence
  Description of Artificial Sequence: Synthetic oligonucleotide
  Antisense strand to SEQ ID NO: 1022750
guuaaccuaguauucuaac

SEQ ID NO: 1022752 - RNA, 19 nt, Artificial Sequence
  Description of Artificial Sequence: Synthetic oligonucleotide
  Sense strand starting at position 430 of SEQ ID NO: 914684
cugacacugccaggaauaa

SEQ ID NO: 1022753 - RNA, 19 nt, Artificial Sequence
  Description of Artificial Sequence: Synthetic oligonucleotide
  Antisense strand to SEQ ID NO: 1022752
uuauuccuggcagugucag

SEQ ID NO: 1022754 - RNA, 19 nt, Artificial Sequence
  Description of Artificial Sequence: Synthetic oligonucleotide
  Sense strand starting at position 547 of SEQ ID NO: 914684
uucuuuaaacgguacacau

SEQ ID NO: 1022755 - RNA, 19 nt, Artificial Sequence
  Description of Artificial Sequence: Synthetic oligonucleotide
  Antisense strand to SEQ ID NO: 1022754
auguguaccguuuaaagaa

SEQ ID NO: 1022756 - RNA, 19 nt, Artificial Sequence
  Description of Artificial Sequence: Synthetic oligonucleotide
  Sense strand starting at position 770 of SEQ ID NO: 914684
uauauuuggugagaacauu

SEQ ID NO: 1022757 - RNA, 19 nt, Artificial Sequence
  Description of Artificial Sequence: Synthetic oligonucleotide
  Antisense strand to SEQ ID NO: 1022756
aauguucucaccaaauaua

SEQ ID NO: 1022758 - RNA, 19 nt, Artificial Sequence
  Description of Artificial Sequence: Synthetic oligonucleotide
  Sense strand starting at position 776 of SEQ ID NO: 914684
uggugagaacauuguaauu

SEQ ID NO: 1022759 - RNA, 19 nt, Artificial Sequence
  Description of Artificial Sequence: Synthetic oligonucleotide
  Antisense strand to SEQ ID NO: 1022758
aauuacaauguucucacca

SEQ ID NO: 1022760 - RNA, 19 nt, Artificial Sequence
  Description of Artificial Sequence: Synthetic oligonucleotide
  Sense strand starting at position 920 of SEQ ID NO: 914684
gaggucuguccagaugcua

SEQ ID NO: 1022761 - RNA, 19 nt, Artificial Sequence
  Description of Artificial Sequence: Synthetic oligonucleotide
  Antisense strand to SEQ ID NO: 1022760
uagcaucuggacagaccuc

SEQ ID NO: 1022762 - RNA, 19 nt, Artificial Sequence
  Description of Artificial Sequence: Synthetic oligonucleotide
  Sense strand starting at position 1482 of SEQ ID NO: 914684
aucagagaguccuccugga

SEQ ID NO: 1022763 - RNA, 19 nt, Artificial Sequence
  Description of Artificial Sequence: Synthetic oligonucleotide
  Antisense strand to SEQ ID NO: 1022762
uccaggaggacucucugau

SEQ ID NO: 1022764 - RNA, 19 nt, Artificial Sequence
  Description of Artificial Sequence: Synthetic oligonucleotide
  Sense strand starting at position 1486 of SEQ ID NO: 914684
gagaguccuccuggagauu

SEQ ID NO: 1022765 - RNA, 19 nt, Artificial Sequence
  Description of Artificial Sequence: Synthetic oligonucleotide
  Antisense strand to SEQ ID NO: 1022764
aaucuccaggaggacucuc

SEQ ID NO: 1022766 - RNA, 19 nt, Artificial Sequence
  Description of Artificial Sequence: Synthetic oligonucleotide
  Sense strand starting at position 1506 of SEQ ID NO: 914684
ggguucucucuauagccau

SEQ ID NO: 1022767 - RNA, 19 nt, Artificial Sequence
  Description of Artificial Sequence: Synthetic oligonucleotide
  Antisense strand to SEQ ID NO: 1022766
auggcuauagagagaaccc

SEQ ID NO: 1022768 - RNA, 19 nt, Artificial Sequence
  Description of Artificial Sequence: Synthetic oligonucleotide
  Sense strand starting at position 2030 of SEQ ID NO: 914684
auuggaacauccgcgaaau

SEQ ID NO: 1022769 - RNA, 19 nt, Artificial Sequence
  Description of Artificial Sequence: Synthetic oligonucleotide
  Antisense strand to SEQ ID NO: 1022768
auuucgcggauguuccaau

SEQ ID NO: 1022770 - RNA, 19 nt, Artificial Sequence
  Description of Artificial Sequence: Synthetic oligonucleotide
  Sense strand starting at position 2031 of SEQ ID NO: 914684
uuggaacauccgcgaaaug

SEQ ID NO: 1022771 - RNA, 19 nt, Artificial Sequence
  Description of Artificial Sequence: Synthetic oligonucleotide
  Antisense strand to SEQ ID NO: 1022770
cauuucgcggauguuccaa

SEQ ID NO: 1022772 - RNA, 19 nt, Artificial Sequence
  Description of Artificial Sequence: Synthetic oligonucleotide
  Sense strand starting at position 2032 of SEQ ID NO: 914684
uggaacauccgcgaaauga

SEQ ID NO: 1022773 - RNA, 19 nt, Artificial Sequence
  Description of Artificial Sequence: Synthetic oligonucleotide
  Antisense strand to SEQ ID NO: 1022772
ucauuucgcggauguucca

SEQ ID NO: 1022774 - RNA, 19 nt, Artificial Sequence
  Description of Artificial Sequence: Synthetic oligonucleotide
  Sense strand starting at position 2064 of SEQ ID NO: 914684
aaugcuauuggucgaaaug

SEQ ID NO: 1022775 - RNA, 19 nt, Artificial Sequence
  Description of Artificial Sequence: Synthetic oligonucleotide
  Antisense strand to SEQ ID NO: 1022774
cauuucgaccaauagcauu

SEQ ID NO: 1022776 - RNA, 19 nt, Artificial Sequence
  Description of Artificial Sequence: Synthetic oligonucleotide
  Sense strand starting at position 2100 of SEQ ID NO: 914684
gucuuuauccguguuccuu

SEQ ID NO: 1022777 - RNA, 19 nt, Artificial Sequence
  Description of Artificial Sequence: Synthetic oligonucleotide
  Antisense strand to SEQ ID NO: 1022776
aaggaacacggauaaagac

SEQ ID NO: 1022778 - RNA, 19 nt, Artificial Sequence
  Description of Artificial Sequence: Synthetic oligonucleotide
  Sense strand starting at position 2164 of SEQ ID NO: 914684
caaagagguucuucuuagu

SEQ ID NO: 1022779 - RNA, 19 nt, Artificial Sequence
  Description of Artificial Sequence: Synthetic oligonucleotide
  Antisense strand to SEQ ID NO: 1022778
acuaagaagaaccucuuug

SEQ ID NO: 1022780 - RNA, 19 nt, Artificial Sequence
  Description of Artificial Sequence: Synthetic oligonucleotide
  Sense strand starting at position 2201 of SEQ ID NO: 914684
gggcauccuaccgagaauu

SEQ ID NO: 1022781 - RNA, 19 nt, Artificial Sequence
  Description of Artificial Sequence: Synthetic oligonucleotide
  Antisense strand to SEQ ID NO: 1022780
aauucucgguaggaugccc

SEQ ID NO: 1022782 - RNA, 19 nt, Artificial Sequence
  Description of Artificial Sequence: Synthetic oligonucleotide
  Sense strand starting at position 2277 of SEQ ID NO: 914684
uuggaaauauccuuaagua

SEQ ID NO: 1022783 - RNA, 19 nt, Artificial Sequence
  Description of Artificial Sequence: Synthetic oligonucleotide
  Antisense strand to SEQ ID NO: 1022782
uacuuaaggauauuuccaa

SEQ ID NO: 1022784 - RNA, 19 nt, Artificial Sequence
  Description of Artificial Sequence: Synthetic oligonucleotide
  Sense strand starting at position 2318 of SEQ ID NO: 914684
aaacuagaaucuguguuga

SEQ ID NO: 1022785 - RNA, 19 nt, Artificial Sequence
  Description of Artificial Sequence: Synthetic oligonucleotide
  Antisense strand to SEQ ID NO: 1022784
ucaacacagauucuaguuu

SEQ ID NO: 1022786 - RNA, 19 nt, Artificial Sequence
  Description of Artificial Sequence: Synthetic oligonucleotide
  Sense strand starting at position 2323 of SEQ ID NO: 914684
agaaucuguguugagguuu

SEQ ID NO: 1022787 - RNA, 19 nt, Artificial Sequence
  Description of Artificial Sequence: Synthetic oligonucleotide
  Antisense strand to SEQ ID NO: 1022786
aaaccucaacacagauucu

SEQ ID NO: 1022788 - RNA, 19 nt, Artificial Sequence
  Description of Artificial Sequence: Synthetic oligonucleotide
  Sense strand starting at position 2350 of SEQ ID NO: 914684
uaaguaacgccagagacau

SEQ ID NO: 1022789 - RNA, 19 nt, Artificial Sequence
  Description of Artificial Sequence: Synthetic oligonucleotide
  Antisense strand to SEQ ID NO: 1022788
augucucuggcguuacuua

SEQ ID NO: 1022790 - RNA, 19 nt, Artificial Sequence
  Description of Artificial Sequence: Synthetic oligonucleotide
  Sense strand starting at position 2366 of SEQ ID NO: 914684
cauacugugacgugaggaa

SEQ ID NO: 1022791 - RNA, 19 nt, Artificial Sequence
  Description of Artificial Sequence: Synthetic oligonucleotide
  Antisense strand to SEQ ID NO: 1022790
uuccucacgucacaguaug

SEQ ID NO: 1022792 - RNA, 19 nt, Artificial Sequence
  Description of Artificial Sequence: Synthetic oligonucleotide
  Sense strand starting at position 2406 of SEQ ID NO: 914684
agaucuauuugagaaacau

SEQ ID NO: 1022793 - RNA, 19 nt, Artificial Sequence
  Description of Artificial Sequence: Synthetic oligonucleotide
  Antisense strand to SEQ ID NO: 1022792
auguuucucaaauagaucu

SEQ ID NO: 1022794 - RNA, 19 nt, Artificial Sequence
  Description of Artificial Sequence: Synthetic oligonucleotide
  Sense strand starting at position 2488 of SEQ ID NO: 914684
uuguccuuccauuauuaga

SEQ ID NO: 1022795 - RNA, 19 nt, Artificial Sequence
  Description of Artificial Sequence: Synthetic oligonucleotide
  Antisense strand to SEQ ID NO: 1022794
ucuaauaauggaaggacaa

SEQ ID NO: 1022796 - RNA, 19 nt, Artificial Sequence
  Description of Artificial Sequence: Synthetic oligonucleotide
  Sense strand starting at position 2782 of SEQ ID NO: 914684
ugucaacuccuaggaguug

SEQ ID NO: 1022797 - RNA, 19 nt, Artificial Sequence
  Description of Artificial Sequence: Synthetic oligonucleotide
  Antisense strand to SEQ ID NO: 1022796
caacuccuaggaguugaca

SEQ ID NO: 1022798 - RNA, 19 nt, Artificial Sequence
  Description of Artificial Sequence: Synthetic oligonucleotide
  Sense strand starting at position 2860 of SEQ ID NO: 914684
agcugaauuuccuuccagu

SEQ ID NO: 1022799 - RNA, 19 nt, Artificial Sequence
  Description of Artificial Sequence: Synthetic oligonucleotide
  Antisense strand to SEQ ID NO: 1022798
acuggaaggaaauucagcu

SEQ ID NO: 1022800 - RNA, 19 nt, Artificial Sequence
  Description of Artificial Sequence: Synthetic oligonucleotide
  Sense strand starting at position 3280 of SEQ ID NO: 914684
acucuuacuugguccugaa

SEQ ID NO: 1022801 - RNA, 19 nt, Artificial Sequence
  Description of Artificial Sequence: Synthetic oligonucleotide
  Antisense strand to SEQ ID NO: 1022800
uucaggaccaaguaagagu

SEQ ID NO: 1022802 - RNA, 19 nt, Artificial Sequence
  Description of Artificial Sequence: Synthetic oligonucleotide
  Sense strand starting at position 3565 of SEQ ID NO: 914684
gugauaguaggaugaaauu

SEQ ID NO: 1022803 - RNA, 19 nt, Artificial Sequence
  Description of Artificial Sequence: Synthetic oligonucleotide
  Antisense strand to SEQ ID NO: 1022802
aauuucauccuacuaucac

SEQ ID NO: 1022804 - RNA, 19 nt, Artificial Sequence
  Description of Artificial Sequence: Synthetic oligonucleotide
  Sense strand starting at position 3609 of SEQ ID NO: 914684
auaggaaggucucuuuaau

SEQ ID NO: 1022805 - RNA, 19 nt, Artificial Sequence
  Description of Artificial Sequence: Synthetic oligonucleotide
  Antisense strand to SEQ ID NO: 1022804
auuaaagagaccuuccuau

SEQ ID NO: 1022806 - RNA, 19 nt, Artificial Sequence
  Description of Artificial Sequence: Synthetic oligonucleotide
  Sense strand starting at position 3615 of SEQ ID NO: 914684
aggucucuuuaauuacuga

SEQ ID NO: 1022807 - RNA, 19 nt, Artificial Sequence
  Description of Artificial Sequence: Synthetic oligonucleotide
  Antisense strand to SEQ ID NO: 1022806
ucaguaauuaaagagaccu

SEQ ID NO: 1022808 - RNA, 19 nt, Artificial Sequence
  Description of Artificial Sequence: Synthetic oligonucleotide
  Sense strand starting at position 3817 of SEQ ID NO: 914684
cuagcuaaucgggagguua

SEQ ID NO: 1022809 - RNA, 19 nt, Artificial Sequence
  Description of Artificial Sequence: Synthetic oligonucleotide
  Antisense strand to SEQ ID NO: 1022808
uaaccucccgauuagcuag

SEQ ID NO: 1022810 - RNA, 19 nt, Artificial Sequence
  Description of Artificial Sequence: Synthetic oligonucleotide
  Sense strand starting at position 3819 of SEQ ID NO: 914684
agcuaaucgggagguuaag

SEQ ID NO: 1022811 - RNA, 19 nt, Artificial Sequence
  Description of Artificial Sequence: Synthetic oligonucleotide
  Antisense strand to SEQ ID NO: 1022810
cuuaaccucccgauuagcu

SEQ ID NO: 1022812 - RNA, 19 nt, Artificial Sequence
  Description of Artificial Sequence: Synthetic oligonucleotide
  Sense strand starting at position 120 of SEQ ID NO: 914685
gcggauggaucucuugaag

SEQ ID NO: 1022813 - RNA, 19 nt, Artificial Sequence
  Description of Artificial Sequence: Synthetic oligonucleotide
  Antisense strand to SEQ ID NO: 1022812
cuucaagagauccauccgc

SEQ ID NO: 1022814 - RNA, 19 nt, Artificial Sequence
  Description of Artificial Sequence: Synthetic oligonucleotide
  Sense strand starting at position 256 of SEQ ID NO: 914685
gcaagagcugaucacuuga

SEQ ID NO: 1022815 - RNA, 19 nt, Artificial Sequence
  Description of Artificial Sequence: Synthetic oligonucleotide
  Antisense strand to SEQ ID NO: 1022814
ucaagugaucagcucuugc

SEQ ID NO: 1022816 - RNA, 19 nt, Artificial Sequence
  Description of Artificial Sequence: Synthetic oligonucleotide
  Sense strand starting at position 483 of SEQ ID NO: 914685
gaaagaucucuugggccga

SEQ ID NO: 1022817 - RNA, 19 nt, Artificial Sequence
  Description of Artificial Sequence: Synthetic oligonucleotide
  Antisense strand to SEQ ID NO: 1022816
ucggcccaagagaucuuuc

SEQ ID NO: 1022818 - RNA, 19 nt, Artificial Sequence
  Description of Artificial Sequence: Synthetic oligonucleotide
  Sense strand starting at position 512 of SEQ ID NO: 914685
gcuggaacgagcuaugauc

SEQ ID NO: 1022819 - RNA, 19 nt, Artificial Sequence
  Description of Artificial Sequence: Synthetic oligonucleotide
  Antisense strand to SEQ ID NO: 1022818
gaucauagcucguuccagc

SEQ ID NO: 1022820 - RNA, 19 nt, Artificial Sequence
  Description of Artificial Sequence: Synthetic oligonucleotide
  Sense strand starting at position 602 of SEQ ID NO: 914685
auacaucaggauuguacuu

SEQ ID NO: 1022821 - RNA, 19 nt, Artificial Sequence
  Description of Artificial Sequence: Synthetic oligonucleotide
  Antisense strand to SEQ ID NO: 1022820
aaguacaauccugauguau

SEQ ID NO: 1022822 - RNA, 19 nt, Artificial Sequence
  Description of Artificial Sequence: Synthetic oligonucleotide
  Sense strand starting at position 615 of SEQ ID NO: 914685
guacuuauacguuaauucu

SEQ ID NO: 1022823 - RNA, 19 nt, Artificial Sequence
  Description of Artificial Sequence: Synthetic oligonucleotide
  Antisense strand to SEQ ID NO: 1022822
agaauuaacguauaaguac

SEQ ID NO: 1022824 - RNA, 19 nt, Artificial Sequence
  Description of Artificial Sequence: Synthetic oligonucleotide
  Sense strand starting at position 727 of SEQ ID NO: 914685
uucugagaguaucuucuga

SEQ ID NO: 1022825 - RNA, 19 nt, Artificial Sequence
  Description of Artificial Sequence: Synthetic oligonucleotide
  Antisense strand to SEQ ID NO: 1022824
ucagaagauacucucagaa

SEQ ID NO: 1022826 - RNA, 19 nt, Artificial Sequence
  Description of Artificial Sequence: Synthetic oligonucleotide
  Sense strand starting at position 729 of SEQ ID NO: 914685
cugagaguaucuucugaug

SEQ ID NO: 1022827 - RNA, 19 nt, Artificial Sequence
  Description of Artificial Sequence: Synthetic oligonucleotide
  Antisense strand to SEQ ID NO: 1022826
caucagaagauacucucag

SEQ ID NO: 1022828 - RNA, 19 nt, Artificial Sequence
  Description of Artificial Sequence: Synthetic oligonucleotide
  Sense strand starting at position 740 of SEQ ID NO: 914685
uucugauguugucuuuaaa

SEQ ID NO: 1022829 - RNA, 19 nt, Artificial Sequence
  Description of Artificial Sequence: Synthetic oligonucleotide
  Antisense strand to SEQ ID NO: 1022828
uuuaaagacaacaucagaa

SEQ ID NO: 1022830 - RNA, 19 nt, Artificial Sequence
  Description of Artificial Sequence: Synthetic oligonucleotide
  Sense strand starting at position 743 of SEQ ID NO: 914685
ugauguugucuuuaaacca

SEQ ID NO: 1022831 - RNA, 19 nt, Artificial Sequence
  Description of Artificial Sequence: Synthetic oligonucleotide
  Antisense strand to SEQ ID NO: 1022830
ugguuuaaagacaacauca

SEQ ID NO: 1022832 - RNA, 19 nt, Artificial Sequence
  Description of Artificial Sequence: Synthetic oligonucleotide
  Sense strand starting at position 790 of SEQ ID NO: 914685
agggauuccugacugccau

SEQ ID NO: 1022833 - RNA, 19 nt, Artificial Sequence
  Description of Artificial Sequence: Synthetic oligonucleotide
  Antisense strand to SEQ ID NO: 1022832
auggcagucaggaaucccu

SEQ ID NO: 1022834 - RNA, 19 nt, Artificial Sequence
  Description of Artificial Sequence: Synthetic oligonucleotide
  Sense strand starting at position 961 of SEQ ID NO: 914685
uugaguauuuggcccucca

SEQ ID NO: 1022835 - RNA, 19 nt, Artificial Sequence
  Description of Artificial Sequence: Synthetic oligonucleotide
  Antisense strand to SEQ ID NO: 1022834
uggagggccaaauacucaa

SEQ ID NO: 1022836 - RNA, 19 nt, Artificial Sequence
  Description of Artificial Sequence: Synthetic oligonucleotide
  Sense strand starting at position 1044 of SEQ ID NO: 914685
cgcagaaucagacaacugu

SEQ ID NO: 1022837 - RNA, 19 nt, Artificial Sequence
  Description of Artificial Sequence: Synthetic oligonucleotide
  Antisense strand to SEQ ID NO: 1022836
acaguugucugauucugcg

SEQ ID NO: 1022838 - RNA, 19 nt, Artificial Sequence
  Description of Artificial Sequence: Synthetic oligonucleotide
  Sense strand starting at position 1133 of SEQ ID NO: 914685
uguauacuuuguccuaaca

SEQ ID NO: 1022839 - RNA, 19 nt, Artificial Sequence
  Description of Artificial Sequence: Synthetic oligonucleotide
  Antisense strand to SEQ ID NO: 1022838
uguuaggacaaaguauaca

SEQ ID NO: 1022840 - RNA, 19 nt, Artificial Sequence
  Description of Artificial Sequence: Synthetic oligonucleotide
  Sense strand starting at position 1261 of SEQ ID NO: 914685
cccaguucuccagagaccu

SEQ ID NO: 1022841 - RNA, 19 nt, Artificial Sequence
  Description of Artificial Sequence: Synthetic oligonucleotide
  Antisense strand to SEQ ID NO: 1022840
aggucucuggagaacuggg

SEQ ID NO: 1022842 - RNA, 19 nt, Artificial Sequence
  Description of Artificial Sequence: Synthetic oligonucleotide
  Sense strand starting at position 2523 of SEQ ID NO: 914685
gagggauccguucggagaa

SEQ ID NO: 1022843 - RNA, 19 nt, Artificial Sequence
  Description of Artificial Sequence: Synthetic oligonucleotide
  Antisense strand to SEQ ID NO: 1022842
uucuccgaacggaucccuc

SEQ ID NO: 1022844 - RNA, 19 nt, Artificial Sequence
  Description of Artificial Sequence: Synthetic oligonucleotide
  Sense strand starting at position 2711 of SEQ ID NO: 914685
gaauaacguuuacuucuga

SEQ ID NO: 1022845 - RNA, 19 nt, Artificial Sequence
  Description of Artificial Sequence: Synthetic oligonucleotide
  Antisense strand to SEQ ID NO: 1022844
ucagaaguaaacguuauuc

SEQ ID NO: 1022846 - RNA, 19 nt, Artificial Sequence
  Description of Artificial Sequence: Synthetic oligonucleotide
  Sense strand starting at position 2799 of SEQ ID NO: 914685
cuguguacacauggaggaa

SEQ ID NO: 1022847 - RNA, 19 nt, Artificial Sequence
  Description of Artificial Sequence: Synthetic oligonucleotide
  Antisense strand to SEQ ID NO: 1022846
uuccuccauguguacacag

SEQ ID NO: 1022848 - RNA, 19 nt, Artificial Sequence
  Description of Artificial Sequence: Synthetic oligonucleotide
  Sense strand starting at position 2930 of SEQ ID NO: 914685
gugggacuccauuguauaa

SEQ ID NO: 1022849 - RNA, 19 nt, Artificial Sequence
  Description of Artificial Sequence: Synthetic oligonucleotide
  Antisense strand to SEQ ID NO: 1022848
uuauacaauggagucccac

SEQ ID NO: 1022850 - RNA, 19 nt, Artificial Sequence
  Description of Artificial Sequence: Synthetic oligonucleotide
  Sense strand starting at position 2948 of SEQ ID NO: 914685
aacaguccgcauuaggauu

SEQ ID NO: 1022851 - RNA, 19 nt, Artificial Sequence
  Description of Artificial Sequence: Synthetic oligonucleotide
  Antisense strand to SEQ ID NO: 1022850
aauccuaaugcggacuguu

SEQ ID NO: 1022852 - RNA, 19 nt, Artificial Sequence
  Description of Artificial Sequence: Synthetic oligonucleotide
  Sense strand starting at position 3007 of SEQ ID NO: 914685
aaagauuugugagaagcaa

SEQ ID NO: 1022853 - RNA, 19 nt, Artificial Sequence
  Description of Artificial Sequence: Synthetic oligonucleotide
  Antisense strand to SEQ ID NO: 1022852
uugcuucucacaaaucuuu

SEQ ID NO: 1022854 - RNA, 19 nt, Artificial Sequence
  Description of Artificial Sequence: Synthetic oligonucleotide
  Sense strand starting at position 3129 of SEQ ID NO: 914685
gugccuggcccuguuagua

SEQ ID NO: 1022855 - RNA, 19 nt, Artificial Sequence
  Description of Artificial Sequence: Synthetic oligonucleotide
  Antisense strand to SEQ ID NO: 1022854
uacuaacagggccaggcac

SEQ ID NO: 1022856 - RNA, 19 nt, Artificial Sequence
  Description of Artificial Sequence: Synthetic oligonucleotide
  Sense strand starting at position 3207 of SEQ ID NO: 914685
uacuuuguggcagauguua

SEQ ID NO: 1022857 - RNA, 19 nt, Artificial Sequence
  Description of Artificial Sequence: Synthetic oligonucleotide
  Antisense strand to SEQ ID NO: 1022856
uaacaucugccacaaagua

SEQ ID NO: 1022858 - RNA, 19 nt, Artificial Sequence
  Description of Artificial Sequence: Synthetic oligonucleotide
  Sense strand starting at position 3224 of SEQ ID NO: 914685
uaaguucuggcucaggaaa

SEQ ID NO: 1022859 - RNA, 19 nt, Artificial Sequence
  Description of Artificial Sequence: Synthetic oligonucleotide
  Antisense strand to SEQ ID NO: 1022858
uuuccugagccagaacuua

SEQ ID NO: 1022860 - RNA, 19 nt, Artificial Sequence
  Description of Artificial Sequence: Synthetic oligonucleotide
  Sense strand starting at position 3340 of SEQ ID NO: 914685
cuugcuuacccucagggau

SEQ ID NO: 1022861 - RNA, 19 nt, Artificial Sequence
  Description of Artificial Sequence: Synthetic oligonucleotide
  Antisense strand to SEQ ID NO: 1022860
aucccugaggguaagcaag

SEQ ID NO: 1022862 - RNA, 19 nt, Artificial Sequence
  Description of Artificial Sequence: Synthetic oligonucleotide
  Sense strand starting at position 3358 of SEQ ID NO: 914685
ugucgcauuccgcuacuuu

SEQ ID NO: 1022863 - RNA, 19 nt, Artificial Sequence
  Description of Artificial Sequence: Synthetic oligonucleotide
  Antisense strand to SEQ ID NO: 1022862
aaaguagcggaaugcgaca

SEQ ID NO: 1022864 - RNA, 19 nt, Artificial Sequence
  Description of Artificial Sequence: Synthetic oligonucleotide
  Sense strand starting at position 3368 of SEQ ID NO: 914685
cgcuacuuuaggcaagaca

SEQ ID NO: 1022865 - RNA, 19 nt, Artificial Sequence
  Description of Artificial Sequence: Synthetic oligonucleotide
  Antisense strand to SEQ ID NO: 1022864
ugucuugccuaaaguagcg

SEQ ID NO: 1022866 - RNA, 19 nt, Artificial Sequence
  Description of Artificial Sequence: Synthetic oligonucleotide
  Sense strand starting at position 3409 of SEQ ID NO: 914685
guccaauagccauagucau

SEQ ID NO: 1022867 - RNA, 19 nt, Artificial Sequence
  Description of Artificial Sequence: Synthetic oligonucleotide
  Antisense strand to SEQ ID NO: 1022866
augacuauggcuauuggac

SEQ ID NO: 1022868 - RNA, 19 nt, Artificial Sequence
  Description of Artificial Sequence: Synthetic oligonucleotide
  Sense strand starting at position 3444 of SEQ ID NO: 914685
gugaaacacuucuuagaag

SEQ ID NO: 1022869 - RNA, 19 nt, Artificial Sequence
  Description of Artificial Sequence: Synthetic oligonucleotide
  Antisense strand to SEQ ID NO: 1022868
cuucuaagaaguguuucac

SEQ ID NO: 1022870 - RNA, 19 nt, Artificial Sequence
  Description of Artificial Sequence: Synthetic oligonucleotide
  Sense strand starting at position 3451 of SEQ ID NO: 914685
acuucuuagaaguggguca

SEQ ID NO: 1022871 - RNA, 19 nt, Artificial Sequence
  Description of Artificial Sequence: Synthetic oligonucleotide
  Antisense strand to SEQ ID NO: 1022870
ugacccacuucuaagaagu

SEQ ID NO: 1022872 - RNA, 19 nt, Artificial Sequence
  Description of Artificial Sequence: Synthetic oligonucleotide
  Sense strand starting at position 3452 of SEQ ID NO: 914685
cuucuuagaagugggucaa

SEQ ID NO: 1022873 - RNA, 19 nt, Artificial Sequence
  Description of Artificial Sequence: Synthetic oligonucleotide
  Antisense strand to SEQ ID NO: 1022872
uugacccacuucuaagaag

SEQ ID NO: 1022874 - RNA, 19 nt, Artificial Sequence
  Description of Artificial Sequence: Synthetic oligonucleotide
  Sense strand starting at position 3453 of SEQ ID NO: 914685
uucuuagaagugggucaaa

SEQ ID NO: 1022875 - RNA, 19 nt, Artificial Sequence
  Description of Artificial Sequence: Synthetic oligonucleotide
  Antisense strand to SEQ ID NO: 1022874
uuugacccacuucuaagaa

SEQ ID NO: 1022876 - RNA, 19 nt, Artificial Sequence
  Description of Artificial Sequence: Synthetic oligonucleotide
  Sense strand starting at position 3608 of SEQ ID NO: 914685
auuuaaagugcuugucacu

SEQ ID NO: 1022877 - RNA, 19 nt, Artificial Sequence
  Description of Artificial Sequence: Synthetic oligonucleotide
  Antisense strand to SEQ ID NO: 1022876
agugacaagcacuuuaaau

SEQ ID NO: 1022878 - RNA, 19 nt, Artificial Sequence
  Description of Artificial Sequence: Synthetic oligonucleotide
  Sense strand starting at position 3614 of SEQ ID NO: 914685
agugcuugucacuacacua

SEQ ID NO: 1022879 - RNA, 19 nt, Artificial Sequence
  Description of Artificial Sequence: Synthetic oligonucleotide
  Antisense strand to SEQ ID NO: 1022878
uaguguagugacaagcacu

SEQ ID NO: 1022880 - RNA, 19 nt, Artificial Sequence
  Description of Artificial Sequence: Synthetic oligonucleotide
  Sense strand starting at position 3634 of SEQ ID NO: 914685
gcauauaaacuuggauaug

SEQ ID NO: 1022881 - RNA, 19 nt, Artificial Sequence
  Description of Artificial Sequence: Synthetic oligonucleotide
  Antisense strand to SEQ ID NO: 1022880
cauauccaaguuuauaugc

SEQ ID NO: 1022882 - RNA, 19 nt, Artificial Sequence
  Description of Artificial Sequence: Synthetic oligonucleotide
  Sense strand starting at position 3774 of SEQ ID NO: 914685
uuagaacauguguagcuaa

SEQ ID NO: 1022883 - RNA, 19 nt, Artificial Sequence
  Description of Artificial Sequence: Synthetic oligonucleotide
  Antisense strand to SEQ ID NO: 1022882
uuagcuacacauguucuaa

SEQ ID NO: 1022884 - RNA, 19 nt, Artificial Sequence
  Description of Artificial Sequence: Synthetic oligonucleotide
  Sense strand starting at position 3800 of SEQ ID NO: 914685
acugcuaagguuuaucagu

SEQ ID NO: 1022885 - RNA, 19 nt, Artificial Sequence
  Description of Artificial Sequence: Synthetic oligonucleotide
  Antisense strand to SEQ ID NO: 1022884
acugauaaaccuuagcagu

SEQ ID NO: 1022886 - RNA, 19 nt, Artificial Sequence
  Description of Artificial Sequence: Synthetic oligonucleotide
  Sense strand starting at position 3806 of SEQ ID NO: 914685
aagguuuaucaguauacug

SEQ ID NO: 1022887 - RNA, 19 nt, Artificial Sequence
  Description of Artificial Sequence: Synthetic oligonucleotide
  Antisense strand to SEQ ID NO: 1022886
caguauacugauaaaccuu

SEQ ID NO: 1022888 - RNA, 19 nt, Artificial Sequence
  Description of Artificial Sequence: Synthetic oligonucleotide
  Sense strand starting at position 3808 of SEQ ID NO: 914685
gguuuaucaguauacugau

SEQ ID NO: 1022889 - RNA, 19 nt, Artificial Sequence
  Description of Artificial Sequence: Synthetic oligonucleotide
  Antisense strand to SEQ ID NO: 1022888
aucaguauacugauaaacc

SEQ ID NO: 1022890 - RNA, 19 nt, Artificial Sequence
  Description of Artificial Sequence: Synthetic oligonucleotide
  Sense strand starting at position 3816 of SEQ ID NO: 914685
aguauacugauaggguaau

SEQ ID NO: 1022891 - RNA, 19 nt, Artificial Sequence
  Description of Artificial Sequence: Synthetic oligonucleotide
  Antisense strand to SEQ ID NO: 1022890
auuacccuaucaguauacu

SEQ ID NO: 1022892 - RNA, 19 nt, Artificial Sequence
  Description of Artificial Sequence: Synthetic oligonucleotide
  Sense strand starting at position 2064 of SEQ ID NO: 914686
ggaaauaacuauuaggaag

SEQ ID NO: 1022893 - RNA, 19 nt, Artificial Sequence
  Description of Artificial Sequence: Synthetic oligonucleotide
  Antisense strand to SEQ ID NO: 1022892
cuuccuaauaguuauuucc

SEQ ID NO: 1022894 - RNA, 19 nt, Artificial Sequence
  Description of Artificial Sequence: Synthetic oligonucleotide
  Sense strand starting at position 2152 of SEQ ID NO: 914686
uugccacuacuagguaaua

SEQ ID NO: 1022895 - RNA, 19 nt, Artificial Sequence
  Description of Artificial Sequence: Synthetic oligonucleotide
  Antisense strand to SEQ ID NO: 1022894
uauuaccuaguaguggcaa

SEQ ID NO: 1022896 - RNA, 19 nt, Artificial Sequence
  Description of Artificial Sequence: Synthetic oligonucleotide
  Sense strand starting at position 2153 of SEQ ID NO: 914686
ugccacuacuagguaauaa

SEQ ID NO: 1022897 - RNA, 19 nt, Artificial Sequence
  Description of Artificial Sequence: Synthetic oligonucleotide
  Antisense strand to SEQ ID NO: 1022896
uuauuaccuaguaguggca

SEQ ID NO: 1022898 - RNA, 19 nt, Artificial Sequence
  Description of Artificial Sequence: Synthetic oligonucleotide
  Sense strand starting at position 2262 of SEQ ID NO: 914686
agcguuguucauugguaca

SEQ ID NO: 1022899 - RNA, 19 nt, Artificial Sequence
  Description of Artificial Sequence: Synthetic oligonucleotide
  Antisense strand to SEQ ID NO: 1022898
uguaccaaugaacaacgcu

SEQ ID NO: 1022900 - RNA, 19 nt, Artificial Sequence
  Description of Artificial Sequence: Synthetic oligonucleotide
  Sense strand starting at position 2264 of SEQ ID NO: 914686
cguuguucauugguacaag

SEQ ID NO: 1022901 - RNA, 19 nt, Artificial Sequence
  Description of Artificial Sequence: Synthetic oligonucleotide
  Antisense strand to SEQ ID NO: 1022900
cuuguaccaaugaacaacg

SEQ ID NO: 1022902 - RNA, 19 nt, Artificial Sequence
  Description of Artificial Sequence: Synthetic oligonucleotide
  Sense strand starting at position 2288 of SEQ ID NO: 914686
uuacauucugaaggucaau

SEQ ID NO: 1022903 - RNA, 19 nt, Artificial Sequence
  Description of Artificial Sequence: Synthetic oligonucleotide
  Antisense strand to SEQ ID NO: 1022902
auugaccuucagaauguaa

SEQ ID NO: 1022904 - RNA, 19 nt, Artificial Sequence
  Description of Artificial Sequence: Synthetic oligonucleotide
  Sense strand starting at position 2298 of SEQ ID NO: 914686
aaggucaauuuagagauau

SEQ ID NO: 1022905 - RNA, 19 nt, Artificial Sequence
  Description of Artificial Sequence: Synthetic oligonucleotide
  Antisense strand to SEQ ID NO: 1022904
auaucucuaaauugaccuu

SEQ ID NO: 1022906 - RNA, 19 nt, Artificial Sequence
  Description of Artificial Sequence: Synthetic oligonucleotide
  Sense strand starting at position 2349 of SEQ ID NO: 914686
uagaacugccuuugcagua

SEQ ID NO: 1022907 - RNA, 19 nt, Artificial Sequence
  Description of Artificial Sequence: Synthetic oligonucleotide
  Antisense strand to SEQ ID NO: 1022906
uacugcaaaggcaguucua

SEQ ID NO: 1022908 - RNA, 19 nt, Artificial Sequence
  Description of Artificial Sequence: Synthetic oligonucleotide
  Sense strand starting at position 2350 of SEQ ID NO: 914686
agaacugccuuugcaguaa

SEQ ID NO: 1022909 - RNA, 19 nt, Artificial Sequence
  Description of Artificial Sequence: Synthetic oligonucleotide
  Antisense strand to SEQ ID NO: 1022908
uuacugcaaaggcaguucu

SEQ ID NO: 1022910 - RNA, 19 nt, Artificial Sequence
  Description of Artificial Sequence: Synthetic oligonucleotide
  Sense strand starting at position 2354 of SEQ ID NO: 914686
cugccuuugcaguaauuau

SEQ ID NO: 1022911 - RNA, 19 nt, Artificial Sequence
  Description of Artificial Sequence: Synthetic oligonucleotide
  Antisense strand to SEQ ID NO: 1022910
auaauuacugcaaaggcag

SEQ ID NO: 1022912 - RNA, 19 nt, Artificial Sequence
  Description of Artificial Sequence: Synthetic oligonucleotide
  Sense strand starting at position 2361 of SEQ ID NO: 914686
ugcaguaauuauccuauag

SEQ ID NO: 1022913 - RNA, 19 nt, Artificial Sequence
  Description of Artificial Sequence: Synthetic oligonucleotide
  Antisense strand to SEQ ID NO: 1022912
cuauaggauaauuacugca

SEQ ID NO: 1022914 - RNA, 19 nt, Artificial Sequence
  Description of Artificial Sequence: Synthetic oligonucleotide
  Sense strand starting at position 2388 of SEQ ID NO: 914686
agacaauuaucuguuauag

SEQ ID NO: 1022915 - RNA, 19 nt, Artificial Sequence
  Description of Artificial Sequence: Synthetic oligonucleotide
  Antisense strand to SEQ ID NO: 1022914
cuauaacagauaauugucu

SEQ ID NO: 1022916 - RNA, 19 nt, Artificial Sequence
  Description of Artificial Sequence: Synthetic oligonucleotide
  Sense strand starting at position 2397 of SEQ ID NO: 914686
ucuguuauagcacaguuua

SEQ ID NO: 1022917 - RNA, 19 nt, Artificial Sequence
  Description of Artificial Sequence: Synthetic oligonucleotide
  Antisense strand to SEQ ID NO: 1022916
uaaacugugcuauaacaga

SEQ ID NO: 1022918 - RNA, 19 nt, Artificial Sequence
  Description of Artificial Sequence: Synthetic oligonucleotide
  Sense strand starting at position 2670 of SEQ ID NO: 914686
gggauuugguggcauauuu

SEQ ID NO: 1022919 - RNA, 19 nt, Artificial Sequence
  Description of Artificial Sequence: Synthetic oligonucleotide
  Antisense strand to SEQ ID NO: 1022918
aaauaugccaccaaauccc

SEQ ID NO: 1022920 - RNA, 19 nt, Artificial Sequence
  Description of Artificial Sequence: Synthetic oligonucleotide
  Sense strand starting at position 2830 of SEQ ID NO: 914686
augcaaugccaugagaaug

SEQ ID NO: 1022921 - RNA, 19 nt, Artificial Sequence
  Description of Artificial Sequence: Synthetic oligonucleotide
  Antisense strand to SEQ ID NO: 1022920
cauucucauggcauugcau

SEQ ID NO: 1022922 - RNA, 19 nt, Artificial Sequence
  Description of Artificial Sequence: Synthetic oligonucleotide
  Sense strand starting at position 2847 of SEQ ID NO: 914686
ugaacaaagugucaaguua

SEQ ID NO: 1022923 - RNA, 19 nt, Artificial Sequence
  Description of Artificial Sequence: Synthetic oligonucleotide
  Antisense strand to SEQ ID NO: 1022922
uaacuugacacuuuguuca

SEQ ID NO: 1022924 - RNA, 19 nt, Artificial Sequence
  Description of Artificial Sequence: Synthetic oligonucleotide
  Sense strand starting at position 2890 of SEQ ID NO: 914686
ggaguuauaugacuggagu

SEQ ID NO: 1022925 - RNA, 19 nt, Artificial Sequence
  Description of Artificial Sequence: Synthetic oligonucleotide
  Antisense strand to SEQ ID NO: 1022924
acuccagucauauaacucc

SEQ ID NO: 1022926 - RNA, 19 nt, Artificial Sequence
  Description of Artificial Sequence: Synthetic oligonucleotide
  Sense strand starting at position 2891 of SEQ ID NO: 914686
gaguuauaugacuggagug

SEQ ID NO: 1022927 - RNA, 19 nt, Artificial Sequence
  Description of Artificial Sequence: Synthetic oligonucleotide
  Antisense strand to SEQ ID NO: 1022926
cacuccagucauauaacuc

SEQ ID NO: 1022928 - RNA, 19 nt, Artificial Sequence
  Description of Artificial Sequence: Synthetic oligonucleotide
  Sense strand starting at position 2892 of SEQ ID NO: 914686
aguuauaugacuggaguga

SEQ ID NO: 1022929 - RNA, 19 nt, Artificial Sequence
  Description of Artificial Sequence: Synthetic oligonucleotide
  Antisense strand to SEQ ID NO: 1022928
ucacuccagucauauaacu

SEQ ID NO: 1022930 - RNA, 19 nt, Artificial Sequence
  Description of Artificial Sequence: Synthetic oligonucleotide
  Sense strand starting at position 2893 of SEQ ID NO: 914686
guuauaugacuggagugau

SEQ ID NO: 1022931 - RNA, 19 nt, Artificial Sequence
  Description of Artificial Sequence: Synthetic oligonucleotide
  Antisense strand to SEQ ID NO: 1022930
aucacuccagucauauaac

SEQ ID NO: 1022932 - RNA, 19 nt, Artificial Sequence
  Description of Artificial Sequence: Synthetic oligonucleotide
  Sense strand starting at position 2896 of SEQ ID NO: 914686
auaugacuggagugauauc

SEQ ID NO: 1022933 - RNA, 19 nt, Artificial Sequence
  Description of Artificial Sequence: Synthetic oligonucleotide
  Antisense strand to SEQ ID NO: 1022932
gauaucacuccagucauau

SEQ ID NO: 1022934 - RNA, 19 nt, Artificial Sequence
  Description of Artificial Sequence: Synthetic oligonucleotide
  Sense strand starting at position 2936 of SEQ ID NO: 914686
agguaagagugauuacuug

SEQ ID NO: 1022935 - RNA, 19 nt, Artificial Sequence
  Description of Artificial Sequence: Synthetic oligonucleotide
  Antisense strand to SEQ ID NO: 1022934
caaguaaucacucuuaccu

SEQ ID NO: 1022936 - RNA, 19 nt, Artificial Sequence
  Description of Artificial Sequence: Synthetic oligonucleotide
  Sense strand starting at position 2940 of SEQ ID NO: 914686
aagagugauuacuugcaag

SEQ ID NO: 1022937 - RNA, 19 nt, Artificial Sequence
  Description of Artificial Sequence: Synthetic oligonucleotide
  Antisense strand to SEQ ID NO: 1022936
cuugcaaguaaucacucuu

SEQ ID NO: 1022938 - RNA, 19 nt, Artificial Sequence
  Description of Artificial Sequence: Synthetic oligonucleotide
  Sense strand starting at position 2943 of SEQ ID NO: 914686
agugauuacuugcaagaaa

SEQ ID NO: 1022939 - RNA, 19 nt, Artificial Sequence
  Description of Artificial Sequence: Synthetic oligonucleotide
  Antisense strand to SEQ ID NO: 1022938
uuucuugcaaguaaucacu

SEQ ID NO: 1022940 - RNA, 19 nt, Artificial Sequence
  Description of Artificial Sequence: Synthetic oligonucleotide
  Sense strand starting at position 3007 of SEQ ID NO: 914686
acuauuaaauuuggacagu

SEQ ID NO: 1022941 - RNA, 19 nt, Artificial Sequence
  Description of Artificial Sequence: Synthetic oligonucleotide
  Antisense strand to SEQ ID NO: 1022940
acuguccaaauuuaauagu

SEQ ID NO: 1022942 - RNA, 19 nt, Artificial Sequence
  Description of Artificial Sequence: Synthetic oligonucleotide
  Sense strand starting at position 3008 of SEQ ID NO: 914686
cuauuaaauuuggacaguu

SEQ ID NO: 1022943 - RNA, 19 nt, Artificial Sequence
  Description of Artificial Sequence: Synthetic oligonucleotide
  Antisense strand to SEQ ID NO: 1022942
aacuguccaaauuuaauag

SEQ ID NO: 1022944 - RNA, 19 nt, Artificial Sequence
  Description of Artificial Sequence: Synthetic oligonucleotide
  Sense strand starting at position 3037 of SEQ ID NO: 914686
caugacuauguggguuaaa

SEQ ID NO: 1022945 - RNA, 19 nt, Artificial Sequence
  Description of Artificial Sequence: Synthetic oligonucleotide
  Antisense strand to SEQ ID NO: 1022944
uuuaacccacauagucaug

SEQ ID NO: 1022946 - RNA, 19 nt, Artificial Sequence
  Description of Artificial Sequence: Synthetic oligonucleotide
  Sense strand starting at position 3207 of SEQ ID NO: 914686
ucugcaagcccuugacauu

SEQ ID NO: 1022947 - RNA, 19 nt, Artificial Sequence
  Description of Artificial Sequence: Synthetic oligonucleotide
  Antisense strand to SEQ ID NO: 1022946
aaugucaagggcuugcaga

SEQ ID NO: 1022948 - RNA, 19 nt, Artificial Sequence
  Description of Artificial Sequence: Synthetic oligonucleotide
  Sense strand starting at position 3275 of SEQ ID NO: 914686
ugaauuucuuugcaggcau

SEQ ID NO: 1022949 - RNA, 19 nt, Artificial Sequence
  Description of Artificial Sequence: Synthetic oligonucleotide
  Antisense strand to SEQ ID NO: 1022948
augccugcaaagaaauuca

SEQ ID NO: 1022950 - RNA, 19 nt, Artificial Sequence
  Description of Artificial Sequence: Synthetic oligonucleotide
  Sense strand starting at position 3283 of SEQ ID NO: 914686
uuugcaggcauguaaugau

SEQ ID NO: 1022951 - RNA, 19 nt, Artificial Sequence
  Description of Artificial Sequence: Synthetic oligonucleotide
  Antisense strand to SEQ ID NO: 1022950
aucauuacaugccugcaaa

SEQ ID NO: 1022952 - RNA, 19 nt, Artificial Sequence
  Description of Artificial Sequence: Synthetic oligonucleotide
  Sense strand starting at position 3305 of SEQ ID NO: 914686
ggcacugugucagucauuu

SEQ ID NO: 1022953 - RNA, 19 nt, Artificial Sequence
  Description of Artificial Sequence: Synthetic oligonucleotide
  Antisense strand to SEQ ID NO: 1022952
aaaugacugacacagugcc

SEQ ID NO: 1022954 - RNA, 19 nt, Artificial Sequence
  Description of Artificial Sequence: Synthetic oligonucleotide
  Sense strand starting at position 3325 of SEQ ID NO: 914686
uccacuuuguuguauuuaa

SEQ ID NO: 1022955 - RNA, 19 nt, Artificial Sequence
  Description of Artificial Sequence: Synthetic oligonucleotide
  Antisense strand to SEQ ID NO: 1022954
uuaaauacaacaaagugga

SEQ ID NO: 1022956 - RNA, 19 nt, Artificial Sequence
  Description of Artificial Sequence: Synthetic oligonucleotide
  Sense strand starting at position 3581 of SEQ ID NO: 914686
agaagcauauaugacauaa

SEQ ID NO: 1022957 - RNA, 19 nt, Artificial Sequence
  Description of Artificial Sequence: Synthetic oligonucleotide
  Antisense strand to SEQ ID NO: 1022956
uuaugucauauaugcuucu

SEQ ID NO: 1022958 - RNA, 19 nt, Artificial Sequence
  Description of Artificial Sequence: Synthetic oligonucleotide
  Sense strand starting at position 3708 of SEQ ID NO: 914686
ucuaguuauuggcugcaaa

SEQ ID NO: 1022959 - RNA, 19 nt, Artificial Sequence
  Description of Artificial Sequence: Synthetic oligonucleotide
  Antisense strand to SEQ ID NO: 1022958
uuugcagccaauaacuaga

SEQ ID NO: 1022960 - RNA, 19 nt, Artificial Sequence
  Description of Artificial Sequence: Synthetic oligonucleotide
  Sense strand starting at position 3709 of SEQ ID NO: 914686
cuaguuauuggcugcaaac

SEQ ID NO: 1022961 - RNA, 19 nt, Artificial Sequence
  Description of Artificial Sequence: Synthetic oligonucleotide
  Antisense strand to SEQ ID NO: 1022960
guuugcagccaauaacuag

SEQ ID NO: 1022962 - RNA, 19 nt, Artificial Sequence
  Description of Artificial Sequence: Synthetic oligonucleotide
  Sense strand starting at position 3748 of SEQ ID NO: 914686
acaggaguuuaacauauua

SEQ ID NO: 1022963 - RNA, 19 nt, Artificial Sequence
  Description of Artificial Sequence: Synthetic oligonucleotide
  Antisense strand to SEQ ID NO: 1022962
uaauauguuaaacuccugu

SEQ ID NO: 1022964 - RNA, 19 nt, Artificial Sequence
  Description of Artificial Sequence: Synthetic oligonucleotide
  Sense strand starting at position 3812 of SEQ ID NO: 914686
guuagcaaggcacauauua

SEQ ID NO: 1022965 - RNA, 19 nt, Artificial Sequence
  Description of Artificial Sequence: Synthetic oligonucleotide
  Antisense strand to SEQ ID NO: 1022964
uaauaugugccuugcuaac

SEQ ID NO: 1022966 - RNA, 19 nt, Artificial Sequence
  Description of Artificial Sequence: Synthetic oligonucleotide
  Sense strand starting at position 3872 of SEQ ID NO: 914686
cuaucucgacuuuauuagu

SEQ ID NO: 1022967 - RNA, 19 nt, Artificial Sequence
  Description of Artificial Sequence: Synthetic oligonucleotide
  Antisense strand to SEQ ID NO: 1022966
acuaauaaagucgagauag

SEQ ID NO: 1022968 - RNA, 19 nt, Artificial Sequence
  Description of Artificial Sequence: Synthetic oligonucleotide
  Sense strand starting at position 3877 of SEQ ID NO: 914686
ucgacuuuauuaguuaagu

SEQ ID NO: 1022969 - RNA, 19 nt, Artificial Sequence
  Description of Artificial Sequence: Synthetic oligonucleotide
  Antisense strand to SEQ ID NO: 1022968
acuuaacuaauaaagucga

SEQ ID NO: 1022970 - RNA, 19 nt, Artificial Sequence
  Description of Artificial Sequence: Synthetic oligonucleotide
  Sense strand starting at position 3878 of SEQ ID NO: 914686
cgacuuuauuaguuaaguc

SEQ ID NO: 1022971 - RNA, 19 nt, Artificial Sequence
  Description of Artificial Sequence: Synthetic oligonucleotide
  Antisense strand to SEQ ID NO: 1022970
gacuuaacuaauaaagucg

SEQ ID NO: 1022972 - RNA, 19 nt, Artificial Sequence
  Description of Artificial Sequence: Synthetic oligonucleotide
  Sense strand starting at position 162 of SEQ ID NO: 914687
accuucucuguuuagaaga

SEQ ID NO: 1022973 - RNA, 19 nt, Artificial Sequence
  Description of Artificial Sequence: Synthetic oligonucleotide
  Antisense strand to SEQ ID NO: 1022972
ucuucuaaacagagaaggu

SEQ ID NO: 1022974 - RNA, 19 nt, Artificial Sequence
  Description of Artificial Sequence: Synthetic oligonucleotide
  Sense strand starting at position 205 of SEQ ID NO: 914687
ugaucaaguuacuuaggau

SEQ ID NO: 1022975 - RNA, 19 nt, Artificial Sequence
  Description of Artificial Sequence: Synthetic oligonucleotide
  Antisense strand to SEQ ID NO: 1022974
auccuaaguaacuugauca

SEQ ID NO: 1022976 - RNA, 19 nt, Artificial Sequence
  Description of Artificial Sequence: Synthetic oligonucleotide
  Sense strand starting at position 399 of SEQ ID NO: 914687
aggccuugcaaguaaagau

SEQ ID NO: 1022977 - RNA, 19 nt, Artificial Sequence
  Description of Artificial Sequence: Synthetic oligonucleotide
  Antisense strand to SEQ ID NO: 1022976
aucuuuacuugcaaggccu

SEQ ID NO: 1022978 - RNA, 19 nt, Artificial Sequence
  Description of Artificial Sequence: Synthetic oligonucleotide
  Sense strand starting at position 418 of SEQ ID NO: 914687
gaaacaaugcgaugacuga

SEQ ID NO: 1022979 - RNA, 19 nt, Artificial Sequence
  Description of Artificial Sequence: Synthetic oligonucleotide
  Antisense strand to SEQ ID NO: 1022978
ucagucaucgcauuguuuc

SEQ ID NO: 1022980 - RNA, 19 nt, Artificial Sequence
  Description of Artificial Sequence: Synthetic oligonucleotide
  Sense strand starting at position 422 of SEQ ID NO: 914687
caaugcgaugacugaacua

SEQ ID NO: 1022981 - RNA, 19 nt, Artificial Sequence
  Description of Artificial Sequence: Synthetic oligonucleotide
  Antisense strand to SEQ ID NO: 1022980
uaguucagucaucgcauug

SEQ ID NO: 1022982 - RNA, 19 nt, Artificial Sequence
  Description of Artificial Sequence: Synthetic oligonucleotide
  Sense strand starting at position 477 of SEQ ID NO: 914687
agacuuaagaguuggcauu

SEQ ID NO: 1022983 - RNA, 19 nt, Artificial Sequence
  Description of Artificial Sequence: Synthetic oligonucleotide
  Antisense strand to SEQ ID NO: 1022982
aaugccaacucuuaagucu

SEQ ID NO: 1022984 - RNA, 19 nt, Artificial Sequence
  Description of Artificial Sequence: Synthetic oligonucleotide
  Sense strand starting at position 720 of SEQ ID NO: 914687
uugguuuagcugugaaagg

SEQ ID NO: 1022985 - RNA, 19 nt, Artificial Sequence
  Description of Artificial Sequence: Synthetic oligonucleotide
  Antisense strand to SEQ ID NO: 1022984
ccuuucacagcuaaaccaa

SEQ ID NO: 1022986 - RNA, 19 nt, Artificial Sequence
  Description of Artificial Sequence: Synthetic oligonucleotide
  Sense strand starting at position 1078 of SEQ ID NO: 914687
cuaggaucucgugauguga

SEQ ID NO: 1022987 - RNA, 19 nt, Artificial Sequence
  Description of Artificial Sequence: Synthetic oligonucleotide
  Antisense strand to SEQ ID NO: 1022986
ucacaucacgagauccuag

SEQ ID NO: 1022988 - RNA, 19 nt, Artificial Sequence
  Description of Artificial Sequence: Synthetic oligonucleotide
  Sense strand starting at position 1082 of SEQ ID NO: 914687
gaucucgugaugugacuga

SEQ ID NO: 1022989 - RNA, 19 nt, Artificial Sequence
  Description of Artificial Sequence: Synthetic oligonucleotide
  Antisense strand to SEQ ID NO: 1022988
ucagucacaucacgagauc

SEQ ID NO: 1022990 - RNA, 19 nt, Artificial Sequence
  Description of Artificial Sequence: Synthetic oligonucleotide
  Sense strand starting at position 1086 of SEQ ID NO: 914687
ucgugaugugacugaaaua

SEQ ID NO: 1022991 - RNA, 19 nt, Artificial Sequence
  Description of Artificial Sequence: Synthetic oligonucleotide
  Antisense strand to SEQ ID NO: 1022990
uauuucagucacaucacga

SEQ ID NO: 1022992 - RNA, 19 nt, Artificial Sequence
  Description of Artificial Sequence: Synthetic oligonucleotide
  Sense strand starting at position 1087 of SEQ ID NO: 914687
cgugaugugacugaaauac

SEQ ID NO: 1022993 - RNA, 19 nt, Artificial Sequence
  Description of Artificial Sequence: Synthetic oligonucleotide
  Antisense strand to SEQ ID NO: 1022992
guauuucagucacaucacg

SEQ ID NO: 1022994 - RNA, 19 nt, Artificial Sequence
  Description of Artificial Sequence: Synthetic oligonucleotide
  Sense strand starting at position 1139 of SEQ ID NO: 914687
uguguucaacaugagggau

SEQ ID NO: 1022995 - RNA, 19 nt, Artificial Sequence
  Description of Artificial Sequence: Synthetic oligonucleotide
  Antisense strand to SEQ ID NO: 1022994
aucccucauguugaacaca

SEQ ID NO: 1022996 - RNA, 19 nt, Artificial Sequence
  Description of Artificial Sequence: Synthetic oligonucleotide
  Sense strand starting at position 1142 of SEQ ID NO: 914687
guucaacaugagggaugua

SEQ ID NO: 1022997 - RNA, 19 nt, Artificial Sequence
  Description of Artificial Sequence: Synthetic oligonucleotide
  Antisense strand to SEQ ID NO: 1022996
uacaucccucauguugaac

SEQ ID NO: 1022998 - RNA, 19 nt, Artificial Sequence
  Description of Artificial Sequence: Synthetic oligonucleotide
  Sense strand starting at position 1200 of SEQ ID NO: 914687
acucuauuaccauaggugu

SEQ ID NO: 1022999 - RNA, 19 nt, Artificial Sequence
  Description of Artificial Sequence: Synthetic oligonucleotide
  Antisense strand to SEQ ID NO: 1022998
acaccuaugguaauagagu

SEQ ID NO: 1023000 - RNA, 19 nt, Artificial Sequence
  Description of Artificial Sequence: Synthetic oligonucleotide
  Sense strand starting at position 1206 of SEQ ID NO: 914687
uuaccauaggugugacacu

SEQ ID NO: 1023001 - RNA, 19 nt, Artificial Sequence
  Description of Artificial Sequence: Synthetic oligonucleotide
  Antisense strand to SEQ ID NO: 1023000
agugucacaccuaugguaa

SEQ ID NO: 1023002 - RNA, 19 nt, Artificial Sequence
  Description of Artificial Sequence: Synthetic oligonucleotide
  Sense strand starting at position 1611 of SEQ ID NO: 914687
cauauuggcgacugaguaa

SEQ ID NO: 1023003 - RNA, 19 nt, Artificial Sequence
  Description of Artificial Sequence: Synthetic oligonucleotide
  Antisense strand to SEQ ID NO: 1023002
uuacucagucgccaauaug

SEQ ID NO: 1023004 - RNA, 19 nt, Artificial Sequence
  Description of Artificial Sequence: Synthetic oligonucleotide
  Sense strand starting at position 1655 of SEQ ID NO: 914687
caagaaaugcucugggaua

SEQ ID NO: 1023005 - RNA, 19 nt, Artificial Sequence
  Description of Artificial Sequence: Synthetic oligonucleotide
  Antisense strand to SEQ ID NO: 1023004
uaucccagagcauuucuug

SEQ ID NO: 1023006 - RNA, 19 nt, Artificial Sequence
  Description of Artificial Sequence: Synthetic oligonucleotide
  Sense strand starting at position 2274 of SEQ ID NO: 914687
aguguuaaucauuguuaac

SEQ ID NO: 1023007 - RNA, 19 nt, Artificial Sequence
  Description of Artificial Sequence: Synthetic oligonucleotide
  Antisense strand to SEQ ID NO: 1023006
guuaacaaugauuaacacu

SEQ ID NO: 1023008 - RNA, 19 nt, Artificial Sequence
  Description of Artificial Sequence: Synthetic oligonucleotide
  Sense strand starting at position 2345 of SEQ ID NO: 914687
aggagaacuugucccgagu

SEQ ID NO: 1023009 - RNA, 19 nt, Artificial Sequence
  Description of Artificial Sequence: Synthetic oligonucleotide
  Antisense strand to SEQ ID NO: 1023008
acucgggacaaguucuccu

SEQ ID NO: 1023010 - RNA, 19 nt, Artificial Sequence
  Description of Artificial Sequence: Synthetic oligonucleotide
  Sense strand starting at position 2348 of SEQ ID NO: 914687
agaacuugucccgagugua

SEQ ID NO: 1023011 - RNA, 19 nt, Artificial Sequence
  Description of Artificial Sequence: Synthetic oligonucleotide
  Antisense strand to SEQ ID NO: 1023010
uacacucgggacaaguucu

SEQ ID NO: 1023012 - RNA, 19 nt, Artificial Sequence
  Description of Artificial Sequence: Synthetic oligonucleotide
  Sense strand starting at position 2403 of SEQ ID NO: 914687
gcucuuugggagcacuuaa

SEQ ID NO: 1023013 - RNA, 19 nt, Artificial Sequence
  Description of Artificial Sequence: Synthetic oligonucleotide
  Antisense strand to SEQ ID NO: 1023012
uuaagugcucccaaagagc

SEQ ID NO: 1023014 - RNA, 19 nt, Artificial Sequence
  Description of Artificial Sequence: Synthetic oligonucleotide
  Sense strand starting at position 2429 of SEQ ID NO: 914687
ccuggcagugucuauauaa

SEQ ID NO: 1023015 - RNA, 19 nt, Artificial Sequence
  Description of Artificial Sequence: Synthetic oligonucleotide
  Antisense strand to SEQ ID NO: 1023014
uuauauagacacugccagg

SEQ ID NO: 1023016 - RNA, 19 nt, Artificial Sequence
  Description of Artificial Sequence: Synthetic oligonucleotide
  Sense strand starting at position 2498 of SEQ ID NO: 914687
gggaauuaugauugccuua

SEQ ID NO: 1023017 - RNA, 19 nt, Artificial Sequence
  Description of Artificial Sequence: Synthetic oligonucleotide
  Antisense strand to SEQ ID NO: 1023016
uaaggcaaucauaauuccc

SEQ ID NO: 1023018 - RNA, 19 nt, Artificial Sequence
  Description of Artificial Sequence: Synthetic oligonucleotide
  Sense strand starting at position 2815 of SEQ ID NO: 914687
gucugauugccuuaauucu

SEQ ID NO: 1023019 - RNA, 19 nt, Artificial Sequence
  Description of Artificial Sequence: Synthetic oligonucleotide
  Antisense strand to SEQ ID NO: 1023018
agaauuaaggcaaucagac

SEQ ID NO: 1023020 - RNA, 19 nt, Artificial Sequence
  Description of Artificial Sequence: Synthetic oligonucleotide
  Sense strand starting at position 2859 of SEQ ID NO: 914687
acuauaucccgucacagau

SEQ ID NO: 1023021 - RNA, 19 nt, Artificial Sequence
  Description of Artificial Sequence: Synthetic oligonucleotide
  Antisense strand to SEQ ID NO: 1023020
aucugugacgggauauagu

SEQ ID NO: 1023022 - RNA, 19 nt, Artificial Sequence
  Description of Artificial Sequence: Synthetic oligonucleotide
  Sense strand starting at position 2874 of SEQ ID NO: 914687
agaugugauuagguuagca

SEQ ID NO: 1023023 - RNA, 19 nt, Artificial Sequence
  Description of Artificial Sequence: Synthetic oligonucleotide
  Antisense strand to SEQ ID NO: 1023022
ugcuaaccuaaucacaucu

SEQ ID NO: 1023024 - RNA, 19 nt, Artificial Sequence
  Description of Artificial Sequence: Synthetic oligonucleotide
  Sense strand starting at position 2876 of SEQ ID NO: 914687
augugauuagguuagcaag

SEQ ID NO: 1023025 - RNA, 19 nt, Artificial Sequence
  Description of Artificial Sequence: Synthetic oligonucleotide
  Antisense strand to SEQ ID NO: 1023024
cuugcuaaccuaaucacau

SEQ ID NO: 1023026 - RNA, 19 nt, Artificial Sequence
  Description of Artificial Sequence: Synthetic oligonucleotide
  Sense strand starting at position 2903 of SEQ ID NO: 914687
ggcaaucauggagguacaa

SEQ ID NO: 1023027 - RNA, 19 nt, Artificial Sequence
  Description of Artificial Sequence: Synthetic oligonucleotide
  Antisense strand to SEQ ID NO: 1023026
uuguaccuccaugauugcc

SEQ ID NO: 1023028 - RNA, 19 nt, Artificial Sequence
  Description of Artificial Sequence: Synthetic oligonucleotide
  Sense strand starting at position 2928 of SEQ ID NO: 914687
ccacgcugccaauauaaua

SEQ ID NO: 1023029 - RNA, 19 nt, Artificial Sequence
  Description of Artificial Sequence: Synthetic oligonucleotide
  Antisense strand to SEQ ID NO: 1023028
uauuauauuggcagcgugg

SEQ ID NO: 1023030 - RNA, 19 nt, Artificial Sequence
  Description of Artificial Sequence: Synthetic oligonucleotide
  Sense strand starting at position 2968 of SEQ ID NO: 914687
acagaaaguuaagccuuaa

SEQ ID NO: 1023031 - RNA, 19 nt, Artificial Sequence
  Description of Artificial Sequence: Synthetic oligonucleotide
  Antisense strand to SEQ ID NO: 1023030
uuaaggcuuaacuuucugu

SEQ ID NO: 1023032 - RNA, 19 nt, Artificial Sequence
  Description of Artificial Sequence: Synthetic oligonucleotide
  Sense strand starting at position 2988 of SEQ ID NO: 914687
uuucuaaaggcuugauuga

SEQ ID NO: 1023033 - RNA, 19 nt, Artificial Sequence
  Description of Artificial Sequence: Synthetic oligonucleotide
  Antisense strand to SEQ ID NO: 1023032
ucaaucaagccuuuagaaa

SEQ ID NO: 1023034 - RNA, 19 nt, Artificial Sequence
  Description of Artificial Sequence: Synthetic oligonucleotide
  Sense strand starting at position 3173 of SEQ ID NO: 914687
ggauauuuauucgggaaug

SEQ ID NO: 1023035 - RNA, 19 nt, Artificial Sequence
  Description of Artificial Sequence: Synthetic oligonucleotide
  Antisense strand to SEQ ID NO: 1023034
cauucccgaauaaauaucc

SEQ ID NO: 1023036 - RNA, 19 nt, Artificial Sequence
  Description of Artificial Sequence: Synthetic oligonucleotide
  Sense strand starting at position 3174 of SEQ ID NO: 914687
gauauuuauucgggaaugg

SEQ ID NO: 1023037 - RNA, 19 nt, Artificial Sequence
  Description of Artificial Sequence: Synthetic oligonucleotide
  Antisense strand to SEQ ID NO: 1023036
ccauucccgaauaaauauc

SEQ ID NO: 1023038 - RNA, 19 nt, Artificial Sequence
  Description of Artificial Sequence: Synthetic oligonucleotide
  Sense strand starting at position 3192 of SEQ ID NO: 914687
gguauagacuaugugcuua

SEQ ID NO: 1023039 - RNA, 19 nt, Artificial Sequence
  Description of Artificial Sequence: Synthetic oligonucleotide
  Antisense strand to SEQ ID NO: 1023038
uaagcacauagucuauacc

SEQ ID NO: 1023040 - RNA, 19 nt, Artificial Sequence
  Description of Artificial Sequence: Synthetic oligonucleotide
  Sense strand starting at position 3203 of SEQ ID NO: 914687
ugugcuuaucagggaggua

SEQ ID NO: 1023041 - RNA, 19 nt, Artificial Sequence
  Description of Artificial Sequence: Synthetic oligonucleotide
  Antisense strand to SEQ ID NO: 1023040
uaccucccugauaagcaca

SEQ ID NO: 1023042 - RNA, 19 nt, Artificial Sequence
  Description of Artificial Sequence: Synthetic oligonucleotide
  Sense strand starting at position 3204 of SEQ ID NO: 914687
gugcuuaucagggagguaa

SEQ ID NO: 1023043 - RNA, 19 nt, Artificial Sequence
  Description of Artificial Sequence: Synthetic oligonucleotide
  Antisense strand to SEQ ID NO: 1023042
uuaccucccugauaagcac

SEQ ID NO: 1023044 - RNA, 19 nt, Artificial Sequence
  Description of Artificial Sequence: Synthetic oligonucleotide
  Sense strand starting at position 3307 of SEQ ID NO: 914687
cguagaucaccuggaguca

SEQ ID NO: 1023045 - RNA, 19 nt, Artificial Sequence
  Description of Artificial Sequence: Synthetic oligonucleotide
  Antisense strand to SEQ ID NO: 1023044
ugacuccaggugaucuacg

SEQ ID NO: 1023046 - RNA, 19 nt, Artificial Sequence
  Description of Artificial Sequence: Synthetic oligonucleotide
  Sense strand starting at position 3355 of SEQ ID NO: 914687
ugaaacccgucucuagaaa

SEQ ID NO: 1023047 - RNA, 19 nt, Artificial Sequence
  Description of Artificial Sequence: Synthetic oligonucleotide
  Antisense strand to SEQ ID NO: 1023046
uuucuagagacggguuuca

SEQ ID NO: 1023048 - RNA, 19 nt, Artificial Sequence
  Description of Artificial Sequence: Synthetic oligonucleotide
  Sense strand starting at position 3593 of SEQ ID NO: 914687
acaguuauccuuggcuaca

SEQ ID NO: 1023049 - RNA, 19 nt, Artificial Sequence
  Description of Artificial Sequence: Synthetic oligonucleotide
  Antisense strand to SEQ ID NO: 1023048
uguagccaaggauaacugu

SEQ ID NO: 1023050 - RNA, 19 nt, Artificial Sequence
  Description of Artificial Sequence: Synthetic oligonucleotide
  Sense strand starting at position 3631 of SEQ ID NO: 914687
gugccaguucaagauugga

SEQ ID NO: 1023051 - RNA, 19 nt, Artificial Sequence
  Description of Artificial Sequence: Synthetic oligonucleotide
  Antisense strand to SEQ ID NO: 1023050
uccaaucuugaacuggcac

SEQ ID NO: 1023052 - RNA, 19 nt, Artificial Sequence
  Description of Artificial Sequence: Synthetic oligonucleotide
  Sense strand starting at position 172 of SEQ ID NO: 914688
gcaauuaugcgcuugccca

SEQ ID NO: 1023053 - RNA, 19 nt, Artificial Sequence
  Description of Artificial Sequence: Synthetic oligonucleotide
  Antisense strand to SEQ ID NO: 1023052
ugggcaagcgcauaauugc

SEQ ID NO: 1023054 - RNA, 19 nt, Artificial Sequence
  Description of Artificial Sequence: Synthetic oligonucleotide
  Sense strand starting at position 363 of SEQ ID NO: 914688
aucaauucugcaggaagaa

SEQ ID NO: 1023055 - RNA, 19 nt, Artificial Sequence
  Description of Artificial Sequence: Synthetic oligonucleotide
  Antisense strand to SEQ ID NO: 1023054
uucuuccugcagaauugau

SEQ ID NO: 1023056 - RNA, 19 nt, Artificial Sequence
  Description of Artificial Sequence: Synthetic oligonucleotide
  Sense strand starting at position 516 of SEQ ID NO: 914688
cugauuugguuagaaugga

SEQ ID NO: 1023057 - RNA, 19 nt, Artificial Sequence
  Description of Artificial Sequence: Synthetic oligonucleotide
  Antisense strand to SEQ ID NO: 1023056
uccauucuaaccaaaucag

SEQ ID NO: 1023058 - RNA, 19 nt, Artificial Sequence
  Description of Artificial Sequence: Synthetic oligonucleotide
  Sense strand starting at position 524 of SEQ ID NO: 914688
guuagaauggauggugcaa

SEQ ID NO: 1023059 - RNA, 19 nt, Artificial Sequence
  Description of Artificial Sequence: Synthetic oligonucleotide
  Antisense strand to SEQ ID NO: 1023058
uugcaccauccauucuaac

SEQ ID NO: 1023060 - RNA, 19 nt, Artificial Sequence
  Description of Artificial Sequence: Synthetic oligonucleotide
  Sense strand starting at position 544 of SEQ ID NO: 914688
ugugauagugguggagaaa

SEQ ID NO: 1023061 - RNA, 19 nt, Artificial Sequence
  Description of Artificial Sequence: Synthetic oligonucleotide
  Antisense strand to SEQ ID NO: 1023060
uuucuccaccacuaucaca

SEQ ID NO: 1023062 - RNA, 19 nt, Artificial Sequence
  Description of Artificial Sequence: Synthetic oligonucleotide
  Sense strand starting at position 617 of SEQ ID NO: 914688
ccagaaguuuagguuauag

SEQ ID NO: 1023063 - RNA, 19 nt, Artificial Sequence
  Description of Artificial Sequence: Synthetic oligonucleotide
  Antisense strand to SEQ ID NO: 1023062
cuauaaccuaaacuucugg

SEQ ID NO: 1023064 - RNA, 19 nt, Artificial Sequence
  Description of Artificial Sequence: Synthetic oligonucleotide
  Sense strand starting at position 619 of SEQ ID NO: 914688
agaaguuuagguuauaguc

SEQ ID NO: 1023065 - RNA, 19 nt, Artificial Sequence
  Description of Artificial Sequence: Synthetic oligonucleotide
  Antisense strand to SEQ ID NO: 1023064
gacuauaaccuaaacuucu

SEQ ID NO: 1023066 - RNA, 19 nt, Artificial Sequence
  Description of Artificial Sequence: Synthetic oligonucleotide
  Sense strand starting at position 628 of SEQ ID NO: 914688
gguuauagucuauaaacau

SEQ ID NO: 1023067 - RNA, 19 nt, Artificial Sequence
  Description of Artificial Sequence: Synthetic oligonucleotide
  Antisense strand to SEQ ID NO: 1023066
auguuuauagacuauaacc

SEQ ID NO: 1023068 - RNA, 19 nt, Artificial Sequence
  Description of Artificial Sequence: Synthetic oligonucleotide
  Sense strand starting at position 685 of SEQ ID NO: 914688
gugucuuggaaagauuacu

SEQ ID NO: 1023069 - RNA, 19 nt, Artificial Sequence
  Description of Artificial Sequence: Synthetic oligonucleotide
  Antisense strand to SEQ ID NO: 1023068
aguaaucuuuccaagacac

SEQ ID NO: 1023070 - RNA, 19 nt, Artificial Sequence
  Description of Artificial Sequence: Synthetic oligonucleotide
  Sense strand starting at position 722 of SEQ ID NO: 914688
uggagacuguuaguuaaau

SEQ ID NO: 1023071 - RNA, 19 nt, Artificial Sequence
  Description of Artificial Sequence: Synthetic oligonucleotide
  Antisense strand to SEQ ID NO: 1023070
auuuaacuaacagucucca

SEQ ID NO: 1023072 - RNA, 19 nt, Artificial Sequence
  Description of Artificial Sequence: Synthetic oligonucleotide
  Sense strand starting at position 723 of SEQ ID NO: 914688
ggagacuguuaguuaaauu

SEQ ID NO: 1023073 - RNA, 19 nt, Artificial Sequence
  Description of Artificial Sequence: Synthetic oligonucleotide
  Antisense strand to SEQ ID NO: 1023072
aauuuaacuaacagucucc

SEQ ID NO: 1023074 - RNA, 19 nt, Artificial Sequence
  Description of Artificial Sequence: Synthetic oligonucleotide
  Sense strand starting at position 815 of SEQ ID NO: 914688
ugagguaucucucuaucac

SEQ ID NO: 1023075 - RNA, 19 nt, Artificial Sequence
  Description of Artificial Sequence: Synthetic oligonucleotide
  Antisense strand to SEQ ID NO: 1023074
gugauagagagauaccuca

SEQ ID NO: 1023076 - RNA, 19 nt, Artificial Sequence
  Description of Artificial Sequence: Synthetic oligonucleotide
  Sense strand starting at position 912 of SEQ ID NO: 914688
aucaucaaauggcuagaau

SEQ ID NO: 1023077 - RNA, 19 nt, Artificial Sequence
  Description of Artificial Sequence: Synthetic oligonucleotide
  Antisense strand to SEQ ID NO: 1023076
auucuagccauuugaugau

SEQ ID NO: 1023078 - RNA, 19 nt, Artificial Sequence
  Description of Artificial Sequence: Synthetic oligonucleotide
  Sense strand starting at position 1044 of SEQ ID NO: 914688
cugucaaggguguaaacaa

SEQ ID NO: 1023079 - RNA, 19 nt, Artificial Sequence
  Description of Artificial Sequence: Synthetic oligonucleotide
  Antisense strand to SEQ ID NO: 1023078
uuguuuacacccuugacag

SEQ ID NO: 1023080 - RNA, 19 nt, Artificial Sequence
  Description of Artificial Sequence: Synthetic oligonucleotide
  Sense strand starting at position 1165 of SEQ ID NO: 914688
cgguguuuauuucuggaac

SEQ ID NO: 1023081 - RNA, 19 nt, Artificial Sequence
  Description of Artificial Sequence: Synthetic oligonucleotide
  Antisense strand to SEQ ID NO: 1023080
guuccagaaauaaacaccg

SEQ ID NO: 1023082 - RNA, 19 nt, Artificial Sequence
  Description of Artificial Sequence: Synthetic oligonucleotide
  Sense strand starting at position 1186 of SEQ ID NO: 914688
augcuaguaaugugggaaa

SEQ ID NO: 1023083 - RNA, 19 nt, Artificial Sequence
  Description of Artificial Sequence: Synthetic oligonucleotide
  Antisense strand to SEQ ID NO: 1023082
uuucccacauuacuagcau

SEQ ID NO: 1023084 - RNA, 19 nt, Artificial Sequence
  Description of Artificial Sequence: Synthetic oligonucleotide
  Sense strand starting at position 1226 of SEQ ID NO: 914688
gauagucaccgguauggca

SEQ ID NO: 1023085 - RNA, 19 nt, Artificial Sequence
  Description of Artificial Sequence: Synthetic oligonucleotide
  Antisense strand to SEQ ID NO: 1023084
ugccauaccggugacuauc

SEQ ID NO: 1023086 - RNA, 19 nt, Artificial Sequence
  Description of Artificial Sequence: Synthetic oligonucleotide
  Sense strand starting at position 1247 of SEQ ID NO: 914688
accggaagucaguaccaaa

SEQ ID NO: 1023087 - RNA, 19 nt, Artificial Sequence
  Description of Artificial Sequence: Synthetic oligonucleotide
  Antisense strand to SEQ ID NO: 1023086
uuugguacugacuuccggu

SEQ ID NO: 1023088 - RNA, 19 nt, Artificial Sequence
  Description of Artificial Sequence: Synthetic oligonucleotide
  Sense strand starting at position 1634 of SEQ ID NO: 914688
uaucucgucgcuucucaua

SEQ ID NO: 1023089 - RNA, 19 nt, Artificial Sequence
  Description of Artificial Sequence: Synthetic oligonucleotide
  Antisense strand to SEQ ID NO: 1023088
uaugagaagcgacgagaua

SEQ ID NO: 1023090 - RNA, 19 nt, Artificial Sequence
  Description of Artificial Sequence: Synthetic oligonucleotide
  Sense strand starting at position 1859 of SEQ ID NO: 914688
gucccauuacuugauuaga

SEQ ID NO: 1023091 - RNA, 19 nt, Artificial Sequence
  Description of Artificial Sequence: Synthetic oligonucleotide
  Antisense strand to SEQ ID NO: 1023090
ucuaaucaaguaaugggac

SEQ ID NO: 1023092 - RNA, 19 nt, Artificial Sequence
  Description of Artificial Sequence: Synthetic oligonucleotide
  Sense strand starting at position 1870 of SEQ ID NO: 914688
ugauuagaucccgauaguc

SEQ ID NO: 1023093 - RNA, 19 nt, Artificial Sequence
  Description of Artificial Sequence: Synthetic oligonucleotide
  Antisense strand to SEQ ID NO: 1023092
gacuaucgggaucuaauca

SEQ ID NO: 1023094 - RNA, 19 nt, Artificial Sequence
  Description of Artificial Sequence: Synthetic oligonucleotide
  Sense strand starting at position 1872 of SEQ ID NO: 914688
auuagaucccgauagucca

SEQ ID NO: 1023095 - RNA, 19 nt, Artificial Sequence
  Description of Artificial Sequence: Synthetic oligonucleotide
  Antisense strand to SEQ ID NO: 1023094
uggacuaucgggaucuaau

SEQ ID NO: 1023096 - RNA, 19 nt, Artificial Sequence
  Description of Artificial Sequence: Synthetic oligonucleotide
  Sense strand starting at position 2216 of SEQ ID NO: 914688
cucgcaucccgguucguaa

SEQ ID NO: 1023097 - RNA, 19 nt, Artificial Sequence
  Description of Artificial Sequence: Synthetic oligonucleotide
  Antisense strand to SEQ ID NO: 1023096
uuacgaaccgggaugcgag

SEQ ID NO: 1023098 - RNA, 19 nt, Artificial Sequence
  Description of Artificial Sequence: Synthetic oligonucleotide
  Sense strand starting at position 2217 of SEQ ID NO: 914688
ucgcaucccgguucguaaa

SEQ ID NO: 1023099 - RNA, 19 nt, Artificial Sequence
  Description of Artificial Sequence: Synthetic oligonucleotide
  Antisense strand to SEQ ID NO: 1023098
uuuacgaaccgggaugcga

SEQ ID NO: 1023100 - RNA, 19 nt, Artificial Sequence
  Description of Artificial Sequence: Synthetic oligonucleotide
  Sense strand starting at position 2262 of SEQ ID NO: 914688
gccaaaucugccucggucu

SEQ ID NO: 1023101 - RNA, 19 nt, Artificial Sequence
  Description of Artificial Sequence: Synthetic oligonucleotide
  Antisense strand to SEQ ID NO: 1023100
agaccgaggcagauuuggc

SEQ ID NO: 1023102 - RNA, 19 nt, Artificial Sequence
  Description of Artificial Sequence: Synthetic oligonucleotide
  Sense strand starting at position 2546 of SEQ ID NO: 914688
auaauuguugagggcuuaa

SEQ ID NO: 1023103 - RNA, 19 nt, Artificial Sequence
  Description of Artificial Sequence: Synthetic oligonucleotide
  Antisense strand to SEQ ID NO: 1023102
uuaagcccucaacaauuau

SEQ ID NO: 1023104 - RNA, 19 nt, Artificial Sequence
  Description of Artificial Sequence: Synthetic oligonucleotide
  Sense strand starting at position 2861 of SEQ ID NO: 914688
ggaaguauaauggguccau

SEQ ID NO: 1023105 - RNA, 19 nt, Artificial Sequence
  Description of Artificial Sequence: Synthetic oligonucleotide
  Antisense strand to SEQ ID NO: 1023104
auggacccauuauacuucc

SEQ ID NO: 1023106 - RNA, 19 nt, Artificial Sequence
  Description of Artificial Sequence: Synthetic oligonucleotide
  Sense strand starting at position 2862 of SEQ ID NO: 914688
gaaguauaauggguccaua

SEQ ID NO: 1023107 - RNA, 19 nt, Artificial Sequence
  Description of Artificial Sequence: Synthetic oligonucleotide
  Antisense strand to SEQ ID NO: 1023106
uauggacccauuauacuuc

SEQ ID NO: 1023108 - RNA, 19 nt, Artificial Sequence
  Description of Artificial Sequence: Synthetic oligonucleotide
  Sense strand starting at position 2865 of SEQ ID NO: 914688
guauaauggguccauacau

SEQ ID NO: 1023109 - RNA, 19 nt, Artificial Sequence
  Description of Artificial Sequence: Synthetic oligonucleotide
  Antisense strand to SEQ ID NO: 1023108
auguauggacccauuauac

SEQ ID NO: 1023110 - RNA, 19 nt, Artificial Sequence
  Description of Artificial Sequence: Synthetic oligonucleotide
  Sense strand starting at position 3157 of SEQ ID NO: 914688
gucacuaaguucuccaaac

SEQ ID NO: 1023111 - RNA, 19 nt, Artificial Sequence
  Description of Artificial Sequence: Synthetic oligonucleotide
  Antisense strand to SEQ ID NO: 1023110
guuuggagaacuuagugac

SEQ ID NO: 1023112 - RNA, 19 nt, Artificial Sequence
  Description of Artificial Sequence: Synthetic oligonucleotide
  Sense strand starting at position 3177 of SEQ ID NO: 914688
uuuccauauccuggagaaa

SEQ ID NO: 1023113 - RNA, 19 nt, Artificial Sequence
  Description of Artificial Sequence: Synthetic oligonucleotide
  Antisense strand to SEQ ID NO: 1023112
uuucuccaggauauggaaa

SEQ ID NO: 1023114 - RNA, 19 nt, Artificial Sequence
  Description of Artificial Sequence: Synthetic oligonucleotide
  Sense strand starting at position 3188 of SEQ ID NO: 914688
uggagaaaguuucucucaa

SEQ ID NO: 1023115 - RNA, 19 nt, Artificial Sequence
  Description of Artificial Sequence: Synthetic oligonucleotide
  Antisense strand to SEQ ID NO: 1023114
uugagagaaacuuucucca

SEQ ID NO: 1023116 - RNA, 19 nt, Artificial Sequence
  Description of Artificial Sequence: Synthetic oligonucleotide
  Sense strand starting at position 3189 of SEQ ID NO: 914688
ggagaaaguuucucucaau

SEQ ID NO: 1023117 - RNA, 19 nt, Artificial Sequence
  Description of Artificial Sequence: Synthetic oligonucleotide
  Antisense strand to SEQ ID NO: 1023116
auugagagaaacuuucucc

SEQ ID NO: 1023118 - RNA, 19 nt, Artificial Sequence
  Description of Artificial Sequence: Synthetic oligonucleotide
  Sense strand starting at position 3201 of SEQ ID NO: 914688
ucucaauuauuuggaagag

SEQ ID NO: 1023119 - RNA, 19 nt, Artificial Sequence
  Description of Artificial Sequence: Synthetic oligonucleotide
  Antisense strand to SEQ ID NO: 1023118
cucuuccaaauaauugaga

SEQ ID NO: 1023120 - RNA, 19 nt, Artificial Sequence
  Description of Artificial Sequence: Synthetic oligonucleotide
  Sense strand starting at position 3202 of SEQ ID NO: 914688
cucaauuauuuggaagagu

SEQ ID NO: 1023121 - RNA, 19 nt, Artificial Sequence
  Description of Artificial Sequence: Synthetic oligonucleotide
  Antisense strand to SEQ ID NO: 1023120
acucuuccaaauaauugag

SEQ ID NO: 1023122 - RNA, 19 nt, Artificial Sequence
  Description of Artificial Sequence: Synthetic oligonucleotide
  Sense strand starting at position 3211 of SEQ ID NO: 914688
uuggaagaguggaagugau

SEQ ID NO: 1023123 - RNA, 19 nt, Artificial Sequence
  Description of Artificial Sequence: Synthetic oligonucleotide
  Antisense strand to SEQ ID NO: 1023122
aucacuuccacucuuccaa

SEQ ID NO: 1023124 - RNA, 19 nt, Artificial Sequence
  Description of Artificial Sequence: Synthetic oligonucleotide
  Sense strand starting at position 3388 of SEQ ID NO: 914688
uuaugcauaugcuuagaag

SEQ ID NO: 1023125 - RNA, 19 nt, Artificial Sequence
  Description of Artificial Sequence: Synthetic oligonucleotide
  Antisense strand to SEQ ID NO: 1023124
cuucuaagcauaugcauaa

SEQ ID NO: 1023126 - RNA, 19 nt, Artificial Sequence
  Description of Artificial Sequence: Synthetic oligonucleotide
  Sense strand starting at position 3601 of SEQ ID NO: 914688
auagacaaaugcuuguaaa

SEQ ID NO: 1023127 - RNA, 19 nt, Artificial Sequence
  Description of Artificial Sequence: Synthetic oligonucleotide
  Antisense strand to SEQ ID NO: 1023126
uuuacaagcauuugucuau

SEQ ID NO: 1023128 - RNA, 19 nt, Artificial Sequence
  Description of Artificial Sequence: Synthetic oligonucleotide
  Sense strand starting at position 3620 of SEQ ID NO: 914688
gguauuugauccugauuua

SEQ ID NO: 1023129 - RNA, 19 nt, Artificial Sequence
  Description of Artificial Sequence: Synthetic oligonucleotide
  Antisense strand to SEQ ID NO: 1023128
uaaaucaggaucaaauacc

SEQ ID NO: 1023130 - RNA, 19 nt, Artificial Sequence
  Description of Artificial Sequence: Synthetic oligonucleotide
  Sense strand starting at position 3632 of SEQ ID NO: 914688
ugauuuauguuugucucca

SEQ ID NO: 1023131 - RNA, 19 nt, Artificial Sequence
  Description of Artificial Sequence: Synthetic oligonucleotide
  Antisense strand to SEQ ID NO: 1023130
uggagacaaacauaaauca

SEQ ID NO: 1023132 - RNA, 19 nt, Artificial Sequence
  Description of Artificial Sequence: Synthetic oligonucleotide
  Sense strand starting at position 9 of SEQ ID NO: 914689
ucaguucuuguguaacuuu

SEQ ID NO: 1023133 - RNA, 19 nt, Artificial Sequence
  Description of Artificial Sequence: Synthetic oligonucleotide
  Antisense strand to SEQ ID NO: 1023132
aaaguuacacaagaacuga

SEQ ID NO: 1023134 - RNA, 19 nt, Artificial Sequence
  Description of Artificial Sequence: Synthetic oligonucleotide
  Sense strand starting at position 40 of SEQ ID NO: 914689
accauauauuuaugaaggu

SEQ ID NO: 1023135 - RNA, 19 nt, Artificial Sequence
  Description of Artificial Sequence: Synthetic oligonucleotide
  Antisense strand to SEQ ID NO: 1023134
accuucauaaauauauggu

SEQ ID NO: 1023136 - RNA, 19 nt, Artificial Sequence
  Description of Artificial Sequence: Synthetic oligonucleotide
  Sense strand starting at position 208 of SEQ ID NO: 914689
gccaaauagccugaacaga

SEQ ID NO: 1023137 - RNA, 19 nt, Artificial Sequence
  Description of Artificial Sequence: Synthetic oligonucleotide
  Antisense strand to SEQ ID NO: 1023136
ucuguucaggcuauuuggc

SEQ ID NO: 1023138 - RNA, 19 nt, Artificial Sequence
  Description of Artificial Sequence: Synthetic oligonucleotide
  Sense strand starting at position 428 of SEQ ID NO: 914689
gccuaagagugccugauac

SEQ ID NO: 1023139 - RNA, 19 nt, Artificial Sequence
  Description of Artificial Sequence: Synthetic oligonucleotide
  Antisense strand to SEQ ID NO: 1023138
guaucaggcacucuuaggc

SEQ ID NO: 1023140 - RNA, 19 nt, Artificial Sequence
  Description of Artificial Sequence: Synthetic oligonucleotide
  Sense strand starting at position 469 of SEQ ID NO: 914689
ucaugauaauaugccugaa

SEQ ID NO: 1023141 - RNA, 19 nt, Artificial Sequence
  Description of Artificial Sequence: Synthetic oligonucleotide
  Antisense strand to SEQ ID NO: 1023140
uucaggcauauuaucauga

SEQ ID NO: 1023142 - RNA, 19 nt, Artificial Sequence
  Description of Artificial Sequence: Synthetic oligonucleotide
  Sense strand starting at position 471 of SEQ ID NO: 914689
augauaauaugccugaauc

SEQ ID NO: 1023143 - RNA, 19 nt, Artificial Sequence
  Description of Artificial Sequence: Synthetic oligonucleotide
  Antisense strand to SEQ ID NO: 1023142
gauucaggcauauuaucau

SEQ ID NO: 1023144 - RNA, 19 nt, Artificial Sequence
  Description of Artificial Sequence: Synthetic oligonucleotide
  Sense strand starting at position 472 of SEQ ID NO: 914689
ugauaauaugccugaaucg

SEQ ID NO: 1023145 - RNA, 19 nt, Artificial Sequence
  Description of Artificial Sequence: Synthetic oligonucleotide
  Antisense strand to SEQ ID NO: 1023144
cgauucaggcauauuauca

SEQ ID NO: 1023146 - RNA, 19 nt, Artificial Sequence
  Description of Artificial Sequence: Synthetic oligonucleotide
  Sense strand starting at position 473 of SEQ ID NO: 914689
gauaauaugccugaaucga

SEQ ID NO: 1023147 - RNA, 19 nt, Artificial Sequence
  Description of Artificial Sequence: Synthetic oligonucleotide
  Antisense strand to SEQ ID NO: 1023146
ucgauucaggcauauuauc

SEQ ID NO: 1023148 - RNA, 19 nt, Artificial Sequence
  Description of Artificial Sequence: Synthetic oligonucleotide
  Sense strand starting at position 481 of SEQ ID NO: 914689
gccugaaucgacuacauaa

SEQ ID NO: 1023149 - RNA, 19 nt, Artificial Sequence
  Description of Artificial Sequence: Synthetic oligonucleotide
  Antisense strand to SEQ ID NO: 1023148
uuauguagucgauucaggc

SEQ ID NO: 1023150 - RNA, 19 nt, Artificial Sequence
  Description of Artificial Sequence: Synthetic oligonucleotide
  Sense strand starting at position 504 of SEQ ID NO: 914689
cuccauaauggcugcgaaa

SEQ ID NO: 1023151 - RNA, 19 nt, Artificial Sequence
  Description of Artificial Sequence: Synthetic oligonucleotide
  Antisense strand to SEQ ID NO: 1023150
uuucgcagccauuauggag

SEQ ID NO: 1023152 - RNA, 19 nt, Artificial Sequence
  Description of Artificial Sequence: Synthetic oligonucleotide
  Sense strand starting at position 538 of SEQ ID NO: 914689
gaaugaugcccucgacuug

SEQ ID NO: 1023153 - RNA, 19 nt, Artificial Sequence
  Description of Artificial Sequence: Synthetic oligonucleotide
  Antisense strand to SEQ ID NO: 1023152
caagucgagggcaucauuc

SEQ ID NO: 1023154 - RNA, 19 nt, Artificial Sequence
  Description of Artificial Sequence: Synthetic oligonucleotide
  Sense strand starting at position 875 of SEQ ID NO: 914689
agcagacacgggugaguua

SEQ ID NO: 1023155 - RNA, 19 nt, Artificial Sequence
  Description of Artificial Sequence: Synthetic oligonucleotide
  Antisense strand to SEQ ID NO: 1023154
uaacucacccgugucugcu

SEQ ID NO: 1023156 - RNA, 19 nt, Artificial Sequence
  Description of Artificial Sequence: Synthetic oligonucleotide
  Sense strand starting at position 886 of SEQ ID NO: 914689
gugaguuaggcguuaggca

SEQ ID NO: 1023157 - RNA, 19 nt, Artificial Sequence
  Description of Artificial Sequence: Synthetic oligonucleotide
  Antisense strand to SEQ ID NO: 1023156
ugccuaacgccuaacucac

SEQ ID NO: 1023158 - RNA, 19 nt, Artificial Sequence
  Description of Artificial Sequence: Synthetic oligonucleotide
  Sense strand starting at position 887 of SEQ ID NO: 914689
ugaguuaggcguuaggcaa

SEQ ID NO: 1023159 - RNA, 19 nt, Artificial Sequence
  Description of Artificial Sequence: Synthetic oligonucleotide
  Antisense strand to SEQ ID NO: 1023158
uugccuaacgccuaacuca

SEQ ID NO: 1023160 - RNA, 19 nt, Artificial Sequence
  Description of Artificial Sequence: Synthetic oligonucleotide
  Sense strand starting at position 967 of SEQ ID NO: 914689
caguauccaucuguaggau

SEQ ID NO: 1023161 - RNA, 19 nt, Artificial Sequence
  Description of Artificial Sequence: Synthetic oligonucleotide
  Antisense strand to SEQ ID NO: 1023160
auccuacagauggauacug

SEQ ID NO: 1023162 - RNA, 19 nt, Artificial Sequence
  Description of Artificial Sequence: Synthetic oligonucleotide
  Sense strand starting at position 968 of SEQ ID NO: 914689
aguauccaucuguaggauu

SEQ ID NO: 1023163 - RNA, 19 nt, Artificial Sequence
  Description of Artificial Sequence: Synthetic oligonucleotide
  Antisense strand to SEQ ID NO: 1023162
aauccuacagauggauacu

SEQ ID NO: 1023164 - RNA, 19 nt, Artificial Sequence
  Description of Artificial Sequence: Synthetic oligonucleotide
  Sense strand starting at position 1236 of SEQ ID NO: 914689
ggcggugacuauuccaacu

SEQ ID NO: 1023165 - RNA, 19 nt, Artificial Sequence
  Description of Artificial Sequence: Synthetic oligonucleotide
  Antisense strand to SEQ ID NO: 1023164
aguuggaauagucaccgcc

SEQ ID NO: 1023166 - RNA, 19 nt, Artificial Sequence
  Description of Artificial Sequence: Synthetic oligonucleotide
  Sense strand starting at position 1892 of SEQ ID NO: 914689
gcgcuuaagaagcaagacu

SEQ ID NO: 1023167 - RNA, 19 nt, Artificial Sequence
  Description of Artificial Sequence: Synthetic oligonucleotide
  Antisense strand to SEQ ID NO: 1023166
agucuugcuucuuaagcgc

SEQ ID NO: 1023168 - RNA, 19 nt, Artificial Sequence
  Description of Artificial Sequence: Synthetic oligonucleotide
  Sense strand starting at position 2836 of SEQ ID NO: 914689
gccugugggauacgagaau

SEQ ID NO: 1023169 - RNA, 19 nt, Artificial Sequence
  Description of Artificial Sequence: Synthetic oligonucleotide
  Antisense strand to SEQ ID NO: 1023168
auucucguaucccacaggc

SEQ ID NO: 1023170 - RNA, 19 nt, Artificial Sequence
  Description of Artificial Sequence: Synthetic oligonucleotide
  Sense strand starting at position 2992 of SEQ ID NO: 914689
gcaguugcucugcaaagga

SEQ ID NO: 1023171 - RNA, 19 nt, Artificial Sequence
  Description of Artificial Sequence: Synthetic oligonucleotide
  Antisense strand to SEQ ID NO: 1023170
uccuuugcagagcaacugc

SEQ ID NO: 1023172 - RNA, 19 nt, Artificial Sequence
  Description of Artificial Sequence: Synthetic oligonucleotide
  Sense strand starting at position 3162 of SEQ ID NO: 914689
acuagaaucugcgucagga

SEQ ID NO: 1023173 - RNA, 19 nt, Artificial Sequence
  Description of Artificial Sequence: Synthetic oligonucleotide
  Antisense strand to SEQ ID NO: 1023172
uccugacgcagauucuagu

SEQ ID NO: 1023174 - RNA, 19 nt, Artificial Sequence
  Description of Artificial Sequence: Synthetic oligonucleotide
  Sense strand starting at position 3178 of SEQ ID NO: 914689
ggaaguguucuauggguua

SEQ ID NO: 1023175 - RNA, 19 nt, Artificial Sequence
  Description of Artificial Sequence: Synthetic oligonucleotide
  Antisense strand to SEQ ID NO: 1023174
uaacccauagaacacuucc

SEQ ID NO: 1023176 - RNA, 19 nt, Artificial Sequence
  Description of Artificial Sequence: Synthetic oligonucleotide
  Sense strand starting at position 3181 of SEQ ID NO: 914689
aguguucuauggguuauuu

SEQ ID NO: 1023177 - RNA, 19 nt, Artificial Sequence
  Description of Artificial Sequence: Synthetic oligonucleotide
  Antisense strand to SEQ ID NO: 1023176
aaauaacccauagaacacu

SEQ ID NO: 1023178 - RNA, 19 nt, Artificial Sequence
  Description of Artificial Sequence: Synthetic oligonucleotide
  Sense strand starting at position 3207 of SEQ ID NO: 914689
gaaacaggugcaggauaau

SEQ ID NO: 1023179 - RNA, 19 nt, Artificial Sequence
  Description of Artificial Sequence: Synthetic oligonucleotide
  Antisense strand to SEQ ID NO: 1023178
auuauccugcaccuguuuc

SEQ ID NO: 1023180 - RNA, 19 nt, Artificial Sequence
  Description of Artificial Sequence: Synthetic oligonucleotide
  Sense strand starting at position 3334 of SEQ ID NO: 914689
gugagcucggcuuccuuau

SEQ ID NO: 1023181 - RNA, 19 nt, Artificial Sequence
  Description of Artificial Sequence: Synthetic oligonucleotide
  Antisense strand to SEQ ID NO: 1023180
auaaggaagccgagcucac

SEQ ID NO: 1023182 - RNA, 19 nt, Artificial Sequence
  Description of Artificial Sequence: Synthetic oligonucleotide
  Sense strand starting at position 3357 of SEQ ID NO: 914689
cagugagggugcuuaucua

SEQ ID NO: 1023183 - RNA, 19 nt, Artificial Sequence
  Description of Artificial Sequence: Synthetic oligonucleotide
  Antisense strand to SEQ ID NO: 1023182
uagauaagcacccucacug

SEQ ID NO: 1023184 - RNA, 19 nt, Artificial Sequence
  Description of Artificial Sequence: Synthetic oligonucleotide
  Sense strand starting at position 3361 of SEQ ID NO: 914689
gagggugcuuaucuaagca

SEQ ID NO: 1023185 - RNA, 19 nt, Artificial Sequence
  Description of Artificial Sequence: Synthetic oligonucleotide
  Antisense strand to SEQ ID NO: 1023184
ugcuuagauaagcacccuc

SEQ ID NO: 1023186 - RNA, 19 nt, Artificial Sequence
  Description of Artificial Sequence: Synthetic oligonucleotide
  Sense strand starting at position 3540 of SEQ ID NO: 914689
gcuggauuacuccaccguu

SEQ ID NO: 1023187 - RNA, 19 nt, Artificial Sequence
  Description of Artificial Sequence: Synthetic oligonucleotide
  Antisense strand to SEQ ID NO: 1023186
aacgguggaguaauccagc

SEQ ID NO: 1023188 - RNA, 19 nt, Artificial Sequence
  Description of Artificial Sequence: Synthetic oligonucleotide
  Sense strand starting at position 3577 of SEQ ID NO: 914689
ccagacagcuguucucaga

SEQ ID NO: 1023189 - RNA, 19 nt, Artificial Sequence
  Description of Artificial Sequence: Synthetic oligonucleotide
  Antisense strand to SEQ ID NO: 1023188
ucugagaacagcugucugg

SEQ ID NO: 1023190 - RNA, 19 nt, Artificial Sequence
  Description of Artificial Sequence: Synthetic oligonucleotide
  Sense strand starting at position 3620 of SEQ ID NO: 914689
gugaaugaggccuggauag

SEQ ID NO: 1023191 - RNA, 19 nt, Artificial Sequence
  Description of Artificial Sequence: Synthetic oligonucleotide
  Antisense strand to SEQ ID NO: 1023190
cuauccaggccucauucac

SEQ ID NO: 1023192 - RNA, 19 nt, Artificial Sequence
  Description of Artificial Sequence: Synthetic oligonucleotide
  Sense strand starting at position 3639 of SEQ ID NO: 914689
acgaguaacuucccagaug

SEQ ID NO: 1023193 - RNA, 19 nt, Artificial Sequence
  Description of Artificial Sequence: Synthetic oligonucleotide
  Antisense strand to SEQ ID NO: 1023192
caucugggaaguuacucgu

SEQ ID NO: 1023194 - RNA, 19 nt, Artificial Sequence
  Description of Artificial Sequence: Synthetic oligonucleotide
  Sense strand starting at position 3698 of SEQ ID NO: 914689
gguuguuuacauugaguua

SEQ ID NO: 1023195 - RNA, 19 nt, Artificial Sequence
  Description of Artificial Sequence: Synthetic oligonucleotide
  Antisense strand to SEQ ID NO: 1023194
uaacucaauguaaacaacc

SEQ ID NO: 1023196 - RNA, 19 nt, Artificial Sequence
  Description of Artificial Sequence: Synthetic oligonucleotide
  Sense strand starting at position 3699 of SEQ ID NO: 914689
guuguuuacauugaguuag

SEQ ID NO: 1023197 - RNA, 19 nt, Artificial Sequence
  Description of Artificial Sequence: Synthetic oligonucleotide
  Antisense strand to SEQ ID NO: 1023196
cuaacucaauguaaacaac

SEQ ID NO: 1023198 - RNA, 19 nt, Artificial Sequence
  Description of Artificial Sequence: Synthetic oligonucleotide
  Sense strand starting at position 3737 of SEQ ID NO: 914689
aagugacagagcuguguuu

SEQ ID NO: 1023199 - RNA, 19 nt, Artificial Sequence
  Description of Artificial Sequence: Synthetic oligonucleotide
  Antisense strand to SEQ ID NO: 1023198
aaacacagcucugucacuu

SEQ ID NO: 1023200 - RNA, 19 nt, Artificial Sequence
  Description of Artificial Sequence: Synthetic oligonucleotide
  Sense strand starting at position 3761 of SEQ ID NO: 914689
aagauuaaucuagagcugu

SEQ ID NO: 1023201 - RNA, 19 nt, Artificial Sequence
  Description of Artificial Sequence: Synthetic oligonucleotide
  Antisense strand to SEQ ID NO: 1023200
acagcucuagauuaaucuu

SEQ ID NO: 1023202 - RNA, 19 nt, Artificial Sequence
  Description of Artificial Sequence: Synthetic oligonucleotide
  Sense strand starting at position 3767 of SEQ ID NO: 914689
aaucuagagcuguguauga

SEQ ID NO: 1023203 - RNA, 19 nt, Artificial Sequence
  Description of Artificial Sequence: Synthetic oligonucleotide
  Antisense strand to SEQ ID NO: 1023202
ucauacacagcucuagauu

SEQ ID NO: 1023204 - RNA, 19 nt, Artificial Sequence
  Description of Artificial Sequence: Synthetic oligonucleotide
  Sense strand starting at position 3769 of SEQ ID NO: 914689
ucuagagcuguguaugaac

SEQ ID NO: 1023205 - RNA, 19 nt, Artificial Sequence
  Description of Artificial Sequence: Synthetic oligonucleotide
  Antisense strand to SEQ ID NO: 1023204
guucauacacagcucuaga

SEQ ID NO: 1023206 - RNA, 19 nt, Artificial Sequence
  Description of Artificial Sequence: Synthetic oligonucleotide
  Sense strand starting at position 3771 of SEQ ID NO: 914689
uagagcuguguaugaacua

SEQ ID NO: 1023207 - RNA, 19 nt, Artificial Sequence
  Description of Artificial Sequence: Synthetic oligonucleotide
  Antisense strand to SEQ ID NO: 1023206
uaguucauacacagcucua

SEQ ID NO: 1023208 - RNA, 19 nt, Artificial Sequence
  Description of Artificial Sequence: Synthetic oligonucleotide
  Sense strand starting at position 3778 of SEQ ID NO: 914689
guguaugaacuaggagacu

SEQ ID NO: 1023209 - RNA, 19 nt, Artificial Sequence
  Description of Artificial Sequence: Synthetic oligonucleotide
  Antisense strand to SEQ ID NO: 1023208
agucuccuaguucauacac

SEQ ID NO: 1023210 - RNA, 19 nt, Artificial Sequence
  Description of Artificial Sequence: Synthetic oligonucleotide
  Sense strand starting at position 3971 of SEQ ID NO: 914689
ccaccaauuuauugugaag

SEQ ID NO: 1023211 - RNA, 19 nt, Artificial Sequence
  Description of Artificial Sequence: Synthetic oligonucleotide
  Antisense strand to SEQ ID NO: 1023210
cuucacaauaaauuggugg

SEQ ID NO: 1023212 - RNA, 19 nt, Artificial Sequence
  Description of Artificial Sequence: Synthetic oligonucleotide
  Sense strand starting at position 446 of SEQ ID NO: 914690
ccacuagauaacgggauua

SEQ ID NO: 1023213 - RNA, 19 nt, Artificial Sequence
  Description of Artificial Sequence: Synthetic oligonucleotide
  Antisense strand to SEQ ID NO: 1023212
uaaucccguuaucuagugg

SEQ ID NO: 1023214 - RNA, 19 nt, Artificial Sequence
  Description of Artificial Sequence: Synthetic oligonucleotide
  Sense strand starting at position 525 of SEQ ID NO: 914690
gacaaagcagcguacaaau

SEQ ID NO: 1023215 - RNA, 19 nt, Artificial Sequence
  Description of Artificial Sequence: Synthetic oligonucleotide
  Antisense strand to SEQ ID NO: 1023214
auuuguacgcugcuuuguc

SEQ ID NO: 1023216 - RNA, 19 nt, Artificial Sequence
  Description of Artificial Sequence: Synthetic oligonucleotide
  Sense strand starting at position 596 of SEQ ID NO: 914690
caaagagcugucgagagau

SEQ ID NO: 1023217 - RNA, 19 nt, Artificial Sequence
  Description of Artificial Sequence: Synthetic oligonucleotide
  Antisense strand to SEQ ID NO: 1023216
aucucucgacagcucuuug

SEQ ID NO: 1023218 - RNA, 19 nt, Artificial Sequence
  Description of Artificial Sequence: Synthetic oligonucleotide
  Sense strand starting at position 598 of SEQ ID NO: 914690
aagagcugucgagagaucu

SEQ ID NO: 1023219 - RNA, 19 nt, Artificial Sequence
  Description of Artificial Sequence: Synthetic oligonucleotide
  Antisense strand to SEQ ID NO: 1023218
agaucucucgacagcucuu

SEQ ID NO: 1023220 - RNA, 19 nt, Artificial Sequence
  Description of Artificial Sequence: Synthetic oligonucleotide
  Sense strand starting at position 606 of SEQ ID NO: 914690
ucgagagaucugcauuaua

SEQ ID NO: 1023221 - RNA, 19 nt, Artificial Sequence
  Description of Artificial Sequence: Synthetic oligonucleotide
  Antisense strand to SEQ ID NO: 1023220
uauaaugcagaucucucga

SEQ ID NO: 1023222 - RNA, 19 nt, Artificial Sequence
  Description of Artificial Sequence: Synthetic oligonucleotide
  Sense strand starting at position 663 of SEQ ID NO: 914690
guaucucuaguauaucuaa

SEQ ID NO: 1023223 - RNA, 19 nt, Artificial Sequence
  Description of Artificial Sequence: Synthetic oligonucleotide
  Antisense strand to SEQ ID NO: 1023222
uuagauauacuagagauac

SEQ ID NO: 1023224 - RNA, 19 nt, Artificial Sequence
  Description of Artificial Sequence: Synthetic oligonucleotide
  Sense strand starting at position 666 of SEQ ID NO: 914690
ucucuaguauaucuaagga

SEQ ID NO: 1023225 - RNA, 19 nt, Artificial Sequence
  Description of Artificial Sequence: Synthetic oligonucleotide
  Antisense strand to SEQ ID NO: 1023224
uccuuagauauacuagaga

SEQ ID NO: 1023226 - RNA, 19 nt, Artificial Sequence
  Description of Artificial Sequence: Synthetic oligonucleotide
  Sense strand starting at position 724 of SEQ ID NO: 914690
ucaacacauuugggauaaa

SEQ ID NO: 1023227 - RNA, 19 nt, Artificial Sequence
  Description of Artificial Sequence: Synthetic oligonucleotide
  Antisense strand to SEQ ID NO: 1023226
uuuaucccaaauguguuga

SEQ ID NO: 1023228 - RNA, 19 nt, Artificial Sequence
  Description of Artificial Sequence: Synthetic oligonucleotide
  Sense strand starting at position 734 of SEQ ID NO: 914690
ugggauaaauugucacauu

SEQ ID NO: 1023229 - RNA, 19 nt, Artificial Sequence
  Description of Artificial Sequence: Synthetic oligonucleotide
  Antisense strand to SEQ ID NO: 1023228
aaugugacaauuuauccca

SEQ ID NO: 1023230 - RNA, 19 nt, Artificial Sequence
  Description of Artificial Sequence: Synthetic oligonucleotide
  Sense strand starting at position 735 of SEQ ID NO: 914690
gggauaaauugucacauuu

SEQ ID NO: 1023231 - RNA, 19 nt, Artificial Sequence
  Description of Artificial Sequence: Synthetic oligonucleotide
  Antisense strand to SEQ ID NO: 1023230
aaaugugacaauuuauccc

SEQ ID NO: 1023232 - RNA, 19 nt, Artificial Sequence
  Description of Artificial Sequence: Synthetic oligonucleotide
  Sense strand starting at position 925 of SEQ ID NO: 914690
auaggaggucuacacuguu

SEQ ID NO: 1023233 - RNA, 19 nt, Artificial Sequence
  Description of Artificial Sequence: Synthetic oligonucleotide
  Antisense strand to SEQ ID NO: 1023232
aacaguguagaccuccuau

SEQ ID NO: 1023234 - RNA, 19 nt, Artificial Sequence
  Description of Artificial Sequence: Synthetic oligonucleotide
  Sense strand starting at position 963 of SEQ ID NO: 914690
uggagaaacuggguuccua

SEQ ID NO: 1023235 - RNA, 19 nt, Artificial Sequence
  Description of Artificial Sequence: Synthetic oligonucleotide
  Antisense strand to SEQ ID NO: 1023234
uaggaacccaguuucucca

SEQ ID NO: 1023236 - RNA, 19 nt, Artificial Sequence
  Description of Artificial Sequence: Synthetic oligonucleotide
  Sense strand starting at position 1004 of SEQ ID NO: 914690
ucagacaaucagugccaaa

SEQ ID NO: 1023237 - RNA, 19 nt, Artificial Sequence
  Description of Artificial Sequence: Synthetic oligonucleotide
  Antisense strand to SEQ ID NO: 1023236
uuuggcacugauugucuga

SEQ ID NO: 1023238 - RNA, 19 nt, Artificial Sequence
  Description of Artificial Sequence: Synthetic oligonucleotide
  Sense strand starting at position 2176 of SEQ ID NO: 914690
gaaagauagcuggacgucu

SEQ ID NO: 1023239 - RNA, 19 nt, Artificial Sequence
  Description of Artificial Sequence: Synthetic oligonucleotide
  Antisense strand to SEQ ID NO: 1023238
agacguccagcuaucuuuc

SEQ ID NO: 1023240 - RNA, 19 nt, Artificial Sequence
  Description of Artificial Sequence: Synthetic oligonucleotide
  Sense strand starting at position 2219 of SEQ ID NO: 914690
cuguguucuguuccgcaua

SEQ ID NO: 1023241 - RNA, 19 nt, Artificial Sequence
  Description of Artificial Sequence: Synthetic oligonucleotide
  Antisense strand to SEQ ID NO: 1023240
uaugcggaacagaacacag

SEQ ID NO: 1023242 - RNA, 19 nt, Artificial Sequence
  Description of Artificial Sequence: Synthetic oligonucleotide
  Sense strand starting at position 2271 of SEQ ID NO: 914690
gaaauugugucaucuugga

SEQ ID NO: 1023243 - RNA, 19 nt, Artificial Sequence
  Description of Artificial Sequence: Synthetic oligonucleotide
  Antisense strand to SEQ ID NO: 1023242
uccaagaugacacaauuuc

SEQ ID NO: 1023244 - RNA, 19 nt, Artificial Sequence
  Description of Artificial Sequence: Synthetic oligonucleotide
  Sense strand starting at position 2477 of SEQ ID NO: 914690
gcuggcugaguacaugaaa

SEQ ID NO: 1023245 - RNA, 19 nt, Artificial Sequence
  Description of Artificial Sequence: Synthetic oligonucleotide
  Antisense strand to SEQ ID NO: 1023244
uuucauguacucagccagc

SEQ ID NO: 1023246 - RNA, 19 nt, Artificial Sequence
  Description of Artificial Sequence: Synthetic oligonucleotide
  Sense strand starting at position 2509 of SEQ ID NO: 914690
accggaaacuuugugauga

SEQ ID NO: 1023247 - RNA, 19 nt, Artificial Sequence
  Description of Artificial Sequence: Synthetic oligonucleotide
  Antisense strand to SEQ ID NO: 1023246
ucaucacaaaguuuccggu

SEQ ID NO: 1023248 - RNA, 19 nt, Artificial Sequence
  Description of Artificial Sequence: Synthetic oligonucleotide
  Sense strand starting at position 2514 of SEQ ID NO: 914690
aaacuuugugaugagcuga

SEQ ID NO: 1023249 - RNA, 19 nt, Artificial Sequence
  Description of Artificial Sequence: Synthetic oligonucleotide
  Antisense strand to SEQ ID NO: 1023248
ucagcucaucacaaaguuu

SEQ ID NO: 1023250 - RNA, 19 nt, Artificial Sequence
  Description of Artificial Sequence: Synthetic oligonucleotide
  Sense strand starting at position 2596 of SEQ ID NO: 914690
ucauauguugugggaaaug

SEQ ID NO: 1023251 - RNA, 19 nt, Artificial Sequence
  Description of Artificial Sequence: Synthetic oligonucleotide
  Antisense strand to SEQ ID NO: 1023250
cauuucccacaacauauga

SEQ ID NO: 1023252 - RNA, 19 nt, Artificial Sequence
  Description of Artificial Sequence: Synthetic oligonucleotide
  Sense strand starting at position 2607 of SEQ ID NO: 914690
gggaaaugcaugggcuuua

SEQ ID NO: 1023253 - RNA, 19 nt, Artificial Sequence
  Description of Artificial Sequence: Synthetic oligonucleotide
  Antisense strand to SEQ ID NO: 1023252
uaaagcccaugcauuuccc

SEQ ID NO: 1023254 - RNA, 19 nt, Artificial Sequence
  Description of Artificial Sequence: Synthetic oligonucleotide
  Sense strand starting at position 2608 of SEQ ID NO: 914690
ggaaaugcaugggcuuuaa

SEQ ID NO: 1023255 - RNA, 19 nt, Artificial Sequence
  Description of Artificial Sequence: Synthetic oligonucleotide
  Antisense strand to SEQ ID NO: 1023254
uuaaagcccaugcauuucc

SEQ ID NO: 1023256 - RNA, 19 nt, Artificial Sequence
  Description of Artificial Sequence: Synthetic oligonucleotide
  Sense strand starting at position 2655 of SEQ ID NO: 914690
gaucuacugcuuuagagau

SEQ ID NO: 1023257 - RNA, 19 nt, Artificial Sequence
  Description of Artificial Sequence: Synthetic oligonucleotide
  Antisense strand to SEQ ID NO: 1023256
aucucuaaagcaguagauc

SEQ ID NO: 1023258 - RNA, 19 nt, Artificial Sequence
  Description of Artificial Sequence: Synthetic oligonucleotide
  Sense strand starting at position 2663 of SEQ ID NO: 914690
gcuuuagagaucugagacc

SEQ ID NO: 1023259 - RNA, 19 nt, Artificial Sequence
  Description of Artificial Sequence: Synthetic oligonucleotide
  Antisense strand to SEQ ID NO: 1023258
ggucucagaucucuaaagc

SEQ ID NO: 1023260 - RNA, 19 nt, Artificial Sequence
  Description of Artificial Sequence: Synthetic oligonucleotide
  Sense strand starting at position 2704 of SEQ ID NO: 914690
ggaucagaguuuccauaac

SEQ ID NO: 1023261 - RNA, 19 nt, Artificial Sequence
  Description of Artificial Sequence: Synthetic oligonucleotide
  Antisense strand to SEQ ID NO: 1023260
guuauggaaacucugaucc

SEQ ID NO: 1023262 - RNA, 19 nt, Artificial Sequence
  Description of Artificial Sequence: Synthetic oligonucleotide
  Sense strand starting at position 2836 of SEQ ID NO: 914690
ccaucaggguacucauaaa

SEQ ID NO: 1023263 - RNA, 19 nt, Artificial Sequence
  Description of Artificial Sequence: Synthetic oligonucleotide
  Antisense strand to SEQ ID NO: 1023262
uuuaugaguacccugaugg

SEQ ID NO: 1023264 - RNA, 19 nt, Artificial Sequence
  Description of Artificial Sequence: Synthetic oligonucleotide
  Sense strand starting at position 2878 of SEQ ID NO: 914690
ggauauugcagauaugcua

SEQ ID NO: 1023265 - RNA, 19 nt, Artificial Sequence
  Description of Artificial Sequence: Synthetic oligonucleotide
  Antisense strand to SEQ ID NO: 1023264
uagcauaucugcaauaucc

SEQ ID NO: 1023266 - RNA, 19 nt, Artificial Sequence
  Description of Artificial Sequence: Synthetic oligonucleotide
  Sense strand starting at position 3100 of SEQ ID NO: 914690
aaguguaagcaugaguaaa

SEQ ID NO: 1023267 - RNA, 19 nt, Artificial Sequence
  Description of Artificial Sequence: Synthetic oligonucleotide
  Antisense strand to SEQ ID NO: 1023266
uuuacucaugcuuacacuu

SEQ ID NO: 1023268 - RNA, 19 nt, Artificial Sequence
  Description of Artificial Sequence: Synthetic oligonucleotide
  Sense strand starting at position 3116 of SEQ ID NO: 914690
aaaguaucugcggacaaug

SEQ ID NO: 1023269 - RNA, 19 nt, Artificial Sequence
  Description of Artificial Sequence: Synthetic oligonucleotide
  Antisense strand to SEQ ID NO: 1023268
cauuguccgcagauacuuu

SEQ ID NO: 1023270 - RNA, 19 nt, Artificial Sequence
  Description of Artificial Sequence: Synthetic oligonucleotide
  Sense strand starting at position 3187 of SEQ ID NO: 914690
ccucaaaucguuggaugaa

SEQ ID NO: 1023271 - RNA, 19 nt, Artificial Sequence
  Description of Artificial Sequence: Synthetic oligonucleotide
  Antisense strand to SEQ ID NO: 1023270
uucauccaacgauuugagg

SEQ ID NO: 1023272 - RNA, 19 nt, Artificial Sequence
  Description of Artificial Sequence: Synthetic oligonucleotide
  Sense strand starting at position 3242 of SEQ ID NO: 914690
ccugacaaguaaucuugaa

SEQ ID NO: 1023273 - RNA, 19 nt, Artificial Sequence
  Description of Artificial Sequence: Synthetic oligonucleotide
  Antisense strand to SEQ ID NO: 1023272
uucaagauuacuugucagg

SEQ ID NO: 1023274 - RNA, 19 nt, Artificial Sequence
  Description of Artificial Sequence: Synthetic oligonucleotide
  Sense strand starting at position 3320 of SEQ ID NO: 914690
ggaugaauuaguuguagga

SEQ ID NO: 1023275 - RNA, 19 nt, Artificial Sequence
  Description of Artificial Sequence: Synthetic oligonucleotide
  Antisense strand to SEQ ID NO: 1023274
uccuacaacuaauucaucc

SEQ ID NO: 1023276 - RNA, 19 nt, Artificial Sequence
  Description of Artificial Sequence: Synthetic oligonucleotide
  Sense strand starting at position 3324 of SEQ ID NO: 914690
gaauuaguuguaggaagag

SEQ ID NO: 1023277 - RNA, 19 nt, Artificial Sequence
  Description of Artificial Sequence: Synthetic oligonucleotide
  Antisense strand to SEQ ID NO: 1023276
cucuuccuacaacuaauuc

SEQ ID NO: 1023278 - RNA, 19 nt, Artificial Sequence
  Description of Artificial Sequence: Synthetic oligonucleotide
  Sense strand starting at position 3450 of SEQ ID NO: 914690
uaguuauucguacacauag

SEQ ID NO: 1023279 - RNA, 19 nt, Artificial Sequence
  Description of Artificial Sequence: Synthetic oligonucleotide
  Antisense strand to SEQ ID NO: 1023278
cuauguguacgaauaacua

SEQ ID NO: 1023280 - RNA, 19 nt, Artificial Sequence
  Description of Artificial Sequence: Synthetic oligonucleotide
  Sense strand starting at position 3452 of SEQ ID NO: 914690
guuauucguacacauagag

SEQ ID NO: 1023281 - RNA, 19 nt, Artificial Sequence
  Description of Artificial Sequence: Synthetic oligonucleotide
  Antisense strand to SEQ ID NO: 1023280
cucuauguguacgaauaac

SEQ ID NO: 1023282 - RNA, 19 nt, Artificial Sequence
  Description of Artificial Sequence: Synthetic oligonucleotide
  Sense strand starting at position 3459 of SEQ ID NO: 914690
guacacauagaguaguuau

SEQ ID NO: 1023283 - RNA, 19 nt, Artificial Sequence
  Description of Artificial Sequence: Synthetic oligonucleotide
  Antisense strand to SEQ ID NO: 1023282
auaacuacucuauguguac

SEQ ID NO: 1023284 - RNA, 19 nt, Artificial Sequence
  Description of Artificial Sequence: Synthetic oligonucleotide
  Sense strand starting at position 3525 of SEQ ID NO: 914690
ugaacauaucaagggucua

SEQ ID NO: 1023285 - RNA, 19 nt, Artificial Sequence
  Description of Artificial Sequence: Synthetic oligonucleotide
  Antisense strand to SEQ ID NO: 1023284
uagacccuugauauguuca

SEQ ID NO: 1023286 - RNA, 19 nt, Artificial Sequence
  Description of Artificial Sequence: Synthetic oligonucleotide
  Sense strand starting at position 3552 of SEQ ID NO: 914690
uggugaauaaauugauguu

SEQ ID NO: 1023287 - RNA, 19 nt, Artificial Sequence
  Description of Artificial Sequence: Synthetic oligonucleotide
  Antisense strand to SEQ ID NO: 1023286
aacaucaauuuauucacca

SEQ ID NO: 1023288 - RNA, 19 nt, Artificial Sequence
  Description of Artificial Sequence: Synthetic oligonucleotide
  Sense strand starting at position 3683 of SEQ ID NO: 914690
ugcaaauaucaguagucag

SEQ ID NO: 1023289 - RNA, 19 nt, Artificial Sequence
  Description of Artificial Sequence: Synthetic oligonucleotide
  Antisense strand to SEQ ID NO: 1023288
cugacuacugauauuugca

SEQ ID NO: 1023290 - RNA, 19 nt, Artificial Sequence
  Description of Artificial Sequence: Synthetic oligonucleotide
  Sense strand starting at position 3690 of SEQ ID NO: 914690
aucaguagucagcagaauu

SEQ ID NO: 1023291 - RNA, 19 nt, Artificial Sequence
  Description of Artificial Sequence: Synthetic oligonucleotide
  Antisense strand to SEQ ID NO: 1023290
aauucugcugacuacugau

SEQ ID NO: 1023292 - RNA, 19 nt, Artificial Sequence
  Description of Artificial Sequence: Synthetic oligonucleotide
  Sense strand starting at position 358 of SEQ ID NO: 914691
cccaguuaguuacuauuaa

SEQ ID NO: 1023293 - RNA, 19 nt, Artificial Sequence
  Description of Artificial Sequence: Synthetic oligonucleotide
  Antisense strand to SEQ ID NO: 1023292
uuaauaguaacuaacuggg

SEQ ID NO: 1023294 - RNA, 19 nt, Artificial Sequence
  Description of Artificial Sequence: Synthetic oligonucleotide
  Sense strand starting at position 407 of SEQ ID NO: 914691
gcauguaaagauuaaguaa

SEQ ID NO: 1023295 - RNA, 19 nt, Artificial Sequence
  Description of Artificial Sequence: Synthetic oligonucleotide
  Antisense strand to SEQ ID NO: 1023294
uuacuuaaucuuuacaugc

SEQ ID NO: 1023296 - RNA, 19 nt, Artificial Sequence
  Description of Artificial Sequence: Synthetic oligonucleotide
  Sense strand starting at position 825 of SEQ ID NO: 914691
guucuuagccauuagacua

SEQ ID NO: 1023297 - RNA, 19 nt, Artificial Sequence
  Description of Artificial Sequence: Synthetic oligonucleotide
  Antisense strand to SEQ ID NO: 1023296
uagucuaauggcuaagaac

SEQ ID NO: 1023298 - RNA, 19 nt, Artificial Sequence
  Description of Artificial Sequence: Synthetic oligonucleotide
  Sense strand starting at position 934 of SEQ ID NO: 914691
ggguuuauauaucugucuu

SEQ ID NO: 1023299 - RNA, 19 nt, Artificial Sequence
  Description of Artificial Sequence: Synthetic oligonucleotide
  Antisense strand to SEQ ID NO: 1023298
aagacagauauauaaaccc

SEQ ID NO: 1023300 - RNA, 19 nt, Artificial Sequence
  Description of Artificial Sequence: Synthetic oligonucleotide
  Sense strand starting at position 1035 of SEQ ID NO: 914691
ggguacaguaacuauguua

SEQ ID NO: 1023301 - RNA, 19 nt, Artificial Sequence
  Description of Artificial Sequence: Synthetic oligonucleotide
  Antisense strand to SEQ ID NO: 1023300
uaacauaguuacuguaccc

SEQ ID NO: 1023302 - RNA, 19 nt, Artificial Sequence
  Description of Artificial Sequence: Synthetic oligonucleotide
  Sense strand starting at position 1046 of SEQ ID NO: 914691
cuauguuauggacaucuua

SEQ ID NO: 1023303 - RNA, 19 nt, Artificial Sequence
  Description of Artificial Sequence: Synthetic oligonucleotide
  Antisense strand to SEQ ID NO: 1023302
uaagauguccauaacauag

SEQ ID NO: 1023304 - RNA, 19 nt, Artificial Sequence
  Description of Artificial Sequence: Synthetic oligonucleotide
  Sense strand starting at position 1140 of SEQ ID NO: 914691
gccagcuuugcguccacaa

SEQ ID NO: 1023305 - RNA, 19 nt, Artificial Sequence
  Description of Artificial Sequence: Synthetic oligonucleotide
  Antisense strand to SEQ ID NO: 1023304
uuguggacgcaaagcuggc

SEQ ID NO: 1023306 - RNA, 19 nt, Artificial Sequence
  Description of Artificial Sequence: Synthetic oligonucleotide
  Sense strand starting at position 1351 of SEQ ID NO: 914691
gcccaagucugggcacaaa

SEQ ID NO: 1023307 - RNA, 19 nt, Artificial Sequence
  Description of Artificial Sequence: Synthetic oligonucleotide
  Antisense strand to SEQ ID NO: 1023306
uuugugcccagacuugggc

SEQ ID NO: 1023308 - RNA, 19 nt, Artificial Sequence
  Description of Artificial Sequence: Synthetic oligonucleotide
  Sense strand starting at position 1374 of SEQ ID NO: 914691
gcuuuaugugaauauccgu

SEQ ID NO: 1023309 - RNA, 19 nt, Artificial Sequence
  Description of Artificial Sequence: Synthetic oligonucleotide
  Antisense strand to SEQ ID NO: 1023308
acggauauucacauaaagc

SEQ ID NO: 1023310 - RNA, 19 nt, Artificial Sequence
  Description of Artificial Sequence: Synthetic oligonucleotide
  Sense strand starting at position 1381 of SEQ ID NO: 914691
gugaauauccgugggacga

SEQ ID NO: 1023311 - RNA, 19 nt, Artificial Sequence
  Description of Artificial Sequence: Synthetic oligonucleotide
  Antisense strand to SEQ ID NO: 1023310
ucgucccacggauauucac

SEQ ID NO: 1023312 - RNA, 19 nt, Artificial Sequence
  Description of Artificial Sequence: Synthetic oligonucleotide
  Sense strand starting at position 1382 of SEQ ID NO: 914691
ugaauauccgugggacgau

SEQ ID NO: 1023313 - RNA, 19 nt, Artificial Sequence
  Description of Artificial Sequence: Synthetic oligonucleotide
  Antisense strand to SEQ ID NO: 1023312
aucgucccacggauauuca

SEQ ID NO: 1023314 - RNA, 19 nt, Artificial Sequence
  Description of Artificial Sequence: Synthetic oligonucleotide
  Sense strand starting at position 1404 of SEQ ID NO: 914691
gaacaaucuccacgugggu

SEQ ID NO: 1023315 - RNA, 19 nt, Artificial Sequence
  Description of Artificial Sequence: Synthetic oligonucleotide
  Antisense strand to SEQ ID NO: 1023314
acccacguggagauuguuc

SEQ ID NO: 1023316 - RNA, 19 nt, Artificial Sequence
  Description of Artificial Sequence: Synthetic oligonucleotide
  Sense strand starting at position 1406 of SEQ ID NO: 914691
acaaucuccacguggguua

SEQ ID NO: 1023317 - RNA, 19 nt, Artificial Sequence
  Description of Artificial Sequence: Synthetic oligonucleotide
  Antisense strand to SEQ ID NO: 1023316
uaacccacguggagauugu

SEQ ID NO: 1023318 - RNA, 19 nt, Artificial Sequence
  Description of Artificial Sequence: Synthetic oligonucleotide
  Sense strand starting at position 1585 of SEQ ID NO: 914691
uaaguugagugcucugauc

SEQ ID NO: 1023319 - RNA, 19 nt, Artificial Sequence
  Description of Artificial Sequence: Synthetic oligonucleotide
  Antisense strand to SEQ ID NO: 1023318
gaucagagcacucaacuua

SEQ ID NO: 1023320 - RNA, 19 nt, Artificial Sequence
  Description of Artificial Sequence: Synthetic oligonucleotide
  Sense strand starting at position 1752 of SEQ ID NO: 914691
ccgucuucucccgucacua

SEQ ID NO: 1023321 - RNA, 19 nt, Artificial Sequence
  Description of Artificial Sequence: Synthetic oligonucleotide
  Antisense strand to SEQ ID NO: 1023320
uagugacgggagaagacgg

SEQ ID NO: 1023322 - RNA, 19 nt, Artificial Sequence
  Description of Artificial Sequence: Synthetic oligonucleotide
  Sense strand starting at position 2183 of SEQ ID NO: 914691
aagaguauugagugucuau

SEQ ID NO: 1023323 - RNA, 19 nt, Artificial Sequence
  Description of Artificial Sequence: Synthetic oligonucleotide
  Antisense strand to SEQ ID NO: 1023322
auagacacucaauacucuu

SEQ ID NO: 1023324 - RNA, 19 nt, Artificial Sequence
  Description of Artificial Sequence: Synthetic oligonucleotide
  Sense strand starting at position 2216 of SEQ ID NO: 914691
cugugagggugguuacgau

SEQ ID NO: 1023325 - RNA, 19 nt, Artificial Sequence
  Description of Artificial Sequence: Synthetic oligonucleotide
  Antisense strand to SEQ ID NO: 1023324
aucguaaccacccucacag

SEQ ID NO: 1023326 - RNA, 19 nt, Artificial Sequence
  Description of Artificial Sequence: Synthetic oligonucleotide
  Sense strand starting at position 2217 of SEQ ID NO: 914691
ugugagggugguuacgaua

SEQ ID NO: 1023327 - RNA, 19 nt, Artificial Sequence
  Description of Artificial Sequence: Synthetic oligonucleotide
  Antisense strand to SEQ ID NO: 1023326
uaucguaaccacccucaca

SEQ ID NO: 1023328 - RNA, 19 nt, Artificial Sequence
  Description of Artificial Sequence: Synthetic oligonucleotide
  Sense strand starting at position 2224 of SEQ ID NO: 914691
gugguuacgauauguggau

SEQ ID NO: 1023329 - RNA, 19 nt, Artificial Sequence
  Description of Artificial Sequence: Synthetic oligonucleotide
  Antisense strand to SEQ ID NO: 1023328
auccacauaucguaaccac

SEQ ID NO: 1023330 - RNA, 19 nt, Artificial Sequence
  Description of Artificial Sequence: Synthetic oligonucleotide
  Sense strand starting at position 2226 of SEQ ID NO: 914691
gguuacgauauguggauga

SEQ ID NO: 1023331 - RNA, 19 nt, Artificial Sequence
  Description of Artificial Sequence: Synthetic oligonucleotide
  Antisense strand to SEQ ID NO: 1023330
ucauccacauaucguaacc

SEQ ID NO: 1023332 - RNA, 19 nt, Artificial Sequence
  Description of Artificial Sequence: Synthetic oligonucleotide
  Sense strand starting at position 2230 of SEQ ID NO: 914691
acgauauguggaugaacaa

SEQ ID NO: 1023333 - RNA, 19 nt, Artificial Sequence
  Description of Artificial Sequence: Synthetic oligonucleotide
  Antisense strand to SEQ ID NO: 1023332
uuguucauccacauaucgu

SEQ ID NO: 1023334 - RNA, 19 nt, Artificial Sequence
  Description of Artificial Sequence: Synthetic oligonucleotide
  Sense strand starting at position 2349 of SEQ ID NO: 914691
agaagaacguuaccaaguu

SEQ ID NO: 1023335 - RNA, 19 nt, Artificial Sequence
  Description of Artificial Sequence: Synthetic oligonucleotide
  Antisense strand to SEQ ID NO: 1023334
aacuugguaacguucuucu

SEQ ID NO: 1023336 - RNA, 19 nt, Artificial Sequence
  Description of Artificial Sequence: Synthetic oligonucleotide
  Sense strand starting at position 2382 of SEQ ID NO: 914691
gucagagaguccuuggaug

SEQ ID NO: 1023337 - RNA, 19 nt, Artificial Sequence
  Description of Artificial Sequence: Synthetic oligonucleotide
  Antisense strand to SEQ ID NO: 1023336
cauccaaggacucucugac

SEQ ID NO: 1023338 - RNA, 19 nt, Artificial Sequence
  Description of Artificial Sequence: Synthetic oligonucleotide
  Sense strand starting at position 2399 of SEQ ID NO: 914691
ugaaguaaacccgaguuga

SEQ ID NO: 1023339 - RNA, 19 nt, Artificial Sequence
  Description of Artificial Sequence: Synthetic oligonucleotide
  Antisense strand to SEQ ID NO: 1023338
ucaacucggguuuacuuca

SEQ ID NO: 1023340 - RNA, 19 nt, Artificial Sequence
  Description of Artificial Sequence: Synthetic oligonucleotide
  Sense strand starting at position 2502 of SEQ ID NO: 914691
gaaacagaauaguugaguu

SEQ ID NO: 1023341 - RNA, 19 nt, Artificial Sequence
  Description of Artificial Sequence: Synthetic oligonucleotide
  Antisense strand to SEQ ID NO: 1023340
aacucaacuauucuguuuc

SEQ ID NO: 1023342 - RNA, 19 nt, Artificial Sequence
  Description of Artificial Sequence: Synthetic oligonucleotide
  Sense strand starting at position 2512 of SEQ ID NO: 914691
aguugaguuuggcugaaac

SEQ ID NO: 1023343 - RNA, 19 nt, Artificial Sequence
  Description of Artificial Sequence: Synthetic oligonucleotide
  Antisense strand to SEQ ID NO: 1023342
guuucagccaaacucaacu

SEQ ID NO: 1023344 - RNA, 19 nt, Artificial Sequence
  Description of Artificial Sequence: Synthetic oligonucleotide
  Sense strand starting at position 2514 of SEQ ID NO: 914691
uugaguuuggcugaaacac

SEQ ID NO: 1023345 - RNA, 19 nt, Artificial Sequence
  Description of Artificial Sequence: Synthetic oligonucleotide
  Antisense strand to SEQ ID NO: 1023344
guguuucagccaaacucaa

SEQ ID NO: 1023346 - RNA, 19 nt, Artificial Sequence
  Description of Artificial Sequence: Synthetic oligonucleotide
  Sense strand starting at position 2842 of SEQ ID NO: 914691
agguauuuauaccagagca

SEQ ID NO: 1023347 - RNA, 19 nt, Artificial Sequence
  Description of Artificial Sequence: Synthetic oligonucleotide
  Antisense strand to SEQ ID NO: 1023346
ugcucugguauaaauaccu

SEQ ID NO: 1023348 - RNA, 19 nt, Artificial Sequence
  Description of Artificial Sequence: Synthetic oligonucleotide
  Sense strand starting at position 2945 of SEQ ID NO: 914691
ugagauagcucagcacaag

SEQ ID NO: 1023349 - RNA, 19 nt, Artificial Sequence
  Description of Artificial Sequence: Synthetic oligonucleotide
  Antisense strand to SEQ ID NO: 1023348
cuugugcugagcuaucuca

SEQ ID NO: 1023350 - RNA, 19 nt, Artificial Sequence
  Description of Artificial Sequence: Synthetic oligonucleotide
  Sense strand starting at position 3302 of SEQ ID NO: 914691
cuugaauuauuucuugugu

SEQ ID NO: 1023351 - RNA, 19 nt, Artificial Sequence
  Description of Artificial Sequence: Synthetic oligonucleotide
  Antisense strand to SEQ ID NO: 1023350
acacaagaaauaauucaag

SEQ ID NO: 1023352 - RNA, 19 nt, Artificial Sequence
  Description of Artificial Sequence: Synthetic oligonucleotide
  Sense strand starting at position 3492 of SEQ ID NO: 914691
ucuccuuuccuguggagaa

SEQ ID NO: 1023353 - RNA, 19 nt, Artificial Sequence
  Description of Artificial Sequence: Synthetic oligonucleotide
  Antisense strand to SEQ ID NO: 1023352
uucuccacaggaaaggaga

SEQ ID NO: 1023354 - RNA, 19 nt, Artificial Sequence
  Description of Artificial Sequence: Synthetic oligonucleotide
  Sense strand starting at position 3705 of SEQ ID NO: 914691
aggcuucuggcuuggacaa

SEQ ID NO: 1023355 - RNA, 19 nt, Artificial Sequence
  Description of Artificial Sequence: Synthetic oligonucleotide
  Antisense strand to SEQ ID NO: 1023354
uuguccaagccagaagccu

SEQ ID NO: 1023356 - RNA, 19 nt, Artificial Sequence
  Description of Artificial Sequence: Synthetic oligonucleotide
  Sense strand starting at position 3731 of SEQ ID NO: 914691
gauggugaugucugucauu

SEQ ID NO: 1023357 - RNA, 19 nt, Artificial Sequence
  Description of Artificial Sequence: Synthetic oligonucleotide
  Antisense strand to SEQ ID NO: 1023356
aaugacagacaucaccauc

SEQ ID NO: 1023358 - RNA, 19 nt, Artificial Sequence
  Description of Artificial Sequence: Synthetic oligonucleotide
  Sense strand starting at position 3768 of SEQ ID NO: 914691
acaccuagaucuccaguau

SEQ ID NO: 1023359 - RNA, 19 nt, Artificial Sequence
  Description of Artificial Sequence: Synthetic oligonucleotide
  Antisense strand to SEQ ID NO: 1023358
auacuggagaucuaggugu

SEQ ID NO: 1023360 - RNA, 19 nt, Artificial Sequence
  Description of Artificial Sequence: Synthetic oligonucleotide
  Sense strand starting at position 3772 of SEQ ID NO: 914691
cuagaucuccaguaugagu

SEQ ID NO: 1023361 - RNA, 19 nt, Artificial Sequence
  Description of Artificial Sequence: Synthetic oligonucleotide
  Antisense strand to SEQ ID NO: 1023360
acucauacuggagaucuag

SEQ ID NO: 1023362 - RNA, 19 nt, Artificial Sequence
  Description of Artificial Sequence: Synthetic oligonucleotide
  Sense strand starting at position 3832 of SEQ ID NO: 914691
ucauguuguuugguaacau

SEQ ID NO: 1023363 - RNA, 19 nt, Artificial Sequence
  Description of Artificial Sequence: Synthetic oligonucleotide
  Antisense strand to SEQ ID NO: 1023362
auguuaccaaacaacauga

SEQ ID NO: 1023364 - RNA, 19 nt, Artificial Sequence
  Description of Artificial Sequence: Synthetic oligonucleotide
  Sense strand starting at position 3844 of SEQ ID NO: 914691
guaacaucagugcaugcau

SEQ ID NO: 1023365 - RNA, 19 nt, Artificial Sequence
  Description of Artificial Sequence: Synthetic oligonucleotide
  Antisense strand to SEQ ID NO: 1023364
augcaugcacugauguuac

SEQ ID NO: 1023366 - RNA, 19 nt, Artificial Sequence
  Description of Artificial Sequence: Synthetic oligonucleotide
  Sense strand starting at position 3888 of SEQ ID NO: 914691
gaggguaguuaccugggau

SEQ ID NO: 1023367 - RNA, 19 nt, Artificial Sequence
  Description of Artificial Sequence: Synthetic oligonucleotide
  Antisense strand to SEQ ID NO: 1023366
aucccagguaacuacccuc

SEQ ID NO: 1023368 - RNA, 19 nt, Artificial Sequence
  Description of Artificial Sequence: Synthetic oligonucleotide
  Sense strand starting at position 3889 of SEQ ID NO: 914691
aggguaguuaccugggaug

SEQ ID NO: 1023369 - RNA, 19 nt, Artificial Sequence
  Description of Artificial Sequence: Synthetic oligonucleotide
  Antisense strand to SEQ ID NO: 1023368
caucccagguaacuacccu

SEQ ID NO: 1023370 - RNA, 19 nt, Artificial Sequence
  Description of Artificial Sequence: Synthetic oligonucleotide
  Sense strand starting at position 3891 of SEQ ID NO: 914691
gguaguuaccugggauguc

SEQ ID NO: 1023371 - RNA, 19 nt, Artificial Sequence
  Description of Artificial Sequence: Synthetic oligonucleotide
  Antisense strand to SEQ ID NO: 1023370
gacaucccagguaacuacc

SEQ ID NO: 1023372 - RNA, 19 nt, Artificial Sequence
  Description of Artificial Sequence: Synthetic oligonucleotide
  Sense strand starting at position 18 of SEQ ID NO: 914692
caguguuucccagauagca

SEQ ID NO: 1023373 - RNA, 19 nt, Artificial Sequence
  Description of Artificial Sequence: Synthetic oligonucleotide
  Antisense strand to SEQ ID NO: 1023372
ugcuaucugggaaacacug

SEQ ID NO: 1023374 - RNA, 19 nt, Artificial Sequence
  Description of Artificial Sequence: Synthetic oligonucleotide
  Sense strand starting at position 140 of SEQ ID NO: 914692
gcaauaauauuuguguucu

SEQ ID NO: 1023375 - RNA, 19 nt, Artificial Sequence
  Description of Artificial Sequence: Synthetic oligonucleotide
  Antisense strand to SEQ ID NO: 1023374
agaacacaaauauuauugc

SEQ ID NO: 1023376 - RNA, 19 nt, Artificial Sequence
  Description of Artificial Sequence: Synthetic oligonucleotide
  Sense strand starting at position 475 of SEQ ID NO: 914692
uugguauguguccaauacu

SEQ ID NO: 1023377 - RNA, 19 nt, Artificial Sequence
  Description of Artificial Sequence: Synthetic oligonucleotide
  Antisense strand to SEQ ID NO: 1023376
aguauuggacacauaccaa

SEQ ID NO: 1023378 - RNA, 19 nt, Artificial Sequence
  Description of Artificial Sequence: Synthetic oligonucleotide
  Sense strand starting at position 478 of SEQ ID NO: 914692
guauguguccaauacucca

SEQ ID NO: 1023379 - RNA, 19 nt, Artificial Sequence
  Description of Artificial Sequence: Synthetic oligonucleotide
  Antisense strand to SEQ ID NO: 1023378
uggaguauuggacacauac

SEQ ID NO: 1023380 - RNA, 19 nt, Artificial Sequence
  Description of Artificial Sequence: Synthetic oligonucleotide
  Sense strand starting at position 523 of SEQ ID NO: 914692
agaggcucugggcaguaau

SEQ ID NO: 1023381 - RNA, 19 nt, Artificial Sequence
  Description of Artificial Sequence: Synthetic oligonucleotide
  Antisense strand to SEQ ID NO: 1023380
auuacugcccagagccucu

SEQ ID NO: 1023382 - RNA, 19 nt, Artificial Sequence
  Description of Artificial Sequence: Synthetic oligonucleotide
  Sense strand starting at position 745 of SEQ ID NO: 914692
ggguucuuucuagagcauc

SEQ ID NO: 1023383 - RNA, 19 nt, Artificial Sequence
  Description of Artificial Sequence: Synthetic oligonucleotide
  Antisense strand to SEQ ID NO: 1023382
gaugcucuagaaagaaccc

SEQ ID NO: 1023384 - RNA, 19 nt, Artificial Sequence
  Description of Artificial Sequence: Synthetic oligonucleotide
  Sense strand starting at position 950 of SEQ ID NO: 914692
cagguccaucccuggauua

SEQ ID NO: 1023385 - RNA, 19 nt, Artificial Sequence
  Description of Artificial Sequence: Synthetic oligonucleotide
  Antisense strand to SEQ ID NO: 1023384
uaauccagggauggaccug

SEQ ID NO: 1023386 - RNA, 19 nt, Artificial Sequence
  Description of Artificial Sequence: Synthetic oligonucleotide
  Sense strand starting at position 951 of SEQ ID NO: 914692
agguccaucccuggauuau

SEQ ID NO: 1023387 - RNA, 19 nt, Artificial Sequence
  Description of Artificial Sequence: Synthetic oligonucleotide
  Antisense strand to SEQ ID NO: 1023386
auaauccagggauggaccu

SEQ ID NO: 1023388 - RNA, 19 nt, Artificial Sequence
  Description of Artificial Sequence: Synthetic oligonucleotide
  Sense strand starting at position 952 of SEQ ID NO: 914692
gguccaucccuggauuauu

SEQ ID NO: 1023389 - RNA, 19 nt, Artificial Sequence
  Description of Artificial Sequence: Synthetic oligonucleotide
  Antisense strand to SEQ ID NO: 1023388
aauaauccagggauggacc

SEQ ID NO: 1023390 - RNA, 19 nt, Artificial Sequence
  Description of Artificial Sequence: Synthetic oligonucleotide
  Sense strand starting at position 1049 of SEQ ID NO: 914692
agcucuggccuugaaucua

SEQ ID NO: 1023391 - RNA, 19 nt, Artificial Sequence
  Description of Artificial Sequence: Synthetic oligonucleotide
  Antisense strand to SEQ ID NO: 1023390
uagauucaaggccagagcu

SEQ ID NO: 1023392 - RNA, 19 nt, Artificial Sequence
  Description of Artificial Sequence: Synthetic oligonucleotide
  Sense strand starting at position 1074 of SEQ ID NO: 914692
gcauuuaccauccguguga

SEQ ID NO: 1023393 - RNA, 19 nt, Artificial Sequence
  Description of Artificial Sequence: Synthetic oligonucleotide
  Antisense strand to SEQ ID NO: 1023392
ucacacggaugguaaaugc

SEQ ID NO: 1023394 - RNA, 19 nt, Artificial Sequence
  Description of Artificial Sequence: Synthetic oligonucleotide
  Sense strand starting at position 1076 of SEQ ID NO: 914692
auuuaccauccgugugaca

SEQ ID NO: 1023395 - RNA, 19 nt, Artificial Sequence
  Description of Artificial Sequence: Synthetic oligonucleotide
  Antisense strand to SEQ ID NO: 1023394
ugucacacggaugguaaau

SEQ ID NO: 1023396 - RNA, 19 nt, Artificial Sequence
  Description of Artificial Sequence: Synthetic oligonucleotide
  Sense strand starting at position 2097 of SEQ ID NO: 914692
gggaguuccagacggagau

SEQ ID NO: 1023397 - RNA, 19 nt, Artificial Sequence
  Description of Artificial Sequence: Synthetic oligonucleotide
  Antisense strand to SEQ ID NO: 1023396
aucuccgucuggaacuccc

SEQ ID NO: 1023398 - RNA, 19 nt, Artificial Sequence
  Description of Artificial Sequence: Synthetic oligonucleotide
  Sense strand starting at position 2240 of SEQ ID NO: 914692
ccaugaacuccuuagguuu

SEQ ID NO: 1023399 - RNA, 19 nt, Artificial Sequence
  Description of Artificial Sequence: Synthetic oligonucleotide
  Antisense strand to SEQ ID NO: 1023398
aaaccuaaggaguucaugg

SEQ ID NO: 1023400 - RNA, 19 nt, Artificial Sequence
  Description of Artificial Sequence: Synthetic oligonucleotide
  Sense strand starting at position 2253 of SEQ ID NO: 914692
agguuucucagcucgcgau

SEQ ID NO: 1023401 - RNA, 19 nt, Artificial Sequence
  Description of Artificial Sequence: Synthetic oligonucleotide
  Antisense strand to SEQ ID NO: 1023400
aucgcgagcugagaaaccu

SEQ ID NO: 1023402 - RNA, 19 nt, Artificial Sequence
  Description of Artificial Sequence: Synthetic oligonucleotide
  Sense strand starting at position 2267 of SEQ ID NO: 914692
gcgauuucuaagggcgaga

SEQ ID NO: 1023403 - RNA, 19 nt, Artificial Sequence
  Description of Artificial Sequence: Synthetic oligonucleotide
  Antisense strand to SEQ ID NO: 1023402
ucucgcccuuagaaaucgc

SEQ ID NO: 1023404 - RNA, 19 nt, Artificial Sequence
  Description of Artificial Sequence: Synthetic oligonucleotide
  Sense strand starting at position 2327 of SEQ ID NO: 914692
cuguuaucggugguguguu

SEQ ID NO: 1023405 - RNA, 19 nt, Artificial Sequence
  Description of Artificial Sequence: Synthetic oligonucleotide
  Antisense strand to SEQ ID NO: 1023404
aacacaccaccgauaacag

SEQ ID NO: 1023406 - RNA, 19 nt, Artificial Sequence
  Description of Artificial Sequence: Synthetic oligonucleotide
  Sense strand starting at position 2400 of SEQ ID NO: 914692
ggcaaauguuuauugguga

SEQ ID NO: 1023407 - RNA, 19 nt, Artificial Sequence
  Description of Artificial Sequence: Synthetic oligonucleotide
  Antisense strand to SEQ ID NO: 1023406
ucaccaauaaacauuugcc

SEQ ID NO: 1023408 - RNA, 19 nt, Artificial Sequence
  Description of Artificial Sequence: Synthetic oligonucleotide
  Sense strand starting at position 2550 of SEQ ID NO: 914692
caucuagcucugggaugau

SEQ ID NO: 1023409 - RNA, 19 nt, Artificial Sequence
  Description of Artificial Sequence: Synthetic oligonucleotide
  Antisense strand to SEQ ID NO: 1023408
aucaucccagagcuagaug

SEQ ID NO: 1023410 - RNA, 19 nt, Artificial Sequence
  Description of Artificial Sequence: Synthetic oligonucleotide
  Sense strand starting at position 2624 of SEQ ID NO: 914692
aauaaauggcagugauugu

SEQ ID NO: 1023411 - RNA, 19 nt, Artificial Sequence
  Description of Artificial Sequence: Synthetic oligonucleotide
  Antisense strand to SEQ ID NO: 1023410
acaaucacugccauuuauu

SEQ ID NO: 1023412 - RNA, 19 nt, Artificial Sequence
  Description of Artificial Sequence: Synthetic oligonucleotide
  Sense strand starting at position 2634 of SEQ ID NO: 914692
agugauugucuuuaucauu

SEQ ID NO: 1023413 - RNA, 19 nt, Artificial Sequence
  Description of Artificial Sequence: Synthetic oligonucleotide
  Antisense strand to SEQ ID NO: 1023412
aaugauaaagacaaucacu

SEQ ID NO: 1023414 - RNA, 19 nt, Artificial Sequence
  Description of Artificial Sequence: Synthetic oligonucleotide
  Sense strand starting at position 2684 of SEQ ID NO: 914692
auugaauuccagugucuca

SEQ ID NO: 1023415 - RNA, 19 nt, Artificial Sequence
  Description of Artificial Sequence: Synthetic oligonucleotide
  Antisense strand to SEQ ID NO: 1023414
ugagacacuggaauucaau

SEQ ID NO: 1023416 - RNA, 19 nt, Artificial Sequence
  Description of Artificial Sequence: Synthetic oligonucleotide
  Sense strand starting at position 2687 of SEQ ID NO: 914692
gaauuccagugucucagaa

SEQ ID NO: 1023417 - RNA, 19 nt, Artificial Sequence
  Description of Artificial Sequence: Synthetic oligonucleotide
  Antisense strand to SEQ ID NO: 1023416
uucugagacacuggaauuc

SEQ ID NO: 1023418 - RNA, 19 nt, Artificial Sequence
  Description of Artificial Sequence: Synthetic oligonucleotide
  Sense strand starting at position 2716 of SEQ ID NO: 914692
aguuuacuucucuagaguu

SEQ ID NO: 1023419 - RNA, 19 nt, Artificial Sequence
  Description of Artificial Sequence: Synthetic oligonucleotide
  Antisense strand to SEQ ID NO: 1023418
aacucuagagaaguaaacu

SEQ ID NO: 1023420 - RNA, 19 nt, Artificial Sequence
  Description of Artificial Sequence: Synthetic oligonucleotide
  Sense strand starting at position 2718 of SEQ ID NO: 914692
uuuacuucucuagaguugu

SEQ ID NO: 1023421 - RNA, 19 nt, Artificial Sequence
  Description of Artificial Sequence: Synthetic oligonucleotide
  Antisense strand to SEQ ID NO: 1023420
acaacucuagagaaguaaa

SEQ ID NO: 1023422 - RNA, 19 nt, Artificial Sequence
  Description of Artificial Sequence: Synthetic oligonucleotide
  Sense strand starting at position 2766 of SEQ ID NO: 914692
accggugacaaugaaguua

SEQ ID NO: 1023423 - RNA, 19 nt, Artificial Sequence
  Description of Artificial Sequence: Synthetic oligonucleotide
  Antisense strand to SEQ ID NO: 1023422
uaacuucauugucaccggu

SEQ ID NO: 1023424 - RNA, 19 nt, Artificial Sequence
  Description of Artificial Sequence: Synthetic oligonucleotide
  Sense strand starting at position 2780 of SEQ ID NO: 914692
aguuaacauuuguacagau

SEQ ID NO: 1023425 - RNA, 19 nt, Artificial Sequence
  Description of Artificial Sequence: Synthetic oligonucleotide
  Antisense strand to SEQ ID NO: 1023424
aucuguacaaauguuaacu

SEQ ID NO: 1023426 - RNA, 19 nt, Artificial Sequence
  Description of Artificial Sequence: Synthetic oligonucleotide
  Sense strand starting at position 2790 of SEQ ID NO: 914692
uguacagaucuuuacguuu

SEQ ID NO: 1023427 - RNA, 19 nt, Artificial Sequence
  Description of Artificial Sequence: Synthetic oligonucleotide
  Antisense strand to SEQ ID NO: 1023426
aaacguaaagaucuguaca

SEQ ID NO: 1023428 - RNA, 19 nt, Artificial Sequence
  Description of Artificial Sequence: Synthetic oligonucleotide
  Sense strand starting at position 2793 of SEQ ID NO: 914692
acagaucuuuacguuuaca

SEQ ID NO: 1023429 - RNA, 19 nt, Artificial Sequence
  Description of Artificial Sequence: Synthetic oligonucleotide
  Antisense strand to SEQ ID NO: 1023428
uguaaacguaaagaucugu

SEQ ID NO: 1023430 - RNA, 19 nt, Artificial Sequence
  Description of Artificial Sequence: Synthetic oligonucleotide
  Sense strand starting at position 3000 of SEQ ID NO: 914692
cuugaaugucuugaccaua

SEQ ID NO: 1023431 - RNA, 19 nt, Artificial Sequence
  Description of Artificial Sequence: Synthetic oligonucleotide
  Antisense strand to SEQ ID NO: 1023430
uauggucaagacauucaag

SEQ ID NO: 1023432 - RNA, 19 nt, Artificial Sequence
  Description of Artificial Sequence: Synthetic oligonucleotide
  Sense strand starting at position 3003 of SEQ ID NO: 914692
gaaugucuugaccauagcu

SEQ ID NO: 1023433 - RNA, 19 nt, Artificial Sequence
  Description of Artificial Sequence: Synthetic oligonucleotide
  Antisense strand to SEQ ID NO: 1023432
agcuauggucaagacauuc

SEQ ID NO: 1023434 - RNA, 19 nt, Artificial Sequence
  Description of Artificial Sequence: Synthetic oligonucleotide
  Sense strand starting at position 3005 of SEQ ID NO: 914692
augucuugaccauagcuca

SEQ ID NO: 1023435 - RNA, 19 nt, Artificial Sequence
  Description of Artificial Sequence: Synthetic oligonucleotide
  Antisense strand to SEQ ID NO: 1023434
ugagcuauggucaagacau

SEQ ID NO: 1023436 - RNA, 19 nt, Artificial Sequence
  Description of Artificial Sequence: Synthetic oligonucleotide
  Sense strand starting at position 3573 of SEQ ID NO: 914692
guaugagaaucucuagaac

SEQ ID NO: 1023437 - RNA, 19 nt, Artificial Sequence
  Description of Artificial Sequence: Synthetic oligonucleotide
  Antisense strand to SEQ ID NO: 1023436
guucuagagauucucauac

SEQ ID NO: 1023438 - RNA, 19 nt, Artificial Sequence
  Description of Artificial Sequence: Synthetic oligonucleotide
  Sense strand starting at position 3698 of SEQ ID NO: 914692
uauugagaucuggguacca

SEQ ID NO: 1023439 - RNA, 19 nt, Artificial Sequence
  Description of Artificial Sequence: Synthetic oligonucleotide
  Antisense strand to SEQ ID NO: 1023438
ugguacccagaucucaaua

SEQ ID NO: 1023440 - RNA, 19 nt, Artificial Sequence
  Description of Artificial Sequence: Synthetic oligonucleotide
  Sense strand starting at position 3713 of SEQ ID NO: 914692
accaccagucagugacuua

SEQ ID NO: 1023441 - RNA, 19 nt, Artificial Sequence
  Description of Artificial Sequence: Synthetic oligonucleotide
  Antisense strand to SEQ ID NO: 1023440
uaagucacugacugguggu

SEQ ID NO: 1023442 - RNA, 19 nt, Artificial Sequence
  Description of Artificial Sequence: Synthetic oligonucleotide
  Sense strand starting at position 3769 of SEQ ID NO: 914692
uccacaaagcuccggaaau

SEQ ID NO: 1023443 - RNA, 19 nt, Artificial Sequence
  Description of Artificial Sequence: Synthetic oligonucleotide
  Antisense strand to SEQ ID NO: 1023442
auuuccggagcuuugugga

SEQ ID NO: 1023444 - RNA, 19 nt, Artificial Sequence
  Description of Artificial Sequence: Synthetic oligonucleotide
  Sense strand starting at position 3781 of SEQ ID NO: 914692
cggaaauuguaggcaaacu

SEQ ID NO: 1023445 - RNA, 19 nt, Artificial Sequence
  Description of Artificial Sequence: Synthetic oligonucleotide
  Antisense strand to SEQ ID NO: 1023444
aguuugccuacaauuuccg

SEQ ID NO: 1023446 - RNA, 19 nt, Artificial Sequence
  Description of Artificial Sequence: Synthetic oligonucleotide
  Sense strand starting at position 3863 of SEQ ID NO: 914692
ucagauuauuggccucaga

SEQ ID NO: 1023447 - RNA, 19 nt, Artificial Sequence
  Description of Artificial Sequence: Synthetic oligonucleotide
  Antisense strand to SEQ ID NO: 1023446
ucugaggccaauaaucuga

SEQ ID NO: 1023448 - RNA, 19 nt, Artificial Sequence
  Description of Artificial Sequence: Synthetic oligonucleotide
  Sense strand starting at position 3886 of SEQ ID NO: 914692
gcuaauaagggccauugau

SEQ ID NO: 1023449 - RNA, 19 nt, Artificial Sequence
  Description of Artificial Sequence: Synthetic oligonucleotide
  Antisense strand to SEQ ID NO: 1023448
aucaauggcccuuauuagc

SEQ ID NO: 1023450 - RNA, 19 nt, Artificial Sequence
  Description of Artificial Sequence: Synthetic oligonucleotide
  Sense strand starting at position 3910 of SEQ ID NO: 914692
gcuacauuuccgggcuaaa

SEQ ID NO: 1023451 - RNA, 19 nt, Artificial Sequence
  Description of Artificial Sequence: Synthetic oligonucleotide
  Antisense strand to SEQ ID NO: 1023450
uuuagcccggaaauguagc

SEQ ID NO: 1023452 - RNA, 19 nt, Artificial Sequence
  Description of Artificial Sequence: Synthetic oligonucleotide
  Sense strand starting at position 166 of SEQ ID NO: 914693
agcugaugugcuuaggagu

SEQ ID NO: 1023453 - RNA, 19 nt, Artificial Sequence
  Description of Artificial Sequence: Synthetic oligonucleotide
  Antisense strand to SEQ ID NO: 1023452
acuccuaagcacaucagcu

SEQ ID NO: 1023454 - RNA, 19 nt, Artificial Sequence
  Description of Artificial Sequence: Synthetic oligonucleotide
  Sense strand starting at position 172 of SEQ ID NO: 914693
ugugcuuaggagugacagu

SEQ ID NO: 1023455 - RNA, 19 nt, Artificial Sequence
  Description of Artificial Sequence: Synthetic oligonucleotide
  Antisense strand to SEQ ID NO: 1023454
acugucacuccuaagcaca

SEQ ID NO: 1023456 - RNA, 19 nt, Artificial Sequence
  Description of Artificial Sequence: Synthetic oligonucleotide
  Sense strand starting at position 173 of SEQ ID NO: 914693
gugcuuaggagugacagua

SEQ ID NO: 1023457 - RNA, 19 nt, Artificial Sequence
  Description of Artificial Sequence: Synthetic oligonucleotide
  Antisense strand to SEQ ID NO: 1023456
uacugucacuccuaagcac

SEQ ID NO: 1023458 - RNA, 19 nt, Artificial Sequence
  Description of Artificial Sequence: Synthetic oligonucleotide
  Sense strand starting at position 685 of SEQ ID NO: 914693
cgugguccuccaugacuga

SEQ ID NO: 1023459 - RNA, 19 nt, Artificial Sequence
  Description of Artificial Sequence: Synthetic oligonucleotide
  Antisense strand to SEQ ID NO: 1023458
ucagucauggaggaccacg

SEQ ID NO: 1023460 - RNA, 19 nt, Artificial Sequence
  Description of Artificial Sequence: Synthetic oligonucleotide
  Sense strand starting at position 686 of SEQ ID NO: 914693
gugguccuccaugacugau

SEQ ID NO: 1023461 - RNA, 19 nt, Artificial Sequence
  Description of Artificial Sequence: Synthetic oligonucleotide
  Antisense strand to SEQ ID NO: 1023460
aucagucauggaggaccac

SEQ ID NO: 1023462 - RNA, 19 nt, Artificial Sequence
  Description of Artificial Sequence: Synthetic oligonucleotide
  Sense strand starting at position 926 of SEQ ID NO: 914693
gcgucugauccuuagcaga

SEQ ID NO: 1023463 - RNA, 19 nt, Artificial Sequence
  Description of Artificial Sequence: Synthetic oligonucleotide
  Antisense strand to SEQ ID NO: 1023462
ucugcuaaggaucagacgc

SEQ ID NO: 1023464 - RNA, 19 nt, Artificial Sequence
  Description of Artificial Sequence: Synthetic oligonucleotide
  Sense strand starting at position 1022 of SEQ ID NO: 914693
ugauuaagcuaaugccuga

SEQ ID NO: 1023465 - RNA, 19 nt, Artificial Sequence
  Description of Artificial Sequence: Synthetic oligonucleotide
  Antisense strand to SEQ ID NO: 1023464
ucaggcauuagcuuaauca

SEQ ID NO: 1023466 - RNA, 19 nt, Artificial Sequence
  Description of Artificial Sequence: Synthetic oligonucleotide
  Sense strand starting at position 1026 of SEQ ID NO: 914693
uaagcuaaugccugaguca

SEQ ID NO: 1023467 - RNA, 19 nt, Artificial Sequence
  Description of Artificial Sequence: Synthetic oligonucleotide
  Antisense strand to SEQ ID NO: 1023466
ugacucaggcauuagcuua

SEQ ID NO: 1023468 - RNA, 19 nt, Artificial Sequence
  Description of Artificial Sequence: Synthetic oligonucleotide
  Sense strand starting at position 1051 of SEQ ID NO: 914693
caccauuaucgggagcuga

SEQ ID NO: 1023469 - RNA, 19 nt, Artificial Sequence
  Description of Artificial Sequence: Synthetic oligonucleotide
  Antisense strand to SEQ ID NO: 1023468
ucagcucccgauaauggug

SEQ ID NO: 1023470 - RNA, 19 nt, Artificial Sequence
  Description of Artificial Sequence: Synthetic oligonucleotide
  Sense strand starting at position 1389 of SEQ ID NO: 914693
gcagaagagcucugugaug

SEQ ID NO: 1023471 - RNA, 19 nt, Artificial Sequence
  Description of Artificial Sequence: Synthetic oligonucleotide
  Antisense strand to SEQ ID NO: 1023470
caucacagagcucuucugc

SEQ ID NO: 1023472 - RNA, 19 nt, Artificial Sequence
  Description of Artificial Sequence: Synthetic oligonucleotide
  Sense strand starting at position 1400 of SEQ ID NO: 914693
cugugaugcccuggacaca

SEQ ID NO: 1023473 - RNA, 19 nt, Artificial Sequence
  Description of Artificial Sequence: Synthetic oligonucleotide
  Antisense strand to SEQ ID NO: 1023472
uguguccagggcaucacag

SEQ ID NO: 1023474 - RNA, 19 nt, Artificial Sequence
  Description of Artificial Sequence: Synthetic oligonucleotide
  Sense strand starting at position 2167 of SEQ ID NO: 914693
gagggaagcucagugcaaa

SEQ ID NO: 1023475 - RNA, 19 nt, Artificial Sequence
  Description of Artificial Sequence: Synthetic oligonucleotide
  Antisense strand to SEQ ID NO: 1023474
uuugcacugagcuucccuc

SEQ ID NO: 1023476 - RNA, 19 nt, Artificial Sequence
  Description of Artificial Sequence: Synthetic oligonucleotide
  Sense strand starting at position 2233 of SEQ ID NO: 914693
gugggaagugucugccauc

SEQ ID NO: 1023477 - RNA, 19 nt, Artificial Sequence
  Description of Artificial Sequence: Synthetic oligonucleotide
  Antisense strand to SEQ ID NO: 1023476
gauggcagacacuucccac

SEQ ID NO: 1023478 - RNA, 19 nt, Artificial Sequence
  Description of Artificial Sequence: Synthetic oligonucleotide
  Sense strand starting at position 2275 of SEQ ID NO: 914693
gaccuugggcuuugaaaca

SEQ ID NO: 1023479 - RNA, 19 nt, Artificial Sequence
  Description of Artificial Sequence: Synthetic oligonucleotide
  Antisense strand to SEQ ID NO: 1023478
uguuucaaagcccaagguc

SEQ ID NO: 1023480 - RNA, 19 nt, Artificial Sequence
  Description of Artificial Sequence: Synthetic oligonucleotide
  Sense strand starting at position 2327 of SEQ ID NO: 914693
gacagaguguauccagguu

SEQ ID NO: 1023481 - RNA, 19 nt, Artificial Sequence
  Description of Artificial Sequence: Synthetic oligonucleotide
  Antisense strand to SEQ ID NO: 1023480
aaccuggauacacucuguc

SEQ ID NO: 1023482 - RNA, 19 nt, Artificial Sequence
  Description of Artificial Sequence: Synthetic oligonucleotide
  Sense strand starting at position 2339 of SEQ ID NO: 914693
ccagguuauuugggacuca

SEQ ID NO: 1023483 - RNA, 19 nt, Artificial Sequence
  Description of Artificial Sequence: Synthetic oligonucleotide
  Antisense strand to SEQ ID NO: 1023482
ugagucccaaauaaccugg

SEQ ID NO: 1023484 - RNA, 19 nt, Artificial Sequence
  Description of Artificial Sequence: Synthetic oligonucleotide
  Sense strand starting at position 2348 of SEQ ID NO: 914693
uugggacucacagguuaaa

SEQ ID NO: 1023485 - RNA, 19 nt, Artificial Sequence
  Description of Artificial Sequence: Synthetic oligonucleotide
  Antisense strand to SEQ ID NO: 1023484
uuuaaccugugagucccaa

SEQ ID NO: 1023486 - RNA, 19 nt, Artificial Sequence
  Description of Artificial Sequence: Synthetic oligonucleotide
  Sense strand starting at position 2580 of SEQ ID NO: 914693
cugugcuccacuuggauga

SEQ ID NO: 1023487 - RNA, 19 nt, Artificial Sequence
  Description of Artificial Sequence: Synthetic oligonucleotide
  Antisense strand to SEQ ID NO: 1023486
ucauccaaguggagcacag

SEQ ID NO: 1023488 - RNA, 19 nt, Artificial Sequence
  Description of Artificial Sequence: Synthetic oligonucleotide
  Sense strand starting at position 2757 of SEQ ID NO: 914693
cggccuuuccagugaacac

SEQ ID NO: 1023489 - RNA, 19 nt, Artificial Sequence
  Description of Artificial Sequence: Synthetic oligonucleotide
  Antisense strand to SEQ ID NO: 1023488
guguucacuggaaaggccg

SEQ ID NO: 1023490 - RNA, 19 nt, Artificial Sequence
  Description of Artificial Sequence: Synthetic oligonucleotide
  Sense strand starting at position 2813 of SEQ ID NO: 914693
gcggcagaguccugccaau

SEQ ID NO: 1023491 - RNA, 19 nt, Artificial Sequence
  Description of Artificial Sequence: Synthetic oligonucleotide
  Antisense strand to SEQ ID NO: 1023490
auuggcaggacucugccgc

SEQ ID NO: 1023492 - RNA, 19 nt, Artificial Sequence
  Description of Artificial Sequence: Synthetic oligonucleotide
  Sense strand starting at position 2972 of SEQ ID NO: 914693
gcagcacucuuggagcaaa

SEQ ID NO: 1023493 - RNA, 19 nt, Artificial Sequence
  Description of Artificial Sequence: Synthetic oligonucleotide
  Antisense strand to SEQ ID NO: 1023492
uuugcuccaagagugcugc

SEQ ID NO: 1023494 - RNA, 19 nt, Artificial Sequence
  Description of Artificial Sequence: Synthetic oligonucleotide
  Sense strand starting at position 2975 of SEQ ID NO: 914693
gcacucuuggagcaaauga

SEQ ID NO: 1023495 - RNA, 19 nt, Artificial Sequence
  Description of Artificial Sequence: Synthetic oligonucleotide
  Antisense strand to SEQ ID NO: 1023494
ucauuugcuccaagagugc

SEQ ID NO: 1023496 - RNA, 19 nt, Artificial Sequence
  Description of Artificial Sequence: Synthetic oligonucleotide
  Sense strand starting at position 3055 of SEQ ID NO: 914693
gcuuguugcaaccauggaa

SEQ ID NO: 1023497 - RNA, 19 nt, Artificial Sequence
  Description of Artificial Sequence: Synthetic oligonucleotide
  Antisense strand to SEQ ID NO: 1023496
uuccaugguugcaacaagc

SEQ ID NO: 1023498 - RNA, 19 nt, Artificial Sequence
  Description of Artificial Sequence: Synthetic oligonucleotide
  Sense strand starting at position 3094 of SEQ ID NO: 914693
acccuaaguucucagguaa

SEQ ID NO: 1023499 - RNA, 19 nt, Artificial Sequence
  Description of Artificial Sequence: Synthetic oligonucleotide
  Antisense strand to SEQ ID NO: 1023498
uuaccugagaacuuagggu

SEQ ID NO: 1023500 - RNA, 19 nt, Artificial Sequence
  Description of Artificial Sequence: Synthetic oligonucleotide
  Sense strand starting at position 3107 of SEQ ID NO: 914693
agguaagagccgugcauua

SEQ ID NO: 1023501 - RNA, 19 nt, Artificial Sequence
  Description of Artificial Sequence: Synthetic oligonucleotide
  Antisense strand to SEQ ID NO: 1023500
uaaugcacggcucuuaccu

SEQ ID NO: 1023502 - RNA, 19 nt, Artificial Sequence
  Description of Artificial Sequence: Synthetic oligonucleotide
  Sense strand starting at position 3109 of SEQ ID NO: 914693
guaagagccgugcauuaaa

SEQ ID NO: 1023503 - RNA, 19 nt, Artificial Sequence
  Description of Artificial Sequence: Synthetic oligonucleotide
  Antisense strand to SEQ ID NO: 1023502
uuuaaugcacggcucuuac

SEQ ID NO: 1023504 - RNA, 19 nt, Artificial Sequence
  Description of Artificial Sequence: Synthetic oligonucleotide
  Sense strand starting at position 3819 of SEQ ID NO: 914693
gucucagcaucucacauua

SEQ ID NO: 1023505 - RNA, 19 nt, Artificial Sequence
  Description of Artificial Sequence: Synthetic oligonucleotide
  Antisense strand to SEQ ID NO: 1023504
uaaugugagaugcugagac

SEQ ID NO: 1023506 - RNA, 19 nt, Artificial Sequence
  Description of Artificial Sequence: Synthetic oligonucleotide
  Sense strand starting at position 3857 of SEQ ID NO: 914693
uccacuauaacguggagaa

SEQ ID NO: 1023507 - RNA, 19 nt, Artificial Sequence
  Description of Artificial Sequence: Synthetic oligonucleotide
  Antisense strand to SEQ ID NO: 1023506
uucuccacguuauagugga

SEQ ID NO: 1023508 - RNA, 19 nt, Artificial Sequence
  Description of Artificial Sequence: Synthetic oligonucleotide
  Sense strand starting at position 3858 of SEQ ID NO: 914693
ccacuauaacguggagaau

SEQ ID NO: 1023509 - RNA, 19 nt, Artificial Sequence
  Description of Artificial Sequence: Synthetic oligonucleotide
  Antisense strand to SEQ ID NO: 1023508
auucuccacguuauagugg

SEQ ID NO: 1023510 - RNA, 19 nt, Artificial Sequence
  Description of Artificial Sequence: Synthetic oligonucleotide
  Sense strand starting at position 3973 of SEQ ID NO: 914693
uggcaaccuucuuggcaaa

SEQ ID NO: 1023511 - RNA, 19 nt, Artificial Sequence
  Description of Artificial Sequence: Synthetic oligonucleotide
  Antisense strand to SEQ ID NO: 1023510
uuugccaagaagguugcca

SEQ ID NO: 1023512 - RNA, 19 nt, Artificial Sequence
  Description of Artificial Sequence: Synthetic oligonucleotide
  Sense strand starting at position 171 of SEQ ID NO: 914694
uccuuaaaguaggauuaau

SEQ ID NO: 1023513 - RNA, 19 nt, Artificial Sequence
  Description of Artificial Sequence: Synthetic oligonucleotide
  Antisense strand to SEQ ID NO: 1023512
auuaauccuacuuuaagga

SEQ ID NO: 1023514 - RNA, 19 nt, Artificial Sequence
  Description of Artificial Sequence: Synthetic oligonucleotide
  Sense strand starting at position 179 of SEQ ID NO: 914694
guaggauuaauacaagcga

SEQ ID NO: 1023515 - RNA, 19 nt, Artificial Sequence
  Description of Artificial Sequence: Synthetic oligonucleotide
  Antisense strand to SEQ ID NO: 1023514
ucgcuuguauuaauccuac

SEQ ID NO: 1023516 - RNA, 19 nt, Artificial Sequence
  Description of Artificial Sequence: Synthetic oligonucleotide
  Sense strand starting at position 194 of SEQ ID NO: 914694
gcgauagcuuauucccuuu

SEQ ID NO: 1023517 - RNA, 19 nt, Artificial Sequence
  Description of Artificial Sequence: Synthetic oligonucleotide
  Antisense strand to SEQ ID NO: 1023516
aaagggaauaagcuaucgc

SEQ ID NO: 1023518 - RNA, 19 nt, Artificial Sequence
  Description of Artificial Sequence: Synthetic oligonucleotide
  Sense strand starting at position 317 of SEQ ID NO: 914694
gcaggacuauagucugauu

SEQ ID NO: 1023519 - RNA, 19 nt, Artificial Sequence
  Description of Artificial Sequence: Synthetic oligonucleotide
  Antisense strand to SEQ ID NO: 1023518
aaucagacuauaguccugc

SEQ ID NO: 1023520 - RNA, 19 nt, Artificial Sequence
  Description of Artificial Sequence: Synthetic oligonucleotide
  Sense strand starting at position 319 of SEQ ID NO: 914694
aggacuauagucugauugu

SEQ ID NO: 1023521 - RNA, 19 nt, Artificial Sequence
  Description of Artificial Sequence: Synthetic oligonucleotide
  Antisense strand to SEQ ID NO: 1023520
acaaucagacuauaguccu

SEQ ID NO: 1023522 - RNA, 19 nt, Artificial Sequence
  Description of Artificial Sequence: Synthetic oligonucleotide
  Sense strand starting at position 325 of SEQ ID NO: 914694
auagucugauuguccuaca

SEQ ID NO: 1023523 - RNA, 19 nt, Artificial Sequence
  Description of Artificial Sequence: Synthetic oligonucleotide
  Antisense strand to SEQ ID NO: 1023522
uguaggacaaucagacuau

SEQ ID NO: 1023524 - RNA, 19 nt, Artificial Sequence
  Description of Artificial Sequence: Synthetic oligonucleotide
  Sense strand starting at position 364 of SEQ ID NO: 914694
cucccaauagaugguguaa

SEQ ID NO: 1023525 - RNA, 19 nt, Artificial Sequence
  Description of Artificial Sequence: Synthetic oligonucleotide
  Antisense strand to SEQ ID NO: 1023524
uuacaccaucuauugggag

SEQ ID NO: 1023526 - RNA, 19 nt, Artificial Sequence
  Description of Artificial Sequence: Synthetic oligonucleotide
  Sense strand starting at position 425 of SEQ ID NO: 914694
guaggaaacgcauaaacgu

SEQ ID NO: 1023527 - RNA, 19 nt, Artificial Sequence
  Description of Artificial Sequence: Synthetic oligonucleotide
  Antisense strand to SEQ ID NO: 1023526
acguuuaugcguuuccuac

SEQ ID NO: 1023528 - RNA, 19 nt, Artificial Sequence
  Description of Artificial Sequence: Synthetic oligonucleotide
  Sense strand starting at position 610 of SEQ ID NO: 914694
ucccaucacuugguccaua

SEQ ID NO: 1023529 - RNA, 19 nt, Artificial Sequence
  Description of Artificial Sequence: Synthetic oligonucleotide
  Antisense strand to SEQ ID NO: 1023528
uauggaccaagugauggga

SEQ ID NO: 1023530 - RNA, 19 nt, Artificial Sequence
  Description of Artificial Sequence: Synthetic oligonucleotide
  Sense strand starting at position 615 of SEQ ID NO: 914694
ucacuugguccauagauca

SEQ ID NO: 1023531 - RNA, 19 nt, Artificial Sequence
  Description of Artificial Sequence: Synthetic oligonucleotide
  Antisense strand to SEQ ID NO: 1023530
ugaucuauggaccaaguga

SEQ ID NO: 1023532 - RNA, 19 nt, Artificial Sequence
  Description of Artificial Sequence: Synthetic oligonucleotide
  Sense strand starting at position 761 of SEQ ID NO: 914694
aaaguauuucguugcauau

SEQ ID NO: 1023533 - RNA, 19 nt, Artificial Sequence
  Description of Artificial Sequence: Synthetic oligonucleotide
  Antisense strand to SEQ ID NO: 1023532
auaugcaacgaaauacuuu

SEQ ID NO: 1023534 - RNA, 19 nt, Artificial Sequence
  Description of Artificial Sequence: Synthetic oligonucleotide
  Sense strand starting at position 1058 of SEQ ID NO: 914694
agaagagcgggcugugaua

SEQ ID NO: 1023535 - RNA, 19 nt, Artificial Sequence
  Description of Artificial Sequence: Synthetic oligonucleotide
  Antisense strand to SEQ ID NO: 1023534
uaucacagcccgcucuucu

SEQ ID NO: 1023536 - RNA, 19 nt, Artificial Sequence
  Description of Artificial Sequence: Synthetic oligonucleotide
  Sense strand starting at position 1549 of SEQ ID NO: 914694
cugagaugauacuggaagu

SEQ ID NO: 1023537 - RNA, 19 nt, Artificial Sequence
  Description of Artificial Sequence: Synthetic oligonucleotide
  Antisense strand to SEQ ID NO: 1023536
acuuccaguaucaucucag

SEQ ID NO: 1023538 - RNA, 19 nt, Artificial Sequence
  Description of Artificial Sequence: Synthetic oligonucleotide
  Sense strand starting at position 1648 of SEQ ID NO: 914694
ucccguuguuccuuucuaa

SEQ ID NO: 1023539 - RNA, 19 nt, Artificial Sequence
  Description of Artificial Sequence: Synthetic oligonucleotide
  Antisense strand to SEQ ID NO: 1023538
uuagaaaggaacaacggga

SEQ ID NO: 1023540 - RNA, 19 nt, Artificial Sequence
  Description of Artificial Sequence: Synthetic oligonucleotide
  Sense strand starting at position 2114 of SEQ ID NO: 914694
ugggcuugccuuuauuaau

SEQ ID NO: 1023541 - RNA, 19 nt, Artificial Sequence
  Description of Artificial Sequence: Synthetic oligonucleotide
  Antisense strand to SEQ ID NO: 1023540
auuaauaaaggcaagccca

SEQ ID NO: 1023542 - RNA, 19 nt, Artificial Sequence
  Description of Artificial Sequence: Synthetic oligonucleotide
  Sense strand starting at position 2207 of SEQ ID NO: 914694
gaugaaagcgugcaauaac

SEQ ID NO: 1023543 - RNA, 19 nt, Artificial Sequence
  Description of Artificial Sequence: Synthetic oligonucleotide
  Antisense strand to SEQ ID NO: 1023542
guuauugcacgcuuucauc

SEQ ID NO: 1023544 - RNA, 19 nt, Artificial Sequence
  Description of Artificial Sequence: Synthetic oligonucleotide
  Sense strand starting at position 2252 of SEQ ID NO: 914694
ugacacuaguuucuggaua

SEQ ID NO: 1023545 - RNA, 19 nt, Artificial Sequence
  Description of Artificial Sequence: Synthetic oligonucleotide
  Antisense strand to SEQ ID NO: 1023544
uauccagaaacuaguguca

SEQ ID NO: 1023546 - RNA, 19 nt, Artificial Sequence
  Description of Artificial Sequence: Synthetic oligonucleotide
  Sense strand starting at position 2490 of SEQ ID NO: 914694
aaaucugagugagaagguu

SEQ ID NO: 1023547 - RNA, 19 nt, Artificial Sequence
  Description of Artificial Sequence: Synthetic oligonucleotide
  Antisense strand to SEQ ID NO: 1023546
aaccuucucacucagauuu

SEQ ID NO: 1023548 - RNA, 19 nt, Artificial Sequence
  Description of Artificial Sequence: Synthetic oligonucleotide
  Sense strand starting at position 2559 of SEQ ID NO: 914694
ugagaagggucccuggagu

SEQ ID NO: 1023549 - RNA, 19 nt, Artificial Sequence
  Description of Artificial Sequence: Synthetic oligonucleotide
  Antisense strand to SEQ ID NO: 1023548
acuccagggacccuucuca

SEQ ID NO: 1023550 - RNA, 19 nt, Artificial Sequence
  Description of Artificial Sequence: Synthetic oligonucleotide
  Sense strand starting at position 2611 of SEQ ID NO: 914694
gugcauaggccugugcuua

SEQ ID NO: 1023551 - RNA, 19 nt, Artificial Sequence
  Description of Artificial Sequence: Synthetic oligonucleotide
  Antisense strand to SEQ ID NO: 1023550
uaagcacaggccuaugcac

SEQ ID NO: 1023552 - RNA, 19 nt, Artificial Sequence
  Description of Artificial Sequence: Synthetic oligonucleotide
  Sense strand starting at position 2615 of SEQ ID NO: 914694
auaggccugugcuuauaga

SEQ ID NO: 1023553 - RNA, 19 nt, Artificial Sequence
  Description of Artificial Sequence: Synthetic oligonucleotide
  Antisense strand to SEQ ID NO: 1023552
ucuauaagcacaggccuau

SEQ ID NO: 1023554 - RNA, 19 nt, Artificial Sequence
  Description of Artificial Sequence: Synthetic oligonucleotide
  Sense strand starting at position 2616 of SEQ ID NO: 914694
uaggccugugcuuauagaa

SEQ ID NO: 1023555 - RNA, 19 nt, Artificial Sequence
  Description of Artificial Sequence: Synthetic oligonucleotide
  Antisense strand to SEQ ID NO: 1023554
uucuauaagcacaggccua

SEQ ID NO: 1023556 - RNA, 19 nt, Artificial Sequence
  Description of Artificial Sequence: Synthetic oligonucleotide
  Sense strand starting at position 2681 of SEQ ID NO: 914694
gcacaagaacuguaauuau

SEQ ID NO: 1023557 - RNA, 19 nt, Artificial Sequence
  Description of Artificial Sequence: Synthetic oligonucleotide
  Antisense strand to SEQ ID NO: 1023556
auaauuacaguucuugugc

SEQ ID NO: 1023558 - RNA, 19 nt, Artificial Sequence
  Description of Artificial Sequence: Synthetic oligonucleotide
  Sense strand starting at position 2876 of SEQ ID NO: 914694
ggaauaaugucccaaugag

SEQ ID NO: 1023559 - RNA, 19 nt, Artificial Sequence
  Description of Artificial Sequence: Synthetic oligonucleotide
  Antisense strand to SEQ ID NO: 1023558
cucauugggacauuauucc

SEQ ID NO: 1023560 - RNA, 19 nt, Artificial Sequence
  Description of Artificial Sequence: Synthetic oligonucleotide
  Sense strand starting at position 2898 of SEQ ID NO: 914694
agaagaagcguuggccuau

SEQ ID NO: 1023561 - RNA, 19 nt, Artificial Sequence
  Description of Artificial Sequence: Synthetic oligonucleotide
  Antisense strand to SEQ ID NO: 1023560
auaggccaacgcuucuucu

SEQ ID NO: 1023562 - RNA, 19 nt, Artificial Sequence
  Description of Artificial Sequence: Synthetic oligonucleotide
  Sense strand starting at position 2899 of SEQ ID NO: 914694
gaagaagcguuggccuauu

SEQ ID NO: 1023563 - RNA, 19 nt, Artificial Sequence
  Description of Artificial Sequence: Synthetic oligonucleotide
  Antisense strand to SEQ ID NO: 1023562
aauaggccaacgcuucuuc

SEQ ID NO: 1023564 - RNA, 19 nt, Artificial Sequence
  Description of Artificial Sequence: Synthetic oligonucleotide
  Sense strand starting at position 2912 of SEQ ID NO: 914694
ccuauuugccuuuguggga

SEQ ID NO: 1023565 - RNA, 19 nt, Artificial Sequence
  Description of Artificial Sequence: Synthetic oligonucleotide
  Antisense strand to SEQ ID NO: 1023564
ucccacaaaggcaaauagg

SEQ ID NO: 1023566 - RNA, 19 nt, Artificial Sequence
  Description of Artificial Sequence: Synthetic oligonucleotide
  Sense strand starting at position 2941 of SEQ ID NO: 914694
gaggaugucuuccuguaag

SEQ ID NO: 1023567 - RNA, 19 nt, Artificial Sequence
  Description of Artificial Sequence: Synthetic oligonucleotide
  Antisense strand to SEQ ID NO: 1023566
cuuacaggaagacauccuc

SEQ ID NO: 1023568 - RNA, 19 nt, Artificial Sequence
  Description of Artificial Sequence: Synthetic oligonucleotide
  Sense strand starting at position 2944 of SEQ ID NO: 914694
gaugucuuccuguaagaaa

SEQ ID NO: 1023569 - RNA, 19 nt, Artificial Sequence
  Description of Artificial Sequence: Synthetic oligonucleotide
  Antisense strand to SEQ ID NO: 1023568
uuucuuacaggaagacauc

SEQ ID NO: 1023570 - RNA, 19 nt, Artificial Sequence
  Description of Artificial Sequence: Synthetic oligonucleotide
  Sense strand starting at position 3266 of SEQ ID NO: 914694
caaagaguagcugguuaaa

SEQ ID NO: 1023571 - RNA, 19 nt, Artificial Sequence
  Description of Artificial Sequence: Synthetic oligonucleotide
  Antisense strand to SEQ ID NO: 1023570
uuuaaccagcuacucuuug

SEQ ID NO: 1023572 - RNA, 19 nt, Artificial Sequence
  Description of Artificial Sequence: Synthetic oligonucleotide
  Sense strand starting at position 3305 of SEQ ID NO: 914694
uugggaucaugcccaguuu

SEQ ID NO: 1023573 - RNA, 19 nt, Artificial Sequence
  Description of Artificial Sequence: Synthetic oligonucleotide
  Antisense strand to SEQ ID NO: 1023572
aaacugggcaugaucccaa

SEQ ID NO: 1023574 - RNA, 19 nt, Artificial Sequence
  Description of Artificial Sequence: Synthetic oligonucleotide
  Sense strand starting at position 3325 of SEQ ID NO: 914694
gugaccuuggguuaguuaa

SEQ ID NO: 1023575 - RNA, 19 nt, Artificial Sequence
  Description of Artificial Sequence: Synthetic oligonucleotide
  Antisense strand to SEQ ID NO: 1023574
uuaacuaacccaaggucac

SEQ ID NO: 1023576 - RNA, 19 nt, Artificial Sequence
  Description of Artificial Sequence: Synthetic oligonucleotide
  Sense strand starting at position 3713 of SEQ ID NO: 914694
uggccuguugugggauuaa

SEQ ID NO: 1023577 - RNA, 19 nt, Artificial Sequence
  Description of Artificial Sequence: Synthetic oligonucleotide
  Antisense strand to SEQ ID NO: 1023576
uuaaucccacaacaggcca

SEQ ID NO: 1023578 - RNA, 19 nt, Artificial Sequence
  Description of Artificial Sequence: Synthetic oligonucleotide
  Sense strand starting at position 3732 of SEQ ID NO: 914694
aggagugaauaugaguaaa

SEQ ID NO: 1023579 - RNA, 19 nt, Artificial Sequence
  Description of Artificial Sequence: Synthetic oligonucleotide
  Antisense strand to SEQ ID NO: 1023578
uuuacucauauucacuccu

SEQ ID NO: 1023580 - RNA, 19 nt, Artificial Sequence
  Description of Artificial Sequence: Synthetic oligonucleotide
  Sense strand starting at position 3754 of SEQ ID NO: 914694
cuuccagguuuauuagaag

SEQ ID NO: 1023581 - RNA, 19 nt, Artificial Sequence
  Description of Artificial Sequence: Synthetic oligonucleotide
  Antisense strand to SEQ ID NO: 1023580
cuucuaauaaaccuggaag

SEQ ID NO: 1023582 - RNA, 19 nt, Artificial Sequence
  Description of Artificial Sequence: Synthetic oligonucleotide
  Sense strand starting at position 3760 of SEQ ID NO: 914694
gguuuauuagaaggcacua

SEQ ID NO: 1023583 - RNA, 19 nt, Artificial Sequence
  Description of Artificial Sequence: Synthetic oligonucleotide
  Antisense strand to SEQ ID NO: 1023582
uagugccuucuaauaaacc

SEQ ID NO: 1023584 - RNA, 19 nt, Artificial Sequence
  Description of Artificial Sequence: Synthetic oligonucleotide
  Sense strand starting at position 3765 of SEQ ID NO: 914694
auuagaaggcacuauaugu

SEQ ID NO: 1023585 - RNA, 19 nt, Artificial Sequence
  Description of Artificial Sequence: Synthetic oligonucleotide
  Antisense strand to SEQ ID NO: 1023584
acauauagugccuucuaau

SEQ ID NO: 1023586 - RNA, 19 nt, Artificial Sequence
  Description of Artificial Sequence: Synthetic oligonucleotide
  Sense strand starting at position 3892 of SEQ ID NO: 914694
auagaugucccauauaugu

SEQ ID NO: 1023587 - RNA, 19 nt, Artificial Sequence
  Description of Artificial Sequence: Synthetic oligonucleotide
  Antisense strand to SEQ ID NO: 1023586
acauauaugggacaucuau

SEQ ID NO: 1023588 - RNA, 19 nt, Artificial Sequence
  Description of Artificial Sequence: Synthetic oligonucleotide
  Sense strand starting at position 3901 of SEQ ID NO: 914694
ccauauaugucucauauag

SEQ ID NO: 1023589 - RNA, 19 nt, Artificial Sequence
  Description of Artificial Sequence: Synthetic oligonucleotide
  Antisense strand to SEQ ID NO: 1023588
cuauaugagacauauaugg

SEQ ID NO: 1023590 - RNA, 19 nt, Artificial Sequence
  Description of Artificial Sequence: Synthetic oligonucleotide
  Sense strand starting at position 3927 of SEQ ID NO: 914694
acauauaugucucauauag

SEQ ID NO: 1023591 - RNA, 19 nt, Artificial Sequence
  Description of Artificial Sequence: Synthetic oligonucleotide
  Antisense strand to SEQ ID NO: 1023590
cuauaugagacauauaugu

SEQ ID NO: 1023592 - RNA, 19 nt, Artificial Sequence
  Description of Artificial Sequence: Synthetic oligonucleotide
  Sense strand starting at position 157 of SEQ ID NO: 914695
gcggguucguuccuuugaa

SEQ ID NO: 1023593 - RNA, 19 nt, Artificial Sequence
  Description of Artificial Sequence: Synthetic oligonucleotide
  Antisense strand to SEQ ID NO: 1023592
uucaaaggaacgaacccgc

SEQ ID NO: 1023594 - RNA, 19 nt, Artificial Sequence
  Description of Artificial Sequence: Synthetic oligonucleotide
  Sense strand starting at position 158 of SEQ ID NO: 914695
cggguucguuccuuugaac

SEQ ID NO: 1023595 - RNA, 19 nt, Artificial Sequence
  Description of Artificial Sequence: Synthetic oligonucleotide
  Antisense strand to SEQ ID NO: 1023594
guucaaaggaacgaacccg

SEQ ID NO: 1023596 - RNA, 19 nt, Artificial Sequence
  Description of Artificial Sequence: Synthetic oligonucleotide
  Sense strand starting at position 286 of SEQ ID NO: 914695
ccagaaagcguuuacagga

SEQ ID NO: 1023597 - RNA, 19 nt, Artificial Sequence
  Description of Artificial Sequence: Synthetic oligonucleotide
  Antisense strand to SEQ ID NO: 1023596
uccuguaaacgcuuucugg

SEQ ID NO: 1023598 - RNA, 19 nt, Artificial Sequence
  Description of Artificial Sequence: Synthetic oligonucleotide
  Sense strand starting at position 376 of SEQ ID NO: 914695
caccgugcuccugguagau

SEQ ID NO: 1023599 - RNA, 19 nt, Artificial Sequence
  Description of Artificial Sequence: Synthetic oligonucleotide
  Antisense strand to SEQ ID NO: 1023598
aucuaccaggagcacggug

SEQ ID NO: 1023600 - RNA, 19 nt, Artificial Sequence
  Description of Artificial Sequence: Synthetic oligonucleotide
  Sense strand starting at position 380 of SEQ ID NO: 914695
gugcuccugguagauuaaa

SEQ ID NO: 1023601 - RNA, 19 nt, Artificial Sequence
  Description of Artificial Sequence: Synthetic oligonucleotide
  Antisense strand to SEQ ID NO: 1023600
uuuaaucuaccaggagcac

SEQ ID NO: 1023602 - RNA, 19 nt, Artificial Sequence
  Description of Artificial Sequence: Synthetic oligonucleotide
  Sense strand starting at position 444 of SEQ ID NO: 914695
uucugccuugcuugacaau

SEQ ID NO: 1023603 - RNA, 19 nt, Artificial Sequence
  Description of Artificial Sequence: Synthetic oligonucleotide
  Antisense strand to SEQ ID NO: 1023602
auugucaagcaaggcagaa

SEQ ID NO: 1023604 - RNA, 19 nt, Artificial Sequence
  Description of Artificial Sequence: Synthetic oligonucleotide
  Sense strand starting at position 445 of SEQ ID NO: 914695
ucugccuugcuugacaauu

SEQ ID NO: 1023605 - RNA, 19 nt, Artificial Sequence
  Description of Artificial Sequence: Synthetic oligonucleotide
  Antisense strand to SEQ ID NO: 1023604
aauugucaagcaaggcaga

SEQ ID NO: 1023606 - RNA, 19 nt, Artificial Sequence
  Description of Artificial Sequence: Synthetic oligonucleotide
  Sense strand starting at position 447 of SEQ ID NO: 914695
ugccuugcuugacaauuga

SEQ ID NO: 1023607 - RNA, 19 nt, Artificial Sequence
  Description of Artificial Sequence: Synthetic oligonucleotide
  Antisense strand to SEQ ID NO: 1023606
ucaauugucaagcaaggca

SEQ ID NO: 1023608 - RNA, 19 nt, Artificial Sequence
  Description of Artificial Sequence: Synthetic oligonucleotide
  Sense strand starting at position 476 of SEQ ID NO: 914695
aaggaaaguuauggguaga

SEQ ID NO: 1023609 - RNA, 19 nt, Artificial Sequence
  Description of Artificial Sequence: Synthetic oligonucleotide
  Antisense strand to SEQ ID NO: 1023608
ucuacccauaacuuuccuu

SEQ ID NO: 1023610 - RNA, 19 nt, Artificial Sequence
  Description of Artificial Sequence: Synthetic oligonucleotide
  Sense strand starting at position 477 of SEQ ID NO: 914695
aggaaaguuauggguagau

SEQ ID NO: 1023611 - RNA, 19 nt, Artificial Sequence
  Description of Artificial Sequence: Synthetic oligonucleotide
  Antisense strand to SEQ ID NO: 1023610
aucuacccauaacuuuccu

SEQ ID NO: 1023612 - RNA, 19 nt, Artificial Sequence
  Description of Artificial Sequence: Synthetic oligonucleotide
  Sense strand starting at position 607 of SEQ ID NO: 914695
ccuguuuaauaucaaagga

SEQ ID NO: 1023613 - RNA, 19 nt, Artificial Sequence
  Description of Artificial Sequence: Synthetic oligonucleotide
  Antisense strand to SEQ ID NO: 1023612
uccuuugauauuaaacagg

SEQ ID NO: 1023614 - RNA, 19 nt, Artificial Sequence
  Description of Artificial Sequence: Synthetic oligonucleotide
  Sense strand starting at position 723 of SEQ ID NO: 914695
acccuaaauuuccguagga

SEQ ID NO: 1023615 - RNA, 19 nt, Artificial Sequence
  Description of Artificial Sequence: Synthetic oligonucleotide
  Antisense strand to SEQ ID NO: 1023614
uccuacggaaauuuagggu

SEQ ID NO: 1023616 - RNA, 19 nt, Artificial Sequence
  Description of Artificial Sequence: Synthetic oligonucleotide
  Sense strand starting at position 735 of SEQ ID NO: 914695
cguaggaaaucgucggaca

SEQ ID NO: 1023617 - RNA, 19 nt, Artificial Sequence
  Description of Artificial Sequence: Synthetic oligonucleotide
  Antisense strand to SEQ ID NO: 1023616
uguccgacgauuuccuacg

SEQ ID NO: 1023618 - RNA, 19 nt, Artificial Sequence
  Description of Artificial Sequence: Synthetic oligonucleotide
  Sense strand starting at position 736 of SEQ ID NO: 914695
guaggaaaucgucggacau

SEQ ID NO: 1023619 - RNA, 19 nt, Artificial Sequence
  Description of Artificial Sequence: Synthetic oligonucleotide
  Antisense strand to SEQ ID NO: 1023618
auguccgacgauuuccuac

SEQ ID NO: 1023620 - RNA, 19 nt, Artificial Sequence
  Description of Artificial Sequence: Synthetic oligonucleotide
  Sense strand starting at position 737 of SEQ ID NO: 914695
uaggaaaucgucggacaug

SEQ ID NO: 1023621 - RNA, 19 nt, Artificial Sequence
  Description of Artificial Sequence: Synthetic oligonucleotide
  Antisense strand to SEQ ID NO: 1023620
cauguccgacgauuuccua

SEQ ID NO: 1023622 - RNA, 19 nt, Artificial Sequence
  Description of Artificial Sequence: Synthetic oligonucleotide
  Sense strand starting at position 758 of SEQ ID NO: 914695
cuuaaucggucuuugcaau

SEQ ID NO: 1023623 - RNA, 19 nt, Artificial Sequence
  Description of Artificial Sequence: Synthetic oligonucleotide
  Antisense strand to SEQ ID NO: 1023622
auugcaaagaccgauuaag

SEQ ID NO: 1023624 - RNA, 19 nt, Artificial Sequence
  Description of Artificial Sequence: Synthetic oligonucleotide
  Sense strand starting at position 770 of SEQ ID NO: 914695
uugcaaucuuucccucgaa

SEQ ID NO: 1023625 - RNA, 19 nt, Artificial Sequence
  Description of Artificial Sequence: Synthetic oligonucleotide
  Antisense strand to SEQ ID NO: 1023624
uucgagggaaagauugcaa

SEQ ID NO: 1023626 - RNA, 19 nt, Artificial Sequence
  Description of Artificial Sequence: Synthetic oligonucleotide
  Sense strand starting at position 1000 of SEQ ID NO: 914695
gagcgacugccuugaucuc

SEQ ID NO: 1023627 - RNA, 19 nt, Artificial Sequence
  Description of Artificial Sequence: Synthetic oligonucleotide
  Antisense strand to SEQ ID NO: 1023626
gagaucaaggcagucgcuc

SEQ ID NO: 1023628 - RNA, 19 nt, Artificial Sequence
  Description of Artificial Sequence: Synthetic oligonucleotide
  Sense strand starting at position 1006 of SEQ ID NO: 914695
cugccuugaucuccagcaa

SEQ ID NO: 1023629 - RNA, 19 nt, Artificial Sequence
  Description of Artificial Sequence: Synthetic oligonucleotide
  Antisense strand to SEQ ID NO: 1023628
uugcuggagaucaaggcag

SEQ ID NO: 1023630 - RNA, 19 nt, Artificial Sequence
  Description of Artificial Sequence: Synthetic oligonucleotide
  Sense strand starting at position 1007 of SEQ ID NO: 914695
ugccuugaucuccagcaaa

SEQ ID NO: 1023631 - RNA, 19 nt, Artificial Sequence
  Description of Artificial Sequence: Synthetic oligonucleotide
  Antisense strand to SEQ ID NO: 1023630
uuugcuggagaucaaggca

SEQ ID NO: 1023632 - RNA, 19 nt, Artificial Sequence
  Description of Artificial Sequence: Synthetic oligonucleotide
  Sense strand starting at position 1758 of SEQ ID NO: 914695
agcauuucuuaucgggauu

SEQ ID NO: 1023633 - RNA, 19 nt, Artificial Sequence
  Description of Artificial Sequence: Synthetic oligonucleotide
  Antisense strand to SEQ ID NO: 1023632
aaucccgauaagaaaugcu

SEQ ID NO: 1023634 - RNA, 19 nt, Artificial Sequence
  Description of Artificial Sequence: Synthetic oligonucleotide
  Sense strand starting at position 1983 of SEQ ID NO: 914695
gagguucuuggcugggaga

SEQ ID NO: 1023635 - RNA, 19 nt, Artificial Sequence
  Description of Artificial Sequence: Synthetic oligonucleotide
  Antisense strand to SEQ ID NO: 1023634
ucucccagccaagaaccuc

SEQ ID NO: 1023636 - RNA, 19 nt, Artificial Sequence
  Description of Artificial Sequence: Synthetic oligonucleotide
  Sense strand starting at position 1985 of SEQ ID NO: 914695
gguucuuggcugggagagu

SEQ ID NO: 1023637 - RNA, 19 nt, Artificial Sequence
  Description of Artificial Sequence: Synthetic oligonucleotide
  Antisense strand to SEQ ID NO: 1023636
acucucccagccaagaacc

SEQ ID NO: 1023638 - RNA, 19 nt, Artificial Sequence
  Description of Artificial Sequence: Synthetic oligonucleotide
  Sense strand starting at position 1986 of SEQ ID NO: 914695
guucuuggcugggagaguu

SEQ ID NO: 1023639 - RNA, 19 nt, Artificial Sequence
  Description of Artificial Sequence: Synthetic oligonucleotide
  Antisense strand to SEQ ID NO: 1023638
aacucucccagccaagaac

SEQ ID NO: 1023640 - RNA, 19 nt, Artificial Sequence
  Description of Artificial Sequence: Synthetic oligonucleotide
  Sense strand starting at position 1996 of SEQ ID NO: 914695
gggagaguuugacuuugua

SEQ ID NO: 1023641 - RNA, 19 nt, Artificial Sequence
  Description of Artificial Sequence: Synthetic oligonucleotide
  Antisense strand to SEQ ID NO: 1023640
uacaaagucaaacucuccc

SEQ ID NO: 1023642 - RNA, 19 nt, Artificial Sequence
  Description of Artificial Sequence: Synthetic oligonucleotide
  Sense strand starting at position 1999 of SEQ ID NO: 914695
agaguuugacuuuguaaag

SEQ ID NO: 1023643 - RNA, 19 nt, Artificial Sequence
  Description of Artificial Sequence: Synthetic oligonucleotide
  Antisense strand to SEQ ID NO: 1023642
cuuuacaaagucaaacucu

SEQ ID NO: 1023644 - RNA, 19 nt, Artificial Sequence
  Description of Artificial Sequence: Synthetic oligonucleotide
  Sense strand starting at position 2000 of SEQ ID NO: 914695
gaguuugacuuuguaaagc

SEQ ID NO: 1023645 - RNA, 19 nt, Artificial Sequence
  Description of Artificial Sequence: Synthetic oligonucleotide
  Antisense strand to SEQ ID NO: 1023644
gcuuuacaaagucaaacuc

SEQ ID NO: 1023646 - RNA, 19 nt, Artificial Sequence
  Description of Artificial Sequence: Synthetic oligonucleotide
  Sense strand starting at position 2251 of SEQ ID NO: 914695
aaagccgucccguagaauu

SEQ ID NO: 1023647 - RNA, 19 nt, Artificial Sequence
  Description of Artificial Sequence: Synthetic oligonucleotide
  Antisense strand to SEQ ID NO: 1023646
aauucuacgggacggcuuu

SEQ ID NO: 1023648 - RNA, 19 nt, Artificial Sequence
  Description of Artificial Sequence: Synthetic oligonucleotide
  Sense strand starting at position 2869 of SEQ ID NO: 914695
gguuccugccaauaaagaa

SEQ ID NO: 1023649 - RNA, 19 nt, Artificial Sequence
  Description of Artificial Sequence: Synthetic oligonucleotide
  Antisense strand to SEQ ID NO: 1023648
uucuuuauuggcaggaacc

SEQ ID NO: 1023650 - RNA, 19 nt, Artificial Sequence
  Description of Artificial Sequence: Synthetic oligonucleotide
  Sense strand starting at position 3082 of SEQ ID NO: 914695
agagaaaugccaggccuaa

SEQ ID NO: 1023651 - RNA, 19 nt, Artificial Sequence
  Description of Artificial Sequence: Synthetic oligonucleotide
  Antisense strand to SEQ ID NO: 1023650
uuaggccuggcauuucucu

SEQ ID NO: 1023652 - RNA, 19 nt, Artificial Sequence
  Description of Artificial Sequence: Synthetic oligonucleotide
  Sense strand starting at position 3167 of SEQ ID NO: 914695
cagcaaaugucaccaggaa

SEQ ID NO: 1023653 - RNA, 19 nt, Artificial Sequence
  Description of Artificial Sequence: Synthetic oligonucleotide
  Antisense strand to SEQ ID NO: 1023652
uuccuggugacauuugcug

SEQ ID NO: 1023654 - RNA, 19 nt, Artificial Sequence
  Description of Artificial Sequence: Synthetic oligonucleotide
  Sense strand starting at position 3243 of SEQ ID NO: 914695
ugugucuugguucagaaag

SEQ ID NO: 1023655 - RNA, 19 nt, Artificial Sequence
  Description of Artificial Sequence: Synthetic oligonucleotide
  Antisense strand to SEQ ID NO: 1023654
cuuucugaaccaagacaca

SEQ ID NO: 1023656 - RNA, 19 nt, Artificial Sequence
  Description of Artificial Sequence: Synthetic oligonucleotide
  Sense strand starting at position 3357 of SEQ ID NO: 914695
uuuaaagauccgugguaaa

SEQ ID NO: 1023657 - RNA, 19 nt, Artificial Sequence
  Description of Artificial Sequence: Synthetic oligonucleotide
  Antisense strand to SEQ ID NO: 1023656
uuuaccacggaucuuuaaa

SEQ ID NO: 1023658 - RNA, 19 nt, Artificial Sequence
  Description of Artificial Sequence: Synthetic oligonucleotide
  Sense strand starting at position 3367 of SEQ ID NO: 914695
cgugguaaaugcgugauaa

SEQ ID NO: 1023659 - RNA, 19 nt, Artificial Sequence
  Description of Artificial Sequence: Synthetic oligonucleotide
  Antisense strand to SEQ ID NO: 1023658
uuaucacgcauuuaccacg

SEQ ID NO: 1023660 - RNA, 19 nt, Artificial Sequence
  Description of Artificial Sequence: Synthetic oligonucleotide
  Sense strand starting at position 3368 of SEQ ID NO: 914695
gugguaaaugcgugauaaa

SEQ ID NO: 1023661 - RNA, 19 nt, Artificial Sequence
  Description of Artificial Sequence: Synthetic oligonucleotide
  Antisense strand to SEQ ID NO: 1023660
uuuaucacgcauuuaccac

SEQ ID NO: 1023662 - RNA, 19 nt, Artificial Sequence
  Description of Artificial Sequence: Synthetic oligonucleotide
  Sense strand starting at position 3369 of SEQ ID NO: 914695
ugguaaaugcgugauaaau

SEQ ID NO: 1023663 - RNA, 19 nt, Artificial Sequence
  Description of Artificial Sequence: Synthetic oligonucleotide
  Antisense strand to SEQ ID NO: 1023662
auuuaucacgcauuuacca

SEQ ID NO: 1023664 - RNA, 19 nt, Artificial Sequence
  Description of Artificial Sequence: Synthetic oligonucleotide
  Sense strand starting at position 3378 of SEQ ID NO: 914695
cgugauaaaugcucuugag

SEQ ID NO: 1023665 - RNA, 19 nt, Artificial Sequence
  Description of Artificial Sequence: Synthetic oligonucleotide
  Antisense strand to SEQ ID NO: 1023664
cucaagagcauuuaucacg

SEQ ID NO: 1023666 - RNA, 19 nt, Artificial Sequence
  Description of Artificial Sequence: Synthetic oligonucleotide
  Sense strand starting at position 3381 of SEQ ID NO: 914695
gauaaaugcucuugagggc

SEQ ID NO: 1023667 - RNA, 19 nt, Artificial Sequence
  Description of Artificial Sequence: Synthetic oligonucleotide
  Antisense strand to SEQ ID NO: 1023666
gcccucaagagcauuuauc

SEQ ID NO: 1023668 - RNA, 19 nt, Artificial Sequence
  Description of Artificial Sequence: Synthetic oligonucleotide
  Sense strand starting at position 3767 of SEQ ID NO: 914695
gcgucuuaucccgggacag

SEQ ID NO: 1023669 - RNA, 19 nt, Artificial Sequence
  Description of Artificial Sequence: Synthetic oligonucleotide
  Antisense strand to SEQ ID NO: 1023668
cugucccgggauaagacgc

SEQ ID NO: 1023670 - RNA, 19 nt, Artificial Sequence
  Description of Artificial Sequence: Synthetic oligonucleotide
  Sense strand starting at position 3885 of SEQ ID NO: 914695
gcuuguccugagggugaca

SEQ ID NO: 1023671 - RNA, 19 nt, Artificial Sequence
  Description of Artificial Sequence: Synthetic oligonucleotide
  Antisense strand to SEQ ID NO: 1023670
ugucacccucaggacaagc

SEQ ID NO: 1023672 - RNA, 19 nt, Artificial Sequence
  Description of Artificial Sequence: Synthetic oligonucleotide
  Sense strand starting at position 109 of SEQ ID NO: 914696
agagaaccggagugucuua

SEQ ID NO: 1023673 - RNA, 19 nt, Artificial Sequence
  Description of Artificial Sequence: Synthetic oligonucleotide
  Antisense strand to SEQ ID NO: 1023672
uaagacacuccgguucucu

SEQ ID NO: 1023674 - RNA, 19 nt, Artificial Sequence
  Description of Artificial Sequence: Synthetic oligonucleotide
  Sense strand starting at position 114 of SEQ ID NO: 914696
accggagugucuuagugag

SEQ ID NO: 1023675 - RNA, 19 nt, Artificial Sequence
  Description of Artificial Sequence: Synthetic oligonucleotide
  Antisense strand to SEQ ID NO: 1023674
cucacuaagacacuccggu

SEQ ID NO: 1023676 - RNA, 19 nt, Artificial Sequence
  Description of Artificial Sequence: Synthetic oligonucleotide
  Sense strand starting at position 116 of SEQ ID NO: 914696
cggagugucuuagugagac

SEQ ID NO: 1023677 - RNA, 19 nt, Artificial Sequence
  Description of Artificial Sequence: Synthetic oligonucleotide
  Antisense strand to SEQ ID NO: 1023676
gucucacuaagacacuccg

SEQ ID NO: 1023678 - RNA, 19 nt, Artificial Sequence
  Description of Artificial Sequence: Synthetic oligonucleotide
  Sense strand starting at position 118 of SEQ ID NO: 914696
gagugucuuagugagacga

SEQ ID NO: 1023679 - RNA, 19 nt, Artificial Sequence
  Description of Artificial Sequence: Synthetic oligonucleotide
  Antisense strand to SEQ ID NO: 1023678
ucgucucacuaagacacuc

SEQ ID NO: 1023680 - RNA, 19 nt, Artificial Sequence
  Description of Artificial Sequence: Synthetic oligonucleotide
  Sense strand starting at position 120 of SEQ ID NO: 914696
gugucuuagugagacgaau

SEQ ID NO: 1023681 - RNA, 19 nt, Artificial Sequence
  Description of Artificial Sequence: Synthetic oligonucleotide
  Antisense strand to SEQ ID NO: 1023680
auucgucucacuaagacac

SEQ ID NO: 1023682 - RNA, 19 nt, Artificial Sequence
  Description of Artificial Sequence: Synthetic oligonucleotide
  Sense strand starting at position 122 of SEQ ID NO: 914696
gucuuagugagacgaauuc

SEQ ID NO: 1023683 - RNA, 19 nt, Artificial Sequence
  Description of Artificial Sequence: Synthetic oligonucleotide
  Antisense strand to SEQ ID NO: 1023682
gaauucgucucacuaagac

SEQ ID NO: 1023684 - RNA, 19 nt, Artificial Sequence
  Description of Artificial Sequence: Synthetic oligonucleotide
  Sense strand starting at position 223 of SEQ ID NO: 914696
ugcggcuuuccuggaggaa

SEQ ID NO: 1023685 - RNA, 19 nt, Artificial Sequence
  Description of Artificial Sequence: Synthetic oligonucleotide
  Antisense strand to SEQ ID NO: 1023684
uuccuccaggaaagccgca

SEQ ID NO: 1023686 - RNA, 19 nt, Artificial Sequence
  Description of Artificial Sequence: Synthetic oligonucleotide
  Sense strand starting at position 224 of SEQ ID NO: 914696
gcggcuuuccuggaggaag

SEQ ID NO: 1023687 - RNA, 19 nt, Artificial Sequence
  Description of Artificial Sequence: Synthetic oligonucleotide
  Antisense strand to SEQ ID NO: 1023686
cuuccuccaggaaagccgc

SEQ ID NO: 1023688 - RNA, 19 nt, Artificial Sequence
  Description of Artificial Sequence: Synthetic oligonucleotide
  Sense strand starting at position 398 of SEQ ID NO: 914696
ccgcuauccugcuccucaa

SEQ ID NO: 1023689 - RNA, 19 nt, Artificial Sequence
  Description of Artificial Sequence: Synthetic oligonucleotide
  Antisense strand to SEQ ID NO: 1023688
uugaggagcaggauagcgg

SEQ ID NO: 1023690 - RNA, 19 nt, Artificial Sequence
  Description of Artificial Sequence: Synthetic oligonucleotide
  Sense strand starting at position 462 of SEQ ID NO: 914696
ccguguaguccggcagacu

SEQ ID NO: 1023691 - RNA, 19 nt, Artificial Sequence
  Description of Artificial Sequence: Synthetic oligonucleotide
  Antisense strand to SEQ ID NO: 1023690
agucugccggacuacacgg

SEQ ID NO: 1023692 - RNA, 19 nt, Artificial Sequence
  Description of Artificial Sequence: Synthetic oligonucleotide
  Sense strand starting at position 890 of SEQ ID NO: 914696
agggcuuaaacuugucaga

SEQ ID NO: 1023693 - RNA, 19 nt, Artificial Sequence
  Description of Artificial Sequence: Synthetic oligonucleotide
  Antisense strand to SEQ ID NO: 1023692
ucugacaaguuuaagcccu

SEQ ID NO: 1023694 - RNA, 19 nt, Artificial Sequence
  Description of Artificial Sequence: Synthetic oligonucleotide
  Sense strand starting at position 892 of SEQ ID NO: 914696
ggcuuaaacuugucagagc

SEQ ID NO: 1023695 - RNA, 19 nt, Artificial Sequence
  Description of Artificial Sequence: Synthetic oligonucleotide
  Antisense strand to SEQ ID NO: 1023694
gcucugacaaguuuaagcc

SEQ ID NO: 1023696 - RNA, 19 nt, Artificial Sequence
  Description of Artificial Sequence: Synthetic oligonucleotide
  Sense strand starting at position 893 of SEQ ID NO: 914696
gcuuaaacuugucagagcu

SEQ ID NO: 1023697 - RNA, 19 nt, Artificial Sequence
  Description of Artificial Sequence: Synthetic oligonucleotide
  Antisense strand to SEQ ID NO: 1023696
agcucugacaaguuuaagc

SEQ ID NO: 1023698 - RNA, 19 nt, Artificial Sequence
  Description of Artificial Sequence: Synthetic oligonucleotide
  Sense strand starting at position 1484 of SEQ ID NO: 914696
agcaguagcagccagauua

SEQ ID NO: 1023699 - RNA, 19 nt, Artificial Sequence
  Description of Artificial Sequence: Synthetic oligonucleotide
  Antisense strand to SEQ ID NO: 1023698
uaaucuggcugcuacugcu

SEQ ID NO: 1023700 - RNA, 19 nt, Artificial Sequence
  Description of Artificial Sequence: Synthetic oligonucleotide
  Sense strand starting at position 1723 of SEQ ID NO: 914696
gaacgcgagucccuuuaau

SEQ ID NO: 1023701 - RNA, 19 nt, Artificial Sequence
  Description of Artificial Sequence: Synthetic oligonucleotide
  Antisense strand to SEQ ID NO: 1023700
auuaaagggacucgcguuc

SEQ ID NO: 1023702 - RNA, 19 nt, Artificial Sequence
  Description of Artificial Sequence: Synthetic oligonucleotide
  Sense strand starting at position 1755 of SEQ ID NO: 914696
caaugaaauuuccguugcu

SEQ ID NO: 1023703 - RNA, 19 nt, Artificial Sequence
  Description of Artificial Sequence: Synthetic oligonucleotide
  Antisense strand to SEQ ID NO: 1023702
agcaacggaaauuucauug

SEQ ID NO: 1023704 - RNA, 19 nt, Artificial Sequence
  Description of Artificial Sequence: Synthetic oligonucleotide
  Sense strand starting at position 1756 of SEQ ID NO: 914696
aaugaaauuuccguugcug

SEQ ID NO: 1023705 - RNA, 19 nt, Artificial Sequence
  Description of Artificial Sequence: Synthetic oligonucleotide
  Antisense strand to SEQ ID NO: 1023704
cagcaacggaaauuucauu

SEQ ID NO: 1023706 - RNA, 19 nt, Artificial Sequence
  Description of Artificial Sequence: Synthetic oligonucleotide
  Sense strand starting at position 1774 of SEQ ID NO: 914696
gcgcaaagcgcugaaagaa

SEQ ID NO: 1023707 - RNA, 19 nt, Artificial Sequence
  Description of Artificial Sequence: Synthetic oligonucleotide
  Antisense strand to SEQ ID NO: 1023706
uucuuucagcgcuuugcgc

SEQ ID NO: 1023708 - RNA, 19 nt, Artificial Sequence
  Description of Artificial Sequence: Synthetic oligonucleotide
  Sense strand starting at position 2143 of SEQ ID NO: 914696
gaugacugauguccgugaa

SEQ ID NO: 1023709 - RNA, 19 nt, Artificial Sequence
  Description of Artificial Sequence: Synthetic oligonucleotide
  Antisense strand to SEQ ID NO: 1023708
uucacggacaucagucauc

SEQ ID NO: 1023710 - RNA, 19 nt, Artificial Sequence
  Description of Artificial Sequence: Synthetic oligonucleotide
  Sense strand starting at position 2144 of SEQ ID NO: 914696
augacugauguccgugaaa

SEQ ID NO: 1023711 - RNA, 19 nt, Artificial Sequence
  Description of Artificial Sequence: Synthetic oligonucleotide
  Antisense strand to SEQ ID NO: 1023710
uuucacggacaucagucau

SEQ ID NO: 1023712 - RNA, 19 nt, Artificial Sequence
  Description of Artificial Sequence: Synthetic oligonucleotide
  Sense strand starting at position 2184 of SEQ ID NO: 914696
cugacaaacgcccauuaaa

SEQ ID NO: 1023713 - RNA, 19 nt, Artificial Sequence
  Description of Artificial Sequence: Synthetic oligonucleotide
  Antisense strand to SEQ ID NO: 1023712
uuuaaugggcguuugucag

SEQ ID NO: 1023714 - RNA, 19 nt, Artificial Sequence
  Description of Artificial Sequence: Synthetic oligonucleotide
  Sense strand starting at position 2360 of SEQ ID NO: 914696
uggagaugcuaucuccuuu

SEQ ID NO: 1023715 - RNA, 19 nt, Artificial Sequence
  Description of Artificial Sequence: Synthetic oligonucleotide
  Antisense strand to SEQ ID NO: 1023714
aaaggagauagcaucucca

SEQ ID NO: 1023716 - RNA, 19 nt, Artificial Sequence
  Description of Artificial Sequence: Synthetic oligonucleotide
  Sense strand starting at position 2596 of SEQ ID NO: 914696
aaaugugaaugacagagau

SEQ ID NO: 1023717 - RNA, 19 nt, Artificial Sequence
  Description of Artificial Sequence: Synthetic oligonucleotide
  Antisense strand to SEQ ID NO: 1023716
aucucugucauucacauuu

SEQ ID NO: 1023718 - RNA, 19 nt, Artificial Sequence
  Description of Artificial Sequence: Synthetic oligonucleotide
  Sense strand starting at position 2770 of SEQ ID NO: 914696
ggaucugaaucagugcaga

SEQ ID NO: 1023719 - RNA, 19 nt, Artificial Sequence
  Description of Artificial Sequence: Synthetic oligonucleotide
  Antisense strand to SEQ ID NO: 1023718
ucugcacugauucagaucc

SEQ ID NO: 1023720 - RNA, 19 nt, Artificial Sequence
  Description of Artificial Sequence: Synthetic oligonucleotide
  Sense strand starting at position 3200 of SEQ ID NO: 914696
ggcaguguguccucuguga

SEQ ID NO: 1023721 - RNA, 19 nt, Artificial Sequence
  Description of Artificial Sequence: Synthetic oligonucleotide
  Antisense strand to SEQ ID NO: 1023720
ucacagaggacacacugcc

SEQ ID NO: 1023722 - RNA, 19 nt, Artificial Sequence
  Description of Artificial Sequence: Synthetic oligonucleotide
  Sense strand starting at position 3334 of SEQ ID NO: 914696
uugugagaguccuugaaca

SEQ ID NO: 1023723 - RNA, 19 nt, Artificial Sequence
  Description of Artificial Sequence: Synthetic oligonucleotide
  Antisense strand to SEQ ID NO: 1023722
uguucaaggacucucacaa

SEQ ID NO: 1023724 - RNA, 19 nt, Artificial Sequence
  Description of Artificial Sequence: Synthetic oligonucleotide
  Sense strand starting at position 3382 of SEQ ID NO: 914696
gccucagacucuugaugga

SEQ ID NO: 1023725 - RNA, 19 nt, Artificial Sequence
  Description of Artificial Sequence: Synthetic oligonucleotide
  Antisense strand to SEQ ID NO: 1023724
uccaucaagagucugaggc

SEQ ID NO: 1023726 - RNA, 19 nt, Artificial Sequence
  Description of Artificial Sequence: Synthetic oligonucleotide
  Sense strand starting at position 3392 of SEQ ID NO: 914696
cuugauggagacuguguua

SEQ ID NO: 1023727 - RNA, 19 nt, Artificial Sequence
  Description of Artificial Sequence: Synthetic oligonucleotide
  Antisense strand to SEQ ID NO: 1023726
uaacacagucuccaucaag

SEQ ID NO: 1023728 - RNA, 19 nt, Artificial Sequence
  Description of Artificial Sequence: Synthetic oligonucleotide
  Sense strand starting at position 3547 of SEQ ID NO: 914696
gaaggaggucgcugcucua

SEQ ID NO: 1023729 - RNA, 19 nt, Artificial Sequence
  Description of Artificial Sequence: Synthetic oligonucleotide
  Antisense strand to SEQ ID NO: 1023728
uagagcagcgaccuccuuc

SEQ ID NO: 1023730 - RNA, 19 nt, Artificial Sequence
  Description of Artificial Sequence: Synthetic oligonucleotide
  Sense strand starting at position 3550 of SEQ ID NO: 914696
ggaggucgcugcucuaaau

SEQ ID NO: 1023731 - RNA, 19 nt, Artificial Sequence
  Description of Artificial Sequence: Synthetic oligonucleotide
  Antisense strand to SEQ ID NO: 1023730
auuuagagcagcgaccucc

SEQ ID NO: 1023732 - RNA, 19 nt, Artificial Sequence
  Description of Artificial Sequence: Synthetic oligonucleotide
  Sense strand starting at position 3843 of SEQ ID NO: 914696
aggcaaucuggguguccau

SEQ ID NO: 1023733 - RNA, 19 nt, Artificial Sequence
  Description of Artificial Sequence: Synthetic oligonucleotide
  Antisense strand to SEQ ID NO: 1023732
auggacacccagauugccu

SEQ ID NO: 1023734 - RNA, 19 nt, Artificial Sequence
  Description of Artificial Sequence: Synthetic oligonucleotide
  Sense strand starting at position 24 of SEQ ID NO: 914697
gcguuguaguuguugggaa

SEQ ID NO: 1023735 - RNA, 19 nt, Artificial Sequence
  Description of Artificial Sequence: Synthetic oligonucleotide
  Antisense strand to SEQ ID NO: 1023734
uucccaacaacuacaacgc

SEQ ID NO: 1023736 - RNA, 19 nt, Artificial Sequence
  Description of Artificial Sequence: Synthetic oligonucleotide
  Sense strand starting at position 31 of SEQ ID NO: 914697
aguuguugggaaggagaau

SEQ ID NO: 1023737 - RNA, 19 nt, Artificial Sequence
  Description of Artificial Sequence: Synthetic oligonucleotide
  Antisense strand to SEQ ID NO: 1023736
auucuccuucccaacaacu

SEQ ID NO: 1023738 - RNA, 19 nt, Artificial Sequence
  Description of Artificial Sequence: Synthetic oligonucleotide
  Sense strand starting at position 42 of SEQ ID NO: 914697
aggagaaucuccuugaacg

SEQ ID NO: 1023739 - RNA, 19 nt, Artificial Sequence
  Description of Artificial Sequence: Synthetic oligonucleotide
  Antisense strand to SEQ ID NO: 1023738
cguucaaggagauucuccu

SEQ ID NO: 1023740 - RNA, 19 nt, Artificial Sequence
  Description of Artificial Sequence: Synthetic oligonucleotide
  Sense strand starting at position 43 of SEQ ID NO: 914697
ggagaaucuccuugaacgu

SEQ ID NO: 1023741 - RNA, 19 nt, Artificial Sequence
  Description of Artificial Sequence: Synthetic oligonucleotide
  Antisense strand to SEQ ID NO: 1023740
acguucaaggagauucucc

SEQ ID NO: 1023742 - RNA, 19 nt, Artificial Sequence
  Description of Artificial Sequence: Synthetic oligonucleotide
  Sense strand starting at position 44 of SEQ ID NO: 914697
gagaaucuccuugaacgug

SEQ ID NO: 1023743 - RNA, 19 nt, Artificial Sequence
  Description of Artificial Sequence: Synthetic oligonucleotide
  Antisense strand to SEQ ID NO: 1023742
cacguucaaggagauucuc

SEQ ID NO: 1023744 - RNA, 19 nt, Artificial Sequence
  Description of Artificial Sequence: Synthetic oligonucleotide
  Sense strand starting at position 59 of SEQ ID NO: 914697
cgugcacucaucggugaag

SEQ ID NO: 1023745 - RNA, 19 nt, Artificial Sequence
  Description of Artificial Sequence: Synthetic oligonucleotide
  Antisense strand to SEQ ID NO: 1023744
cuucaccgaugagugcacg

SEQ ID NO: 1023746 - RNA, 19 nt, Artificial Sequence
  Description of Artificial Sequence: Synthetic oligonucleotide
  Sense strand starting at position 60 of SEQ ID NO: 914697
gugcacucaucggugaaga

SEQ ID NO: 1023747 - RNA, 19 nt, Artificial Sequence
  Description of Artificial Sequence: Synthetic oligonucleotide
  Antisense strand to SEQ ID NO: 1023746
ucuucaccgaugagugcac

SEQ ID NO: 1023748 - RNA, 19 nt, Artificial Sequence
  Description of Artificial Sequence: Synthetic oligonucleotide
  Sense strand starting at position 61 of SEQ ID NO: 914697
ugcacucaucggugaagaa

SEQ ID NO: 1023749 - RNA, 19 nt, Artificial Sequence
  Description of Artificial Sequence: Synthetic oligonucleotide
  Antisense strand to SEQ ID NO: 1023748
uucuucaccgaugagugca

SEQ ID NO: 1023750 - RNA, 19 nt, Artificial Sequence
  Description of Artificial Sequence: Synthetic oligonucleotide
  Sense strand starting at position 62 of SEQ ID NO: 914697
gcacucaucggugaagaag

SEQ ID NO: 1023751 - RNA, 19 nt, Artificial Sequence
  Description of Artificial Sequence: Synthetic oligonucleotide
  Antisense strand to SEQ ID NO: 1023750
cuucuucaccgaugagugc

SEQ ID NO: 1023752 - RNA, 19 nt, Artificial Sequence
  Description of Artificial Sequence: Synthetic oligonucleotide
  Sense strand starting at position 115 of SEQ ID NO: 914697
gcaccucuugggcaaggua

SEQ ID NO: 1023753 - RNA, 19 nt, Artificial Sequence
  Description of Artificial Sequence: Synthetic oligonucleotide
  Antisense strand to SEQ ID NO: 1023752
uaccuugcccaagaggugc

SEQ ID NO: 1023754 - RNA, 19 nt, Artificial Sequence
  Description of Artificial Sequence: Synthetic oligonucleotide
  Sense strand starting at position 188 of SEQ ID NO: 914697
cugagaugucucugcugag

SEQ ID NO: 1023755 - RNA, 19 nt, Artificial Sequence
  Description of Artificial Sequence: Synthetic oligonucleotide
  Antisense strand to SEQ ID NO: 1023754
cucagcagagacaucucag

SEQ ID NO: 1023756 - RNA, 19 nt, Artificial Sequence
  Description of Artificial Sequence: Synthetic oligonucleotide
  Sense strand starting at position 194 of SEQ ID NO: 914697
ugucucugcugagcaguua

SEQ ID NO: 1023757 - RNA, 19 nt, Artificial Sequence
  Description of Artificial Sequence: Synthetic oligonucleotide
  Antisense strand to SEQ ID NO: 1023756
uaacugcucagcagagaca

SEQ ID NO: 1023758 - RNA, 19 nt, Artificial Sequence
  Description of Artificial Sequence: Synthetic oligonucleotide
  Sense strand starting at position 195 of SEQ ID NO: 914697
gucucugcugagcaguuaa

SEQ ID NO: 1023759 - RNA, 19 nt, Artificial Sequence
  Description of Artificial Sequence: Synthetic oligonucleotide
  Antisense strand to SEQ ID NO: 1023758
uuaacugcucagcagagac

SEQ ID NO: 1023760 - RNA, 19 nt, Artificial Sequence
  Description of Artificial Sequence: Synthetic oligonucleotide
  Sense strand starting at position 610 of SEQ ID NO: 914697
gcgguacucaccgagccau

SEQ ID NO: 1023761 - RNA, 19 nt, Artificial Sequence
  Description of Artificial Sequence: Synthetic oligonucleotide
  Antisense strand to SEQ ID NO: 1023760
auggcucggugaguaccgc

SEQ ID NO: 1023762 - RNA, 19 nt, Artificial Sequence
  Description of Artificial Sequence: Synthetic oligonucleotide
  Sense strand starting at position 644 of SEQ ID NO: 914697
ugcucauggccacgaagaa

SEQ ID NO: 1023763 - RNA, 19 nt, Artificial Sequence
  Description of Artificial Sequence: Synthetic oligonucleotide
  Antisense strand to SEQ ID NO: 1023762
uucuucguggccaugagca

SEQ ID NO: 1023764 - RNA, 19 nt, Artificial Sequence
  Description of Artificial Sequence: Synthetic oligonucleotide
  Sense strand starting at position 923 of SEQ ID NO: 914697
agauuagcuugccugugua

SEQ ID NO: 1023765 - RNA, 19 nt, Artificial Sequence
  Description of Artificial Sequence: Synthetic oligonucleotide
  Antisense strand to SEQ ID NO: 1023764
uacacaggcaagcuaaucu

SEQ ID NO: 1023766 - RNA, 19 nt, Artificial Sequence
  Description of Artificial Sequence: Synthetic oligonucleotide
  Sense strand starting at position 1074 of SEQ ID NO: 914697
gggcgaaggcgcuggaauu

SEQ ID NO: 1023767 - RNA, 19 nt, Artificial Sequence
  Description of Artificial Sequence: Synthetic oligonucleotide
  Antisense strand to SEQ ID NO: 1023766
aauuccagcgccuucgccc

SEQ ID NO: 1023768 - RNA, 19 nt, Artificial Sequence
  Description of Artificial Sequence: Synthetic oligonucleotide
  Sense strand starting at position 2540 of SEQ ID NO: 914697
gcguuucugggcuggaguu

SEQ ID NO: 1023769 - RNA, 19 nt, Artificial Sequence
  Description of Artificial Sequence: Synthetic oligonucleotide
  Antisense strand to SEQ ID NO: 1023768
aacuccagcccagaaacgc

SEQ ID NO: 1023770 - RNA, 19 nt, Artificial Sequence
  Description of Artificial Sequence: Synthetic oligonucleotide
  Sense strand starting at position 2872 of SEQ ID NO: 914697
ggcccaccuaggugugaaa

SEQ ID NO: 1023771 - RNA, 19 nt, Artificial Sequence
  Description of Artificial Sequence: Synthetic oligonucleotide
  Antisense strand to SEQ ID NO: 1023770
uuucacaccuaggugggcc

SEQ ID NO: 1023772 - RNA, 19 nt, Artificial Sequence
  Description of Artificial Sequence: Synthetic oligonucleotide
  Sense strand starting at position 3139 of SEQ ID NO: 914697
ucuucucugaggugcagaa

SEQ ID NO: 1023773 - RNA, 19 nt, Artificial Sequence
  Description of Artificial Sequence: Synthetic oligonucleotide
  Antisense strand to SEQ ID NO: 1023772
uucugcaccucagagaaga

SEQ ID NO: 1023774 - RNA, 19 nt, Artificial Sequence
  Description of Artificial Sequence: Synthetic oligonucleotide
  Sense strand starting at position 3347 of SEQ ID NO: 914697
cccagaugagccugcagau

SEQ ID NO: 1023775 - RNA, 19 nt, Artificial Sequence
  Description of Artificial Sequence: Synthetic oligonucleotide
  Antisense strand to SEQ ID NO: 1023774
aucugcaggcucaucuggg

SEQ ID NO: 1023776 - RNA, 19 nt, Artificial Sequence
  Description of Artificial Sequence: Synthetic oligonucleotide
  Sense strand starting at position 3369 of SEQ ID NO: 914697
gugccaaauagacaucguu

SEQ ID NO: 1023777 - RNA, 19 nt, Artificial Sequence
  Description of Artificial Sequence: Synthetic oligonucleotide
  Antisense strand to SEQ ID NO: 1023776
aacgaugucuauuuggcac

SEQ ID NO: 1023778 - RNA, 19 nt, Artificial Sequence
  Description of Artificial Sequence: Synthetic oligonucleotide
  Sense strand starting at position 3596 of SEQ ID NO: 914697
gagggacucugaugucuuc

SEQ ID NO: 1023779 - RNA, 19 nt, Artificial Sequence
  Description of Artificial Sequence: Synthetic oligonucleotide
  Antisense strand to SEQ ID NO: 1023778
gaagacaucagagucccuc

SEQ ID NO: 1023780 - RNA, 19 nt, Artificial Sequence
  Description of Artificial Sequence: Synthetic oligonucleotide
  Sense strand starting at position 3630 of SEQ ID NO: 914697
ggaugaggcuccuuucuuc

SEQ ID NO: 1023781 - RNA, 19 nt, Artificial Sequence
  Description of Artificial Sequence: Synthetic oligonucleotide
  Antisense strand to SEQ ID NO: 1023780
gaagaaaggagccucaucc

SEQ ID NO: 1023782 - RNA, 19 nt, Artificial Sequence
  Description of Artificial Sequence: Synthetic oligonucleotide
  Sense strand starting at position 3703 of SEQ ID NO: 914697
ucuccuauuugcugugagu

SEQ ID NO: 1023783 - RNA, 19 nt, Artificial Sequence
  Description of Artificial Sequence: Synthetic oligonucleotide
  Antisense strand to SEQ ID NO: 1023782
acucacagcaaauaggaga

SEQ ID NO: 1023784 - RNA, 19 nt, Artificial Sequence
  Description of Artificial Sequence: Synthetic oligonucleotide
  Sense strand starting at position 3705 of SEQ ID NO: 914697
uccuauuugcugugaguuc

SEQ ID NO: 1023785 - RNA, 19 nt, Artificial Sequence
  Description of Artificial Sequence: Synthetic oligonucleotide
  Antisense strand to SEQ ID NO: 1023784
gaacucacagcaaauagga

SEQ ID NO: 1023786 - RNA, 19 nt, Artificial Sequence
  Description of Artificial Sequence: Synthetic oligonucleotide
  Sense strand starting at position 3714 of SEQ ID NO: 914697
cugugaguucagcaaagga

SEQ ID NO: 1023787 - RNA, 19 nt, Artificial Sequence
  Description of Artificial Sequence: Synthetic oligonucleotide
  Antisense strand to SEQ ID NO: 1023786
uccuuugcugaacucacag

SEQ ID NO: 1023788 - RNA, 19 nt, Artificial Sequence
  Description of Artificial Sequence: Synthetic oligonucleotide
  Sense strand starting at position 3734 of SEQ ID NO: 914697
gcugcaggcagcugauaua

SEQ ID NO: 1023789 - RNA, 19 nt, Artificial Sequence
  Description of Artificial Sequence: Synthetic oligonucleotide
  Antisense strand to SEQ ID NO: 1023788
uauaucagcugccugcagc

SEQ ID NO: 1023790 - RNA, 19 nt, Artificial Sequence
  Description of Artificial Sequence: Synthetic oligonucleotide
  Sense strand starting at position 3744 of SEQ ID NO: 914697
gcugauauaucucccagaa

SEQ ID NO: 1023791 - RNA, 19 nt, Artificial Sequence
  Description of Artificial Sequence: Synthetic oligonucleotide
  Antisense strand to SEQ ID NO: 1023790
uucugggagauauaucagc

SEQ ID NO: 1023792 - RNA, 19 nt, Artificial Sequence
  Description of Artificial Sequence: Synthetic oligonucleotide
  Sense strand starting at position 2029 of SEQ ID NO: 914698
cugguuucgucacuuggaa

SEQ ID NO: 1023793 - RNA, 19 nt, Artificial Sequence
  Description of Artificial Sequence: Synthetic oligonucleotide
  Antisense strand to SEQ ID NO: 1023792
uuccaagugacgaaaccag

SEQ ID NO: 1023794 - RNA, 19 nt, Artificial Sequence
  Description of Artificial Sequence: Synthetic oligonucleotide
  Sense strand starting at position 2077 of SEQ ID NO: 914698
ucaccaggucuccacuauu

SEQ ID NO: 1023795 - RNA, 19 nt, Artificial Sequence
  Description of Artificial Sequence: Synthetic oligonucleotide
  Antisense strand to SEQ ID NO: 1023794
aauaguggagaccugguga

SEQ ID NO: 1023796 - RNA, 19 nt, Artificial Sequence
  Description of Artificial Sequence: Synthetic oligonucleotide
  Sense strand starting at position 2200 of SEQ ID NO: 914698
aacccugguuuguuauuga

SEQ ID NO: 1023797 - RNA, 19 nt, Artificial Sequence
  Description of Artificial Sequence: Synthetic oligonucleotide
  Antisense strand to SEQ ID NO: 1023796
ucaauaacaaaccaggguu

SEQ ID NO: 1023798 - RNA, 19 nt, Artificial Sequence
  Description of Artificial Sequence: Synthetic oligonucleotide
  Sense strand starting at position 2203 of SEQ ID NO: 914698
ccugguuuguuauugacau

SEQ ID NO: 1023799 - RNA, 19 nt, Artificial Sequence
  Description of Artificial Sequence: Synthetic oligonucleotide
  Antisense strand to SEQ ID NO: 1023798
augucaauaacaaaccagg

SEQ ID NO: 1023800 - RNA, 19 nt, Artificial Sequence
  Description of Artificial Sequence: Synthetic oligonucleotide
  Sense strand starting at position 2274 of SEQ ID NO: 914698
caauaaauaucagguugga

SEQ ID NO: 1023801 - RNA, 19 nt, Artificial Sequence
  Description of Artificial Sequence: Synthetic oligonucleotide
  Antisense strand to SEQ ID NO: 1023800
uccaaccugauauuuauug

SEQ ID NO: 1023802 - RNA, 19 nt, Artificial Sequence
  Description of Artificial Sequence: Synthetic oligonucleotide
  Sense strand starting at position 2328 of SEQ ID NO: 914698
ugugacuuugaaggcaaau

SEQ ID NO: 1023803 - RNA, 19 nt, Artificial Sequence
  Description of Artificial Sequence: Synthetic oligonucleotide
  Antisense strand to SEQ ID NO: 1023802
auuugccuucaaagucaca

SEQ ID NO: 1023804 - RNA, 19 nt, Artificial Sequence
  Description of Artificial Sequence: Synthetic oligonucleotide
  Sense strand starting at position 2431 of SEQ ID NO: 914698
uacagaaaguugcuuaaug

SEQ ID NO: 1023805 - RNA, 19 nt, Artificial Sequence
  Description of Artificial Sequence: Synthetic oligonucleotide
  Antisense strand to SEQ ID NO: 1023804
cauuaagcaacuuucugua

SEQ ID NO: 1023806 - RNA, 19 nt, Artificial Sequence
  Description of Artificial Sequence: Synthetic oligonucleotide
  Sense strand starting at position 2432 of SEQ ID NO: 914698
acagaaaguugcuuaaugu

SEQ ID NO: 1023807 - RNA, 19 nt, Artificial Sequence
  Description of Artificial Sequence: Synthetic oligonucleotide
  Antisense strand to SEQ ID NO: 1023806
acauuaagcaacuuucugu

SEQ ID NO: 1023808 - RNA, 19 nt, Artificial Sequence
  Description of Artificial Sequence: Synthetic oligonucleotide
  Sense strand starting at position 2433 of SEQ ID NO: 914698
cagaaaguugcuuaaugua

SEQ ID NO: 1023809 - RNA, 19 nt, Artificial Sequence
  Description of Artificial Sequence: Synthetic oligonucleotide
  Antisense strand to SEQ ID NO: 1023808
uacauuaagcaacuuucug

SEQ ID NO: 1023810 - RNA, 19 nt, Artificial Sequence
  Description of Artificial Sequence: Synthetic oligonucleotide
  Sense strand starting at position 2447 of SEQ ID NO: 914698
auguauagucuuuaguaug

SEQ ID NO: 1023811 - RNA, 19 nt, Artificial Sequence
  Description of Artificial Sequence: Synthetic oligonucleotide
  Antisense strand to SEQ ID NO: 1023810
cauacuaaagacuauacau

SEQ ID NO: 1023812 - RNA, 19 nt, Artificial Sequence
  Description of Artificial Sequence: Synthetic oligonucleotide
  Sense strand starting at position 2453 of SEQ ID NO: 914698
agucuuuaguauguauaag

SEQ ID NO: 1023813 - RNA, 19 nt, Artificial Sequence
  Description of Artificial Sequence: Synthetic oligonucleotide
  Antisense strand to SEQ ID NO: 1023812
cuuauacauacuaaagacu

SEQ ID NO: 1023814 - RNA, 19 nt, Artificial Sequence
  Description of Artificial Sequence: Synthetic oligonucleotide
  Sense strand starting at position 2454 of SEQ ID NO: 914698
gucuuuaguauguauaaga

SEQ ID NO: 1023815 - RNA, 19 nt, Artificial Sequence
  Description of Artificial Sequence: Synthetic oligonucleotide
  Antisense strand to SEQ ID NO: 1023814
ucuuauacauacuaaagac

SEQ ID NO: 1023816 - RNA, 19 nt, Artificial Sequence
  Description of Artificial Sequence: Synthetic oligonucleotide
  Sense strand starting at position 2459 of SEQ ID NO: 914698
uaguauguauaagaacaga

SEQ ID NO: 1023817 - RNA, 19 nt, Artificial Sequence
  Description of Artificial Sequence: Synthetic oligonucleotide
  Antisense strand to SEQ ID NO: 1023816
ucuguucuuauacauacua

SEQ ID NO: 1023818 - RNA, 19 nt, Artificial Sequence
  Description of Artificial Sequence: Synthetic oligonucleotide
  Sense strand starting at position 2498 of SEQ ID NO: 914698
ccagcuuagugaguuaaag

SEQ ID NO: 1023819 - RNA, 19 nt, Artificial Sequence
  Description of Artificial Sequence: Synthetic oligonucleotide
  Antisense strand to SEQ ID NO: 1023818
cuuuaacucacuaagcugg

SEQ ID NO: 1023820 - RNA, 19 nt, Artificial Sequence
  Description of Artificial Sequence: Synthetic oligonucleotide
  Sense strand starting at position 2500 of SEQ ID NO: 914698
agcuuagugaguuaaagga

SEQ ID NO: 1023821 - RNA, 19 nt, Artificial Sequence
  Description of Artificial Sequence: Synthetic oligonucleotide
  Antisense strand to SEQ ID NO: 1023820
uccuuuaacucacuaagcu

SEQ ID NO: 1023822 - RNA, 19 nt, Artificial Sequence
  Description of Artificial Sequence: Synthetic oligonucleotide
  Sense strand starting at position 2626 of SEQ ID NO: 914698
ugaagaauguuucugguac

SEQ ID NO: 1023823 - RNA, 19 nt, Artificial Sequence
  Description of Artificial Sequence: Synthetic oligonucleotide
  Antisense strand to SEQ ID NO: 1023822
guaccagaaacauucuuca

SEQ ID NO: 1023824 - RNA, 19 nt, Artificial Sequence
  Description of Artificial Sequence: Synthetic oligonucleotide
  Sense strand starting at position 2677 of SEQ ID NO: 914698
ggagcagaauguuaagcaa

SEQ ID NO: 1023825 - RNA, 19 nt, Artificial Sequence
  Description of Artificial Sequence: Synthetic oligonucleotide
  Antisense strand to SEQ ID NO: 1023824
uugcuuaacauucugcucc

SEQ ID NO: 1023826 - RNA, 19 nt, Artificial Sequence
  Description of Artificial Sequence: Synthetic oligonucleotide
  Sense strand starting at position 2680 of SEQ ID NO: 914698
gcagaauguuaagcaaauu

SEQ ID NO: 1023827 - RNA, 19 nt, Artificial Sequence
  Description of Artificial Sequence: Synthetic oligonucleotide
  Antisense strand to SEQ ID NO: 1023826
aauuugcuuaacauucugc

SEQ ID NO: 1023828 - RNA, 19 nt, Artificial Sequence
  Description of Artificial Sequence: Synthetic oligonucleotide
  Sense strand starting at position 2698 of SEQ ID NO: 914698
ugauuauagucacacaguu

SEQ ID NO: 1023829 - RNA, 19 nt, Artificial Sequence
  Description of Artificial Sequence: Synthetic oligonucleotide
  Antisense strand to SEQ ID NO: 1023828
aacugugugacuauaauca

SEQ ID NO: 1023830 - RNA, 19 nt, Artificial Sequence
  Description of Artificial Sequence: Synthetic oligonucleotide
  Sense strand starting at position 2711 of SEQ ID NO: 914698
acaguuagacuuuaguuga

SEQ ID NO: 1023831 - RNA, 19 nt, Artificial Sequence
  Description of Artificial Sequence: Synthetic oligonucleotide
  Antisense strand to SEQ ID NO: 1023830
ucaacuaaagucuaacugu

SEQ ID NO: 1023832 - RNA, 19 nt, Artificial Sequence
  Description of Artificial Sequence: Synthetic oligonucleotide
  Sense strand starting at position 2718 of SEQ ID NO: 914698
gacuuuaguugagccagaa

SEQ ID NO: 1023833 - RNA, 19 nt, Artificial Sequence
  Description of Artificial Sequence: Synthetic oligonucleotide
  Antisense strand to SEQ ID NO: 1023832
uucuggcucaacuaaaguc

SEQ ID NO: 1023834 - RNA, 19 nt, Artificial Sequence
  Description of Artificial Sequence: Synthetic oligonucleotide
  Sense strand starting at position 2722 of SEQ ID NO: 914698
uuaguugagccagaacuaa

SEQ ID NO: 1023835 - RNA, 19 nt, Artificial Sequence
  Description of Artificial Sequence: Synthetic oligonucleotide
  Antisense strand to SEQ ID NO: 1023834
uuaguucuggcucaacuaa

SEQ ID NO: 1023836 - RNA, 19 nt, Artificial Sequence
  Description of Artificial Sequence: Synthetic oligonucleotide
  Sense strand starting at position 2827 of SEQ ID NO: 914698
uuaugaacuuauuggcaaa

SEQ ID NO: 1023837 - RNA, 19 nt, Artificial Sequence
  Description of Artificial Sequence: Synthetic oligonucleotide
  Antisense strand to SEQ ID NO: 1023836
uuugccaauaaguucauaa

SEQ ID NO: 1023838 - RNA, 19 nt, Artificial Sequence
  Description of Artificial Sequence: Synthetic oligonucleotide
  Sense strand starting at position 2891 of SEQ ID NO: 914698
gcauuuacugcaugccaaa

SEQ ID NO: 1023839 - RNA, 19 nt, Artificial Sequence
  Description of Artificial Sequence: Synthetic oligonucleotide
  Antisense strand to SEQ ID NO: 1023838
uuuggcaugcaguaaaugc

SEQ ID NO: 1023840 - RNA, 19 nt, Artificial Sequence
  Description of Artificial Sequence: Synthetic oligonucleotide
  Sense strand starting at position 3338 of SEQ ID NO: 914698
agauguaaguuggacauca

SEQ ID NO: 1023841 - RNA, 19 nt, Artificial Sequence
  Description of Artificial Sequence: Synthetic oligonucleotide
  Antisense strand to SEQ ID NO: 1023840
ugauguccaacuuacaucu

SEQ ID NO: 1023842 - RNA, 19 nt, Artificial Sequence
  Description of Artificial Sequence: Synthetic oligonucleotide
  Sense strand starting at position 3352 of SEQ ID NO: 914698
caucaauagggcuguggaa

SEQ ID NO: 1023843 - RNA, 19 nt, Artificial Sequence
  Description of Artificial Sequence: Synthetic oligonucleotide
  Antisense strand to SEQ ID NO: 1023842
uuccacagcccuauugaug

SEQ ID NO: 1023844 - RNA, 19 nt, Artificial Sequence
  Description of Artificial Sequence: Synthetic oligonucleotide
  Sense strand starting at position 3354 of SEQ ID NO: 914698
ucaauagggcuguggaaga

SEQ ID NO: 1023845 - RNA, 19 nt, Artificial Sequence
  Description of Artificial Sequence: Synthetic oligonucleotide
  Antisense strand to SEQ ID NO: 1023844
ucuuccacagcccuauuga

SEQ ID NO: 1023846 - RNA, 19 nt, Artificial Sequence
  Description of Artificial Sequence: Synthetic oligonucleotide
  Sense strand starting at position 3472 of SEQ ID NO: 914698
uugacuugccaguguucca

SEQ ID NO: 1023847 - RNA, 19 nt, Artificial Sequence
  Description of Artificial Sequence: Synthetic oligonucleotide
  Antisense strand to SEQ ID NO: 1023846
uggaacacuggcaagucaa

SEQ ID NO: 1023848 - RNA, 19 nt, Artificial Sequence
  Description of Artificial Sequence: Synthetic oligonucleotide
  Sense strand starting at position 3479 of SEQ ID NO: 914698
gccaguguuccauaccuau

SEQ ID NO: 1023849 - RNA, 19 nt, Artificial Sequence
  Description of Artificial Sequence: Synthetic oligonucleotide
  Antisense strand to SEQ ID NO: 1023848
auagguauggaacacuggc

SEQ ID NO: 1023850 - RNA, 19 nt, Artificial Sequence
  Description of Artificial Sequence: Synthetic oligonucleotide
  Sense strand starting at position 3546 of SEQ ID NO: 914698
cacacuguucugggacagu

SEQ ID NO: 1023851 - RNA, 19 nt, Artificial Sequence
  Description of Artificial Sequence: Synthetic oligonucleotide
  Antisense strand to SEQ ID NO: 1023850
acugucccagaacagugug

SEQ ID NO: 1023852 - RNA, 19 nt, Artificial Sequence
  Description of Artificial Sequence: Synthetic oligonucleotide
  Sense strand starting at position 3549 of SEQ ID NO: 914698
acuguucugggacaguuau

SEQ ID NO: 1023853 - RNA, 19 nt, Artificial Sequence
  Description of Artificial Sequence: Synthetic oligonucleotide
  Antisense strand to SEQ ID NO: 1023852
auaacugucccagaacagu

SEQ ID NO: 1023854 - RNA, 19 nt, Artificial Sequence
  Description of Artificial Sequence: Synthetic oligonucleotide
  Sense strand starting at position 3555 of SEQ ID NO: 914698
cugggacaguuauacucau

SEQ ID NO: 1023855 - RNA, 19 nt, Artificial Sequence
  Description of Artificial Sequence: Synthetic oligonucleotide
  Antisense strand to SEQ ID NO: 1023854
augaguauaacugucccag

SEQ ID NO: 1023856 - RNA, 19 nt, Artificial Sequence
  Description of Artificial Sequence: Synthetic oligonucleotide
  Sense strand starting at position 3562 of SEQ ID NO: 914698
aguuauacucauugucauc

SEQ ID NO: 1023857 - RNA, 19 nt, Artificial Sequence
  Description of Artificial Sequence: Synthetic oligonucleotide
  Antisense strand to SEQ ID NO: 1023856
gaugacaaugaguauaacu

SEQ ID NO: 1023858 - RNA, 19 nt, Artificial Sequence
  Description of Artificial Sequence: Synthetic oligonucleotide
  Sense strand starting at position 3619 of SEQ ID NO: 914698
aaaugagaagucugguuaa

SEQ ID NO: 1023859 - RNA, 19 nt, Artificial Sequence
  Description of Artificial Sequence: Synthetic oligonucleotide
  Antisense strand to SEQ ID NO: 1023858
uuaaccagacuucucauuu

SEQ ID NO: 1023860 - RNA, 19 nt, Artificial Sequence
  Description of Artificial Sequence: Synthetic oligonucleotide
  Sense strand starting at position 3622 of SEQ ID NO: 914698
ugagaagucugguuaagua

SEQ ID NO: 1023861 - RNA, 19 nt, Artificial Sequence
  Description of Artificial Sequence: Synthetic oligonucleotide
  Antisense strand to SEQ ID NO: 1023860
uacuuaaccagacuucuca

SEQ ID NO: 1023862 - RNA, 19 nt, Artificial Sequence
  Description of Artificial Sequence: Synthetic oligonucleotide
  Sense strand starting at position 3630 of SEQ ID NO: 914698
cugguuaaguaacuugaua

SEQ ID NO: 1023863 - RNA, 19 nt, Artificial Sequence
  Description of Artificial Sequence: Synthetic oligonucleotide
  Antisense strand to SEQ ID NO: 1023862
uaucaaguuacuuaaccag

SEQ ID NO: 1023864 - RNA, 19 nt, Artificial Sequence
  Description of Artificial Sequence: Synthetic oligonucleotide
  Sense strand starting at position 3662 of SEQ ID NO: 914698
guaucacaugcauggaguu

SEQ ID NO: 1023865 - RNA, 19 nt, Artificial Sequence
  Description of Artificial Sequence: Synthetic oligonucleotide
  Antisense strand to SEQ ID NO: 1023864
aacuccaugcaugugauac

SEQ ID NO: 1023866 - RNA, 19 nt, Artificial Sequence
  Description of Artificial Sequence: Synthetic oligonucleotide
  Sense strand starting at position 3672 of SEQ ID NO: 914698
cauggaguuucugaagcau

SEQ ID NO: 1023867 - RNA, 19 nt, Artificial Sequence
  Description of Artificial Sequence: Synthetic oligonucleotide
  Antisense strand to SEQ ID NO: 1023866
augcuucagaaacuccaug

SEQ ID NO: 1023868 - RNA, 19 nt, Artificial Sequence
  Description of Artificial Sequence: Synthetic oligonucleotide
  Sense strand starting at position 3764 of SEQ ID NO: 914698
guuuaugccaaguggaaga

SEQ ID NO: 1023869 - RNA, 19 nt, Artificial Sequence
  Description of Artificial Sequence: Synthetic oligonucleotide
  Antisense strand to SEQ ID NO: 1023868
ucuuccacuuggcauaaac

SEQ ID NO: 1023870 - RNA, 19 nt, Artificial Sequence
  Description of Artificial Sequence: Synthetic oligonucleotide
  Sense strand starting at position 3832 of SEQ ID NO: 914698
guugaaagacuggacuguu

SEQ ID NO: 1023871 - RNA, 19 nt, Artificial Sequence
  Description of Artificial Sequence: Synthetic oligonucleotide
  Antisense strand to SEQ ID NO: 1023870
aacaguccagucuuucaac

SEQ ID NO: 1023872 - RNA, 19 nt, Artificial Sequence
  Description of Artificial Sequence: Synthetic oligonucleotide
  Sense strand starting at position 83 of SEQ ID NO: 914699
uguaucuugccuuggauaa

SEQ ID NO: 1023873 - RNA, 19 nt, Artificial Sequence
  Description of Artificial Sequence: Synthetic oligonucleotide
  Antisense strand to SEQ ID NO: 1023872
uuauccaaggcaagauaca

SEQ ID NO: 1023874 - RNA, 19 nt, Artificial Sequence
  Description of Artificial Sequence: Synthetic oligonucleotide
  Sense strand starting at position 84 of SEQ ID NO: 914699
guaucuugccuuggauaaa

SEQ ID NO: 1023875 - RNA, 19 nt, Artificial Sequence
  Description of Artificial Sequence: Synthetic oligonucleotide
  Antisense strand to SEQ ID NO: 1023874
uuuauccaaggcaagauac

SEQ ID NO: 1023876 - RNA, 19 nt, Artificial Sequence
  Description of Artificial Sequence: Synthetic oligonucleotide
  Sense strand starting at position 87 of SEQ ID NO: 914699
ucuugccuuggauaaaugu

SEQ ID NO: 1023877 - RNA, 19 nt, Artificial Sequence
  Description of Artificial Sequence: Synthetic oligonucleotide
  Antisense strand to SEQ ID NO: 1023876
acauuuauccaaggcaaga

SEQ ID NO: 1023878 - RNA, 19 nt, Artificial Sequence
  Description of Artificial Sequence: Synthetic oligonucleotide
  Sense strand starting at position 94 of SEQ ID NO: 914699
uuggauaaauguuuacuca

SEQ ID NO: 1023879 - RNA, 19 nt, Artificial Sequence
  Description of Artificial Sequence: Synthetic oligonucleotide
  Antisense strand to SEQ ID NO: 1023878
ugaguaaacauuuauccaa

SEQ ID NO: 1023880 - RNA, 19 nt, Artificial Sequence
  Description of Artificial Sequence: Synthetic oligonucleotide
  Sense strand starting at position 162 of SEQ ID NO: 914699
ucacaaguuugaguuggaa

SEQ ID NO: 1023881 - RNA, 19 nt, Artificial Sequence
  Description of Artificial Sequence: Synthetic oligonucleotide
  Antisense strand to SEQ ID NO: 1023880
uuccaacucaaacuuguga

SEQ ID NO: 1023882 - RNA, 19 nt, Artificial Sequence
  Description of Artificial Sequence: Synthetic oligonucleotide
  Sense strand starting at position 164 of SEQ ID NO: 914699
acaaguuugaguuggaaga

SEQ ID NO: 1023883 - RNA, 19 nt, Artificial Sequence
  Description of Artificial Sequence: Synthetic oligonucleotide
  Antisense strand to SEQ ID NO: 1023882
ucuuccaacucaaacuugu

SEQ ID NO: 1023884 - RNA, 19 nt, Artificial Sequence
  Description of Artificial Sequence: Synthetic oligonucleotide
  Sense strand starting at position 180 of SEQ ID NO: 914699
agagacuuuccuggcuaag

SEQ ID NO: 1023885 - RNA, 19 nt, Artificial Sequence
  Description of Artificial Sequence: Synthetic oligonucleotide
  Antisense strand to SEQ ID NO: 1023884
cuuagccaggaaagucucu

SEQ ID NO: 1023886 - RNA, 19 nt, Artificial Sequence
  Description of Artificial Sequence: Synthetic oligonucleotide
  Sense strand starting at position 192 of SEQ ID NO: 914699
ggcuaagcccuagaaacua

SEQ ID NO: 1023887 - RNA, 19 nt, Artificial Sequence
  Description of Artificial Sequence: Synthetic oligonucleotide
  Antisense strand to SEQ ID NO: 1023886
uaguuucuagggcuuagcc

SEQ ID NO: 1023888 - RNA, 19 nt, Artificial Sequence
  Description of Artificial Sequence: Synthetic oligonucleotide
  Sense strand starting at position 394 of SEQ ID NO: 914699
guagaagcaacaugaguaa

SEQ ID NO: 1023889 - RNA, 19 nt, Artificial Sequence
  Description of Artificial Sequence: Synthetic oligonucleotide
  Antisense strand to SEQ ID NO: 1023888
uuacucauguugcuucuac

SEQ ID NO: 1023890 - RNA, 19 nt, Artificial Sequence
  Description of Artificial Sequence: Synthetic oligonucleotide
  Sense strand starting at position 429 of SEQ ID NO: 914699
ggagaaauguaagccuaga

SEQ ID NO: 1023891 - RNA, 19 nt, Artificial Sequence
  Description of Artificial Sequence: Synthetic oligonucleotide
  Antisense strand to SEQ ID NO: 1023890
ucuaggcuuacauuucucc

SEQ ID NO: 1023892 - RNA, 19 nt, Artificial Sequence
  Description of Artificial Sequence: Synthetic oligonucleotide
  Sense strand starting at position 522 of SEQ ID NO: 914699
gugggagccaaugaaaguu

SEQ ID NO: 1023893 - RNA, 19 nt, Artificial Sequence
  Description of Artificial Sequence: Synthetic oligonucleotide
  Antisense strand to SEQ ID NO: 1023892
aacuuucauuggcucccac

SEQ ID NO: 1023894 - RNA, 19 nt, Artificial Sequence
  Description of Artificial Sequence: Synthetic oligonucleotide
  Sense strand starting at position 1009 of SEQ ID NO: 914699
gagggagugaaguguagau

SEQ ID NO: 1023895 - RNA, 19 nt, Artificial Sequence
  Description of Artificial Sequence: Synthetic oligonucleotide
  Antisense strand to SEQ ID NO: 1023894
aucuacacuucacucccuc

SEQ ID NO: 1023896 - RNA, 19 nt, Artificial Sequence
  Description of Artificial Sequence: Synthetic oligonucleotide
  Sense strand starting at position 1102 of SEQ ID NO: 914699
ugaugucauccaggucuuu

SEQ ID NO: 1023897 - RNA, 19 nt, Artificial Sequence
  Description of Artificial Sequence: Synthetic oligonucleotide
  Antisense strand to SEQ ID NO: 1023896
aaagaccuggaugacauca

SEQ ID NO: 1023898 - RNA, 19 nt, Artificial Sequence
  Description of Artificial Sequence: Synthetic oligonucleotide
  Sense strand starting at position 1287 of SEQ ID NO: 914699
cuuucugauggcuggguaa

SEQ ID NO: 1023899 - RNA, 19 nt, Artificial Sequence
  Description of Artificial Sequence: Synthetic oligonucleotide
  Antisense strand to SEQ ID NO: 1023898
uuacccagccaucagaaag

SEQ ID NO: 1023900 - RNA, 19 nt, Artificial Sequence
  Description of Artificial Sequence: Synthetic oligonucleotide
  Sense strand starting at position 1289 of SEQ ID NO: 914699
uucugauggcuggguaaau

SEQ ID NO: 1023901 - RNA, 19 nt, Artificial Sequence
  Description of Artificial Sequence: Synthetic oligonucleotide
  Antisense strand to SEQ ID NO: 1023900
auuuacccagccaucagaa

SEQ ID NO: 1023902 - RNA, 19 nt, Artificial Sequence
  Description of Artificial Sequence: Synthetic oligonucleotide
  Sense strand starting at position 1351 of SEQ ID NO: 914699
cagucagacugguugaugu

SEQ ID NO: 1023903 - RNA, 19 nt, Artificial Sequence
  Description of Artificial Sequence: Synthetic oligonucleotide
  Antisense strand to SEQ ID NO: 1023902
acaucaaccagucugacug

SEQ ID NO: 1023904 - RNA, 19 nt, Artificial Sequence
  Description of Artificial Sequence: Synthetic oligonucleotide
  Sense strand starting at position 1361 of SEQ ID NO: 914699
gguugaugucuccaccauc

SEQ ID NO: 1023905 - RNA, 19 nt, Artificial Sequence
  Description of Artificial Sequence: Synthetic oligonucleotide
  Antisense strand to SEQ ID NO: 1023904
gaugguggagacaucaacc

SEQ ID NO: 1023906 - RNA, 19 nt, Artificial Sequence
  Description of Artificial Sequence: Synthetic oligonucleotide
  Sense strand starting at position 1388 of SEQ ID NO: 914699
ugagcaccucucgaugagu

SEQ ID NO: 1023907 - RNA, 19 nt, Artificial Sequence
  Description of Artificial Sequence: Synthetic oligonucleotide
  Antisense strand to SEQ ID NO: 1023906
acucaucgagaggugcuca

SEQ ID NO: 1023908 - RNA, 19 nt, Artificial Sequence
  Description of Artificial Sequence: Synthetic oligonucleotide
  Sense strand starting at position 1391 of SEQ ID NO: 914699
gcaccucucgaugaguagu

SEQ ID NO: 1023909 - RNA, 19 nt, Artificial Sequence
  Description of Artificial Sequence: Synthetic oligonucleotide
  Antisense strand to SEQ ID NO: 1023908
acuacucaucgagaggugc

SEQ ID NO: 1023910 - RNA, 19 nt, Artificial Sequence
  Description of Artificial Sequence: Synthetic oligonucleotide
  Sense strand starting at position 1422 of SEQ ID NO: 914699
ggcggaaucuggaagauga

SEQ ID NO: 1023911 - RNA, 19 nt, Artificial Sequence
  Description of Artificial Sequence: Synthetic oligonucleotide
  Antisense strand to SEQ ID NO: 1023910
ucaucuuccagauuccgcc

SEQ ID NO: 1023912 - RNA, 19 nt, Artificial Sequence
  Description of Artificial Sequence: Synthetic oligonucleotide
  Sense strand starting at position 1497 of SEQ ID NO: 914699
cgguaaugguccauggugu

SEQ ID NO: 1023913 - RNA, 19 nt, Artificial Sequence
  Description of Artificial Sequence: Synthetic oligonucleotide
  Antisense strand to SEQ ID NO: 1023912
acaccauggaccauuaccg

SEQ ID NO: 1023914 - RNA, 19 nt, Artificial Sequence
  Description of Artificial Sequence: Synthetic oligonucleotide
  Sense strand starting at position 1541 of SEQ ID NO: 914699
gccagucugcuccaggauu

SEQ ID NO: 1023915 - RNA, 19 nt, Artificial Sequence
  Description of Artificial Sequence: Synthetic oligonucleotide
  Antisense strand to SEQ ID NO: 1023914
aauccuggagcagacuggc

SEQ ID NO: 1023916 - RNA, 19 nt, Artificial Sequence
  Description of Artificial Sequence: Synthetic oligonucleotide
  Sense strand starting at position 1831 of SEQ ID NO: 914699
cgucgauaagggucguguu

SEQ ID NO: 1023917 - RNA, 19 nt, Artificial Sequence
  Description of Artificial Sequence: Synthetic oligonucleotide
  Antisense strand to SEQ ID NO: 1023916
aacacgacccuuaucgacg

SEQ ID NO: 1023918 - RNA, 19 nt, Artificial Sequence
  Description of Artificial Sequence: Synthetic oligonucleotide
  Sense strand starting at position 2257 of SEQ ID NO: 914699
uccuaaguuugaccuguau

SEQ ID NO: 1023919 - RNA, 19 nt, Artificial Sequence
  Description of Artificial Sequence: Synthetic oligonucleotide
  Antisense strand to SEQ ID NO: 1023918
auacaggucaaacuuagga

SEQ ID NO: 1023920 - RNA, 19 nt, Artificial Sequence
  Description of Artificial Sequence: Synthetic oligonucleotide
  Sense strand starting at position 2356 of SEQ ID NO: 914699
uggagacugguuuguccau

SEQ ID NO: 1023921 - RNA, 19 nt, Artificial Sequence
  Description of Artificial Sequence: Synthetic oligonucleotide
  Antisense strand to SEQ ID NO: 1023920
auggacaaaccagucucca

SEQ ID NO: 1023922 - RNA, 19 nt, Artificial Sequence
  Description of Artificial Sequence: Synthetic oligonucleotide
  Sense strand starting at position 2648 of SEQ ID NO: 914699
guucucauacgagaaaccu

SEQ ID NO: 1023923 - RNA, 19 nt, Artificial Sequence
  Description of Artificial Sequence: Synthetic oligonucleotide
  Antisense strand to SEQ ID NO: 1023922
agguuucucguaugagaac

SEQ ID NO: 1023924 - RNA, 19 nt, Artificial Sequence
  Description of Artificial Sequence: Synthetic oligonucleotide
  Sense strand starting at position 2807 of SEQ ID NO: 914699
cuuugacaccguuacuaau

SEQ ID NO: 1023925 - RNA, 19 nt, Artificial Sequence
  Description of Artificial Sequence: Synthetic oligonucleotide
  Antisense strand to SEQ ID NO: 1023924
auuaguaacggugucaaag

SEQ ID NO: 1023926 - RNA, 19 nt, Artificial Sequence
  Description of Artificial Sequence: Synthetic oligonucleotide
  Sense strand starting at position 3080 of SEQ ID NO: 914699
ucaccaucuuggccaguua

SEQ ID NO: 1023927 - RNA, 19 nt, Artificial Sequence
  Description of Artificial Sequence: Synthetic oligonucleotide
  Antisense strand to SEQ ID NO: 1023926
uaacuggccaagaugguga

SEQ ID NO: 1023928 - RNA, 19 nt, Artificial Sequence
  Description of Artificial Sequence: Synthetic oligonucleotide
  Sense strand starting at position 3167 of SEQ ID NO: 914699
cuuaguggccuuuggaaau

SEQ ID NO: 1023929 - RNA, 19 nt, Artificial Sequence
  Description of Artificial Sequence: Synthetic oligonucleotide
  Antisense strand to SEQ ID NO: 1023928
auuuccaaaggccacuaag

SEQ ID NO: 1023930 - RNA, 19 nt, Artificial Sequence
  Description of Artificial Sequence: Synthetic oligonucleotide
  Sense strand starting at position 3369 of SEQ ID NO: 914699
ugaaauagcucuuuacuug

SEQ ID NO: 1023931 - RNA, 19 nt, Artificial Sequence
  Description of Artificial Sequence: Synthetic oligonucleotide
  Antisense strand to SEQ ID NO: 1023930
caaguaaagagcuauuuca

SEQ ID NO: 1023932 - RNA, 19 nt, Artificial Sequence
  Description of Artificial Sequence: Synthetic oligonucleotide
  Sense strand starting at position 3387 of SEQ ID NO: 914699
ggcaaaguccuauggaucu

SEQ ID NO: 1023933 - RNA, 19 nt, Artificial Sequence
  Description of Artificial Sequence: Synthetic oligonucleotide
  Antisense strand to SEQ ID NO: 1023932
agauccauaggacuuugcc

SEQ ID NO: 1023934 - RNA, 19 nt, Artificial Sequence
  Description of Artificial Sequence: Synthetic oligonucleotide
  Sense strand starting at position 3496 of SEQ ID NO: 914699
gcuugacuucccggacaga

SEQ ID NO: 1023935 - RNA, 19 nt, Artificial Sequence
  Description of Artificial Sequence: Synthetic oligonucleotide
  Antisense strand to SEQ ID NO: 1023934
ucuguccgggaagucaagc

SEQ ID NO: 1023936 - RNA, 19 nt, Artificial Sequence
  Description of Artificial Sequence: Synthetic oligonucleotide
  Sense strand starting at position 3515 of SEQ ID NO: 914699
cugcgaccuccuugaggau

SEQ ID NO: 1023937 - RNA, 19 nt, Artificial Sequence
  Description of Artificial Sequence: Synthetic oligonucleotide
  Antisense strand to SEQ ID NO: 1023936
auccucaaggaggucgcag

SEQ ID NO: 1023938 - RNA, 19 nt, Artificial Sequence
  Description of Artificial Sequence: Synthetic oligonucleotide
  Sense strand starting at position 3527 of SEQ ID NO: 914699
ugaggauggaaucgguauu

SEQ ID NO: 1023939 - RNA, 19 nt, Artificial Sequence
  Description of Artificial Sequence: Synthetic oligonucleotide
  Antisense strand to SEQ ID NO: 1023938
aauaccgauuccauccuca

SEQ ID NO: 1023940 - RNA, 19 nt, Artificial Sequence
  Description of Artificial Sequence: Synthetic oligonucleotide
  Sense strand starting at position 3586 of SEQ ID NO: 914699
acguuuauugaacaaacga

SEQ ID NO: 1023941 - RNA, 19 nt, Artificial Sequence
  Description of Artificial Sequence: Synthetic oligonucleotide
  Antisense strand to SEQ ID NO: 1023940
ucguuuguucaauaaacgu

SEQ ID NO: 1023942 - RNA, 19 nt, Artificial Sequence
  Description of Artificial Sequence: Synthetic oligonucleotide
  Sense strand starting at position 3599 of SEQ ID NO: 914699
aaacgaauccuguauguuc

SEQ ID NO: 1023943 - RNA, 19 nt, Artificial Sequence
  Description of Artificial Sequence: Synthetic oligonucleotide
  Antisense strand to SEQ ID NO: 1023942
gaacauacaggauucguuu

SEQ ID NO: 1023944 - RNA, 19 nt, Artificial Sequence
  Description of Artificial Sequence: Synthetic oligonucleotide
  Sense strand starting at position 3657 of SEQ ID NO: 914699
gucuauuggugagcuagga

SEQ ID NO: 1023945 - RNA, 19 nt, Artificial Sequence
  Description of Artificial Sequence: Synthetic oligonucleotide
  Antisense strand to SEQ ID NO: 1023944
uccuagcucaccaauagac

SEQ ID NO: 1023946 - RNA, 19 nt, Artificial Sequence
  Description of Artificial Sequence: Synthetic oligonucleotide
  Sense strand starting at position 3727 of SEQ ID NO: 914699
acuuccgaauuugaucaaa

SEQ ID NO: 1023947 - RNA, 19 nt, Artificial Sequence
  Description of Artificial Sequence: Synthetic oligonucleotide
  Antisense strand to SEQ ID NO: 1023946
uuugaucaaauucggaagu

SEQ ID NO: 1023948 - RNA, 19 nt, Artificial Sequence
  Description of Artificial Sequence: Synthetic oligonucleotide
  Sense strand starting at position 3816 of SEQ ID NO: 914699
ugaaucuuguuucucagaa

SEQ ID NO: 1023949 - RNA, 19 nt, Artificial Sequence
  Description of Artificial Sequence: Synthetic oligonucleotide
  Antisense strand to SEQ ID NO: 1023948
uucugagaaacaagauuca

SEQ ID NO: 1023950 - RNA, 19 nt, Artificial Sequence
  Description of Artificial Sequence: Synthetic oligonucleotide
  Sense strand starting at position 3817 of SEQ ID NO: 914699
gaaucuuguuucucagaag

SEQ ID NO: 1023951 - RNA, 19 nt, Artificial Sequence
  Description of Artificial Sequence: Synthetic oligonucleotide
  Antisense strand to SEQ ID NO: 1023950
cuucugagaaacaagauuc

SEQ ID NO: 1023952 - RNA, 19 nt, Artificial Sequence
  Description of Artificial Sequence: Synthetic oligonucleotide
  Sense strand starting at position 2104 of SEQ ID NO: 914700
gcgggucuccugcaaacuu

SEQ ID NO: 1023953 - RNA, 19 nt, Artificial Sequence
  Description of Artificial Sequence: Synthetic oligonucleotide
  Antisense strand to SEQ ID NO: 1023952
aaguuugcaggagacccgc

SEQ ID NO: 1023954 - RNA, 19 nt, Artificial Sequence
  Description of Artificial Sequence: Synthetic oligonucleotide
  Sense strand starting at position 2174 of SEQ ID NO: 914700
gucccuuugcuuucucagu

SEQ ID NO: 1023955 - RNA, 19 nt, Artificial Sequence
  Description of Artificial Sequence: Synthetic oligonucleotide
  Antisense strand to SEQ ID NO: 1023954
acugagaaagcaaagggac

SEQ ID NO: 1023956 - RNA, 19 nt, Artificial Sequence
  Description of Artificial Sequence: Synthetic oligonucleotide
  Sense strand starting at position 2188 of SEQ ID NO: 914700
ucaguuucugucuggguga

SEQ ID NO: 1023957 - RNA, 19 nt, Artificial Sequence
  Description of Artificial Sequence: Synthetic oligonucleotide
  Antisense strand to SEQ ID NO: 1023956
ucacccagacagaaacuga

SEQ ID NO: 1023958 - RNA, 19 nt, Artificial Sequence
  Description of Artificial Sequence: Synthetic oligonucleotide
  Sense strand starting at position 2190 of SEQ ID NO: 914700
aguuucugucugggugauu

SEQ ID NO: 1023959 - RNA, 19 nt, Artificial Sequence
  Description of Artificial Sequence: Synthetic oligonucleotide
  Antisense strand to SEQ ID NO: 1023958
aaucacccagacagaaacu

SEQ ID NO: 1023960 - RNA, 19 nt, Artificial Sequence
  Description of Artificial Sequence: Synthetic oligonucleotide
  Sense strand starting at position 2218 of SEQ ID NO: 914700
uuauguaaaucucugggaa

SEQ ID NO: 1023961 - RNA, 19 nt, Artificial Sequence
  Description of Artificial Sequence: Synthetic oligonucleotide
  Antisense strand to SEQ ID NO: 1023960
uucccagagauuuacauaa

SEQ ID NO: 1023962 - RNA, 19 nt, Artificial Sequence
  Description of Artificial Sequence: Synthetic oligonucleotide
  Sense strand starting at position 2219 of SEQ ID NO: 914700
uauguaaaucucugggaau

SEQ ID NO: 1023963 - RNA, 19 nt, Artificial Sequence
  Description of Artificial Sequence: Synthetic oligonucleotide
  Antisense strand to SEQ ID NO: 1023962
auucccagagauuuacaua

SEQ ID NO: 1023964 - RNA, 19 nt, Artificial Sequence
  Description of Artificial Sequence: Synthetic oligonucleotide
  Sense strand starting at position 2221 of SEQ ID NO: 914700
uguaaaucucugggaaugu

SEQ ID NO: 1023965 - RNA, 19 nt, Artificial Sequence
  Description of Artificial Sequence: Synthetic oligonucleotide
  Antisense strand to SEQ ID NO: 1023964
acauucccagagauuuaca

SEQ ID NO: 1023966 - RNA, 19 nt, Artificial Sequence
  Description of Artificial Sequence: Synthetic oligonucleotide
  Sense strand starting at position 2231 of SEQ ID NO: 914700
ugggaaugucuccgagcca

SEQ ID NO: 1023967 - RNA, 19 nt, Artificial Sequence
  Description of Artificial Sequence: Synthetic oligonucleotide
  Antisense strand to SEQ ID NO: 1023966
uggcucggagacauuccca

SEQ ID NO: 1023968 - RNA, 19 nt, Artificial Sequence
  Description of Artificial Sequence: Synthetic oligonucleotide
  Sense strand starting at position 2254 of SEQ ID NO: 914700
ggaugugauuccagcggaa

SEQ ID NO: 1023969 - RNA, 19 nt, Artificial Sequence
  Description of Artificial Sequence: Synthetic oligonucleotide
  Antisense strand to SEQ ID NO: 1023968
uuccgcuggaaucacaucc

SEQ ID NO: 1023970 - RNA, 19 nt, Artificial Sequence
  Description of Artificial Sequence: Synthetic oligonucleotide
  Sense strand starting at position 2256 of SEQ ID NO: 914700
augugauuccagcggaaag

SEQ ID NO: 1023971 - RNA, 19 nt, Artificial Sequence
  Description of Artificial Sequence: Synthetic oligonucleotide
  Antisense strand to SEQ ID NO: 1023970
cuuuccgcuggaaucacau

SEQ ID NO: 1023972 - RNA, 19 nt, Artificial Sequence
  Description of Artificial Sequence: Synthetic oligonucleotide
  Sense strand starting at position 2257 of SEQ ID NO: 914700
ugugauuccagcggaaaga

SEQ ID NO: 1023973 - RNA, 19 nt, Artificial Sequence
  Description of Artificial Sequence: Synthetic oligonucleotide
  Antisense strand to SEQ ID NO: 1023972
ucuuuccgcuggaaucaca

SEQ ID NO: 1023974 - RNA, 19 nt, Artificial Sequence
  Description of Artificial Sequence: Synthetic oligonucleotide
  Sense strand starting at position 2474 of SEQ ID NO: 914700
ucugguucugcuuaccaga

SEQ ID NO: 1023975 - RNA, 19 nt, Artificial Sequence
  Description of Artificial Sequence: Synthetic oligonucleotide
  Antisense strand to SEQ ID NO: 1023974
ucugguaagcagaaccaga

SEQ ID NO: 1023976 - RNA, 19 nt, Artificial Sequence
  Description of Artificial Sequence: Synthetic oligonucleotide
  Sense strand starting at position 2479 of SEQ ID NO: 914700
uucugcuuaccagaagcaa

SEQ ID NO: 1023977 - RNA, 19 nt, Artificial Sequence
  Description of Artificial Sequence: Synthetic oligonucleotide
  Antisense strand to SEQ ID NO: 1023976
uugcuucugguaagcagaa

SEQ ID NO: 1023978 - RNA, 19 nt, Artificial Sequence
  Description of Artificial Sequence: Synthetic oligonucleotide
  Sense strand starting at position 2531 of SEQ ID NO: 914700
uuuacauuccagugggacu

SEQ ID NO: 1023979 - RNA, 19 nt, Artificial Sequence
  Description of Artificial Sequence: Synthetic oligonucleotide
  Antisense strand to SEQ ID NO: 1023978
agucccacuggaauguaaa

SEQ ID NO: 1023980 - RNA, 19 nt, Artificial Sequence
  Description of Artificial Sequence: Synthetic oligonucleotide
  Sense strand starting at position 2563 of SEQ ID NO: 914700
gagagauuauagccaucca

SEQ ID NO: 1023981 - RNA, 19 nt, Artificial Sequence
  Description of Artificial Sequence: Synthetic oligonucleotide
  Antisense strand to SEQ ID NO: 1023980
uggauggcuauaaucucuc

SEQ ID NO: 1023982 - RNA, 19 nt, Artificial Sequence
  Description of Artificial Sequence: Synthetic oligonucleotide
  Sense strand starting at position 2672 of SEQ ID NO: 914700
auggguguugcucaggauu

SEQ ID NO: 1023983 - RNA, 19 nt, Artificial Sequence
  Description of Artificial Sequence: Synthetic oligonucleotide
  Antisense strand to SEQ ID NO: 1023982
aauccugagcaacacccau

SEQ ID NO: 1023984 - RNA, 19 nt, Artificial Sequence
  Description of Artificial Sequence: Synthetic oligonucleotide
  Sense strand starting at position 2675 of SEQ ID NO: 914700
gguguugcucaggauugca

SEQ ID NO: 1023985 - RNA, 19 nt, Artificial Sequence
  Description of Artificial Sequence: Synthetic oligonucleotide
  Antisense strand to SEQ ID NO: 1023984
ugcaauccugagcaacacc

SEQ ID NO: 1023986 - RNA, 19 nt, Artificial Sequence
  Description of Artificial Sequence: Synthetic oligonucleotide
  Sense strand starting at position 3112 of SEQ ID NO: 914700
ccagauccacacugagauu

SEQ ID NO: 1023987 - RNA, 19 nt, Artificial Sequence
  Description of Artificial Sequence: Synthetic oligonucleotide
  Antisense strand to SEQ ID NO: 1023986
aaucucaguguggaucugg

SEQ ID NO: 1023988 - RNA, 19 nt, Artificial Sequence
  Description of Artificial Sequence: Synthetic oligonucleotide
  Sense strand starting at position 3123 of SEQ ID NO: 914700
cugagauucccaggguaga

SEQ ID NO: 1023989 - RNA, 19 nt, Artificial Sequence
  Description of Artificial Sequence: Synthetic oligonucleotide
  Antisense strand to SEQ ID NO: 1023988
ucuacccugggaaucucag

SEQ ID NO: 1023990 - RNA, 19 nt, Artificial Sequence
  Description of Artificial Sequence: Synthetic oligonucleotide
  Sense strand starting at position 3124 of SEQ ID NO: 914700
ugagauucccaggguagac

SEQ ID NO: 1023991 - RNA, 19 nt, Artificial Sequence
  Description of Artificial Sequence: Synthetic oligonucleotide
  Antisense strand to SEQ ID NO: 1023990
gucuacccugggaaucuca

SEQ ID NO: 1023992 - RNA, 19 nt, Artificial Sequence
  Description of Artificial Sequence: Synthetic oligonucleotide
  Sense strand starting at position 3278 of SEQ ID NO: 914700
aucaguuggcacugauuau

SEQ ID NO: 1023993 - RNA, 19 nt, Artificial Sequence
  Description of Artificial Sequence: Synthetic oligonucleotide
  Antisense strand to SEQ ID NO: 1023992
auaaucagugccaacugau

SEQ ID NO: 1023994 - RNA, 19 nt, Artificial Sequence
  Description of Artificial Sequence: Synthetic oligonucleotide
  Sense strand starting at position 3317 of SEQ ID NO: 914700
aacguucuagggugauaga

SEQ ID NO: 1023995 - RNA, 19 nt, Artificial Sequence
  Description of Artificial Sequence: Synthetic oligonucleotide
  Antisense strand to SEQ ID NO: 1023994
ucuaucacccuagaacguu

SEQ ID NO: 1023996 - RNA, 19 nt, Artificial Sequence
  Description of Artificial Sequence: Synthetic oligonucleotide
  Sense strand starting at position 3335 of SEQ ID NO: 914700
agcguuccagggugauaaa

SEQ ID NO: 1023997 - RNA, 19 nt, Artificial Sequence
  Description of Artificial Sequence: Synthetic oligonucleotide
  Antisense strand to SEQ ID NO: 1023996
uuuaucacccuggaacgcu

SEQ ID NO: 1023998 - RNA, 19 nt, Artificial Sequence
  Description of Artificial Sequence: Synthetic oligonucleotide
  Sense strand starting at position 3364 of SEQ ID NO: 914700
uuauguuuauggcugagca

SEQ ID NO: 1023999 - RNA, 19 nt, Artificial Sequence
  Description of Artificial Sequence: Synthetic oligonucleotide
  Antisense strand to SEQ ID NO: 1023998
ugcucagccauaaacauaa

SEQ ID NO: 1024000 - RNA, 19 nt, Artificial Sequence
  Description of Artificial Sequence: Synthetic oligonucleotide
  Sense strand starting at position 3366 of SEQ ID NO: 914700
auguuuauggcugagcaga

SEQ ID NO: 1024001 - RNA, 19 nt, Artificial Sequence
  Description of Artificial Sequence: Synthetic oligonucleotide
  Antisense strand to SEQ ID NO: 1024000
ucugcucagccauaaacau

SEQ ID NO: 1024002 - RNA, 19 nt, Artificial Sequence
  Description of Artificial Sequence: Synthetic oligonucleotide
  Sense strand starting at position 3405 of SEQ ID NO: 914700
ggaguauugcagcacugac

SEQ ID NO: 1024003 - RNA, 19 nt, Artificial Sequence
  Description of Artificial Sequence: Synthetic oligonucleotide
  Antisense strand to SEQ ID NO: 1024002
gucagugcugcaauacucc

SEQ ID NO: 1024004 - RNA, 19 nt, Artificial Sequence
  Description of Artificial Sequence: Synthetic oligonucleotide
  Sense strand starting at position 3413 of SEQ ID NO: 914700
gcagcacugacccaggaua

SEQ ID NO: 1024005 - RNA, 19 nt, Artificial Sequence
  Description of Artificial Sequence: Synthetic oligonucleotide
  Antisense strand to SEQ ID NO: 1024004
uauccugggucagugcugc

SEQ ID NO: 1024006 - RNA, 19 nt, Artificial Sequence
  Description of Artificial Sequence: Synthetic oligonucleotide
  Sense strand starting at position 3424 of SEQ ID NO: 914700
ccaggauacagucaagugu

SEQ ID NO: 1024007 - RNA, 19 nt, Artificial Sequence
  Description of Artificial Sequence: Synthetic oligonucleotide
  Antisense strand to SEQ ID NO: 1024006
acacuugacuguauccugg

SEQ ID NO: 1024008 - RNA, 19 nt, Artificial Sequence
  Description of Artificial Sequence: Synthetic oligonucleotide
  Sense strand starting at position 3449 of SEQ ID NO: 914700
uggugugguuaaguacaua

SEQ ID NO: 1024009 - RNA, 19 nt, Artificial Sequence
  Description of Artificial Sequence: Synthetic oligonucleotide
  Antisense strand to SEQ ID NO: 1024008
uauguacuuaaccacacca

SEQ ID NO: 1024010 - RNA, 19 nt, Artificial Sequence
  Description of Artificial Sequence: Synthetic oligonucleotide
  Sense strand starting at position 3478 of SEQ ID NO: 914700
uguugaaucuguucccaac

SEQ ID NO: 1024011 - RNA, 19 nt, Artificial Sequence
  Description of Artificial Sequence: Synthetic oligonucleotide
  Antisense strand to SEQ ID NO: 1024010
guugggaacagauucaaca

SEQ ID NO: 1024012 - RNA, 19 nt, Artificial Sequence
  Description of Artificial Sequence: Synthetic oligonucleotide
  Sense strand starting at position 3527 of SEQ ID NO: 914700
acucuuaucugauaaugag

SEQ ID NO: 1024013 - RNA, 19 nt, Artificial Sequence
  Description of Artificial Sequence: Synthetic oligonucleotide
  Antisense strand to SEQ ID NO: 1024012
cucauuaucagauaagagu

SEQ ID NO: 1024014 - RNA, 19 nt, Artificial Sequence
  Description of Artificial Sequence: Synthetic oligonucleotide
  Sense strand starting at position 3533 of SEQ ID NO: 914700
aucugauaaugagauuacu

SEQ ID NO: 1024015 - RNA, 19 nt, Artificial Sequence
  Description of Artificial Sequence: Synthetic oligonucleotide
  Antisense strand to SEQ ID NO: 1024014
aguaaucucauuaucagau

SEQ ID NO: 1024016 - RNA, 19 nt, Artificial Sequence
  Description of Artificial Sequence: Synthetic oligonucleotide
  Sense strand starting at position 3544 of SEQ ID NO: 914700
agauuacuauggcucccau

SEQ ID NO: 1024017 - RNA, 19 nt, Artificial Sequence
  Description of Artificial Sequence: Synthetic oligonucleotide
  Antisense strand to SEQ ID NO: 1024016
augggagccauaguaaucu

SEQ ID NO: 1024018 - RNA, 19 nt, Artificial Sequence
  Description of Artificial Sequence: Synthetic oligonucleotide
  Sense strand starting at position 3800 of SEQ ID NO: 914700
ggcaaacuauaagcaagau

SEQ ID NO: 1024019 - RNA, 19 nt, Artificial Sequence
  Description of Artificial Sequence: Synthetic oligonucleotide
  Antisense strand to SEQ ID NO: 1024018
aucuugcuuauaguuugcc

SEQ ID NO: 1024020 - RNA, 19 nt, Artificial Sequence
  Description of Artificial Sequence: Synthetic oligonucleotide
  Sense strand starting at position 3832 of SEQ ID NO: 914700
gcauaaguagaguaucauc

SEQ ID NO: 1024021 - RNA, 19 nt, Artificial Sequence
  Description of Artificial Sequence: Synthetic oligonucleotide
  Antisense strand to SEQ ID NO: 1024020
gaugauacucuacuuaugc

SEQ ID NO: 1024022 - RNA, 19 nt, Artificial Sequence
  Description of Artificial Sequence: Synthetic oligonucleotide
  Sense strand starting at position 3837 of SEQ ID NO: 914700
aguagaguaucaucuaauu

SEQ ID NO: 1024023 - RNA, 19 nt, Artificial Sequence
  Description of Artificial Sequence: Synthetic oligonucleotide
  Antisense strand to SEQ ID NO: 1024022
aauuagaugauacucuacu

SEQ ID NO: 1024024 - RNA, 19 nt, Artificial Sequence
  Description of Artificial Sequence: Synthetic oligonucleotide
  Sense strand starting at position 3842 of SEQ ID NO: 914700
aguaucaucuaauuggaga

SEQ ID NO: 1024025 - RNA, 19 nt, Artificial Sequence
  Description of Artificial Sequence: Synthetic oligonucleotide
  Antisense strand to SEQ ID NO: 1024024
ucuccaauuagaugauacu

SEQ ID NO: 1024026 - RNA, 19 nt, Artificial Sequence
  Description of Artificial Sequence: Synthetic oligonucleotide
  Sense strand starting at position 3878 of SEQ ID NO: 914700
cuggaugauuaauuguuga

SEQ ID NO: 1024027 - RNA, 19 nt, Artificial Sequence
  Description of Artificial Sequence: Synthetic oligonucleotide
  Antisense strand to SEQ ID NO: 1024026
ucaacaauuaaucauccag

SEQ ID NO: 1024028 - RNA, 19 nt, Artificial Sequence
  Description of Artificial Sequence: Synthetic oligonucleotide
  Sense strand starting at position 3881 of SEQ ID NO: 914700
gaugauuaauuguugaagu

SEQ ID NO: 1024029 - RNA, 19 nt, Artificial Sequence
  Description of Artificial Sequence: Synthetic oligonucleotide
  Antisense strand to SEQ ID NO: 1024028
acuucaacaauuaaucauc

SEQ ID NO: 1024030 - RNA, 19 nt, Artificial Sequence
  Description of Artificial Sequence: Synthetic oligonucleotide
  Sense strand starting at position 3894 of SEQ ID NO: 914700
ugaaguuaaauucggaaga

SEQ ID NO: 1024031 - RNA, 19 nt, Artificial Sequence
  Description of Artificial Sequence: Synthetic oligonucleotide
  Antisense strand to SEQ ID NO: 1024030
ucuuccgaauuuaacuuca

SEQ ID NO: 1024032 - RNA, 19 nt, Artificial Sequence
  Description of Artificial Sequence: Synthetic oligonucleotide
  Sense strand starting at position 339 of SEQ ID NO: 914701
uggucauaguucuuuaaga

SEQ ID NO: 1024033 - RNA, 19 nt, Artificial Sequence
  Description of Artificial Sequence: Synthetic oligonucleotide
  Antisense strand to SEQ ID NO: 1024032
ucuuaaagaacuaugacca

SEQ ID NO: 1024034 - RNA, 19 nt, Artificial Sequence
  Description of Artificial Sequence: Synthetic oligonucleotide
  Sense strand starting at position 340 of SEQ ID NO: 914701
ggucauaguucuuuaagag

SEQ ID NO: 1024035 - RNA, 19 nt, Artificial Sequence
  Description of Artificial Sequence: Synthetic oligonucleotide
  Antisense strand to SEQ ID NO: 1024034
cucuuaaagaacuaugacc

SEQ ID NO: 1024036 - RNA, 19 nt, Artificial Sequence
  Description of Artificial Sequence: Synthetic oligonucleotide
  Sense strand starting at position 341 of SEQ ID NO: 914701
gucauaguucuuuaagagg

SEQ ID NO: 1024037 - RNA, 19 nt, Artificial Sequence
  Description of Artificial Sequence: Synthetic oligonucleotide
  Antisense strand to SEQ ID NO: 1024036
ccucuuaaagaacuaugac

SEQ ID NO: 1024038 - RNA, 19 nt, Artificial Sequence
  Description of Artificial Sequence: Synthetic oligonucleotide
  Sense strand starting at position 344 of SEQ ID NO: 914701
auaguucuuuaagaggaca

SEQ ID NO: 1024039 - RNA, 19 nt, Artificial Sequence
  Description of Artificial Sequence: Synthetic oligonucleotide
  Antisense strand to SEQ ID NO: 1024038
uguccucuuaaagaacuau

SEQ ID NO: 1024040 - RNA, 19 nt, Artificial Sequence
  Description of Artificial Sequence: Synthetic oligonucleotide
  Sense strand starting at position 485 of SEQ ID NO: 914701
cuaccuggcuuauggagaa

SEQ ID NO: 1024041 - RNA, 19 nt, Artificial Sequence
  Description of Artificial Sequence: Synthetic oligonucleotide
  Antisense strand to SEQ ID NO: 1024040
uucuccauaagccagguag

SEQ ID NO: 1024042 - RNA, 19 nt, Artificial Sequence
  Description of Artificial Sequence: Synthetic oligonucleotide
  Sense strand starting at position 916 of SEQ ID NO: 914701
uuaccaguccagugagaag

SEQ ID NO: 1024043 - RNA, 19 nt, Artificial Sequence
  Description of Artificial Sequence: Synthetic oligonucleotide
  Antisense strand to SEQ ID NO: 1024042
cuucucacuggacugguaa

SEQ ID NO: 1024044 - RNA, 19 nt, Artificial Sequence
  Description of Artificial Sequence: Synthetic oligonucleotide
  Sense strand starting at position 1392 of SEQ ID NO: 914701
cgguggaguucucggccua

SEQ ID NO: 1024045 - RNA, 19 nt, Artificial Sequence
  Description of Artificial Sequence: Synthetic oligonucleotide
  Antisense strand to SEQ ID NO: 1024044
uaggccgagaacuccaccg

SEQ ID NO: 1024046 - RNA, 19 nt, Artificial Sequence
  Description of Artificial Sequence: Synthetic oligonucleotide
  Sense strand starting at position 1393 of SEQ ID NO: 914701
gguggaguucucggccuac

SEQ ID NO: 1024047 - RNA, 19 nt, Artificial Sequence
  Description of Artificial Sequence: Synthetic oligonucleotide
  Antisense strand to SEQ ID NO: 1024046
guaggccgagaacuccacc

SEQ ID NO: 1024048 - RNA, 19 nt, Artificial Sequence
  Description of Artificial Sequence: Synthetic oligonucleotide
  Sense strand starting at position 2195 of SEQ ID NO: 914701
agcgguagucuguaagguu

SEQ ID NO: 1024049 - RNA, 19 nt, Artificial Sequence
  Description of Artificial Sequence: Synthetic oligonucleotide
  Antisense strand to SEQ ID NO: 1024048
aaccuuacagacuaccgcu

SEQ ID NO: 1024050 - RNA, 19 nt, Artificial Sequence
  Description of Artificial Sequence: Synthetic oligonucleotide
  Sense strand starting at position 2196 of SEQ ID NO: 914701
gcgguagucuguaagguua

SEQ ID NO: 1024051 - RNA, 19 nt, Artificial Sequence
  Description of Artificial Sequence: Synthetic oligonucleotide
  Antisense strand to SEQ ID NO: 1024050
uaaccuuacagacuaccgc

SEQ ID NO: 1024052 - RNA, 19 nt, Artificial Sequence
  Description of Artificial Sequence: Synthetic oligonucleotide
  Sense strand starting at position 2203 of SEQ ID NO: 914701
ucuguaagguuaggugaaa

SEQ ID NO: 1024053 - RNA, 19 nt, Artificial Sequence
  Description of Artificial Sequence: Synthetic oligonucleotide
  Antisense strand to SEQ ID NO: 1024052
uuucaccuaaccuuacaga

SEQ ID NO: 1024054 - RNA, 19 nt, Artificial Sequence
  Description of Artificial Sequence: Synthetic oligonucleotide
  Sense strand starting at position 2406 of SEQ ID NO: 914701
cagugacacucacguuuga

SEQ ID NO: 1024055 - RNA, 19 nt, Artificial Sequence
  Description of Artificial Sequence: Synthetic oligonucleotide
  Antisense strand to SEQ ID NO: 1024054
ucaaacgugagugucacug

SEQ ID NO: 1024056 - RNA, 19 nt, Artificial Sequence
  Description of Artificial Sequence: Synthetic oligonucleotide
  Sense strand starting at position 2434 of SEQ ID NO: 914701
cggcugugugcuugguaga

SEQ ID NO: 1024057 - RNA, 19 nt, Artificial Sequence
  Description of Artificial Sequence: Synthetic oligonucleotide
  Antisense strand to SEQ ID NO: 1024056
ucuaccaagcacacagccg

SEQ ID NO: 1024058 - RNA, 19 nt, Artificial Sequence
  Description of Artificial Sequence: Synthetic oligonucleotide
  Sense strand starting at position 2435 of SEQ ID NO: 914701
ggcugugugcuugguagaa

SEQ ID NO: 1024059 - RNA, 19 nt, Artificial Sequence
  Description of Artificial Sequence: Synthetic oligonucleotide
  Antisense strand to SEQ ID NO: 1024058
uucuaccaagcacacagcc

SEQ ID NO: 1024060 - RNA, 19 nt, Artificial Sequence
  Description of Artificial Sequence: Synthetic oligonucleotide
  Sense strand starting at position 2437 of SEQ ID NO: 914701
cugugugcuugguagaauu

SEQ ID NO: 1024061 - RNA, 19 nt, Artificial Sequence
  Description of Artificial Sequence: Synthetic oligonucleotide
  Antisense strand to SEQ ID NO: 1024060
aauucuaccaagcacacag

SEQ ID NO: 1024062 - RNA, 19 nt, Artificial Sequence
  Description of Artificial Sequence: Synthetic oligonucleotide
  Sense strand starting at position 2447 of SEQ ID NO: 914701
gguagaauuugucauccaa

SEQ ID NO: 1024063 - RNA, 19 nt, Artificial Sequence
  Description of Artificial Sequence: Synthetic oligonucleotide
  Antisense strand to SEQ ID NO: 1024062
uuggaugacaaauucuacc

SEQ ID NO: 1024064 - RNA, 19 nt, Artificial Sequence
  Description of Artificial Sequence: Synthetic oligonucleotide
  Sense strand starting at position 2460 of SEQ ID NO: 914701
auccaauacaggcguguaa

SEQ ID NO: 1024065 - RNA, 19 nt, Artificial Sequence
  Description of Artificial Sequence: Synthetic oligonucleotide
  Antisense strand to SEQ ID NO: 1024064
uuacacgccuguauuggau

SEQ ID NO: 1024066 - RNA, 19 nt, Artificial Sequence
  Description of Artificial Sequence: Synthetic oligonucleotide
  Sense strand starting at position 2462 of SEQ ID NO: 914701
ccaauacaggcguguaaca

SEQ ID NO: 1024067 - RNA, 19 nt, Artificial Sequence
  Description of Artificial Sequence: Synthetic oligonucleotide
  Antisense strand to SEQ ID NO: 1024066
uguuacacgccuguauugg

SEQ ID NO: 1024068 - RNA, 19 nt, Artificial Sequence
  Description of Artificial Sequence: Synthetic oligonucleotide
  Sense strand starting at position 2520 of SEQ ID NO: 914701
ccgagaugauguccaauga

SEQ ID NO: 1024069 - RNA, 19 nt, Artificial Sequence
  Description of Artificial Sequence: Synthetic oligonucleotide
  Antisense strand to SEQ ID NO: 1024068
ucauuggacaucaucucgg

SEQ ID NO: 1024070 - RNA, 19 nt, Artificial Sequence
  Description of Artificial Sequence: Synthetic oligonucleotide
  Sense strand starting at position 2614 of SEQ ID NO: 914701
ugggcugugacucaugacu

SEQ ID NO: 1024071 - RNA, 19 nt, Artificial Sequence
  Description of Artificial Sequence: Synthetic oligonucleotide
  Antisense strand to SEQ ID NO: 1024070
agucaugagucacagccca

SEQ ID NO: 1024072 - RNA, 19 nt, Artificial Sequence
  Description of Artificial Sequence: Synthetic oligonucleotide
  Sense strand starting at position 2619 of SEQ ID NO: 914701
ugugacucaugacuggaau

SEQ ID NO: 1024073 - RNA, 19 nt, Artificial Sequence
  Description of Artificial Sequence: Synthetic oligonucleotide
  Antisense strand to SEQ ID NO: 1024072
auuccagucaugagucaca

SEQ ID NO: 1024074 - RNA, 19 nt, Artificial Sequence
  Description of Artificial Sequence: Synthetic oligonucleotide
  Sense strand starting at position 2620 of SEQ ID NO: 914701
gugacucaugacuggaaug

SEQ ID NO: 1024075 - RNA, 19 nt, Artificial Sequence
  Description of Artificial Sequence: Synthetic oligonucleotide
  Antisense strand to SEQ ID NO: 1024074
cauuccagucaugagucac

SEQ ID NO: 1024076 - RNA, 19 nt, Artificial Sequence
  Description of Artificial Sequence: Synthetic oligonucleotide
  Sense strand starting at position 2736 of SEQ ID NO: 914701
cagcuaaaccuagguugaa

SEQ ID NO: 1024077 - RNA, 19 nt, Artificial Sequence
  Description of Artificial Sequence: Synthetic oligonucleotide
  Antisense strand to SEQ ID NO: 1024076
uucaaccuagguuuagcug

SEQ ID NO: 1024078 - RNA, 19 nt, Artificial Sequence
  Description of Artificial Sequence: Synthetic oligonucleotide
  Sense strand starting at position 2833 of SEQ ID NO: 914701
ggaagacaaucaugaugcu

SEQ ID NO: 1024079 - RNA, 19 nt, Artificial Sequence
  Description of Artificial Sequence: Synthetic oligonucleotide
  Antisense strand to SEQ ID NO: 1024078
agcaucaugauugucuucc

SEQ ID NO: 1024080 - RNA, 19 nt, Artificial Sequence
  Description of Artificial Sequence: Synthetic oligonucleotide
  Sense strand starting at position 2842 of SEQ ID NO: 914701
ucaugaugcugaccucaga

SEQ ID NO: 1024081 - RNA, 19 nt, Artificial Sequence
  Description of Artificial Sequence: Synthetic oligonucleotide
  Antisense strand to SEQ ID NO: 1024080
ucugaggucagcaucauga

SEQ ID NO: 1024082 - RNA, 19 nt, Artificial Sequence
  Description of Artificial Sequence: Synthetic oligonucleotide
  Sense strand starting at position 2892 of SEQ ID NO: 914701
ugaagcauugugcgugacu

SEQ ID NO: 1024083 - RNA, 19 nt, Artificial Sequence
  Description of Artificial Sequence: Synthetic oligonucleotide
  Antisense strand to SEQ ID NO: 1024082
agucacgcacaaugcuuca

SEQ ID NO: 1024084 - RNA, 19 nt, Artificial Sequence
  Description of Artificial Sequence: Synthetic oligonucleotide
  Sense strand starting at position 2985 of SEQ ID NO: 914701
uggcauguccagugacauc

SEQ ID NO: 1024085 - RNA, 19 nt, Artificial Sequence
  Description of Artificial Sequence: Synthetic oligonucleotide
  Antisense strand to SEQ ID NO: 1024084
gaugucacuggacaugcca

SEQ ID NO: 1024086 - RNA, 19 nt, Artificial Sequence
  Description of Artificial Sequence: Synthetic oligonucleotide
  Sense strand starting at position 3029 of SEQ ID NO: 914701
aguaaucgcugucaggaau

SEQ ID NO: 1024087 - RNA, 19 nt, Artificial Sequence
  Description of Artificial Sequence: Synthetic oligonucleotide
  Antisense strand to SEQ ID NO: 1024086
auuccugacagcgauuacu

SEQ ID NO: 1024088 - RNA, 19 nt, Artificial Sequence
  Description of Artificial Sequence: Synthetic oligonucleotide
  Sense strand starting at position 3041 of SEQ ID NO: 914701
caggaauugucuccugguu

SEQ ID NO: 1024089 - RNA, 19 nt, Artificial Sequence
  Description of Artificial Sequence: Synthetic oligonucleotide
  Antisense strand to SEQ ID NO: 1024088
aaccaggagacaauuccug

SEQ ID NO: 1024090 - RNA, 19 nt, Artificial Sequence
  Description of Artificial Sequence: Synthetic oligonucleotide
  Sense strand starting at position 3293 of SEQ ID NO: 914701
cugggcuugggcuaggaua

SEQ ID NO: 1024091 - RNA, 19 nt, Artificial Sequence
  Description of Artificial Sequence: Synthetic oligonucleotide
  Antisense strand to SEQ ID NO: 1024090
uauccuagcccaagcccag

SEQ ID NO: 1024092 - RNA, 19 nt, Artificial Sequence
  Description of Artificial Sequence: Synthetic oligonucleotide
  Sense strand starting at position 3295 of SEQ ID NO: 914701
gggcuugggcuaggauaga

SEQ ID NO: 1024093 - RNA, 19 nt, Artificial Sequence
  Description of Artificial Sequence: Synthetic oligonucleotide
  Antisense strand to SEQ ID NO: 1024092
ucuauccuagcccaagccc

SEQ ID NO: 1024094 - RNA, 19 nt, Artificial Sequence
  Description of Artificial Sequence: Synthetic oligonucleotide
  Sense strand starting at position 3309 of SEQ ID NO: 914701
auagacaagucaggagaau

SEQ ID NO: 1024095 - RNA, 19 nt, Artificial Sequence
  Description of Artificial Sequence: Synthetic oligonucleotide
  Antisense strand to SEQ ID NO: 1024094
auucuccugacuugucuau

SEQ ID NO: 1024096 - RNA, 19 nt, Artificial Sequence
  Description of Artificial Sequence: Synthetic oligonucleotide
  Sense strand starting at position 3320 of SEQ ID NO: 914701
aggagaaucucaggcagca

SEQ ID NO: 1024097 - RNA, 19 nt, Artificial Sequence
  Description of Artificial Sequence: Synthetic oligonucleotide
  Antisense strand to SEQ ID NO: 1024096
ugcugccugagauucuccu

SEQ ID NO: 1024098 - RNA, 19 nt, Artificial Sequence
  Description of Artificial Sequence: Synthetic oligonucleotide
  Sense strand starting at position 148 of SEQ ID NO: 914702
uggucauaguucuuuaaga

SEQ ID NO: 1024099 - RNA, 19 nt, Artificial Sequence
  Description of Artificial Sequence: Synthetic oligonucleotide
  Antisense strand to SEQ ID NO: 1024098
ucuuaaagaacuaugacca

SEQ ID NO: 1024100 - RNA, 19 nt, Artificial Sequence
  Description of Artificial Sequence: Synthetic oligonucleotide
  Sense strand starting at position 149 of SEQ ID NO: 914702
ggucauaguucuuuaagag

SEQ ID NO: 1024101 - RNA, 19 nt, Artificial Sequence
  Description of Artificial Sequence: Synthetic oligonucleotide
  Antisense strand to SEQ ID NO: 1024100
cucuuaaagaacuaugacc

SEQ ID NO: 1024102 - RNA, 19 nt, Artificial Sequence
  Description of Artificial Sequence: Synthetic oligonucleotide
  Sense strand starting at position 150 of SEQ ID NO: 914702
gucauaguucuuuaagagg

SEQ ID NO: 1024103 - RNA, 19 nt, Artificial Sequence
  Description of Artificial Sequence: Synthetic oligonucleotide
  Antisense strand to SEQ ID NO: 1024102
ccucuuaaagaacuaugac

SEQ ID NO: 1024104 - RNA, 19 nt, Artificial Sequence
  Description of Artificial Sequence: Synthetic oligonucleotide
  Sense strand starting at position 153 of SEQ ID NO: 914702
auaguucuuuaagaggaca

SEQ ID NO: 1024105 - RNA, 19 nt, Artificial Sequence
  Description of Artificial Sequence: Synthetic oligonucleotide
  Antisense strand to SEQ ID NO: 1024104
uguccucuuaaagaacuau

SEQ ID NO: 1024106 - RNA, 19 nt, Artificial Sequence
  Description of Artificial Sequence: Synthetic oligonucleotide
  Sense strand starting at position 294 of SEQ ID NO: 914702
cuaccuggcuuauggagaa

SEQ ID NO: 1024107 - RNA, 19 nt, Artificial Sequence
  Description of Artificial Sequence: Synthetic oligonucleotide
  Antisense strand to SEQ ID NO: 1024106
uucuccauaagccagguag

SEQ ID NO: 1024108 - RNA, 19 nt, Artificial Sequence
  Description of Artificial Sequence: Synthetic oligonucleotide
  Sense strand starting at position 725 of SEQ ID NO: 914702
uuaccaguccagugagaag

SEQ ID NO: 1024109 - RNA, 19 nt, Artificial Sequence
  Description of Artificial Sequence: Synthetic oligonucleotide
  Antisense strand to SEQ ID NO: 1024108
cuucucacuggacugguaa

SEQ ID NO: 1024110 - RNA, 19 nt, Artificial Sequence
  Description of Artificial Sequence: Synthetic oligonucleotide
  Sense strand starting at position 1201 of SEQ ID NO: 914702
cgguggaguucucggccua

SEQ ID NO: 1024111 - RNA, 19 nt, Artificial Sequence
  Description of Artificial Sequence: Synthetic oligonucleotide
  Antisense strand to SEQ ID NO: 1024110
uaggccgagaacuccaccg

SEQ ID NO: 1024112 - RNA, 19 nt, Artificial Sequence
  Description of Artificial Sequence: Synthetic oligonucleotide
  Sense strand starting at position 1202 of SEQ ID NO: 914702
gguggaguucucggccuac

SEQ ID NO: 1024113 - RNA, 19 nt, Artificial Sequence
  Description of Artificial Sequence: Synthetic oligonucleotide
  Antisense strand to SEQ ID NO: 1024112
guaggccgagaacuccacc

SEQ ID NO: 1024114 - RNA, 19 nt, Artificial Sequence
  Description of Artificial Sequence: Synthetic oligonucleotide
  Sense strand starting at position 2004 of SEQ ID NO: 914702
agcgguagucuguaagguu

SEQ ID NO: 1024115 - RNA, 19 nt, Artificial Sequence
  Description of Artificial Sequence: Synthetic oligonucleotide
  Antisense strand to SEQ ID NO: 1024114
aaccuuacagacuaccgcu

SEQ ID NO: 1024116 - RNA, 19 nt, Artificial Sequence
  Description of Artificial Sequence: Synthetic oligonucleotide
  Sense strand starting at position 2005 of SEQ ID NO: 914702
gcgguagucuguaagguua

SEQ ID NO: 1024117 - RNA, 19 nt, Artificial Sequence
  Description of Artificial Sequence: Synthetic oligonucleotide
  Antisense strand to SEQ ID NO: 1024116
uaaccuuacagacuaccgc

SEQ ID NO: 1024118 - RNA, 19 nt, Artificial Sequence
  Description of Artificial Sequence: Synthetic oligonucleotide
  Sense strand starting at position 2012 of SEQ ID NO: 914702
ucuguaagguuaggugaaa

SEQ ID NO: 1024119 - RNA, 19 nt, Artificial Sequence
  Description of Artificial Sequence: Synthetic oligonucleotide
  Antisense strand to SEQ ID NO: 1024118
uuucaccuaaccuuacaga

SEQ ID NO: 1024120 - RNA, 19 nt, Artificial Sequence
  Description of Artificial Sequence: Synthetic oligonucleotide
  Sense strand starting at position 2215 of SEQ ID NO: 914702
cagugacacucacguuuga

SEQ ID NO: 1024121 - RNA, 19 nt, Artificial Sequence
  Description of Artificial Sequence: Synthetic oligonucleotide
  Antisense strand to SEQ ID NO: 1024120
ucaaacgugagugucacug

SEQ ID NO: 1024122 - RNA, 19 nt, Artificial Sequence
  Description of Artificial Sequence: Synthetic oligonucleotide
  Sense strand starting at position 2243 of SEQ ID NO: 914702
cggcugugugcuugguaga

SEQ ID NO: 1024123 - RNA, 19 nt, Artificial Sequence
  Description of Artificial Sequence: Synthetic oligonucleotide
  Antisense strand to SEQ ID NO: 1024122
ucuaccaagcacacagccg

SEQ ID NO: 1024124 - RNA, 19 nt, Artificial Sequence
  Description of Artificial Sequence: Synthetic oligonucleotide
  Sense strand starting at position 2244 of SEQ ID NO: 914702
ggcugugugcuugguagaa

SEQ ID NO: 1024125 - RNA, 19 nt, Artificial Sequence
  Description of Artificial Sequence: Synthetic oligonucleotide
  Antisense strand to SEQ ID NO: 1024124
uucuaccaagcacacagcc

SEQ ID NO: 1024126 - RNA, 19 nt, Artificial Sequence
  Description of Artificial Sequence: Synthetic oligonucleotide
  Sense strand starting at position 2246 of SEQ ID NO: 914702
cugugugcuugguagaauu

SEQ ID NO: 1024127 - RNA, 19 nt, Artificial Sequence
  Description of Artificial Sequence: Synthetic oligonucleotide
  Antisense strand to SEQ ID NO: 1024126
aauucuaccaagcacacag

SEQ ID NO: 1024128 - RNA, 19 nt, Artificial Sequence
  Description of Artificial Sequence: Synthetic oligonucleotide
  Sense strand starting at position 2256 of SEQ ID NO: 914702
gguagaauuugucauccaa

SEQ ID NO: 1024129 - RNA, 19 nt, Artificial Sequence
  Description of Artificial Sequence: Synthetic oligonucleotide
  Antisense strand to SEQ ID NO: 1024128
uuggaugacaaauucuacc

SEQ ID NO: 1024130 - RNA, 19 nt, Artificial Sequence
  Description of Artificial Sequence: Synthetic oligonucleotide
  Sense strand starting at position 2269 of SEQ ID NO: 914702
auccaauacaggcguguaa

SEQ ID NO: 1024131 - RNA, 19 nt, Artificial Sequence
  Description of Artificial Sequence: Synthetic oligonucleotide
  Antisense strand to SEQ ID NO: 1024130
uuacacgccuguauuggau

SEQ ID NO: 1024132 - RNA, 19 nt, Artificial Sequence
  Description of Artificial Sequence: Synthetic oligonucleotide
  Sense strand starting at position 2271 of SEQ ID NO: 914702
ccaauacaggcguguaaca

SEQ ID NO: 1024133 - RNA, 19 nt, Artificial Sequence
  Description of Artificial Sequence: Synthetic oligonucleotide
  Antisense strand to SEQ ID NO: 1024132
uguuacacgccuguauugg

SEQ ID NO: 1024134 - RNA, 19 nt, Artificial Sequence
  Description of Artificial Sequence: Synthetic oligonucleotide
  Sense strand starting at position 2329 of SEQ ID NO: 914702
ccgagaugauguccaauga

SEQ ID NO: 1024135 - RNA, 19 nt, Artificial Sequence
  Description of Artificial Sequence: Synthetic oligonucleotide
  Antisense strand to SEQ ID NO: 1024134
ucauuggacaucaucucgg

SEQ ID NO: 1024136 - RNA, 19 nt, Artificial Sequence
  Description of Artificial Sequence: Synthetic oligonucleotide
  Sense strand starting at position 2423 of SEQ ID NO: 914702
ugggcugugacucaugacu

SEQ ID NO: 1024137 - RNA, 19 nt, Artificial Sequence
  Description of Artificial Sequence: Synthetic oligonucleotide
  Antisense strand to SEQ ID NO: 1024136
agucaugagucacagccca

SEQ ID NO: 1024138 - RNA, 19 nt, Artificial Sequence
  Description of Artificial Sequence: Synthetic oligonucleotide
  Sense strand starting at position 2428 of SEQ ID NO: 914702
ugugacucaugacuggaau

SEQ ID NO: 1024139 - RNA, 19 nt, Artificial Sequence
  Description of Artificial Sequence: Synthetic oligonucleotide
  Antisense strand to SEQ ID NO: 1024138
auuccagucaugagucaca

SEQ ID NO: 1024140 - RNA, 19 nt, Artificial Sequence
  Description of Artificial Sequence: Synthetic oligonucleotide
  Sense strand starting at position 2429 of SEQ ID NO: 914702
gugacucaugacuggaaug

SEQ ID NO: 1024141 - RNA, 19 nt, Artificial Sequence
  Description of Artificial Sequence: Synthetic oligonucleotide
  Antisense strand to SEQ ID NO: 1024140
cauuccagucaugagucac

SEQ ID NO: 1024142 - RNA, 19 nt, Artificial Sequence
  Description of Artificial Sequence: Synthetic oligonucleotide
  Sense strand starting at position 2545 of SEQ ID NO: 914702
cagcuaaaccuagguugaa

SEQ ID NO: 1024143 - RNA, 19 nt, Artificial Sequence
  Description of Artificial Sequence: Synthetic oligonucleotide
  Antisense strand to SEQ ID NO: 1024142
uucaaccuagguuuagcug

SEQ ID NO: 1024144 - RNA, 19 nt, Artificial Sequence
  Description of Artificial Sequence: Synthetic oligonucleotide
  Sense strand starting at position 2642 of SEQ ID NO: 914702
ggaagacaaucaugaugcu

SEQ ID NO: 1024145 - RNA, 19 nt, Artificial Sequence
  Description of Artificial Sequence: Synthetic oligonucleotide
  Antisense strand to SEQ ID NO: 1024144
agcaucaugauugucuucc

SEQ ID NO: 1024146 - RNA, 19 nt, Artificial Sequence
  Description of Artificial Sequence: Synthetic oligonucleotide
  Sense strand starting at position 2651 of SEQ ID NO: 914702
ucaugaugcugaccucaga

SEQ ID NO: 1024147 - RNA, 19 nt, Artificial Sequence
  Description of Artificial Sequence: Synthetic oligonucleotide
  Antisense strand to SEQ ID NO: 1024146
ucugaggucagcaucauga

SEQ ID NO: 1024148 - RNA, 19 nt, Artificial Sequence
  Description of Artificial Sequence: Synthetic oligonucleotide
  Sense strand starting at position 2701 of SEQ ID NO: 914702
ugaagcauugugcgugacu

SEQ ID NO: 1024149 - RNA, 19 nt, Artificial Sequence
  Description of Artificial Sequence: Synthetic oligonucleotide
  Antisense strand to SEQ ID NO: 1024148
agucacgcacaaugcuuca

SEQ ID NO: 1024150 - RNA, 19 nt, Artificial Sequence
  Description of Artificial Sequence: Synthetic oligonucleotide
  Sense strand starting at position 2794 of SEQ ID NO: 914702
uggcauguccagugacauc

SEQ ID NO: 1024151 - RNA, 19 nt, Artificial Sequence
  Description of Artificial Sequence: Synthetic oligonucleotide
  Antisense strand to SEQ ID NO: 1024150
gaugucacuggacaugcca

SEQ ID NO: 1024152 - RNA, 19 nt, Artificial Sequence
  Description of Artificial Sequence: Synthetic oligonucleotide
  Sense strand starting at position 2838 of SEQ ID NO: 914702
aguaaucgcugucaggaau

SEQ ID NO: 1024153 - RNA, 19 nt, Artificial Sequence
  Description of Artificial Sequence: Synthetic oligonucleotide
  Antisense strand to SEQ ID NO: 1024152
auuccugacagcgauuacu

SEQ ID NO: 1024154 - RNA, 19 nt, Artificial Sequence
  Description of Artificial Sequence: Synthetic oligonucleotide
  Sense strand starting at position 2850 of SEQ ID NO: 914702
caggaauugucuccugguu

SEQ ID NO: 1024155 - RNA, 19 nt, Artificial Sequence
  Description of Artificial Sequence: Synthetic oligonucleotide
  Antisense strand to SEQ ID NO: 1024154
aaccaggagacaauuccug

SEQ ID NO: 1024156 - RNA, 19 nt, Artificial Sequence
  Description of Artificial Sequence: Synthetic oligonucleotide
  Sense strand starting at position 3102 of SEQ ID NO: 914702
cugggcuugggcuaggaua

SEQ ID NO: 1024157 - RNA, 19 nt, Artificial Sequence
  Description of Artificial Sequence: Synthetic oligonucleotide
  Antisense strand to SEQ ID NO: 1024156
uauccuagcccaagcccag

SEQ ID NO: 1024158 - RNA, 19 nt, Artificial Sequence
  Description of Artificial Sequence: Synthetic oligonucleotide
  Sense strand starting at position 3104 of SEQ ID NO: 914702
gggcuugggcuaggauaga

SEQ ID NO: 1024159 - RNA, 19 nt, Artificial Sequence
  Description of Artificial Sequence: Synthetic oligonucleotide
  Antisense strand to SEQ ID NO: 1024158
ucuauccuagcccaagccc

SEQ ID NO: 1024160 - RNA, 19 nt, Artificial Sequence
  Description of Artificial Sequence: Synthetic oligonucleotide
  Sense strand starting at position 3118 of SEQ ID NO: 914702
auagacaagucaggagaau

SEQ ID NO: 1024161 - RNA, 19 nt, Artificial Sequence
  Description of Artificial Sequence: Synthetic oligonucleotide
  Antisense strand to SEQ ID NO: 1024160
auucuccugacuugucuau

SEQ ID NO: 1024162 - RNA, 19 nt, Artificial Sequence
  Description of Artificial Sequence: Synthetic oligonucleotide
  Sense strand starting at position 3129 of SEQ ID NO: 914702
aggagaaucucaggcagca

SEQ ID NO: 1024163 - RNA, 19 nt, Artificial Sequence
  Description of Artificial Sequence: Synthetic oligonucleotide
  Antisense strand to SEQ ID NO: 1024162
ugcugccugagauucuccu

SEQ ID NO: 1024164 - RNA, 19 nt, Artificial Sequence
  Description of Artificial Sequence: Synthetic oligonucleotide
  Sense strand starting at position 229 of SEQ ID NO: 914703
aagguuuacuaccuggaau

SEQ ID NO: 1024165 - RNA, 19 nt, Artificial Sequence
  Description of Artificial Sequence: Synthetic oligonucleotide
  Antisense strand to SEQ ID NO: 1024164
auuccagguaguaaaccuu

SEQ ID NO: 1024166 - RNA, 19 nt, Artificial Sequence
  Description of Artificial Sequence: Synthetic oligonucleotide
  Sense strand starting at position 231 of SEQ ID NO: 914703
gguuuacuaccuggaaucu

SEQ ID NO: 1024167 - RNA, 19 nt, Artificial Sequence
  Description of Artificial Sequence: Synthetic oligonucleotide
  Antisense strand to SEQ ID NO: 1024166
agauuccagguaguaaacc

SEQ ID NO: 1024168 - RNA, 19 nt, Artificial Sequence
  Description of Artificial Sequence: Synthetic oligonucleotide
  Sense strand starting at position 269 of SEQ ID NO: 914703
uccauacccuguugaagau

SEQ ID NO: 1024169 - RNA, 19 nt, Artificial Sequence
  Description of Artificial Sequence: Synthetic oligonucleotide
  Antisense strand to SEQ ID NO: 1024168
aucuucaacaggguaugga

SEQ ID NO: 1024170 - RNA, 19 nt, Artificial Sequence
  Description of Artificial Sequence: Synthetic oligonucleotide
  Sense strand starting at position 378 of SEQ ID NO: 914703
ggagaaggguaauggagau

SEQ ID NO: 1024171 - RNA, 19 nt, Artificial Sequence
  Description of Artificial Sequence: Synthetic oligonucleotide
  Antisense strand to SEQ ID NO: 1024170
aucuccauuacccuucucc

SEQ ID NO: 1024172 - RNA, 19 nt, Artificial Sequence
  Description of Artificial Sequence: Synthetic oligonucleotide
  Sense strand starting at position 467 of SEQ ID NO: 914703
cccuguacucacugcuaga

SEQ ID NO: 1024173 - RNA, 19 nt, Artificial Sequence
  Description of Artificial Sequence: Synthetic oligonucleotide
  Antisense strand to SEQ ID NO: 1024172
ucuagcagugaguacaggg

SEQ ID NO: 1024174 - RNA, 19 nt, Artificial Sequence
  Description of Artificial Sequence: Synthetic oligonucleotide
  Sense strand starting at position 499 of SEQ ID NO: 914703
ggaggaggcauguauugua

SEQ ID NO: 1024175 - RNA, 19 nt, Artificial Sequence
  Description of Artificial Sequence: Synthetic oligonucleotide
  Antisense strand to SEQ ID NO: 1024174
uacaauacaugccuccucc

SEQ ID NO: 1024176 - RNA, 19 nt, Artificial Sequence
  Description of Artificial Sequence: Synthetic oligonucleotide
  Sense strand starting at position 502 of SEQ ID NO: 914703
ggaggcauguauuguaaug

SEQ ID NO: 1024177 - RNA, 19 nt, Artificial Sequence
  Description of Artificial Sequence: Synthetic oligonucleotide
  Antisense strand to SEQ ID NO: 1024176
cauuacaauacaugccucc

SEQ ID NO: 1024178 - RNA, 19 nt, Artificial Sequence
  Description of Artificial Sequence: Synthetic oligonucleotide
  Sense strand starting at position 504 of SEQ ID NO: 914703
aggcauguauuguaaugaa

SEQ ID NO: 1024179 - RNA, 19 nt, Artificial Sequence
  Description of Artificial Sequence: Synthetic oligonucleotide
  Antisense strand to SEQ ID NO: 1024178
uucauuacaauacaugccu

SEQ ID NO: 1024180 - RNA, 19 nt, Artificial Sequence
  Description of Artificial Sequence: Synthetic oligonucleotide
  Sense strand starting at position 1323 of SEQ ID NO: 914703
uggucauaguucuuuaaga

SEQ ID NO: 1024181 - RNA, 19 nt, Artificial Sequence
  Description of Artificial Sequence: Synthetic oligonucleotide
  Antisense strand to SEQ ID NO: 1024180
ucuuaaagaacuaugacca

SEQ ID NO: 1024182 - RNA, 19 nt, Artificial Sequence
  Description of Artificial Sequence: Synthetic oligonucleotide
  Sense strand starting at position 1324 of SEQ ID NO: 914703
ggucauaguucuuuaagag

SEQ ID NO: 1024183 - RNA, 19 nt, Artificial Sequence
  Description of Artificial Sequence: Synthetic oligonucleotide
  Antisense strand to SEQ ID NO: 1024182
cucuuaaagaacuaugacc

SEQ ID NO: 1024184 - RNA, 19 nt, Artificial Sequence
  Description of Artificial Sequence: Synthetic oligonucleotide
  Sense strand starting at position 1325 of SEQ ID NO: 914703
gucauaguucuuuaagagg

SEQ ID NO: 1024185 - RNA, 19 nt, Artificial Sequence
  Description of Artificial Sequence: Synthetic oligonucleotide
  Antisense strand to SEQ ID NO: 1024184
ccucuuaaagaacuaugac

SEQ ID NO: 1024186 - RNA, 19 nt, Artificial Sequence
  Description of Artificial Sequence: Synthetic oligonucleotide
  Sense strand starting at position 1328 of SEQ ID NO: 914703
auaguucuuuaagaggaca

SEQ ID NO: 1024187 - RNA, 19 nt, Artificial Sequence
  Description of Artificial Sequence: Synthetic oligonucleotide
  Antisense strand to SEQ ID NO: 1024186
uguccucuuaaagaacuau

SEQ ID NO: 1024188 - RNA, 19 nt, Artificial Sequence
  Description of Artificial Sequence: Synthetic oligonucleotide
  Sense strand starting at position 1469 of SEQ ID NO: 914703
cuaccuggcuuauggagaa

SEQ ID NO: 1024189 - RNA, 19 nt, Artificial Sequence
  Description of Artificial Sequence: Synthetic oligonucleotide
  Antisense strand to SEQ ID NO: 1024188
uucuccauaagccagguag

SEQ ID NO: 1024190 - RNA, 19 nt, Artificial Sequence
  Description of Artificial Sequence: Synthetic oligonucleotide
  Sense strand starting at position 1900 of SEQ ID NO: 914703
uuaccaguccagugagaag

SEQ ID NO: 1024191 - RNA, 19 nt, Artificial Sequence
  Description of Artificial Sequence: Synthetic oligonucleotide
  Antisense strand to SEQ ID NO: 1024190
cuucucacuggacugguaa

SEQ ID NO: 1024192 - RNA, 19 nt, Artificial Sequence
  Description of Artificial Sequence: Synthetic oligonucleotide
  Sense strand starting at position 2376 of SEQ ID NO: 914703
cgguggaguucucggccua

SEQ ID NO: 1024193 - RNA, 19 nt, Artificial Sequence
  Description of Artificial Sequence: Synthetic oligonucleotide
  Antisense strand to SEQ ID NO: 1024192
uaggccgagaacuccaccg

SEQ ID NO: 1024194 - RNA, 19 nt, Artificial Sequence
  Description of Artificial Sequence: Synthetic oligonucleotide
  Sense strand starting at position 2377 of SEQ ID NO: 914703
gguggaguucucggccuac

SEQ ID NO: 1024195 - RNA, 19 nt, Artificial Sequence
  Description of Artificial Sequence: Synthetic oligonucleotide
  Antisense strand to SEQ ID NO: 1024194
guaggccgagaacuccacc

SEQ ID NO: 1024196 - RNA, 19 nt, Artificial Sequence
  Description of Artificial Sequence: Synthetic oligonucleotide
  Sense strand starting at position 3179 of SEQ ID NO: 914703
agcgguagucuguaagguu

SEQ ID NO: 1024197 - RNA, 19 nt, Artificial Sequence
  Description of Artificial Sequence: Synthetic oligonucleotide
  Antisense strand to SEQ ID NO: 1024196
aaccuuacagacuaccgcu

SEQ ID NO: 1024198 - RNA, 19 nt, Artificial Sequence
  Description of Artificial Sequence: Synthetic oligonucleotide
  Sense strand starting at position 3180 of SEQ ID NO: 914703
gcgguagucuguaagguua

SEQ ID NO: 1024199 - RNA, 19 nt, Artificial Sequence
  Description of Artificial Sequence: Synthetic oligonucleotide
  Antisense strand to SEQ ID NO: 1024198
uaaccuuacagacuaccgc

SEQ ID NO: 1024200 - RNA, 19 nt, Artificial Sequence
  Description of Artificial Sequence: Synthetic oligonucleotide
  Sense strand starting at position 3187 of SEQ ID NO: 914703
ucuguaagguuaggugaaa

SEQ ID NO: 1024201 - RNA, 19 nt, Artificial Sequence
  Description of Artificial Sequence: Synthetic oligonucleotide
  Antisense strand to SEQ ID NO: 1024200
uuucaccuaaccuuacaga

SEQ ID NO: 1024202 - RNA, 19 nt, Artificial Sequence
  Description of Artificial Sequence: Synthetic oligonucleotide
  Sense strand starting at position 3390 of SEQ ID NO: 914703
cagugacacucacguuuga

SEQ ID NO: 1024203 - RNA, 19 nt, Artificial Sequence
  Description of Artificial Sequence: Synthetic oligonucleotide
  Antisense strand to SEQ ID NO: 1024202
ucaaacgugagugucacug

SEQ ID NO: 1024204 - RNA, 19 nt, Artificial Sequence
  Description of Artificial Sequence: Synthetic oligonucleotide
  Sense strand starting at position 3418 of SEQ ID NO: 914703
cggcugugugcuugguaga

SEQ ID NO: 1024205 - RNA, 19 nt, Artificial Sequence
  Description of Artificial Sequence: Synthetic oligonucleotide
  Antisense strand to SEQ ID NO: 1024204
ucuaccaagcacacagccg

SEQ ID NO: 1024206 - RNA, 19 nt, Artificial Sequence
  Description of Artificial Sequence: Synthetic oligonucleotide
  Sense strand starting at position 3419 of SEQ ID NO: 914703
ggcugugugcuugguagaa

SEQ ID NO: 1024207 - RNA, 19 nt, Artificial Sequence
  Description of Artificial Sequence: Synthetic oligonucleotide
  Antisense strand to SEQ ID NO: 1024206
uucuaccaagcacacagcc

SEQ ID NO: 1024208 - RNA, 19 nt, Artificial Sequence
  Description of Artificial Sequence: Synthetic oligonucleotide
  Sense strand starting at position 3421 of SEQ ID NO: 914703
cugugugcuugguagaauu

SEQ ID NO: 1024209 - RNA, 19 nt, Artificial Sequence
  Description of Artificial Sequence: Synthetic oligonucleotide
  Antisense strand to SEQ ID NO: 1024208
aauucuaccaagcacacag

SEQ ID NO: 1024210 - RNA, 19 nt, Artificial Sequence
  Description of Artificial Sequence: Synthetic oligonucleotide
  Sense strand starting at position 3431 of SEQ ID NO: 914703
gguagaauuugucauccaa

SEQ ID NO: 1024211 - RNA, 19 nt, Artificial Sequence
  Description of Artificial Sequence: Synthetic oligonucleotide
  Antisense strand to SEQ ID NO: 1024210
uuggaugacaaauucuacc

SEQ ID NO: 1024212 - RNA, 19 nt, Artificial Sequence
  Description of Artificial Sequence: Synthetic oligonucleotide
  Sense strand starting at position 3444 of SEQ ID NO: 914703
auccaauacaggcguguaa

SEQ ID NO: 1024213 - RNA, 19 nt, Artificial Sequence
  Description of Artificial Sequence: Synthetic oligonucleotide
  Antisense strand to SEQ ID NO: 1024212
uuacacgccuguauuggau

SEQ ID NO: 1024214 - RNA, 19 nt, Artificial Sequence
  Description of Artificial Sequence: Synthetic oligonucleotide
  Sense strand starting at position 3446 of SEQ ID NO: 914703
ccaauacaggcguguaaca

SEQ ID NO: 1024215 - RNA, 19 nt, Artificial Sequence
  Description of Artificial Sequence: Synthetic oligonucleotide
  Antisense strand to SEQ ID NO: 1024214
uguuacacgccuguauugg

SEQ ID NO: 1024216 - RNA, 19 nt, Artificial Sequence
  Description of Artificial Sequence: Synthetic oligonucleotide
  Sense strand starting at position 3504 of SEQ ID NO: 914703
ccgagaugauguccaauga

SEQ ID NO: 1024217 - RNA, 19 nt, Artificial Sequence
  Description of Artificial Sequence: Synthetic oligonucleotide
  Antisense strand to SEQ ID NO: 1024216
ucauuggacaucaucucgg

SEQ ID NO: 1024218 - RNA, 19 nt, Artificial Sequence
  Description of Artificial Sequence: Synthetic oligonucleotide
  Sense strand starting at position 3598 of SEQ ID NO: 914703
ugggcugugacucaugacu

SEQ ID NO: 1024219 - RNA, 19 nt, Artificial Sequence
  Description of Artificial Sequence: Synthetic oligonucleotide
  Antisense strand to SEQ ID NO: 1024218
agucaugagucacagccca

SEQ ID NO: 1024220 - RNA, 19 nt, Artificial Sequence
  Description of Artificial Sequence: Synthetic oligonucleotide
  Sense strand starting at position 3603 of SEQ ID NO: 914703
ugugacucaugacuggaau

SEQ ID NO: 1024221 - RNA, 19 nt, Artificial Sequence
  Description of Artificial Sequence: Synthetic oligonucleotide
  Antisense strand to SEQ ID NO: 1024220
auuccagucaugagucaca

SEQ ID NO: 1024222 - RNA, 19 nt, Artificial Sequence
  Description of Artificial Sequence: Synthetic oligonucleotide
  Sense strand starting at position 3604 of SEQ ID NO: 914703
gugacucaugacuggaaug

SEQ ID NO: 1024223 - RNA, 19 nt, Artificial Sequence
  Description of Artificial Sequence: Synthetic oligonucleotide
  Antisense strand to SEQ ID NO: 1024222
cauuccagucaugagucac

SEQ ID NO: 1024224 - RNA, 19 nt, Artificial Sequence
  Description of Artificial Sequence: Synthetic oligonucleotide
  Sense strand starting at position 3720 of SEQ ID NO: 914703
cagcuaaaccuagguugaa

SEQ ID NO: 1024225 - RNA, 19 nt, Artificial Sequence
  Description of Artificial Sequence: Synthetic oligonucleotide
  Antisense strand to SEQ ID NO: 1024224
uucaaccuagguuuagcug

SEQ ID NO: 1024226 - RNA, 19 nt, Artificial Sequence
  Description of Artificial Sequence: Synthetic oligonucleotide
  Sense strand starting at position 3817 of SEQ ID NO: 914703
ggaagacaaucaugaugcu

SEQ ID NO: 1024227 - RNA, 19 nt, Artificial Sequence
  Description of Artificial Sequence: Synthetic oligonucleotide
  Antisense strand to SEQ ID NO: 1024226
agcaucaugauugucuucc

SEQ ID NO: 1024228 - RNA, 19 nt, Artificial Sequence
  Description of Artificial Sequence: Synthetic oligonucleotide
  Sense strand starting at position 3826 of SEQ ID NO: 914703
ucaugaugcugaccucaga

SEQ ID NO: 1024229 - RNA, 19 nt, Artificial Sequence
  Description of Artificial Sequence: Synthetic oligonucleotide
  Antisense strand to SEQ ID NO: 1024228
ucugaggucagcaucauga

SEQ ID NO: 1024230 - RNA, 19 nt, Artificial Sequence
  Description of Artificial Sequence: Synthetic oligonucleotide
  Sense strand starting at position 3876 of SEQ ID NO: 914703
ugaagcauugugcgugacu

SEQ ID NO: 1024231 - RNA, 19 nt, Artificial Sequence
  Description of Artificial Sequence: Synthetic oligonucleotide
  Antisense strand to SEQ ID NO: 1024230
agucacgcacaaugcuuca

SEQ ID NO: 1024232 - RNA, 19 nt, Artificial Sequence
  Description of Artificial Sequence: Synthetic oligonucleotide
  Sense strand starting at position 3969 of SEQ ID NO: 914703
uggcauguccagugacauc

SEQ ID NO: 1024233 - RNA, 19 nt, Artificial Sequence
  Description of Artificial Sequence: Synthetic oligonucleotide
  Antisense strand to SEQ ID NO: 1024232
gaugucacuggacaugcca

SEQ ID NO: 1024234 - RNA, 19 nt, Artificial Sequence
  Description of Artificial Sequence: Synthetic oligonucleotide
  Sense strand starting at position 1 of SEQ ID NO: 914704
cagaguaagugguaacugu

SEQ ID NO: 1024235 - RNA, 19 nt, Artificial Sequence
  Description of Artificial Sequence: Synthetic oligonucleotide
  Antisense strand to SEQ ID NO: 1024234
acaguuaccacuuacucug

SEQ ID NO: 1024236 - RNA, 19 nt, Artificial Sequence
  Description of Artificial Sequence: Synthetic oligonucleotide
  Sense strand starting at position 8 of SEQ ID NO: 914704
agugguaacuguccugauu

SEQ ID NO: 1024237 - RNA, 19 nt, Artificial Sequence
  Description of Artificial Sequence: Synthetic oligonucleotide
  Antisense strand to SEQ ID NO: 1024236
aaucaggacaguuaccacu

SEQ ID NO: 1024238 - RNA, 19 nt, Artificial Sequence
  Description of Artificial Sequence: Synthetic oligonucleotide
  Sense strand starting at position 49 of SEQ ID NO: 914704
gggagcaucucauuacuaa

SEQ ID NO: 1024239 - RNA, 19 nt, Artificial Sequence
  Description of Artificial Sequence: Synthetic oligonucleotide
  Antisense strand to SEQ ID NO: 1024238
uuaguaaugagaugcuccc

SEQ ID NO: 1024240 - RNA, 19 nt, Artificial Sequence
  Description of Artificial Sequence: Synthetic oligonucleotide
  Sense strand starting at position 221 of SEQ ID NO: 914704
cuuauaggcucuuauagcu

SEQ ID NO: 1024241 - RNA, 19 nt, Artificial Sequence
  Description of Artificial Sequence: Synthetic oligonucleotide
  Antisense strand to SEQ ID NO: 1024240
agcuauaagagccuauaag

SEQ ID NO: 1024242 - RNA, 19 nt, Artificial Sequence
  Description of Artificial Sequence: Synthetic oligonucleotide
  Sense strand starting at position 258 of SEQ ID NO: 914704
ucaguuaucucaucuccag

SEQ ID NO: 1024243 - RNA, 19 nt, Artificial Sequence
  Description of Artificial Sequence: Synthetic oligonucleotide
  Antisense strand to SEQ ID NO: 1024242
cuggagaugagauaacuga

SEQ ID NO: 1024244 - RNA, 19 nt, Artificial Sequence
  Description of Artificial Sequence: Synthetic oligonucleotide
  Sense strand starting at position 261 of SEQ ID NO: 914704
guuaucucaucuccagauu

SEQ ID NO: 1024245 - RNA, 19 nt, Artificial Sequence
  Description of Artificial Sequence: Synthetic oligonucleotide
  Antisense strand to SEQ ID NO: 1024244
aaucuggagaugagauaac

SEQ ID NO: 1024246 - RNA, 19 nt, Artificial Sequence
  Description of Artificial Sequence: Synthetic oligonucleotide
  Sense strand starting at position 388 of SEQ ID NO: 914704
cuugaauucucugagccca

SEQ ID NO: 1024247 - RNA, 19 nt, Artificial Sequence
  Description of Artificial Sequence: Synthetic oligonucleotide
  Antisense strand to SEQ ID NO: 1024246
ugggcucagagaauucaag

SEQ ID NO: 1024248 - RNA, 19 nt, Artificial Sequence
  Description of Artificial Sequence: Synthetic oligonucleotide
  Sense strand starting at position 390 of SEQ ID NO: 914704
ugaauucucugagcccaac

SEQ ID NO: 1024249 - RNA, 19 nt, Artificial Sequence
  Description of Artificial Sequence: Synthetic oligonucleotide
  Antisense strand to SEQ ID NO: 1024248
guugggcucagagaauuca

SEQ ID NO: 1024250 - RNA, 19 nt, Artificial Sequence
  Description of Artificial Sequence: Synthetic oligonucleotide
  Sense strand starting at position 1087 of SEQ ID NO: 914704
ggagcccgcucagauagau

SEQ ID NO: 1024251 - RNA, 19 nt, Artificial Sequence
  Description of Artificial Sequence: Synthetic oligonucleotide
  Antisense strand to SEQ ID NO: 1024250
aucuaucugagcgggcucc

SEQ ID NO: 1024252 - RNA, 19 nt, Artificial Sequence
  Description of Artificial Sequence: Synthetic oligonucleotide
  Sense strand starting at position 1631 of SEQ ID NO: 914704
cgccgcuuaccuuaauagu

SEQ ID NO: 1024253 - RNA, 19 nt, Artificial Sequence
  Description of Artificial Sequence: Synthetic oligonucleotide
  Antisense strand to SEQ ID NO: 1024252
acuauuaagguaagcggcg

SEQ ID NO: 1024254 - RNA, 19 nt, Artificial Sequence
  Description of Artificial Sequence: Synthetic oligonucleotide
  Sense strand starting at position 2097 of SEQ ID NO: 914704
cggagaugcccagacacau

SEQ ID NO: 1024255 - RNA, 19 nt, Artificial Sequence
  Description of Artificial Sequence: Synthetic oligonucleotide
  Antisense strand to SEQ ID NO: 1024254
augugucugggcaucuccg

SEQ ID NO: 1024256 - RNA, 19 nt, Artificial Sequence
  Description of Artificial Sequence: Synthetic oligonucleotide
  Sense strand starting at position 2135 of SEQ ID NO: 914704
gauacuugcuccugggaga

SEQ ID NO: 1024257 - RNA, 19 nt, Artificial Sequence
  Description of Artificial Sequence: Synthetic oligonucleotide
  Antisense strand to SEQ ID NO: 1024256
ucucccaggagcaaguauc

SEQ ID NO: 1024258 - RNA, 19 nt, Artificial Sequence
  Description of Artificial Sequence: Synthetic oligonucleotide
  Sense strand starting at position 2136 of SEQ ID NO: 914704
auacuugcuccugggagau

SEQ ID NO: 1024259 - RNA, 19 nt, Artificial Sequence
  Description of Artificial Sequence: Synthetic oligonucleotide
  Antisense strand to SEQ ID NO: 1024258
aucucccaggagcaaguau

SEQ ID NO: 1024260 - RNA, 19 nt, Artificial Sequence
  Description of Artificial Sequence: Synthetic oligonucleotide
  Sense strand starting at position 2138 of SEQ ID NO: 914704
acuugcuccugggagauaa

SEQ ID NO: 1024261 - RNA, 19 nt, Artificial Sequence
  Description of Artificial Sequence: Synthetic oligonucleotide
  Antisense strand to SEQ ID NO: 1024260
uuaucucccaggagcaagu

SEQ ID NO: 1024262 - RNA, 19 nt, Artificial Sequence
  Description of Artificial Sequence: Synthetic oligonucleotide
  Sense strand starting at position 2156 of SEQ ID NO: 914704
agagcuagccgggaacaau

SEQ ID NO: 1024263 - RNA, 19 nt, Artificial Sequence
  Description of Artificial Sequence: Synthetic oligonucleotide
  Antisense strand to SEQ ID NO: 1024262
auuguucccggcuagcucu

SEQ ID NO: 1024264 - RNA, 19 nt, Artificial Sequence
  Description of Artificial Sequence: Synthetic oligonucleotide
  Sense strand starting at position 2325 of SEQ ID NO: 914704
uuccguuucuucccacaga

SEQ ID NO: 1024265 - RNA, 19 nt, Artificial Sequence
  Description of Artificial Sequence: Synthetic oligonucleotide
  Antisense strand to SEQ ID NO: 1024264
ucugugggaagaaacggaa

SEQ ID NO: 1024266 - RNA, 19 nt, Artificial Sequence
  Description of Artificial Sequence: Synthetic oligonucleotide
  Sense strand starting at position 2326 of SEQ ID NO: 914704
uccguuucuucccacagau

SEQ ID NO: 1024267 - RNA, 19 nt, Artificial Sequence
  Description of Artificial Sequence: Synthetic oligonucleotide
  Antisense strand to SEQ ID NO: 1024266
aucugugggaagaaacgga

SEQ ID NO: 1024268 - RNA, 19 nt, Artificial Sequence
  Description of Artificial Sequence: Synthetic oligonucleotide
  Sense strand starting at position 2328 of SEQ ID NO: 914704
cguuucuucccacagauac

SEQ ID NO: 1024269 - RNA, 19 nt, Artificial Sequence
  Description of Artificial Sequence: Synthetic oligonucleotide
  Antisense strand to SEQ ID NO: 1024268
guaucugugggaagaaacg

SEQ ID NO: 1024270 - RNA, 19 nt, Artificial Sequence
  Description of Artificial Sequence: Synthetic oligonucleotide
  Sense strand starting at position 2638 of SEQ ID NO: 914704
ggcgcauuguuaggagaag

SEQ ID NO: 1024271 - RNA, 19 nt, Artificial Sequence
  Description of Artificial Sequence: Synthetic oligonucleotide
  Antisense strand to SEQ ID NO: 1024270
cuucuccuaacaaugcgcc

SEQ ID NO: 1024272 - RNA, 19 nt, Artificial Sequence
  Description of Artificial Sequence: Synthetic oligonucleotide
  Sense strand starting at position 2740 of SEQ ID NO: 914704
ccgcaucuucucgagccaa

SEQ ID NO: 1024273 - RNA, 19 nt, Artificial Sequence
  Description of Artificial Sequence: Synthetic oligonucleotide
  Antisense strand to SEQ ID NO: 1024272
uuggcucgagaagaugcgg

SEQ ID NO: 1024274 - RNA, 19 nt, Artificial Sequence
  Description of Artificial Sequence: Synthetic oligonucleotide
  Sense strand starting at position 2851 of SEQ ID NO: 914704
ggacguucccucuaggaca

SEQ ID NO: 1024275 - RNA, 19 nt, Artificial Sequence
  Description of Artificial Sequence: Synthetic oligonucleotide
  Antisense strand to SEQ ID NO: 1024274
uguccuagagggaacgucc

SEQ ID NO: 1024276 - RNA, 19 nt, Artificial Sequence
  Description of Artificial Sequence: Synthetic oligonucleotide
  Sense strand starting at position 3209 of SEQ ID NO: 914704
ccaagucaauuggaagaaa

SEQ ID NO: 1024277 - RNA, 19 nt, Artificial Sequence
  Description of Artificial Sequence: Synthetic oligonucleotide
  Antisense strand to SEQ ID NO: 1024276
uuucuuccaauugacuugg

SEQ ID NO: 1024278 - RNA, 19 nt, Artificial Sequence
  Description of Artificial Sequence: Synthetic oligonucleotide
  Sense strand starting at position 3293 of SEQ ID NO: 914704
gcaauugagcccgagagcu

SEQ ID NO: 1024279 - RNA, 19 nt, Artificial Sequence
  Description of Artificial Sequence: Synthetic oligonucleotide
  Antisense strand to SEQ ID NO: 1024278
agcucucgggcucaauugc

SEQ ID NO: 1024280 - RNA, 19 nt, Artificial Sequence
  Description of Artificial Sequence: Synthetic oligonucleotide
  Sense strand starting at position 3515 of SEQ ID NO: 914704
gcuccugucugcuucucaa

SEQ ID NO: 1024281 - RNA, 19 nt, Artificial Sequence
  Description of Artificial Sequence: Synthetic oligonucleotide
  Antisense strand to SEQ ID NO: 1024280
uugagaagcagacaggagc

SEQ ID NO: 1024282 - RNA, 19 nt, Artificial Sequence
  Description of Artificial Sequence: Synthetic oligonucleotide
  Sense strand starting at position 3712 of SEQ ID NO: 914704
acgugcuuuccagagagga

SEQ ID NO: 1024283 - RNA, 19 nt, Artificial Sequence
  Description of Artificial Sequence: Synthetic oligonucleotide
  Antisense strand to SEQ ID NO: 1024282
uccucucuggaaagcacgu

SEQ ID NO: 1024284 - RNA, 19 nt, Artificial Sequence
  Description of Artificial Sequence: Synthetic oligonucleotide
  Sense strand starting at position 3729 of SEQ ID NO: 914704
gaaagagguuaacgggaaa

SEQ ID NO: 1024285 - RNA, 19 nt, Artificial Sequence
  Description of Artificial Sequence: Synthetic oligonucleotide
  Antisense strand to SEQ ID NO: 1024284
uuucccguuaaccucuuuc

SEQ ID NO: 1024286 - RNA, 19 nt, Artificial Sequence
  Description of Artificial Sequence: Synthetic oligonucleotide
  Sense strand starting at position 57 of SEQ ID NO: 914705
cuggcaaauguucgaugga

SEQ ID NO: 1024287 - RNA, 19 nt, Artificial Sequence
  Description of Artificial Sequence: Synthetic oligonucleotide
  Antisense strand to SEQ ID NO: 1024286
uccaucgaacauuugccag

SEQ ID NO: 1024288 - RNA, 19 nt, Artificial Sequence
  Description of Artificial Sequence: Synthetic oligonucleotide
  Sense strand starting at position 374 of SEQ ID NO: 914705
gguuccuaugagugggaga

SEQ ID NO: 1024289 - RNA, 19 nt, Artificial Sequence
  Description of Artificial Sequence: Synthetic oligonucleotide
  Antisense strand to SEQ ID NO: 1024288
ucucccacucauaggaacc

SEQ ID NO: 1024290 - RNA, 19 nt, Artificial Sequence
  Description of Artificial Sequence: Synthetic oligonucleotide
  Sense strand starting at position 376 of SEQ ID NO: 914705
uuccuaugagugggagaga

SEQ ID NO: 1024291 - RNA, 19 nt, Artificial Sequence
  Description of Artificial Sequence: Synthetic oligonucleotide
  Antisense strand to SEQ ID NO: 1024290
ucucucccacucauaggaa

SEQ ID NO: 1024292 - RNA, 19 nt, Artificial Sequence
  Description of Artificial Sequence: Synthetic oligonucleotide
  Sense strand starting at position 422 of SEQ ID NO: 914705
uuacaauccucagugcaga

SEQ ID NO: 1024293 - RNA, 19 nt, Artificial Sequence
  Description of Artificial Sequence: Synthetic oligonucleotide
  Antisense strand to SEQ ID NO: 1024292
ucugcacugaggauuguaa

SEQ ID NO: 1024294 - RNA, 19 nt, Artificial Sequence
  Description of Artificial Sequence: Synthetic oligonucleotide
  Sense strand starting at position 486 of SEQ ID NO: 914705
gugggaguacccgaguacu

SEQ ID NO: 1024295 - RNA, 19 nt, Artificial Sequence
  Description of Artificial Sequence: Synthetic oligonucleotide
  Antisense strand to SEQ ID NO: 1024294
aguacucggguacucccac

SEQ ID NO: 1024296 - RNA, 19 nt, Artificial Sequence
  Description of Artificial Sequence: Synthetic oligonucleotide
  Sense strand starting at position 489 of SEQ ID NO: 914705
ggaguacccgaguacucuu

SEQ ID NO: 1024297 - RNA, 19 nt, Artificial Sequence
  Description of Artificial Sequence: Synthetic oligonucleotide
  Antisense strand to SEQ ID NO: 1024296
aagaguacucggguacucc

SEQ ID NO: 1024298 - RNA, 19 nt, Artificial Sequence
  Description of Artificial Sequence: Synthetic oligonucleotide
  Sense strand starting at position 497 of SEQ ID NO: 914705
cgaguacucuuccuaaacu

SEQ ID NO: 1024299 - RNA, 19 nt, Artificial Sequence
  Description of Artificial Sequence: Synthetic oligonucleotide
  Antisense strand to SEQ ID NO: 1024298
aguuuaggaagaguacucg

SEQ ID NO: 1024300 - RNA, 19 nt, Artificial Sequence
  Description of Artificial Sequence: Synthetic oligonucleotide
  Sense strand starting at position 553 of SEQ ID NO: 914705
uuagucuaaccuuaaagua

SEQ ID NO: 1024301 - RNA, 19 nt, Artificial Sequence
  Description of Artificial Sequence: Synthetic oligonucleotide
  Antisense strand to SEQ ID NO: 1024300
uacuuuaagguuagacuaa

SEQ ID NO: 1024302 - RNA, 19 nt, Artificial Sequence
  Description of Artificial Sequence: Synthetic oligonucleotide
  Sense strand starting at position 617 of SEQ ID NO: 914705
ugguuauugcuacaugaau

SEQ ID NO: 1024303 - RNA, 19 nt, Artificial Sequence
  Description of Artificial Sequence: Synthetic oligonucleotide
  Antisense strand to SEQ ID NO: 1024302
auucauguagcaauaacca

SEQ ID NO: 1024304 - RNA, 19 nt, Artificial Sequence
  Description of Artificial Sequence: Synthetic oligonucleotide
  Sense strand starting at position 663 of SEQ ID NO: 914705
ucacucaggcauugucaau

SEQ ID NO: 1024305 - RNA, 19 nt, Artificial Sequence
  Description of Artificial Sequence: Synthetic oligonucleotide
  Antisense strand to SEQ ID NO: 1024304
auugacaaugccugaguga

SEQ ID NO: 1024306 - RNA, 19 nt, Artificial Sequence
  Description of Artificial Sequence: Synthetic oligonucleotide
  Sense strand starting at position 669 of SEQ ID NO: 914705
aggcauugucaaugaaaca

SEQ ID NO: 1024307 - RNA, 19 nt, Artificial Sequence
  Description of Artificial Sequence: Synthetic oligonucleotide
  Antisense strand to SEQ ID NO: 1024306
uguuucauugacaaugccu

SEQ ID NO: 1024308 - RNA, 19 nt, Artificial Sequence
  Description of Artificial Sequence: Synthetic oligonucleotide
  Sense strand starting at position 697 of SEQ ID NO: 914705
gggccaagccucuaggauu

SEQ ID NO: 1024309 - RNA, 19 nt, Artificial Sequence
  Description of Artificial Sequence: Synthetic oligonucleotide
  Antisense strand to SEQ ID NO: 1024308
aauccuagaggcuuggccc

SEQ ID NO: 1024310 - RNA, 19 nt, Artificial Sequence
  Description of Artificial Sequence: Synthetic oligonucleotide
  Sense strand starting at position 717 of SEQ ID NO: 914705
ggccuucccuuccugaaau

SEQ ID NO: 1024311 - RNA, 19 nt, Artificial Sequence
  Description of Artificial Sequence: Synthetic oligonucleotide
  Antisense strand to SEQ ID NO: 1024310
auuucaggaagggaaggcc

SEQ ID NO: 1024312 - RNA, 19 nt, Artificial Sequence
  Description of Artificial Sequence: Synthetic oligonucleotide
  Sense strand starting at position 802 of SEQ ID NO: 914705
gaggguuggacgcauaauu

SEQ ID NO: 1024313 - RNA, 19 nt, Artificial Sequence
  Description of Artificial Sequence: Synthetic oligonucleotide
  Antisense strand to SEQ ID NO: 1024312
aauuaugcguccaacccuc

SEQ ID NO: 1024314 - RNA, 19 nt, Artificial Sequence
  Description of Artificial Sequence: Synthetic oligonucleotide
  Sense strand starting at position 880 of SEQ ID NO: 914705
cuggcauuugcccgacacu

SEQ ID NO: 1024315 - RNA, 19 nt, Artificial Sequence
  Description of Artificial Sequence: Synthetic oligonucleotide
  Antisense strand to SEQ ID NO: 1024314
agugucgggcaaaugccag

SEQ ID NO: 1024316 - RNA, 19 nt, Artificial Sequence
  Description of Artificial Sequence: Synthetic oligonucleotide
  Sense strand starting at position 1226 of SEQ ID NO: 914705
guuuacauucuuggaaacu

SEQ ID NO: 1024317 - RNA, 19 nt, Artificial Sequence
  Description of Artificial Sequence: Synthetic oligonucleotide
  Antisense strand to SEQ ID NO: 1024316
aguuuccaagaauguaaac

SEQ ID NO: 1024318 - RNA, 19 nt, Artificial Sequence
  Description of Artificial Sequence: Synthetic oligonucleotide
  Sense strand starting at position 1297 of SEQ ID NO: 914705
agcaaucugcgcuuccgaa

SEQ ID NO: 1024319 - RNA, 19 nt, Artificial Sequence
  Description of Artificial Sequence: Synthetic oligonucleotide
  Antisense strand to SEQ ID NO: 1024318
uucggaagcgcagauugcu

SEQ ID NO: 1024320 - RNA, 19 nt, Artificial Sequence
  Description of Artificial Sequence: Synthetic oligonucleotide
  Sense strand starting at position 1358 of SEQ ID NO: 914705
gugucucaccuguaggaga

SEQ ID NO: 1024321 - RNA, 19 nt, Artificial Sequence
  Description of Artificial Sequence: Synthetic oligonucleotide
  Antisense strand to SEQ ID NO: 1024320
ucuccuacaggugagacac

SEQ ID NO: 1024322 - RNA, 19 nt, Artificial Sequence
  Description of Artificial Sequence: Synthetic oligonucleotide
  Sense strand starting at position 1800 of SEQ ID NO: 914705
gucaucaccuguuuaaaga

SEQ ID NO: 1024323 - RNA, 19 nt, Artificial Sequence
  Description of Artificial Sequence: Synthetic oligonucleotide
  Antisense strand to SEQ ID NO: 1024322
ucuuuaaacaggugaugac

SEQ ID NO: 1024324 - RNA, 19 nt, Artificial Sequence
  Description of Artificial Sequence: Synthetic oligonucleotide
  Sense strand starting at position 1826 of SEQ ID NO: 914705
augucuuaccuugauguaa

SEQ ID NO: 1024325 - RNA, 19 nt, Artificial Sequence
  Description of Artificial Sequence: Synthetic oligonucleotide
  Antisense strand to SEQ ID NO: 1024324
uuacaucaagguaagacau

SEQ ID NO: 1024326 - RNA, 19 nt, Artificial Sequence
  Description of Artificial Sequence: Synthetic oligonucleotide
  Sense strand starting at position 2239 of SEQ ID NO: 914705
cagcuuguucuggaaacca

SEQ ID NO: 1024327 - RNA, 19 nt, Artificial Sequence
  Description of Artificial Sequence: Synthetic oligonucleotide
  Antisense strand to SEQ ID NO: 1024326
ugguuuccagaacaagcug

SEQ ID NO: 1024328 - RNA, 19 nt, Artificial Sequence
  Description of Artificial Sequence: Synthetic oligonucleotide
  Sense strand starting at position 2275 of SEQ ID NO: 914705
gugcguguugaggagagaa

SEQ ID NO: 1024329 - RNA, 19 nt, Artificial Sequence
  Description of Artificial Sequence: Synthetic oligonucleotide
  Antisense strand to SEQ ID NO: 1024328
uucucuccucaacacgcac

SEQ ID NO: 1024330 - RNA, 19 nt, Artificial Sequence
  Description of Artificial Sequence: Synthetic oligonucleotide
  Sense strand starting at position 2464 of SEQ ID NO: 914705
ggaagacuaacgcaagguu

SEQ ID NO: 1024331 - RNA, 19 nt, Artificial Sequence
  Description of Artificial Sequence: Synthetic oligonucleotide
  Antisense strand to SEQ ID NO: 1024330
aaccuugcguuagucuucc

SEQ ID NO: 1024332 - RNA, 19 nt, Artificial Sequence
  Description of Artificial Sequence: Synthetic oligonucleotide
  Sense strand starting at position 2567 of SEQ ID NO: 914705
aggagagucuuacuuaggu

SEQ ID NO: 1024333 - RNA, 19 nt, Artificial Sequence
  Description of Artificial Sequence: Synthetic oligonucleotide
  Antisense strand to SEQ ID NO: 1024332
accuaaguaagacucuccu

SEQ ID NO: 1024334 - RNA, 19 nt, Artificial Sequence
  Description of Artificial Sequence: Synthetic oligonucleotide
  Sense strand starting at position 2572 of SEQ ID NO: 914705
agucuuacuuaggucugau

SEQ ID NO: 1024335 - RNA, 19 nt, Artificial Sequence
  Description of Artificial Sequence: Synthetic oligonucleotide
  Antisense strand to SEQ ID NO: 1024334
aucagaccuaaguaagacu

SEQ ID NO: 1024336 - RNA, 19 nt, Artificial Sequence
  Description of Artificial Sequence: Synthetic oligonucleotide
  Sense strand starting at position 2575 of SEQ ID NO: 914705
cuuacuuaggucugauaau

SEQ ID NO: 1024337 - RNA, 19 nt, Artificial Sequence
  Description of Artificial Sequence: Synthetic oligonucleotide
  Antisense strand to SEQ ID NO: 1024336
auuaucagaccuaaguaag

SEQ ID NO: 1024338 - RNA, 19 nt, Artificial Sequence
  Description of Artificial Sequence: Synthetic oligonucleotide
  Sense strand starting at position 2647 of SEQ ID NO: 914705
ugggucucucccugacuua

SEQ ID NO: 1024339 - RNA, 19 nt, Artificial Sequence
  Description of Artificial Sequence: Synthetic oligonucleotide
  Antisense strand to SEQ ID NO: 1024338
uaagucagggagagaccca

SEQ ID NO: 1024340 - RNA, 19 nt, Artificial Sequence
  Description of Artificial Sequence: Synthetic oligonucleotide
  Sense strand starting at position 3509 of SEQ ID NO: 914705
ccaacugcugucugaugaa

SEQ ID NO: 1024341 - RNA, 19 nt, Artificial Sequence
  Description of Artificial Sequence: Synthetic oligonucleotide
  Antisense strand to SEQ ID NO: 1024340
uucaucagacagcaguugg

SEQ ID NO: 1024342 - RNA, 19 nt, Artificial Sequence
  Description of Artificial Sequence: Synthetic oligonucleotide
  Sense strand starting at position 3572 of SEQ ID NO: 914705
uagaaaccacucgguguua

SEQ ID NO: 1024343 - RNA, 19 nt, Artificial Sequence
  Description of Artificial Sequence: Synthetic oligonucleotide
  Antisense strand to SEQ ID NO: 1024342
uaacaccgagugguuucua

SEQ ID NO: 1024344 - RNA, 19 nt, Artificial Sequence
  Description of Artificial Sequence: Synthetic oligonucleotide
  Sense strand starting at position 3610 of SEQ ID NO: 914705
gcuagaaaucaugaacgca

SEQ ID NO: 1024345 - RNA, 19 nt, Artificial Sequence
  Description of Artificial Sequence: Synthetic oligonucleotide
  Antisense strand to SEQ ID NO: 1024344
ugcguucaugauuucuagc

SEQ ID NO: 1024346 - RNA, 19 nt, Artificial Sequence
  Description of Artificial Sequence: Synthetic oligonucleotide
  Sense strand starting at position 3613 of SEQ ID NO: 914705
agaaaucaugaacgcauau

SEQ ID NO: 1024347 - RNA, 19 nt, Artificial Sequence
  Description of Artificial Sequence: Synthetic oligonucleotide
  Antisense strand to SEQ ID NO: 1024346
auaugcguucaugauuucu

SEQ ID NO: 1024348 - RNA, 19 nt, Artificial Sequence
  Description of Artificial Sequence: Synthetic oligonucleotide
  Sense strand starting at position 3686 of SEQ ID NO: 914705
cuucuuugagcugauuauu

SEQ ID NO: 1024349 - RNA, 19 nt, Artificial Sequence
  Description of Artificial Sequence: Synthetic oligonucleotide
  Antisense strand to SEQ ID NO: 1024348
aauaaucagcucaaagaag

SEQ ID NO: 1024350 - RNA, 19 nt, Artificial Sequence
  Description of Artificial Sequence: Synthetic oligonucleotide
  Sense strand starting at position 3716 of SEQ ID NO: 914705
aguuccaaauuaucgauau

SEQ ID NO: 1024351 - RNA, 19 nt, Artificial Sequence
  Description of Artificial Sequence: Synthetic oligonucleotide
  Antisense strand to SEQ ID NO: 1024350
auaucgauaauuuggaacu

SEQ ID NO: 1024352 - RNA, 19 nt, Artificial Sequence
  Description of Artificial Sequence: Synthetic oligonucleotide
  Sense strand starting at position 3720 of SEQ ID NO: 914705
ccaaauuaucgauaugcaa

SEQ ID NO: 1024353 - RNA, 19 nt, Artificial Sequence
  Description of Artificial Sequence: Synthetic oligonucleotide
  Antisense strand to SEQ ID NO: 1024352
uugcauaucgauaauuugg

SEQ ID NO: 1024354 - RNA, 19 nt, Artificial Sequence
  Description of Artificial Sequence: Synthetic oligonucleotide
  Sense strand starting at position 3723 of SEQ ID NO: 914705
aauuaucgauaugcaagua

SEQ ID NO: 1024355 - RNA, 19 nt, Artificial Sequence
  Description of Artificial Sequence: Synthetic oligonucleotide
  Antisense strand to SEQ ID NO: 1024354
uacuugcauaucgauaauu

SEQ ID NO: 1024356 - RNA, 19 nt, Artificial Sequence
  Description of Artificial Sequence: Synthetic oligonucleotide
  Sense strand starting at position 3754 of SEQ ID NO: 914705
acuugauaucggugaaguu

SEQ ID NO: 1024357 - RNA, 19 nt, Artificial Sequence
  Description of Artificial Sequence: Synthetic oligonucleotide
  Antisense strand to SEQ ID NO: 1024356
aacuucaccgauaucaagu

SEQ ID NO: 1024358 - RNA, 19 nt, Artificial Sequence
  Description of Artificial Sequence: Synthetic oligonucleotide
  Sense strand starting at position 3755 of SEQ ID NO: 914705
cuugauaucggugaaguua

SEQ ID NO: 1024359 - RNA, 19 nt, Artificial Sequence
  Description of Artificial Sequence: Synthetic oligonucleotide
  Antisense strand to SEQ ID NO: 1024358
uaacuucaccgauaucaag

SEQ ID NO: 1024360 - RNA, 19 nt, Artificial Sequence
  Description of Artificial Sequence: Synthetic oligonucleotide
  Sense strand starting at position 3915 of SEQ ID NO: 914705
agcaaaguggauugcaaau

SEQ ID NO: 1024361 - RNA, 19 nt, Artificial Sequence
  Description of Artificial Sequence: Synthetic oligonucleotide
  Antisense strand to SEQ ID NO: 1024360
auuugcaauccacuuugcu

SEQ ID NO: 1024362 - RNA, 19 nt, Artificial Sequence
  Description of Artificial Sequence: Synthetic oligonucleotide
  Sense strand starting at position 3921 of SEQ ID NO: 914705
guggauugcaaaugccaua

SEQ ID NO: 1024363 - RNA, 19 nt, Artificial Sequence
  Description of Artificial Sequence: Synthetic oligonucleotide
  Antisense strand to SEQ ID NO: 1024362
uauggcauuugcaauccac

SEQ ID NO: 1024364 - RNA, 19 nt, Artificial Sequence
  Description of Artificial Sequence: Synthetic oligonucleotide
  Sense strand starting at position 3926 of SEQ ID NO: 914705
uugcaaaugccauagaaau

SEQ ID NO: 1024365 - RNA, 19 nt, Artificial Sequence
  Description of Artificial Sequence: Synthetic oligonucleotide
  Antisense strand to SEQ ID NO: 1024364
auuucuauggcauuugcaa

SEQ ID NO: 1024366 - RNA, 19 nt, Artificial Sequence
  Description of Artificial Sequence: Synthetic oligonucleotide
  Sense strand starting at position 275 of SEQ ID NO: 914706
ggucacgccucuuagcauu

SEQ ID NO: 1024367 - RNA, 19 nt, Artificial Sequence
  Description of Artificial Sequence: Synthetic oligonucleotide
  Antisense strand to SEQ ID NO: 1024366
aaugcuaagaggcgugacc

SEQ ID NO: 1024368 - RNA, 19 nt, Artificial Sequence
  Description of Artificial Sequence: Synthetic oligonucleotide
  Sense strand starting at position 281 of SEQ ID NO: 914706
gccucuuagcauuaggagu

SEQ ID NO: 1024369 - RNA, 19 nt, Artificial Sequence
  Description of Artificial Sequence: Synthetic oligonucleotide
  Antisense strand to SEQ ID NO: 1024368
acuccuaaugcuaagaggc

SEQ ID NO: 1024370 - RNA, 19 nt, Artificial Sequence
  Description of Artificial Sequence: Synthetic oligonucleotide
  Sense strand starting at position 321 of SEQ ID NO: 914706
gaguguugggcacgucaua

SEQ ID NO: 1024371 - RNA, 19 nt, Artificial Sequence
  Description of Artificial Sequence: Synthetic oligonucleotide
  Antisense strand to SEQ ID NO: 1024370
uaugacgugcccaacacuc

SEQ ID NO: 1024372 - RNA, 19 nt, Artificial Sequence
  Description of Artificial Sequence: Synthetic oligonucleotide
  Sense strand starting at position 778 of SEQ ID NO: 914706
ggcuaauaacauggcuauu

SEQ ID NO: 1024373 - RNA, 19 nt, Artificial Sequence
  Description of Artificial Sequence: Synthetic oligonucleotide
  Antisense strand to SEQ ID NO: 1024372
aauagccauguuauuagcc

SEQ ID NO: 1024374 - RNA, 19 nt, Artificial Sequence
  Description of Artificial Sequence: Synthetic oligonucleotide
  Sense strand starting at position 887 of SEQ ID NO: 914706
gagcgugggaagugucauu

SEQ ID NO: 1024375 - RNA, 19 nt, Artificial Sequence
  Description of Artificial Sequence: Synthetic oligonucleotide
  Antisense strand to SEQ ID NO: 1024374
aaugacacuucccacgcuc

SEQ ID NO: 1024376 - RNA, 19 nt, Artificial Sequence
  Description of Artificial Sequence: Synthetic oligonucleotide
  Sense strand starting at position 905 of SEQ ID NO: 914706
uuuccaucuugguaaugaa

SEQ ID NO: 1024377 - RNA, 19 nt, Artificial Sequence
  Description of Artificial Sequence: Synthetic oligonucleotide
  Antisense strand to SEQ ID NO: 1024376
uucauuaccaagauggaaa

SEQ ID NO: 1024378 - RNA, 19 nt, Artificial Sequence
  Description of Artificial Sequence: Synthetic oligonucleotide
  Sense strand starting at position 908 of SEQ ID NO: 914706
ccaucuugguaaugaauug

SEQ ID NO: 1024379 - RNA, 19 nt, Artificial Sequence
  Description of Artificial Sequence: Synthetic oligonucleotide
  Antisense strand to SEQ ID NO: 1024378
caauucauuaccaagaugg

SEQ ID NO: 1024380 - RNA, 19 nt, Artificial Sequence
  Description of Artificial Sequence: Synthetic oligonucleotide
  Sense strand starting at position 957 of SEQ ID NO: 914706
gcuugagguugcugggauu

SEQ ID NO: 1024381 - RNA, 19 nt, Artificial Sequence
  Description of Artificial Sequence: Synthetic oligonucleotide
  Antisense strand to SEQ ID NO: 1024380
aaucccagcaaccucaagc

SEQ ID NO: 1024382 - RNA, 19 nt, Artificial Sequence
  Description of Artificial Sequence: Synthetic oligonucleotide
  Sense strand starting at position 960 of SEQ ID NO: 914706
ugagguugcugggauuugu

SEQ ID NO: 1024383 - RNA, 19 nt, Artificial Sequence
  Description of Artificial Sequence: Synthetic oligonucleotide
  Antisense strand to SEQ ID NO: 1024382
acaaaucccagcaaccuca

SEQ ID NO: 1024384 - RNA, 19 nt, Artificial Sequence
  Description of Artificial Sequence: Synthetic oligonucleotide
  Sense strand starting at position 964 of SEQ ID NO: 914706
guugcugggauuuguguuu

SEQ ID NO: 1024385 - RNA, 19 nt, Artificial Sequence
  Description of Artificial Sequence: Synthetic oligonucleotide
  Antisense strand to SEQ ID NO: 1024384
aaacacaaaucccagcaac

SEQ ID NO: 1024386 - RNA, 19 nt, Artificial Sequence
  Description of Artificial Sequence: Synthetic oligonucleotide
  Sense strand starting at position 1192 of SEQ ID NO: 914706
ggcaguagcuuuggaucaa

SEQ ID NO: 1024387 - RNA, 19 nt, Artificial Sequence
  Description of Artificial Sequence: Synthetic oligonucleotide
  Antisense strand to SEQ ID NO: 1024386
uugauccaaagcuacugcc

SEQ ID NO: 1024388 - RNA, 19 nt, Artificial Sequence
  Description of Artificial Sequence: Synthetic oligonucleotide
  Sense strand starting at position 1248 of SEQ ID NO: 914706
cugauauagacuuguggac

SEQ ID NO: 1024389 - RNA, 19 nt, Artificial Sequence
  Description of Artificial Sequence: Synthetic oligonucleotide
  Antisense strand to SEQ ID NO: 1024388
guccacaagucuauaucag

SEQ ID NO: 1024390 - RNA, 19 nt, Artificial Sequence
  Description of Artificial Sequence: Synthetic oligonucleotide
  Sense strand starting at position 1250 of SEQ ID NO: 914706
gauauagacuuguggacuc

SEQ ID NO: 1024391 - RNA, 19 nt, Artificial Sequence
  Description of Artificial Sequence: Synthetic oligonucleotide
  Antisense strand to SEQ ID NO: 1024390
gaguccacaagucuauauc

SEQ ID NO: 1024392 - RNA, 19 nt, Artificial Sequence
  Description of Artificial Sequence: Synthetic oligonucleotide
  Sense strand starting at position 1296 of SEQ ID NO: 914706
gggcaaguagccuagguua

SEQ ID NO: 1024393 - RNA, 19 nt, Artificial Sequence
  Description of Artificial Sequence: Synthetic oligonucleotide
  Antisense strand to SEQ ID NO: 1024392
uaaccuaggcuacuugccc

SEQ ID NO: 1024394 - RNA, 19 nt, Artificial Sequence
  Description of Artificial Sequence: Synthetic oligonucleotide
  Sense strand starting at position 1497 of SEQ ID NO: 914706
augcuuaugccggcaagca

SEQ ID NO: 1024395 - RNA, 19 nt, Artificial Sequence
  Description of Artificial Sequence: Synthetic oligonucleotide
  Antisense strand to SEQ ID NO: 1024394
ugcuugccggcauaagcau

SEQ ID NO: 1024396 - RNA, 19 nt, Artificial Sequence
  Description of Artificial Sequence: Synthetic oligonucleotide
  Sense strand starting at position 1584 of SEQ ID NO: 914706
uggagcucuggcugggaaa

SEQ ID NO: 1024397 - RNA, 19 nt, Artificial Sequence
  Description of Artificial Sequence: Synthetic oligonucleotide
  Antisense strand to SEQ ID NO: 1024396
uuucccagccagagcucca

SEQ ID NO: 1024398 - RNA, 19 nt, Artificial Sequence
  Description of Artificial Sequence: Synthetic oligonucleotide
  Sense strand starting at position 2024 of SEQ ID NO: 914706
cuggcuuaucccugcagag

SEQ ID NO: 1024399 - RNA, 19 nt, Artificial Sequence
  Description of Artificial Sequence: Synthetic oligonucleotide
  Antisense strand to SEQ ID NO: 1024398
cucugcagggauaagccag

SEQ ID NO: 1024400 - RNA, 19 nt, Artificial Sequence
  Description of Artificial Sequence: Synthetic oligonucleotide
  Sense strand starting at position 2026 of SEQ ID NO: 914706
ggcuuaucccugcagagug

SEQ ID NO: 1024401 - RNA, 19 nt, Artificial Sequence
  Description of Artificial Sequence: Synthetic oligonucleotide
  Antisense strand to SEQ ID NO: 1024400
cacucugcagggauaagcc

SEQ ID NO: 1024402 - RNA, 19 nt, Artificial Sequence
  Description of Artificial Sequence: Synthetic oligonucleotide
  Sense strand starting at position 2313 of SEQ ID NO: 914706
uuaagucacuuggcagaau

SEQ ID NO: 1024403 - RNA, 19 nt, Artificial Sequence
  Description of Artificial Sequence: Synthetic oligonucleotide
  Antisense strand to SEQ ID NO: 1024402
auucugccaagugacuuaa

SEQ ID NO: 1024404 - RNA, 19 nt, Artificial Sequence
  Description of Artificial Sequence: Synthetic oligonucleotide
  Sense strand starting at position 2340 of SEQ ID NO: 914706
ugcagagaguguucuugca

SEQ ID NO: 1024405 - RNA, 19 nt, Artificial Sequence
  Description of Artificial Sequence: Synthetic oligonucleotide
  Antisense strand to SEQ ID NO: 1024404
ugcaagaacacucucugca

SEQ ID NO: 1024406 - RNA, 19 nt, Artificial Sequence
  Description of Artificial Sequence: Synthetic oligonucleotide
  Sense strand starting at position 2342 of SEQ ID NO: 914706
cagagaguguucuugcaug

SEQ ID NO: 1024407 - RNA, 19 nt, Artificial Sequence
  Description of Artificial Sequence: Synthetic oligonucleotide
  Antisense strand to SEQ ID NO: 1024406
caugcaagaacacucucug

SEQ ID NO: 1024408 - RNA, 19 nt, Artificial Sequence
  Description of Artificial Sequence: Synthetic oligonucleotide
  Sense strand starting at position 2347 of SEQ ID NO: 914706
aguguucuugcaugacgga

SEQ ID NO: 1024409 - RNA, 19 nt, Artificial Sequence
  Description of Artificial Sequence: Synthetic oligonucleotide
  Antisense strand to SEQ ID NO: 1024408
uccgucaugcaagaacacu

SEQ ID NO: 1024410 - RNA, 19 nt, Artificial Sequence
  Description of Artificial Sequence: Synthetic oligonucleotide
  Sense strand starting at position 2520 of SEQ ID NO: 914706
acaugcccuucuuugagaa

SEQ ID NO: 1024411 - RNA, 19 nt, Artificial Sequence
  Description of Artificial Sequence: Synthetic oligonucleotide
  Antisense strand to SEQ ID NO: 1024410
uucucaaagaagggcaugu

SEQ ID NO: 1024412 - RNA, 19 nt, Artificial Sequence
  Description of Artificial Sequence: Synthetic oligonucleotide
  Sense strand starting at position 2522 of SEQ ID NO: 914706
augcccuucuuugagaaga

SEQ ID NO: 1024413 - RNA, 19 nt, Artificial Sequence
  Description of Artificial Sequence: Synthetic oligonucleotide
  Antisense strand to SEQ ID NO: 1024412
ucuucucaaagaagggcau

SEQ ID NO: 1024414 - RNA, 19 nt, Artificial Sequence
  Description of Artificial Sequence: Synthetic oligonucleotide
  Sense strand starting at position 2524 of SEQ ID NO: 914706
gcccuucuuugagaagaug

SEQ ID NO: 1024415 - RNA, 19 nt, Artificial Sequence
  Description of Artificial Sequence: Synthetic oligonucleotide
  Antisense strand to SEQ ID NO: 1024414
caucuucucaaagaagggc

SEQ ID NO: 1024416 - RNA, 19 nt, Artificial Sequence
  Description of Artificial Sequence: Synthetic oligonucleotide
  Sense strand starting at position 2640 of SEQ ID NO: 914706
ucuggucuugucuguccaa

SEQ ID NO: 1024417 - RNA, 19 nt, Artificial Sequence
  Description of Artificial Sequence: Synthetic oligonucleotide
  Antisense strand to SEQ ID NO: 1024416
uuggacagacaagaccaga

SEQ ID NO: 1024418 - RNA, 19 nt, Artificial Sequence
  Description of Artificial Sequence: Synthetic oligonucleotide
  Sense strand starting at position 2641 of SEQ ID NO: 914706
cuggucuugucuguccaaa

SEQ ID NO: 1024419 - RNA, 19 nt, Artificial Sequence
  Description of Artificial Sequence: Synthetic oligonucleotide
  Antisense strand to SEQ ID NO: 1024418
uuuggacagacaagaccag

SEQ ID NO: 1024420 - RNA, 19 nt, Artificial Sequence
  Description of Artificial Sequence: Synthetic oligonucleotide
  Sense strand starting at position 3158 of SEQ ID NO: 914706
ggguuauucucccuaucuc

SEQ ID NO: 1024421 - RNA, 19 nt, Artificial Sequence
  Description of Artificial Sequence: Synthetic oligonucleotide
  Antisense strand to SEQ ID NO: 1024420
gagauagggagaauaaccc

SEQ ID NO: 1024422 - RNA, 19 nt, Artificial Sequence
  Description of Artificial Sequence: Synthetic oligonucleotide
  Sense strand starting at position 3194 of SEQ ID NO: 914706
cugacaauuggccaugcau

SEQ ID NO: 1024423 - RNA, 19 nt, Artificial Sequence
  Description of Artificial Sequence: Synthetic oligonucleotide
  Antisense strand to SEQ ID NO: 1024422
augcauggccaauugucag

SEQ ID NO: 1024424 - RNA, 19 nt, Artificial Sequence
  Description of Artificial Sequence: Synthetic oligonucleotide
  Sense strand starting at position 3351 of SEQ ID NO: 914706
ugcucuucuugcuaaaugu

SEQ ID NO: 1024425 - RNA, 19 nt, Artificial Sequence
  Description of Artificial Sequence: Synthetic oligonucleotide
  Antisense strand to SEQ ID NO: 1024424
acauuuagcaagaagagca

SEQ ID NO: 1024426 - RNA, 19 nt, Artificial Sequence
  Description of Artificial Sequence: Synthetic oligonucleotide
  Sense strand starting at position 3731 of SEQ ID NO: 914706
ugcucacucugguuugaaa

SEQ ID NO: 1024427 - RNA, 19 nt, Artificial Sequence
  Description of Artificial Sequence: Synthetic oligonucleotide
  Antisense strand to SEQ ID NO: 1024426
uuucaaaccagagugagca

SEQ ID NO: 1024428 - RNA, 19 nt, Artificial Sequence
  Description of Artificial Sequence: Synthetic oligonucleotide
  Sense strand starting at position 3733 of SEQ ID NO: 914706
cucacucugguuugaaauc

SEQ ID NO: 1024429 - RNA, 19 nt, Artificial Sequence
  Description of Artificial Sequence: Synthetic oligonucleotide
  Antisense strand to SEQ ID NO: 1024428
gauuucaaaccagagugag

SEQ ID NO: 1024430 - RNA, 19 nt, Artificial Sequence
  Description of Artificial Sequence: Synthetic oligonucleotide
  Sense strand starting at position 3734 of SEQ ID NO: 914706
ucacucugguuugaaauca

SEQ ID NO: 1024431 - RNA, 19 nt, Artificial Sequence
  Description of Artificial Sequence: Synthetic oligonucleotide
  Antisense strand to SEQ ID NO: 1024430
ugauuucaaaccagaguga

SEQ ID NO: 1024432 - RNA, 19 nt, Artificial Sequence
  Description of Artificial Sequence: Synthetic oligonucleotide
  Sense strand starting at position 3796 of SEQ ID NO: 914706
ggccuaagguggcugauuu

SEQ ID NO: 1024433 - RNA, 19 nt, Artificial Sequence
  Description of Artificial Sequence: Synthetic oligonucleotide
  Antisense strand to SEQ ID NO: 1024432
aaaucagccaccuuaggcc

SEQ ID NO: 1024434 - RNA, 19 nt, Artificial Sequence
  Description of Artificial Sequence: Synthetic oligonucleotide
  Sense strand starting at position 3813 of SEQ ID NO: 914706
uugagaaaugcuuguuguc

SEQ ID NO: 1024435 - RNA, 19 nt, Artificial Sequence
  Description of Artificial Sequence: Synthetic oligonucleotide
  Antisense strand to SEQ ID NO: 1024434
gacaacaagcauuucucaa

SEQ ID NO: 1024436 - RNA, 19 nt, Artificial Sequence
  Description of Artificial Sequence: Synthetic oligonucleotide
  Sense strand starting at position 3815 of SEQ ID NO: 914706
gagaaaugcuuguugucag

SEQ ID NO: 1024437 - RNA, 19 nt, Artificial Sequence
  Description of Artificial Sequence: Synthetic oligonucleotide
  Antisense strand to SEQ ID NO: 1024436
cugacaacaagcauuucuc

SEQ ID NO: 1024438 - RNA, 19 nt, Artificial Sequence
  Description of Artificial Sequence: Synthetic oligonucleotide
  Sense strand starting at position 3816 of SEQ ID NO: 914706
agaaaugcuuguugucaga

SEQ ID NO: 1024439 - RNA, 19 nt, Artificial Sequence
  Description of Artificial Sequence: Synthetic oligonucleotide
  Antisense strand to SEQ ID NO: 1024438
ucugacaacaagcauuucu

SEQ ID NO: 1024440 - RNA, 19 nt, Artificial Sequence
  Description of Artificial Sequence: Synthetic oligonucleotide
  Sense strand starting at position 3829 of SEQ ID NO: 914706
gucagaggccguuacaaau

SEQ ID NO: 1024441 - RNA, 19 nt, Artificial Sequence
  Description of Artificial Sequence: Synthetic oligonucleotide
  Antisense strand to SEQ ID NO: 1024440
auuuguaacggccucugac

SEQ ID NO: 1024442 - RNA, 19 nt, Artificial Sequence
  Description of Artificial Sequence: Synthetic oligonucleotide
  Sense strand starting at position 372 of SEQ ID NO: 914707
cccaaauaauugggagaua

SEQ ID NO: 1024443 - RNA, 19 nt, Artificial Sequence
  Description of Artificial Sequence: Synthetic oligonucleotide
  Antisense strand to SEQ ID NO: 1024442
uaucucccaauuauuuggg

SEQ ID NO: 1024444 - RNA, 19 nt, Artificial Sequence
  Description of Artificial Sequence: Synthetic oligonucleotide
  Sense strand starting at position 373 of SEQ ID NO: 914707
ccaaauaauugggagauaa

SEQ ID NO: 1024445 - RNA, 19 nt, Artificial Sequence
  Description of Artificial Sequence: Synthetic oligonucleotide
  Antisense strand to SEQ ID NO: 1024444
uuaucucccaauuauuugg

SEQ ID NO: 1024446 - RNA, 19 nt, Artificial Sequence
  Description of Artificial Sequence: Synthetic oligonucleotide
  Sense strand starting at position 576 of SEQ ID NO: 914707
agggaagacucuuaccaug

SEQ ID NO: 1024447 - RNA, 19 nt, Artificial Sequence
  Description of Artificial Sequence: Synthetic oligonucleotide
  Antisense strand to SEQ ID NO: 1024446
caugguaagagucuucccu

SEQ ID NO: 1024448 - RNA, 19 nt, Artificial Sequence
  Description of Artificial Sequence: Synthetic oligonucleotide
  Sense strand starting at position 578 of SEQ ID NO: 914707
ggaagacucuuaccauggu

SEQ ID NO: 1024449 - RNA, 19 nt, Artificial Sequence
  Description of Artificial Sequence: Synthetic oligonucleotide
  Antisense strand to SEQ ID NO: 1024448
accaugguaagagucuucc

SEQ ID NO: 1024450 - RNA, 19 nt, Artificial Sequence
  Description of Artificial Sequence: Synthetic oligonucleotide
  Sense strand starting at position 581 of SEQ ID NO: 914707
agacucuuaccaugguaaa

SEQ ID NO: 1024451 - RNA, 19 nt, Artificial Sequence
  Description of Artificial Sequence: Synthetic oligonucleotide
  Antisense strand to SEQ ID NO: 1024450
uuuaccaugguaagagucu

SEQ ID NO: 1024452 - RNA, 19 nt, Artificial Sequence
  Description of Artificial Sequence: Synthetic oligonucleotide
  Sense strand starting at position 637 of SEQ ID NO: 914707
ggcucucgccuguaaugau

SEQ ID NO: 1024453 - RNA, 19 nt, Artificial Sequence
  Description of Artificial Sequence: Synthetic oligonucleotide
  Antisense strand to SEQ ID NO: 1024452
aucauuacaggcgagagcc

SEQ ID NO: 1024454 - RNA, 19 nt, Artificial Sequence
  Description of Artificial Sequence: Synthetic oligonucleotide
  Sense strand starting at position 859 of SEQ ID NO: 914707
uugagacauugucucgaaa

SEQ ID NO: 1024455 - RNA, 19 nt, Artificial Sequence
  Description of Artificial Sequence: Synthetic oligonucleotide
  Antisense strand to SEQ ID NO: 1024454
uuucgagacaaugucucaa

SEQ ID NO: 1024456 - RNA, 19 nt, Artificial Sequence
  Description of Artificial Sequence: Synthetic oligonucleotide
  Sense strand starting at position 939 of SEQ ID NO: 914707
guaaguauucuccaggcua

SEQ ID NO: 1024457 - RNA, 19 nt, Artificial Sequence
  Description of Artificial Sequence: Synthetic oligonucleotide
  Antisense strand to SEQ ID NO: 1024456
uagccuggagaauacuuac

SEQ ID NO: 1024458 - RNA, 19 nt, Artificial Sequence
  Description of Artificial Sequence: Synthetic oligonucleotide
  Sense strand starting at position 941 of SEQ ID NO: 914707
aaguauucuccaggcuaug

SEQ ID NO: 1024459 - RNA, 19 nt, Artificial Sequence
  Description of Artificial Sequence: Synthetic oligonucleotide
  Antisense strand to SEQ ID NO: 1024458
cauagccuggagaauacuu

SEQ ID NO: 1024460 - RNA, 19 nt, Artificial Sequence
  Description of Artificial Sequence: Synthetic oligonucleotide
  Sense strand starting at position 1016 of SEQ ID NO: 914707
gaaccagcgugaucucuga

SEQ ID NO: 1024461 - RNA, 19 nt, Artificial Sequence
  Description of Artificial Sequence: Synthetic oligonucleotide
  Antisense strand to SEQ ID NO: 1024460
ucagagaucacgcugguuc

SEQ ID NO: 1024462 - RNA, 19 nt, Artificial Sequence
  Description of Artificial Sequence: Synthetic oligonucleotide
  Sense strand starting at position 1020 of SEQ ID NO: 914707
cagcgugaucucugaacau

SEQ ID NO: 1024463 - RNA, 19 nt, Artificial Sequence
  Description of Artificial Sequence: Synthetic oligonucleotide
  Antisense strand to SEQ ID NO: 1024462
auguucagagaucacgcug

SEQ ID NO: 1024464 - RNA, 19 nt, Artificial Sequence
  Description of Artificial Sequence: Synthetic oligonucleotide
  Sense strand starting at position 1024 of SEQ ID NO: 914707
gugaucucugaacauguga

SEQ ID NO: 1024465 - RNA, 19 nt, Artificial Sequence
  Description of Artificial Sequence: Synthetic oligonucleotide
  Antisense strand to SEQ ID NO: 1024464
ucacauguucagagaucac

SEQ ID NO: 1024466 - RNA, 19 nt, Artificial Sequence
  Description of Artificial Sequence: Synthetic oligonucleotide
  Sense strand starting at position 1137 of SEQ ID NO: 914707
gcuccauuucuccagcagu

SEQ ID NO: 1024467 - RNA, 19 nt, Artificial Sequence
  Description of Artificial Sequence: Synthetic oligonucleotide
  Antisense strand to SEQ ID NO: 1024466
acugcuggagaaauggagc

SEQ ID NO: 1024468 - RNA, 19 nt, Artificial Sequence
  Description of Artificial Sequence: Synthetic oligonucleotide
  Sense strand starting at position 1148 of SEQ ID NO: 914707
ccagcaguucugcuagugu

SEQ ID NO: 1024469 - RNA, 19 nt, Artificial Sequence
  Description of Artificial Sequence: Synthetic oligonucleotide
  Antisense strand to SEQ ID NO: 1024468
acacuagcagaacugcugg

SEQ ID NO: 1024470 - RNA, 19 nt, Artificial Sequence
  Description of Artificial Sequence: Synthetic oligonucleotide
  Sense strand starting at position 1170 of SEQ ID NO: 914707
gaugcuuacuagcuggaau

SEQ ID NO: 1024471 - RNA, 19 nt, Artificial Sequence
  Description of Artificial Sequence: Synthetic oligonucleotide
  Antisense strand to SEQ ID NO: 1024470
auuccagcuaguaagcauc

SEQ ID NO: 1024472 - RNA, 19 nt, Artificial Sequence
  Description of Artificial Sequence: Synthetic oligonucleotide
  Sense strand starting at position 1172 of SEQ ID NO: 914707
ugcuuacuagcuggaauau

SEQ ID NO: 1024473 - RNA, 19 nt, Artificial Sequence
  Description of Artificial Sequence: Synthetic oligonucleotide
  Antisense strand to SEQ ID NO: 1024472
auauuccagcuaguaagca

SEQ ID NO: 1024474 - RNA, 19 nt, Artificial Sequence
  Description of Artificial Sequence: Synthetic oligonucleotide
  Sense strand starting at position 1173 of SEQ ID NO: 914707
gcuuacuagcuggaauauu

SEQ ID NO: 1024475 - RNA, 19 nt, Artificial Sequence
  Description of Artificial Sequence: Synthetic oligonucleotide
  Antisense strand to SEQ ID NO: 1024474
aauauuccagcuaguaagc

SEQ ID NO: 1024476 - RNA, 19 nt, Artificial Sequence
  Description of Artificial Sequence: Synthetic oligonucleotide
  Sense strand starting at position 2160 of SEQ ID NO: 914707
ugcgguagggccugaauua

SEQ ID NO: 1024477 - RNA, 19 nt, Artificial Sequence
  Description of Artificial Sequence: Synthetic oligonucleotide
  Antisense strand to SEQ ID NO: 1024476
uaauucaggcccuaccgca

SEQ ID NO: 1024478 - RNA, 19 nt, Artificial Sequence
  Description of Artificial Sequence: Synthetic oligonucleotide
  Sense strand starting at position 2259 of SEQ ID NO: 914707
uggcuauucucggccuaga

SEQ ID NO: 1024479 - RNA, 19 nt, Artificial Sequence
  Description of Artificial Sequence: Synthetic oligonucleotide
  Antisense strand to SEQ ID NO: 1024478
ucuaggccgagaauagcca

SEQ ID NO: 1024480 - RNA, 19 nt, Artificial Sequence
  Description of Artificial Sequence: Synthetic oligonucleotide
  Sense strand starting at position 2262 of SEQ ID NO: 914707
cuauucucggccuagaguu

SEQ ID NO: 1024481 - RNA, 19 nt, Artificial Sequence
  Description of Artificial Sequence: Synthetic oligonucleotide
  Antisense strand to SEQ ID NO: 1024480
aacucuaggccgagaauag

SEQ ID NO: 1024482 - RNA, 19 nt, Artificial Sequence
  Description of Artificial Sequence: Synthetic oligonucleotide
  Sense strand starting at position 2284 of SEQ ID NO: 914707
uguugucugucuucuagaa

SEQ ID NO: 1024483 - RNA, 19 nt, Artificial Sequence
  Description of Artificial Sequence: Synthetic oligonucleotide
  Antisense strand to SEQ ID NO: 1024482
uucuagaagacagacaaca

SEQ ID NO: 1024484 - RNA, 19 nt, Artificial Sequence
  Description of Artificial Sequence: Synthetic oligonucleotide
  Sense strand starting at position 2288 of SEQ ID NO: 914707
gucugucuucuagaaaggu

SEQ ID NO: 1024485 - RNA, 19 nt, Artificial Sequence
  Description of Artificial Sequence: Synthetic oligonucleotide
  Antisense strand to SEQ ID NO: 1024484
accuuucuagaagacagac

SEQ ID NO: 1024486 - RNA, 19 nt, Artificial Sequence
  Description of Artificial Sequence: Synthetic oligonucleotide
  Sense strand starting at position 2391 of SEQ ID NO: 914707
agaccagcuuguccaagau

SEQ ID NO: 1024487 - RNA, 19 nt, Artificial Sequence
  Description of Artificial Sequence: Synthetic oligonucleotide
  Antisense strand to SEQ ID NO: 1024486
aucuuggacaagcuggucu

SEQ ID NO: 1024488 - RNA, 19 nt, Artificial Sequence
  Description of Artificial Sequence: Synthetic oligonucleotide
  Sense strand starting at position 2599 of SEQ ID NO: 914707
aaagaaaggugugcuguuu

SEQ ID NO: 1024489 - RNA, 19 nt, Artificial Sequence
  Description of Artificial Sequence: Synthetic oligonucleotide
  Antisense strand to SEQ ID NO: 1024488
aaacagcacaccuuucuuu

SEQ ID NO: 1024490 - RNA, 19 nt, Artificial Sequence
  Description of Artificial Sequence: Synthetic oligonucleotide
  Sense strand starting at position 2644 of SEQ ID NO: 914707
ggauuauuguggcuuacuu

SEQ ID NO: 1024491 - RNA, 19 nt, Artificial Sequence
  Description of Artificial Sequence: Synthetic oligonucleotide
  Antisense strand to SEQ ID NO: 1024490
aaguaagccacaauaaucc

SEQ ID NO: 1024492 - RNA, 19 nt, Artificial Sequence
  Description of Artificial Sequence: Synthetic oligonucleotide
  Sense strand starting at position 2655 of SEQ ID NO: 914707
gcuuacuuuggguauagca

SEQ ID NO: 1024493 - RNA, 19 nt, Artificial Sequence
  Description of Artificial Sequence: Synthetic oligonucleotide
  Antisense strand to SEQ ID NO: 1024492
ugcuauacccaaaguaagc

SEQ ID NO: 1024494 - RNA, 19 nt, Artificial Sequence
  Description of Artificial Sequence: Synthetic oligonucleotide
  Sense strand starting at position 2663 of SEQ ID NO: 914707
uggguauagcauugaacau

SEQ ID NO: 1024495 - RNA, 19 nt, Artificial Sequence
  Description of Artificial Sequence: Synthetic oligonucleotide
  Antisense strand to SEQ ID NO: 1024494
auguucaaugcuauaccca

SEQ ID NO: 1024496 - RNA, 19 nt, Artificial Sequence
  Description of Artificial Sequence: Synthetic oligonucleotide
  Sense strand starting at position 2664 of SEQ ID NO: 914707
ggguauagcauugaacauu

SEQ ID NO: 1024497 - RNA, 19 nt, Artificial Sequence
  Description of Artificial Sequence: Synthetic oligonucleotide
  Antisense strand to SEQ ID NO: 1024496
aauguucaaugcuauaccc

SEQ ID NO: 1024498 - RNA, 19 nt, Artificial Sequence
  Description of Artificial Sequence: Synthetic oligonucleotide
  Sense strand starting at position 2751 of SEQ ID NO: 914707
cucgcuuauuagcugggaa

SEQ ID NO: 1024499 - RNA, 19 nt, Artificial Sequence
  Description of Artificial Sequence: Synthetic oligonucleotide
  Antisense strand to SEQ ID NO: 1024498
uucccagcuaauaagcgag

SEQ ID NO: 1024500 - RNA, 19 nt, Artificial Sequence
  Description of Artificial Sequence: Synthetic oligonucleotide
  Sense strand starting at position 2752 of SEQ ID NO: 914707
ucgcuuauuagcugggaaa

SEQ ID NO: 1024501 - RNA, 19 nt, Artificial Sequence
  Description of Artificial Sequence: Synthetic oligonucleotide
  Antisense strand to SEQ ID NO: 1024500
uuucccagcuaauaagcga

SEQ ID NO: 1024502 - RNA, 19 nt, Artificial Sequence
  Description of Artificial Sequence: Synthetic oligonucleotide
  Sense strand starting at position 2848 of SEQ ID NO: 914707
guacuacuaucgucaacau

SEQ ID NO: 1024503 - RNA, 19 nt, Artificial Sequence
  Description of Artificial Sequence: Synthetic oligonucleotide
  Antisense strand to SEQ ID NO: 1024502
auguugacgauaguaguac

SEQ ID NO: 1024504 - RNA, 19 nt, Artificial Sequence
  Description of Artificial Sequence: Synthetic oligonucleotide
  Sense strand starting at position 2857 of SEQ ID NO: 914707
ucgucaacaugcuuuaauu

SEQ ID NO: 1024505 - RNA, 19 nt, Artificial Sequence
  Description of Artificial Sequence: Synthetic oligonucleotide
  Antisense strand to SEQ ID NO: 1024504
aauuaaagcauguugacga

SEQ ID NO: 1024506 - RNA, 19 nt, Artificial Sequence
  Description of Artificial Sequence: Synthetic oligonucleotide
  Sense strand starting at position 2957 of SEQ ID NO: 914707
cuuugcacugacuggaaua

SEQ ID NO: 1024507 - RNA, 19 nt, Artificial Sequence
  Description of Artificial Sequence: Synthetic oligonucleotide
  Antisense strand to SEQ ID NO: 1024506
uauuccagucagugcaaag

SEQ ID NO: 1024508 - RNA, 19 nt, Artificial Sequence
  Description of Artificial Sequence: Synthetic oligonucleotide
  Sense strand starting at position 3111 of SEQ ID NO: 914707
aaggaaugcgagugguauu

SEQ ID NO: 1024509 - RNA, 19 nt, Artificial Sequence
  Description of Artificial Sequence: Synthetic oligonucleotide
  Antisense strand to SEQ ID NO: 1024508
aauaccacucgcauuccuu

SEQ ID NO: 1024510 - RNA, 19 nt, Artificial Sequence
  Description of Artificial Sequence: Synthetic oligonucleotide
  Sense strand starting at position 3112 of SEQ ID NO: 914707
aggaaugcgagugguauuu

SEQ ID NO: 1024511 - RNA, 19 nt, Artificial Sequence
  Description of Artificial Sequence: Synthetic oligonucleotide
  Antisense strand to SEQ ID NO: 1024510
aaauaccacucgcauuccu

SEQ ID NO: 1024512 - RNA, 19 nt, Artificial Sequence
  Description of Artificial Sequence: Synthetic oligonucleotide
  Sense strand starting at position 3177 of SEQ ID NO: 914707
cuuacugagcucuaugugu

SEQ ID NO: 1024513 - RNA, 19 nt, Artificial Sequence
  Description of Artificial Sequence: Synthetic oligonucleotide
  Antisense strand to SEQ ID NO: 1024512
acacauagagcucaguaag

SEQ ID NO: 1024514 - RNA, 19 nt, Artificial Sequence
  Description of Artificial Sequence: Synthetic oligonucleotide
  Sense strand starting at position 3179 of SEQ ID NO: 914707
uacugagcucuauguguca

SEQ ID NO: 1024515 - RNA, 19 nt, Artificial Sequence
  Description of Artificial Sequence: Synthetic oligonucleotide
  Antisense strand to SEQ ID NO: 1024514
ugacacauagagcucagua

SEQ ID NO: 1024516 - RNA, 19 nt, Artificial Sequence
  Description of Artificial Sequence: Synthetic oligonucleotide
  Sense strand starting at position 3268 of SEQ ID NO: 914707
acgugucuugcucugucau

SEQ ID NO: 1024517 - RNA, 19 nt, Artificial Sequence
  Description of Artificial Sequence: Synthetic oligonucleotide
  Antisense strand to SEQ ID NO: 1024516
augacagagcaagacacgu

SEQ ID NO: 1024518 - RNA, 19 nt, Artificial Sequence
  Description of Artificial Sequence: Synthetic oligonucleotide
  Sense strand starting at position 3296 of SEQ ID NO: 914707
aguaacguggcaugauuau

SEQ ID NO: 1024519 - RNA, 19 nt, Artificial Sequence
  Description of Artificial Sequence: Synthetic oligonucleotide
  Antisense strand to SEQ ID NO: 1024518
auaaucaugccacguuacu

SEQ ID NO: 1024520 - RNA, 19 nt, Artificial Sequence
  Description of Artificial Sequence: Synthetic oligonucleotide
  Sense strand starting at position 3830 of SEQ ID NO: 914707
uguaucuuaguagagaugu

SEQ ID NO: 1024521 - RNA, 19 nt, Artificial Sequence
  Description of Artificial Sequence: Synthetic oligonucleotide
  Antisense strand to SEQ ID NO: 1024520
acaucucuacuaagauaca

SEQ ID NO: 1024522 - RNA, 19 nt, Artificial Sequence
  Description of Artificial Sequence: Synthetic oligonucleotide
  Sense strand starting at position 29 of SEQ ID NO: 914708
ugcugugagaguuugcguu

SEQ ID NO: 1024523 - RNA, 19 nt, Artificial Sequence
  Description of Artificial Sequence: Synthetic oligonucleotide
  Antisense strand to SEQ ID NO: 1024522
aacgcaaacucucacagca

SEQ ID NO: 1024524 - RNA, 19 nt, Artificial Sequence
  Description of Artificial Sequence: Synthetic oligonucleotide
  Sense strand starting at position 53 of SEQ ID NO: 914708
ugaaguaggcgugagaaau

SEQ ID NO: 1024525 - RNA, 19 nt, Artificial Sequence
  Description of Artificial Sequence: Synthetic oligonucleotide
  Antisense strand to SEQ ID NO: 1024524
auuucucacgccuacuuca

SEQ ID NO: 1024526 - RNA, 19 nt, Artificial Sequence
  Description of Artificial Sequence: Synthetic oligonucleotide
  Sense strand starting at position 393 of SEQ ID NO: 914708
cgcaaacggaaauaagauu

SEQ ID NO: 1024527 - RNA, 19 nt, Artificial Sequence
  Description of Artificial Sequence: Synthetic oligonucleotide
  Antisense strand to SEQ ID NO: 1024526
aaucuuauuuccguuugcg

SEQ ID NO: 1024528 - RNA, 19 nt, Artificial Sequence
  Description of Artificial Sequence: Synthetic oligonucleotide
  Sense strand starting at position 474 of SEQ ID NO: 914708
ggacgagaugcuugaacug

SEQ ID NO: 1024529 - RNA, 19 nt, Artificial Sequence
  Description of Artificial Sequence: Synthetic oligonucleotide
  Antisense strand to SEQ ID NO: 1024528
caguucaagcaucucgucc

SEQ ID NO: 1024530 - RNA, 19 nt, Artificial Sequence
  Description of Artificial Sequence: Synthetic oligonucleotide
  Sense strand starting at position 479 of SEQ ID NO: 914708
agaugcuugaacugagauc

SEQ ID NO: 1024531 - RNA, 19 nt, Artificial Sequence
  Description of Artificial Sequence: Synthetic oligonucleotide
  Antisense strand to SEQ ID NO: 1024530
gaucucaguucaagcaucu

SEQ ID NO: 1024532 - RNA, 19 nt, Artificial Sequence
  Description of Artificial Sequence: Synthetic oligonucleotide
  Sense strand starting at position 805 of SEQ ID NO: 914708
aagaauuccgagcaggagu

SEQ ID NO: 1024533 - RNA, 19 nt, Artificial Sequence
  Description of Artificial Sequence: Synthetic oligonucleotide
  Antisense strand to SEQ ID NO: 1024532
acuccugcucggaauucuu

SEQ ID NO: 1024534 - RNA, 19 nt, Artificial Sequence
  Description of Artificial Sequence: Synthetic oligonucleotide
  Sense strand starting at position 821 of SEQ ID NO: 914708
aguggacuaccuggugaua

SEQ ID NO: 1024535 - RNA, 19 nt, Artificial Sequence
  Description of Artificial Sequence: Synthetic oligonucleotide
  Antisense strand to SEQ ID NO: 1024534
uaucaccagguaguccacu

SEQ ID NO: 1024536 - RNA, 19 nt, Artificial Sequence
  Description of Artificial Sequence: Synthetic oligonucleotide
  Sense strand starting at position 846 of SEQ ID NO: 914708
acuaguccuguguauuaaa

SEQ ID NO: 1024537 - RNA, 19 nt, Artificial Sequence
  Description of Artificial Sequence: Synthetic oligonucleotide
  Antisense strand to SEQ ID NO: 1024536
uuuaauacacaggacuagu

SEQ ID NO: 1024538 - RNA, 19 nt, Artificial Sequence
  Description of Artificial Sequence: Synthetic oligonucleotide
  Sense strand starting at position 1121 of SEQ ID NO: 914708
uuggaucaagucugcaaau

SEQ ID NO: 1024539 - RNA, 19 nt, Artificial Sequence
  Description of Artificial Sequence: Synthetic oligonucleotide
  Antisense strand to SEQ ID NO: 1024538
auuugcagacuugauccaa

SEQ ID NO: 1024540 - RNA, 19 nt, Artificial Sequence
  Description of Artificial Sequence: Synthetic oligonucleotide
  Sense strand starting at position 1123 of SEQ ID NO: 914708
ggaucaagucugcaaauca

SEQ ID NO: 1024541 - RNA, 19 nt, Artificial Sequence
  Description of Artificial Sequence: Synthetic oligonucleotide
  Antisense strand to SEQ ID NO: 1024540
ugauuugcagacuugaucc

SEQ ID NO: 1024542 - RNA, 19 nt, Artificial Sequence
  Description of Artificial Sequence: Synthetic oligonucleotide
  Sense strand starting at position 1134 of SEQ ID NO: 914708
gcaaaucaguacccaggaa

SEQ ID NO: 1024543 - RNA, 19 nt, Artificial Sequence
  Description of Artificial Sequence: Synthetic oligonucleotide
  Antisense strand to SEQ ID NO: 1024542
uuccuggguacugauuugc

SEQ ID NO: 1024544 - RNA, 19 nt, Artificial Sequence
  Description of Artificial Sequence: Synthetic oligonucleotide
  Sense strand starting at position 1227 of SEQ ID NO: 914708
uguuacuuccaaggaagaa

SEQ ID NO: 1024545 - RNA, 19 nt, Artificial Sequence
  Description of Artificial Sequence: Synthetic oligonucleotide
  Antisense strand to SEQ ID NO: 1024544
uucuuccuuggaaguaaca

SEQ ID NO: 1024546 - RNA, 19 nt, Artificial Sequence
  Description of Artificial Sequence: Synthetic oligonucleotide
  Sense strand starting at position 1708 of SEQ ID NO: 914708
gccgagucgguuucgugaa

SEQ ID NO: 1024547 - RNA, 19 nt, Artificial Sequence
  Description of Artificial Sequence: Synthetic oligonucleotide
  Antisense strand to SEQ ID NO: 1024546
uucacgaaaccgacucggc

SEQ ID NO: 1024548 - RNA, 19 nt, Artificial Sequence
  Description of Artificial Sequence: Synthetic oligonucleotide
  Sense strand starting at position 1934 of SEQ ID NO: 914708
aaccaauccgagcgagaga

SEQ ID NO: 1024549 - RNA, 19 nt, Artificial Sequence
  Description of Artificial Sequence: Synthetic oligonucleotide
  Antisense strand to SEQ ID NO: 1024548
ucucucgcucggauugguu

SEQ ID NO: 1024550 - RNA, 19 nt, Artificial Sequence
  Description of Artificial Sequence: Synthetic oligonucleotide
  Sense strand starting at position 2210 of SEQ ID NO: 914708
uugucaucaguguaaauca

SEQ ID NO: 1024551 - RNA, 19 nt, Artificial Sequence
  Description of Artificial Sequence: Synthetic oligonucleotide
  Antisense strand to SEQ ID NO: 1024550
ugauuuacacugaugacaa

SEQ ID NO: 1024552 - RNA, 19 nt, Artificial Sequence
  Description of Artificial Sequence: Synthetic oligonucleotide
  Sense strand starting at position 2278 of SEQ ID NO: 914708
aggguauuauccuccacuu

SEQ ID NO: 1024553 - RNA, 19 nt, Artificial Sequence
  Description of Artificial Sequence: Synthetic oligonucleotide
  Antisense strand to SEQ ID NO: 1024552
aaguggaggauaauacccu

SEQ ID NO: 1024554 - RNA, 19 nt, Artificial Sequence
  Description of Artificial Sequence: Synthetic oligonucleotide
  Sense strand starting at position 2280 of SEQ ID NO: 914708
gguauuauccuccacuuac

SEQ ID NO: 1024555 - RNA, 19 nt, Artificial Sequence
  Description of Artificial Sequence: Synthetic oligonucleotide
  Antisense strand to SEQ ID NO: 1024554
guaaguggaggauaauacc

SEQ ID NO: 1024556 - RNA, 19 nt, Artificial Sequence
  Description of Artificial Sequence: Synthetic oligonucleotide
  Sense strand starting at position 2376 of SEQ ID NO: 914708
ggaucacgaagucgagaaa

SEQ ID NO: 1024557 - RNA, 19 nt, Artificial Sequence
  Description of Artificial Sequence: Synthetic oligonucleotide
  Antisense strand to SEQ ID NO: 1024556
uuucucgacuucgugaucc

SEQ ID NO: 1024558 - RNA, 19 nt, Artificial Sequence
  Description of Artificial Sequence: Synthetic oligonucleotide
  Sense strand starting at position 2751 of SEQ ID NO: 914708
aaaucaaucuugguuggau

SEQ ID NO: 1024559 - RNA, 19 nt, Artificial Sequence
  Description of Artificial Sequence: Synthetic oligonucleotide
  Antisense strand to SEQ ID NO: 1024558
auccaaccaagauugauuu

SEQ ID NO: 1024560 - RNA, 19 nt, Artificial Sequence
  Description of Artificial Sequence: Synthetic oligonucleotide
  Sense strand starting at position 2752 of SEQ ID NO: 914708
aaucaaucuugguuggauu

SEQ ID NO: 1024561 - RNA, 19 nt, Artificial Sequence
  Description of Artificial Sequence: Synthetic oligonucleotide
  Antisense strand to SEQ ID NO: 1024560
aauccaaccaagauugauu

SEQ ID NO: 1024562 - RNA, 19 nt, Artificial Sequence
  Description of Artificial Sequence: Synthetic oligonucleotide
  Sense strand starting at position 2753 of SEQ ID NO: 914708
aucaaucuugguuggauua

SEQ ID NO: 1024563 - RNA, 19 nt, Artificial Sequence
  Description of Artificial Sequence: Synthetic oligonucleotide
  Antisense strand to SEQ ID NO: 1024562
uaauccaaccaagauugau

SEQ ID NO: 1024564 - RNA, 19 nt, Artificial Sequence
  Description of Artificial Sequence: Synthetic oligonucleotide
  Sense strand starting at position 2754 of SEQ ID NO: 914708
ucaaucuugguuggauuaa

SEQ ID NO: 1024565 - RNA, 19 nt, Artificial Sequence
  Description of Artificial Sequence: Synthetic oligonucleotide
  Antisense strand to SEQ ID NO: 1024564
uuaauccaaccaagauuga

SEQ ID NO: 1024566 - RNA, 19 nt, Artificial Sequence
  Description of Artificial Sequence: Synthetic oligonucleotide
  Sense strand starting at position 2843 of SEQ ID NO: 914708
agagaauagcuacaugcuu

SEQ ID NO: 1024567 - RNA, 19 nt, Artificial Sequence
  Description of Artificial Sequence: Synthetic oligonucleotide
  Antisense strand to SEQ ID NO: 1024566
aagcauguagcuauucucu

SEQ ID NO: 1024568 - RNA, 19 nt, Artificial Sequence
  Description of Artificial Sequence: Synthetic oligonucleotide
  Sense strand starting at position 2878 of SEQ ID NO: 914708
uucuuauaauccgugagag

SEQ ID NO: 1024569 - RNA, 19 nt, Artificial Sequence
  Description of Artificial Sequence: Synthetic oligonucleotide
  Antisense strand to SEQ ID NO: 1024568
cucucacggauuauaagaa

SEQ ID NO: 1024570 - RNA, 19 nt, Artificial Sequence
  Description of Artificial Sequence: Synthetic oligonucleotide
  Sense strand starting at position 2879 of SEQ ID NO: 914708
ucuuauaauccgugagaga

SEQ ID NO: 1024571 - RNA, 19 nt, Artificial Sequence
  Description of Artificial Sequence: Synthetic oligonucleotide
  Antisense strand to SEQ ID NO: 1024570
ucucucacggauuauaaga

SEQ ID NO: 1024572 - RNA, 19 nt, Artificial Sequence
  Description of Artificial Sequence: Synthetic oligonucleotide
  Sense strand starting at position 2902 of SEQ ID NO: 914708
gugcauuugcuaggaguac

SEQ ID NO: 1024573 - RNA, 19 nt, Artificial Sequence
  Description of Artificial Sequence: Synthetic oligonucleotide
  Antisense strand to SEQ ID NO: 1024572
guacuccuagcaaaugcac

SEQ ID NO: 1024574 - RNA, 19 nt, Artificial Sequence
  Description of Artificial Sequence: Synthetic oligonucleotide
  Sense strand starting at position 3058 of SEQ ID NO: 914708
caaacaguuugcuuugaga

SEQ ID NO: 1024575 - RNA, 19 nt, Artificial Sequence
  Description of Artificial Sequence: Synthetic oligonucleotide
  Antisense strand to SEQ ID NO: 1024574
ucucaaagcaaacuguuug

SEQ ID NO: 1024576 - RNA, 19 nt, Artificial Sequence
  Description of Artificial Sequence: Synthetic oligonucleotide
  Sense strand starting at position 3060 of SEQ ID NO: 914708
aacaguuugcuuugagaaa

SEQ ID NO: 1024577 - RNA, 19 nt, Artificial Sequence
  Description of Artificial Sequence: Synthetic oligonucleotide
  Antisense strand to SEQ ID NO: 1024576
uuucucaaagcaaacuguu

SEQ ID NO: 1024578 - RNA, 19 nt, Artificial Sequence
  Description of Artificial Sequence: Synthetic oligonucleotide
  Sense strand starting at position 3079 of SEQ ID NO: 914708
gggagagcacaguaugagu

SEQ ID NO: 1024579 - RNA, 19 nt, Artificial Sequence
  Description of Artificial Sequence: Synthetic oligonucleotide
  Antisense strand to SEQ ID NO: 1024578
acucauacugugcucuccc

SEQ ID NO: 1024580 - RNA, 19 nt, Artificial Sequence
  Description of Artificial Sequence: Synthetic oligonucleotide
  Sense strand starting at position 3131 of SEQ ID NO: 914708
uugggugcuucgauguaga

SEQ ID NO: 1024581 - RNA, 19 nt, Artificial Sequence
  Description of Artificial Sequence: Synthetic oligonucleotide
  Antisense strand to SEQ ID NO: 1024580
ucuacaucgaagcacccaa

SEQ ID NO: 1024582 - RNA, 19 nt, Artificial Sequence
  Description of Artificial Sequence: Synthetic oligonucleotide
  Sense strand starting at position 3142 of SEQ ID NO: 914708
gauguagacuuucugagca

SEQ ID NO: 1024583 - RNA, 19 nt, Artificial Sequence
  Description of Artificial Sequence: Synthetic oligonucleotide
  Antisense strand to SEQ ID NO: 1024582
ugcucagaaagucuacauc

SEQ ID NO: 1024584 - RNA, 19 nt, Artificial Sequence
  Description of Artificial Sequence: Synthetic oligonucleotide
  Sense strand starting at position 3146 of SEQ ID NO: 914708
uagacuuucugagcaaagu

SEQ ID NO: 1024585 - RNA, 19 nt, Artificial Sequence
  Description of Artificial Sequence: Synthetic oligonucleotide
  Antisense strand to SEQ ID NO: 1024584
acuuugcucagaaagucua

SEQ ID NO: 1024586 - RNA, 19 nt, Artificial Sequence
  Description of Artificial Sequence: Synthetic oligonucleotide
  Sense strand starting at position 3147 of SEQ ID NO: 914708
agacuuucugagcaaagug

SEQ ID NO: 1024587 - RNA, 19 nt, Artificial Sequence
  Description of Artificial Sequence: Synthetic oligonucleotide
  Antisense strand to SEQ ID NO: 1024586
cacuuugcucagaaagucu

SEQ ID NO: 1024588 - RNA, 19 nt, Artificial Sequence
  Description of Artificial Sequence: Synthetic oligonucleotide
  Sense strand starting at position 3309 of SEQ ID NO: 914708
cuaaucagagauggcuaau

SEQ ID NO: 1024589 - RNA, 19 nt, Artificial Sequence
  Description of Artificial Sequence: Synthetic oligonucleotide
  Antisense strand to SEQ ID NO: 1024588
auuagccaucucugauuag

SEQ ID NO: 1024590 - RNA, 19 nt, Artificial Sequence
  Description of Artificial Sequence: Synthetic oligonucleotide
  Sense strand starting at position 3352 of SEQ ID NO: 914708
acuuauuaugagugaugca

SEQ ID NO: 1024591 - RNA, 19 nt, Artificial Sequence
  Description of Artificial Sequence: Synthetic oligonucleotide
  Antisense strand to SEQ ID NO: 1024590
ugcaucacucauaauaagu

SEQ ID NO: 1024592 - RNA, 19 nt, Artificial Sequence
  Description of Artificial Sequence: Synthetic oligonucleotide
  Sense strand starting at position 3357 of SEQ ID NO: 914708
uuaugagugaugcauguua

SEQ ID NO: 1024593 - RNA, 19 nt, Artificial Sequence
  Description of Artificial Sequence: Synthetic oligonucleotide
  Antisense strand to SEQ ID NO: 1024592
uaacaugcaucacucauaa

SEQ ID NO: 1024594 - RNA, 19 nt, Artificial Sequence
  Description of Artificial Sequence: Synthetic oligonucleotide
  Sense strand starting at position 3766 of SEQ ID NO: 914708
gaagguuagaugugauuau

SEQ ID NO: 1024595 - RNA, 19 nt, Artificial Sequence
  Description of Artificial Sequence: Synthetic oligonucleotide
  Antisense strand to SEQ ID NO: 1024594
auaaucacaucuaaccuuc

SEQ ID NO: 1024596 - RNA, 19 nt, Artificial Sequence
  Description of Artificial Sequence: Synthetic oligonucleotide
  Sense strand starting at position 3770 of SEQ ID NO: 914708
guuagaugugauuauaagu

SEQ ID NO: 1024597 - RNA, 19 nt, Artificial Sequence
  Description of Artificial Sequence: Synthetic oligonucleotide
  Antisense strand to SEQ ID NO: 1024596
acuuauaaucacaucuaac

SEQ ID NO: 1024598 - RNA, 19 nt, Artificial Sequence
  Description of Artificial Sequence: Synthetic oligonucleotide
  Sense strand starting at position 3775 of SEQ ID NO: 914708
augugauuauaaguaagca

SEQ ID NO: 1024599 - RNA, 19 nt, Artificial Sequence
  Description of Artificial Sequence: Synthetic oligonucleotide
  Antisense strand to SEQ ID NO: 1024598
ugcuuacuuauaaucacau

SEQ ID NO: 1024600 - RNA, 19 nt, Artificial Sequence
  Description of Artificial Sequence: Synthetic oligonucleotide
  Sense strand starting at position 3876 of SEQ ID NO: 914708
gaggauguauuugaagaau

SEQ ID NO: 1024601 - RNA, 19 nt, Artificial Sequence
  Description of Artificial Sequence: Synthetic oligonucleotide
  Antisense strand to SEQ ID NO: 1024600
auucuucaaauacauccuc

SEQ ID NO: 1024602 - RNA, 19 nt, Artificial Sequence
  Description of Artificial Sequence: Synthetic oligonucleotide
  Sense strand starting at position 62 of SEQ ID NO: 914709
augacauguugugugggau

SEQ ID NO: 1024603 - RNA, 19 nt, Artificial Sequence
  Description of Artificial Sequence: Synthetic oligonucleotide
  Antisense strand to SEQ ID NO: 1024602
aucccacacaacaugucau

SEQ ID NO: 1024604 - RNA, 19 nt, Artificial Sequence
  Description of Artificial Sequence: Synthetic oligonucleotide
  Sense strand starting at position 170 of SEQ ID NO: 914709
acuuucguauauguuagaa

SEQ ID NO: 1024605 - RNA, 19 nt, Artificial Sequence
  Description of Artificial Sequence: Synthetic oligonucleotide
  Antisense strand to SEQ ID NO: 1024604
uucuaacauauacgaaagu

SEQ ID NO: 1024606 - RNA, 19 nt, Artificial Sequence
  Description of Artificial Sequence: Synthetic oligonucleotide
  Sense strand starting at position 620 of SEQ ID NO: 914709
auagauaacuuggcaaauu

SEQ ID NO: 1024607 - RNA, 19 nt, Artificial Sequence
  Description of Artificial Sequence: Synthetic oligonucleotide
  Antisense strand to SEQ ID NO: 1024606
aauuugccaaguuaucuau

SEQ ID NO: 1024608 - RNA, 19 nt, Artificial Sequence
  Description of Artificial Sequence: Synthetic oligonucleotide
  Sense strand starting at position 715 of SEQ ID NO: 914709
ucaaauaguugagcacauu

SEQ ID NO: 1024609 - RNA, 19 nt, Artificial Sequence
  Description of Artificial Sequence: Synthetic oligonucleotide
  Antisense strand to SEQ ID NO: 1024608
aaugugcucaacuauuuga

SEQ ID NO: 1024610 - RNA, 19 nt, Artificial Sequence
  Description of Artificial Sequence: Synthetic oligonucleotide
  Sense strand starting at position 940 of SEQ ID NO: 914709
aaguaaauugcuggcauuu

SEQ ID NO: 1024611 - RNA, 19 nt, Artificial Sequence
  Description of Artificial Sequence: Synthetic oligonucleotide
  Antisense strand to SEQ ID NO: 1024610
aaaugccagcaauuuacuu

SEQ ID NO: 1024612 - RNA, 19 nt, Artificial Sequence
  Description of Artificial Sequence: Synthetic oligonucleotide
  Sense strand starting at position 1010 of SEQ ID NO: 914709
augcauuuccugggcucua

SEQ ID NO: 1024613 - RNA, 19 nt, Artificial Sequence
  Description of Artificial Sequence: Synthetic oligonucleotide
  Antisense strand to SEQ ID NO: 1024612
uagagcccaggaaaugcau

SEQ ID NO: 1024614 - RNA, 19 nt, Artificial Sequence
  Description of Artificial Sequence: Synthetic oligonucleotide
  Sense strand starting at position 1020 of SEQ ID NO: 914709
ugggcucuauauccuaaau

SEQ ID NO: 1024615 - RNA, 19 nt, Artificial Sequence
  Description of Artificial Sequence: Synthetic oligonucleotide
  Antisense strand to SEQ ID NO: 1024614
auuuaggauauagagccca

SEQ ID NO: 1024616 - RNA, 19 nt, Artificial Sequence
  Description of Artificial Sequence: Synthetic oligonucleotide
  Sense strand starting at position 1090 of SEQ ID NO: 914709
cugugaaaucuguaaaucu

SEQ ID NO: 1024617 - RNA, 19 nt, Artificial Sequence
  Description of Artificial Sequence: Synthetic oligonucleotide
  Antisense strand to SEQ ID NO: 1024616
agauuuacagauuucacag

SEQ ID NO: 1024618 - RNA, 19 nt, Artificial Sequence
  Description of Artificial Sequence: Synthetic oligonucleotide
  Sense strand starting at position 1179 of SEQ ID NO: 914709
agacauaagucuguuuaua

SEQ ID NO: 1024619 - RNA, 19 nt, Artificial Sequence
  Description of Artificial Sequence: Synthetic oligonucleotide
  Antisense strand to SEQ ID NO: 1024618
uauaaacagacuuaugucu

SEQ ID NO: 1024620 - RNA, 19 nt, Artificial Sequence
  Description of Artificial Sequence: Synthetic oligonucleotide
  Sense strand starting at position 1308 of SEQ ID NO: 914709
uguuaugcaaguuauggua

SEQ ID NO: 1024621 - RNA, 19 nt, Artificial Sequence
  Description of Artificial Sequence: Synthetic oligonucleotide
  Antisense strand to SEQ ID NO: 1024620
uaccauaacuugcauaaca

SEQ ID NO: 1024622 - RNA, 19 nt, Artificial Sequence
  Description of Artificial Sequence: Synthetic oligonucleotide
  Sense strand starting at position 1315 of SEQ ID NO: 914709
caaguuaugguauaugugu

SEQ ID NO: 1024623 - RNA, 19 nt, Artificial Sequence
  Description of Artificial Sequence: Synthetic oligonucleotide
  Antisense strand to SEQ ID NO: 1024622
acacauauaccauaacuug

SEQ ID NO: 1024624 - RNA, 19 nt, Artificial Sequence
  Description of Artificial Sequence: Synthetic oligonucleotide
  Sense strand starting at position 1329 of SEQ ID NO: 914709
uguguaacaccauaauguu

SEQ ID NO: 1024625 - RNA, 19 nt, Artificial Sequence
  Description of Artificial Sequence: Synthetic oligonucleotide
  Antisense strand to SEQ ID NO: 1024624
aacauuaugguguuacaca

SEQ ID NO: 1024626 - RNA, 19 nt, Artificial Sequence
  Description of Artificial Sequence: Synthetic oligonucleotide
  Sense strand starting at position 1985 of SEQ ID NO: 914709
gguagugaguauuugcuau

SEQ ID NO: 1024627 - RNA, 19 nt, Artificial Sequence
  Description of Artificial Sequence: Synthetic oligonucleotide
  Antisense strand to SEQ ID NO: 1024626
auagcaaauacucacuacc

SEQ ID NO: 1024628 - RNA, 19 nt, Artificial Sequence
  Description of Artificial Sequence: Synthetic oligonucleotide
  Sense strand starting at position 2154 of SEQ ID NO: 914709
uaaauuggcuauguguaaa

SEQ ID NO: 1024629 - RNA, 19 nt, Artificial Sequence
  Description of Artificial Sequence: Synthetic oligonucleotide
  Antisense strand to SEQ ID NO: 1024628
uuuacacauagccaauuua

SEQ ID NO: 1024630 - RNA, 19 nt, Artificial Sequence
  Description of Artificial Sequence: Synthetic oligonucleotide
  Sense strand starting at position 2277 of SEQ ID NO: 914709
cagugcaugcuucuuugua

SEQ ID NO: 1024631 - RNA, 19 nt, Artificial Sequence
  Description of Artificial Sequence: Synthetic oligonucleotide
  Antisense strand to SEQ ID NO: 1024630
uacaaagaagcaugcacug

SEQ ID NO: 1024632 - RNA, 19 nt, Artificial Sequence
  Description of Artificial Sequence: Synthetic oligonucleotide
  Sense strand starting at position 2378 of SEQ ID NO: 914709
auuuaacccugggauauaa

SEQ ID NO: 1024633 - RNA, 19 nt, Artificial Sequence
  Description of Artificial Sequence: Synthetic oligonucleotide
  Antisense strand to SEQ ID NO: 1024632
uuauaucccaggguuaaau

SEQ ID NO: 1024634 - RNA, 19 nt, Artificial Sequence
  Description of Artificial Sequence: Synthetic oligonucleotide
  Sense strand starting at position 2659 of SEQ ID NO: 914709
guuaacaugcacuagauca

SEQ ID NO: 1024635 - RNA, 19 nt, Artificial Sequence
  Description of Artificial Sequence: Synthetic oligonucleotide
  Antisense strand to SEQ ID NO: 1024634
ugaucuagugcauguuaac

SEQ ID NO: 1024636 - RNA, 19 nt, Artificial Sequence
  Description of Artificial Sequence: Synthetic oligonucleotide
  Sense strand starting at position 2789 of SEQ ID NO: 914709
gagggucagaaaugcauga

SEQ ID NO: 1024637 - RNA, 19 nt, Artificial Sequence
  Description of Artificial Sequence: Synthetic oligonucleotide
  Antisense strand to SEQ ID NO: 1024636
ucaugcauuucugacccuc

SEQ ID NO: 1024638 - RNA, 19 nt, Artificial Sequence
  Description of Artificial Sequence: Synthetic oligonucleotide
  Sense strand starting at position 2800 of SEQ ID NO: 914709
augcaugagcuccaaagaa

SEQ ID NO: 1024639 - RNA, 19 nt, Artificial Sequence
  Description of Artificial Sequence: Synthetic oligonucleotide
  Antisense strand to SEQ ID NO: 1024638
uucuuuggagcucaugcau

SEQ ID NO: 1024640 - RNA, 19 nt, Artificial Sequence
  Description of Artificial Sequence: Synthetic oligonucleotide
  Sense strand starting at position 2838 of SEQ ID NO: 914709
aauugaaauugagaaugga

SEQ ID NO: 1024641 - RNA, 19 nt, Artificial Sequence
  Description of Artificial Sequence: Synthetic oligonucleotide
  Antisense strand to SEQ ID NO: 1024640
uccauucucaauuucaauu

SEQ ID NO: 1024642 - RNA, 19 nt, Artificial Sequence
  Description of Artificial Sequence: Synthetic oligonucleotide
  Sense strand starting at position 2854 of SEQ ID NO: 914709
ggaauuaguugggcuagaa

SEQ ID NO: 1024643 - RNA, 19 nt, Artificial Sequence
  Description of Artificial Sequence: Synthetic oligonucleotide
  Antisense strand to SEQ ID NO: 1024642
uucuagcccaacuaauucc

SEQ ID NO: 1024644 - RNA, 19 nt, Artificial Sequence
  Description of Artificial Sequence: Synthetic oligonucleotide
  Sense strand starting at position 2895 of SEQ ID NO: 914709
guuuguauuugucccauau

SEQ ID NO: 1024645 - RNA, 19 nt, Artificial Sequence
  Description of Artificial Sequence: Synthetic oligonucleotide
  Antisense strand to SEQ ID NO: 1024644
auaugggacaaauacaaac

SEQ ID NO: 1024646 - RNA, 19 nt, Artificial Sequence
  Description of Artificial Sequence: Synthetic oligonucleotide
  Sense strand starting at position 2897 of SEQ ID NO: 914709
uuguauuugucccauauuu

SEQ ID NO: 1024647 - RNA, 19 nt, Artificial Sequence
  Description of Artificial Sequence: Synthetic oligonucleotide
  Antisense strand to SEQ ID NO: 1024646
aaauaugggacaaauacaa

SEQ ID NO: 1024648 - RNA, 19 nt, Artificial Sequence
  Description of Artificial Sequence: Synthetic oligonucleotide
  Sense strand starting at position 2905 of SEQ ID NO: 914709
gucccauauuuaguggcua

SEQ ID NO: 1024649 - RNA, 19 nt, Artificial Sequence
  Description of Artificial Sequence: Synthetic oligonucleotide
  Antisense strand to SEQ ID NO: 1024648
uagccacuaaauaugggac

SEQ ID NO: 1024650 - RNA, 19 nt, Artificial Sequence
  Description of Artificial Sequence: Synthetic oligonucleotide
  Sense strand starting at position 3062 of SEQ ID NO: 914709
cagggaguagcuuaauggu

SEQ ID NO: 1024651 - RNA, 19 nt, Artificial Sequence
  Description of Artificial Sequence: Synthetic oligonucleotide
  Antisense strand to SEQ ID NO: 1024650
accauuaagcuacucccug

SEQ ID NO: 1024652 - RNA, 19 nt, Artificial Sequence
  Description of Artificial Sequence: Synthetic oligonucleotide
  Sense strand starting at position 3071 of SEQ ID NO: 914709
gcuuaaugguucuuaacaa

SEQ ID NO: 1024653 - RNA, 19 nt, Artificial Sequence
  Description of Artificial Sequence: Synthetic oligonucleotide
  Antisense strand to SEQ ID NO: 1024652
uuguuaagaaccauuaagc

SEQ ID NO: 1024654 - RNA, 19 nt, Artificial Sequence
  Description of Artificial Sequence: Synthetic oligonucleotide
  Sense strand starting at position 3113 of SEQ ID NO: 914709
agguaacaucacugcuuua

SEQ ID NO: 1024655 - RNA, 19 nt, Artificial Sequence
  Description of Artificial Sequence: Synthetic oligonucleotide
  Antisense strand to SEQ ID NO: 1024654
uaaagcagugauguuaccu

SEQ ID NO: 1024656 - RNA, 19 nt, Artificial Sequence
  Description of Artificial Sequence: Synthetic oligonucleotide
  Sense strand starting at position 3126 of SEQ ID NO: 914709
gcuuuacaggucugauuuc

SEQ ID NO: 1024657 - RNA, 19 nt, Artificial Sequence
  Description of Artificial Sequence: Synthetic oligonucleotide
  Antisense strand to SEQ ID NO: 1024656
gaaaucagaccuguaaagc

SEQ ID NO: 1024658 - RNA, 19 nt, Artificial Sequence
  Description of Artificial Sequence: Synthetic oligonucleotide
  Sense strand starting at position 3147 of SEQ ID NO: 914709
ucauuaaugugauuaugug

SEQ ID NO: 1024659 - RNA, 19 nt, Artificial Sequence
  Description of Artificial Sequence: Synthetic oligonucleotide
  Antisense strand to SEQ ID NO: 1024658
cacauaaucacauuaauga

SEQ ID NO: 1024660 - RNA, 19 nt, Artificial Sequence
  Description of Artificial Sequence: Synthetic oligonucleotide
  Sense strand starting at position 3151 of SEQ ID NO: 914709
uaaugugauuaugugcaaa

SEQ ID NO: 1024661 - RNA, 19 nt, Artificial Sequence
  Description of Artificial Sequence: Synthetic oligonucleotide
  Antisense strand to SEQ ID NO: 1024660
uuugcacauaaucacauua

SEQ ID NO: 1024662 - RNA, 19 nt, Artificial Sequence
  Description of Artificial Sequence: Synthetic oligonucleotide
  Sense strand starting at position 3154 of SEQ ID NO: 914709
ugugauuaugugcaaaucu

SEQ ID NO: 1024663 - RNA, 19 nt, Artificial Sequence
  Description of Artificial Sequence: Synthetic oligonucleotide
  Antisense strand to SEQ ID NO: 1024662
agauuugcacauaaucaca

SEQ ID NO: 1024664 - RNA, 19 nt, Artificial Sequence
  Description of Artificial Sequence: Synthetic oligonucleotide
  Sense strand starting at position 3196 of SEQ ID NO: 914709
uucucauuggcucaaugau

SEQ ID NO: 1024665 - RNA, 19 nt, Artificial Sequence
  Description of Artificial Sequence: Synthetic oligonucleotide
  Antisense strand to SEQ ID NO: 1024664
aucauugagccaaugagaa

SEQ ID NO: 1024666 - RNA, 19 nt, Artificial Sequence
  Description of Artificial Sequence: Synthetic oligonucleotide
  Sense strand starting at position 3204 of SEQ ID NO: 914709
ggcucaaugaucugcuaga

SEQ ID NO: 1024667 - RNA, 19 nt, Artificial Sequence
  Description of Artificial Sequence: Synthetic oligonucleotide
  Antisense strand to SEQ ID NO: 1024666
ucuagcagaucauugagcc

SEQ ID NO: 1024668 - RNA, 19 nt, Artificial Sequence
  Description of Artificial Sequence: Synthetic oligonucleotide
  Sense strand starting at position 3220 of SEQ ID NO: 914709
agauuaaaucagugaucuu

SEQ ID NO: 1024669 - RNA, 19 nt, Artificial Sequence
  Description of Artificial Sequence: Synthetic oligonucleotide
  Antisense strand to SEQ ID NO: 1024668
aagaucacugauuuaaucu

SEQ ID NO: 1024670 - RNA, 19 nt, Artificial Sequence
  Description of Artificial Sequence: Synthetic oligonucleotide
  Sense strand starting at position 3590 of SEQ ID NO: 914709
agaugagcuguccagauuc

SEQ ID NO: 1024671 - RNA, 19 nt, Artificial Sequence
  Description of Artificial Sequence: Synthetic oligonucleotide
  Antisense strand to SEQ ID NO: 1024670
gaaucuggacagcucaucu

SEQ ID NO: 1024672 - RNA, 19 nt, Artificial Sequence
  Description of Artificial Sequence: Synthetic oligonucleotide
  Sense strand starting at position 3644 of SEQ ID NO: 914709
ggaggcucucugcagacaa

SEQ ID NO: 1024673 - RNA, 19 nt, Artificial Sequence
  Description of Artificial Sequence: Synthetic oligonucleotide
  Antisense strand to SEQ ID NO: 1024672
uugucugcagagagccucc

SEQ ID NO: 1024674 - RNA, 19 nt, Artificial Sequence
  Description of Artificial Sequence: Synthetic oligonucleotide
  Sense strand starting at position 3683 of SEQ ID NO: 914709
caaggauugccucagcugu

SEQ ID NO: 1024675 - RNA, 19 nt, Artificial Sequence
  Description of Artificial Sequence: Synthetic oligonucleotide
  Antisense strand to SEQ ID NO: 1024674
acagcugaggcaauccuug

SEQ ID NO: 1024676 - RNA, 19 nt, Artificial Sequence
  Description of Artificial Sequence: Synthetic oligonucleotide
  Sense strand starting at position 3756 of SEQ ID NO: 914709
gacugauugaugugagggu

SEQ ID NO: 1024677 - RNA, 19 nt, Artificial Sequence
  Description of Artificial Sequence: Synthetic oligonucleotide
  Antisense strand to SEQ ID NO: 1024676
acccucacaucaaucaguc

SEQ ID NO: 1024678 - RNA, 19 nt, Artificial Sequence
  Description of Artificial Sequence: Synthetic oligonucleotide
  Sense strand starting at position 3786 of SEQ ID NO: 914709
gacaucucagucuaacgua

SEQ ID NO: 1024679 - RNA, 19 nt, Artificial Sequence
  Description of Artificial Sequence: Synthetic oligonucleotide
  Antisense strand to SEQ ID NO: 1024678
uacguuagacugagauguc

SEQ ID NO: 1024680 - RNA, 19 nt, Artificial Sequence
  Description of Artificial Sequence: Synthetic oligonucleotide
  Sense strand starting at position 3920 of SEQ ID NO: 914709
uguugaucccaagagagca

SEQ ID NO: 1024681 - RNA, 19 nt, Artificial Sequence
  Description of Artificial Sequence: Synthetic oligonucleotide
  Antisense strand to SEQ ID NO: 1024680
ugcucucuugggaucaaca

SEQ ID NO: 1024682 - RNA, 19 nt, Artificial Sequence
  Description of Artificial Sequence: Synthetic oligonucleotide
  Sense strand starting at position 4 of SEQ ID NO: 914710
ugcagaaauagccaggagu

SEQ ID NO: 1024683 - RNA, 19 nt, Artificial Sequence
  Description of Artificial Sequence: Synthetic oligonucleotide
  Antisense strand to SEQ ID NO: 1024682
acuccuggcuauuucugca

SEQ ID NO: 1024684 - RNA, 19 nt, Artificial Sequence
  Description of Artificial Sequence: Synthetic oligonucleotide
  Sense strand starting at position 6 of SEQ ID NO: 914710
cagaaauagccaggaguuu

SEQ ID NO: 1024685 - RNA, 19 nt, Artificial Sequence
  Description of Artificial Sequence: Synthetic oligonucleotide
  Antisense strand to SEQ ID NO: 1024684
aaacuccuggcuauuucug

SEQ ID NO: 1024686 - RNA, 19 nt, Artificial Sequence
  Description of Artificial Sequence: Synthetic oligonucleotide
  Sense strand starting at position 12 of SEQ ID NO: 914710
uagccaggaguuugccaua

SEQ ID NO: 1024687 - RNA, 19 nt, Artificial Sequence
  Description of Artificial Sequence: Synthetic oligonucleotide
  Antisense strand to SEQ ID NO: 1024686
uauggcaaacuccuggcua

SEQ ID NO: 1024688 - RNA, 19 nt, Artificial Sequence
  Description of Artificial Sequence: Synthetic oligonucleotide
  Sense strand starting at position 153 of SEQ ID NO: 914710
aguuacacuagugggauaa

SEQ ID NO: 1024689 - RNA, 19 nt, Artificial Sequence
  Description of Artificial Sequence: Synthetic oligonucleotide
  Antisense strand to SEQ ID NO: 1024688
uuaucccacuaguguaacu

SEQ ID NO: 1024690 - RNA, 19 nt, Artificial Sequence
  Description of Artificial Sequence: Synthetic oligonucleotide
  Sense strand starting at position 154 of SEQ ID NO: 914710
guuacacuagugggauaaa

SEQ ID NO: 1024691 - RNA, 19 nt, Artificial Sequence
  Description of Artificial Sequence: Synthetic oligonucleotide
  Antisense strand to SEQ ID NO: 1024690
uuuaucccacuaguguaac

SEQ ID NO: 1024692 - RNA, 19 nt, Artificial Sequence
  Description of Artificial Sequence: Synthetic oligonucleotide
  Sense strand starting at position 155 of SEQ ID NO: 914710
uuacacuagugggauaaau

SEQ ID NO: 1024693 - RNA, 19 nt, Artificial Sequence
  Description of Artificial Sequence: Synthetic oligonucleotide
  Antisense strand to SEQ ID NO: 1024692
auuuaucccacuaguguaa

SEQ ID NO: 1024694 - RNA, 19 nt, Artificial Sequence
  Description of Artificial Sequence: Synthetic oligonucleotide
  Sense strand starting at position 674 of SEQ ID NO: 914710
ccggaaaccaugggaucuu

SEQ ID NO: 1024695 - RNA, 19 nt, Artificial Sequence
  Description of Artificial Sequence: Synthetic oligonucleotide
  Antisense strand to SEQ ID NO: 1024694
aagaucccaugguuuccgg

SEQ ID NO: 1024696 - RNA, 19 nt, Artificial Sequence
  Description of Artificial Sequence: Synthetic oligonucleotide
  Sense strand starting at position 794 of SEQ ID NO: 914710
ucuccuuggucaucacaga

SEQ ID NO: 1024697 - RNA, 19 nt, Artificial Sequence
  Description of Artificial Sequence: Synthetic oligonucleotide
  Antisense strand to SEQ ID NO: 1024696
ucugugaugaccaaggaga

SEQ ID NO: 1024698 - RNA, 19 nt, Artificial Sequence
  Description of Artificial Sequence: Synthetic oligonucleotide
  Sense strand starting at position 1204 of SEQ ID NO: 914710
ucacucucucaugguugau

SEQ ID NO: 1024699 - RNA, 19 nt, Artificial Sequence
  Description of Artificial Sequence: Synthetic oligonucleotide
  Antisense strand to SEQ ID NO: 1024698
aucaaccaugagagaguga

SEQ ID NO: 1024700 - RNA, 19 nt, Artificial Sequence
  Description of Artificial Sequence: Synthetic oligonucleotide
  Sense strand starting at position 1334 of SEQ ID NO: 914710
ucaguuccugcgggaacaa

SEQ ID NO: 1024701 - RNA, 19 nt, Artificial Sequence
  Description of Artificial Sequence: Synthetic oligonucleotide
  Antisense strand to SEQ ID NO: 1024700
uuguucccgcaggaacuga

SEQ ID NO: 1024702 - RNA, 19 nt, Artificial Sequence
  Description of Artificial Sequence: Synthetic oligonucleotide
  Sense strand starting at position 1353 of SEQ ID NO: 914710
acccuaacuguuuagagca

SEQ ID NO: 1024703 - RNA, 19 nt, Artificial Sequence
  Description of Artificial Sequence: Synthetic oligonucleotide
  Antisense strand to SEQ ID NO: 1024702
ugcucuaaacaguuagggu

SEQ ID NO: 1024704 - RNA, 19 nt, Artificial Sequence
  Description of Artificial Sequence: Synthetic oligonucleotide
  Sense strand starting at position 1444 of SEQ ID NO: 914710
gcaaacuaucuugaggcuu

SEQ ID NO: 1024705 - RNA, 19 nt, Artificial Sequence
  Description of Artificial Sequence: Synthetic oligonucleotide
  Antisense strand to SEQ ID NO: 1024704
aagccucaagauaguuugc

SEQ ID NO: 1024706 - RNA, 19 nt, Artificial Sequence
  Description of Artificial Sequence: Synthetic oligonucleotide
  Sense strand starting at position 1463 of SEQ ID NO: 914710
agcuuucuccugcaaggau

SEQ ID NO: 1024707 - RNA, 19 nt, Artificial Sequence
  Description of Artificial Sequence: Synthetic oligonucleotide
  Antisense strand to SEQ ID NO: 1024706
auccuugcaggagaaagcu

SEQ ID NO: 1024708 - RNA, 19 nt, Artificial Sequence
  Description of Artificial Sequence: Synthetic oligonucleotide
  Sense strand starting at position 1466 of SEQ ID NO: 914710
uuucuccugcaaggauuaa

SEQ ID NO: 1024709 - RNA, 19 nt, Artificial Sequence
  Description of Artificial Sequence: Synthetic oligonucleotide
  Antisense strand to SEQ ID NO: 1024708
uuaauccuugcaggagaaa

SEQ ID NO: 1024710 - RNA, 19 nt, Artificial Sequence
  Description of Artificial Sequence: Synthetic oligonucleotide
  Sense strand starting at position 1516 of SEQ ID NO: 914710
ccaguuuaaucuuugugga

SEQ ID NO: 1024711 - RNA, 19 nt, Artificial Sequence
  Description of Artificial Sequence: Synthetic oligonucleotide
  Antisense strand to SEQ ID NO: 1024710
uccacaaagauuaaacugg

SEQ ID NO: 1024712 - RNA, 19 nt, Artificial Sequence
  Description of Artificial Sequence: Synthetic oligonucleotide
  Sense strand starting at position 1517 of SEQ ID NO: 914710
caguuuaaucuuuguggaa

SEQ ID NO: 1024713 - RNA, 19 nt, Artificial Sequence
  Description of Artificial Sequence: Synthetic oligonucleotide
  Antisense strand to SEQ ID NO: 1024712
uuccacaaagauuaaacug

SEQ ID NO: 1024714 - RNA, 19 nt, Artificial Sequence
  Description of Artificial Sequence: Synthetic oligonucleotide
  Sense strand starting at position 1518 of SEQ ID NO: 914710
aguuuaaucuuuguggaau

SEQ ID NO: 1024715 - RNA, 19 nt, Artificial Sequence
  Description of Artificial Sequence: Synthetic oligonucleotide
  Antisense strand to SEQ ID NO: 1024714
auuccacaaagauuaaacu

SEQ ID NO: 1024716 - RNA, 19 nt, Artificial Sequence
  Description of Artificial Sequence: Synthetic oligonucleotide
  Sense strand starting at position 1521 of SEQ ID NO: 914710
uuaaucuuuguggaaucau

SEQ ID NO: 1024717 - RNA, 19 nt, Artificial Sequence
  Description of Artificial Sequence: Synthetic oligonucleotide
  Antisense strand to SEQ ID NO: 1024716
augauuccacaaagauuaa

SEQ ID NO: 1024718 - RNA, 19 nt, Artificial Sequence
  Description of Artificial Sequence: Synthetic oligonucleotide
  Sense strand starting at position 1731 of SEQ ID NO: 914710
gucaguagucucucuugcu

SEQ ID NO: 1024719 - RNA, 19 nt, Artificial Sequence
  Description of Artificial Sequence: Synthetic oligonucleotide
  Antisense strand to SEQ ID NO: 1024718
agcaagagagacuacugac

SEQ ID NO: 1024720 - RNA, 19 nt, Artificial Sequence
  Description of Artificial Sequence: Synthetic oligonucleotide
  Sense strand starting at position 1987 of SEQ ID NO: 914710
gucguuuaaccuugagcag

SEQ ID NO: 1024721 - RNA, 19 nt, Artificial Sequence
  Description of Artificial Sequence: Synthetic oligonucleotide
  Antisense strand to SEQ ID NO: 1024720
cugcucaagguuaaacgac

SEQ ID NO: 1024722 - RNA, 19 nt, Artificial Sequence
  Description of Artificial Sequence: Synthetic oligonucleotide
  Sense strand starting at position 2475 of SEQ ID NO: 914710
ccaggauccuuugagcuaa

SEQ ID NO: 1024723 - RNA, 19 nt, Artificial Sequence
  Description of Artificial Sequence: Synthetic oligonucleotide
  Antisense strand to SEQ ID NO: 1024722
uuagcucaaaggauccugg

SEQ ID NO: 1024724 - RNA, 19 nt, Artificial Sequence
  Description of Artificial Sequence: Synthetic oligonucleotide
  Sense strand starting at position 2516 of SEQ ID NO: 914710
uguccuguuaggcagauga

SEQ ID NO: 1024725 - RNA, 19 nt, Artificial Sequence
  Description of Artificial Sequence: Synthetic oligonucleotide
  Antisense strand to SEQ ID NO: 1024724
ucaucugccuaacaggaca

SEQ ID NO: 1024726 - RNA, 19 nt, Artificial Sequence
  Description of Artificial Sequence: Synthetic oligonucleotide
  Sense strand starting at position 2520 of SEQ ID NO: 914710
cuguuaggcagaugaggaa

SEQ ID NO: 1024727 - RNA, 19 nt, Artificial Sequence
  Description of Artificial Sequence: Synthetic oligonucleotide
  Antisense strand to SEQ ID NO: 1024726
uuccucaucugccuaacag

SEQ ID NO: 1024728 - RNA, 19 nt, Artificial Sequence
  Description of Artificial Sequence: Synthetic oligonucleotide
  Sense strand starting at position 2812 of SEQ ID NO: 914710
cugugauucugggcuaacu

SEQ ID NO: 1024729 - RNA, 19 nt, Artificial Sequence
  Description of Artificial Sequence: Synthetic oligonucleotide
  Antisense strand to SEQ ID NO: 1024728
aguuagcccagaaucacag

SEQ ID NO: 1024730 - RNA, 19 nt, Artificial Sequence
  Description of Artificial Sequence: Synthetic oligonucleotide
  Sense strand starting at position 2814 of SEQ ID NO: 914710
gugauucugggcuaacucu

SEQ ID NO: 1024731 - RNA, 19 nt, Artificial Sequence
  Description of Artificial Sequence: Synthetic oligonucleotide
  Antisense strand to SEQ ID NO: 1024730
agaguuagcccagaaucac

SEQ ID NO: 1024732 - RNA, 19 nt, Artificial Sequence
  Description of Artificial Sequence: Synthetic oligonucleotide
  Sense strand starting at position 2931 of SEQ ID NO: 914710
cagguuugggcaggaagaa

SEQ ID NO: 1024733 - RNA, 19 nt, Artificial Sequence
  Description of Artificial Sequence: Synthetic oligonucleotide
  Antisense strand to SEQ ID NO: 1024732
uucuuccugcccaaaccug

SEQ ID NO: 1024734 - RNA, 19 nt, Artificial Sequence
  Description of Artificial Sequence: Synthetic oligonucleotide
  Sense strand starting at position 3025 of SEQ ID NO: 914710
gggaagaguccagguugga

SEQ ID NO: 1024735 - RNA, 19 nt, Artificial Sequence
  Description of Artificial Sequence: Synthetic oligonucleotide
  Antisense strand to SEQ ID NO: 1024734
uccaaccuggacucuuccc

SEQ ID NO: 1024736 - RNA, 19 nt, Artificial Sequence
  Description of Artificial Sequence: Synthetic oligonucleotide
  Sense strand starting at position 3062 of SEQ ID NO: 914710
cagacuaugaguggcagua

SEQ ID NO: 1024737 - RNA, 19 nt, Artificial Sequence
  Description of Artificial Sequence: Synthetic oligonucleotide
  Antisense strand to SEQ ID NO: 1024736
uacugccacucauagucug

SEQ ID NO: 1024738 - RNA, 19 nt, Artificial Sequence
  Description of Artificial Sequence: Synthetic oligonucleotide
  Sense strand starting at position 3074 of SEQ ID NO: 914710
ggcaguaaguguagggaaa

SEQ ID NO: 1024739 - RNA, 19 nt, Artificial Sequence
  Description of Artificial Sequence: Synthetic oligonucleotide
  Antisense strand to SEQ ID NO: 1024738
uuucccuacacuuacugcc

SEQ ID NO: 1024740 - RNA, 19 nt, Artificial Sequence
  Description of Artificial Sequence: Synthetic oligonucleotide
  Sense strand starting at position 3098 of SEQ ID NO: 914710
ggcccaguaaucugggcaa

SEQ ID NO: 1024741 - RNA, 19 nt, Artificial Sequence
  Description of Artificial Sequence: Synthetic oligonucleotide
  Antisense strand to SEQ ID NO: 1024740
uugcccagauuacugggcc

SEQ ID NO: 1024742 - RNA, 19 nt, Artificial Sequence
  Description of Artificial Sequence: Synthetic oligonucleotide
  Sense strand starting at position 3100 of SEQ ID NO: 914710
cccaguaaucugggcaaug

SEQ ID NO: 1024743 - RNA, 19 nt, Artificial Sequence
  Description of Artificial Sequence: Synthetic oligonucleotide
  Antisense strand to SEQ ID NO: 1024742
cauugcccagauuacuggg

SEQ ID NO: 1024744 - RNA, 19 nt, Artificial Sequence
  Description of Artificial Sequence: Synthetic oligonucleotide
  Sense strand starting at position 3248 of SEQ ID NO: 914710
gcuuauguccugcaacagu

SEQ ID NO: 1024745 - RNA, 19 nt, Artificial Sequence
  Description of Artificial Sequence: Synthetic oligonucleotide
  Antisense strand to SEQ ID NO: 1024744
acuguugcaggacauaagc

SEQ ID NO: 1024746 - RNA, 19 nt, Artificial Sequence
  Description of Artificial Sequence: Synthetic oligonucleotide
  Sense strand starting at position 3261 of SEQ ID NO: 914710
aacagugagccauaccuga

SEQ ID NO: 1024747 - RNA, 19 nt, Artificial Sequence
  Description of Artificial Sequence: Synthetic oligonucleotide
  Antisense strand to SEQ ID NO: 1024746
ucagguauggcucacuguu

SEQ ID NO: 1024748 - RNA, 19 nt, Artificial Sequence
  Description of Artificial Sequence: Synthetic oligonucleotide
  Sense strand starting at position 3266 of SEQ ID NO: 914710
ugagccauaccugaaucuu

SEQ ID NO: 1024749 - RNA, 19 nt, Artificial Sequence
  Description of Artificial Sequence: Synthetic oligonucleotide
  Antisense strand to SEQ ID NO: 1024748
aagauucagguauggcuca

SEQ ID NO: 1024750 - RNA, 19 nt, Artificial Sequence
  Description of Artificial Sequence: Synthetic oligonucleotide
  Sense strand starting at position 3274 of SEQ ID NO: 914710
accugaaucuugugacaac

SEQ ID NO: 1024751 - RNA, 19 nt, Artificial Sequence
  Description of Artificial Sequence: Synthetic oligonucleotide
  Antisense strand to SEQ ID NO: 1024750
guugucacaagauucaggu

SEQ ID NO: 1024752 - RNA, 19 nt, Artificial Sequence
  Description of Artificial Sequence: Synthetic oligonucleotide
  Sense strand starting at position 3285 of SEQ ID NO: 914710
gugacaaccugagaagugu

SEQ ID NO: 1024753 - RNA, 19 nt, Artificial Sequence
  Description of Artificial Sequence: Synthetic oligonucleotide
  Antisense strand to SEQ ID NO: 1024752
acacuucucagguugucac

SEQ ID NO: 1024754 - RNA, 19 nt, Artificial Sequence
  Description of Artificial Sequence: Synthetic oligonucleotide
  Sense strand starting at position 3384 of SEQ ID NO: 914710
gagccuuuggcugagacca

SEQ ID NO: 1024755 - RNA, 19 nt, Artificial Sequence
  Description of Artificial Sequence: Synthetic oligonucleotide
  Antisense strand to SEQ ID NO: 1024754
uggucucagccaaaggcuc

SEQ ID NO: 1024756 - RNA, 19 nt, Artificial Sequence
  Description of Artificial Sequence: Synthetic oligonucleotide
  Sense strand starting at position 3472 of SEQ ID NO: 914710
auuaauggguuauaggaaa

SEQ ID NO: 1024757 - RNA, 19 nt, Artificial Sequence
  Description of Artificial Sequence: Synthetic oligonucleotide
  Antisense strand to SEQ ID NO: 1024756
uuuccuauaacccauuaau

SEQ ID NO: 1024758 - RNA, 19 nt, Artificial Sequence
  Description of Artificial Sequence: Synthetic oligonucleotide
  Sense strand starting at position 3628 of SEQ ID NO: 914710
gucggagacuugcucugua

SEQ ID NO: 1024759 - RNA, 19 nt, Artificial Sequence
  Description of Artificial Sequence: Synthetic oligonucleotide
  Antisense strand to SEQ ID NO: 1024758
uacagagcaagucuccgac

SEQ ID NO: 1024760 - RNA, 19 nt, Artificial Sequence
  Description of Artificial Sequence: Synthetic oligonucleotide
  Sense strand starting at position 3740 of SEQ ID NO: 914710
uggaauuauaggcgccuga

SEQ ID NO: 1024761 - RNA, 19 nt, Artificial Sequence
  Description of Artificial Sequence: Synthetic oligonucleotide
  Antisense strand to SEQ ID NO: 1024760
ucaggcgccuauaauucca

SEQ ID NO: 1024762 - RNA, 19 nt, Artificial Sequence
  Description of Artificial Sequence: Synthetic oligonucleotide
  Sense strand starting at position 317 of SEQ ID NO: 914711
ccggaaaccaugggaucuu

SEQ ID NO: 1024763 - RNA, 19 nt, Artificial Sequence
  Description of Artificial Sequence: Synthetic oligonucleotide
  Antisense strand to SEQ ID NO: 1024762
aagaucccaugguuuccgg

SEQ ID NO: 1024764 - RNA, 19 nt, Artificial Sequence
  Description of Artificial Sequence: Synthetic oligonucleotide
  Sense strand starting at position 437 of SEQ ID NO: 914711
ucuccuuggucaucacaga

SEQ ID NO: 1024765 - RNA, 19 nt, Artificial Sequence
  Description of Artificial Sequence: Synthetic oligonucleotide
  Antisense strand to SEQ ID NO: 1024764
ucugugaugaccaaggaga

SEQ ID NO: 1024766 - RNA, 19 nt, Artificial Sequence
  Description of Artificial Sequence: Synthetic oligonucleotide
  Sense strand starting at position 825 of SEQ ID NO: 914711
cucuauugauuccaguguu

SEQ ID NO: 1024767 - RNA, 19 nt, Artificial Sequence
  Description of Artificial Sequence: Synthetic oligonucleotide
  Antisense strand to SEQ ID NO: 1024766
aacacuggaaucaauagag

SEQ ID NO: 1024768 - RNA, 19 nt, Artificial Sequence
  Description of Artificial Sequence: Synthetic oligonucleotide
  Sense strand starting at position 847 of SEQ ID NO: 914711
ucacucucucaugguugau

SEQ ID NO: 1024769 - RNA, 19 nt, Artificial Sequence
  Description of Artificial Sequence: Synthetic oligonucleotide
  Antisense strand to SEQ ID NO: 1024768
aucaaccaugagagaguga

SEQ ID NO: 1024770 - RNA, 19 nt, Artificial Sequence
  Description of Artificial Sequence: Synthetic oligonucleotide
  Sense strand starting at position 977 of SEQ ID NO: 914711
ucaguuccugcgggaacaa

SEQ ID NO: 1024771 - RNA, 19 nt, Artificial Sequence
  Description of Artificial Sequence: Synthetic oligonucleotide
  Antisense strand to SEQ ID NO: 1024770
uuguucccgcaggaacuga

SEQ ID NO: 1024772 - RNA, 19 nt, Artificial Sequence
  Description of Artificial Sequence: Synthetic oligonucleotide
  Sense strand starting at position 996 of SEQ ID NO: 914711
acccuaacuguuuagagca

SEQ ID NO: 1024773 - RNA, 19 nt, Artificial Sequence
  Description of Artificial Sequence: Synthetic oligonucleotide
  Antisense strand to SEQ ID NO: 1024772
ugcucuaaacaguuagggu

SEQ ID NO: 1024774 - RNA, 19 nt, Artificial Sequence
  Description of Artificial Sequence: Synthetic oligonucleotide
  Sense strand starting at position 1087 of SEQ ID NO: 914711
gcaaacuaucuugaggcuu

SEQ ID NO: 1024775 - RNA, 19 nt, Artificial Sequence
  Description of Artificial Sequence: Synthetic oligonucleotide
  Antisense strand to SEQ ID NO: 1024774
aagccucaagauaguuugc

SEQ ID NO: 1024776 - RNA, 19 nt, Artificial Sequence
  Description of Artificial Sequence: Synthetic oligonucleotide
  Sense strand starting at position 1106 of SEQ ID NO: 914711
agcuuucuccugcaaggau

SEQ ID NO: 1024777 - RNA, 19 nt, Artificial Sequence
  Description of Artificial Sequence: Synthetic oligonucleotide
  Antisense strand to SEQ ID NO: 1024776
auccuugcaggagaaagcu

SEQ ID NO: 1024778 - RNA, 19 nt, Artificial Sequence
  Description of Artificial Sequence: Synthetic oligonucleotide
  Sense strand starting at position 1109 of SEQ ID NO: 914711
uuucuccugcaaggauuaa

SEQ ID NO: 1024779 - RNA, 19 nt, Artificial Sequence
  Description of Artificial Sequence: Synthetic oligonucleotide
  Antisense strand to SEQ ID NO: 1024778
uuaauccuugcaggagaaa

SEQ ID NO: 1024780 - RNA, 19 nt, Artificial Sequence
  Description of Artificial Sequence: Synthetic oligonucleotide
  Sense strand starting at position 1159 of SEQ ID NO: 914711
ccaguuuaaucuuugugga

SEQ ID NO: 1024781 - RNA, 19 nt, Artificial Sequence
  Description of Artificial Sequence: Synthetic oligonucleotide
  Antisense strand to SEQ ID NO: 1024780
uccacaaagauuaaacugg

SEQ ID NO: 1024782 - RNA, 19 nt, Artificial Sequence
  Description of Artificial Sequence: Synthetic oligonucleotide
  Sense strand starting at position 1160 of SEQ ID NO: 914711
caguuuaaucuuuguggaa

SEQ ID NO: 1024783 - RNA, 19 nt, Artificial Sequence
  Description of Artificial Sequence: Synthetic oligonucleotide
  Antisense strand to SEQ ID NO: 1024782
uuccacaaagauuaaacug

SEQ ID NO: 1024784 - RNA, 19 nt, Artificial Sequence
  Description of Artificial Sequence: Synthetic oligonucleotide
  Sense strand starting at position 1161 of SEQ ID NO: 914711
aguuuaaucuuuguggaau

SEQ ID NO: 1024785 - RNA, 19 nt, Artificial Sequence
  Description of Artificial Sequence: Synthetic oligonucleotide
  Antisense strand to SEQ ID NO: 1024784
auuccacaaagauuaaacu

SEQ ID NO: 1024786 - RNA, 19 nt, Artificial Sequence
  Description of Artificial Sequence: Synthetic oligonucleotide
  Sense strand starting at position 1162 of SEQ ID NO: 914711
guuuaaucuuuguggaauc

SEQ ID NO: 1024787 - RNA, 19 nt, Artificial Sequence
  Description of Artificial Sequence: Synthetic oligonucleotide
  Antisense strand to SEQ ID NO: 1024786
gauuccacaaagauuaaac

SEQ ID NO: 1024788 - RNA, 19 nt, Artificial Sequence
  Description of Artificial Sequence: Synthetic oligonucleotide
  Sense strand starting at position 1163 of SEQ ID NO: 914711
uuuaaucuuuguggaauca

SEQ ID NO: 1024789 - RNA, 19 nt, Artificial Sequence
  Description of Artificial Sequence: Synthetic oligonucleotide
  Antisense strand to SEQ ID NO: 1024788
ugauuccacaaagauuaaa

SEQ ID NO: 1024790 - RNA, 19 nt, Artificial Sequence
  Description of Artificial Sequence: Synthetic oligonucleotide
  Sense strand starting at position 1164 of SEQ ID NO: 914711
uuaaucuuuguggaaucau

SEQ ID NO: 1024791 - RNA, 19 nt, Artificial Sequence
  Description of Artificial Sequence: Synthetic oligonucleotide
  Antisense strand to SEQ ID NO: 1024790
augauuccacaaagauuaa

SEQ ID NO: 1024792 - RNA, 19 nt, Artificial Sequence
  Description of Artificial Sequence: Synthetic oligonucleotide
  Sense strand starting at position 1374 of SEQ ID NO: 914711
gucaguagucucucuugcu

SEQ ID NO: 1024793 - RNA, 19 nt, Artificial Sequence
  Description of Artificial Sequence: Synthetic oligonucleotide
  Antisense strand to SEQ ID NO: 1024792
agcaagagagacuacugac

SEQ ID NO: 1024794 - RNA, 19 nt, Artificial Sequence
  Description of Artificial Sequence: Synthetic oligonucleotide
  Sense strand starting at position 1630 of SEQ ID NO: 914711
gucguuuaaccuugagcag

SEQ ID NO: 1024795 - RNA, 19 nt, Artificial Sequence
  Description of Artificial Sequence: Synthetic oligonucleotide
  Antisense strand to SEQ ID NO: 1024794
cugcucaagguuaaacgac

SEQ ID NO: 1024796 - RNA, 19 nt, Artificial Sequence
  Description of Artificial Sequence: Synthetic oligonucleotide
  Sense strand starting at position 2118 of SEQ ID NO: 914711
ccaggauccuuugagcuaa

SEQ ID NO: 1024797 - RNA, 19 nt, Artificial Sequence
  Description of Artificial Sequence: Synthetic oligonucleotide
  Antisense strand to SEQ ID NO: 1024796
uuagcucaaaggauccugg

SEQ ID NO: 1024798 - RNA, 19 nt, Artificial Sequence
  Description of Artificial Sequence: Synthetic oligonucleotide
  Sense strand starting at position 2128 of SEQ ID NO: 914711
uugagcuaaucucaucagu

SEQ ID NO: 1024799 - RNA, 19 nt, Artificial Sequence
  Description of Artificial Sequence: Synthetic oligonucleotide
  Antisense strand to SEQ ID NO: 1024798
acugaugagauuagcucaa

SEQ ID NO: 1024800 - RNA, 19 nt, Artificial Sequence
  Description of Artificial Sequence: Synthetic oligonucleotide
  Sense strand starting at position 2159 of SEQ ID NO: 914711
uguccuguuaggcagauga

SEQ ID NO: 1024801 - RNA, 19 nt, Artificial Sequence
  Description of Artificial Sequence: Synthetic oligonucleotide
  Antisense strand to SEQ ID NO: 1024800
ucaucugccuaacaggaca

SEQ ID NO: 1024802 - RNA, 19 nt, Artificial Sequence
  Description of Artificial Sequence: Synthetic oligonucleotide
  Sense strand starting at position 2163 of SEQ ID NO: 914711
cuguuaggcagaugaggaa

SEQ ID NO: 1024803 - RNA, 19 nt, Artificial Sequence
  Description of Artificial Sequence: Synthetic oligonucleotide
  Antisense strand to SEQ ID NO: 1024802
uuccucaucugccuaacag

SEQ ID NO: 1024804 - RNA, 19 nt, Artificial Sequence
  Description of Artificial Sequence: Synthetic oligonucleotide
  Sense strand starting at position 2455 of SEQ ID NO: 914711
cugugauucugggcuaacu

SEQ ID NO: 1024805 - RNA, 19 nt, Artificial Sequence
  Description of Artificial Sequence: Synthetic oligonucleotide
  Antisense strand to SEQ ID NO: 1024804
aguuagcccagaaucacag

SEQ ID NO: 1024806 - RNA, 19 nt, Artificial Sequence
  Description of Artificial Sequence: Synthetic oligonucleotide
  Sense strand starting at position 2457 of SEQ ID NO: 914711
gugauucugggcuaacucu

SEQ ID NO: 1024807 - RNA, 19 nt, Artificial Sequence
  Description of Artificial Sequence: Synthetic oligonucleotide
  Antisense strand to SEQ ID NO: 1024806
agaguuagcccagaaucac

SEQ ID NO: 1024808 - RNA, 19 nt, Artificial Sequence
  Description of Artificial Sequence: Synthetic oligonucleotide
  Sense strand starting at position 2574 of SEQ ID NO: 914711
cagguuugggcaggaagaa

SEQ ID NO: 1024809 - RNA, 19 nt, Artificial Sequence
  Description of Artificial Sequence: Synthetic oligonucleotide
  Antisense strand to SEQ ID NO: 1024808
uucuuccugcccaaaccug

SEQ ID NO: 1024810 - RNA, 19 nt, Artificial Sequence
  Description of Artificial Sequence: Synthetic oligonucleotide
  Sense strand starting at position 2668 of SEQ ID NO: 914711
gggaagaguccagguugga

SEQ ID NO: 1024811 - RNA, 19 nt, Artificial Sequence
  Description of Artificial Sequence: Synthetic oligonucleotide
  Antisense strand to SEQ ID NO: 1024810
uccaaccuggacucuuccc

SEQ ID NO: 1024812 - RNA, 19 nt, Artificial Sequence
  Description of Artificial Sequence: Synthetic oligonucleotide
  Sense strand starting at position 2705 of SEQ ID NO: 914711
cagacuaugaguggcagua

SEQ ID NO: 1024813 - RNA, 19 nt, Artificial Sequence
  Description of Artificial Sequence: Synthetic oligonucleotide
  Antisense strand to SEQ ID NO: 1024812
uacugccacucauagucug

SEQ ID NO: 1024814 - RNA, 19 nt, Artificial Sequence
  Description of Artificial Sequence: Synthetic oligonucleotide
  Sense strand starting at position 2717 of SEQ ID NO: 914711
ggcaguaaguguagggaaa

SEQ ID NO: 1024815 - RNA, 19 nt, Artificial Sequence
  Description of Artificial Sequence: Synthetic oligonucleotide
  Antisense strand to SEQ ID NO: 1024814
uuucccuacacuuacugcc

SEQ ID NO: 1024816 - RNA, 19 nt, Artificial Sequence
  Description of Artificial Sequence: Synthetic oligonucleotide
  Sense strand starting at position 2741 of SEQ ID NO: 914711
ggcccaguaaucugggcaa

SEQ ID NO: 1024817 - RNA, 19 nt, Artificial Sequence
  Description of Artificial Sequence: Synthetic oligonucleotide
  Antisense strand to SEQ ID NO: 1024816
uugcccagauuacugggcc

SEQ ID NO: 1024818 - RNA, 19 nt, Artificial Sequence
  Description of Artificial Sequence: Synthetic oligonucleotide
  Sense strand starting at position 2743 of SEQ ID NO: 914711
cccaguaaucugggcaaug

SEQ ID NO: 1024819 - RNA, 19 nt, Artificial Sequence
  Description of Artificial Sequence: Synthetic oligonucleotide
  Antisense strand to SEQ ID NO: 1024818
cauugcccagauuacuggg

SEQ ID NO: 1024820 - RNA, 19 nt, Artificial Sequence
  Description of Artificial Sequence: Synthetic oligonucleotide
  Sense strand starting at position 2891 of SEQ ID NO: 914711
gcuuauguccugcaacagu

SEQ ID NO: 1024821 - RNA, 19 nt, Artificial Sequence
  Description of Artificial Sequence: Synthetic oligonucleotide
  Antisense strand to SEQ ID NO: 1024820
acuguugcaggacauaagc

SEQ ID NO: 1024822 - RNA, 19 nt, Artificial Sequence
  Description of Artificial Sequence: Synthetic oligonucleotide
  Sense strand starting at position 2904 of SEQ ID NO: 914711
aacagugagccauaccuga

SEQ ID NO: 1024823 - RNA, 19 nt, Artificial Sequence
  Description of Artificial Sequence: Synthetic oligonucleotide
  Antisense strand to SEQ ID NO: 1024822
ucagguauggcucacuguu

SEQ ID NO: 1024824 - RNA, 19 nt, Artificial Sequence
  Description of Artificial Sequence: Synthetic oligonucleotide
  Sense strand starting at position 2909 of SEQ ID NO: 914711
ugagccauaccugaaucuu

SEQ ID NO: 1024825 - RNA, 19 nt, Artificial Sequence
  Description of Artificial Sequence: Synthetic oligonucleotide
  Antisense strand to SEQ ID NO: 1024824
aagauucagguauggcuca

SEQ ID NO: 1024826 - RNA, 19 nt, Artificial Sequence
  Description of Artificial Sequence: Synthetic oligonucleotide
  Sense strand starting at position 2915 of SEQ ID NO: 914711
auaccugaaucuugugaca

SEQ ID NO: 1024827 - RNA, 19 nt, Artificial Sequence
  Description of Artificial Sequence: Synthetic oligonucleotide
  Antisense strand to SEQ ID NO: 1024826
ugucacaagauucagguau

SEQ ID NO: 1024828 - RNA, 19 nt, Artificial Sequence
  Description of Artificial Sequence: Synthetic oligonucleotide
  Sense strand starting at position 2917 of SEQ ID NO: 914711
accugaaucuugugacaac

SEQ ID NO: 1024829 - RNA, 19 nt, Artificial Sequence
  Description of Artificial Sequence: Synthetic oligonucleotide
  Antisense strand to SEQ ID NO: 1024828
guugucacaagauucaggu

SEQ ID NO: 1024830 - RNA, 19 nt, Artificial Sequence
  Description of Artificial Sequence: Synthetic oligonucleotide
  Sense strand starting at position 2928 of SEQ ID NO: 914711
gugacaaccugagaagugu

SEQ ID NO: 1024831 - RNA, 19 nt, Artificial Sequence
  Description of Artificial Sequence: Synthetic oligonucleotide
  Antisense strand to SEQ ID NO: 1024830
acacuucucagguugucac

SEQ ID NO: 1024832 - RNA, 19 nt, Artificial Sequence
  Description of Artificial Sequence: Synthetic oligonucleotide
  Sense strand starting at position 3027 of SEQ ID NO: 914711
gagccuuuggcugagacca

SEQ ID NO: 1024833 - RNA, 19 nt, Artificial Sequence
  Description of Artificial Sequence: Synthetic oligonucleotide
  Antisense strand to SEQ ID NO: 1024832
uggucucagccaaaggcuc

SEQ ID NO: 1024834 - RNA, 19 nt, Artificial Sequence
  Description of Artificial Sequence: Synthetic oligonucleotide
  Sense strand starting at position 3096 of SEQ ID NO: 914711
uggguuggcuagcauacau

SEQ ID NO: 1024835 - RNA, 19 nt, Artificial Sequence
  Description of Artificial Sequence: Synthetic oligonucleotide
  Antisense strand to SEQ ID NO: 1024834
auguaugcuagccaaccca

SEQ ID NO: 1024836 - RNA, 19 nt, Artificial Sequence
  Description of Artificial Sequence: Synthetic oligonucleotide
  Sense strand starting at position 3115 of SEQ ID NO: 914711
auuaauggguuauaggaaa

SEQ ID NO: 1024837 - RNA, 19 nt, Artificial Sequence
  Description of Artificial Sequence: Synthetic oligonucleotide
  Antisense strand to SEQ ID NO: 1024836
uuuccuauaacccauuaau

SEQ ID NO: 1024838 - RNA, 19 nt, Artificial Sequence
  Description of Artificial Sequence: Synthetic oligonucleotide
  Sense strand starting at position 3271 of SEQ ID NO: 914711
gucggagacuugcucugua

SEQ ID NO: 1024839 - RNA, 19 nt, Artificial Sequence
  Description of Artificial Sequence: Synthetic oligonucleotide
  Antisense strand to SEQ ID NO: 1024838
uacagagcaagucuccgac

SEQ ID NO: 1024840 - RNA, 19 nt, Artificial Sequence
  Description of Artificial Sequence: Synthetic oligonucleotide
  Sense strand starting at position 3383 of SEQ ID NO: 914711
uggaauuauaggcgccuga

SEQ ID NO: 1024841 - RNA, 19 nt, Artificial Sequence
  Description of Artificial Sequence: Synthetic oligonucleotide
  Antisense strand to SEQ ID NO: 1024840
ucaggcgccuauaauucca

SEQ ID NO: 1024842 - RNA, 19 nt, Artificial Sequence
  Description of Artificial Sequence: Synthetic oligonucleotide
  Sense strand starting at position 58 of SEQ ID NO: 914712
cucacauagugccuguaau

SEQ ID NO: 1024843 - RNA, 19 nt, Artificial Sequence
  Description of Artificial Sequence: Synthetic oligonucleotide
  Antisense strand to SEQ ID NO: 1024842
auuacaggcacuaugugag

SEQ ID NO: 1024844 - RNA, 19 nt, Artificial Sequence
  Description of Artificial Sequence: Synthetic oligonucleotide
  Sense strand starting at position 59 of SEQ ID NO: 914712
ucacauagugccuguaauc

SEQ ID NO: 1024845 - RNA, 19 nt, Artificial Sequence
  Description of Artificial Sequence: Synthetic oligonucleotide
  Antisense strand to SEQ ID NO: 1024844
gauuacaggcacuauguga

SEQ ID NO: 1024846 - RNA, 19 nt, Artificial Sequence
  Description of Artificial Sequence: Synthetic oligonucleotide
  Sense strand starting at position 1149 of SEQ ID NO: 914712
aaauaaauguuauagggag

SEQ ID NO: 1024847 - RNA, 19 nt, Artificial Sequence
  Description of Artificial Sequence: Synthetic oligonucleotide
  Antisense strand to SEQ ID NO: 1024846
cucccuauaacauuuauuu

SEQ ID NO: 1024848 - RNA, 19 nt, Artificial Sequence
  Description of Artificial Sequence: Synthetic oligonucleotide
  Sense strand starting at position 1175 of SEQ ID NO: 914712
guccaauguggucgagaga

SEQ ID NO: 1024849 - RNA, 19 nt, Artificial Sequence
  Description of Artificial Sequence: Synthetic oligonucleotide
  Antisense strand to SEQ ID NO: 1024848
ucucucgaccacauuggac

SEQ ID NO: 1024850 - RNA, 19 nt, Artificial Sequence
  Description of Artificial Sequence: Synthetic oligonucleotide
  Sense strand starting at position 1208 of SEQ ID NO: 914712
uugcgagaugcaugaacca

SEQ ID NO: 1024851 - RNA, 19 nt, Artificial Sequence
  Description of Artificial Sequence: Synthetic oligonucleotide
  Antisense strand to SEQ ID NO: 1024850
ugguucaugcaucucgcaa

SEQ ID NO: 1024852 - RNA, 19 nt, Artificial Sequence
  Description of Artificial Sequence: Synthetic oligonucleotide
  Sense strand starting at position 1245 of SEQ ID NO: 914712
uacggcucauuucuguaau

SEQ ID NO: 1024853 - RNA, 19 nt, Artificial Sequence
  Description of Artificial Sequence: Synthetic oligonucleotide
  Antisense strand to SEQ ID NO: 1024852
auuacagaaaugagccgua

SEQ ID NO: 1024854 - RNA, 19 nt, Artificial Sequence
  Description of Artificial Sequence: Synthetic oligonucleotide
  Sense strand starting at position 1246 of SEQ ID NO: 914712
acggcucauuucuguaauc

SEQ ID NO: 1024855 - RNA, 19 nt, Artificial Sequence
  Description of Artificial Sequence: Synthetic oligonucleotide
  Antisense strand to SEQ ID NO: 1024854
gauuacagaaaugagccgu

SEQ ID NO: 1024856 - RNA, 19 nt, Artificial Sequence
  Description of Artificial Sequence: Synthetic oligonucleotide
  Sense strand starting at position 1335 of SEQ ID NO: 914712
uggagacuuugucucagga

SEQ ID NO: 1024857 - RNA, 19 nt, Artificial Sequence
  Description of Artificial Sequence: Synthetic oligonucleotide
  Antisense strand to SEQ ID NO: 1024856
uccugagacaaagucucca

SEQ ID NO: 1024858 - RNA, 19 nt, Artificial Sequence
  Description of Artificial Sequence: Synthetic oligonucleotide
  Sense strand starting at position 1380 of SEQ ID NO: 914712
agccucauaaugugagaga

SEQ ID NO: 1024859 - RNA, 19 nt, Artificial Sequence
  Description of Artificial Sequence: Synthetic oligonucleotide
  Antisense strand to SEQ ID NO: 1024858
ucucucacauuaugaggcu

SEQ ID NO: 1024860 - RNA, 19 nt, Artificial Sequence
  Description of Artificial Sequence: Synthetic oligonucleotide
  Sense strand starting at position 1455 of SEQ ID NO: 914712
gcaguuucuucccucagau

SEQ ID NO: 1024861 - RNA, 19 nt, Artificial Sequence
  Description of Artificial Sequence: Synthetic oligonucleotide
  Antisense strand to SEQ ID NO: 1024860
aucugagggaagaaacugc

SEQ ID NO: 1024862 - RNA, 19 nt, Artificial Sequence
  Description of Artificial Sequence: Synthetic oligonucleotide
  Sense strand starting at position 1457 of SEQ ID NO: 914712
aguuucuucccucagaucu

SEQ ID NO: 1024863 - RNA, 19 nt, Artificial Sequence
  Description of Artificial Sequence: Synthetic oligonucleotide
  Antisense strand to SEQ ID NO: 1024862
agaucugagggaagaaacu

SEQ ID NO: 1024864 - RNA, 19 nt, Artificial Sequence
  Description of Artificial Sequence: Synthetic oligonucleotide
  Sense strand starting at position 1465 of SEQ ID NO: 914712
cccucagaucuuuggagga

SEQ ID NO: 1024865 - RNA, 19 nt, Artificial Sequence
  Description of Artificial Sequence: Synthetic oligonucleotide
  Antisense strand to SEQ ID NO: 1024864
uccuccaaagaucugaggg

SEQ ID NO: 1024866 - RNA, 19 nt, Artificial Sequence
  Description of Artificial Sequence: Synthetic oligonucleotide
  Sense strand starting at position 1467 of SEQ ID NO: 914712
cucagaucuuuggaggagu

SEQ ID NO: 1024867 - RNA, 19 nt, Artificial Sequence
  Description of Artificial Sequence: Synthetic oligonucleotide
  Antisense strand to SEQ ID NO: 1024866
acuccuccaaagaucugag

SEQ ID NO: 1024868 - RNA, 19 nt, Artificial Sequence
  Description of Artificial Sequence: Synthetic oligonucleotide
  Sense strand starting at position 1469 of SEQ ID NO: 914712
cagaucuuuggaggaguca

SEQ ID NO: 1024869 - RNA, 19 nt, Artificial Sequence
  Description of Artificial Sequence: Synthetic oligonucleotide
  Antisense strand to SEQ ID NO: 1024868
ugacuccuccaaagaucug

SEQ ID NO: 1024870 - RNA, 19 nt, Artificial Sequence
  Description of Artificial Sequence: Synthetic oligonucleotide
  Sense strand starting at position 1573 of SEQ ID NO: 914712
uuauuucuguaaugcggaa

SEQ ID NO: 1024871 - RNA, 19 nt, Artificial Sequence
  Description of Artificial Sequence: Synthetic oligonucleotide
  Antisense strand to SEQ ID NO: 1024870
uuccgcauuacagaaauaa

SEQ ID NO: 1024872 - RNA, 19 nt, Artificial Sequence
  Description of Artificial Sequence: Synthetic oligonucleotide
  Sense strand starting at position 1636 of SEQ ID NO: 914712
uggcacagugucugugaaa

SEQ ID NO: 1024873 - RNA, 19 nt, Artificial Sequence
  Description of Artificial Sequence: Synthetic oligonucleotide
  Antisense strand to SEQ ID NO: 1024872
uuucacagacacugugcca

SEQ ID NO: 1024874 - RNA, 19 nt, Artificial Sequence
  Description of Artificial Sequence: Synthetic oligonucleotide
  Sense strand starting at position 1637 of SEQ ID NO: 914712
ggcacagugucugugaaau

SEQ ID NO: 1024875 - RNA, 19 nt, Artificial Sequence
  Description of Artificial Sequence: Synthetic oligonucleotide
  Antisense strand to SEQ ID NO: 1024874
auuucacagacacugugcc

SEQ ID NO: 1024876 - RNA, 19 nt, Artificial Sequence
  Description of Artificial Sequence: Synthetic oligonucleotide
  Sense strand starting at position 1639 of SEQ ID NO: 914712
cacagugucugugaaauag

SEQ ID NO: 1024877 - RNA, 19 nt, Artificial Sequence
  Description of Artificial Sequence: Synthetic oligonucleotide
  Antisense strand to SEQ ID NO: 1024876
cuauuucacagacacugug

SEQ ID NO: 1024878 - RNA, 19 nt, Artificial Sequence
  Description of Artificial Sequence: Synthetic oligonucleotide
  Sense strand starting at position 1649 of SEQ ID NO: 914712
gugaaauagucacccauau

SEQ ID NO: 1024879 - RNA, 19 nt, Artificial Sequence
  Description of Artificial Sequence: Synthetic oligonucleotide
  Antisense strand to SEQ ID NO: 1024878
auaugggugacuauuucac

SEQ ID NO: 1024880 - RNA, 19 nt, Artificial Sequence
  Description of Artificial Sequence: Synthetic oligonucleotide
  Sense strand starting at position 2110 of SEQ ID NO: 914712
aaugaaagguaggauuaga

SEQ ID NO: 1024881 - RNA, 19 nt, Artificial Sequence
  Description of Artificial Sequence: Synthetic oligonucleotide
  Antisense strand to SEQ ID NO: 1024880
ucuaauccuaccuuucauu

SEQ ID NO: 1024882 - RNA, 19 nt, Artificial Sequence
  Description of Artificial Sequence: Synthetic oligonucleotide
  Sense strand starting at position 2176 of SEQ ID NO: 914712
cgagguucaggugauauaa

SEQ ID NO: 1024883 - RNA, 19 nt, Artificial Sequence
  Description of Artificial Sequence: Synthetic oligonucleotide
  Antisense strand to SEQ ID NO: 1024882
uuauaucaccugaaccucg

SEQ ID NO: 1024884 - RNA, 19 nt, Artificial Sequence
  Description of Artificial Sequence: Synthetic oligonucleotide
  Sense strand starting at position 2218 of SEQ ID NO: 914712
ugcagaaauagccaggagu

SEQ ID NO: 1024885 - RNA, 19 nt, Artificial Sequence
  Description of Artificial Sequence: Synthetic oligonucleotide
  Antisense strand to SEQ ID NO: 1024884
acuccuggcuauuucugca

SEQ ID NO: 1024886 - RNA, 19 nt, Artificial Sequence
  Description of Artificial Sequence: Synthetic oligonucleotide
  Sense strand starting at position 2220 of SEQ ID NO: 914712
cagaaauagccaggaguuu

SEQ ID NO: 1024887 - RNA, 19 nt, Artificial Sequence
  Description of Artificial Sequence: Synthetic oligonucleotide
  Antisense strand to SEQ ID NO: 1024886
aaacuccuggcuauuucug

SEQ ID NO: 1024888 - RNA, 19 nt, Artificial Sequence
  Description of Artificial Sequence: Synthetic oligonucleotide
  Sense strand starting at position 2226 of SEQ ID NO: 914712
uagccaggaguuugccaua

SEQ ID NO: 1024889 - RNA, 19 nt, Artificial Sequence
  Description of Artificial Sequence: Synthetic oligonucleotide
  Antisense strand to SEQ ID NO: 1024888
uauggcaaacuccuggcua

SEQ ID NO: 1024890 - RNA, 19 nt, Artificial Sequence
  Description of Artificial Sequence: Synthetic oligonucleotide
  Sense strand starting at position 2367 of SEQ ID NO: 914712
aguuacacuagugggauaa

SEQ ID NO: 1024891 - RNA, 19 nt, Artificial Sequence
  Description of Artificial Sequence: Synthetic oligonucleotide
  Antisense strand to SEQ ID NO: 1024890
uuaucccacuaguguaacu

SEQ ID NO: 1024892 - RNA, 19 nt, Artificial Sequence
  Description of Artificial Sequence: Synthetic oligonucleotide
  Sense strand starting at position 2368 of SEQ ID NO: 914712
guuacacuagugggauaaa

SEQ ID NO: 1024893 - RNA, 19 nt, Artificial Sequence
  Description of Artificial Sequence: Synthetic oligonucleotide
  Antisense strand to SEQ ID NO: 1024892
uuuaucccacuaguguaac

SEQ ID NO: 1024894 - RNA, 19 nt, Artificial Sequence
  Description of Artificial Sequence: Synthetic oligonucleotide
  Sense strand starting at position 2369 of SEQ ID NO: 914712
uuacacuagugggauaaau

SEQ ID NO: 1024895 - RNA, 19 nt, Artificial Sequence
  Description of Artificial Sequence: Synthetic oligonucleotide
  Antisense strand to SEQ ID NO: 1024894
auuuaucccacuaguguaa

SEQ ID NO: 1024896 - RNA, 19 nt, Artificial Sequence
  Description of Artificial Sequence: Synthetic oligonucleotide
  Sense strand starting at position 2888 of SEQ ID NO: 914712
ccggaaaccaugggaucuu

SEQ ID NO: 1024897 - RNA, 19 nt, Artificial Sequence
  Description of Artificial Sequence: Synthetic oligonucleotide
  Antisense strand to SEQ ID NO: 1024896
aagaucccaugguuuccgg

SEQ ID NO: 1024898 - RNA, 19 nt, Artificial Sequence
  Description of Artificial Sequence: Synthetic oligonucleotide
  Sense strand starting at position 3008 of SEQ ID NO: 914712
ucuccuuggucaucacaga

SEQ ID NO: 1024899 - RNA, 19 nt, Artificial Sequence
  Description of Artificial Sequence: Synthetic oligonucleotide
  Antisense strand to SEQ ID NO: 1024898
ucugugaugaccaaggaga

SEQ ID NO: 1024900 - RNA, 19 nt, Artificial Sequence
  Description of Artificial Sequence: Synthetic oligonucleotide
  Sense strand starting at position 3418 of SEQ ID NO: 914712
ucacucucucaugguugau

SEQ ID NO: 1024901 - RNA, 19 nt, Artificial Sequence
  Description of Artificial Sequence: Synthetic oligonucleotide
  Antisense strand to SEQ ID NO: 1024900
aucaaccaugagagaguga

SEQ ID NO: 1024902 - RNA, 19 nt, Artificial Sequence
  Description of Artificial Sequence: Synthetic oligonucleotide
  Sense strand starting at position 3548 of SEQ ID NO: 914712
ucaguuccugcgggaacaa

SEQ ID NO: 1024903 - RNA, 19 nt, Artificial Sequence
  Description of Artificial Sequence: Synthetic oligonucleotide
  Antisense strand to SEQ ID NO: 1024902
uuguucccgcaggaacuga

SEQ ID NO: 1024904 - RNA, 19 nt, Artificial Sequence
  Description of Artificial Sequence: Synthetic oligonucleotide
  Sense strand starting at position 3567 of SEQ ID NO: 914712
acccuaacuguuuagagca

SEQ ID NO: 1024905 - RNA, 19 nt, Artificial Sequence
  Description of Artificial Sequence: Synthetic oligonucleotide
  Antisense strand to SEQ ID NO: 1024904
ugcucuaaacaguuagggu

SEQ ID NO: 1024906 - RNA, 19 nt, Artificial Sequence
  Description of Artificial Sequence: Synthetic oligonucleotide
  Sense strand starting at position 3658 of SEQ ID NO: 914712
gcaaacuaucuugaggcuu

SEQ ID NO: 1024907 - RNA, 19 nt, Artificial Sequence
  Description of Artificial Sequence: Synthetic oligonucleotide
  Antisense strand to SEQ ID NO: 1024906
aagccucaagauaguuugc

SEQ ID NO: 1024908 - RNA, 19 nt, Artificial Sequence
  Description of Artificial Sequence: Synthetic oligonucleotide
  Sense strand starting at position 3677 of SEQ ID NO: 914712
agcuuucuccugcaaggau

SEQ ID NO: 1024909 - RNA, 19 nt, Artificial Sequence
  Description of Artificial Sequence: Synthetic oligonucleotide
  Antisense strand to SEQ ID NO: 1024908
auccuugcaggagaaagcu

SEQ ID NO: 1024910 - RNA, 19 nt, Artificial Sequence
  Description of Artificial Sequence: Synthetic oligonucleotide
  Sense strand starting at position 3680 of SEQ ID NO: 914712
uuucuccugcaaggauuaa

SEQ ID NO: 1024911 - RNA, 19 nt, Artificial Sequence
  Description of Artificial Sequence: Synthetic oligonucleotide
  Antisense strand to SEQ ID NO: 1024910
uuaauccuugcaggagaaa

SEQ ID NO: 1024912 - RNA, 19 nt, Artificial Sequence
  Description of Artificial Sequence: Synthetic oligonucleotide
  Sense strand starting at position 3730 of SEQ ID NO: 914712
ccaguuuaaucuuugugga

SEQ ID NO: 1024913 - RNA, 19 nt, Artificial Sequence
  Description of Artificial Sequence: Synthetic oligonucleotide
  Antisense strand to SEQ ID NO: 1024912
uccacaaagauuaaacugg

SEQ ID NO: 1024914 - RNA, 19 nt, Artificial Sequence
  Description of Artificial Sequence: Synthetic oligonucleotide
  Sense strand starting at position 3731 of SEQ ID NO: 914712
caguuuaaucuuuguggaa

SEQ ID NO: 1024915 - RNA, 19 nt, Artificial Sequence
  Description of Artificial Sequence: Synthetic oligonucleotide
  Antisense strand to SEQ ID NO: 1024914
uuccacaaagauuaaacug

SEQ ID NO: 1024916 - RNA, 19 nt, Artificial Sequence
  Description of Artificial Sequence: Synthetic oligonucleotide
  Sense strand starting at position 3732 of SEQ ID NO: 914712
aguuuaaucuuuguggaau

SEQ ID NO: 1024917 - RNA, 19 nt, Artificial Sequence
  Description of Artificial Sequence: Synthetic oligonucleotide
  Antisense strand to SEQ ID NO: 1024916
auuccacaaagauuaaacu

SEQ ID NO: 1024918 - RNA, 19 nt, Artificial Sequence
  Description of Artificial Sequence: Synthetic oligonucleotide
  Sense strand starting at position 3735 of SEQ ID NO: 914712
uuaaucuuuguggaaucau

SEQ ID NO: 1024919 - RNA, 19 nt, Artificial Sequence
  Description of Artificial Sequence: Synthetic oligonucleotide
  Antisense strand to SEQ ID NO: 1024918
augauuccacaaagauuaa

SEQ ID NO: 1024920 - RNA, 19 nt, Artificial Sequence
  Description of Artificial Sequence: Synthetic oligonucleotide
  Sense strand starting at position 3945 of SEQ ID NO: 914712
gucaguagucucucuugcu

SEQ ID NO: 1024921 - RNA, 19 nt, Artificial Sequence
  Description of Artificial Sequence: Synthetic oligonucleotide
  Antisense strand to SEQ ID NO: 1024920
agcaagagagacuacugac

SEQ ID NO: 1024922 - RNA, 19 nt, Artificial Sequence
  Description of Artificial Sequence: Synthetic oligonucleotide
  Sense strand starting at position 403 of SEQ ID NO: 914713
gcuuuaaaggcucaggaga

SEQ ID NO: 1024923 - RNA, 19 nt, Artificial Sequence
  Description of Artificial Sequence: Synthetic oligonucleotide
  Antisense strand to SEQ ID NO: 1024922
ucuccugagccuuuaaagc

SEQ ID NO: 1024924 - RNA, 19 nt, Artificial Sequence
  Description of Artificial Sequence: Synthetic oligonucleotide
  Sense strand starting at position 419 of SEQ ID NO: 914713
agaacuggcguuagugagu

SEQ ID NO: 1024925 - RNA, 19 nt, Artificial Sequence
  Description of Artificial Sequence: Synthetic oligonucleotide
  Antisense strand to SEQ ID NO: 1024924
acucacuaacgccaguucu

SEQ ID NO: 1024926 - RNA, 19 nt, Artificial Sequence
  Description of Artificial Sequence: Synthetic oligonucleotide
  Sense strand starting at position 497 of SEQ ID NO: 914713
aggcuuuaucuaugacaag

SEQ ID NO: 1024927 - RNA, 19 nt, Artificial Sequence
  Description of Artificial Sequence: Synthetic oligonucleotide
  Antisense strand to SEQ ID NO: 1024926
cuugucauagauaaagccu

SEQ ID NO: 1024928 - RNA, 19 nt, Artificial Sequence
  Description of Artificial Sequence: Synthetic oligonucleotide
  Sense strand starting at position 539 of SEQ ID NO: 914713
cucugcuucccugaacaga

SEQ ID NO: 1024929 - RNA, 19 nt, Artificial Sequence
  Description of Artificial Sequence: Synthetic oligonucleotide
  Antisense strand to SEQ ID NO: 1024928
ucuguucagggaagcagag

SEQ ID NO: 1024930 - RNA, 19 nt, Artificial Sequence
  Description of Artificial Sequence: Synthetic oligonucleotide
  Sense strand starting at position 596 of SEQ ID NO: 914713
gggcucugugguuagauga

SEQ ID NO: 1024931 - RNA, 19 nt, Artificial Sequence
  Description of Artificial Sequence: Synthetic oligonucleotide
  Antisense strand to SEQ ID NO: 1024930
ucaucuaaccacagagccc

SEQ ID NO: 1024932 - RNA, 19 nt, Artificial Sequence
  Description of Artificial Sequence: Synthetic oligonucleotide
  Sense strand starting at position 692 of SEQ ID NO: 914713
cucagaucagcaugaggau

SEQ ID NO: 1024933 - RNA, 19 nt, Artificial Sequence
  Description of Artificial Sequence: Synthetic oligonucleotide
  Antisense strand to SEQ ID NO: 1024932
auccucaugcugaucugag

SEQ ID NO: 1024934 - RNA, 19 nt, Artificial Sequence
  Description of Artificial Sequence: Synthetic oligonucleotide
  Sense strand starting at position 726 of SEQ ID NO: 914713
acaggaugguguuugguua

SEQ ID NO: 1024935 - RNA, 19 nt, Artificial Sequence
  Description of Artificial Sequence: Synthetic oligonucleotide
  Antisense strand to SEQ ID NO: 1024934
uaaccaaacaccauccugu

SEQ ID NO: 1024936 - RNA, 19 nt, Artificial Sequence
  Description of Artificial Sequence: Synthetic oligonucleotide
  Sense strand starting at position 727 of SEQ ID NO: 914713
caggaugguguuugguuaa

SEQ ID NO: 1024937 - RNA, 19 nt, Artificial Sequence
  Description of Artificial Sequence: Synthetic oligonucleotide
  Antisense strand to SEQ ID NO: 1024936
uuaaccaaacaccauccug

SEQ ID NO: 1024938 - RNA, 19 nt, Artificial Sequence
  Description of Artificial Sequence: Synthetic oligonucleotide
  Sense strand starting at position 730 of SEQ ID NO: 914713
gaugguguuugguuaaaug

SEQ ID NO: 1024939 - RNA, 19 nt, Artificial Sequence
  Description of Artificial Sequence: Synthetic oligonucleotide
  Antisense strand to SEQ ID NO: 1024938
cauuuaaccaaacaccauc

SEQ ID NO: 1024940 - RNA, 19 nt, Artificial Sequence
  Description of Artificial Sequence: Synthetic oligonucleotide
  Sense strand starting at position 740 of SEQ ID NO: 914713
gguuaaaugauacggaaau

SEQ ID NO: 1024941 - RNA, 19 nt, Artificial Sequence
  Description of Artificial Sequence: Synthetic oligonucleotide
  Antisense strand to SEQ ID NO: 1024940
auuuccguaucauuuaacc

SEQ ID NO: 1024942 - RNA, 19 nt, Artificial Sequence
  Description of Artificial Sequence: Synthetic oligonucleotide
  Sense strand starting at position 903 of SEQ ID NO: 914713
agaugagaaugauauagac

SEQ ID NO: 1024943 - RNA, 19 nt, Artificial Sequence
  Description of Artificial Sequence: Synthetic oligonucleotide
  Antisense strand to SEQ ID NO: 1024942
gucuauaucauucucaucu

SEQ ID NO: 1024944 - RNA, 19 nt, Artificial Sequence
  Description of Artificial Sequence: Synthetic oligonucleotide
  Sense strand starting at position 962 of SEQ ID NO: 914713
acuauauacugaguacagu

SEQ ID NO: 1024945 - RNA, 19 nt, Artificial Sequence
  Description of Artificial Sequence: Synthetic oligonucleotide
  Antisense strand to SEQ ID NO: 1024944
acuguacucaguauauagu

SEQ ID NO: 1024946 - RNA, 19 nt, Artificial Sequence
  Description of Artificial Sequence: Synthetic oligonucleotide
  Sense strand starting at position 992 of SEQ ID NO: 914713
cggugacuggugcacuaaa

SEQ ID NO: 1024947 - RNA, 19 nt, Artificial Sequence
  Description of Artificial Sequence: Synthetic oligonucleotide
  Antisense strand to SEQ ID NO: 1024946
uuuagugcaccagucaccg

SEQ ID NO: 1024948 - RNA, 19 nt, Artificial Sequence
  Description of Artificial Sequence: Synthetic oligonucleotide
  Sense strand starting at position 1134 of SEQ ID NO: 914713
acaugaaaguuucccaugu

SEQ ID NO: 1024949 - RNA, 19 nt, Artificial Sequence
  Description of Artificial Sequence: Synthetic oligonucleotide
  Antisense strand to SEQ ID NO: 1024948
acaugggaaacuuucaugu

SEQ ID NO: 1024950 - RNA, 19 nt, Artificial Sequence
  Description of Artificial Sequence: Synthetic oligonucleotide
  Sense strand starting at position 1138 of SEQ ID NO: 914713
gaaaguuucccauguugga

SEQ ID NO: 1024951 - RNA, 19 nt, Artificial Sequence
  Description of Artificial Sequence: Synthetic oligonucleotide
  Antisense strand to SEQ ID NO: 1024950
uccaacaugggaaacuuuc

SEQ ID NO: 1024952 - RNA, 19 nt, Artificial Sequence
  Description of Artificial Sequence: Synthetic oligonucleotide
  Sense strand starting at position 1272 of SEQ ID NO: 914713
ugggcucugucacuaaaga

SEQ ID NO: 1024953 - RNA, 19 nt, Artificial Sequence
  Description of Artificial Sequence: Synthetic oligonucleotide
  Antisense strand to SEQ ID NO: 1024952
ucuuuagugacagagccca

SEQ ID NO: 1024954 - RNA, 19 nt, Artificial Sequence
  Description of Artificial Sequence: Synthetic oligonucleotide
  Sense strand starting at position 1273 of SEQ ID NO: 914713
gggcucugucacuaaagag

SEQ ID NO: 1024955 - RNA, 19 nt, Artificial Sequence
  Description of Artificial Sequence: Synthetic oligonucleotide
  Antisense strand to SEQ ID NO: 1024954
cucuuuagugacagagccc

SEQ ID NO: 1024956 - RNA, 19 nt, Artificial Sequence
  Description of Artificial Sequence: Synthetic oligonucleotide
  Sense strand starting at position 1280 of SEQ ID NO: 914713
gucacuaaagaguggauaa

SEQ ID NO: 1024957 - RNA, 19 nt, Artificial Sequence
  Description of Artificial Sequence: Synthetic oligonucleotide
  Antisense strand to SEQ ID NO: 1024956
uuauccacucuuuagugac

SEQ ID NO: 1024958 - RNA, 19 nt, Artificial Sequence
  Description of Artificial Sequence: Synthetic oligonucleotide
  Sense strand starting at position 1323 of SEQ ID NO: 914713
ugguaaaggucccuccaaa

SEQ ID NO: 1024959 - RNA, 19 nt, Artificial Sequence
  Description of Artificial Sequence: Synthetic oligonucleotide
  Antisense strand to SEQ ID NO: 1024958
uuuggagggaccuuuacca

SEQ ID NO: 1024960 - RNA, 19 nt, Artificial Sequence
  Description of Artificial Sequence: Synthetic oligonucleotide
  Sense strand starting at position 1349 of SEQ ID NO: 914713
ugaccauggcucuauguuu

SEQ ID NO: 1024961 - RNA, 19 nt, Artificial Sequence
  Description of Artificial Sequence: Synthetic oligonucleotide
  Antisense strand to SEQ ID NO: 1024960
aaacauagagccaugguca

SEQ ID NO: 1024962 - RNA, 19 nt, Artificial Sequence
  Description of Artificial Sequence: Synthetic oligonucleotide
  Sense strand starting at position 1764 of SEQ ID NO: 914713
gaaagaaagguguguuccu

SEQ ID NO: 1024963 - RNA, 19 nt, Artificial Sequence
  Description of Artificial Sequence: Synthetic oligonucleotide
  Antisense strand to SEQ ID NO: 1024962
aggaacacaccuuucuuuc

SEQ ID NO: 1024964 - RNA, 19 nt, Artificial Sequence
  Description of Artificial Sequence: Synthetic oligonucleotide
  Sense strand starting at position 1984 of SEQ ID NO: 914713
guaagcacugagugaaauc

SEQ ID NO: 1024965 - RNA, 19 nt, Artificial Sequence
  Description of Artificial Sequence: Synthetic oligonucleotide
  Antisense strand to SEQ ID NO: 1024964
gauuucacucagugcuuac

SEQ ID NO: 1024966 - RNA, 19 nt, Artificial Sequence
  Description of Artificial Sequence: Synthetic oligonucleotide
  Sense strand starting at position 1995 of SEQ ID NO: 914713
gugaaaucucccuacuuag

SEQ ID NO: 1024967 - RNA, 19 nt, Artificial Sequence
  Description of Artificial Sequence: Synthetic oligonucleotide
  Antisense strand to SEQ ID NO: 1024966
cuaaguagggagauuucac

SEQ ID NO: 1024968 - RNA, 19 nt, Artificial Sequence
  Description of Artificial Sequence: Synthetic oligonucleotide
  Sense strand starting at position 2066 of SEQ ID NO: 914713
cccugagucuguccauuua

SEQ ID NO: 1024969 - RNA, 19 nt, Artificial Sequence
  Description of Artificial Sequence: Synthetic oligonucleotide
  Antisense strand to SEQ ID NO: 1024968
uaaauggacagacucaggg

SEQ ID NO: 1024970 - RNA, 19 nt, Artificial Sequence
  Description of Artificial Sequence: Synthetic oligonucleotide
  Sense strand starting at position 2162 of SEQ ID NO: 914713
ucuagagaauugcucauca

SEQ ID NO: 1024971 - RNA, 19 nt, Artificial Sequence
  Description of Artificial Sequence: Synthetic oligonucleotide
  Antisense strand to SEQ ID NO: 1024970
ugaugagcaauucucuaga

SEQ ID NO: 1024972 - RNA, 19 nt, Artificial Sequence
  Description of Artificial Sequence: Synthetic oligonucleotide
  Sense strand starting at position 2231 of SEQ ID NO: 914713
gccagcucgauggagauua

SEQ ID NO: 1024973 - RNA, 19 nt, Artificial Sequence
  Description of Artificial Sequence: Synthetic oligonucleotide
  Antisense strand to SEQ ID NO: 1024972
uaaucuccaucgagcuggc

SEQ ID NO: 1024974 - RNA, 19 nt, Artificial Sequence
  Description of Artificial Sequence: Synthetic oligonucleotide
  Sense strand starting at position 2242 of SEQ ID NO: 914713
ggagauuaggucuggugga

SEQ ID NO: 1024975 - RNA, 19 nt, Artificial Sequence
  Description of Artificial Sequence: Synthetic oligonucleotide
  Antisense strand to SEQ ID NO: 1024974
uccaccagaccuaaucucc

SEQ ID NO: 1024976 - RNA, 19 nt, Artificial Sequence
  Description of Artificial Sequence: Synthetic oligonucleotide
  Sense strand starting at position 2314 of SEQ ID NO: 914713
cuugcacaaccuugggaaa

SEQ ID NO: 1024977 - RNA, 19 nt, Artificial Sequence
  Description of Artificial Sequence: Synthetic oligonucleotide
  Antisense strand to SEQ ID NO: 1024976
uuucccaagguugugcaag

SEQ ID NO: 1024978 - RNA, 19 nt, Artificial Sequence
  Description of Artificial Sequence: Synthetic oligonucleotide
  Sense strand starting at position 2355 of SEQ ID NO: 914713
ucaguuugcucacuagaaa

SEQ ID NO: 1024979 - RNA, 19 nt, Artificial Sequence
  Description of Artificial Sequence: Synthetic oligonucleotide
  Antisense strand to SEQ ID NO: 1024978
uuucuagugagcaaacuga

SEQ ID NO: 1024980 - RNA, 19 nt, Artificial Sequence
  Description of Artificial Sequence: Synthetic oligonucleotide
  Sense strand starting at position 2425 of SEQ ID NO: 914713
gugacagcuauuggguuaa

SEQ ID NO: 1024981 - RNA, 19 nt, Artificial Sequence
  Description of Artificial Sequence: Synthetic oligonucleotide
  Antisense strand to SEQ ID NO: 1024980
uuaacccaauagcugucac

SEQ ID NO: 1024982 - RNA, 19 nt, Artificial Sequence
  Description of Artificial Sequence: Synthetic oligonucleotide
  Sense strand starting at position 2427 of SEQ ID NO: 914713
gacagcuauuggguuaauu

SEQ ID NO: 1024983 - RNA, 19 nt, Artificial Sequence
  Description of Artificial Sequence: Synthetic oligonucleotide
  Antisense strand to SEQ ID NO: 1024982
aauuaacccaauagcuguc

SEQ ID NO: 1024984 - RNA, 19 nt, Artificial Sequence
  Description of Artificial Sequence: Synthetic oligonucleotide
  Sense strand starting at position 2465 of SEQ ID NO: 914713
auagguagaaguugaggua

SEQ ID NO: 1024985 - RNA, 19 nt, Artificial Sequence
  Description of Artificial Sequence: Synthetic oligonucleotide
  Antisense strand to SEQ ID NO: 1024984
uaccucaacuucuaccuau

SEQ ID NO: 1024986 - RNA, 19 nt, Artificial Sequence
  Description of Artificial Sequence: Synthetic oligonucleotide
  Sense strand starting at position 2795 of SEQ ID NO: 914713
aguugagguauagaaguca

SEQ ID NO: 1024987 - RNA, 19 nt, Artificial Sequence
  Description of Artificial Sequence: Synthetic oligonucleotide
  Antisense strand to SEQ ID NO: 1024986
ugacuucuauaccucaacu

SEQ ID NO: 1024988 - RNA, 19 nt, Artificial Sequence
  Description of Artificial Sequence: Synthetic oligonucleotide
  Sense strand starting at position 2983 of SEQ ID NO: 914713
agcagugucaaauauaguc

SEQ ID NO: 1024989 - RNA, 19 nt, Artificial Sequence
  Description of Artificial Sequence: Synthetic oligonucleotide
  Antisense strand to SEQ ID NO: 1024988
gacuauauuugacacugcu

SEQ ID NO: 1024990 - RNA, 19 nt, Artificial Sequence
  Description of Artificial Sequence: Synthetic oligonucleotide
  Sense strand starting at position 2988 of SEQ ID NO: 914713
ugucaaauauagucauacu

SEQ ID NO: 1024991 - RNA, 19 nt, Artificial Sequence
  Description of Artificial Sequence: Synthetic oligonucleotide
  Antisense strand to SEQ ID NO: 1024990
aguaugacuauauuugaca

SEQ ID NO: 1024992 - RNA, 19 nt, Artificial Sequence
  Description of Artificial Sequence: Synthetic oligonucleotide
  Sense strand starting at position 3011 of SEQ ID NO: 914713
gcaaucaaucuuggaaacu

SEQ ID NO: 1024993 - RNA, 19 nt, Artificial Sequence
  Description of Artificial Sequence: Synthetic oligonucleotide
  Antisense strand to SEQ ID NO: 1024992
aguuuccaagauugauugc

SEQ ID NO: 1024994 - RNA, 19 nt, Artificial Sequence
  Description of Artificial Sequence: Synthetic oligonucleotide
  Sense strand starting at position 3120 of SEQ ID NO: 914713
gucucugugauuugggcua

SEQ ID NO: 1024995 - RNA, 19 nt, Artificial Sequence
  Description of Artificial Sequence: Synthetic oligonucleotide
  Antisense strand to SEQ ID NO: 1024994
uagcccaaaucacagagac

SEQ ID NO: 1024996 - RNA, 19 nt, Artificial Sequence
  Description of Artificial Sequence: Synthetic oligonucleotide
  Sense strand starting at position 3674 of SEQ ID NO: 914713
uagugauaaugagcaucuu

SEQ ID NO: 1024997 - RNA, 19 nt, Artificial Sequence
  Description of Artificial Sequence: Synthetic oligonucleotide
  Antisense strand to SEQ ID NO: 1024996
aagaugcucauuaucacua

SEQ ID NO: 1024998 - RNA, 19 nt, Artificial Sequence
  Description of Artificial Sequence: Synthetic oligonucleotide
  Sense strand starting at position 3874 of SEQ ID NO: 914713
uugauuguccuuugaugga

SEQ ID NO: 1024999 - RNA, 19 nt, Artificial Sequence
  Description of Artificial Sequence: Synthetic oligonucleotide
  Antisense strand to SEQ ID NO: 1024998
uccaucaaaggacaaucaa

SEQ ID NO: 1025000 - RNA, 19 nt, Artificial Sequence
  Description of Artificial Sequence: Synthetic oligonucleotide
  Sense strand starting at position 3878 of SEQ ID NO: 914713
uuguccuuugauggacaga

SEQ ID NO: 1025001 - RNA, 19 nt, Artificial Sequence
  Description of Artificial Sequence: Synthetic oligonucleotide
  Antisense strand to SEQ ID NO: 1025000
ucuguccaucaaaggacaa

SEQ ID NO: 1025002 - RNA, 19 nt, Artificial Sequence
  Description of Artificial Sequence: Synthetic oligonucleotide
  Sense strand starting at position 799 of SEQ ID NO: 914714
ggucuuaggguuuggcaga

SEQ ID NO: 1025003 - RNA, 19 nt, Artificial Sequence
  Description of Artificial Sequence: Synthetic oligonucleotide
  Antisense strand to SEQ ID NO: 1025002
ucugccaaacccuaagacc

SEQ ID NO: 1025004 - RNA, 19 nt, Artificial Sequence
  Description of Artificial Sequence: Synthetic oligonucleotide
  Sense strand starting at position 841 of SEQ ID NO: 914714
aaggguuguugccuccaaa

SEQ ID NO: 1025005 - RNA, 19 nt, Artificial Sequence
  Description of Artificial Sequence: Synthetic oligonucleotide
  Antisense strand to SEQ ID NO: 1025004
uuuggaggcaacaacccuu

SEQ ID NO: 1025006 - RNA, 19 nt, Artificial Sequence
  Description of Artificial Sequence: Synthetic oligonucleotide
  Sense strand starting at position 859 of SEQ ID NO: 914714
aagaguuacugaguacaau

SEQ ID NO: 1025007 - RNA, 19 nt, Artificial Sequence
  Description of Artificial Sequence: Synthetic oligonucleotide
  Antisense strand to SEQ ID NO: 1025006
auuguacucaguaacucuu

SEQ ID NO: 1025008 - RNA, 19 nt, Artificial Sequence
  Description of Artificial Sequence: Synthetic oligonucleotide
  Sense strand starting at position 882 of SEQ ID NO: 914714
agaacucccuugcuauagu

SEQ ID NO: 1025009 - RNA, 19 nt, Artificial Sequence
  Description of Artificial Sequence: Synthetic oligonucleotide
  Antisense strand to SEQ ID NO: 1025008
acuauagcaagggaguucu

SEQ ID NO: 1025010 - RNA, 19 nt, Artificial Sequence
  Description of Artificial Sequence: Synthetic oligonucleotide
  Sense strand starting at position 944 of SEQ ID NO: 914714
ugagaaugauagucaucug

SEQ ID NO: 1025011 - RNA, 19 nt, Artificial Sequence
  Description of Artificial Sequence: Synthetic oligonucleotide
  Antisense strand to SEQ ID NO: 1025010
cagaugacuaucauucuca

SEQ ID NO: 1025012 - RNA, 19 nt, Artificial Sequence
  Description of Artificial Sequence: Synthetic oligonucleotide
  Sense strand starting at position 947 of SEQ ID NO: 914714
gaaugauagucaucugucu

SEQ ID NO: 1025013 - RNA, 19 nt, Artificial Sequence
  Description of Artificial Sequence: Synthetic oligonucleotide
  Antisense strand to SEQ ID NO: 1025012
agacagaugacuaucauuc

SEQ ID NO: 1025014 - RNA, 19 nt, Artificial Sequence
  Description of Artificial Sequence: Synthetic oligonucleotide
  Sense strand starting at position 974 of SEQ ID NO: 914714
ggucuacauccacaccauu

SEQ ID NO: 1025015 - RNA, 19 nt, Artificial Sequence
  Description of Artificial Sequence: Synthetic oligonucleotide
  Antisense strand to SEQ ID NO: 1025014
aaugguguggauguagacc

SEQ ID NO: 1025016 - RNA, 19 nt, Artificial Sequence
  Description of Artificial Sequence: Synthetic oligonucleotide
  Sense strand starting at position 1005 of SEQ ID NO: 914714
ggaugugcucuagaagguu

SEQ ID NO: 1025017 - RNA, 19 nt, Artificial Sequence
  Description of Artificial Sequence: Synthetic oligonucleotide
  Antisense strand to SEQ ID NO: 1025016
aaccuucuagagcacaucc

SEQ ID NO: 1025018 - RNA, 19 nt, Artificial Sequence
  Description of Artificial Sequence: Synthetic oligonucleotide
  Sense strand starting at position 1139 of SEQ ID NO: 914714
cacugaaccguacaguuaa

SEQ ID NO: 1025019 - RNA, 19 nt, Artificial Sequence
  Description of Artificial Sequence: Synthetic oligonucleotide
  Antisense strand to SEQ ID NO: 1025018
uuaacuguacgguucagug

SEQ ID NO: 1025020 - RNA, 19 nt, Artificial Sequence
  Description of Artificial Sequence: Synthetic oligonucleotide
  Sense strand starting at position 1232 of SEQ ID NO: 914714
gaauguugggagugacuca

SEQ ID NO: 1025021 - RNA, 19 nt, Artificial Sequence
  Description of Artificial Sequence: Synthetic oligonucleotide
  Antisense strand to SEQ ID NO: 1025020
ugagucacucccaacauuc

SEQ ID NO: 1025022 - RNA, 19 nt, Artificial Sequence
  Description of Artificial Sequence: Synthetic oligonucleotide
  Sense strand starting at position 1237 of SEQ ID NO: 914714
uugggagugacucagaugu

SEQ ID NO: 1025023 - RNA, 19 nt, Artificial Sequence
  Description of Artificial Sequence: Synthetic oligonucleotide
  Antisense strand to SEQ ID NO: 1025022
acaucugagucacucccaa

SEQ ID NO: 1025024 - RNA, 19 nt, Artificial Sequence
  Description of Artificial Sequence: Synthetic oligonucleotide
  Sense strand starting at position 1241 of SEQ ID NO: 914714
gagugacucagaugucaug

SEQ ID NO: 1025025 - RNA, 19 nt, Artificial Sequence
  Description of Artificial Sequence: Synthetic oligonucleotide
  Antisense strand to SEQ ID NO: 1025024
caugacaucugagucacuc

SEQ ID NO: 1025026 - RNA, 19 nt, Artificial Sequence
  Description of Artificial Sequence: Synthetic oligonucleotide
  Sense strand starting at position 1283 of SEQ ID NO: 914714
cgcuuuaacccacagauug

SEQ ID NO: 1025027 - RNA, 19 nt, Artificial Sequence
  Description of Artificial Sequence: Synthetic oligonucleotide
  Antisense strand to SEQ ID NO: 1025026
caaucuguggguuaaagcg

SEQ ID NO: 1025028 - RNA, 19 nt, Artificial Sequence
  Description of Artificial Sequence: Synthetic oligonucleotide
  Sense strand starting at position 1338 of SEQ ID NO: 914714
gcccucugggaaugugaaa

SEQ ID NO: 1025029 - RNA, 19 nt, Artificial Sequence
  Description of Artificial Sequence: Synthetic oligonucleotide
  Antisense strand to SEQ ID NO: 1025028
uuucacauucccagagggc

SEQ ID NO: 1025030 - RNA, 19 nt, Artificial Sequence
  Description of Artificial Sequence: Synthetic oligonucleotide
  Sense strand starting at position 1572 of SEQ ID NO: 914714
gugugcaugcuguccuaca

SEQ ID NO: 1025031 - RNA, 19 nt, Artificial Sequence
  Description of Artificial Sequence: Synthetic oligonucleotide
  Antisense strand to SEQ ID NO: 1025030
uguaggacagcaugcacac

SEQ ID NO: 1025032 - RNA, 19 nt, Artificial Sequence
  Description of Artificial Sequence: Synthetic oligonucleotide
  Sense strand starting at position 1832 of SEQ ID NO: 914714
ccaugugauuguguacucu

SEQ ID NO: 1025033 - RNA, 19 nt, Artificial Sequence
  Description of Artificial Sequence: Synthetic oligonucleotide
  Antisense strand to SEQ ID NO: 1025032
agaguacacaaucacaugg

SEQ ID NO: 1025034 - RNA, 19 nt, Artificial Sequence
  Description of Artificial Sequence: Synthetic oligonucleotide
  Sense strand starting at position 2704 of SEQ ID NO: 914714
gagaaagcuccugauguac

SEQ ID NO: 1025035 - RNA, 19 nt, Artificial Sequence
  Description of Artificial Sequence: Synthetic oligonucleotide
  Antisense strand to SEQ ID NO: 1025034
guacaucaggagcuuucuc

SEQ ID NO: 1025036 - RNA, 19 nt, Artificial Sequence
  Description of Artificial Sequence: Synthetic oligonucleotide
  Sense strand starting at position 2710 of SEQ ID NO: 914714
gcuccugauguacaaauau

SEQ ID NO: 1025037 - RNA, 19 nt, Artificial Sequence
  Description of Artificial Sequence: Synthetic oligonucleotide
  Antisense strand to SEQ ID NO: 1025036
auauuuguacaucaggagc

SEQ ID NO: 1025038 - RNA, 19 nt, Artificial Sequence
  Description of Artificial Sequence: Synthetic oligonucleotide
  Sense strand starting at position 2743 of SEQ ID NO: 914714
gugcauuguuaaguggaaa

SEQ ID NO: 1025039 - RNA, 19 nt, Artificial Sequence
  Description of Artificial Sequence: Synthetic oligonucleotide
  Antisense strand to SEQ ID NO: 1025038
uuuccacuuaacaaugcac

SEQ ID NO: 1025040 - RNA, 19 nt, Artificial Sequence
  Description of Artificial Sequence: Synthetic oligonucleotide
  Sense strand starting at position 2822 of SEQ ID NO: 914714
gaguaagaaugucuguguu

SEQ ID NO: 1025041 - RNA, 19 nt, Artificial Sequence
  Description of Artificial Sequence: Synthetic oligonucleotide
  Antisense strand to SEQ ID NO: 1025040
aacacagacauucuuacuc

SEQ ID NO: 1025042 - RNA, 19 nt, Artificial Sequence
  Description of Artificial Sequence: Synthetic oligonucleotide
  Sense strand starting at position 2824 of SEQ ID NO: 914714
guaagaaugucuguguuga

SEQ ID NO: 1025043 - RNA, 19 nt, Artificial Sequence
  Description of Artificial Sequence: Synthetic oligonucleotide
  Antisense strand to SEQ ID NO: 1025042
ucaacacagacauucuuac

SEQ ID NO: 1025044 - RNA, 19 nt, Artificial Sequence
  Description of Artificial Sequence: Synthetic oligonucleotide
  Sense strand starting at position 2825 of SEQ ID NO: 914714
uaagaaugucuguguugac

SEQ ID NO: 1025045 - RNA, 19 nt, Artificial Sequence
  Description of Artificial Sequence: Synthetic oligonucleotide
  Antisense strand to SEQ ID NO: 1025044
gucaacacagacauucuua

SEQ ID NO: 1025046 - RNA, 19 nt, Artificial Sequence
  Description of Artificial Sequence: Synthetic oligonucleotide
  Sense strand starting at position 2826 of SEQ ID NO: 914714
aagaaugucuguguugacu

SEQ ID NO: 1025047 - RNA, 19 nt, Artificial Sequence
  Description of Artificial Sequence: Synthetic oligonucleotide
  Antisense strand to SEQ ID NO: 1025046
agucaacacagacauucuu

SEQ ID NO: 1025048 - RNA, 19 nt, Artificial Sequence
  Description of Artificial Sequence: Synthetic oligonucleotide
  Sense strand starting at position 2920 of SEQ ID NO: 914714
cgacaucagccuggucaau

SEQ ID NO: 1025049 - RNA, 19 nt, Artificial Sequence
  Description of Artificial Sequence: Synthetic oligonucleotide
  Antisense strand to SEQ ID NO: 1025048
auugaccaggcugaugucg

SEQ ID NO: 1025050 - RNA, 19 nt, Artificial Sequence
  Description of Artificial Sequence: Synthetic oligonucleotide
  Sense strand starting at position 2922 of SEQ ID NO: 914714
acaucagccuggucaauau

SEQ ID NO: 1025051 - RNA, 19 nt, Artificial Sequence
  Description of Artificial Sequence: Synthetic oligonucleotide
  Antisense strand to SEQ ID NO: 1025050
auauugaccaggcugaugu

SEQ ID NO: 1025052 - RNA, 19 nt, Artificial Sequence
  Description of Artificial Sequence: Synthetic oligonucleotide
  Sense strand starting at position 3103 of SEQ ID NO: 914714
gaacgugacucugucauua

SEQ ID NO: 1025053 - RNA, 19 nt, Artificial Sequence
  Description of Artificial Sequence: Synthetic oligonucleotide
  Antisense strand to SEQ ID NO: 1025052
uaaugacagagucacguuc

SEQ ID NO: 1025054 - RNA, 19 nt, Artificial Sequence
  Description of Artificial Sequence: Synthetic oligonucleotide
  Sense strand starting at position 3129 of SEQ ID NO: 914714
aaagaauaucuguguuugc

SEQ ID NO: 1025055 - RNA, 19 nt, Artificial Sequence
  Description of Artificial Sequence: Synthetic oligonucleotide
  Antisense strand to SEQ ID NO: 1025054
gcaaacacagauauucuuu

SEQ ID NO: 1025056 - RNA, 19 nt, Artificial Sequence
  Description of Artificial Sequence: Synthetic oligonucleotide
  Sense strand starting at position 3130 of SEQ ID NO: 914714
aagaauaucuguguuugca

SEQ ID NO: 1025057 - RNA, 19 nt, Artificial Sequence
  Description of Artificial Sequence: Synthetic oligonucleotide
  Antisense strand to SEQ ID NO: 1025056
ugcaaacacagauauucuu

SEQ ID NO: 1025058 - RNA, 19 nt, Artificial Sequence
  Description of Artificial Sequence: Synthetic oligonucleotide
  Sense strand starting at position 3212 of SEQ ID NO: 914714
caggauuaggcuugagacu

SEQ ID NO: 1025059 - RNA, 19 nt, Artificial Sequence
  Description of Artificial Sequence: Synthetic oligonucleotide
  Antisense strand to SEQ ID NO: 1025058
agucucaagccuaauccug

SEQ ID NO: 1025060 - RNA, 19 nt, Artificial Sequence
  Description of Artificial Sequence: Synthetic oligonucleotide
  Sense strand starting at position 3266 of SEQ ID NO: 914714
uggaccaugugacuauaaa

SEQ ID NO: 1025061 - RNA, 19 nt, Artificial Sequence
  Description of Artificial Sequence: Synthetic oligonucleotide
  Antisense strand to SEQ ID NO: 1025060
uuuauagucacauggucca

SEQ ID NO: 1025062 - RNA, 19 nt, Artificial Sequence
  Description of Artificial Sequence: Synthetic oligonucleotide
  Sense strand starting at position 3365 of SEQ ID NO: 914714
ugaccucucugacuugaua

SEQ ID NO: 1025063 - RNA, 19 nt, Artificial Sequence
  Description of Artificial Sequence: Synthetic oligonucleotide
  Antisense strand to SEQ ID NO: 1025062
uaucaagucagagagguca

SEQ ID NO: 1025064 - RNA, 19 nt, Artificial Sequence
  Description of Artificial Sequence: Synthetic oligonucleotide
  Sense strand starting at position 3445 of SEQ ID NO: 914714
cuacacaugugcuugcaaa

SEQ ID NO: 1025065 - RNA, 19 nt, Artificial Sequence
  Description of Artificial Sequence: Synthetic oligonucleotide
  Antisense strand to SEQ ID NO: 1025064
uuugcaagcacauguguag

SEQ ID NO: 1025066 - RNA, 19 nt, Artificial Sequence
  Description of Artificial Sequence: Synthetic oligonucleotide
  Sense strand starting at position 3486 of SEQ ID NO: 914714
gaguucuggucccuggaca

SEQ ID NO: 1025067 - RNA, 19 nt, Artificial Sequence
  Description of Artificial Sequence: Synthetic oligonucleotide
  Antisense strand to SEQ ID NO: 1025066
uguccagggaccagaacuc

SEQ ID NO: 1025068 - RNA, 19 nt, Artificial Sequence
  Description of Artificial Sequence: Synthetic oligonucleotide
  Sense strand starting at position 3487 of SEQ ID NO: 914714
aguucuggucccuggacau

SEQ ID NO: 1025069 - RNA, 19 nt, Artificial Sequence
  Description of Artificial Sequence: Synthetic oligonucleotide
  Antisense strand to SEQ ID NO: 1025068
auguccagggaccagaacu

SEQ ID NO: 1025070 - RNA, 19 nt, Artificial Sequence
  Description of Artificial Sequence: Synthetic oligonucleotide
  Sense strand starting at position 3511 of SEQ ID NO: 914714
caguaaauucgaugcaguu

SEQ ID NO: 1025071 - RNA, 19 nt, Artificial Sequence
  Description of Artificial Sequence: Synthetic oligonucleotide
  Antisense strand to SEQ ID NO: 1025070
aacugcaucgaauuuacug

SEQ ID NO: 1025072 - RNA, 19 nt, Artificial Sequence
  Description of Artificial Sequence: Synthetic oligonucleotide
  Sense strand starting at position 3664 of SEQ ID NO: 914714
ugcacacuugaguauuacu

SEQ ID NO: 1025073 - RNA, 19 nt, Artificial Sequence
  Description of Artificial Sequence: Synthetic oligonucleotide
  Antisense strand to SEQ ID NO: 1025072
aguaauacucaagugugca

SEQ ID NO: 1025074 - RNA, 19 nt, Artificial Sequence
  Description of Artificial Sequence: Synthetic oligonucleotide
  Sense strand starting at position 3669 of SEQ ID NO: 914714
acuugaguauuacuguaca

SEQ ID NO: 1025075 - RNA, 19 nt, Artificial Sequence
  Description of Artificial Sequence: Synthetic oligonucleotide
  Antisense strand to SEQ ID NO: 1025074
uguacaguaauacucaagu

SEQ ID NO: 1025076 - RNA, 19 nt, Artificial Sequence
  Description of Artificial Sequence: Synthetic oligonucleotide
  Sense strand starting at position 3672 of SEQ ID NO: 914714
ugaguauuacuguacaucu

SEQ ID NO: 1025077 - RNA, 19 nt, Artificial Sequence
  Description of Artificial Sequence: Synthetic oligonucleotide
  Antisense strand to SEQ ID NO: 1025076
agauguacaguaauacuca

SEQ ID NO: 1025078 - RNA, 19 nt, Artificial Sequence
  Description of Artificial Sequence: Synthetic oligonucleotide
  Sense strand starting at position 3674 of SEQ ID NO: 914714
aguauuacuguacaucuga

SEQ ID NO: 1025079 - RNA, 19 nt, Artificial Sequence
  Description of Artificial Sequence: Synthetic oligonucleotide
  Antisense strand to SEQ ID NO: 1025078
ucagauguacaguaauacu

SEQ ID NO: 1025080 - RNA, 19 nt, Artificial Sequence
  Description of Artificial Sequence: Synthetic oligonucleotide
  Sense strand starting at position 3720 of SEQ ID NO: 914714
ccucguagggucuaaacuu

SEQ ID NO: 1025081 - RNA, 19 nt, Artificial Sequence
  Description of Artificial Sequence: Synthetic oligonucleotide
  Antisense strand to SEQ ID NO: 1025080
aaguuuagacccuacgagg

SEQ ID NO: 1025082 - RNA, 19 nt, Artificial Sequence
  Description of Artificial Sequence: Synthetic oligonucleotide
  Sense strand starting at position 58 of SEQ ID NO: 914715
uauuguuacaggugaggau

SEQ ID NO: 1025083 - RNA, 19 nt, Artificial Sequence
  Description of Artificial Sequence: Synthetic oligonucleotide
  Antisense strand to SEQ ID NO: 1025082
auccucaccuguaacaaua

SEQ ID NO: 1025084 - RNA, 19 nt, Artificial Sequence
  Description of Artificial Sequence: Synthetic oligonucleotide
  Sense strand starting at position 59 of SEQ ID NO: 914715
auuguuacaggugaggauu

SEQ ID NO: 1025085 - RNA, 19 nt, Artificial Sequence
  Description of Artificial Sequence: Synthetic oligonucleotide
  Antisense strand to SEQ ID NO: 1025084
aauccucaccuguaacaau

SEQ ID NO: 1025086 - RNA, 19 nt, Artificial Sequence
  Description of Artificial Sequence: Synthetic oligonucleotide
  Sense strand starting at position 67 of SEQ ID NO: 914715
aggugaggauuacaggauu

SEQ ID NO: 1025087 - RNA, 19 nt, Artificial Sequence
  Description of Artificial Sequence: Synthetic oligonucleotide
  Antisense strand to SEQ ID NO: 1025086
aauccuguaauccucaccu

SEQ ID NO: 1025088 - RNA, 19 nt, Artificial Sequence
  Description of Artificial Sequence: Synthetic oligonucleotide
  Sense strand starting at position 399 of SEQ ID NO: 914715
cucuauagucugggcaaca

SEQ ID NO: 1025089 - RNA, 19 nt, Artificial Sequence
  Description of Artificial Sequence: Synthetic oligonucleotide
  Antisense strand to SEQ ID NO: 1025088
uguugcccagacuauagag

SEQ ID NO: 1025090 - RNA, 19 nt, Artificial Sequence
  Description of Artificial Sequence: Synthetic oligonucleotide
  Sense strand starting at position 473 of SEQ ID NO: 914715
aaauuaguggcauaaaguu

SEQ ID NO: 1025091 - RNA, 19 nt, Artificial Sequence
  Description of Artificial Sequence: Synthetic oligonucleotide
  Antisense strand to SEQ ID NO: 1025090
aacuuuaugccacuaauuu

SEQ ID NO: 1025092 - RNA, 19 nt, Artificial Sequence
  Description of Artificial Sequence: Synthetic oligonucleotide
  Sense strand starting at position 522 of SEQ ID NO: 914715
cuucgauuccgugaaauau

SEQ ID NO: 1025093 - RNA, 19 nt, Artificial Sequence
  Description of Artificial Sequence: Synthetic oligonucleotide
  Antisense strand to SEQ ID NO: 1025092
auauuucacggaaucgaag

SEQ ID NO: 1025094 - RNA, 19 nt, Artificial Sequence
  Description of Artificial Sequence: Synthetic oligonucleotide
  Sense strand starting at position 526 of SEQ ID NO: 914715
gauuccgugaaauauggua

SEQ ID NO: 1025095 - RNA, 19 nt, Artificial Sequence
  Description of Artificial Sequence: Synthetic oligonucleotide
  Antisense strand to SEQ ID NO: 1025094
uaccauauuucacggaauc

SEQ ID NO: 1025096 - RNA, 19 nt, Artificial Sequence
  Description of Artificial Sequence: Synthetic oligonucleotide
  Sense strand starting at position 528 of SEQ ID NO: 914715
uuccgugaaauaugguaaa

SEQ ID NO: 1025097 - RNA, 19 nt, Artificial Sequence
  Description of Artificial Sequence: Synthetic oligonucleotide
  Antisense strand to SEQ ID NO: 1025096
uuuaccauauuucacggaa

SEQ ID NO: 1025098 - RNA, 19 nt, Artificial Sequence
  Description of Artificial Sequence: Synthetic oligonucleotide
  Sense strand starting at position 540 of SEQ ID NO: 914715
ugguaaaugauguagcaag

SEQ ID NO: 1025099 - RNA, 19 nt, Artificial Sequence
  Description of Artificial Sequence: Synthetic oligonucleotide
  Antisense strand to SEQ ID NO: 1025098
cuugcuacaucauuuacca

SEQ ID NO: 1025100 - RNA, 19 nt, Artificial Sequence
  Description of Artificial Sequence: Synthetic oligonucleotide
  Sense strand starting at position 625 of SEQ ID NO: 914715
cucaguguucugggagaag

SEQ ID NO: 1025101 - RNA, 19 nt, Artificial Sequence
  Description of Artificial Sequence: Synthetic oligonucleotide
  Antisense strand to SEQ ID NO: 1025100
cuucucccagaacacugag

SEQ ID NO: 1025102 - RNA, 19 nt, Artificial Sequence
  Description of Artificial Sequence: Synthetic oligonucleotide
  Sense strand starting at position 2101 of SEQ ID NO: 914715
gacguagcugcccauacau

SEQ ID NO: 1025103 - RNA, 19 nt, Artificial Sequence
  Description of Artificial Sequence: Synthetic oligonucleotide
  Antisense strand to SEQ ID NO: 1025102
auguaugggcagcuacguc

SEQ ID NO: 1025104 - RNA, 19 nt, Artificial Sequence
  Description of Artificial Sequence: Synthetic oligonucleotide
  Sense strand starting at position 2334 of SEQ ID NO: 914715
uaaggcuucgaguauauga

SEQ ID NO: 1025105 - RNA, 19 nt, Artificial Sequence
  Description of Artificial Sequence: Synthetic oligonucleotide
  Antisense strand to SEQ ID NO: 1025104
ucauauacucgaagccuua

SEQ ID NO: 1025106 - RNA, 19 nt, Artificial Sequence
  Description of Artificial Sequence: Synthetic oligonucleotide
  Sense strand starting at position 2336 of SEQ ID NO: 914715
aggcuucgaguauaugaaa

SEQ ID NO: 1025107 - RNA, 19 nt, Artificial Sequence
  Description of Artificial Sequence: Synthetic oligonucleotide
  Antisense strand to SEQ ID NO: 1025106
uuucauauacucgaagccu

SEQ ID NO: 1025108 - RNA, 19 nt, Artificial Sequence
  Description of Artificial Sequence: Synthetic oligonucleotide
  Sense strand starting at position 2356 of SEQ ID NO: 914715
gugaauaaaugacaaacca

SEQ ID NO: 1025109 - RNA, 19 nt, Artificial Sequence
  Description of Artificial Sequence: Synthetic oligonucleotide
  Antisense strand to SEQ ID NO: 1025108
ugguuugucauuuauucac

SEQ ID NO: 1025110 - RNA, 19 nt, Artificial Sequence
  Description of Artificial Sequence: Synthetic oligonucleotide
  Sense strand starting at position 2478 of SEQ ID NO: 914715
gcucaacuuccugagcuaa

SEQ ID NO: 1025111 - RNA, 19 nt, Artificial Sequence
  Description of Artificial Sequence: Synthetic oligonucleotide
  Antisense strand to SEQ ID NO: 1025110
uuagcucaggaaguugagc

SEQ ID NO: 1025112 - RNA, 19 nt, Artificial Sequence
  Description of Artificial Sequence: Synthetic oligonucleotide
  Sense strand starting at position 2629 of SEQ ID NO: 914715
aaauguuugcgauaaggua

SEQ ID NO: 1025113 - RNA, 19 nt, Artificial Sequence
  Description of Artificial Sequence: Synthetic oligonucleotide
  Antisense strand to SEQ ID NO: 1025112
uaccuuaucgcaaacauuu

SEQ ID NO: 1025114 - RNA, 19 nt, Artificial Sequence
  Description of Artificial Sequence: Synthetic oligonucleotide
  Sense strand starting at position 2744 of SEQ ID NO: 914715
uguccugaggucugauaaa

SEQ ID NO: 1025115 - RNA, 19 nt, Artificial Sequence
  Description of Artificial Sequence: Synthetic oligonucleotide
  Antisense strand to SEQ ID NO: 1025114
uuuaucagaccucaggaca

SEQ ID NO: 1025116 - RNA, 19 nt, Artificial Sequence
  Description of Artificial Sequence: Synthetic oligonucleotide
  Sense strand starting at position 2822 of SEQ ID NO: 914715
gaguaugucaaaggugagu

SEQ ID NO: 1025117 - RNA, 19 nt, Artificial Sequence
  Description of Artificial Sequence: Synthetic oligonucleotide
  Antisense strand to SEQ ID NO: 1025116
acucaccuuugacauacuc

SEQ ID NO: 1025118 - RNA, 19 nt, Artificial Sequence
  Description of Artificial Sequence: Synthetic oligonucleotide
  Sense strand starting at position 2824 of SEQ ID NO: 914715
guaugucaaaggugaguga

SEQ ID NO: 1025119 - RNA, 19 nt, Artificial Sequence
  Description of Artificial Sequence: Synthetic oligonucleotide
  Antisense strand to SEQ ID NO: 1025118
ucacucaccuuugacauac

SEQ ID NO: 1025120 - RNA, 19 nt, Artificial Sequence
  Description of Artificial Sequence: Synthetic oligonucleotide
  Sense strand starting at position 2828 of SEQ ID NO: 914715
gucaaaggugagugaaugu

SEQ ID NO: 1025121 - RNA, 19 nt, Artificial Sequence
  Description of Artificial Sequence: Synthetic oligonucleotide
  Antisense strand to SEQ ID NO: 1025120
acauucacucaccuuugac

SEQ ID NO: 1025122 - RNA, 19 nt, Artificial Sequence
  Description of Artificial Sequence: Synthetic oligonucleotide
  Sense strand starting at position 2839 of SEQ ID NO: 914715
gugaaugugaggcagguau

SEQ ID NO: 1025123 - RNA, 19 nt, Artificial Sequence
  Description of Artificial Sequence: Synthetic oligonucleotide
  Antisense strand to SEQ ID NO: 1025122
auaccugccucacauucac

SEQ ID NO: 1025124 - RNA, 19 nt, Artificial Sequence
  Description of Artificial Sequence: Synthetic oligonucleotide
  Sense strand starting at position 2841 of SEQ ID NO: 914715
gaaugugaggcagguauca

SEQ ID NO: 1025125 - RNA, 19 nt, Artificial Sequence
  Description of Artificial Sequence: Synthetic oligonucleotide
  Antisense strand to SEQ ID NO: 1025124
ugauaccugccucacauuc

SEQ ID NO: 1025126 - RNA, 19 nt, Artificial Sequence
  Description of Artificial Sequence: Synthetic oligonucleotide
  Sense strand starting at position 2854 of SEQ ID NO: 914715
guaucauccucaucucugu

SEQ ID NO: 1025127 - RNA, 19 nt, Artificial Sequence
  Description of Artificial Sequence: Synthetic oligonucleotide
  Antisense strand to SEQ ID NO: 1025126
acagagaugaggaugauac

SEQ ID NO: 1025128 - RNA, 19 nt, Artificial Sequence
  Description of Artificial Sequence: Synthetic oligonucleotide
  Sense strand starting at position 2917 of SEQ ID NO: 914715
gcuugaagucgcuaaguga

SEQ ID NO: 1025129 - RNA, 19 nt, Artificial Sequence
  Description of Artificial Sequence: Synthetic oligonucleotide
  Antisense strand to SEQ ID NO: 1025128
ucacuuagcgacuucaagc

SEQ ID NO: 1025130 - RNA, 19 nt, Artificial Sequence
  Description of Artificial Sequence: Synthetic oligonucleotide
  Sense strand starting at position 3030 of SEQ ID NO: 914715
gucgcacauccagaauguu

SEQ ID NO: 1025131 - RNA, 19 nt, Artificial Sequence
  Description of Artificial Sequence: Synthetic oligonucleotide
  Antisense strand to SEQ ID NO: 1025130
aacauucuggaugugcgac

SEQ ID NO: 1025132 - RNA, 19 nt, Artificial Sequence
  Description of Artificial Sequence: Synthetic oligonucleotide
  Sense strand starting at position 3033 of SEQ ID NO: 914715
gcacauccagaauguuagu

SEQ ID NO: 1025133 - RNA, 19 nt, Artificial Sequence
  Description of Artificial Sequence: Synthetic oligonucleotide
  Antisense strand to SEQ ID NO: 1025132
acuaacauucuggaugugc

SEQ ID NO: 1025134 - RNA, 19 nt, Artificial Sequence
  Description of Artificial Sequence: Synthetic oligonucleotide
  Sense strand starting at position 3119 of SEQ ID NO: 914715
ggaguacugagcugucagu

SEQ ID NO: 1025135 - RNA, 19 nt, Artificial Sequence
  Description of Artificial Sequence: Synthetic oligonucleotide
  Antisense strand to SEQ ID NO: 1025134
acugacagcucaguacucc

SEQ ID NO: 1025136 - RNA, 19 nt, Artificial Sequence
  Description of Artificial Sequence: Synthetic oligonucleotide
  Sense strand starting at position 3329 of SEQ ID NO: 914715
ggcuuaagccagggagguu

SEQ ID NO: 1025137 - RNA, 19 nt, Artificial Sequence
  Description of Artificial Sequence: Synthetic oligonucleotide
  Antisense strand to SEQ ID NO: 1025136
aaccucccuggcuuaagcc

SEQ ID NO: 1025138 - RNA, 19 nt, Artificial Sequence
  Description of Artificial Sequence: Synthetic oligonucleotide
  Sense strand starting at position 3491 of SEQ ID NO: 914715
gggcuacuuuccuugggaa

SEQ ID NO: 1025139 - RNA, 19 nt, Artificial Sequence
  Description of Artificial Sequence: Synthetic oligonucleotide
  Antisense strand to SEQ ID NO: 1025138
uucccaaggaaaguagccc

SEQ ID NO: 1025140 - RNA, 19 nt, Artificial Sequence
  Description of Artificial Sequence: Synthetic oligonucleotide
  Sense strand starting at position 3492 of SEQ ID NO: 914715
ggcuacuuuccuugggaac

SEQ ID NO: 1025141 - RNA, 19 nt, Artificial Sequence
  Description of Artificial Sequence: Synthetic oligonucleotide
  Antisense strand to SEQ ID NO: 1025140
guucccaaggaaaguagcc

SEQ ID NO: 1025142 - RNA, 19 nt, Artificial Sequence
  Description of Artificial Sequence: Synthetic oligonucleotide
  Sense strand starting at position 3493 of SEQ ID NO: 914715
gcuacuuuccuugggaaca

SEQ ID NO: 1025143 - RNA, 19 nt, Artificial Sequence
  Description of Artificial Sequence: Synthetic oligonucleotide
  Antisense strand to SEQ ID NO: 1025142
uguucccaaggaaaguagc

SEQ ID NO: 1025144 - RNA, 19 nt, Artificial Sequence
  Description of Artificial Sequence: Synthetic oligonucleotide
  Sense strand starting at position 3574 of SEQ ID NO: 914715
guucuagucccagagcuac

SEQ ID NO: 1025145 - RNA, 19 nt, Artificial Sequence
  Description of Artificial Sequence: Synthetic oligonucleotide
  Antisense strand to SEQ ID NO: 1025144
guagcucugggacuagaac

SEQ ID NO: 1025146 - RNA, 19 nt, Artificial Sequence
  Description of Artificial Sequence: Synthetic oligonucleotide
  Sense strand starting at position 3659 of SEQ ID NO: 914715
agagcuguugugggaucaa

SEQ ID NO: 1025147 - RNA, 19 nt, Artificial Sequence
  Description of Artificial Sequence: Synthetic oligonucleotide
  Antisense strand to SEQ ID NO: 1025146
uugaucccacaacagcucu

SEQ ID NO: 1025148 - RNA, 19 nt, Artificial Sequence
  Description of Artificial Sequence: Synthetic oligonucleotide
  Sense strand starting at position 3670 of SEQ ID NO: 914715
gggaucaagugagaucaca

SEQ ID NO: 1025149 - RNA, 19 nt, Artificial Sequence
  Description of Artificial Sequence: Synthetic oligonucleotide
  Antisense strand to SEQ ID NO: 1025148
ugugaucucacuugauccc

SEQ ID NO: 1025150 - RNA, 19 nt, Artificial Sequence
  Description of Artificial Sequence: Synthetic oligonucleotide
  Sense strand starting at position 3717 of SEQ ID NO: 914715
guguuaugcacucagaaag

SEQ ID NO: 1025151 - RNA, 19 nt, Artificial Sequence
  Description of Artificial Sequence: Synthetic oligonucleotide
  Antisense strand to SEQ ID NO: 1025150
cuuucugagugcauaacac

SEQ ID NO: 1025152 - RNA, 19 nt, Artificial Sequence
  Description of Artificial Sequence: Synthetic oligonucleotide
  Sense strand starting at position 3894 of SEQ ID NO: 914715
gcaguaugauccguggaca

SEQ ID NO: 1025153 - RNA, 19 nt, Artificial Sequence
  Description of Artificial Sequence: Synthetic oligonucleotide
  Antisense strand to SEQ ID NO: 1025152
uguccacggaucauacugc

SEQ ID NO: 1025154 - RNA, 19 nt, Artificial Sequence
  Description of Artificial Sequence: Synthetic oligonucleotide
  Sense strand starting at position 3895 of SEQ ID NO: 914715
caguaugauccguggacag

SEQ ID NO: 1025155 - RNA, 19 nt, Artificial Sequence
  Description of Artificial Sequence: Synthetic oligonucleotide
  Antisense strand to SEQ ID NO: 1025154
cuguccacggaucauacug

SEQ ID NO: 1025156 - RNA, 19 nt, Artificial Sequence
  Description of Artificial Sequence: Synthetic oligonucleotide
  Sense strand starting at position 3897 of SEQ ID NO: 914715
guaugauccguggacagaa

SEQ ID NO: 1025157 - RNA, 19 nt, Artificial Sequence
  Description of Artificial Sequence: Synthetic oligonucleotide
  Antisense strand to SEQ ID NO: 1025156
uucuguccacggaucauac

SEQ ID NO: 1025158 - RNA, 19 nt, Artificial Sequence
  Description of Artificial Sequence: Synthetic oligonucleotide
  Sense strand starting at position 3972 of SEQ ID NO: 914715
ucaccaguugugugaccua

SEQ ID NO: 1025159 - RNA, 19 nt, Artificial Sequence
  Description of Artificial Sequence: Synthetic oligonucleotide
  Antisense strand to SEQ ID NO: 1025158
uaggucacacaacugguga

SEQ ID NO: 1025160 - RNA, 19 nt, Artificial Sequence
  Description of Artificial Sequence: Synthetic oligonucleotide
  Sense strand starting at position 3977 of SEQ ID NO: 914715
aguugugugaccuagguga

SEQ ID NO: 1025161 - RNA, 19 nt, Artificial Sequence
  Description of Artificial Sequence: Synthetic oligonucleotide
  Antisense strand to SEQ ID NO: 1025160
ucaccuaggucacacaacu

SEQ ID NO: 1025162 - RNA, 19 nt, Artificial Sequence
  Description of Artificial Sequence: Synthetic oligonucleotide
  Sense strand starting at position 67 of SEQ ID NO: 914716
ggcggaucauggucaggaa

SEQ ID NO: 1025163 - RNA, 19 nt, Artificial Sequence
  Description of Artificial Sequence: Synthetic oligonucleotide
  Antisense strand to SEQ ID NO: 1025162
uuccugaccaugauccgcc

SEQ ID NO: 1025164 - RNA, 19 nt, Artificial Sequence
  Description of Artificial Sequence: Synthetic oligonucleotide
  Sense strand starting at position 68 of SEQ ID NO: 914716
gcggaucauggucaggaau

SEQ ID NO: 1025165 - RNA, 19 nt, Artificial Sequence
  Description of Artificial Sequence: Synthetic oligonucleotide
  Antisense strand to SEQ ID NO: 1025164
auuccugaccaugauccgc

SEQ ID NO: 1025166 - RNA, 19 nt, Artificial Sequence
  Description of Artificial Sequence: Synthetic oligonucleotide
  Sense strand starting at position 405 of SEQ ID NO: 914716
auuauacuucuguggauua

SEQ ID NO: 1025167 - RNA, 19 nt, Artificial Sequence
  Description of Artificial Sequence: Synthetic oligonucleotide
  Antisense strand to SEQ ID NO: 1025166
uaauccacagaaguauaau

SEQ ID NO: 1025168 - RNA, 19 nt, Artificial Sequence
  Description of Artificial Sequence: Synthetic oligonucleotide
  Sense strand starting at position 473 of SEQ ID NO: 914716
guguaucaugagugucuaa

SEQ ID NO: 1025169 - RNA, 19 nt, Artificial Sequence
  Description of Artificial Sequence: Synthetic oligonucleotide
  Antisense strand to SEQ ID NO: 1025168
uuagacacucaugauacac

SEQ ID NO: 1025170 - RNA, 19 nt, Artificial Sequence
  Description of Artificial Sequence: Synthetic oligonucleotide
  Sense strand starting at position 507 of SEQ ID NO: 914716
guuggaggugcucaauaca

SEQ ID NO: 1025171 - RNA, 19 nt, Artificial Sequence
  Description of Artificial Sequence: Synthetic oligonucleotide
  Antisense strand to SEQ ID NO: 1025170
uguauugagcaccuccaac

SEQ ID NO: 1025172 - RNA, 19 nt, Artificial Sequence
  Description of Artificial Sequence: Synthetic oligonucleotide
  Sense strand starting at position 589 of SEQ ID NO: 914716
ggaagcaaucuaggguaaa

SEQ ID NO: 1025173 - RNA, 19 nt, Artificial Sequence
  Description of Artificial Sequence: Synthetic oligonucleotide
  Antisense strand to SEQ ID NO: 1025172
uuuacccuagauugcuucc

SEQ ID NO: 1025174 - RNA, 19 nt, Artificial Sequence
  Description of Artificial Sequence: Synthetic oligonucleotide
  Sense strand starting at position 632 of SEQ ID NO: 914716
acacccagccgauagaaua

SEQ ID NO: 1025175 - RNA, 19 nt, Artificial Sequence
  Description of Artificial Sequence: Synthetic oligonucleotide
  Antisense strand to SEQ ID NO: 1025174
uauucuaucggcugggugu

SEQ ID NO: 1025176 - RNA, 19 nt, Artificial Sequence
  Description of Artificial Sequence: Synthetic oligonucleotide
  Sense strand starting at position 671 of SEQ ID NO: 914716
ugaaucaggucugaauuua

SEQ ID NO: 1025177 - RNA, 19 nt, Artificial Sequence
  Description of Artificial Sequence: Synthetic oligonucleotide
  Antisense strand to SEQ ID NO: 1025176
uaaauucagaccugauuca

SEQ ID NO: 1025178 - RNA, 19 nt, Artificial Sequence
  Description of Artificial Sequence: Synthetic oligonucleotide
  Sense strand starting at position 679 of SEQ ID NO: 914716
gucugaauuuagcaaccua

SEQ ID NO: 1025179 - RNA, 19 nt, Artificial Sequence
  Description of Artificial Sequence: Synthetic oligonucleotide
  Antisense strand to SEQ ID NO: 1025178
uagguugcuaaauucagac

SEQ ID NO: 1025180 - RNA, 19 nt, Artificial Sequence
  Description of Artificial Sequence: Synthetic oligonucleotide
  Sense strand starting at position 732 of SEQ ID NO: 914716
acagacguuaaauggauua

SEQ ID NO: 1025181 - RNA, 19 nt, Artificial Sequence
  Description of Artificial Sequence: Synthetic oligonucleotide
  Antisense strand to SEQ ID NO: 1025180
uaauccauuuaacgucugu

SEQ ID NO: 1025182 - RNA, 19 nt, Artificial Sequence
  Description of Artificial Sequence: Synthetic oligonucleotide
  Sense strand starting at position 737 of SEQ ID NO: 914716
cguuaaauggauuaggguu

SEQ ID NO: 1025183 - RNA, 19 nt, Artificial Sequence
  Description of Artificial Sequence: Synthetic oligonucleotide
  Antisense strand to SEQ ID NO: 1025182
aacccuaauccauuuaacg

SEQ ID NO: 1025184 - RNA, 19 nt, Artificial Sequence
  Description of Artificial Sequence: Synthetic oligonucleotide
  Sense strand starting at position 743 of SEQ ID NO: 914716
auggauuaggguugguaau

SEQ ID NO: 1025185 - RNA, 19 nt, Artificial Sequence
  Description of Artificial Sequence: Synthetic oligonucleotide
  Antisense strand to SEQ ID NO: 1025184
auuaccaacccuaauccau

SEQ ID NO: 1025186 - RNA, 19 nt, Artificial Sequence
  Description of Artificial Sequence: Synthetic oligonucleotide
  Sense strand starting at position 1095 of SEQ ID NO: 914716
gaguuaauccaagggucuu

SEQ ID NO: 1025187 - RNA, 19 nt, Artificial Sequence
  Description of Artificial Sequence: Synthetic oligonucleotide
  Antisense strand to SEQ ID NO: 1025186
aagacccuuggauuaacuc

SEQ ID NO: 1025188 - RNA, 19 nt, Artificial Sequence
  Description of Artificial Sequence: Synthetic oligonucleotide
  Sense strand starting at position 1105 of SEQ ID NO: 914716
aagggucuugcaggcgaaa

SEQ ID NO: 1025189 - RNA, 19 nt, Artificial Sequence
  Description of Artificial Sequence: Synthetic oligonucleotide
  Antisense strand to SEQ ID NO: 1025188
uuucgccugcaagacccuu

SEQ ID NO: 1025190 - RNA, 19 nt, Artificial Sequence
  Description of Artificial Sequence: Synthetic oligonucleotide
  Sense strand starting at position 1140 of SEQ ID NO: 914716
gggaguaauuaugucaacu

SEQ ID NO: 1025191 - RNA, 19 nt, Artificial Sequence
  Description of Artificial Sequence: Synthetic oligonucleotide
  Antisense strand to SEQ ID NO: 1025190
aguugacauaauuacuccc

SEQ ID NO: 1025192 - RNA, 19 nt, Artificial Sequence
  Description of Artificial Sequence: Synthetic oligonucleotide
  Sense strand starting at position 1200 of SEQ ID NO: 914716
gaucgcgauggucaacuaa

SEQ ID NO: 1025193 - RNA, 19 nt, Artificial Sequence
  Description of Artificial Sequence: Synthetic oligonucleotide
  Antisense strand to SEQ ID NO: 1025192
uuaguugaccaucgcgauc

SEQ ID NO: 1025194 - RNA, 19 nt, Artificial Sequence
  Description of Artificial Sequence: Synthetic oligonucleotide
  Sense strand starting at position 1243 of SEQ ID NO: 914716
guaggugucaggcaauaug

SEQ ID NO: 1025195 - RNA, 19 nt, Artificial Sequence
  Description of Artificial Sequence: Synthetic oligonucleotide
  Antisense strand to SEQ ID NO: 1025194
cauauugccugacaccuac

SEQ ID NO: 1025196 - RNA, 19 nt, Artificial Sequence
  Description of Artificial Sequence: Synthetic oligonucleotide
  Sense strand starting at position 1246 of SEQ ID NO: 914716
ggugucaggcaauauguua

SEQ ID NO: 1025197 - RNA, 19 nt, Artificial Sequence
  Description of Artificial Sequence: Synthetic oligonucleotide
  Antisense strand to SEQ ID NO: 1025196
uaacauauugccugacacc

SEQ ID NO: 1025198 - RNA, 19 nt, Artificial Sequence
  Description of Artificial Sequence: Synthetic oligonucleotide
  Sense strand starting at position 1378 of SEQ ID NO: 914716
agaagaggccuuggaaugu

SEQ ID NO: 1025199 - RNA, 19 nt, Artificial Sequence
  Description of Artificial Sequence: Synthetic oligonucleotide
  Antisense strand to SEQ ID NO: 1025198
acauuccaaggccucuucu

SEQ ID NO: 1025200 - RNA, 19 nt, Artificial Sequence
  Description of Artificial Sequence: Synthetic oligonucleotide
  Sense strand starting at position 1464 of SEQ ID NO: 914716
ggagcuuccaauugaguca

SEQ ID NO: 1025201 - RNA, 19 nt, Artificial Sequence
  Description of Artificial Sequence: Synthetic oligonucleotide
  Antisense strand to SEQ ID NO: 1025200
ugacucaauuggaagcucc

SEQ ID NO: 1025202 - RNA, 19 nt, Artificial Sequence
  Description of Artificial Sequence: Synthetic oligonucleotide
  Sense strand starting at position 2174 of SEQ ID NO: 914716
auggucaagugaucguauu

SEQ ID NO: 1025203 - RNA, 19 nt, Artificial Sequence
  Description of Artificial Sequence: Synthetic oligonucleotide
  Antisense strand to SEQ ID NO: 1025202
aauacgaucacuugaccau

SEQ ID NO: 1025204 - RNA, 19 nt, Artificial Sequence
  Description of Artificial Sequence: Synthetic oligonucleotide
  Sense strand starting at position 2175 of SEQ ID NO: 914716
uggucaagugaucguauuu

SEQ ID NO: 1025205 - RNA, 19 nt, Artificial Sequence
  Description of Artificial Sequence: Synthetic oligonucleotide
  Antisense strand to SEQ ID NO: 1025204
aaauacgaucacuugacca

SEQ ID NO: 1025206 - RNA, 19 nt, Artificial Sequence
  Description of Artificial Sequence: Synthetic oligonucleotide
  Sense strand starting at position 2247 of SEQ ID NO: 914716
aguaguuacuuucuagaag

SEQ ID NO: 1025207 - RNA, 19 nt, Artificial Sequence
  Description of Artificial Sequence: Synthetic oligonucleotide
  Antisense strand to SEQ ID NO: 1025206
cuucuagaaaguaacuacu

SEQ ID NO: 1025208 - RNA, 19 nt, Artificial Sequence
  Description of Artificial Sequence: Synthetic oligonucleotide
  Sense strand starting at position 2250 of SEQ ID NO: 914716
aguuacuuucuagaaguua

SEQ ID NO: 1025209 - RNA, 19 nt, Artificial Sequence
  Description of Artificial Sequence: Synthetic oligonucleotide
  Antisense strand to SEQ ID NO: 1025208
uaacuucuagaaaguaacu

SEQ ID NO: 1025210 - RNA, 19 nt, Artificial Sequence
  Description of Artificial Sequence: Synthetic oligonucleotide
  Sense strand starting at position 2266 of SEQ ID NO: 914716
uuaugaaagguuuaugguu

SEQ ID NO: 1025211 - RNA, 19 nt, Artificial Sequence
  Description of Artificial Sequence: Synthetic oligonucleotide
  Antisense strand to SEQ ID NO: 1025210
aaccauaaaccuuucauaa

SEQ ID NO: 1025212 - RNA, 19 nt, Artificial Sequence
  Description of Artificial Sequence: Synthetic oligonucleotide
  Sense strand starting at position 2275 of SEQ ID NO: 914716
guuuaugguuuauccacga

SEQ ID NO: 1025213 - RNA, 19 nt, Artificial Sequence
  Description of Artificial Sequence: Synthetic oligonucleotide
  Antisense strand to SEQ ID NO: 1025212
ucguggauaaaccauaaac

SEQ ID NO: 1025214 - RNA, 19 nt, Artificial Sequence
  Description of Artificial Sequence: Synthetic oligonucleotide
  Sense strand starting at position 2279 of SEQ ID NO: 914716
augguuuauccacgaucac

SEQ ID NO: 1025215 - RNA, 19 nt, Artificial Sequence
  Description of Artificial Sequence: Synthetic oligonucleotide
  Antisense strand to SEQ ID NO: 1025214
gugaucguggauaaaccau

SEQ ID NO: 1025216 - RNA, 19 nt, Artificial Sequence
  Description of Artificial Sequence: Synthetic oligonucleotide
  Sense strand starting at position 2280 of SEQ ID NO: 914716
ugguuuauccacgaucaca

SEQ ID NO: 1025217 - RNA, 19 nt, Artificial Sequence
  Description of Artificial Sequence: Synthetic oligonucleotide
  Antisense strand to SEQ ID NO: 1025216
ugugaucguggauaaacca

SEQ ID NO: 1025218 - RNA, 19 nt, Artificial Sequence
  Description of Artificial Sequence: Synthetic oligonucleotide
  Sense strand starting at position 2291 of SEQ ID NO: 914716
cgaucacaucuguaguaga

SEQ ID NO: 1025219 - RNA, 19 nt, Artificial Sequence
  Description of Artificial Sequence: Synthetic oligonucleotide
  Antisense strand to SEQ ID NO: 1025218
ucuacuacagaugugaucg

SEQ ID NO: 1025220 - RNA, 19 nt, Artificial Sequence
  Description of Artificial Sequence: Synthetic oligonucleotide
  Sense strand starting at position 2323 of SEQ ID NO: 914716
auuacauuggauggugauu

SEQ ID NO: 1025221 - RNA, 19 nt, Artificial Sequence
  Description of Artificial Sequence: Synthetic oligonucleotide
  Antisense strand to SEQ ID NO: 1025220
aaucaccauccaauguaau

SEQ ID NO: 1025222 - RNA, 19 nt, Artificial Sequence
  Description of Artificial Sequence: Synthetic oligonucleotide
  Sense strand starting at position 2812 of SEQ ID NO: 914716
gcuuaacaauuugagagua

SEQ ID NO: 1025223 - RNA, 19 nt, Artificial Sequence
  Description of Artificial Sequence: Synthetic oligonucleotide
  Antisense strand to SEQ ID NO: 1025222
uacucucaaauuguuaagc

SEQ ID NO: 1025224 - RNA, 19 nt, Artificial Sequence
  Description of Artificial Sequence: Synthetic oligonucleotide
  Sense strand starting at position 2824 of SEQ ID NO: 914716
gagaguaauuugcagacau

SEQ ID NO: 1025225 - RNA, 19 nt, Artificial Sequence
  Description of Artificial Sequence: Synthetic oligonucleotide
  Antisense strand to SEQ ID NO: 1025224
augucugcaaauuacucuc

SEQ ID NO: 1025226 - RNA, 19 nt, Artificial Sequence
  Description of Artificial Sequence: Synthetic oligonucleotide
  Sense strand starting at position 2836 of SEQ ID NO: 914716
cagacaucgugucccuuua

SEQ ID NO: 1025227 - RNA, 19 nt, Artificial Sequence
  Description of Artificial Sequence: Synthetic oligonucleotide
  Antisense strand to SEQ ID NO: 1025226
uaaagggacacgaugucug

SEQ ID NO: 1025228 - RNA, 19 nt, Artificial Sequence
  Description of Artificial Sequence: Synthetic oligonucleotide
  Sense strand starting at position 3502 of SEQ ID NO: 914716
ggcucucugucuuuauaau

SEQ ID NO: 1025229 - RNA, 19 nt, Artificial Sequence
  Description of Artificial Sequence: Synthetic oligonucleotide
  Antisense strand to SEQ ID NO: 1025228
auuauaaagacagagagcc

SEQ ID NO: 1025230 - RNA, 19 nt, Artificial Sequence
  Description of Artificial Sequence: Synthetic oligonucleotide
  Sense strand starting at position 3590 of SEQ ID NO: 914716
uggcuaauguuuccucuua

SEQ ID NO: 1025231 - RNA, 19 nt, Artificial Sequence
  Description of Artificial Sequence: Synthetic oligonucleotide
  Antisense strand to SEQ ID NO: 1025230
uaagaggaaacauuagcca

SEQ ID NO: 1025232 - RNA, 19 nt, Artificial Sequence
  Description of Artificial Sequence: Synthetic oligonucleotide
  Sense strand starting at position 3591 of SEQ ID NO: 914716
ggcuaauguuuccucuuaa

SEQ ID NO: 1025233 - RNA, 19 nt, Artificial Sequence
  Description of Artificial Sequence: Synthetic oligonucleotide
  Antisense strand to SEQ ID NO: 1025232
uuaagaggaaacauuagcc

SEQ ID NO: 1025234 - RNA, 19 nt, Artificial Sequence
  Description of Artificial Sequence: Synthetic oligonucleotide
  Sense strand starting at position 3598 of SEQ ID NO: 914716
guuuccucuuaauuagagu

SEQ ID NO: 1025235 - RNA, 19 nt, Artificial Sequence
  Description of Artificial Sequence: Synthetic oligonucleotide
  Antisense strand to SEQ ID NO: 1025234
acucuaauuaagaggaaac

SEQ ID NO: 1025236 - RNA, 19 nt, Artificial Sequence
  Description of Artificial Sequence: Synthetic oligonucleotide
  Sense strand starting at position 3604 of SEQ ID NO: 914716
ucuuaauuagaguaugcau

SEQ ID NO: 1025237 - RNA, 19 nt, Artificial Sequence
  Description of Artificial Sequence: Synthetic oligonucleotide
  Antisense strand to SEQ ID NO: 1025236
augcauacucuaauuaaga

SEQ ID NO: 1025238 - RNA, 19 nt, Artificial Sequence
  Description of Artificial Sequence: Synthetic oligonucleotide
  Sense strand starting at position 3690 of SEQ ID NO: 914716
gcagguuugcuacauauga

SEQ ID NO: 1025239 - RNA, 19 nt, Artificial Sequence
  Description of Artificial Sequence: Synthetic oligonucleotide
  Antisense strand to SEQ ID NO: 1025238
ucauauguagcaaaccugc

SEQ ID NO: 1025240 - RNA, 19 nt, Artificial Sequence
  Description of Artificial Sequence: Synthetic oligonucleotide
  Sense strand starting at position 3761 of SEQ ID NO: 914716
ccuaguacgcaagaguuau

SEQ ID NO: 1025241 - RNA, 19 nt, Artificial Sequence
  Description of Artificial Sequence: Synthetic oligonucleotide
  Antisense strand to SEQ ID NO: 1025240
auaacucuugcguacuagg

SEQ ID NO: 1025242 - RNA, 19 nt, Artificial Sequence
  Description of Artificial Sequence: Synthetic oligonucleotide
  Sense strand starting at position 9 of SEQ ID NO: 914717
gcuuauccuggauauccau

SEQ ID NO: 1025243 - RNA, 19 nt, Artificial Sequence
  Description of Artificial Sequence: Synthetic oligonucleotide
  Antisense strand to SEQ ID NO: 1025242
auggauauccaggauaagc

SEQ ID NO: 1025244 - RNA, 19 nt, Artificial Sequence
  Description of Artificial Sequence: Synthetic oligonucleotide
  Sense strand starting at position 226 of SEQ ID NO: 914717
cugugaacauguuuacaau

SEQ ID NO: 1025245 - RNA, 19 nt, Artificial Sequence
  Description of Artificial Sequence: Synthetic oligonucleotide
  Antisense strand to SEQ ID NO: 1025244
auuguaaacauguucacag

SEQ ID NO: 1025246 - RNA, 19 nt, Artificial Sequence
  Description of Artificial Sequence: Synthetic oligonucleotide
  Sense strand starting at position 508 of SEQ ID NO: 914717
guuaauuccuugcuuggga

SEQ ID NO: 1025247 - RNA, 19 nt, Artificial Sequence
  Description of Artificial Sequence: Synthetic oligonucleotide
  Antisense strand to SEQ ID NO: 1025246
ucccaagcaaggaauuaac

SEQ ID NO: 1025248 - RNA, 19 nt, Artificial Sequence
  Description of Artificial Sequence: Synthetic oligonucleotide
  Sense strand starting at position 509 of SEQ ID NO: 914717
uuaauuccuugcuugggaa

SEQ ID NO: 1025249 - RNA, 19 nt, Artificial Sequence
  Description of Artificial Sequence: Synthetic oligonucleotide
  Antisense strand to SEQ ID NO: 1025248
uucccaagcaaggaauuaa

SEQ ID NO: 1025250 - RNA, 19 nt, Artificial Sequence
  Description of Artificial Sequence: Synthetic oligonucleotide
  Sense strand starting at position 562 of SEQ ID NO: 914717
acaugaucucuuggacaca

SEQ ID NO: 1025251 - RNA, 19 nt, Artificial Sequence
  Description of Artificial Sequence: Synthetic oligonucleotide
  Antisense strand to SEQ ID NO: 1025250
uguguccaagagaucaugu

SEQ ID NO: 1025252 - RNA, 19 nt, Artificial Sequence
  Description of Artificial Sequence: Synthetic oligonucleotide
  Sense strand starting at position 685 of SEQ ID NO: 914717
gugcucaguaaguaucuua

SEQ ID NO: 1025253 - RNA, 19 nt, Artificial Sequence
  Description of Artificial Sequence: Synthetic oligonucleotide
  Antisense strand to SEQ ID NO: 1025252
uaagauacuuacugagcac

SEQ ID NO: 1025254 - RNA, 19 nt, Artificial Sequence
  Description of Artificial Sequence: Synthetic oligonucleotide
  Sense strand starting at position 688 of SEQ ID NO: 914717
cucaguaaguaucuuaaau

SEQ ID NO: 1025255 - RNA, 19 nt, Artificial Sequence
  Description of Artificial Sequence: Synthetic oligonucleotide
  Antisense strand to SEQ ID NO: 1025254
auuuaagauacuuacugag

SEQ ID NO: 1025256 - RNA, 19 nt, Artificial Sequence
  Description of Artificial Sequence: Synthetic oligonucleotide
  Sense strand starting at position 757 of SEQ ID NO: 914717
acuggaaucuuucuuuggu

SEQ ID NO: 1025257 - RNA, 19 nt, Artificial Sequence
  Description of Artificial Sequence: Synthetic oligonucleotide
  Antisense strand to SEQ ID NO: 1025256
accaaagaaagauuccagu

SEQ ID NO: 1025258 - RNA, 19 nt, Artificial Sequence
  Description of Artificial Sequence: Synthetic oligonucleotide
  Sense strand starting at position 1007 of SEQ ID NO: 914717
gcauuaaguugaguucuag

SEQ ID NO: 1025259 - RNA, 19 nt, Artificial Sequence
  Description of Artificial Sequence: Synthetic oligonucleotide
  Antisense strand to SEQ ID NO: 1025258
cuagaacucaacuuaaugc

SEQ ID NO: 1025260 - RNA, 19 nt, Artificial Sequence
  Description of Artificial Sequence: Synthetic oligonucleotide
  Sense strand starting at position 1347 of SEQ ID NO: 914717
uggccuacugucuauugaa

SEQ ID NO: 1025261 - RNA, 19 nt, Artificial Sequence
  Description of Artificial Sequence: Synthetic oligonucleotide
  Antisense strand to SEQ ID NO: 1025260
uucaauagacaguaggcca

SEQ ID NO: 1025262 - RNA, 19 nt, Artificial Sequence
  Description of Artificial Sequence: Synthetic oligonucleotide
  Sense strand starting at position 1478 of SEQ ID NO: 914717
ggacuuaaugcacaucugu

SEQ ID NO: 1025263 - RNA, 19 nt, Artificial Sequence
  Description of Artificial Sequence: Synthetic oligonucleotide
  Antisense strand to SEQ ID NO: 1025262
acagaugugcauuaagucc

SEQ ID NO: 1025264 - RNA, 19 nt, Artificial Sequence
  Description of Artificial Sequence: Synthetic oligonucleotide
  Sense strand starting at position 1494 of SEQ ID NO: 914717
ugugccaccgauuaucaau

SEQ ID NO: 1025265 - RNA, 19 nt, Artificial Sequence
  Description of Artificial Sequence: Synthetic oligonucleotide
  Antisense strand to SEQ ID NO: 1025264
auugauaaucgguggcaca

SEQ ID NO: 1025266 - RNA, 19 nt, Artificial Sequence
  Description of Artificial Sequence: Synthetic oligonucleotide
  Sense strand starting at position 1509 of SEQ ID NO: 914717
caaucagucugacuguaag

SEQ ID NO: 1025267 - RNA, 19 nt, Artificial Sequence
  Description of Artificial Sequence: Synthetic oligonucleotide
  Antisense strand to SEQ ID NO: 1025266
cuuacagucagacugauug

SEQ ID NO: 1025268 - RNA, 19 nt, Artificial Sequence
  Description of Artificial Sequence: Synthetic oligonucleotide
  Sense strand starting at position 1515 of SEQ ID NO: 914717
gucugacuguaagcuuaaa

SEQ ID NO: 1025269 - RNA, 19 nt, Artificial Sequence
  Description of Artificial Sequence: Synthetic oligonucleotide
  Antisense strand to SEQ ID NO: 1025268
uuuaagcuuacagucagac

SEQ ID NO: 1025270 - RNA, 19 nt, Artificial Sequence
  Description of Artificial Sequence: Synthetic oligonucleotide
  Sense strand starting at position 1523 of SEQ ID NO: 914717
guaagcuuaaauggagaau

SEQ ID NO: 1025271 - RNA, 19 nt, Artificial Sequence
  Description of Artificial Sequence: Synthetic oligonucleotide
  Antisense strand to SEQ ID NO: 1025270
auucuccauuuaagcuuac

SEQ ID NO: 1025272 - RNA, 19 nt, Artificial Sequence
  Description of Artificial Sequence: Synthetic oligonucleotide
  Sense strand starting at position 2182 of SEQ ID NO: 914717
ggcgaacgcggccugaauu

SEQ ID NO: 1025273 - RNA, 19 nt, Artificial Sequence
  Description of Artificial Sequence: Synthetic oligonucleotide
  Antisense strand to SEQ ID NO: 1025272
aauucaggccgcguucgcc

SEQ ID NO: 1025274 - RNA, 19 nt, Artificial Sequence
  Description of Artificial Sequence: Synthetic oligonucleotide
  Sense strand starting at position 2294 of SEQ ID NO: 914717
ggcguuagcgacucaugca

SEQ ID NO: 1025275 - RNA, 19 nt, Artificial Sequence
  Description of Artificial Sequence: Synthetic oligonucleotide
  Antisense strand to SEQ ID NO: 1025274
ugcaugagucgcuaacgcc

SEQ ID NO: 1025276 - RNA, 19 nt, Artificial Sequence
  Description of Artificial Sequence: Synthetic oligonucleotide
  Sense strand starting at position 2317 of SEQ ID NO: 914717
acccguuaacgcguugauu

SEQ ID NO: 1025277 - RNA, 19 nt, Artificial Sequence
  Description of Artificial Sequence: Synthetic oligonucleotide
  Antisense strand to SEQ ID NO: 1025276
aaucaacgcguuaacgggu

SEQ ID NO: 1025278 - RNA, 19 nt, Artificial Sequence
  Description of Artificial Sequence: Synthetic oligonucleotide
  Sense strand starting at position 2552 of SEQ ID NO: 914717
ucucaacucuagccgaauu

SEQ ID NO: 1025279 - RNA, 19 nt, Artificial Sequence
  Description of Artificial Sequence: Synthetic oligonucleotide
  Antisense strand to SEQ ID NO: 1025278
aauucggcuagaguugaga

SEQ ID NO: 1025280 - RNA, 19 nt, Artificial Sequence
  Description of Artificial Sequence: Synthetic oligonucleotide
  Sense strand starting at position 2632 of SEQ ID NO: 914717
uuucgagccuaggugaaau

SEQ ID NO: 1025281 - RNA, 19 nt, Artificial Sequence
  Description of Artificial Sequence: Synthetic oligonucleotide
  Antisense strand to SEQ ID NO: 1025280
auuucaccuaggcucgaaa

SEQ ID NO: 1025282 - RNA, 19 nt, Artificial Sequence
  Description of Artificial Sequence: Synthetic oligonucleotide
  Sense strand starting at position 2696 of SEQ ID NO: 914717
cuaguaaucugauuguuua

SEQ ID NO: 1025283 - RNA, 19 nt, Artificial Sequence
  Description of Artificial Sequence: Synthetic oligonucleotide
  Antisense strand to SEQ ID NO: 1025282
uaaacaaucagauuacuag

SEQ ID NO: 1025284 - RNA, 19 nt, Artificial Sequence
  Description of Artificial Sequence: Synthetic oligonucleotide
  Sense strand starting at position 2699 of SEQ ID NO: 914717
guaaucugauuguuuacau

SEQ ID NO: 1025285 - RNA, 19 nt, Artificial Sequence
  Description of Artificial Sequence: Synthetic oligonucleotide
  Antisense strand to SEQ ID NO: 1025284
auguaaacaaucagauuac

SEQ ID NO: 1025286 - RNA, 19 nt, Artificial Sequence
  Description of Artificial Sequence: Synthetic oligonucleotide
  Sense strand starting at position 2856 of SEQ ID NO: 914717
gggaaauguuuggcucuuu

SEQ ID NO: 1025287 - RNA, 19 nt, Artificial Sequence
  Description of Artificial Sequence: Synthetic oligonucleotide
  Antisense strand to SEQ ID NO: 1025286
aaagagccaaacauuuccc

SEQ ID NO: 1025288 - RNA, 19 nt, Artificial Sequence
  Description of Artificial Sequence: Synthetic oligonucleotide
  Sense strand starting at position 2857 of SEQ ID NO: 914717
ggaaauguuuggcucuuuc

SEQ ID NO: 1025289 - RNA, 19 nt, Artificial Sequence
  Description of Artificial Sequence: Synthetic oligonucleotide
  Antisense strand to SEQ ID NO: 1025288
gaaagagccaaacauuucc

SEQ ID NO: 1025290 - RNA, 19 nt, Artificial Sequence
  Description of Artificial Sequence: Synthetic oligonucleotide
  Sense strand starting at position 2922 of SEQ ID NO: 914717
uagucugaacacugagaca

SEQ ID NO: 1025291 - RNA, 19 nt, Artificial Sequence
  Description of Artificial Sequence: Synthetic oligonucleotide
  Antisense strand to SEQ ID NO: 1025290
ugucucaguguucagacua

SEQ ID NO: 1025292 - RNA, 19 nt, Artificial Sequence
  Description of Artificial Sequence: Synthetic oligonucleotide
  Sense strand starting at position 3059 of SEQ ID NO: 914717
ggacgauugcauuguuaac

SEQ ID NO: 1025293 - RNA, 19 nt, Artificial Sequence
  Description of Artificial Sequence: Synthetic oligonucleotide
  Antisense strand to SEQ ID NO: 1025292
guuaacaaugcaaucgucc

SEQ ID NO: 1025294 - RNA, 19 nt, Artificial Sequence
  Description of Artificial Sequence: Synthetic oligonucleotide
  Sense strand starting at position 3061 of SEQ ID NO: 914717
acgauugcauuguuaacau

SEQ ID NO: 1025295 - RNA, 19 nt, Artificial Sequence
  Description of Artificial Sequence: Synthetic oligonucleotide
  Antisense strand to SEQ ID NO: 1025294
auguuaacaaugcaaucgu

SEQ ID NO: 1025296 - RNA, 19 nt, Artificial Sequence
  Description of Artificial Sequence: Synthetic oligonucleotide
  Sense strand starting at position 3118 of SEQ ID NO: 914717
aguguauaugaugacguaa

SEQ ID NO: 1025297 - RNA, 19 nt, Artificial Sequence
  Description of Artificial Sequence: Synthetic oligonucleotide
  Antisense strand to SEQ ID NO: 1025296
uuacgucaucauauacacu

SEQ ID NO: 1025298 - RNA, 19 nt, Artificial Sequence
  Description of Artificial Sequence: Synthetic oligonucleotide
  Sense strand starting at position 3232 of SEQ ID NO: 914717
agcugaaccuaucucugaa

SEQ ID NO: 1025299 - RNA, 19 nt, Artificial Sequence
  Description of Artificial Sequence: Synthetic oligonucleotide
  Antisense strand to SEQ ID NO: 1025298
uucagagauagguucagcu

SEQ ID NO: 1025300 - RNA, 19 nt, Artificial Sequence
  Description of Artificial Sequence: Synthetic oligonucleotide
  Sense strand starting at position 3272 of SEQ ID NO: 914717
ccuccauucuaggcuagua

SEQ ID NO: 1025301 - RNA, 19 nt, Artificial Sequence
  Description of Artificial Sequence: Synthetic oligonucleotide
  Antisense strand to SEQ ID NO: 1025300
uacuagccuagaauggagg

SEQ ID NO: 1025302 - RNA, 19 nt, Artificial Sequence
  Description of Artificial Sequence: Synthetic oligonucleotide
  Sense strand starting at position 3391 of SEQ ID NO: 914717
gcuguuucgggacaaguac

SEQ ID NO: 1025303 - RNA, 19 nt, Artificial Sequence
  Description of Artificial Sequence: Synthetic oligonucleotide
  Antisense strand to SEQ ID NO: 1025302
guacuugucccgaaacagc

SEQ ID NO: 1025304 - RNA, 19 nt, Artificial Sequence
  Description of Artificial Sequence: Synthetic oligonucleotide
  Sense strand starting at position 3402 of SEQ ID NO: 914717
acaaguaccgcacagagau

SEQ ID NO: 1025305 - RNA, 19 nt, Artificial Sequence
  Description of Artificial Sequence: Synthetic oligonucleotide
  Antisense strand to SEQ ID NO: 1025304
aucucugugcgguacuugu

SEQ ID NO: 1025306 - RNA, 19 nt, Artificial Sequence
  Description of Artificial Sequence: Synthetic oligonucleotide
  Sense strand starting at position 3426 of SEQ ID NO: 914717
agcaaagugcuuuaaguuu

SEQ ID NO: 1025307 - RNA, 19 nt, Artificial Sequence
  Description of Artificial Sequence: Synthetic oligonucleotide
  Antisense strand to SEQ ID NO: 1025306
aaacuuaaagcacuuugcu

SEQ ID NO: 1025308 - RNA, 19 nt, Artificial Sequence
  Description of Artificial Sequence: Synthetic oligonucleotide
  Sense strand starting at position 3536 of SEQ ID NO: 914717
ugaugaccucucugaaggu

SEQ ID NO: 1025309 - RNA, 19 nt, Artificial Sequence
  Description of Artificial Sequence: Synthetic oligonucleotide
  Antisense strand to SEQ ID NO: 1025308
accuucagagaggucauca

SEQ ID NO: 1025310 - RNA, 19 nt, Artificial Sequence
  Description of Artificial Sequence: Synthetic oligonucleotide
  Sense strand starting at position 3554 of SEQ ID NO: 914717
ugguucaaaggugguaaau

SEQ ID NO: 1025311 - RNA, 19 nt, Artificial Sequence
  Description of Artificial Sequence: Synthetic oligonucleotide
  Antisense strand to SEQ ID NO: 1025310
auuuaccaccuuugaacca

SEQ ID NO: 1025312 - RNA, 19 nt, Artificial Sequence
  Description of Artificial Sequence: Synthetic oligonucleotide
  Sense strand starting at position 3774 of SEQ ID NO: 914717
ccaagaaaccugugagguc

SEQ ID NO: 1025313 - RNA, 19 nt, Artificial Sequence
  Description of Artificial Sequence: Synthetic oligonucleotide
  Antisense strand to SEQ ID NO: 1025312
gaccucacagguuucuugg

SEQ ID NO: 1025314 - RNA, 19 nt, Artificial Sequence
  Description of Artificial Sequence: Synthetic oligonucleotide
  Sense strand starting at position 3781 of SEQ ID NO: 914717
accugugagguccaugauu

SEQ ID NO: 1025315 - RNA, 19 nt, Artificial Sequence
  Description of Artificial Sequence: Synthetic oligonucleotide
  Antisense strand to SEQ ID NO: 1025314
aaucauggaccucacaggu

SEQ ID NO: 1025316 - RNA, 19 nt, Artificial Sequence
  Description of Artificial Sequence: Synthetic oligonucleotide
  Sense strand starting at position 3783 of SEQ ID NO: 914717
cugugagguccaugauuga

SEQ ID NO: 1025317 - RNA, 19 nt, Artificial Sequence
  Description of Artificial Sequence: Synthetic oligonucleotide
  Antisense strand to SEQ ID NO: 1025316
ucaaucauggaccucacag

SEQ ID NO: 1025318 - RNA, 19 nt, Artificial Sequence
  Description of Artificial Sequence: Synthetic oligonucleotide
  Sense strand starting at position 3869 of SEQ ID NO: 914717
aaguuugaguucuuuggau

SEQ ID NO: 1025319 - RNA, 19 nt, Artificial Sequence
  Description of Artificial Sequence: Synthetic oligonucleotide
  Antisense strand to SEQ ID NO: 1025318
auccaaagaacucaaacuu

SEQ ID NO: 1025320 - RNA, 19 nt, Artificial Sequence
  Description of Artificial Sequence: Synthetic oligonucleotide
  Sense strand starting at position 3894 of SEQ ID NO: 914717
ggacaugaaagguguuaac

SEQ ID NO: 1025321 - RNA, 19 nt, Artificial Sequence
  Description of Artificial Sequence: Synthetic oligonucleotide
  Antisense strand to SEQ ID NO: 1025320
guuaacaccuuucaugucc

SEQ ID NO: 1025322 - RNA, 19 nt, Artificial Sequence
  Description of Artificial Sequence: Synthetic oligonucleotide
  Sense strand starting at position 62 of SEQ ID NO: 914718
gucaauuuaaguugucagu

SEQ ID NO: 1025323 - RNA, 19 nt, Artificial Sequence
  Description of Artificial Sequence: Synthetic oligonucleotide
  Antisense strand to SEQ ID NO: 1025322
acugacaacuuaaauugac

SEQ ID NO: 1025324 - RNA, 19 nt, Artificial Sequence
  Description of Artificial Sequence: Synthetic oligonucleotide
  Sense strand starting at position 115 of SEQ ID NO: 914718
ccuccaagaguguguggaa

SEQ ID NO: 1025325 - RNA, 19 nt, Artificial Sequence
  Description of Artificial Sequence: Synthetic oligonucleotide
  Antisense strand to SEQ ID NO: 1025324
uuccacacacucuuggagg

SEQ ID NO: 1025326 - RNA, 19 nt, Artificial Sequence
  Description of Artificial Sequence: Synthetic oligonucleotide
  Sense strand starting at position 139 of SEQ ID NO: 914718
gggcacgguuucucaucua

SEQ ID NO: 1025327 - RNA, 19 nt, Artificial Sequence
  Description of Artificial Sequence: Synthetic oligonucleotide
  Antisense strand to SEQ ID NO: 1025326
uagaugagaaaccgugccc

SEQ ID NO: 1025328 - RNA, 19 nt, Artificial Sequence
  Description of Artificial Sequence: Synthetic oligonucleotide
  Sense strand starting at position 250 of SEQ ID NO: 914718
agaucuacuucucaggcaa

SEQ ID NO: 1025329 - RNA, 19 nt, Artificial Sequence
  Description of Artificial Sequence: Synthetic oligonucleotide
  Antisense strand to SEQ ID NO: 1025328
uugccugagaaguagaucu

SEQ ID NO: 1025330 - RNA, 19 nt, Artificial Sequence
  Description of Artificial Sequence: Synthetic oligonucleotide
  Sense strand starting at position 346 of SEQ ID NO: 914718
ggcccaguuuccucccuau

SEQ ID NO: 1025331 - RNA, 19 nt, Artificial Sequence
  Description of Artificial Sequence: Synthetic oligonucleotide
  Antisense strand to SEQ ID NO: 1025330
auagggaggaaacugggcc

SEQ ID NO: 1025332 - RNA, 19 nt, Artificial Sequence
  Description of Artificial Sequence: Synthetic oligonucleotide
  Sense strand starting at position 369 of SEQ ID NO: 914718
ugaagaucaugauaugauc

SEQ ID NO: 1025333 - RNA, 19 nt, Artificial Sequence
  Description of Artificial Sequence: Synthetic oligonucleotide
  Antisense strand to SEQ ID NO: 1025332
gaucauaucaugaucuuca

SEQ ID NO: 1025334 - RNA, 19 nt, Artificial Sequence
  Description of Artificial Sequence: Synthetic oligonucleotide
  Sense strand starting at position 1294 of SEQ ID NO: 914718
cucugacuucugugaguuu

SEQ ID NO: 1025335 - RNA, 19 nt, Artificial Sequence
  Description of Artificial Sequence: Synthetic oligonucleotide
  Antisense strand to SEQ ID NO: 1025334
aaacucacagaagucagag

SEQ ID NO: 1025336 - RNA, 19 nt, Artificial Sequence
  Description of Artificial Sequence: Synthetic oligonucleotide
  Sense strand starting at position 1330 of SEQ ID NO: 914718
cuuauuauuucuuagucga

SEQ ID NO: 1025337 - RNA, 19 nt, Artificial Sequence
  Description of Artificial Sequence: Synthetic oligonucleotide
  Antisense strand to SEQ ID NO: 1025336
ucgacuaagaaauaauaag

SEQ ID NO: 1025338 - RNA, 19 nt, Artificial Sequence
  Description of Artificial Sequence: Synthetic oligonucleotide
  Sense strand starting at position 1337 of SEQ ID NO: 914718
uuucuuagucgauacauaa

SEQ ID NO: 1025339 - RNA, 19 nt, Artificial Sequence
  Description of Artificial Sequence: Synthetic oligonucleotide
  Antisense strand to SEQ ID NO: 1025338
uuauguaucgacuaagaaa

SEQ ID NO: 1025340 - RNA, 19 nt, Artificial Sequence
  Description of Artificial Sequence: Synthetic oligonucleotide
  Sense strand starting at position 2165 of SEQ ID NO: 914718
ggguuuggcgaagauucga

SEQ ID NO: 1025341 - RNA, 19 nt, Artificial Sequence
  Description of Artificial Sequence: Synthetic oligonucleotide
  Antisense strand to SEQ ID NO: 1025340
ucgaaucuucgccaaaccc

SEQ ID NO: 1025342 - RNA, 19 nt, Artificial Sequence
  Description of Artificial Sequence: Synthetic oligonucleotide
  Sense strand starting at position 2227 of SEQ ID NO: 914718
gcuaguucccugccuguga

SEQ ID NO: 1025343 - RNA, 19 nt, Artificial Sequence
  Description of Artificial Sequence: Synthetic oligonucleotide
  Antisense strand to SEQ ID NO: 1025342
ucacaggcagggaacuagc

SEQ ID NO: 1025344 - RNA, 19 nt, Artificial Sequence
  Description of Artificial Sequence: Synthetic oligonucleotide
  Sense strand starting at position 2228 of SEQ ID NO: 914718
cuaguucccugccugugaa

SEQ ID NO: 1025345 - RNA, 19 nt, Artificial Sequence
  Description of Artificial Sequence: Synthetic oligonucleotide
  Antisense strand to SEQ ID NO: 1025344
uucacaggcagggaacuag

SEQ ID NO: 1025346 - RNA, 19 nt, Artificial Sequence
  Description of Artificial Sequence: Synthetic oligonucleotide
  Sense strand starting at position 2229 of SEQ ID NO: 914718
uaguucccugccugugaaa

SEQ ID NO: 1025347 - RNA, 19 nt, Artificial Sequence
  Description of Artificial Sequence: Synthetic oligonucleotide
  Antisense strand to SEQ ID NO: 1025346
uuucacaggcagggaacua

SEQ ID NO: 1025348 - RNA, 19 nt, Artificial Sequence
  Description of Artificial Sequence: Synthetic oligonucleotide
  Sense strand starting at position 2231 of SEQ ID NO: 914718
guucccugccugugaaaug

SEQ ID NO: 1025349 - RNA, 19 nt, Artificial Sequence
  Description of Artificial Sequence: Synthetic oligonucleotide
  Antisense strand to SEQ ID NO: 1025348
cauuucacaggcagggaac

SEQ ID NO: 1025350 - RNA, 19 nt, Artificial Sequence
  Description of Artificial Sequence: Synthetic oligonucleotide
  Sense strand starting at position 2315 of SEQ ID NO: 914718
ggcaguggucaggagaaug

SEQ ID NO: 1025351 - RNA, 19 nt, Artificial Sequence
  Description of Artificial Sequence: Synthetic oligonucleotide
  Antisense strand to SEQ ID NO: 1025350
cauucuccugaccacugcc

SEQ ID NO: 1025352 - RNA, 19 nt, Artificial Sequence
  Description of Artificial Sequence: Synthetic oligonucleotide
  Sense strand starting at position 2343 of SEQ ID NO: 914718
ccagacucauccuggacaa

SEQ ID NO: 1025353 - RNA, 19 nt, Artificial Sequence
  Description of Artificial Sequence: Synthetic oligonucleotide
  Antisense strand to SEQ ID NO: 1025352
uuguccaggaugagucugg

SEQ ID NO: 1025354 - RNA, 19 nt, Artificial Sequence
  Description of Artificial Sequence: Synthetic oligonucleotide
  Sense strand starting at position 2740 of SEQ ID NO: 914718
cggcgagacuccgucugaa

SEQ ID NO: 1025355 - RNA, 19 nt, Artificial Sequence
  Description of Artificial Sequence: Synthetic oligonucleotide
  Antisense strand to SEQ ID NO: 1025354
uucagacggagucucgccg

SEQ ID NO: 1025356 - RNA, 19 nt, Artificial Sequence
  Description of Artificial Sequence: Synthetic oligonucleotide
  Sense strand starting at position 2911 of SEQ ID NO: 914718
caaagaggcaggugugaaa

SEQ ID NO: 1025357 - RNA, 19 nt, Artificial Sequence
  Description of Artificial Sequence: Synthetic oligonucleotide
  Antisense strand to SEQ ID NO: 1025356
uuucacaccugccucuuug

SEQ ID NO: 1025358 - RNA, 19 nt, Artificial Sequence
  Description of Artificial Sequence: Synthetic oligonucleotide
  Sense strand starting at position 2943 of SEQ ID NO: 914718
gggccaugucacugacaug

SEQ ID NO: 1025359 - RNA, 19 nt, Artificial Sequence
  Description of Artificial Sequence: Synthetic oligonucleotide
  Antisense strand to SEQ ID NO: 1025358
caugucagugacauggccc

SEQ ID NO: 1025360 - RNA, 19 nt, Artificial Sequence
  Description of Artificial Sequence: Synthetic oligonucleotide
  Sense strand starting at position 2944 of SEQ ID NO: 914718
ggccaugucacugacaugu

SEQ ID NO: 1025361 - RNA, 19 nt, Artificial Sequence
  Description of Artificial Sequence: Synthetic oligonucleotide
  Antisense strand to SEQ ID NO: 1025360
acaugucagugacauggcc

SEQ ID NO: 1025362 - RNA, 19 nt, Artificial Sequence
  Description of Artificial Sequence: Synthetic oligonucleotide
  Sense strand starting at position 2954 of SEQ ID NO: 914718
cugacauguccugguaaug

SEQ ID NO: 1025363 - RNA, 19 nt, Artificial Sequence
  Description of Artificial Sequence: Synthetic oligonucleotide
  Antisense strand to SEQ ID NO: 1025362
cauuaccaggacaugucag

SEQ ID NO: 1025364 - RNA, 19 nt, Artificial Sequence
  Description of Artificial Sequence: Synthetic oligonucleotide
  Sense strand starting at position 2972 of SEQ ID NO: 914718
gcaacaugugugcaucuga

SEQ ID NO: 1025365 - RNA, 19 nt, Artificial Sequence
  Description of Artificial Sequence: Synthetic oligonucleotide
  Antisense strand to SEQ ID NO: 1025364
ucagaugcacacauguugc

SEQ ID NO: 1025366 - RNA, 19 nt, Artificial Sequence
  Description of Artificial Sequence: Synthetic oligonucleotide
  Sense strand starting at position 2981 of SEQ ID NO: 914718
gugcaucugagauguggaa

SEQ ID NO: 1025367 - RNA, 19 nt, Artificial Sequence
  Description of Artificial Sequence: Synthetic oligonucleotide
  Antisense strand to SEQ ID NO: 1025366
uuccacaucucagaugcac

SEQ ID NO: 1025368 - RNA, 19 nt, Artificial Sequence
  Description of Artificial Sequence: Synthetic oligonucleotide
  Sense strand starting at position 2983 of SEQ ID NO: 914718
gcaucugagauguggaacu

SEQ ID NO: 1025369 - RNA, 19 nt, Artificial Sequence
  Description of Artificial Sequence: Synthetic oligonucleotide
  Antisense strand to SEQ ID NO: 1025368
aguuccacaucucagaugc

SEQ ID NO: 1025370 - RNA, 19 nt, Artificial Sequence
  Description of Artificial Sequence: Synthetic oligonucleotide
  Sense strand starting at position 3047 of SEQ ID NO: 914718
accagaaguugucccaagu

SEQ ID NO: 1025371 - RNA, 19 nt, Artificial Sequence
  Description of Artificial Sequence: Synthetic oligonucleotide
  Antisense strand to SEQ ID NO: 1025370
acuugggacaacuucuggu

SEQ ID NO: 1025372 - RNA, 19 nt, Artificial Sequence
  Description of Artificial Sequence: Synthetic oligonucleotide
  Sense strand starting at position 3159 of SEQ ID NO: 914718
aguccagccuucuuuggua

SEQ ID NO: 1025373 - RNA, 19 nt, Artificial Sequence
  Description of Artificial Sequence: Synthetic oligonucleotide
  Antisense strand to SEQ ID NO: 1025372
uaccaaagaaggcuggacu

SEQ ID NO: 1025374 - RNA, 19 nt, Artificial Sequence
  Description of Artificial Sequence: Synthetic oligonucleotide
  Sense strand starting at position 3166 of SEQ ID NO: 914718
ccuucuuugguaugugaac

SEQ ID NO: 1025375 - RNA, 19 nt, Artificial Sequence
  Description of Artificial Sequence: Synthetic oligonucleotide
  Antisense strand to SEQ ID NO: 1025374
guucacauaccaaagaagg

SEQ ID NO: 1025376 - RNA, 19 nt, Artificial Sequence
  Description of Artificial Sequence: Synthetic oligonucleotide
  Sense strand starting at position 3245 of SEQ ID NO: 914718
uugccuugccaaugugacu

SEQ ID NO: 1025377 - RNA, 19 nt, Artificial Sequence
  Description of Artificial Sequence: Synthetic oligonucleotide
  Antisense strand to SEQ ID NO: 1025376
agucacauuggcaaggcaa

SEQ ID NO: 1025378 - RNA, 19 nt, Artificial Sequence
  Description of Artificial Sequence: Synthetic oligonucleotide
  Sense strand starting at position 3252 of SEQ ID NO: 914718
gccaaugugacuuaaggac

SEQ ID NO: 1025379 - RNA, 19 nt, Artificial Sequence
  Description of Artificial Sequence: Synthetic oligonucleotide
  Antisense strand to SEQ ID NO: 1025378
guccuuaagucacauuggc

SEQ ID NO: 1025380 - RNA, 19 nt, Artificial Sequence
  Description of Artificial Sequence: Synthetic oligonucleotide
  Sense strand starting at position 3411 of SEQ ID NO: 914718
agcagaagaguucaguguu

SEQ ID NO: 1025381 - RNA, 19 nt, Artificial Sequence
  Description of Artificial Sequence: Synthetic oligonucleotide
  Antisense strand to SEQ ID NO: 1025380
aacacugaacucuucugcu

SEQ ID NO: 1025382 - RNA, 19 nt, Artificial Sequence
  Description of Artificial Sequence: Synthetic oligonucleotide
  Sense strand starting at position 3414 of SEQ ID NO: 914718
agaagaguucaguguuguu

SEQ ID NO: 1025383 - RNA, 19 nt, Artificial Sequence
  Description of Artificial Sequence: Synthetic oligonucleotide
  Antisense strand to SEQ ID NO: 1025382
aacaacacugaacucuucu

SEQ ID NO: 1025384 - RNA, 19 nt, Artificial Sequence
  Description of Artificial Sequence: Synthetic oligonucleotide
  Sense strand starting at position 3504 of SEQ ID NO: 914718
cucagaaagugucuguugu

SEQ ID NO: 1025385 - RNA, 19 nt, Artificial Sequence
  Description of Artificial Sequence: Synthetic oligonucleotide
  Antisense strand to SEQ ID NO: 1025384
acaacagacacuuucugag

SEQ ID NO: 1025386 - RNA, 19 nt, Artificial Sequence
  Description of Artificial Sequence: Synthetic oligonucleotide
  Sense strand starting at position 3512 of SEQ ID NO: 914718
gugucuguugugguuuaau

SEQ ID NO: 1025387 - RNA, 19 nt, Artificial Sequence
  Description of Artificial Sequence: Synthetic oligonucleotide
  Antisense strand to SEQ ID NO: 1025386
auuaaaccacaacagacac

SEQ ID NO: 1025388 - RNA, 19 nt, Artificial Sequence
  Description of Artificial Sequence: Synthetic oligonucleotide
  Sense strand starting at position 3520 of SEQ ID NO: 914718
ugugguuuaauuggugagu

SEQ ID NO: 1025389 - RNA, 19 nt, Artificial Sequence
  Description of Artificial Sequence: Synthetic oligonucleotide
  Antisense strand to SEQ ID NO: 1025388
acucaccaauuaaaccaca

SEQ ID NO: 1025390 - RNA, 19 nt, Artificial Sequence
  Description of Artificial Sequence: Synthetic oligonucleotide
  Sense strand starting at position 3521 of SEQ ID NO: 914718
gugguuuaauuggugaguu

SEQ ID NO: 1025391 - RNA, 19 nt, Artificial Sequence
  Description of Artificial Sequence: Synthetic oligonucleotide
  Antisense strand to SEQ ID NO: 1025390
aacucaccaauuaaaccac

SEQ ID NO: 1025392 - RNA, 19 nt, Artificial Sequence
  Description of Artificial Sequence: Synthetic oligonucleotide
  Sense strand starting at position 3523 of SEQ ID NO: 914718
gguuuaauuggugaguuaa

SEQ ID NO: 1025393 - RNA, 19 nt, Artificial Sequence
  Description of Artificial Sequence: Synthetic oligonucleotide
  Antisense strand to SEQ ID NO: 1025392
uuaacucaccaauuaaacc

SEQ ID NO: 1025394 - RNA, 19 nt, Artificial Sequence
  Description of Artificial Sequence: Synthetic oligonucleotide
  Sense strand starting at position 3871 of SEQ ID NO: 914718
agaugacagcauugccuua

SEQ ID NO: 1025395 - RNA, 19 nt, Artificial Sequence
  Description of Artificial Sequence: Synthetic oligonucleotide
  Antisense strand to SEQ ID NO: 1025394
uaaggcaaugcugucaucu

SEQ ID NO: 1025396 - RNA, 19 nt, Artificial Sequence
  Description of Artificial Sequence: Synthetic oligonucleotide
  Sense strand starting at position 3876 of SEQ ID NO: 914718
acagcauugccuuaagaac

SEQ ID NO: 1025397 - RNA, 19 nt, Artificial Sequence
  Description of Artificial Sequence: Synthetic oligonucleotide
  Antisense strand to SEQ ID NO: 1025396
guucuuaaggcaaugcugu

SEQ ID NO: 1025398 - RNA, 19 nt, Artificial Sequence
  Description of Artificial Sequence: Synthetic oligonucleotide
  Sense strand starting at position 3965 of SEQ ID NO: 914718
cccuguuuccugugucauu

SEQ ID NO: 1025399 - RNA, 19 nt, Artificial Sequence
  Description of Artificial Sequence: Synthetic oligonucleotide
  Antisense strand to SEQ ID NO: 1025398
aaugacacaggaaacaggg

SEQ ID NO: 1025400 - RNA, 19 nt, Artificial Sequence
  Description of Artificial Sequence: Synthetic oligonucleotide
  Sense strand starting at position 3970 of SEQ ID NO: 914718
uuuccugugucauucucau

SEQ ID NO: 1025401 - RNA, 19 nt, Artificial Sequence
  Description of Artificial Sequence: Synthetic oligonucleotide
  Antisense strand to SEQ ID NO: 1025400
augagaaugacacaggaaa

SEQ ID NO: 1025402 - RNA, 19 nt, Artificial Sequence
  Description of Artificial Sequence: Synthetic oligonucleotide
  Sense strand starting at position 73 of SEQ ID NO: 914719
uuauuuauacugcguagag

SEQ ID NO: 1025403 - RNA, 19 nt, Artificial Sequence
  Description of Artificial Sequence: Synthetic oligonucleotide
  Antisense strand to SEQ ID NO: 1025402
cucuacgcaguauaaauaa

SEQ ID NO: 1025404 - RNA, 19 nt, Artificial Sequence
  Description of Artificial Sequence: Synthetic oligonucleotide
  Sense strand starting at position 77 of SEQ ID NO: 914719
uuauacugcguagagaaau

SEQ ID NO: 1025405 - RNA, 19 nt, Artificial Sequence
  Description of Artificial Sequence: Synthetic oligonucleotide
  Antisense strand to SEQ ID NO: 1025404
auuucucuacgcaguauaa

SEQ ID NO: 1025406 - RNA, 19 nt, Artificial Sequence
  Description of Artificial Sequence: Synthetic oligonucleotide
  Sense strand starting at position 168 of SEQ ID NO: 914719
aauggaguuugaucaaacu

SEQ ID NO: 1025407 - RNA, 19 nt, Artificial Sequence
  Description of Artificial Sequence: Synthetic oligonucleotide
  Antisense strand to SEQ ID NO: 1025406
aguuugaucaaacuccauu

SEQ ID NO: 1025408 - RNA, 19 nt, Artificial Sequence
  Description of Artificial Sequence: Synthetic oligonucleotide
  Sense strand starting at position 324 of SEQ ID NO: 914719
guauuaaugcaaggaaacu

SEQ ID NO: 1025409 - RNA, 19 nt, Artificial Sequence
  Description of Artificial Sequence: Synthetic oligonucleotide
  Antisense strand to SEQ ID NO: 1025408
aguuuccuugcauuaauac

SEQ ID NO: 1025410 - RNA, 19 nt, Artificial Sequence
  Description of Artificial Sequence: Synthetic oligonucleotide
  Sense strand starting at position 383 of SEQ ID NO: 914719
uucucaaugcuauaacgaa

SEQ ID NO: 1025411 - RNA, 19 nt, Artificial Sequence
  Description of Artificial Sequence: Synthetic oligonucleotide
  Antisense strand to SEQ ID NO: 1025410
uucguuauagcauugagaa

SEQ ID NO: 1025412 - RNA, 19 nt, Artificial Sequence
  Description of Artificial Sequence: Synthetic oligonucleotide
  Sense strand starting at position 430 of SEQ ID NO: 914719
ucuaacagucugcaagaau

SEQ ID NO: 1025413 - RNA, 19 nt, Artificial Sequence
  Description of Artificial Sequence: Synthetic oligonucleotide
  Antisense strand to SEQ ID NO: 1025412
auucuugcagacuguuaga

SEQ ID NO: 1025414 - RNA, 19 nt, Artificial Sequence
  Description of Artificial Sequence: Synthetic oligonucleotide
  Sense strand starting at position 452 of SEQ ID NO: 914719
uuguguucucaggcuguuu

SEQ ID NO: 1025415 - RNA, 19 nt, Artificial Sequence
  Description of Artificial Sequence: Synthetic oligonucleotide
  Antisense strand to SEQ ID NO: 1025414
aaacagccugagaacacaa

SEQ ID NO: 1025416 - RNA, 19 nt, Artificial Sequence
  Description of Artificial Sequence: Synthetic oligonucleotide
  Sense strand starting at position 576 of SEQ ID NO: 914719
uguagugucaguuaaagaa

SEQ ID NO: 1025417 - RNA, 19 nt, Artificial Sequence
  Description of Artificial Sequence: Synthetic oligonucleotide
  Antisense strand to SEQ ID NO: 1025416
uucuuuaacugacacuaca

SEQ ID NO: 1025418 - RNA, 19 nt, Artificial Sequence
  Description of Artificial Sequence: Synthetic oligonucleotide
  Sense strand starting at position 580 of SEQ ID NO: 914719
gugucaguuaaagaaauug

SEQ ID NO: 1025419 - RNA, 19 nt, Artificial Sequence
  Description of Artificial Sequence: Synthetic oligonucleotide
  Antisense strand to SEQ ID NO: 1025418
caauuucuuuaacugacac

SEQ ID NO: 1025420 - RNA, 19 nt, Artificial Sequence
  Description of Artificial Sequence: Synthetic oligonucleotide
  Sense strand starting at position 607 of SEQ ID NO: 914719
agaauauuauagguccuuu

SEQ ID NO: 1025421 - RNA, 19 nt, Artificial Sequence
  Description of Artificial Sequence: Synthetic oligonucleotide
  Antisense strand to SEQ ID NO: 1025420
aaaggaccuauaauauucu

SEQ ID NO: 1025422 - RNA, 19 nt, Artificial Sequence
  Description of Artificial Sequence: Synthetic oligonucleotide
  Sense strand starting at position 618 of SEQ ID NO: 914719
gguccuuuaugauuaaaua

SEQ ID NO: 1025423 - RNA, 19 nt, Artificial Sequence
  Description of Artificial Sequence: Synthetic oligonucleotide
  Antisense strand to SEQ ID NO: 1025422
uauuuaaucauaaaggacc

SEQ ID NO: 1025424 - RNA, 19 nt, Artificial Sequence
  Description of Artificial Sequence: Synthetic oligonucleotide
  Sense strand starting at position 720 of SEQ ID NO: 914719
guaccaaauugaucagauu

SEQ ID NO: 1025425 - RNA, 19 nt, Artificial Sequence
  Description of Artificial Sequence: Synthetic oligonucleotide
  Antisense strand to SEQ ID NO: 1025424
aaucugaucaauuugguac

SEQ ID NO: 1025426 - RNA, 19 nt, Artificial Sequence
  Description of Artificial Sequence: Synthetic oligonucleotide
  Sense strand starting at position 1165 of SEQ ID NO: 914719
gaacgauaaucauuaugua

SEQ ID NO: 1025427 - RNA, 19 nt, Artificial Sequence
  Description of Artificial Sequence: Synthetic oligonucleotide
  Antisense strand to SEQ ID NO: 1025426
uacauaaugauuaucguuc

SEQ ID NO: 1025428 - RNA, 19 nt, Artificial Sequence
  Description of Artificial Sequence: Synthetic oligonucleotide
  Sense strand starting at position 1283 of SEQ ID NO: 914719
uguuucuuggaacaacauu

SEQ ID NO: 1025429 - RNA, 19 nt, Artificial Sequence
  Description of Artificial Sequence: Synthetic oligonucleotide
  Antisense strand to SEQ ID NO: 1025428
aauguuguuccaagaaaca

SEQ ID NO: 1025430 - RNA, 19 nt, Artificial Sequence
  Description of Artificial Sequence: Synthetic oligonucleotide
  Sense strand starting at position 1395 of SEQ ID NO: 914719
auuagaaucuuauugcuga

SEQ ID NO: 1025431 - RNA, 19 nt, Artificial Sequence
  Description of Artificial Sequence: Synthetic oligonucleotide
  Antisense strand to SEQ ID NO: 1025430
ucagcaauaagauucuaau

SEQ ID NO: 1025432 - RNA, 19 nt, Artificial Sequence
  Description of Artificial Sequence: Synthetic oligonucleotide
  Sense strand starting at position 1428 of SEQ ID NO: 914719
uuacucugauaauugugau

SEQ ID NO: 1025433 - RNA, 19 nt, Artificial Sequence
  Description of Artificial Sequence: Synthetic oligonucleotide
  Antisense strand to SEQ ID NO: 1025432
aucacaauuaucagaguaa

SEQ ID NO: 1025434 - RNA, 19 nt, Artificial Sequence
  Description of Artificial Sequence: Synthetic oligonucleotide
  Sense strand starting at position 1434 of SEQ ID NO: 914719
ugauaauugugaucaucau

SEQ ID NO: 1025435 - RNA, 19 nt, Artificial Sequence
  Description of Artificial Sequence: Synthetic oligonucleotide
  Antisense strand to SEQ ID NO: 1025434
augaugaucacaauuauca

SEQ ID NO: 1025436 - RNA, 19 nt, Artificial Sequence
  Description of Artificial Sequence: Synthetic oligonucleotide
  Sense strand starting at position 1771 of SEQ ID NO: 914719
ggcauauuggucuauaaag

SEQ ID NO: 1025437 - RNA, 19 nt, Artificial Sequence
  Description of Artificial Sequence: Synthetic oligonucleotide
  Antisense strand to SEQ ID NO: 1025436
cuuuauagaccaauaugcc

SEQ ID NO: 1025438 - RNA, 19 nt, Artificial Sequence
  Description of Artificial Sequence: Synthetic oligonucleotide
  Sense strand starting at position 1991 of SEQ ID NO: 914719
gcaagagcuguagacugaa

SEQ ID NO: 1025439 - RNA, 19 nt, Artificial Sequence
  Description of Artificial Sequence: Synthetic oligonucleotide
  Antisense strand to SEQ ID NO: 1025438
uucagucuacagcucuugc

SEQ ID NO: 1025440 - RNA, 19 nt, Artificial Sequence
  Description of Artificial Sequence: Synthetic oligonucleotide
  Sense strand starting at position 1994 of SEQ ID NO: 914719
agagcuguagacugaauga

SEQ ID NO: 1025441 - RNA, 19 nt, Artificial Sequence
  Description of Artificial Sequence: Synthetic oligonucleotide
  Antisense strand to SEQ ID NO: 1025440
ucauucagucuacagcucu

SEQ ID NO: 1025442 - RNA, 19 nt, Artificial Sequence
  Description of Artificial Sequence: Synthetic oligonucleotide
  Sense strand starting at position 2058 of SEQ ID NO: 914719
uguggauuuguuggguauu

SEQ ID NO: 1025443 - RNA, 19 nt, Artificial Sequence
  Description of Artificial Sequence: Synthetic oligonucleotide
  Antisense strand to SEQ ID NO: 1025442
aauacccaacaaauccaca

SEQ ID NO: 1025444 - RNA, 19 nt, Artificial Sequence
  Description of Artificial Sequence: Synthetic oligonucleotide
  Sense strand starting at position 2147 of SEQ ID NO: 914719
uuacuaaaguagucuaaac

SEQ ID NO: 1025445 - RNA, 19 nt, Artificial Sequence
  Description of Artificial Sequence: Synthetic oligonucleotide
  Antisense strand to SEQ ID NO: 1025444
guuuagacuacuuuaguaa

SEQ ID NO: 1025446 - RNA, 19 nt, Artificial Sequence
  Description of Artificial Sequence: Synthetic oligonucleotide
  Sense strand starting at position 2187 of SEQ ID NO: 914719
uguuacuagagaugaugau

SEQ ID NO: 1025447 - RNA, 19 nt, Artificial Sequence
  Description of Artificial Sequence: Synthetic oligonucleotide
  Antisense strand to SEQ ID NO: 1025446
aucaucaucucuaguaaca

SEQ ID NO: 1025448 - RNA, 19 nt, Artificial Sequence
  Description of Artificial Sequence: Synthetic oligonucleotide
  Sense strand starting at position 2749 of SEQ ID NO: 914719
uucuguguguaaccauuua

SEQ ID NO: 1025449 - RNA, 19 nt, Artificial Sequence
  Description of Artificial Sequence: Synthetic oligonucleotide
  Antisense strand to SEQ ID NO: 1025448
uaaaugguuacacacagaa

SEQ ID NO: 1025450 - RNA, 19 nt, Artificial Sequence
  Description of Artificial Sequence: Synthetic oligonucleotide
  Sense strand starting at position 2792 of SEQ ID NO: 914719
cuaugaucucuuuggagac

SEQ ID NO: 1025451 - RNA, 19 nt, Artificial Sequence
  Description of Artificial Sequence: Synthetic oligonucleotide
  Antisense strand to SEQ ID NO: 1025450
gucuccaaagagaucauag

SEQ ID NO: 1025452 - RNA, 19 nt, Artificial Sequence
  Description of Artificial Sequence: Synthetic oligonucleotide
  Sense strand starting at position 2908 of SEQ ID NO: 914719
acaggagucaaauguugga

SEQ ID NO: 1025453 - RNA, 19 nt, Artificial Sequence
  Description of Artificial Sequence: Synthetic oligonucleotide
  Antisense strand to SEQ ID NO: 1025452
uccaacauuugacuccugu

SEQ ID NO: 1025454 - RNA, 19 nt, Artificial Sequence
  Description of Artificial Sequence: Synthetic oligonucleotide
  Sense strand starting at position 2912 of SEQ ID NO: 914719
gagucaaauguuggaacuu

SEQ ID NO: 1025455 - RNA, 19 nt, Artificial Sequence
  Description of Artificial Sequence: Synthetic oligonucleotide
  Antisense strand to SEQ ID NO: 1025454
aaguuccaacauuugacuc

SEQ ID NO: 1025456 - RNA, 19 nt, Artificial Sequence
  Description of Artificial Sequence: Synthetic oligonucleotide
  Sense strand starting at position 2925 of SEQ ID NO: 914719
gaacuuguagaccagugua

SEQ ID NO: 1025457 - RNA, 19 nt, Artificial Sequence
  Description of Artificial Sequence: Synthetic oligonucleotide
  Antisense strand to SEQ ID NO: 1025456
uacacuggucuacaaguuc

SEQ ID NO: 1025458 - RNA, 19 nt, Artificial Sequence
  Description of Artificial Sequence: Synthetic oligonucleotide
  Sense strand starting at position 3011 of SEQ ID NO: 914719
acaugaucugauugaguuc

SEQ ID NO: 1025459 - RNA, 19 nt, Artificial Sequence
  Description of Artificial Sequence: Synthetic oligonucleotide
  Antisense strand to SEQ ID NO: 1025458
gaacucaaucagaucaugu

SEQ ID NO: 1025460 - RNA, 19 nt, Artificial Sequence
  Description of Artificial Sequence: Synthetic oligonucleotide
  Sense strand starting at position 3014 of SEQ ID NO: 914719
ugaucugauugaguucuaa

SEQ ID NO: 1025461 - RNA, 19 nt, Artificial Sequence
  Description of Artificial Sequence: Synthetic oligonucleotide
  Antisense strand to SEQ ID NO: 1025460
uuagaacucaaucagauca

SEQ ID NO: 1025462 - RNA, 19 nt, Artificial Sequence
  Description of Artificial Sequence: Synthetic oligonucleotide
  Sense strand starting at position 3111 of SEQ ID NO: 914719
ccaggugagaaaugauguu

SEQ ID NO: 1025463 - RNA, 19 nt, Artificial Sequence
  Description of Artificial Sequence: Synthetic oligonucleotide
  Antisense strand to SEQ ID NO: 1025462
aacaucauuucucaccugg

SEQ ID NO: 1025464 - RNA, 19 nt, Artificial Sequence
  Description of Artificial Sequence: Synthetic oligonucleotide
  Sense strand starting at position 3282 of SEQ ID NO: 914719
ggucaaggauggcucuaaa

SEQ ID NO: 1025465 - RNA, 19 nt, Artificial Sequence
  Description of Artificial Sequence: Synthetic oligonucleotide
  Antisense strand to SEQ ID NO: 1025464
uuuagagccauccuugacc

SEQ ID NO: 1025466 - RNA, 19 nt, Artificial Sequence
  Description of Artificial Sequence: Synthetic oligonucleotide
  Sense strand starting at position 3299 of SEQ ID NO: 914719
aagauucugguuugaguag

SEQ ID NO: 1025467 - RNA, 19 nt, Artificial Sequence
  Description of Artificial Sequence: Synthetic oligonucleotide
  Antisense strand to SEQ ID NO: 1025466
cuacucaaaccagaaucuu

SEQ ID NO: 1025468 - RNA, 19 nt, Artificial Sequence
  Description of Artificial Sequence: Synthetic oligonucleotide
  Sense strand starting at position 3323 of SEQ ID NO: 914719
aggauaaacuugcuaucag

SEQ ID NO: 1025469 - RNA, 19 nt, Artificial Sequence
  Description of Artificial Sequence: Synthetic oligonucleotide
  Antisense strand to SEQ ID NO: 1025468
cugauagcaaguuuauccu

SEQ ID NO: 1025470 - RNA, 19 nt, Artificial Sequence
  Description of Artificial Sequence: Synthetic oligonucleotide
  Sense strand starting at position 3361 of SEQ ID NO: 914719
aaugucgaaguuugggaaa

SEQ ID NO: 1025471 - RNA, 19 nt, Artificial Sequence
  Description of Artificial Sequence: Synthetic oligonucleotide
  Antisense strand to SEQ ID NO: 1025470
uuucccaaacuucgacauu

SEQ ID NO: 1025472 - RNA, 19 nt, Artificial Sequence
  Description of Artificial Sequence: Synthetic oligonucleotide
  Sense strand starting at position 3423 of SEQ ID NO: 914719
guacuacauccaggagaua

SEQ ID NO: 1025473 - RNA, 19 nt, Artificial Sequence
  Description of Artificial Sequence: Synthetic oligonucleotide
  Antisense strand to SEQ ID NO: 1025472
uaucuccuggauguaguac

SEQ ID NO: 1025474 - RNA, 19 nt, Artificial Sequence
  Description of Artificial Sequence: Synthetic oligonucleotide
  Sense strand starting at position 3582 of SEQ ID NO: 914719
cugacagguuaaguaagau

SEQ ID NO: 1025475 - RNA, 19 nt, Artificial Sequence
  Description of Artificial Sequence: Synthetic oligonucleotide
  Antisense strand to SEQ ID NO: 1025474
aucuuacuuaaccugucag

SEQ ID NO: 1025476 - RNA, 19 nt, Artificial Sequence
  Description of Artificial Sequence: Synthetic oligonucleotide
  Sense strand starting at position 3588 of SEQ ID NO: 914719
gguuaaguaagaugaggau

SEQ ID NO: 1025477 - RNA, 19 nt, Artificial Sequence
  Description of Artificial Sequence: Synthetic oligonucleotide
  Antisense strand to SEQ ID NO: 1025476
auccucaucuuacuuaacc

SEQ ID NO: 1025478 - RNA, 19 nt, Artificial Sequence
  Description of Artificial Sequence: Synthetic oligonucleotide
  Sense strand starting at position 3664 of SEQ ID NO: 914719
guuacuuuggaaugaugaa

SEQ ID NO: 1025479 - RNA, 19 nt, Artificial Sequence
  Description of Artificial Sequence: Synthetic oligonucleotide
  Antisense strand to SEQ ID NO: 1025478
uucaucauuccaaaguaac

SEQ ID NO: 1025480 - RNA, 19 nt, Artificial Sequence
  Description of Artificial Sequence: Synthetic oligonucleotide
  Sense strand starting at position 3699 of SEQ ID NO: 914719
guauguguuuaagugauuu

SEQ ID NO: 1025481 - RNA, 19 nt, Artificial Sequence
  Description of Artificial Sequence: Synthetic oligonucleotide
  Antisense strand to SEQ ID NO: 1025480
aaaucacuuaaacacauac

SEQ ID NO: 1025482 - RNA, 19 nt, Artificial Sequence
  Description of Artificial Sequence: Synthetic oligonucleotide
  Sense strand starting at position 7 of SEQ ID NO: 914720
agaugagcuacuggauuga

SEQ ID NO: 1025483 - RNA, 19 nt, Artificial Sequence
  Description of Artificial Sequence: Synthetic oligonucleotide
  Antisense strand to SEQ ID NO: 1025482
ucaauccaguagcucaucu

SEQ ID NO: 1025484 - RNA, 19 nt, Artificial Sequence
  Description of Artificial Sequence: Synthetic oligonucleotide
  Sense strand starting at position 31 of SEQ ID NO: 914720
agaguaauguuucuauucu

SEQ ID NO: 1025485 - RNA, 19 nt, Artificial Sequence
  Description of Artificial Sequence: Synthetic oligonucleotide
  Antisense strand to SEQ ID NO: 1025484
agaauagaaacauuacucu

SEQ ID NO: 1025486 - RNA, 19 nt, Artificial Sequence
  Description of Artificial Sequence: Synthetic oligonucleotide
  Sense strand starting at position 131 of SEQ ID NO: 914720
ucuuaaggaucuguauuac

SEQ ID NO: 1025487 - RNA, 19 nt, Artificial Sequence
  Description of Artificial Sequence: Synthetic oligonucleotide
  Antisense strand to SEQ ID NO: 1025486
guaauacagauccuuaaga

SEQ ID NO: 1025488 - RNA, 19 nt, Artificial Sequence
  Description of Artificial Sequence: Synthetic oligonucleotide
  Sense strand starting at position 137 of SEQ ID NO: 914720
ggaucuguauuacugcaca

SEQ ID NO: 1025489 - RNA, 19 nt, Artificial Sequence
  Description of Artificial Sequence: Synthetic oligonucleotide
  Antisense strand to SEQ ID NO: 1025488
ugugcaguaauacagaucc

SEQ ID NO: 1025490 - RNA, 19 nt, Artificial Sequence
  Description of Artificial Sequence: Synthetic oligonucleotide
  Sense strand starting at position 140 of SEQ ID NO: 914720
ucuguauuacugcacagaa

SEQ ID NO: 1025491 - RNA, 19 nt, Artificial Sequence
  Description of Artificial Sequence: Synthetic oligonucleotide
  Antisense strand to SEQ ID NO: 1025490
uucugugcaguaauacaga

SEQ ID NO: 1025492 - RNA, 19 nt, Artificial Sequence
  Description of Artificial Sequence: Synthetic oligonucleotide
  Sense strand starting at position 246 of SEQ ID NO: 914720
cuguauuaaccauguuaaa

SEQ ID NO: 1025493 - RNA, 19 nt, Artificial Sequence
  Description of Artificial Sequence: Synthetic oligonucleotide
  Antisense strand to SEQ ID NO: 1025492
uuuaacaugguuaauacag

SEQ ID NO: 1025494 - RNA, 19 nt, Artificial Sequence
  Description of Artificial Sequence: Synthetic oligonucleotide
  Sense strand starting at position 257 of SEQ ID NO: 914720
auguuaaagcaugguuaaa

SEQ ID NO: 1025495 - RNA, 19 nt, Artificial Sequence
  Description of Artificial Sequence: Synthetic oligonucleotide
  Antisense strand to SEQ ID NO: 1025494
uuuaaccaugcuuuaacau

SEQ ID NO: 1025496 - RNA, 19 nt, Artificial Sequence
  Description of Artificial Sequence: Synthetic oligonucleotide
  Sense strand starting at position 745 of SEQ ID NO: 914720
aguguuugugaaaggcagu

SEQ ID NO: 1025497 - RNA, 19 nt, Artificial Sequence
  Description of Artificial Sequence: Synthetic oligonucleotide
  Antisense strand to SEQ ID NO: 1025496
acugccuuucacaaacacu

SEQ ID NO: 1025498 - RNA, 19 nt, Artificial Sequence
  Description of Artificial Sequence: Synthetic oligonucleotide
  Sense strand starting at position 758 of SEQ ID NO: 914720
ggcagugacagucacagaa

SEQ ID NO: 1025499 - RNA, 19 nt, Artificial Sequence
  Description of Artificial Sequence: Synthetic oligonucleotide
  Antisense strand to SEQ ID NO: 1025498
uucugugacugucacugcc

SEQ ID NO: 1025500 - RNA, 19 nt, Artificial Sequence
  Description of Artificial Sequence: Synthetic oligonucleotide
  Sense strand starting at position 830 of SEQ ID NO: 914720
ggacaaucacaaggcaauu

SEQ ID NO: 1025501 - RNA, 19 nt, Artificial Sequence
  Description of Artificial Sequence: Synthetic oligonucleotide
  Antisense strand to SEQ ID NO: 1025500
aauugccuugugauugucc

SEQ ID NO: 1025502 - RNA, 19 nt, Artificial Sequence
  Description of Artificial Sequence: Synthetic oligonucleotide
  Sense strand starting at position 853 of SEQ ID NO: 914720
ggaagacucccacgacacu

SEQ ID NO: 1025503 - RNA, 19 nt, Artificial Sequence
  Description of Artificial Sequence: Synthetic oligonucleotide
  Antisense strand to SEQ ID NO: 1025502
agugucgugggagucuucc

SEQ ID NO: 1025504 - RNA, 19 nt, Artificial Sequence
  Description of Artificial Sequence: Synthetic oligonucleotide
  Sense strand starting at position 897 of SEQ ID NO: 914720
ugauuccacugaucacuga

SEQ ID NO: 1025505 - RNA, 19 nt, Artificial Sequence
  Description of Artificial Sequence: Synthetic oligonucleotide
  Antisense strand to SEQ ID NO: 1025504
ucagugaucaguggaauca

SEQ ID NO: 1025506 - RNA, 19 nt, Artificial Sequence
  Description of Artificial Sequence: Synthetic oligonucleotide
  Sense strand starting at position 937 of SEQ ID NO: 914720
gucgguggacuuuauccaa

SEQ ID NO: 1025507 - RNA, 19 nt, Artificial Sequence
  Description of Artificial Sequence: Synthetic oligonucleotide
  Antisense strand to SEQ ID NO: 1025506
uuggauaaaguccaccgac

SEQ ID NO: 1025508 - RNA, 19 nt, Artificial Sequence
  Description of Artificial Sequence: Synthetic oligonucleotide
  Sense strand starting at position 940 of SEQ ID NO: 914720
gguggacuuuauccaagaa

SEQ ID NO: 1025509 - RNA, 19 nt, Artificial Sequence
  Description of Artificial Sequence: Synthetic oligonucleotide
  Antisense strand to SEQ ID NO: 1025508
uucuuggauaaaguccacc

SEQ ID NO: 1025510 - RNA, 19 nt, Artificial Sequence
  Description of Artificial Sequence: Synthetic oligonucleotide
  Sense strand starting at position 1070 of SEQ ID NO: 914720
gggcgauuccuagagauau

SEQ ID NO: 1025511 - RNA, 19 nt, Artificial Sequence
  Description of Artificial Sequence: Synthetic oligonucleotide
  Antisense strand to SEQ ID NO: 1025510
auaucucuaggaaucgccc

SEQ ID NO: 1025512 - RNA, 19 nt, Artificial Sequence
  Description of Artificial Sequence: Synthetic oligonucleotide
  Sense strand starting at position 1072 of SEQ ID NO: 914720
gcgauuccuagagauaugc

SEQ ID NO: 1025513 - RNA, 19 nt, Artificial Sequence
  Description of Artificial Sequence: Synthetic oligonucleotide
  Antisense strand to SEQ ID NO: 1025512
gcauaucucuaggaaucgc

SEQ ID NO: 1025514 - RNA, 19 nt, Artificial Sequence
  Description of Artificial Sequence: Synthetic oligonucleotide
  Sense strand starting at position 1444 of SEQ ID NO: 914720
gagcauucucaggguacag

SEQ ID NO: 1025515 - RNA, 19 nt, Artificial Sequence
  Description of Artificial Sequence: Synthetic oligonucleotide
  Antisense strand to SEQ ID NO: 1025514
cuguacccugagaaugcuc

SEQ ID NO: 1025516 - RNA, 19 nt, Artificial Sequence
  Description of Artificial Sequence: Synthetic oligonucleotide
  Sense strand starting at position 1484 of SEQ ID NO: 914720
gacuuucugcgccagagaa

SEQ ID NO: 1025517 - RNA, 19 nt, Artificial Sequence
  Description of Artificial Sequence: Synthetic oligonucleotide
  Antisense strand to SEQ ID NO: 1025516
uucucuggcgcagaaaguc

SEQ ID NO: 1025518 - RNA, 19 nt, Artificial Sequence
  Description of Artificial Sequence: Synthetic oligonucleotide
  Sense strand starting at position 1496 of SEQ ID NO: 914720
cagagaaguccucggaaac

SEQ ID NO: 1025519 - RNA, 19 nt, Artificial Sequence
  Description of Artificial Sequence: Synthetic oligonucleotide
  Antisense strand to SEQ ID NO: 1025518
guuuccgaggacuucucug

SEQ ID NO: 1025520 - RNA, 19 nt, Artificial Sequence
  Description of Artificial Sequence: Synthetic oligonucleotide
  Sense strand starting at position 1497 of SEQ ID NO: 914720
agagaaguccucggaaacc

SEQ ID NO: 1025521 - RNA, 19 nt, Artificial Sequence
  Description of Artificial Sequence: Synthetic oligonucleotide
  Antisense strand to SEQ ID NO: 1025520
gguuuccgaggacuucucu

SEQ ID NO: 1025522 - RNA, 19 nt, Artificial Sequence
  Description of Artificial Sequence: Synthetic oligonucleotide
  Sense strand starting at position 1982 of SEQ ID NO: 914720
gucgcuuguggucucuuau

SEQ ID NO: 1025523 - RNA, 19 nt, Artificial Sequence
  Description of Artificial Sequence: Synthetic oligonucleotide
  Antisense strand to SEQ ID NO: 1025522
auaagagaccacaagcgac

SEQ ID NO: 1025524 - RNA, 19 nt, Artificial Sequence
  Description of Artificial Sequence: Synthetic oligonucleotide
  Sense strand starting at position 1983 of SEQ ID NO: 914720
ucgcuuguggucucuuaua

SEQ ID NO: 1025525 - RNA, 19 nt, Artificial Sequence
  Description of Artificial Sequence: Synthetic oligonucleotide
  Antisense strand to SEQ ID NO: 1025524
uauaagagaccacaagcga

SEQ ID NO: 1025526 - RNA, 19 nt, Artificial Sequence
  Description of Artificial Sequence: Synthetic oligonucleotide
  Sense strand starting at position 2379 of SEQ ID NO: 914720
gguguuagaaaucauagcu

SEQ ID NO: 1025527 - RNA, 19 nt, Artificial Sequence
  Description of Artificial Sequence: Synthetic oligonucleotide
  Antisense strand to SEQ ID NO: 1025526
agcuaugauuucuaacacc

SEQ ID NO: 1025528 - RNA, 19 nt, Artificial Sequence
  Description of Artificial Sequence: Synthetic oligonucleotide
  Sense strand starting at position 2387 of SEQ ID NO: 914720
aaaucauagcugcggagaa

SEQ ID NO: 1025529 - RNA, 19 nt, Artificial Sequence
  Description of Artificial Sequence: Synthetic oligonucleotide
  Antisense strand to SEQ ID NO: 1025528
uucuccgcagcuaugauuu

SEQ ID NO: 1025530 - RNA, 19 nt, Artificial Sequence
  Description of Artificial Sequence: Synthetic oligonucleotide
  Sense strand starting at position 2431 of SEQ ID NO: 914720
ugggaagcugcagaugauu

SEQ ID NO: 1025531 - RNA, 19 nt, Artificial Sequence
  Description of Artificial Sequence: Synthetic oligonucleotide
  Antisense strand to SEQ ID NO: 1025530
aaucaucugcagcuuccca

SEQ ID NO: 1025532 - RNA, 19 nt, Artificial Sequence
  Description of Artificial Sequence: Synthetic oligonucleotide
  Sense strand starting at position 2890 of SEQ ID NO: 914720
gggugucauuggagagaag

SEQ ID NO: 1025533 - RNA, 19 nt, Artificial Sequence
  Description of Artificial Sequence: Synthetic oligonucleotide
  Antisense strand to SEQ ID NO: 1025532
cuucucuccaaugacaccc

SEQ ID NO: 1025534 - RNA, 19 nt, Artificial Sequence
  Description of Artificial Sequence: Synthetic oligonucleotide
  Sense strand starting at position 2993 of SEQ ID NO: 914720
caggguggaugugaauuua

SEQ ID NO: 1025535 - RNA, 19 nt, Artificial Sequence
  Description of Artificial Sequence: Synthetic oligonucleotide
  Antisense strand to SEQ ID NO: 1025534
uaaauucacauccacccug

SEQ ID NO: 1025536 - RNA, 19 nt, Artificial Sequence
  Description of Artificial Sequence: Synthetic oligonucleotide
  Sense strand starting at position 3192 of SEQ ID NO: 914720
aaauaaauugccgacggaa

SEQ ID NO: 1025537 - RNA, 19 nt, Artificial Sequence
  Description of Artificial Sequence: Synthetic oligonucleotide
  Antisense strand to SEQ ID NO: 1025536
uuccgucggcaauuuauuu

SEQ ID NO: 1025538 - RNA, 19 nt, Artificial Sequence
  Description of Artificial Sequence: Synthetic oligonucleotide
  Sense strand starting at position 3216 of SEQ ID NO: 914720
gugauuucuuguucacggu

SEQ ID NO: 1025539 - RNA, 19 nt, Artificial Sequence
  Description of Artificial Sequence: Synthetic oligonucleotide
  Antisense strand to SEQ ID NO: 1025538
accgugaacaagaaaucac

SEQ ID NO: 1025540 - RNA, 19 nt, Artificial Sequence
  Description of Artificial Sequence: Synthetic oligonucleotide
  Sense strand starting at position 3283 of SEQ ID NO: 914720
gugcuagagcuacaagaau

SEQ ID NO: 1025541 - RNA, 19 nt, Artificial Sequence
  Description of Artificial Sequence: Synthetic oligonucleotide
  Antisense strand to SEQ ID NO: 1025540
auucuuguagcucuagcac

SEQ ID NO: 1025542 - RNA, 19 nt, Artificial Sequence
  Description of Artificial Sequence: Synthetic oligonucleotide
  Sense strand starting at position 3392 of SEQ ID NO: 914720
gugagcugaguuugaagaa

SEQ ID NO: 1025543 - RNA, 19 nt, Artificial Sequence
  Description of Artificial Sequence: Synthetic oligonucleotide
  Antisense strand to SEQ ID NO: 1025542
uucuucaaacucagcucac

SEQ ID NO: 1025544 - RNA, 19 nt, Artificial Sequence
  Description of Artificial Sequence: Synthetic oligonucleotide
  Sense strand starting at position 3478 of SEQ ID NO: 914720
uaugcaaagguguggaaau

SEQ ID NO: 1025545 - RNA, 19 nt, Artificial Sequence
  Description of Artificial Sequence: Synthetic oligonucleotide
  Antisense strand to SEQ ID NO: 1025544
auuuccacaccuuugcaua

SEQ ID NO: 1025546 - RNA, 19 nt, Artificial Sequence
  Description of Artificial Sequence: Synthetic oligonucleotide
  Sense strand starting at position 3638 of SEQ ID NO: 914720
gcuaacuaacauggcuaaa

SEQ ID NO: 1025547 - RNA, 19 nt, Artificial Sequence
  Description of Artificial Sequence: Synthetic oligonucleotide
  Antisense strand to SEQ ID NO: 1025546
uuuagccauguuaguuagc

SEQ ID NO: 1025548 - RNA, 19 nt, Artificial Sequence
  Description of Artificial Sequence: Synthetic oligonucleotide
  Sense strand starting at position 3857 of SEQ ID NO: 914720
gaaagaauguuggccugga

SEQ ID NO: 1025549 - RNA, 19 nt, Artificial Sequence
  Description of Artificial Sequence: Synthetic oligonucleotide
  Antisense strand to SEQ ID NO: 1025548
uccaggccaacauucuuuc

SEQ ID NO: 1025550 - RNA, 19 nt, Artificial Sequence
  Description of Artificial Sequence: Synthetic oligonucleotide
  Sense strand starting at position 3858 of SEQ ID NO: 914720
aaagaauguuggccuggaa

SEQ ID NO: 1025551 - RNA, 19 nt, Artificial Sequence
  Description of Artificial Sequence: Synthetic oligonucleotide
  Antisense strand to SEQ ID NO: 1025550
uuccaggccaacauucuuu

SEQ ID NO: 1025552 - RNA, 19 nt, Artificial Sequence
  Description of Artificial Sequence: Synthetic oligonucleotide
  Sense strand starting at position 3861 of SEQ ID NO: 914720
gaauguuggccuggaaagu

SEQ ID NO: 1025553 - RNA, 19 nt, Artificial Sequence
  Description of Artificial Sequence: Synthetic oligonucleotide
  Antisense strand to SEQ ID NO: 1025552
acuuuccaggccaacauuc

SEQ ID NO: 1025554 - RNA, 19 nt, Artificial Sequence
  Description of Artificial Sequence: Synthetic oligonucleotide
  Sense strand starting at position 3862 of SEQ ID NO: 914720
aauguuggccuggaaagua

SEQ ID NO: 1025555 - RNA, 19 nt, Artificial Sequence
  Description of Artificial Sequence: Synthetic oligonucleotide
  Antisense strand to SEQ ID NO: 1025554
uacuuuccaggccaacauu

SEQ ID NO: 1025556 - RNA, 19 nt, Artificial Sequence
  Description of Artificial Sequence: Synthetic oligonucleotide
  Sense strand starting at position 3899 of SEQ ID NO: 914720
gcugguuaggguggagaau

SEQ ID NO: 1025557 - RNA, 19 nt, Artificial Sequence
  Description of Artificial Sequence: Synthetic oligonucleotide
  Antisense strand to SEQ ID NO: 1025556
auucuccacccuaaccagc

SEQ ID NO: 1025558 - RNA, 19 nt, Artificial Sequence
  Description of Artificial Sequence: Synthetic oligonucleotide
  Sense strand starting at position 3956 of SEQ ID NO: 914720
gguuaaacuugauccuaga

SEQ ID NO: 1025559 - RNA, 19 nt, Artificial Sequence
  Description of Artificial Sequence: Synthetic oligonucleotide
  Antisense strand to SEQ ID NO: 1025558
ucuaggaucaaguuuaacc

SEQ ID NO: 1025560 - RNA, 19 nt, Artificial Sequence
  Description of Artificial Sequence: Synthetic oligonucleotide
  Sense strand starting at position 3983 of SEQ ID NO: 914720
agagacaccucauuagcuu

SEQ ID NO: 1025561 - RNA, 19 nt, Artificial Sequence
  Description of Artificial Sequence: Synthetic oligonucleotide
  Antisense strand to SEQ ID NO: 1025560
aagcuaaugaggugucucu

SEQ ID NO: 1025562 - RNA, 19 nt, Artificial Sequence
  Description of Artificial Sequence: Synthetic oligonucleotide
  Sense strand starting at position 2134 of SEQ ID NO: 914721
agucucugcauuuggugaa

SEQ ID NO: 1025563 - RNA, 19 nt, Artificial Sequence
  Description of Artificial Sequence: Synthetic oligonucleotide
  Antisense strand to SEQ ID NO: 1025562
uucaccaaaugcagagacu

SEQ ID NO: 1025564 - RNA, 19 nt, Artificial Sequence
  Description of Artificial Sequence: Synthetic oligonucleotide
  Sense strand starting at position 2137 of SEQ ID NO: 914721
cucugcauuuggugaagaa

SEQ ID NO: 1025565 - RNA, 19 nt, Artificial Sequence
  Description of Artificial Sequence: Synthetic oligonucleotide
  Antisense strand to SEQ ID NO: 1025564
uucuucaccaaaugcagag

SEQ ID NO: 1025566 - RNA, 19 nt, Artificial Sequence
  Description of Artificial Sequence: Synthetic oligonucleotide
  Sense strand starting at position 2166 of SEQ ID NO: 914721
caaugugagugcucauaag

SEQ ID NO: 1025567 - RNA, 19 nt, Artificial Sequence
  Description of Artificial Sequence: Synthetic oligonucleotide
  Antisense strand to SEQ ID NO: 1025566
cuuaugagcacucacauug

SEQ ID NO: 1025568 - RNA, 19 nt, Artificial Sequence
  Description of Artificial Sequence: Synthetic oligonucleotide
  Sense strand starting at position 2301 of SEQ ID NO: 914721
aguaguauugcuuguacca

SEQ ID NO: 1025569 - RNA, 19 nt, Artificial Sequence
  Description of Artificial Sequence: Synthetic oligonucleotide
  Antisense strand to SEQ ID NO: 1025568
ugguacaagcaauacuacu

SEQ ID NO: 1025570 - RNA, 19 nt, Artificial Sequence
  Description of Artificial Sequence: Synthetic oligonucleotide
  Sense strand starting at position 2367 of SEQ ID NO: 914721
ggcccuugucgucaaggaa

SEQ ID NO: 1025571 - RNA, 19 nt, Artificial Sequence
  Description of Artificial Sequence: Synthetic oligonucleotide
  Antisense strand to SEQ ID NO: 1025570
uuccuugacgacaagggcc

SEQ ID NO: 1025572 - RNA, 19 nt, Artificial Sequence
  Description of Artificial Sequence: Synthetic oligonucleotide
  Sense strand starting at position 2370 of SEQ ID NO: 914721
ccuugucgucaaggaauuu

SEQ ID NO: 1025573 - RNA, 19 nt, Artificial Sequence
  Description of Artificial Sequence: Synthetic oligonucleotide
  Antisense strand to SEQ ID NO: 1025572
aaauuccuugacgacaagg

SEQ ID NO: 1025574 - RNA, 19 nt, Artificial Sequence
  Description of Artificial Sequence: Synthetic oligonucleotide
  Sense strand starting at position 2390 of SEQ ID NO: 914721
uugccuguucagugagaug

SEQ ID NO: 1025575 - RNA, 19 nt, Artificial Sequence
  Description of Artificial Sequence: Synthetic oligonucleotide
  Antisense strand to SEQ ID NO: 1025574
caucucacugaacaggcaa

SEQ ID NO: 1025576 - RNA, 19 nt, Artificial Sequence
  Description of Artificial Sequence: Synthetic oligonucleotide
  Sense strand starting at position 2456 of SEQ ID NO: 914721
uucugcacccaugaaaguu

SEQ ID NO: 1025577 - RNA, 19 nt, Artificial Sequence
  Description of Artificial Sequence: Synthetic oligonucleotide
  Antisense strand to SEQ ID NO: 1025576
aacuuucaugggugcagaa

SEQ ID NO: 1025578 - RNA, 19 nt, Artificial Sequence
  Description of Artificial Sequence: Synthetic oligonucleotide
  Sense strand starting at position 2527 of SEQ ID NO: 914721
ccaaguuaaggguguaaag

SEQ ID NO: 1025579 - RNA, 19 nt, Artificial Sequence
  Description of Artificial Sequence: Synthetic oligonucleotide
  Antisense strand to SEQ ID NO: 1025578
cuuuacacccuuaacuugg

SEQ ID NO: 1025580 - RNA, 19 nt, Artificial Sequence
  Description of Artificial Sequence: Synthetic oligonucleotide
  Sense strand starting at position 2587 of SEQ ID NO: 914721
ggagacaucuacgucuaca

SEQ ID NO: 1025581 - RNA, 19 nt, Artificial Sequence
  Description of Artificial Sequence: Synthetic oligonucleotide
  Antisense strand to SEQ ID NO: 1025580
uguagacguagaugucucc

SEQ ID NO: 1025582 - RNA, 19 nt, Artificial Sequence
  Description of Artificial Sequence: Synthetic oligonucleotide
  Sense strand starting at position 2598 of SEQ ID NO: 914721
cgucuacagucacuugaga

SEQ ID NO: 1025583 - RNA, 19 nt, Artificial Sequence
  Description of Artificial Sequence: Synthetic oligonucleotide
  Antisense strand to SEQ ID NO: 1025582
ucucaagugacuguagacg

SEQ ID NO: 1025584 - RNA, 19 nt, Artificial Sequence
  Description of Artificial Sequence: Synthetic oligonucleotide
  Sense strand starting at position 2603 of SEQ ID NO: 914721
acagucacuugagaaauuu

SEQ ID NO: 1025585 - RNA, 19 nt, Artificial Sequence
  Description of Artificial Sequence: Synthetic oligonucleotide
  Antisense strand to SEQ ID NO: 1025584
aaauuucucaagugacugu

SEQ ID NO: 1025586 - RNA, 19 nt, Artificial Sequence
  Description of Artificial Sequence: Synthetic oligonucleotide
  Sense strand starting at position 2638 of SEQ ID NO: 914721
auuugaauuucuggguguu

SEQ ID NO: 1025587 - RNA, 19 nt, Artificial Sequence
  Description of Artificial Sequence: Synthetic oligonucleotide
  Antisense strand to SEQ ID NO: 1025586
aacacccagaaauucaaau

SEQ ID NO: 1025588 - RNA, 19 nt, Artificial Sequence
  Description of Artificial Sequence: Synthetic oligonucleotide
  Sense strand starting at position 2648 of SEQ ID NO: 914721
cuggguguucgcuuugguu

SEQ ID NO: 1025589 - RNA, 19 nt, Artificial Sequence
  Description of Artificial Sequence: Synthetic oligonucleotide
  Antisense strand to SEQ ID NO: 1025588
aaccaaagcgaacacccag

SEQ ID NO: 1025590 - RNA, 19 nt, Artificial Sequence
  Description of Artificial Sequence: Synthetic oligonucleotide
  Sense strand starting at position 2655 of SEQ ID NO: 914721
uucgcuuugguuuaugaua

SEQ ID NO: 1025591 - RNA, 19 nt, Artificial Sequence
  Description of Artificial Sequence: Synthetic oligonucleotide
  Antisense strand to SEQ ID NO: 1025590
uaucauaaaccaaagcgaa

SEQ ID NO: 1025592 - RNA, 19 nt, Artificial Sequence
  Description of Artificial Sequence: Synthetic oligonucleotide
  Sense strand starting at position 2760 of SEQ ID NO: 914721
guagaucacagcugugcau

SEQ ID NO: 1025593 - RNA, 19 nt, Artificial Sequence
  Description of Artificial Sequence: Synthetic oligonucleotide
  Antisense strand to SEQ ID NO: 1025592
augcacagcugugaucuac

SEQ ID NO: 1025594 - RNA, 19 nt, Artificial Sequence
  Description of Artificial Sequence: Synthetic oligonucleotide
  Sense strand starting at position 2850 of SEQ ID NO: 914721
ugauguuaugccuacagaa

SEQ ID NO: 1025595 - RNA, 19 nt, Artificial Sequence
  Description of Artificial Sequence: Synthetic oligonucleotide
  Antisense strand to SEQ ID NO: 1025594
uucuguaggcauaacauca

SEQ ID NO: 1025596 - RNA, 19 nt, Artificial Sequence
  Description of Artificial Sequence: Synthetic oligonucleotide
  Sense strand starting at position 2870 of SEQ ID NO: 914721
auaaauuugcguuagccau

SEQ ID NO: 1025597 - RNA, 19 nt, Artificial Sequence
  Description of Artificial Sequence: Synthetic oligonucleotide
  Antisense strand to SEQ ID NO: 1025596
auggcuaacgcaaauuuau

SEQ ID NO: 1025598 - RNA, 19 nt, Artificial Sequence
  Description of Artificial Sequence: Synthetic oligonucleotide
  Sense strand starting at position 2872 of SEQ ID NO: 914721
aaauuugcguuagccauau

SEQ ID NO: 1025599 - RNA, 19 nt, Artificial Sequence
  Description of Artificial Sequence: Synthetic oligonucleotide
  Antisense strand to SEQ ID NO: 1025598
auauggcuaacgcaaauuu

SEQ ID NO: 1025600 - RNA, 19 nt, Artificial Sequence
  Description of Artificial Sequence: Synthetic oligonucleotide
  Sense strand starting at position 2874 of SEQ ID NO: 914721
auuugcguuagccauauga

SEQ ID NO: 1025601 - RNA, 19 nt, Artificial Sequence
  Description of Artificial Sequence: Synthetic oligonucleotide
  Antisense strand to SEQ ID NO: 1025600
ucauauggcuaacgcaaau

SEQ ID NO: 1025602 - RNA, 19 nt, Artificial Sequence
  Description of Artificial Sequence: Synthetic oligonucleotide
  Sense strand starting at position 2876 of SEQ ID NO: 914721
uugcguuagccauaugaau

SEQ ID NO: 1025603 - RNA, 19 nt, Artificial Sequence
  Description of Artificial Sequence: Synthetic oligonucleotide
  Antisense strand to SEQ ID NO: 1025602
auucauauggcuaacgcaa

SEQ ID NO: 1025604 - RNA, 19 nt, Artificial Sequence
  Description of Artificial Sequence: Synthetic oligonucleotide
  Sense strand starting at position 2878 of SEQ ID NO: 914721
gcguuagccauaugaauuu

SEQ ID NO: 1025605 - RNA, 19 nt, Artificial Sequence
  Description of Artificial Sequence: Synthetic oligonucleotide
  Antisense strand to SEQ ID NO: 1025604
aaauucauauggcuaacgc

SEQ ID NO: 1025606 - RNA, 19 nt, Artificial Sequence
  Description of Artificial Sequence: Synthetic oligonucleotide
  Sense strand starting at position 3313 of SEQ ID NO: 914721
ggaggauguuagguguucu

SEQ ID NO: 1025607 - RNA, 19 nt, Artificial Sequence
  Description of Artificial Sequence: Synthetic oligonucleotide
  Antisense strand to SEQ ID NO: 1025606
agaacaccuaacauccucc

SEQ ID NO: 1025608 - RNA, 19 nt, Artificial Sequence
  Description of Artificial Sequence: Synthetic oligonucleotide
  Sense strand starting at position 3666 of SEQ ID NO: 914721
guaggcauuugggaaauau

SEQ ID NO: 1025609 - RNA, 19 nt, Artificial Sequence
  Description of Artificial Sequence: Synthetic oligonucleotide
  Antisense strand to SEQ ID NO: 1025608
auauuucccaaaugccuac

SEQ ID NO: 1025610 - RNA, 19 nt, Artificial Sequence
  Description of Artificial Sequence: Synthetic oligonucleotide
  Sense strand starting at position 3676 of SEQ ID NO: 914721
gggaaauauuacccugcuu

SEQ ID NO: 1025611 - RNA, 19 nt, Artificial Sequence
  Description of Artificial Sequence: Synthetic oligonucleotide
  Antisense strand to SEQ ID NO: 1025610
aagcaggguaauauuuccc

SEQ ID NO: 1025612 - RNA, 19 nt, Artificial Sequence
  Description of Artificial Sequence: Synthetic oligonucleotide
  Sense strand starting at position 3724 of SEQ ID NO: 914721
cucuuaagccuccgaaugu

SEQ ID NO: 1025613 - RNA, 19 nt, Artificial Sequence
  Description of Artificial Sequence: Synthetic oligonucleotide
  Antisense strand to SEQ ID NO: 1025612
acauucggaggcuuaagag

SEQ ID NO: 1025614 - RNA, 19 nt, Artificial Sequence
  Description of Artificial Sequence: Synthetic oligonucleotide
  Sense strand starting at position 3731 of SEQ ID NO: 914721
gccuccgaauguuccaauu

SEQ ID NO: 1025615 - RNA, 19 nt, Artificial Sequence
  Description of Artificial Sequence: Synthetic oligonucleotide
  Antisense strand to SEQ ID NO: 1025614
aauuggaacauucggaggc

SEQ ID NO: 1025616 - RNA, 19 nt, Artificial Sequence
  Description of Artificial Sequence: Synthetic oligonucleotide
  Sense strand starting at position 3766 of SEQ ID NO: 914721
ugaagaaugcccgaggucu

SEQ ID NO: 1025617 - RNA, 19 nt, Artificial Sequence
  Description of Artificial Sequence: Synthetic oligonucleotide
  Antisense strand to SEQ ID NO: 1025616
agaccucgggcauucuuca

SEQ ID NO: 1025618 - RNA, 19 nt, Artificial Sequence
  Description of Artificial Sequence: Synthetic oligonucleotide
  Sense strand starting at position 3777 of SEQ ID NO: 914721
cgaggucucaugcauauca

SEQ ID NO: 1025619 - RNA, 19 nt, Artificial Sequence
  Description of Artificial Sequence: Synthetic oligonucleotide
  Antisense strand to SEQ ID NO: 1025618
ugauaugcaugagaccucg

SEQ ID NO: 1025620 - RNA, 19 nt, Artificial Sequence
  Description of Artificial Sequence: Synthetic oligonucleotide
  Sense strand starting at position 3779 of SEQ ID NO: 914721
aggucucaugcauaucaau

SEQ ID NO: 1025621 - RNA, 19 nt, Artificial Sequence
  Description of Artificial Sequence: Synthetic oligonucleotide
  Antisense strand to SEQ ID NO: 1025620
auugauaugcaugagaccu

SEQ ID NO: 1025622 - RNA, 19 nt, Artificial Sequence
  Description of Artificial Sequence: Synthetic oligonucleotide
  Sense strand starting at position 3853 of SEQ ID NO: 914721
acccuuauuugauguggga

SEQ ID NO: 1025623 - RNA, 19 nt, Artificial Sequence
  Description of Artificial Sequence: Synthetic oligonucleotide
  Antisense strand to SEQ ID NO: 1025622
ucccacaucaaauaagggu

SEQ ID NO: 1025624 - RNA, 19 nt, Artificial Sequence
  Description of Artificial Sequence: Synthetic oligonucleotide
  Sense strand starting at position 3856 of SEQ ID NO: 914721
cuuauuugaugugggagga

SEQ ID NO: 1025625 - RNA, 19 nt, Artificial Sequence
  Description of Artificial Sequence: Synthetic oligonucleotide
  Antisense strand to SEQ ID NO: 1025624
uccucccacaucaaauaag

SEQ ID NO: 1025626 - RNA, 19 nt, Artificial Sequence
  Description of Artificial Sequence: Synthetic oligonucleotide
  Sense strand starting at position 3886 of SEQ ID NO: 914721
guaguaaggugugucugga

SEQ ID NO: 1025627 - RNA, 19 nt, Artificial Sequence
  Description of Artificial Sequence: Synthetic oligonucleotide
  Antisense strand to SEQ ID NO: 1025626
uccagacacaccuuacuac

SEQ ID NO: 1025628 - RNA, 19 nt, Artificial Sequence
  Description of Artificial Sequence: Synthetic oligonucleotide
  Sense strand starting at position 3908 of SEQ ID NO: 914721
auggaaaccagucgugacu

SEQ ID NO: 1025629 - RNA, 19 nt, Artificial Sequence
  Description of Artificial Sequence: Synthetic oligonucleotide
  Antisense strand to SEQ ID NO: 1025628
agucacgacugguuuccau

SEQ ID NO: 1025630 - RNA, 19 nt, Artificial Sequence
  Description of Artificial Sequence: Synthetic oligonucleotide
  Sense strand starting at position 3927 of SEQ ID NO: 914721
ucgcaaauugcugguugaa

SEQ ID NO: 1025631 - RNA, 19 nt, Artificial Sequence
  Description of Artificial Sequence: Synthetic oligonucleotide
  Antisense strand to SEQ ID NO: 1025630
uucaaccagcaauuugcga

SEQ ID NO: 1025632 - RNA, 19 nt, Artificial Sequence
  Description of Artificial Sequence: Synthetic oligonucleotide
  Sense strand starting at position 3943 of SEQ ID NO: 914721
gaaggucauacgugaucau

SEQ ID NO: 1025633 - RNA, 19 nt, Artificial Sequence
  Description of Artificial Sequence: Synthetic oligonucleotide
  Antisense strand to SEQ ID NO: 1025632
augaucacguaugaccuuc

SEQ ID NO: 1025634 - RNA, 19 nt, Artificial Sequence
  Description of Artificial Sequence: Synthetic oligonucleotide
  Sense strand starting at position 3944 of SEQ ID NO: 914721
aaggucauacgugaucauu

SEQ ID NO: 1025635 - RNA, 19 nt, Artificial Sequence
  Description of Artificial Sequence: Synthetic oligonucleotide
  Antisense strand to SEQ ID NO: 1025634
aaugaucacguaugaccuu

SEQ ID NO: 1025636 - RNA, 19 nt, Artificial Sequence
  Description of Artificial Sequence: Synthetic oligonucleotide
  Sense strand starting at position 3946 of SEQ ID NO: 914721
ggucauacgugaucauugu

SEQ ID NO: 1025637 - RNA, 19 nt, Artificial Sequence
  Description of Artificial Sequence: Synthetic oligonucleotide
  Antisense strand to SEQ ID NO: 1025636
acaaugaucacguaugacc

SEQ ID NO: 1025638 - RNA, 19 nt, Artificial Sequence
  Description of Artificial Sequence: Synthetic oligonucleotide
  Sense strand starting at position 3950 of SEQ ID NO: 914721
auacgugaucauugugcau

SEQ ID NO: 1025639 - RNA, 19 nt, Artificial Sequence
  Description of Artificial Sequence: Synthetic oligonucleotide
  Antisense strand to SEQ ID NO: 1025638
augcacaaugaucacguau

SEQ ID NO: 1025640 - RNA, 19 nt, Artificial Sequence
  Description of Artificial Sequence: Synthetic oligonucleotide
  Sense strand starting at position 3954 of SEQ ID NO: 914721
gugaucauugugcaucuca

SEQ ID NO: 1025641 - RNA, 19 nt, Artificial Sequence
  Description of Artificial Sequence: Synthetic oligonucleotide
  Antisense strand to SEQ ID NO: 1025640
ugagaugcacaaugaucac

SEQ ID NO: 1025642 - RNA, 19 nt, Artificial Sequence
  Description of Artificial Sequence: Synthetic oligonucleotide
  Sense strand starting at position 35 of SEQ ID NO: 914722
gcuggaauucccuguccuu

SEQ ID NO: 1025643 - RNA, 19 nt, Artificial Sequence
  Description of Artificial Sequence: Synthetic oligonucleotide
  Antisense strand to SEQ ID NO: 1025642
aaggacagggaauuccagc

SEQ ID NO: 1025644 - RNA, 19 nt, Artificial Sequence
  Description of Artificial Sequence: Synthetic oligonucleotide
  Sense strand starting at position 257 of SEQ ID NO: 914722
ugauuccuaccaugguaga

SEQ ID NO: 1025645 - RNA, 19 nt, Artificial Sequence
  Description of Artificial Sequence: Synthetic oligonucleotide
  Antisense strand to SEQ ID NO: 1025644
ucuaccaugguaggaauca

SEQ ID NO: 1025646 - RNA, 19 nt, Artificial Sequence
  Description of Artificial Sequence: Synthetic oligonucleotide
  Sense strand starting at position 258 of SEQ ID NO: 914722
gauuccuaccaugguagaa

SEQ ID NO: 1025647 - RNA, 19 nt, Artificial Sequence
  Description of Artificial Sequence: Synthetic oligonucleotide
  Antisense strand to SEQ ID NO: 1025646
uucuaccaugguaggaauc

SEQ ID NO: 1025648 - RNA, 19 nt, Artificial Sequence
  Description of Artificial Sequence: Synthetic oligonucleotide
  Sense strand starting at position 284 of SEQ ID NO: 914722
ggagaagccucucccauua

SEQ ID NO: 1025649 - RNA, 19 nt, Artificial Sequence
  Description of Artificial Sequence: Synthetic oligonucleotide
  Antisense strand to SEQ ID NO: 1025648
uaaugggagaggcuucucc

SEQ ID NO: 1025650 - RNA, 19 nt, Artificial Sequence
  Description of Artificial Sequence: Synthetic oligonucleotide
  Sense strand starting at position 505 of SEQ ID NO: 914722
agaucuaguuaagaaacau

SEQ ID NO: 1025651 - RNA, 19 nt, Artificial Sequence
  Description of Artificial Sequence: Synthetic oligonucleotide
  Antisense strand to SEQ ID NO: 1025650
auguuucuuaacuagaucu

SEQ ID NO: 1025652 - RNA, 19 nt, Artificial Sequence
  Description of Artificial Sequence: Synthetic oligonucleotide
  Sense strand starting at position 610 of SEQ ID NO: 914722
gucauucugguguaaucca

SEQ ID NO: 1025653 - RNA, 19 nt, Artificial Sequence
  Description of Artificial Sequence: Synthetic oligonucleotide
  Antisense strand to SEQ ID NO: 1025652
uggauuacaccagaaugac

SEQ ID NO: 1025654 - RNA, 19 nt, Artificial Sequence
  Description of Artificial Sequence: Synthetic oligonucleotide
  Sense strand starting at position 663 of SEQ ID NO: 914722
acaguuauacagcaaguca

SEQ ID NO: 1025655 - RNA, 19 nt, Artificial Sequence
  Description of Artificial Sequence: Synthetic oligonucleotide
  Antisense strand to SEQ ID NO: 1025654
ugacuugcuguauaacugu

SEQ ID NO: 1025656 - RNA, 19 nt, Artificial Sequence
  Description of Artificial Sequence: Synthetic oligonucleotide
  Sense strand starting at position 720 of SEQ ID NO: 914722
ugagaauggaggugcauaa

SEQ ID NO: 1025657 - RNA, 19 nt, Artificial Sequence
  Description of Artificial Sequence: Synthetic oligonucleotide
  Antisense strand to SEQ ID NO: 1025656
uuaugcaccuccauucuca

SEQ ID NO: 1025658 - RNA, 19 nt, Artificial Sequence
  Description of Artificial Sequence: Synthetic oligonucleotide
  Sense strand starting at position 733 of SEQ ID NO: 914722
gcauaagcccuuugaucug

SEQ ID NO: 1025659 - RNA, 19 nt, Artificial Sequence
  Description of Artificial Sequence: Synthetic oligonucleotide
  Antisense strand to SEQ ID NO: 1025658
cagaucaaagggcuuaugc

SEQ ID NO: 1025660 - RNA, 19 nt, Artificial Sequence
  Description of Artificial Sequence: Synthetic oligonucleotide
  Sense strand starting at position 1061 of SEQ ID NO: 914722
agacuuagggucugucaag

SEQ ID NO: 1025661 - RNA, 19 nt, Artificial Sequence
  Description of Artificial Sequence: Synthetic oligonucleotide
  Antisense strand to SEQ ID NO: 1025660
cuugacagacccuaagucu

SEQ ID NO: 1025662 - RNA, 19 nt, Artificial Sequence
  Description of Artificial Sequence: Synthetic oligonucleotide
  Sense strand starting at position 1216 of SEQ ID NO: 914722
agggcugucuucccagauu

SEQ ID NO: 1025663 - RNA, 19 nt, Artificial Sequence
  Description of Artificial Sequence: Synthetic oligonucleotide
  Antisense strand to SEQ ID NO: 1025662
aaucugggaagacagcccu

SEQ ID NO: 1025664 - RNA, 19 nt, Artificial Sequence
  Description of Artificial Sequence: Synthetic oligonucleotide
  Sense strand starting at position 1264 of SEQ ID NO: 914722
ggauuuaagugucagagca

SEQ ID NO: 1025665 - RNA, 19 nt, Artificial Sequence
  Description of Artificial Sequence: Synthetic oligonucleotide
  Antisense strand to SEQ ID NO: 1025664
ugcucugacacuuaaaucc

SEQ ID NO: 1025666 - RNA, 19 nt, Artificial Sequence
  Description of Artificial Sequence: Synthetic oligonucleotide
  Sense strand starting at position 1266 of SEQ ID NO: 914722
auuuaagugucagagcaac

SEQ ID NO: 1025667 - RNA, 19 nt, Artificial Sequence
  Description of Artificial Sequence: Synthetic oligonucleotide
  Antisense strand to SEQ ID NO: 1025666
guugcucugacacuuaaau

SEQ ID NO: 1025668 - RNA, 19 nt, Artificial Sequence
  Description of Artificial Sequence: Synthetic oligonucleotide
  Sense strand starting at position 1481 of SEQ ID NO: 914722
uggagagugugacuugaac

SEQ ID NO: 1025669 - RNA, 19 nt, Artificial Sequence
  Description of Artificial Sequence: Synthetic oligonucleotide
  Antisense strand to SEQ ID NO: 1025668
guucaagucacacucucca

SEQ ID NO: 1025670 - RNA, 19 nt, Artificial Sequence
  Description of Artificial Sequence: Synthetic oligonucleotide
  Sense strand starting at position 1483 of SEQ ID NO: 914722
gagagugugacuugaacuu

SEQ ID NO: 1025671 - RNA, 19 nt, Artificial Sequence
  Description of Artificial Sequence: Synthetic oligonucleotide
  Antisense strand to SEQ ID NO: 1025670
aaguucaagucacacucuc

SEQ ID NO: 1025672 - RNA, 19 nt, Artificial Sequence
  Description of Artificial Sequence: Synthetic oligonucleotide
  Sense strand starting at position 2503 of SEQ ID NO: 914722
agcaguagauccuccagaa

SEQ ID NO: 1025673 - RNA, 19 nt, Artificial Sequence
  Description of Artificial Sequence: Synthetic oligonucleotide
  Antisense strand to SEQ ID NO: 1025672
uucuggaggaucuacugcu

SEQ ID NO: 1025674 - RNA, 19 nt, Artificial Sequence
  Description of Artificial Sequence: Synthetic oligonucleotide
  Sense strand starting at position 2680 of SEQ ID NO: 914722
gccaguuuaccauggagca

SEQ ID NO: 1025675 - RNA, 19 nt, Artificial Sequence
  Description of Artificial Sequence: Synthetic oligonucleotide
  Antisense strand to SEQ ID NO: 1025674
ugcuccaugguaaacuggc

SEQ ID NO: 1025676 - RNA, 19 nt, Artificial Sequence
  Description of Artificial Sequence: Synthetic oligonucleotide
  Sense strand starting at position 2681 of SEQ ID NO: 914722
ccaguuuaccauggagcau

SEQ ID NO: 1025677 - RNA, 19 nt, Artificial Sequence
  Description of Artificial Sequence: Synthetic oligonucleotide
  Antisense strand to SEQ ID NO: 1025676
augcuccaugguaaacugg

SEQ ID NO: 1025678 - RNA, 19 nt, Artificial Sequence
  Description of Artificial Sequence: Synthetic oligonucleotide
  Sense strand starting at position 2750 of SEQ ID NO: 914722
gcguuuaugguuuaccaag

SEQ ID NO: 1025679 - RNA, 19 nt, Artificial Sequence
  Description of Artificial Sequence: Synthetic oligonucleotide
  Antisense strand to SEQ ID NO: 1025678
cuugguaaaccauaaacgc

SEQ ID NO: 1025680 - RNA, 19 nt, Artificial Sequence
  Description of Artificial Sequence: Synthetic oligonucleotide
  Sense strand starting at position 2796 of SEQ ID NO: 914722
agcuuuauguuucccauuu

SEQ ID NO: 1025681 - RNA, 19 nt, Artificial Sequence
  Description of Artificial Sequence: Synthetic oligonucleotide
  Antisense strand to SEQ ID NO: 1025680
aaaugggaaacauaaagcu

SEQ ID NO: 1025682 - RNA, 19 nt, Artificial Sequence
  Description of Artificial Sequence: Synthetic oligonucleotide
  Sense strand starting at position 2818 of SEQ ID NO: 914722
ugaugaggcaggugucuaa

SEQ ID NO: 1025683 - RNA, 19 nt, Artificial Sequence
  Description of Artificial Sequence: Synthetic oligonucleotide
  Antisense strand to SEQ ID NO: 1025682
uuagacaccugccucauca

SEQ ID NO: 1025684 - RNA, 19 nt, Artificial Sequence
  Description of Artificial Sequence: Synthetic oligonucleotide
  Sense strand starting at position 2999 of SEQ ID NO: 914722
gguagucacagguacugua

SEQ ID NO: 1025685 - RNA, 19 nt, Artificial Sequence
  Description of Artificial Sequence: Synthetic oligonucleotide
  Antisense strand to SEQ ID NO: 1025684
uacaguaccugugacuacc

SEQ ID NO: 1025686 - RNA, 19 nt, Artificial Sequence
  Description of Artificial Sequence: Synthetic oligonucleotide
  Sense strand starting at position 3012 of SEQ ID NO: 914722
acuguagaauccucguuga

SEQ ID NO: 1025687 - RNA, 19 nt, Artificial Sequence
  Description of Artificial Sequence: Synthetic oligonucleotide
  Antisense strand to SEQ ID NO: 1025686
ucaacgaggauucuacagu

SEQ ID NO: 1025688 - RNA, 19 nt, Artificial Sequence
  Description of Artificial Sequence: Synthetic oligonucleotide
  Sense strand starting at position 3015 of SEQ ID NO: 914722
guagaauccucguugaguu

SEQ ID NO: 1025689 - RNA, 19 nt, Artificial Sequence
  Description of Artificial Sequence: Synthetic oligonucleotide
  Antisense strand to SEQ ID NO: 1025688
aacucaacgaggauucuac

SEQ ID NO: 1025690 - RNA, 19 nt, Artificial Sequence
  Description of Artificial Sequence: Synthetic oligonucleotide
  Sense strand starting at position 3016 of SEQ ID NO: 914722
uagaauccucguugaguuc

SEQ ID NO: 1025691 - RNA, 19 nt, Artificial Sequence
  Description of Artificial Sequence: Synthetic oligonucleotide
  Antisense strand to SEQ ID NO: 1025690
gaacucaacgaggauucua

SEQ ID NO: 1025692 - RNA, 19 nt, Artificial Sequence
  Description of Artificial Sequence: Synthetic oligonucleotide
  Sense strand starting at position 3028 of SEQ ID NO: 914722
ugaguucuaguccauugaa

SEQ ID NO: 1025693 - RNA, 19 nt, Artificial Sequence
  Description of Artificial Sequence: Synthetic oligonucleotide
  Antisense strand to SEQ ID NO: 1025692
uucaauggacuagaacuca

SEQ ID NO: 1025694 - RNA, 19 nt, Artificial Sequence
  Description of Artificial Sequence: Synthetic oligonucleotide
  Sense strand starting at position 3031 of SEQ ID NO: 914722
guucuaguccauugaauug

SEQ ID NO: 1025695 - RNA, 19 nt, Artificial Sequence
  Description of Artificial Sequence: Synthetic oligonucleotide
  Antisense strand to SEQ ID NO: 1025694
caauucaauggacuagaac

SEQ ID NO: 1025696 - RNA, 19 nt, Artificial Sequence
  Description of Artificial Sequence: Synthetic oligonucleotide
  Sense strand starting at position 3139 of SEQ ID NO: 914722
gagccacuguauccaugaa

SEQ ID NO: 1025697 - RNA, 19 nt, Artificial Sequence
  Description of Artificial Sequence: Synthetic oligonucleotide
  Antisense strand to SEQ ID NO: 1025696
uucauggauacaguggcuc

SEQ ID NO: 1025698 - RNA, 19 nt, Artificial Sequence
  Description of Artificial Sequence: Synthetic oligonucleotide
  Sense strand starting at position 3383 of SEQ ID NO: 914722
acuguuauauguguguuga

SEQ ID NO: 1025699 - RNA, 19 nt, Artificial Sequence
  Description of Artificial Sequence: Synthetic oligonucleotide
  Antisense strand to SEQ ID NO: 1025698
ucaacacacauauaacagu

SEQ ID NO: 1025700 - RNA, 19 nt, Artificial Sequence
  Description of Artificial Sequence: Synthetic oligonucleotide
  Sense strand starting at position 3384 of SEQ ID NO: 914722
cuguuauauguguguugau

SEQ ID NO: 1025701 - RNA, 19 nt, Artificial Sequence
  Description of Artificial Sequence: Synthetic oligonucleotide
  Antisense strand to SEQ ID NO: 1025700
aucaacacacauauaacag

SEQ ID NO: 1025702 - RNA, 19 nt, Artificial Sequence
  Description of Artificial Sequence: Synthetic oligonucleotide
  Sense strand starting at position 3385 of SEQ ID NO: 914722
uguuauauguguguugauu

SEQ ID NO: 1025703 - RNA, 19 nt, Artificial Sequence
  Description of Artificial Sequence: Synthetic oligonucleotide
  Antisense strand to SEQ ID NO: 1025702
aaucaacacacauauaaca

SEQ ID NO: 1025704 - RNA, 19 nt, Artificial Sequence
  Description of Artificial Sequence: Synthetic oligonucleotide
  Sense strand starting at position 3391 of SEQ ID NO: 914722
auguguguugauugaagaa

SEQ ID NO: 1025705 - RNA, 19 nt, Artificial Sequence
  Description of Artificial Sequence: Synthetic oligonucleotide
  Antisense strand to SEQ ID NO: 1025704
uucuucaaucaacacacau

SEQ ID NO: 1025706 - RNA, 19 nt, Artificial Sequence
  Description of Artificial Sequence: Synthetic oligonucleotide
  Sense strand starting at position 3416 of SEQ ID NO: 914722
agcauuagccuuuggcaaa

SEQ ID NO: 1025707 - RNA, 19 nt, Artificial Sequence
  Description of Artificial Sequence: Synthetic oligonucleotide
  Antisense strand to SEQ ID NO: 1025706
uuugccaaaggcuaaugcu

SEQ ID NO: 1025708 - RNA, 19 nt, Artificial Sequence
  Description of Artificial Sequence: Synthetic oligonucleotide
  Sense strand starting at position 3783 of SEQ ID NO: 914722
aagggacuugccugaaaca

SEQ ID NO: 1025709 - RNA, 19 nt, Artificial Sequence
  Description of Artificial Sequence: Synthetic oligonucleotide
  Antisense strand to SEQ ID NO: 1025708
uguuucaggcaagucccuu

SEQ ID NO: 1025710 - RNA, 19 nt, Artificial Sequence
  Description of Artificial Sequence: Synthetic oligonucleotide
  Sense strand starting at position 3886 of SEQ ID NO: 914722
gggugcucccuuuauuaua

SEQ ID NO: 1025711 - RNA, 19 nt, Artificial Sequence
  Description of Artificial Sequence: Synthetic oligonucleotide
  Antisense strand to SEQ ID NO: 1025710
uauaauaaagggagcaccc

SEQ ID NO: 1025712 - RNA, 19 nt, Artificial Sequence
  Description of Artificial Sequence: Synthetic oligonucleotide
  Sense strand starting at position 3899 of SEQ ID NO: 914722
auuauacaggauuguguua

SEQ ID NO: 1025713 - RNA, 19 nt, Artificial Sequence
  Description of Artificial Sequence: Synthetic oligonucleotide
  Antisense strand to SEQ ID NO: 1025712
uaacacaauccuguauaau

SEQ ID NO: 1025714 - RNA, 19 nt, Artificial Sequence
  Description of Artificial Sequence: Synthetic oligonucleotide
  Sense strand starting at position 3911 of SEQ ID NO: 914722
uguguuaucuuauugcauu

SEQ ID NO: 1025715 - RNA, 19 nt, Artificial Sequence
  Description of Artificial Sequence: Synthetic oligonucleotide
  Antisense strand to SEQ ID NO: 1025714
aaugcaauaagauaacaca

SEQ ID NO: 1025716 - RNA, 19 nt, Artificial Sequence
  Description of Artificial Sequence: Synthetic oligonucleotide
  Sense strand starting at position 3921 of SEQ ID NO: 914722
uauugcauuuggucuguau

SEQ ID NO: 1025717 - RNA, 19 nt, Artificial Sequence
  Description of Artificial Sequence: Synthetic oligonucleotide
  Antisense strand to SEQ ID NO: 1025716
auacagaccaaaugcaaua

SEQ ID NO: 1025718 - RNA, 19 nt, Artificial Sequence
  Description of Artificial Sequence: Synthetic oligonucleotide
  Sense strand starting at position 3954 of SEQ ID NO: 914722
ggagucuuucgggaauaau

SEQ ID NO: 1025719 - RNA, 19 nt, Artificial Sequence
  Description of Artificial Sequence: Synthetic oligonucleotide
  Antisense strand to SEQ ID NO: 1025718
auuauucccgaaagacucc

SEQ ID NO: 1025720 - RNA, 19 nt, Artificial Sequence
  Description of Artificial Sequence: Synthetic oligonucleotide
  Sense strand starting at position 3963 of SEQ ID NO: 914722
cgggaauaauaagagaugu

SEQ ID NO: 1025721 - RNA, 19 nt, Artificial Sequence
  Description of Artificial Sequence: Synthetic oligonucleotide
  Antisense strand to SEQ ID NO: 1025720
acaucucuuauuauucccg

SEQ ID NO: 1025722 - RNA, 19 nt, Artificial Sequence
  Description of Artificial Sequence: Synthetic oligonucleotide
  Sense strand starting at position 35 of SEQ ID NO: 914723
acuguuauauguguguuga

SEQ ID NO: 1025723 - RNA, 19 nt, Artificial Sequence
  Description of Artificial Sequence: Synthetic oligonucleotide
  Antisense strand to SEQ ID NO: 1025722
ucaacacacauauaacagu

SEQ ID NO: 1025724 - RNA, 19 nt, Artificial Sequence
  Description of Artificial Sequence: Synthetic oligonucleotide
  Sense strand starting at position 36 of SEQ ID NO: 914723
cuguuauauguguguugau

SEQ ID NO: 1025725 - RNA, 19 nt, Artificial Sequence
  Description of Artificial Sequence: Synthetic oligonucleotide
  Antisense strand to SEQ ID NO: 1025724
aucaacacacauauaacag

SEQ ID NO: 1025726 - RNA, 19 nt, Artificial Sequence
  Description of Artificial Sequence: Synthetic oligonucleotide
  Sense strand starting at position 37 of SEQ ID NO: 914723
uguuauauguguguugauu

SEQ ID NO: 1025727 - RNA, 19 nt, Artificial Sequence
  Description of Artificial Sequence: Synthetic oligonucleotide
  Antisense strand to SEQ ID NO: 1025726
aaucaacacacauauaaca

SEQ ID NO: 1025728 - RNA, 19 nt, Artificial Sequence
  Description of Artificial Sequence: Synthetic oligonucleotide
  Sense strand starting at position 43 of SEQ ID NO: 914723
auguguguugauugaagaa

SEQ ID NO: 1025729 - RNA, 19 nt, Artificial Sequence
  Description of Artificial Sequence: Synthetic oligonucleotide
  Antisense strand to SEQ ID NO: 1025728
uucuucaaucaacacacau

SEQ ID NO: 1025730 - RNA, 19 nt, Artificial Sequence
  Description of Artificial Sequence: Synthetic oligonucleotide
  Sense strand starting at position 68 of SEQ ID NO: 914723
agcauuagccuuuggcaaa

SEQ ID NO: 1025731 - RNA, 19 nt, Artificial Sequence
  Description of Artificial Sequence: Synthetic oligonucleotide
  Antisense strand to SEQ ID NO: 1025730
uuugccaaaggcuaaugcu

SEQ ID NO: 1025732 - RNA, 19 nt, Artificial Sequence
  Description of Artificial Sequence: Synthetic oligonucleotide
  Sense strand starting at position 259 of SEQ ID NO: 914723
agcguuuggugaagaugga

SEQ ID NO: 1025733 - RNA, 19 nt, Artificial Sequence
  Description of Artificial Sequence: Synthetic oligonucleotide
  Antisense strand to SEQ ID NO: 1025732
uccaucuucaccaaacgcu

SEQ ID NO: 1025734 - RNA, 19 nt, Artificial Sequence
  Description of Artificial Sequence: Synthetic oligonucleotide
  Sense strand starting at position 435 of SEQ ID NO: 914723
aagggacuugccugaaaca

SEQ ID NO: 1025735 - RNA, 19 nt, Artificial Sequence
  Description of Artificial Sequence: Synthetic oligonucleotide
  Antisense strand to SEQ ID NO: 1025734
uguuucaggcaagucccuu

SEQ ID NO: 1025736 - RNA, 19 nt, Artificial Sequence
  Description of Artificial Sequence: Synthetic oligonucleotide
  Sense strand starting at position 538 of SEQ ID NO: 914723
gggugcucccuuuauuaua

SEQ ID NO: 1025737 - RNA, 19 nt, Artificial Sequence
  Description of Artificial Sequence: Synthetic oligonucleotide
  Antisense strand to SEQ ID NO: 1025736
uauaauaaagggagcaccc

SEQ ID NO: 1025738 - RNA, 19 nt, Artificial Sequence
  Description of Artificial Sequence: Synthetic oligonucleotide
  Sense strand starting at position 551 of SEQ ID NO: 914723
auuauacaggauuguguua

SEQ ID NO: 1025739 - RNA, 19 nt, Artificial Sequence
  Description of Artificial Sequence: Synthetic oligonucleotide
  Antisense strand to SEQ ID NO: 1025738
uaacacaauccuguauaau

SEQ ID NO: 1025740 - RNA, 19 nt, Artificial Sequence
  Description of Artificial Sequence: Synthetic oligonucleotide
  Sense strand starting at position 556 of SEQ ID NO: 914723
acaggauuguguuaucuua

SEQ ID NO: 1025741 - RNA, 19 nt, Artificial Sequence
  Description of Artificial Sequence: Synthetic oligonucleotide
  Antisense strand to SEQ ID NO: 1025740
uaagauaacacaauccugu

SEQ ID NO: 1025742 - RNA, 19 nt, Artificial Sequence
  Description of Artificial Sequence: Synthetic oligonucleotide
  Sense strand starting at position 563 of SEQ ID NO: 914723
uguguuaucuuauugcauu

SEQ ID NO: 1025743 - RNA, 19 nt, Artificial Sequence
  Description of Artificial Sequence: Synthetic oligonucleotide
  Antisense strand to SEQ ID NO: 1025742
aaugcaauaagauaacaca

SEQ ID NO: 1025744 - RNA, 19 nt, Artificial Sequence
  Description of Artificial Sequence: Synthetic oligonucleotide
  Sense strand starting at position 564 of SEQ ID NO: 914723
guguuaucuuauugcauuu

SEQ ID NO: 1025745 - RNA, 19 nt, Artificial Sequence
  Description of Artificial Sequence: Synthetic oligonucleotide
  Antisense strand to SEQ ID NO: 1025744
aaaugcaauaagauaacac

SEQ ID NO: 1025746 - RNA, 19 nt, Artificial Sequence
  Description of Artificial Sequence: Synthetic oligonucleotide
  Sense strand starting at position 573 of SEQ ID NO: 914723
uauugcauuuggucuguau

SEQ ID NO: 1025747 - RNA, 19 nt, Artificial Sequence
  Description of Artificial Sequence: Synthetic oligonucleotide
  Antisense strand to SEQ ID NO: 1025746
auacagaccaaaugcaaua

SEQ ID NO: 1025748 - RNA, 19 nt, Artificial Sequence
  Description of Artificial Sequence: Synthetic oligonucleotide
  Sense strand starting at position 603 of SEQ ID NO: 914723
cauggagucuuucgggaau

SEQ ID NO: 1025749 - RNA, 19 nt, Artificial Sequence
  Description of Artificial Sequence: Synthetic oligonucleotide
  Antisense strand to SEQ ID NO: 1025748
auucccgaaagacuccaug

SEQ ID NO: 1025750 - RNA, 19 nt, Artificial Sequence
  Description of Artificial Sequence: Synthetic oligonucleotide
  Sense strand starting at position 605 of SEQ ID NO: 914723
uggagucuuucgggaauaa

SEQ ID NO: 1025751 - RNA, 19 nt, Artificial Sequence
  Description of Artificial Sequence: Synthetic oligonucleotide
  Antisense strand to SEQ ID NO: 1025750
uuauucccgaaagacucca

SEQ ID NO: 1025752 - RNA, 19 nt, Artificial Sequence
  Description of Artificial Sequence: Synthetic oligonucleotide
  Sense strand starting at position 606 of SEQ ID NO: 914723
ggagucuuucgggaauaau

SEQ ID NO: 1025753 - RNA, 19 nt, Artificial Sequence
  Description of Artificial Sequence: Synthetic oligonucleotide
  Antisense strand to SEQ ID NO: 1025752
auuauucccgaaagacucc

SEQ ID NO: 1025754 - RNA, 19 nt, Artificial Sequence
  Description of Artificial Sequence: Synthetic oligonucleotide
  Sense strand starting at position 615 of SEQ ID NO: 914723
cgggaauaauaagagaugu

SEQ ID NO: 1025755 - RNA, 19 nt, Artificial Sequence
  Description of Artificial Sequence: Synthetic oligonucleotide
  Antisense strand to SEQ ID NO: 1025754
acaucucuuauuauucccg

SEQ ID NO: 1025756 - RNA, 19 nt, Artificial Sequence
  Description of Artificial Sequence: Synthetic oligonucleotide
  Sense strand starting at position 852 of SEQ ID NO: 914723
ggcauuaaacauuaacagu

SEQ ID NO: 1025757 - RNA, 19 nt, Artificial Sequence
  Description of Artificial Sequence: Synthetic oligonucleotide
  Antisense strand to SEQ ID NO: 1025756
acuguuaauguuuaaugcc

SEQ ID NO: 1025758 - RNA, 19 nt, Artificial Sequence
  Description of Artificial Sequence: Synthetic oligonucleotide
  Sense strand starting at position 863 of SEQ ID NO: 914723
uuaacagugccagguaaua

SEQ ID NO: 1025759 - RNA, 19 nt, Artificial Sequence
  Description of Artificial Sequence: Synthetic oligonucleotide
  Antisense strand to SEQ ID NO: 1025758
uauuaccuggcacuguuaa

SEQ ID NO: 1025760 - RNA, 19 nt, Artificial Sequence
  Description of Artificial Sequence: Synthetic oligonucleotide
  Sense strand starting at position 1036 of SEQ ID NO: 914723
auagauagauauggaugau

SEQ ID NO: 1025761 - RNA, 19 nt, Artificial Sequence
  Description of Artificial Sequence: Synthetic oligonucleotide
  Antisense strand to SEQ ID NO: 1025760
aucauccauaucuaucuau

SEQ ID NO: 1025762 - RNA, 19 nt, Artificial Sequence
  Description of Artificial Sequence: Synthetic oligonucleotide
  Sense strand starting at position 1096 of SEQ ID NO: 914723
gcuaguugauggcuacauu

SEQ ID NO: 1025763 - RNA, 19 nt, Artificial Sequence
  Description of Artificial Sequence: Synthetic oligonucleotide
  Antisense strand to SEQ ID NO: 1025762
aauguagccaucaacuagc

SEQ ID NO: 1025764 - RNA, 19 nt, Artificial Sequence
  Description of Artificial Sequence: Synthetic oligonucleotide
  Sense strand starting at position 1542 of SEQ ID NO: 914723
aggcccagauaaguuaaau

SEQ ID NO: 1025765 - RNA, 19 nt, Artificial Sequence
  Description of Artificial Sequence: Synthetic oligonucleotide
  Antisense strand to SEQ ID NO: 1025764
auuuaacuuaucugggccu

SEQ ID NO: 1025766 - RNA, 19 nt, Artificial Sequence
  Description of Artificial Sequence: Synthetic oligonucleotide
  Sense strand starting at position 1708 of SEQ ID NO: 914723
ucagauaugcucugcacac

SEQ ID NO: 1025767 - RNA, 19 nt, Artificial Sequence
  Description of Artificial Sequence: Synthetic oligonucleotide
  Antisense strand to SEQ ID NO: 1025766
gugugcagagcauaucuga

SEQ ID NO: 1025768 - RNA, 19 nt, Artificial Sequence
  Description of Artificial Sequence: Synthetic oligonucleotide
  Sense strand starting at position 1739 of SEQ ID NO: 914723
gccagugacuccguaugga

SEQ ID NO: 1025769 - RNA, 19 nt, Artificial Sequence
  Description of Artificial Sequence: Synthetic oligonucleotide
  Antisense strand to SEQ ID NO: 1025768
uccauacggagucacuggc

SEQ ID NO: 1025770 - RNA, 19 nt, Artificial Sequence
  Description of Artificial Sequence: Synthetic oligonucleotide
  Sense strand starting at position 1742 of SEQ ID NO: 914723
agugacuccguauggagau

SEQ ID NO: 1025771 - RNA, 19 nt, Artificial Sequence
  Description of Artificial Sequence: Synthetic oligonucleotide
  Antisense strand to SEQ ID NO: 1025770
aucuccauacggagucacu

SEQ ID NO: 1025772 - RNA, 19 nt, Artificial Sequence
  Description of Artificial Sequence: Synthetic oligonucleotide
  Sense strand starting at position 1770 of SEQ ID NO: 914723
uggaaauucugccucucuu

SEQ ID NO: 1025773 - RNA, 19 nt, Artificial Sequence
  Description of Artificial Sequence: Synthetic oligonucleotide
  Antisense strand to SEQ ID NO: 1025772
aagagaggcagaauuucca

SEQ ID NO: 1025774 - RNA, 19 nt, Artificial Sequence
  Description of Artificial Sequence: Synthetic oligonucleotide
  Sense strand starting at position 1932 of SEQ ID NO: 914723
gcugguuguguccaggagu

SEQ ID NO: 1025775 - RNA, 19 nt, Artificial Sequence
  Description of Artificial Sequence: Synthetic oligonucleotide
  Antisense strand to SEQ ID NO: 1025774
acuccuggacacaaccagc

SEQ ID NO: 1025776 - RNA, 19 nt, Artificial Sequence
  Description of Artificial Sequence: Synthetic oligonucleotide
  Sense strand starting at position 1933 of SEQ ID NO: 914723
cugguuguguccaggagug

SEQ ID NO: 1025777 - RNA, 19 nt, Artificial Sequence
  Description of Artificial Sequence: Synthetic oligonucleotide
  Antisense strand to SEQ ID NO: 1025776
cacuccuggacacaaccag

SEQ ID NO: 1025778 - RNA, 19 nt, Artificial Sequence
  Description of Artificial Sequence: Synthetic oligonucleotide
  Sense strand starting at position 2410 of SEQ ID NO: 914723
ggccguuggccggagguau

SEQ ID NO: 1025779 - RNA, 19 nt, Artificial Sequence
  Description of Artificial Sequence: Synthetic oligonucleotide
  Antisense strand to SEQ ID NO: 1025778
auaccuccggccaacggcc

SEQ ID NO: 1025780 - RNA, 19 nt, Artificial Sequence
  Description of Artificial Sequence: Synthetic oligonucleotide
  Sense strand starting at position 2422 of SEQ ID NO: 914723
gagguauccugcccaagac

SEQ ID NO: 1025781 - RNA, 19 nt, Artificial Sequence
  Description of Artificial Sequence: Synthetic oligonucleotide
  Antisense strand to SEQ ID NO: 1025780
gucuugggcaggauaccuc

SEQ ID NO: 1025782 - RNA, 19 nt, Artificial Sequence
  Description of Artificial Sequence: Synthetic oligonucleotide
  Sense strand starting at position 3228 of SEQ ID NO: 914723
cccucucagggcugaaaua

SEQ ID NO: 1025783 - RNA, 19 nt, Artificial Sequence
  Description of Artificial Sequence: Synthetic oligonucleotide
  Antisense strand to SEQ ID NO: 1025782
uauuucagcccugagaggg

SEQ ID NO: 1025784 - RNA, 19 nt, Artificial Sequence
  Description of Artificial Sequence: Synthetic oligonucleotide
  Sense strand starting at position 3254 of SEQ ID NO: 914723
ggaggucuaagaggugcua

SEQ ID NO: 1025785 - RNA, 19 nt, Artificial Sequence
  Description of Artificial Sequence: Synthetic oligonucleotide
  Antisense strand to SEQ ID NO: 1025784
uagcaccucuuagaccucc

SEQ ID NO: 1025786 - RNA, 19 nt, Artificial Sequence
  Description of Artificial Sequence: Synthetic oligonucleotide
  Sense strand starting at position 3256 of SEQ ID NO: 914723
aggucuaagaggugcuauu

SEQ ID NO: 1025787 - RNA, 19 nt, Artificial Sequence
  Description of Artificial Sequence: Synthetic oligonucleotide
  Antisense strand to SEQ ID NO: 1025786
aauagcaccucuuagaccu

SEQ ID NO: 1025788 - RNA, 19 nt, Artificial Sequence
  Description of Artificial Sequence: Synthetic oligonucleotide
  Sense strand starting at position 3263 of SEQ ID NO: 914723
agaggugcuauuuguuauc

SEQ ID NO: 1025789 - RNA, 19 nt, Artificial Sequence
  Description of Artificial Sequence: Synthetic oligonucleotide
  Antisense strand to SEQ ID NO: 1025788
gauaacaaauagcaccucu

SEQ ID NO: 1025790 - RNA, 19 nt, Artificial Sequence
  Description of Artificial Sequence: Synthetic oligonucleotide
  Sense strand starting at position 3269 of SEQ ID NO: 914723
gcuauuuguuaucaggaug

SEQ ID NO: 1025791 - RNA, 19 nt, Artificial Sequence
  Description of Artificial Sequence: Synthetic oligonucleotide
  Antisense strand to SEQ ID NO: 1025790
cauccugauaacaaauagc

SEQ ID NO: 1025792 - RNA, 19 nt, Artificial Sequence
  Description of Artificial Sequence: Synthetic oligonucleotide
  Sense strand starting at position 3541 of SEQ ID NO: 914723
guccaaacauauucuaagu

SEQ ID NO: 1025793 - RNA, 19 nt, Artificial Sequence
  Description of Artificial Sequence: Synthetic oligonucleotide
  Antisense strand to SEQ ID NO: 1025792
acuuagaauauguuuggac

SEQ ID NO: 1025794 - RNA, 19 nt, Artificial Sequence
  Description of Artificial Sequence: Synthetic oligonucleotide
  Sense strand starting at position 3550 of SEQ ID NO: 914723
uauucuaagugguccagaa

SEQ ID NO: 1025795 - RNA, 19 nt, Artificial Sequence
  Description of Artificial Sequence: Synthetic oligonucleotide
  Antisense strand to SEQ ID NO: 1025794
uucuggaccacuuagaaua

SEQ ID NO: 1025796 - RNA, 19 nt, Artificial Sequence
  Description of Artificial Sequence: Synthetic oligonucleotide
  Sense strand starting at position 3666 of SEQ ID NO: 914723
cucagagcccggugugauu

SEQ ID NO: 1025797 - RNA, 19 nt, Artificial Sequence
  Description of Artificial Sequence: Synthetic oligonucleotide
  Antisense strand to SEQ ID NO: 1025796
aaucacaccgggcucugag

SEQ ID NO: 1025798 - RNA, 19 nt, Artificial Sequence
  Description of Artificial Sequence: Synthetic oligonucleotide
  Sense strand starting at position 3769 of SEQ ID NO: 914723
cagagagggcucggaugau

SEQ ID NO: 1025799 - RNA, 19 nt, Artificial Sequence
  Description of Artificial Sequence: Synthetic oligonucleotide
  Antisense strand to SEQ ID NO: 1025798
aucauccgagcccucucug

SEQ ID NO: 1025800 - RNA, 19 nt, Artificial Sequence
  Description of Artificial Sequence: Synthetic oligonucleotide
  Sense strand starting at position 3917 of SEQ ID NO: 914723
agcgauuauucugacuaag

SEQ ID NO: 1025801 - RNA, 19 nt, Artificial Sequence
  Description of Artificial Sequence: Synthetic oligonucleotide
  Antisense strand to SEQ ID NO: 1025800
cuuagucagaauaaucgcu

SEQ ID NO: 1025802 - RNA, 19 nt, Artificial Sequence
  Description of Artificial Sequence: Synthetic oligonucleotide
  Sense strand starting at position 117 of SEQ ID NO: 914724
gccugagaugcccacugau

SEQ ID NO: 1025803 - RNA, 19 nt, Artificial Sequence
  Description of Artificial Sequence: Synthetic oligonucleotide
  Antisense strand to SEQ ID NO: 1025802
aucagugggcaucucaggc

SEQ ID NO: 1025804 - RNA, 19 nt, Artificial Sequence
  Description of Artificial Sequence: Synthetic oligonucleotide
  Sense strand starting at position 120 of SEQ ID NO: 914724
ugagaugcccacugaucca

SEQ ID NO: 1025805 - RNA, 19 nt, Artificial Sequence
  Description of Artificial Sequence: Synthetic oligonucleotide
  Antisense strand to SEQ ID NO: 1025804
uggaucagugggcaucuca

SEQ ID NO: 1025806 - RNA, 19 nt, Artificial Sequence
  Description of Artificial Sequence: Synthetic oligonucleotide
  Sense strand starting at position 907 of SEQ ID NO: 914724
ccgaucuccuuguuuacau

SEQ ID NO: 1025807 - RNA, 19 nt, Artificial Sequence
  Description of Artificial Sequence: Synthetic oligonucleotide
  Antisense strand to SEQ ID NO: 1025806
auguaaacaaggagaucgg

SEQ ID NO: 1025808 - RNA, 19 nt, Artificial Sequence
  Description of Artificial Sequence: Synthetic oligonucleotide
  Sense strand starting at position 1596 of SEQ ID NO: 914724
ggugucucucugcaauagu

SEQ ID NO: 1025809 - RNA, 19 nt, Artificial Sequence
  Description of Artificial Sequence: Synthetic oligonucleotide
  Antisense strand to SEQ ID NO: 1025808
acuauugcagagagacacc

SEQ ID NO: 1025810 - RNA, 19 nt, Artificial Sequence
  Description of Artificial Sequence: Synthetic oligonucleotide
  Sense strand starting at position 1599 of SEQ ID NO: 914724
gucucucugcaauaguaaa

SEQ ID NO: 1025811 - RNA, 19 nt, Artificial Sequence
  Description of Artificial Sequence: Synthetic oligonucleotide
  Antisense strand to SEQ ID NO: 1025810
uuuacuauugcagagagac

SEQ ID NO: 1025812 - RNA, 19 nt, Artificial Sequence
  Description of Artificial Sequence: Synthetic oligonucleotide
  Sense strand starting at position 1679 of SEQ ID NO: 914724
uugggagccuugguaauua

SEQ ID NO: 1025813 - RNA, 19 nt, Artificial Sequence
  Description of Artificial Sequence: Synthetic oligonucleotide
  Antisense strand to SEQ ID NO: 1025812
uaauuaccaaggcucccaa

SEQ ID NO: 1025814 - RNA, 19 nt, Artificial Sequence
  Description of Artificial Sequence: Synthetic oligonucleotide
  Sense strand starting at position 1717 of SEQ ID NO: 914724
gcaugaauggcugugucgu

SEQ ID NO: 1025815 - RNA, 19 nt, Artificial Sequence
  Description of Artificial Sequence: Synthetic oligonucleotide
  Antisense strand to SEQ ID NO: 1025814
acgacacagccauucaugc

SEQ ID NO: 1025816 - RNA, 19 nt, Artificial Sequence
  Description of Artificial Sequence: Synthetic oligonucleotide
  Sense strand starting at position 2066 of SEQ ID NO: 914724
augggaggcuuagcucaua

SEQ ID NO: 1025817 - RNA, 19 nt, Artificial Sequence
  Description of Artificial Sequence: Synthetic oligonucleotide
  Antisense strand to SEQ ID NO: 1025816
uaugagcuaagccucccau

SEQ ID NO: 1025818 - RNA, 19 nt, Artificial Sequence
  Description of Artificial Sequence: Synthetic oligonucleotide
  Sense strand starting at position 2085 of SEQ ID NO: 914724
gugagugcucaagaaauug

SEQ ID NO: 1025819 - RNA, 19 nt, Artificial Sequence
  Description of Artificial Sequence: Synthetic oligonucleotide
  Antisense strand to SEQ ID NO: 1025818
caauuucuugagcacucac

SEQ ID NO: 1025820 - RNA, 19 nt, Artificial Sequence
  Description of Artificial Sequence: Synthetic oligonucleotide
  Sense strand starting at position 2093 of SEQ ID NO: 914724
ucaagaaauuggcucuuac

SEQ ID NO: 1025821 - RNA, 19 nt, Artificial Sequence
  Description of Artificial Sequence: Synthetic oligonucleotide
  Antisense strand to SEQ ID NO: 1025820
guaagagccaauuucuuga

SEQ ID NO: 1025822 - RNA, 19 nt, Artificial Sequence
  Description of Artificial Sequence: Synthetic oligonucleotide
  Sense strand starting at position 2247 of SEQ ID NO: 914724
ugagaaaggcugugauugu

SEQ ID NO: 1025823 - RNA, 19 nt, Artificial Sequence
  Description of Artificial Sequence: Synthetic oligonucleotide
  Antisense strand to SEQ ID NO: 1025822
acaaucacagccuuucuca

SEQ ID NO: 1025824 - RNA, 19 nt, Artificial Sequence
  Description of Artificial Sequence: Synthetic oligonucleotide
  Sense strand starting at position 2251 of SEQ ID NO: 914724
aaaggcugugauuguccaa

SEQ ID NO: 1025825 - RNA, 19 nt, Artificial Sequence
  Description of Artificial Sequence: Synthetic oligonucleotide
  Antisense strand to SEQ ID NO: 1025824
uuggacaaucacagccuuu

SEQ ID NO: 1025826 - RNA, 19 nt, Artificial Sequence
  Description of Artificial Sequence: Synthetic oligonucleotide
  Sense strand starting at position 2283 of SEQ ID NO: 914724
cacggagaguuccuuacaa

SEQ ID NO: 1025827 - RNA, 19 nt, Artificial Sequence
  Description of Artificial Sequence: Synthetic oligonucleotide
  Antisense strand to SEQ ID NO: 1025826
uuguaaggaacucuccgug

SEQ ID NO: 1025828 - RNA, 19 nt, Artificial Sequence
  Description of Artificial Sequence: Synthetic oligonucleotide
  Sense strand starting at position 2285 of SEQ ID NO: 914724
cggagaguuccuuacaaac

SEQ ID NO: 1025829 - RNA, 19 nt, Artificial Sequence
  Description of Artificial Sequence: Synthetic oligonucleotide
  Antisense strand to SEQ ID NO: 1025828
guuuguaaggaacucuccg

SEQ ID NO: 1025830 - RNA, 19 nt, Artificial Sequence
  Description of Artificial Sequence: Synthetic oligonucleotide
  Sense strand starting at position 2320 of SEQ ID NO: 914724
uggguacugcuaggaagaa

SEQ ID NO: 1025831 - RNA, 19 nt, Artificial Sequence
  Description of Artificial Sequence: Synthetic oligonucleotide
  Antisense strand to SEQ ID NO: 1025830
uucuuccuagcaguaccca

SEQ ID NO: 1025832 - RNA, 19 nt, Artificial Sequence
  Description of Artificial Sequence: Synthetic oligonucleotide
  Sense strand starting at position 2321 of SEQ ID NO: 914724
ggguacugcuaggaagaaa

SEQ ID NO: 1025833 - RNA, 19 nt, Artificial Sequence
  Description of Artificial Sequence: Synthetic oligonucleotide
  Antisense strand to SEQ ID NO: 1025832
uuucuuccuagcaguaccc

SEQ ID NO: 1025834 - RNA, 19 nt, Artificial Sequence
  Description of Artificial Sequence: Synthetic oligonucleotide
  Sense strand starting at position 2429 of SEQ ID NO: 914724
ccagcucugcccuagauga

SEQ ID NO: 1025835 - RNA, 19 nt, Artificial Sequence
  Description of Artificial Sequence: Synthetic oligonucleotide
  Antisense strand to SEQ ID NO: 1025834
ucaucuagggcagagcugg

SEQ ID NO: 1025836 - RNA, 19 nt, Artificial Sequence
  Description of Artificial Sequence: Synthetic oligonucleotide
  Sense strand starting at position 2436 of SEQ ID NO: 914724
ugcccuagaugaucuaauu

SEQ ID NO: 1025837 - RNA, 19 nt, Artificial Sequence
  Description of Artificial Sequence: Synthetic oligonucleotide
  Antisense strand to SEQ ID NO: 1025836
aauuagaucaucuagggca

SEQ ID NO: 1025838 - RNA, 19 nt, Artificial Sequence
  Description of Artificial Sequence: Synthetic oligonucleotide
  Sense strand starting at position 2657 of SEQ ID NO: 914724
gguuccugugaaugcuaaa

SEQ ID NO: 1025839 - RNA, 19 nt, Artificial Sequence
  Description of Artificial Sequence: Synthetic oligonucleotide
  Antisense strand to SEQ ID NO: 1025838
uuuagcauucacaggaacc

SEQ ID NO: 1025840 - RNA, 19 nt, Artificial Sequence
  Description of Artificial Sequence: Synthetic oligonucleotide
  Sense strand starting at position 2705 of SEQ ID NO: 914724
ugccuauuugcgugccuaa

SEQ ID NO: 1025841 - RNA, 19 nt, Artificial Sequence
  Description of Artificial Sequence: Synthetic oligonucleotide
  Antisense strand to SEQ ID NO: 1025840
uuaggcacgcaaauaggca

SEQ ID NO: 1025842 - RNA, 19 nt, Artificial Sequence
  Description of Artificial Sequence: Synthetic oligonucleotide
  Sense strand starting at position 2793 of SEQ ID NO: 914724
uguauucuagguggcagau

SEQ ID NO: 1025843 - RNA, 19 nt, Artificial Sequence
  Description of Artificial Sequence: Synthetic oligonucleotide
  Antisense strand to SEQ ID NO: 1025842
aucugccaccuagaauaca

SEQ ID NO: 1025844 - RNA, 19 nt, Artificial Sequence
  Description of Artificial Sequence: Synthetic oligonucleotide
  Sense strand starting at position 2954 of SEQ ID NO: 914724
aagccuauuugggaaagga

SEQ ID NO: 1025845 - RNA, 19 nt, Artificial Sequence
  Description of Artificial Sequence: Synthetic oligonucleotide
  Antisense strand to SEQ ID NO: 1025844
uccuuucccaaauaggcuu

SEQ ID NO: 1025846 - RNA, 19 nt, Artificial Sequence
  Description of Artificial Sequence: Synthetic oligonucleotide
  Sense strand starting at position 3112 of SEQ ID NO: 914724
acuaaaugugcaugagaaa

SEQ ID NO: 1025847 - RNA, 19 nt, Artificial Sequence
  Description of Artificial Sequence: Synthetic oligonucleotide
  Antisense strand to SEQ ID NO: 1025846
uuucucaugcacauuuagu

SEQ ID NO: 1025848 - RNA, 19 nt, Artificial Sequence
  Description of Artificial Sequence: Synthetic oligonucleotide
  Sense strand starting at position 3125 of SEQ ID NO: 914724
gagaaaccgccauggcuua

SEQ ID NO: 1025849 - RNA, 19 nt, Artificial Sequence
  Description of Artificial Sequence: Synthetic oligonucleotide
  Antisense strand to SEQ ID NO: 1025848
uaagccauggcgguuucuc

SEQ ID NO: 1025850 - RNA, 19 nt, Artificial Sequence
  Description of Artificial Sequence: Synthetic oligonucleotide
  Sense strand starting at position 3176 of SEQ ID NO: 914724
aaggguacugcuggaagaa

SEQ ID NO: 1025851 - RNA, 19 nt, Artificial Sequence
  Description of Artificial Sequence: Synthetic oligonucleotide
  Antisense strand to SEQ ID NO: 1025850
uucuuccagcaguacccuu

SEQ ID NO: 1025852 - RNA, 19 nt, Artificial Sequence
  Description of Artificial Sequence: Synthetic oligonucleotide
  Sense strand starting at position 3199 of SEQ ID NO: 914724
ggguguuacagcuacaaag

SEQ ID NO: 1025853 - RNA, 19 nt, Artificial Sequence
  Description of Artificial Sequence: Synthetic oligonucleotide
  Antisense strand to SEQ ID NO: 1025852
cuuuguagcuguaacaccc

SEQ ID NO: 1025854 - RNA, 19 nt, Artificial Sequence
  Description of Artificial Sequence: Synthetic oligonucleotide
  Sense strand starting at position 3415 of SEQ ID NO: 914724
agauguggucccuggguga

SEQ ID NO: 1025855 - RNA, 19 nt, Artificial Sequence
  Description of Artificial Sequence: Synthetic oligonucleotide
  Antisense strand to SEQ ID NO: 1025854
ucacccagggaccacaucu

SEQ ID NO: 1025856 - RNA, 19 nt, Artificial Sequence
  Description of Artificial Sequence: Synthetic oligonucleotide
  Sense strand starting at position 3418 of SEQ ID NO: 914724
uguggucccugggugagau

SEQ ID NO: 1025857 - RNA, 19 nt, Artificial Sequence
  Description of Artificial Sequence: Synthetic oligonucleotide
  Antisense strand to SEQ ID NO: 1025856
aucucacccagggaccaca

SEQ ID NO: 1025858 - RNA, 19 nt, Artificial Sequence
  Description of Artificial Sequence: Synthetic oligonucleotide
  Sense strand starting at position 3419 of SEQ ID NO: 914724
guggucccugggugagaua

SEQ ID NO: 1025859 - RNA, 19 nt, Artificial Sequence
  Description of Artificial Sequence: Synthetic oligonucleotide
  Antisense strand to SEQ ID NO: 1025858
uaucucacccagggaccac

SEQ ID NO: 1025860 - RNA, 19 nt, Artificial Sequence
  Description of Artificial Sequence: Synthetic oligonucleotide
  Sense strand starting at position 3499 of SEQ ID NO: 914724
gauauagcauuugagaaag

SEQ ID NO: 1025861 - RNA, 19 nt, Artificial Sequence
  Description of Artificial Sequence: Synthetic oligonucleotide
  Antisense strand to SEQ ID NO: 1025860
cuuucucaaaugcuauauc

SEQ ID NO: 1025862 - RNA, 19 nt, Artificial Sequence
  Description of Artificial Sequence: Synthetic oligonucleotide
  Sense strand starting at position 3501 of SEQ ID NO: 914724
uauagcauuugagaaaggu

SEQ ID NO: 1025863 - RNA, 19 nt, Artificial Sequence
  Description of Artificial Sequence: Synthetic oligonucleotide
  Antisense strand to SEQ ID NO: 1025862
accuuucucaaaugcuaua

SEQ ID NO: 1025864 - RNA, 19 nt, Artificial Sequence
  Description of Artificial Sequence: Synthetic oligonucleotide
  Sense strand starting at position 3510 of SEQ ID NO: 914724
ugagaaaggucaggagaug

SEQ ID NO: 1025865 - RNA, 19 nt, Artificial Sequence
  Description of Artificial Sequence: Synthetic oligonucleotide
  Antisense strand to SEQ ID NO: 1025864
caucuccugaccuuucuca

SEQ ID NO: 1025866 - RNA, 19 nt, Artificial Sequence
  Description of Artificial Sequence: Synthetic oligonucleotide
  Sense strand starting at position 3521 of SEQ ID NO: 914724
aggagauguuaagaagaug

SEQ ID NO: 1025867 - RNA, 19 nt, Artificial Sequence
  Description of Artificial Sequence: Synthetic oligonucleotide
  Antisense strand to SEQ ID NO: 1025866
caucuucuuaacaucuccu

SEQ ID NO: 1025868 - RNA, 19 nt, Artificial Sequence
  Description of Artificial Sequence: Synthetic oligonucleotide
  Sense strand starting at position 3577 of SEQ ID NO: 914724
agaugauucugccucugga

SEQ ID NO: 1025869 - RNA, 19 nt, Artificial Sequence
  Description of Artificial Sequence: Synthetic oligonucleotide
  Antisense strand to SEQ ID NO: 1025868
uccagaggcagaaucaucu

SEQ ID NO: 1025870 - RNA, 19 nt, Artificial Sequence
  Description of Artificial Sequence: Synthetic oligonucleotide
  Sense strand starting at position 3656 of SEQ ID NO: 914724
gugggacuggcccaacaau

SEQ ID NO: 1025871 - RNA, 19 nt, Artificial Sequence
  Description of Artificial Sequence: Synthetic oligonucleotide
  Antisense strand to SEQ ID NO: 1025870
auuguugggccagucccac

SEQ ID NO: 1025872 - RNA, 19 nt, Artificial Sequence
  Description of Artificial Sequence: Synthetic oligonucleotide
  Sense strand starting at position 3667 of SEQ ID NO: 914724
ccaacaauuccuggugauu

SEQ ID NO: 1025873 - RNA, 19 nt, Artificial Sequence
  Description of Artificial Sequence: Synthetic oligonucleotide
  Antisense strand to SEQ ID NO: 1025872
aaucaccaggaauuguugg

SEQ ID NO: 1025874 - RNA, 19 nt, Artificial Sequence
  Description of Artificial Sequence: Synthetic oligonucleotide
  Sense strand starting at position 3733 of SEQ ID NO: 914724
ugagcaagaauuggugaga

SEQ ID NO: 1025875 - RNA, 19 nt, Artificial Sequence
  Description of Artificial Sequence: Synthetic oligonucleotide
  Antisense strand to SEQ ID NO: 1025874
ucucaccaauucuugcuca

SEQ ID NO: 1025876 - RNA, 19 nt, Artificial Sequence
  Description of Artificial Sequence: Synthetic oligonucleotide
  Sense strand starting at position 3736 of SEQ ID NO: 914724
gcaagaauuggugagaggu

SEQ ID NO: 1025877 - RNA, 19 nt, Artificial Sequence
  Description of Artificial Sequence: Synthetic oligonucleotide
  Antisense strand to SEQ ID NO: 1025876
accucucaccaauucuugc

SEQ ID NO: 1025878 - RNA, 19 nt, Artificial Sequence
  Description of Artificial Sequence: Synthetic oligonucleotide
  Sense strand starting at position 3821 of SEQ ID NO: 914724
acaugaagcugagaaauaa

SEQ ID NO: 1025879 - RNA, 19 nt, Artificial Sequence
  Description of Artificial Sequence: Synthetic oligonucleotide
  Antisense strand to SEQ ID NO: 1025878
uuauuucucagcuucaugu

SEQ ID NO: 1025880 - RNA, 19 nt, Artificial Sequence
  Description of Artificial Sequence: Synthetic oligonucleotide
  Sense strand starting at position 3944 of SEQ ID NO: 914724
ggaaaccauuccugaaaua

SEQ ID NO: 1025881 - RNA, 19 nt, Artificial Sequence
  Description of Artificial Sequence: Synthetic oligonucleotide
  Antisense strand to SEQ ID NO: 1025880
uauuucaggaaugguuucc

SEQ ID NO: 1025882 - RNA, 19 nt, Artificial Sequence
  Description of Artificial Sequence: Synthetic oligonucleotide
  Sense strand starting at position 53 of SEQ ID NO: 914725
gagacuuauuuagauguac

SEQ ID NO: 1025883 - RNA, 19 nt, Artificial Sequence
  Description of Artificial Sequence: Synthetic oligonucleotide
  Antisense strand to SEQ ID NO: 1025882
guacaucuaaauaagucuc

SEQ ID NO: 1025884 - RNA, 19 nt, Artificial Sequence
  Description of Artificial Sequence: Synthetic oligonucleotide
  Sense strand starting at position 135 of SEQ ID NO: 914725
ugugguggugcgguauaua

SEQ ID NO: 1025885 - RNA, 19 nt, Artificial Sequence
  Description of Artificial Sequence: Synthetic oligonucleotide
  Antisense strand to SEQ ID NO: 1025884
uauauaccgcaccaccaca

SEQ ID NO: 1025886 - RNA, 19 nt, Artificial Sequence
  Description of Artificial Sequence: Synthetic oligonucleotide
  Sense strand starting at position 146 of SEQ ID NO: 914725
gguauauaugcgguguguu

SEQ ID NO: 1025887 - RNA, 19 nt, Artificial Sequence
  Description of Artificial Sequence: Synthetic oligonucleotide
  Antisense strand to SEQ ID NO: 1025886
aacacaccgcauauauacc

SEQ ID NO: 1025888 - RNA, 19 nt, Artificial Sequence
  Description of Artificial Sequence: Synthetic oligonucleotide
  Sense strand starting at position 183 of SEQ ID NO: 914725
agguaugauguauauguau

SEQ ID NO: 1025889 - RNA, 19 nt, Artificial Sequence
  Description of Artificial Sequence: Synthetic oligonucleotide
  Antisense strand to SEQ ID NO: 1025888
auacauauacaucauaccu

SEQ ID NO: 1025890 - RNA, 19 nt, Artificial Sequence
  Description of Artificial Sequence: Synthetic oligonucleotide
  Sense strand starting at position 241 of SEQ ID NO: 914725
gguauaugucuguaugugu

SEQ ID NO: 1025891 - RNA, 19 nt, Artificial Sequence
  Description of Artificial Sequence: Synthetic oligonucleotide
  Antisense strand to SEQ ID NO: 1025890
acacauacagacauauacc

SEQ ID NO: 1025892 - RNA, 19 nt, Artificial Sequence
  Description of Artificial Sequence: Synthetic oligonucleotide
  Sense strand starting at position 256 of SEQ ID NO: 914725
guguuugugguguugguga

SEQ ID NO: 1025893 - RNA, 19 nt, Artificial Sequence
  Description of Artificial Sequence: Synthetic oligonucleotide
  Antisense strand to SEQ ID NO: 1025892
ucaccaacaccacaaacac

SEQ ID NO: 1025894 - RNA, 19 nt, Artificial Sequence
  Description of Artificial Sequence: Synthetic oligonucleotide
  Sense strand starting at position 324 of SEQ ID NO: 914725
ggguguaggagccagauau

SEQ ID NO: 1025895 - RNA, 19 nt, Artificial Sequence
  Description of Artificial Sequence: Synthetic oligonucleotide
  Antisense strand to SEQ ID NO: 1025894
auaucuggcuccuacaccc

SEQ ID NO: 1025896 - RNA, 19 nt, Artificial Sequence
  Description of Artificial Sequence: Synthetic oligonucleotide
  Sense strand starting at position 335 of SEQ ID NO: 914725
ccagauaucuaggucuccu

SEQ ID NO: 1025897 - RNA, 19 nt, Artificial Sequence
  Description of Artificial Sequence: Synthetic oligonucleotide
  Antisense strand to SEQ ID NO: 1025896
aggagaccuagauaucugg

SEQ ID NO: 1025898 - RNA, 19 nt, Artificial Sequence
  Description of Artificial Sequence: Synthetic oligonucleotide
  Sense strand starting at position 347 of SEQ ID NO: 914725
gucuccuagccagggauaa

SEQ ID NO: 1025899 - RNA, 19 nt, Artificial Sequence
  Description of Artificial Sequence: Synthetic oligonucleotide
  Antisense strand to SEQ ID NO: 1025898
uuaucccuggcuaggagac

SEQ ID NO: 1025900 - RNA, 19 nt, Artificial Sequence
  Description of Artificial Sequence: Synthetic oligonucleotide
  Sense strand starting at position 572 of SEQ ID NO: 914725
gccugagaugcccacugau

SEQ ID NO: 1025901 - RNA, 19 nt, Artificial Sequence
  Description of Artificial Sequence: Synthetic oligonucleotide
  Antisense strand to SEQ ID NO: 1025900
aucagugggcaucucaggc

SEQ ID NO: 1025902 - RNA, 19 nt, Artificial Sequence
  Description of Artificial Sequence: Synthetic oligonucleotide
  Sense strand starting at position 575 of SEQ ID NO: 914725
ugagaugcccacugaucca

SEQ ID NO: 1025903 - RNA, 19 nt, Artificial Sequence
  Description of Artificial Sequence: Synthetic oligonucleotide
  Antisense strand to SEQ ID NO: 1025902
uggaucagugggcaucuca

SEQ ID NO: 1025904 - RNA, 19 nt, Artificial Sequence
  Description of Artificial Sequence: Synthetic oligonucleotide
  Sense strand starting at position 1362 of SEQ ID NO: 914725
ccgaucuccuuguuuacau

SEQ ID NO: 1025905 - RNA, 19 nt, Artificial Sequence
  Description of Artificial Sequence: Synthetic oligonucleotide
  Antisense strand to SEQ ID NO: 1025904
auguaaacaaggagaucgg

SEQ ID NO: 1025906 - RNA, 19 nt, Artificial Sequence
  Description of Artificial Sequence: Synthetic oligonucleotide
  Sense strand starting at position 2051 of SEQ ID NO: 914725
ggugucucucugcaauagu

SEQ ID NO: 1025907 - RNA, 19 nt, Artificial Sequence
  Description of Artificial Sequence: Synthetic oligonucleotide
  Antisense strand to SEQ ID NO: 1025906
acuauugcagagagacacc

SEQ ID NO: 1025908 - RNA, 19 nt, Artificial Sequence
  Description of Artificial Sequence: Synthetic oligonucleotide
  Sense strand starting at position 2054 of SEQ ID NO: 914725
gucucucugcaauaguaaa

SEQ ID NO: 1025909 - RNA, 19 nt, Artificial Sequence
  Description of Artificial Sequence: Synthetic oligonucleotide
  Antisense strand to SEQ ID NO: 1025908
uuuacuauugcagagagac

SEQ ID NO: 1025910 - RNA, 19 nt, Artificial Sequence
  Description of Artificial Sequence: Synthetic oligonucleotide
  Sense strand starting at position 2134 of SEQ ID NO: 914725
uugggagccuugguaauua

SEQ ID NO: 1025911 - RNA, 19 nt, Artificial Sequence
  Description of Artificial Sequence: Synthetic oligonucleotide
  Antisense strand to SEQ ID NO: 1025910
uaauuaccaaggcucccaa

SEQ ID NO: 1025912 - RNA, 19 nt, Artificial Sequence
  Description of Artificial Sequence: Synthetic oligonucleotide
  Sense strand starting at position 2172 of SEQ ID NO: 914725
gcaugaauggcugugucgu

SEQ ID NO: 1025913 - RNA, 19 nt, Artificial Sequence
  Description of Artificial Sequence: Synthetic oligonucleotide
  Antisense strand to SEQ ID NO: 1025912
acgacacagccauucaugc

SEQ ID NO: 1025914 - RNA, 19 nt, Artificial Sequence
  Description of Artificial Sequence: Synthetic oligonucleotide
  Sense strand starting at position 2521 of SEQ ID NO: 914725
augggaggcuuagcucaua

SEQ ID NO: 1025915 - RNA, 19 nt, Artificial Sequence
  Description of Artificial Sequence: Synthetic oligonucleotide
  Antisense strand to SEQ ID NO: 1025914
uaugagcuaagccucccau

SEQ ID NO: 1025916 - RNA, 19 nt, Artificial Sequence
  Description of Artificial Sequence: Synthetic oligonucleotide
  Sense strand starting at position 2540 of SEQ ID NO: 914725
gugagugcucaagaaauug

SEQ ID NO: 1025917 - RNA, 19 nt, Artificial Sequence
  Description of Artificial Sequence: Synthetic oligonucleotide
  Antisense strand to SEQ ID NO: 1025916
caauuucuugagcacucac

SEQ ID NO: 1025918 - RNA, 19 nt, Artificial Sequence
  Description of Artificial Sequence: Synthetic oligonucleotide
  Sense strand starting at position 2548 of SEQ ID NO: 914725
ucaagaaauuggcucuuac

SEQ ID NO: 1025919 - RNA, 19 nt, Artificial Sequence
  Description of Artificial Sequence: Synthetic oligonucleotide
  Antisense strand to SEQ ID NO: 1025918
guaagagccaauuucuuga

SEQ ID NO: 1025920 - RNA, 19 nt, Artificial Sequence
  Description of Artificial Sequence: Synthetic oligonucleotide
  Sense strand starting at position 2702 of SEQ ID NO: 914725
ugagaaaggcugugauugu

SEQ ID NO: 1025921 - RNA, 19 nt, Artificial Sequence
  Description of Artificial Sequence: Synthetic oligonucleotide
  Antisense strand to SEQ ID NO: 1025920
acaaucacagccuuucuca

SEQ ID NO: 1025922 - RNA, 19 nt, Artificial Sequence
  Description of Artificial Sequence: Synthetic oligonucleotide
  Sense strand starting at position 2706 of SEQ ID NO: 914725
aaaggcugugauuguccaa

SEQ ID NO: 1025923 - RNA, 19 nt, Artificial Sequence
  Description of Artificial Sequence: Synthetic oligonucleotide
  Antisense strand to SEQ ID NO: 1025922
uuggacaaucacagccuuu

SEQ ID NO: 1025924 - RNA, 19 nt, Artificial Sequence
  Description of Artificial Sequence: Synthetic oligonucleotide
  Sense strand starting at position 2738 of SEQ ID NO: 914725
cacggagaguuccuuacaa

SEQ ID NO: 1025925 - RNA, 19 nt, Artificial Sequence
  Description of Artificial Sequence: Synthetic oligonucleotide
  Antisense strand to SEQ ID NO: 1025924
uuguaaggaacucuccgug

SEQ ID NO: 1025926 - RNA, 19 nt, Artificial Sequence
  Description of Artificial Sequence: Synthetic oligonucleotide
  Sense strand starting at position 2740 of SEQ ID NO: 914725
cggagaguuccuuacaaac

SEQ ID NO: 1025927 - RNA, 19 nt, Artificial Sequence
  Description of Artificial Sequence: Synthetic oligonucleotide
  Antisense strand to SEQ ID NO: 1025926
guuuguaaggaacucuccg

SEQ ID NO: 1025928 - RNA, 19 nt, Artificial Sequence
  Description of Artificial Sequence: Synthetic oligonucleotide
  Sense strand starting at position 2775 of SEQ ID NO: 914725
uggguacugcuaggaagaa

SEQ ID NO: 1025929 - RNA, 19 nt, Artificial Sequence
  Description of Artificial Sequence: Synthetic oligonucleotide
  Antisense strand to SEQ ID NO: 1025928
uucuuccuagcaguaccca

SEQ ID NO: 1025930 - RNA, 19 nt, Artificial Sequence
  Description of Artificial Sequence: Synthetic oligonucleotide
  Sense strand starting at position 2884 of SEQ ID NO: 914725
ccagcucugcccuagauga

SEQ ID NO: 1025931 - RNA, 19 nt, Artificial Sequence
  Description of Artificial Sequence: Synthetic oligonucleotide
  Antisense strand to SEQ ID NO: 1025930
ucaucuagggcagagcugg

SEQ ID NO: 1025932 - RNA, 19 nt, Artificial Sequence
  Description of Artificial Sequence: Synthetic oligonucleotide
  Sense strand starting at position 2891 of SEQ ID NO: 914725
ugcccuagaugaucuaauu

SEQ ID NO: 1025933 - RNA, 19 nt, Artificial Sequence
  Description of Artificial Sequence: Synthetic oligonucleotide
  Antisense strand to SEQ ID NO: 1025932
aauuagaucaucuagggca

SEQ ID NO: 1025934 - RNA, 19 nt, Artificial Sequence
  Description of Artificial Sequence: Synthetic oligonucleotide
  Sense strand starting at position 3112 of SEQ ID NO: 914725
gguuccugugaaugcuaaa

SEQ ID NO: 1025935 - RNA, 19 nt, Artificial Sequence
  Description of Artificial Sequence: Synthetic oligonucleotide
  Antisense strand to SEQ ID NO: 1025934
uuuagcauucacaggaacc

SEQ ID NO: 1025936 - RNA, 19 nt, Artificial Sequence
  Description of Artificial Sequence: Synthetic oligonucleotide
  Sense strand starting at position 3160 of SEQ ID NO: 914725
ugccuauuugcgugccuaa

SEQ ID NO: 1025937 - RNA, 19 nt, Artificial Sequence
  Description of Artificial Sequence: Synthetic oligonucleotide
  Antisense strand to SEQ ID NO: 1025936
uuaggcacgcaaauaggca

SEQ ID NO: 1025938 - RNA, 19 nt, Artificial Sequence
  Description of Artificial Sequence: Synthetic oligonucleotide
  Sense strand starting at position 3248 of SEQ ID NO: 914725
uguauucuagguggcagau

SEQ ID NO: 1025939 - RNA, 19 nt, Artificial Sequence
  Description of Artificial Sequence: Synthetic oligonucleotide
  Antisense strand to SEQ ID NO: 1025938
aucugccaccuagaauaca

SEQ ID NO: 1025940 - RNA, 19 nt, Artificial Sequence
  Description of Artificial Sequence: Synthetic oligonucleotide
  Sense strand starting at position 3409 of SEQ ID NO: 914725
aagccuauuugggaaagga

SEQ ID NO: 1025941 - RNA, 19 nt, Artificial Sequence
  Description of Artificial Sequence: Synthetic oligonucleotide
  Antisense strand to SEQ ID NO: 1025940
uccuuucccaaauaggcuu

SEQ ID NO: 1025942 - RNA, 19 nt, Artificial Sequence
  Description of Artificial Sequence: Synthetic oligonucleotide
  Sense strand starting at position 3567 of SEQ ID NO: 914725
acuaaaugugcaugagaaa

SEQ ID NO: 1025943 - RNA, 19 nt, Artificial Sequence
  Description of Artificial Sequence: Synthetic oligonucleotide
  Antisense strand to SEQ ID NO: 1025942
uuucucaugcacauuuagu

SEQ ID NO: 1025944 - RNA, 19 nt, Artificial Sequence
  Description of Artificial Sequence: Synthetic oligonucleotide
  Sense strand starting at position 3580 of SEQ ID NO: 914725
gagaaaccgccauggcuua

SEQ ID NO: 1025945 - RNA, 19 nt, Artificial Sequence
  Description of Artificial Sequence: Synthetic oligonucleotide
  Antisense strand to SEQ ID NO: 1025944
uaagccauggcgguuucuc

SEQ ID NO: 1025946 - RNA, 19 nt, Artificial Sequence
  Description of Artificial Sequence: Synthetic oligonucleotide
  Sense strand starting at position 3631 of SEQ ID NO: 914725
aaggguacugcuggaagaa

SEQ ID NO: 1025947 - RNA, 19 nt, Artificial Sequence
  Description of Artificial Sequence: Synthetic oligonucleotide
  Antisense strand to SEQ ID NO: 1025946
uucuuccagcaguacccuu

SEQ ID NO: 1025948 - RNA, 19 nt, Artificial Sequence
  Description of Artificial Sequence: Synthetic oligonucleotide
  Sense strand starting at position 3654 of SEQ ID NO: 914725
ggguguuacagcuacaaag

SEQ ID NO: 1025949 - RNA, 19 nt, Artificial Sequence
  Description of Artificial Sequence: Synthetic oligonucleotide
  Antisense strand to SEQ ID NO: 1025948
cuuuguagcuguaacaccc

SEQ ID NO: 1025950 - RNA, 19 nt, Artificial Sequence
  Description of Artificial Sequence: Synthetic oligonucleotide
  Sense strand starting at position 3870 of SEQ ID NO: 914725
agauguggucccuggguga

SEQ ID NO: 1025951 - RNA, 19 nt, Artificial Sequence
  Description of Artificial Sequence: Synthetic oligonucleotide
  Antisense strand to SEQ ID NO: 1025950
ucacccagggaccacaucu

SEQ ID NO: 1025952 - RNA, 19 nt, Artificial Sequence
  Description of Artificial Sequence: Synthetic oligonucleotide
  Sense strand starting at position 3873 of SEQ ID NO: 914725
uguggucccugggugagau

SEQ ID NO: 1025953 - RNA, 19 nt, Artificial Sequence
  Description of Artificial Sequence: Synthetic oligonucleotide
  Antisense strand to SEQ ID NO: 1025952
aucucacccagggaccaca

SEQ ID NO: 1025954 - RNA, 19 nt, Artificial Sequence
  Description of Artificial Sequence: Synthetic oligonucleotide
  Sense strand starting at position 3874 of SEQ ID NO: 914725
guggucccugggugagaua

SEQ ID NO: 1025955 - RNA, 19 nt, Artificial Sequence
  Description of Artificial Sequence: Synthetic oligonucleotide
  Antisense strand to SEQ ID NO: 1025954
uaucucacccagggaccac

SEQ ID NO: 1025956 - RNA, 19 nt, Artificial Sequence
  Description of Artificial Sequence: Synthetic oligonucleotide
  Sense strand starting at position 3954 of SEQ ID NO: 914725
gauauagcauuugagaaag

SEQ ID NO: 1025957 - RNA, 19 nt, Artificial Sequence
  Description of Artificial Sequence: Synthetic oligonucleotide
  Antisense strand to SEQ ID NO: 1025956
cuuucucaaaugcuauauc

SEQ ID NO: 1025958 - RNA, 19 nt, Artificial Sequence
  Description of Artificial Sequence: Synthetic oligonucleotide
  Sense strand starting at position 3956 of SEQ ID NO: 914725
uauagcauuugagaaaggu

SEQ ID NO: 1025959 - RNA, 19 nt, Artificial Sequence
  Description of Artificial Sequence: Synthetic oligonucleotide
  Antisense strand to SEQ ID NO: 1025958
accuuucucaaaugcuaua

SEQ ID NO: 1025960 - RNA, 19 nt, Artificial Sequence
  Description of Artificial Sequence: Synthetic oligonucleotide
  Sense strand starting at position 3976 of SEQ ID NO: 914725
aggagauguuaagaagaug

SEQ ID NO: 1025961 - RNA, 19 nt, Artificial Sequence
  Description of Artificial Sequence: Synthetic oligonucleotide
  Antisense strand to SEQ ID NO: 1025960
caucuucuuaacaucuccu

SEQ ID NO: 1025962 - RNA, 19 nt, Artificial Sequence
  Description of Artificial Sequence: Synthetic oligonucleotide
  Sense strand starting at position 53 of SEQ ID NO: 914726
gagacuuauuuagauguac

SEQ ID NO: 1025963 - RNA, 19 nt, Artificial Sequence
  Description of Artificial Sequence: Synthetic oligonucleotide
  Antisense strand to SEQ ID NO: 1025962
guacaucuaaauaagucuc

SEQ ID NO: 1025964 - RNA, 19 nt, Artificial Sequence
  Description of Artificial Sequence: Synthetic oligonucleotide
  Sense strand starting at position 135 of SEQ ID NO: 914726
ugugguggugcgguauaua

SEQ ID NO: 1025965 - RNA, 19 nt, Artificial Sequence
  Description of Artificial Sequence: Synthetic oligonucleotide
  Antisense strand to SEQ ID NO: 1025964
uauauaccgcaccaccaca

SEQ ID NO: 1025966 - RNA, 19 nt, Artificial Sequence
  Description of Artificial Sequence: Synthetic oligonucleotide
  Sense strand starting at position 146 of SEQ ID NO: 914726
gguauauaugcgguguguu

SEQ ID NO: 1025967 - RNA, 19 nt, Artificial Sequence
  Description of Artificial Sequence: Synthetic oligonucleotide
  Antisense strand to SEQ ID NO: 1025966
aacacaccgcauauauacc

SEQ ID NO: 1025968 - RNA, 19 nt, Artificial Sequence
  Description of Artificial Sequence: Synthetic oligonucleotide
  Sense strand starting at position 183 of SEQ ID NO: 914726
agguaugauguauauguau

SEQ ID NO: 1025969 - RNA, 19 nt, Artificial Sequence
  Description of Artificial Sequence: Synthetic oligonucleotide
  Antisense strand to SEQ ID NO: 1025968
auacauauacaucauaccu

SEQ ID NO: 1025970 - RNA, 19 nt, Artificial Sequence
  Description of Artificial Sequence: Synthetic oligonucleotide
  Sense strand starting at position 241 of SEQ ID NO: 914726
gguauaugucuguaugugu

SEQ ID NO: 1025971 - RNA, 19 nt, Artificial Sequence
  Description of Artificial Sequence: Synthetic oligonucleotide
  Antisense strand to SEQ ID NO: 1025970
acacauacagacauauacc

SEQ ID NO: 1025972 - RNA, 19 nt, Artificial Sequence
  Description of Artificial Sequence: Synthetic oligonucleotide
  Sense strand starting at position 256 of SEQ ID NO: 914726
guguuugugguguugguga

SEQ ID NO: 1025973 - RNA, 19 nt, Artificial Sequence
  Description of Artificial Sequence: Synthetic oligonucleotide
  Antisense strand to SEQ ID NO: 1025972
ucaccaacaccacaaacac

SEQ ID NO: 1025974 - RNA, 19 nt, Artificial Sequence
  Description of Artificial Sequence: Synthetic oligonucleotide
  Sense strand starting at position 324 of SEQ ID NO: 914726
ggguguaggagccagauau

SEQ ID NO: 1025975 - RNA, 19 nt, Artificial Sequence
  Description of Artificial Sequence: Synthetic oligonucleotide
  Antisense strand to SEQ ID NO: 1025974
auaucuggcuccuacaccc

SEQ ID NO: 1025976 - RNA, 19 nt, Artificial Sequence
  Description of Artificial Sequence: Synthetic oligonucleotide
  Sense strand starting at position 335 of SEQ ID NO: 914726
ccagauaucuaggucuccu

SEQ ID NO: 1025977 - RNA, 19 nt, Artificial Sequence
  Description of Artificial Sequence: Synthetic oligonucleotide
  Antisense strand to SEQ ID NO: 1025976
aggagaccuagauaucugg

SEQ ID NO: 1025978 - RNA, 19 nt, Artificial Sequence
  Description of Artificial Sequence: Synthetic oligonucleotide
  Sense strand starting at position 347 of SEQ ID NO: 914726
gucuccuagccagggauaa

SEQ ID NO: 1025979 - RNA, 19 nt, Artificial Sequence
  Description of Artificial Sequence: Synthetic oligonucleotide
  Antisense strand to SEQ ID NO: 1025978
uuaucccuggcuaggagac

SEQ ID NO: 1025980 - RNA, 19 nt, Artificial Sequence
  Description of Artificial Sequence: Synthetic oligonucleotide
  Sense strand starting at position 572 of SEQ ID NO: 914726
gccugagaugcccacugau

SEQ ID NO: 1025981 - RNA, 19 nt, Artificial Sequence
  Description of Artificial Sequence: Synthetic oligonucleotide
  Antisense strand to SEQ ID NO: 1025980
aucagugggcaucucaggc

SEQ ID NO: 1025982 - RNA, 19 nt, Artificial Sequence
  Description of Artificial Sequence: Synthetic oligonucleotide
  Sense strand starting at position 575 of SEQ ID NO: 914726
ugagaugcccacugaucca

SEQ ID NO: 1025983 - RNA, 19 nt, Artificial Sequence
  Description of Artificial Sequence: Synthetic oligonucleotide
  Antisense strand to SEQ ID NO: 1025982
uggaucagugggcaucuca

SEQ ID NO: 1025984 - RNA, 19 nt, Artificial Sequence
  Description of Artificial Sequence: Synthetic oligonucleotide
  Sense strand starting at position 1362 of SEQ ID NO: 914726
ccgaucuccuuguuuacau

SEQ ID NO: 1025985 - RNA, 19 nt, Artificial Sequence
  Description of Artificial Sequence: Synthetic oligonucleotide
  Antisense strand to SEQ ID NO: 1025984
auguaaacaaggagaucgg

SEQ ID NO: 1025986 - RNA, 19 nt, Artificial Sequence
  Description of Artificial Sequence: Synthetic oligonucleotide
  Sense strand starting at position 2051 of SEQ ID NO: 914726
ggugucucucugcaauagu

SEQ ID NO: 1025987 - RNA, 19 nt, Artificial Sequence
  Description of Artificial Sequence: Synthetic oligonucleotide
  Antisense strand to SEQ ID NO: 1025986
acuauugcagagagacacc

SEQ ID NO: 1025988 - RNA, 19 nt, Artificial Sequence
  Description of Artificial Sequence: Synthetic oligonucleotide
  Sense strand starting at position 2054 of SEQ ID NO: 914726
gucucucugcaauaguaaa

SEQ ID NO: 1025989 - RNA, 19 nt, Artificial Sequence
  Description of Artificial Sequence: Synthetic oligonucleotide
  Antisense strand to SEQ ID NO: 1025988
uuuacuauugcagagagac

SEQ ID NO: 1025990 - RNA, 19 nt, Artificial Sequence
  Description of Artificial Sequence: Synthetic oligonucleotide
  Sense strand starting at position 2134 of SEQ ID NO: 914726
uugggagccuugguaauua

SEQ ID NO: 1025991 - RNA, 19 nt, Artificial Sequence
  Description of Artificial Sequence: Synthetic oligonucleotide
  Antisense strand to SEQ ID NO: 1025990
uaauuaccaaggcucccaa

SEQ ID NO: 1025992 - RNA, 19 nt, Artificial Sequence
  Description of Artificial Sequence: Synthetic oligonucleotide
  Sense strand starting at position 2172 of SEQ ID NO: 914726
gcaugaauggcugugucgu

SEQ ID NO: 1025993 - RNA, 19 nt, Artificial Sequence
  Description of Artificial Sequence: Synthetic oligonucleotide
  Antisense strand to SEQ ID NO: 1025992
acgacacagccauucaugc

SEQ ID NO: 1025994 - RNA, 19 nt, Artificial Sequence
  Description of Artificial Sequence: Synthetic oligonucleotide
  Sense strand starting at position 2521 of SEQ ID NO: 914726
augggaggcuuagcucaua

SEQ ID NO: 1025995 - RNA, 19 nt, Artificial Sequence
  Description of Artificial Sequence: Synthetic oligonucleotide
  Antisense strand to SEQ ID NO: 1025994
uaugagcuaagccucccau

SEQ ID NO: 1025996 - RNA, 19 nt, Artificial Sequence
  Description of Artificial Sequence: Synthetic oligonucleotide
  Sense strand starting at position 2540 of SEQ ID NO: 914726
gugagugcucaagaaauug

SEQ ID NO: 1025997 - RNA, 19 nt, Artificial Sequence
  Description of Artificial Sequence: Synthetic oligonucleotide
  Antisense strand to SEQ ID NO: 1025996
caauuucuugagcacucac

SEQ ID NO: 1025998 - RNA, 19 nt, Artificial Sequence
  Description of Artificial Sequence: Synthetic oligonucleotide
  Sense strand starting at position 2548 of SEQ ID NO: 914726
ucaagaaauuggcucuuac

SEQ ID NO: 1025999 - RNA, 19 nt, Artificial Sequence
  Description of Artificial Sequence: Synthetic oligonucleotide
  Antisense strand to SEQ ID NO: 1025998
guaagagccaauuucuuga

SEQ ID NO: 1026000 - RNA, 19 nt, Artificial Sequence
  Description of Artificial Sequence: Synthetic oligonucleotide
  Sense strand starting at position 2702 of SEQ ID NO: 914726
ugagaaaggcugugauugu

SEQ ID NO: 1026001 - RNA, 19 nt, Artificial Sequence
  Description of Artificial Sequence: Synthetic oligonucleotide
  Antisense strand to SEQ ID NO: 1026000
acaaucacagccuuucuca

SEQ ID NO: 1026002 - RNA, 19 nt, Artificial Sequence
  Description of Artificial Sequence: Synthetic oligonucleotide
  Sense strand starting at position 2706 of SEQ ID NO: 914726
aaaggcugugauuguccaa

SEQ ID NO: 1026003 - RNA, 19 nt, Artificial Sequence
  Description of Artificial Sequence: Synthetic oligonucleotide
  Antisense strand to SEQ ID NO: 1026002
uuggacaaucacagccuuu

SEQ ID NO: 1026004 - RNA, 19 nt, Artificial Sequence
  Description of Artificial Sequence: Synthetic oligonucleotide
  Sense strand starting at position 2738 of SEQ ID NO: 914726
cacggagaguuccuuacaa

SEQ ID NO: 1026005 - RNA, 19 nt, Artificial Sequence
  Description of Artificial Sequence: Synthetic oligonucleotide
  Antisense strand to SEQ ID NO: 1026004
uuguaaggaacucuccgug

SEQ ID NO: 1026006 - RNA, 19 nt, Artificial Sequence
  Description of Artificial Sequence: Synthetic oligonucleotide
  Sense strand starting at position 2740 of SEQ ID NO: 914726
cggagaguuccuuacaaac

SEQ ID NO: 1026007 - RNA, 19 nt, Artificial Sequence
  Description of Artificial Sequence: Synthetic oligonucleotide
  Antisense strand to SEQ ID NO: 1026006
guuuguaaggaacucuccg

SEQ ID NO: 1026008 - RNA, 19 nt, Artificial Sequence
  Description of Artificial Sequence: Synthetic oligonucleotide
  Sense strand starting at position 2775 of SEQ ID NO: 914726
uggguacugcuaggaagaa

SEQ ID NO: 1026009 - RNA, 19 nt, Artificial Sequence
  Description of Artificial Sequence: Synthetic oligonucleotide
  Antisense strand to SEQ ID NO: 1026008
uucuuccuagcaguaccca

SEQ ID NO: 1026010 - RNA, 19 nt, Artificial Sequence
  Description of Artificial Sequence: Synthetic oligonucleotide
  Sense strand starting at position 2884 of SEQ ID NO: 914726
ccagcucugcccuagauga

SEQ ID NO: 1026011 - RNA, 19 nt, Artificial Sequence
  Description of Artificial Sequence: Synthetic oligonucleotide
  Antisense strand to SEQ ID NO: 1026010
ucaucuagggcagagcugg

SEQ ID NO: 1026012 - RNA, 19 nt, Artificial Sequence
  Description of Artificial Sequence: Synthetic oligonucleotide
  Sense strand starting at position 2891 of SEQ ID NO: 914726
ugcccuagaugaucuaauu

SEQ ID NO: 1026013 - RNA, 19 nt, Artificial Sequence
  Description of Artificial Sequence: Synthetic oligonucleotide
  Antisense strand to SEQ ID NO: 1026012
aauuagaucaucuagggca

SEQ ID NO: 1026014 - RNA, 19 nt, Artificial Sequence
  Description of Artificial Sequence: Synthetic oligonucleotide
  Sense strand starting at position 3112 of SEQ ID NO: 914726
gguuccugugaaugcuaaa

SEQ ID NO: 1026015 - RNA, 19 nt, Artificial Sequence
  Description of Artificial Sequence: Synthetic oligonucleotide
  Antisense strand to SEQ ID NO: 1026014
uuuagcauucacaggaacc

SEQ ID NO: 1026016 - RNA, 19 nt, Artificial Sequence
  Description of Artificial Sequence: Synthetic oligonucleotide
  Sense strand starting at position 3160 of SEQ ID NO: 914726
ugccuauuugcgugccuaa

SEQ ID NO: 1026017 - RNA, 19 nt, Artificial Sequence
  Description of Artificial Sequence: Synthetic oligonucleotide
  Antisense strand to SEQ ID NO: 1026016
uuaggcacgcaaauaggca

SEQ ID NO: 1026018 - RNA, 19 nt, Artificial Sequence
  Description of Artificial Sequence: Synthetic oligonucleotide
  Sense strand starting at position 3248 of SEQ ID NO: 914726
uguauucuagguggcagau

SEQ ID NO: 1026019 - RNA, 19 nt, Artificial Sequence
  Description of Artificial Sequence: Synthetic oligonucleotide
  Antisense strand to SEQ ID NO: 1026018
aucugccaccuagaauaca

SEQ ID NO: 1026020 - RNA, 19 nt, Artificial Sequence
  Description of Artificial Sequence: Synthetic oligonucleotide
  Sense strand starting at position 3409 of SEQ ID NO: 914726
aagccuauuugggaaagga

SEQ ID NO: 1026021 - RNA, 19 nt, Artificial Sequence
  Description of Artificial Sequence: Synthetic oligonucleotide
  Antisense strand to SEQ ID NO: 1026020
uccuuucccaaauaggcuu

SEQ ID NO: 1026022 - RNA, 19 nt, Artificial Sequence
  Description of Artificial Sequence: Synthetic oligonucleotide
  Sense strand starting at position 3567 of SEQ ID NO: 914726
acuaaaugugcaugagaaa

SEQ ID NO: 1026023 - RNA, 19 nt, Artificial Sequence
  Description of Artificial Sequence: Synthetic oligonucleotide
  Antisense strand to SEQ ID NO: 1026022
uuucucaugcacauuuagu

SEQ ID NO: 1026024 - RNA, 19 nt, Artificial Sequence
  Description of Artificial Sequence: Synthetic oligonucleotide
  Sense strand starting at position 3580 of SEQ ID NO: 914726
gagaaaccgccauggcuua

SEQ ID NO: 1026025 - RNA, 19 nt, Artificial Sequence
  Description of Artificial Sequence: Synthetic oligonucleotide
  Antisense strand to SEQ ID NO: 1026024
uaagccauggcgguuucuc

SEQ ID NO: 1026026 - RNA, 19 nt, Artificial Sequence
  Description of Artificial Sequence: Synthetic oligonucleotide
  Sense strand starting at position 3631 of SEQ ID NO: 914726
aaggguacugcuggaagaa

SEQ ID NO: 1026027 - RNA, 19 nt, Artificial Sequence
  Description of Artificial Sequence: Synthetic oligonucleotide
  Antisense strand to SEQ ID NO: 1026026
uucuuccagcaguacccuu

SEQ ID NO: 1026028 - RNA, 19 nt, Artificial Sequence
  Description of Artificial Sequence: Synthetic oligonucleotide
  Sense strand starting at position 3654 of SEQ ID NO: 914726
ggguguuacagcuacaaag

SEQ ID NO: 1026029 - RNA, 19 nt, Artificial Sequence
  Description of Artificial Sequence: Synthetic oligonucleotide
  Antisense strand to SEQ ID NO: 1026028
cuuuguagcuguaacaccc

SEQ ID NO: 1026030 - RNA, 19 nt, Artificial Sequence
  Description of Artificial Sequence: Synthetic oligonucleotide
  Sense strand starting at position 3870 of SEQ ID NO: 914726
agauguggucccuggguga

SEQ ID NO: 1026031 - RNA, 19 nt, Artificial Sequence
  Description of Artificial Sequence: Synthetic oligonucleotide
  Antisense strand to SEQ ID NO: 1026030
ucacccagggaccacaucu

SEQ ID NO: 1026032 - RNA, 19 nt, Artificial Sequence
  Description of Artificial Sequence: Synthetic oligonucleotide
  Sense strand starting at position 3873 of SEQ ID NO: 914726
uguggucccugggugagau

SEQ ID NO: 1026033 - RNA, 19 nt, Artificial Sequence
  Description of Artificial Sequence: Synthetic oligonucleotide
  Antisense strand to SEQ ID NO: 1026032
aucucacccagggaccaca

SEQ ID NO: 1026034 - RNA, 19 nt, Artificial Sequence
  Description of Artificial Sequence: Synthetic oligonucleotide
  Sense strand starting at position 3874 of SEQ ID NO: 914726
guggucccugggugagaua

SEQ ID NO: 1026035 - RNA, 19 nt, Artificial Sequence
  Description of Artificial Sequence: Synthetic oligonucleotide
  Antisense strand to SEQ ID NO: 1026034
uaucucacccagggaccac

SEQ ID NO: 1026036 - RNA, 19 nt, Artificial Sequence
  Description of Artificial Sequence: Synthetic oligonucleotide
  Sense strand starting at position 3954 of SEQ ID NO: 914726
gauauagcauuugagaaag

SEQ ID NO: 1026037 - RNA, 19 nt, Artificial Sequence
  Description of Artificial Sequence: Synthetic oligonucleotide
  Antisense strand to SEQ ID NO: 1026036
cuuucucaaaugcuauauc

SEQ ID NO: 1026038 - RNA, 19 nt, Artificial Sequence
  Description of Artificial Sequence: Synthetic oligonucleotide
  Sense strand starting at position 3956 of SEQ ID NO: 914726
uauagcauuugagaaaggu

SEQ ID NO: 1026039 - RNA, 19 nt, Artificial Sequence
  Description of Artificial Sequence: Synthetic oligonucleotide
  Antisense strand to SEQ ID NO: 1026038
accuuucucaaaugcuaua

SEQ ID NO: 1026040 - RNA, 19 nt, Artificial Sequence
  Description of Artificial Sequence: Synthetic oligonucleotide
  Sense strand starting at position 3976 of SEQ ID NO: 914726
aggagauguuaagaagaug

SEQ ID NO: 1026041 - RNA, 19 nt, Artificial Sequence
  Description of Artificial Sequence: Synthetic oligonucleotide
  Antisense strand to SEQ ID NO: 1026040
caucuucuuaacaucuccu

SEQ ID NO: 1026042 - RNA, 19 nt, Artificial Sequence
  Description of Artificial Sequence: Synthetic oligonucleotide
  Sense strand starting at position 8 of SEQ ID NO: 914727
aggaucauuucuuaagcuu

SEQ ID NO: 1026043 - RNA, 19 nt, Artificial Sequence
  Description of Artificial Sequence: Synthetic oligonucleotide
  Antisense strand to SEQ ID NO: 1026042
aagcuuaagaaaugauccu

SEQ ID NO: 1026044 - RNA, 19 nt, Artificial Sequence
  Description of Artificial Sequence: Synthetic oligonucleotide
  Sense strand starting at position 158 of SEQ ID NO: 914727
guaagcuguaugucuguuu

SEQ ID NO: 1026045 - RNA, 19 nt, Artificial Sequence
  Description of Artificial Sequence: Synthetic oligonucleotide
  Antisense strand to SEQ ID NO: 1026044
aaacagacauacagcuuac

SEQ ID NO: 1026046 - RNA, 19 nt, Artificial Sequence
  Description of Artificial Sequence: Synthetic oligonucleotide
  Sense strand starting at position 687 of SEQ ID NO: 914727
gcaggauuauaaucacccu

SEQ ID NO: 1026047 - RNA, 19 nt, Artificial Sequence
  Description of Artificial Sequence: Synthetic oligonucleotide
  Antisense strand to SEQ ID NO: 1026046
agggugauuauaauccugc

SEQ ID NO: 1026048 - RNA, 19 nt, Artificial Sequence
  Description of Artificial Sequence: Synthetic oligonucleotide
  Sense strand starting at position 690 of SEQ ID NO: 914727
ggauuauaaucacccugua

SEQ ID NO: 1026049 - RNA, 19 nt, Artificial Sequence
  Description of Artificial Sequence: Synthetic oligonucleotide
  Antisense strand to SEQ ID NO: 1026048
uacagggugauuauaaucc

SEQ ID NO: 1026050 - RNA, 19 nt, Artificial Sequence
  Description of Artificial Sequence: Synthetic oligonucleotide
  Sense strand starting at position 717 of SEQ ID NO: 914727
uucuuauuacuguggaaua

SEQ ID NO: 1026051 - RNA, 19 nt, Artificial Sequence
  Description of Artificial Sequence: Synthetic oligonucleotide
  Antisense strand to SEQ ID NO: 1026050
uauuccacaguaauaagaa

SEQ ID NO: 1026052 - RNA, 19 nt, Artificial Sequence
  Description of Artificial Sequence: Synthetic oligonucleotide
  Sense strand starting at position 1007 of SEQ ID NO: 914727
aaggaaguucggugaagga

SEQ ID NO: 1026053 - RNA, 19 nt, Artificial Sequence
  Description of Artificial Sequence: Synthetic oligonucleotide
  Antisense strand to SEQ ID NO: 1026052
uccuucaccgaacuuccuu

SEQ ID NO: 1026054 - RNA, 19 nt, Artificial Sequence
  Description of Artificial Sequence: Synthetic oligonucleotide
  Sense strand starting at position 1017 of SEQ ID NO: 914727
ggugaaggauggucuccuu

SEQ ID NO: 1026055 - RNA, 19 nt, Artificial Sequence
  Description of Artificial Sequence: Synthetic oligonucleotide
  Antisense strand to SEQ ID NO: 1026054
aaggagaccauccuucacc

SEQ ID NO: 1026056 - RNA, 19 nt, Artificial Sequence
  Description of Artificial Sequence: Synthetic oligonucleotide
  Sense strand starting at position 1020 of SEQ ID NO: 914727
gaaggauggucuccuuauc

SEQ ID NO: 1026057 - RNA, 19 nt, Artificial Sequence
  Description of Artificial Sequence: Synthetic oligonucleotide
  Antisense strand to SEQ ID NO: 1026056
gauaaggagaccauccuuc

SEQ ID NO: 1026058 - RNA, 19 nt, Artificial Sequence
  Description of Artificial Sequence: Synthetic oligonucleotide
  Sense strand starting at position 1098 of SEQ ID NO: 914727
gccagaauccuuggcagag

SEQ ID NO: 1026059 - RNA, 19 nt, Artificial Sequence
  Description of Artificial Sequence: Synthetic oligonucleotide
  Antisense strand to SEQ ID NO: 1026058
cucugccaaggauucuggc

SEQ ID NO: 1026060 - RNA, 19 nt, Artificial Sequence
  Description of Artificial Sequence: Synthetic oligonucleotide
  Sense strand starting at position 1099 of SEQ ID NO: 914727
ccagaauccuuggcagaga

SEQ ID NO: 1026061 - RNA, 19 nt, Artificial Sequence
  Description of Artificial Sequence: Synthetic oligonucleotide
  Antisense strand to SEQ ID NO: 1026060
ucucugccaaggauucugg

SEQ ID NO: 1026062 - RNA, 19 nt, Artificial Sequence
  Description of Artificial Sequence: Synthetic oligonucleotide
  Sense strand starting at position 1240 of SEQ ID NO: 914727
ggcuuccagucccugagaa

SEQ ID NO: 1026063 - RNA, 19 nt, Artificial Sequence
  Description of Artificial Sequence: Synthetic oligonucleotide
  Antisense strand to SEQ ID NO: 1026062
uucucagggacuggaagcc

SEQ ID NO: 1026064 - RNA, 19 nt, Artificial Sequence
  Description of Artificial Sequence: Synthetic oligonucleotide
  Sense strand starting at position 1241 of SEQ ID NO: 914727
gcuuccagucccugagaaa

SEQ ID NO: 1026065 - RNA, 19 nt, Artificial Sequence
  Description of Artificial Sequence: Synthetic oligonucleotide
  Antisense strand to SEQ ID NO: 1026064
uuucucagggacuggaagc

SEQ ID NO: 1026066 - RNA, 19 nt, Artificial Sequence
  Description of Artificial Sequence: Synthetic oligonucleotide
  Sense strand starting at position 1307 of SEQ ID NO: 914727
gggcuaggaugaucaacuu

SEQ ID NO: 1026067 - RNA, 19 nt, Artificial Sequence
  Description of Artificial Sequence: Synthetic oligonucleotide
  Antisense strand to SEQ ID NO: 1026066
aaguugaucauccuagccc

SEQ ID NO: 1026068 - RNA, 19 nt, Artificial Sequence
  Description of Artificial Sequence: Synthetic oligonucleotide
  Sense strand starting at position 1313 of SEQ ID NO: 914727
ggaugaucaacuuggcaug

SEQ ID NO: 1026069 - RNA, 19 nt, Artificial Sequence
  Description of Artificial Sequence: Synthetic oligonucleotide
  Antisense strand to SEQ ID NO: 1026068
caugccaaguugaucaucc

SEQ ID NO: 1026070 - RNA, 19 nt, Artificial Sequence
  Description of Artificial Sequence: Synthetic oligonucleotide
  Sense strand starting at position 1427 of SEQ ID NO: 914727
cuggaugagcggugugaaa

SEQ ID NO: 1026071 - RNA, 19 nt, Artificial Sequence
  Description of Artificial Sequence: Synthetic oligonucleotide
  Antisense strand to SEQ ID NO: 1026070
uuucacaccgcucauccag

SEQ ID NO: 1026072 - RNA, 19 nt, Artificial Sequence
  Description of Artificial Sequence: Synthetic oligonucleotide
  Sense strand starting at position 1522 of SEQ ID NO: 914727
gguucuggcacauggagau

SEQ ID NO: 1026073 - RNA, 19 nt, Artificial Sequence
  Description of Artificial Sequence: Synthetic oligonucleotide
  Antisense strand to SEQ ID NO: 1026072
aucuccaugugccagaacc

SEQ ID NO: 1026074 - RNA, 19 nt, Artificial Sequence
  Description of Artificial Sequence: Synthetic oligonucleotide
  Sense strand starting at position 2315 of SEQ ID NO: 914727
gugagaagugcgcccuguu

SEQ ID NO: 1026075 - RNA, 19 nt, Artificial Sequence
  Description of Artificial Sequence: Synthetic oligonucleotide
  Antisense strand to SEQ ID NO: 1026074
aacagggcgcacuucucac

SEQ ID NO: 1026076 - RNA, 19 nt, Artificial Sequence
  Description of Artificial Sequence: Synthetic oligonucleotide
  Sense strand starting at position 2499 of SEQ ID NO: 914727
ggcgucagucuccucugua

SEQ ID NO: 1026077 - RNA, 19 nt, Artificial Sequence
  Description of Artificial Sequence: Synthetic oligonucleotide
  Antisense strand to SEQ ID NO: 1026076
uacagaggagacugacgcc

SEQ ID NO: 1026078 - RNA, 19 nt, Artificial Sequence
  Description of Artificial Sequence: Synthetic oligonucleotide
  Sense strand starting at position 2512 of SEQ ID NO: 914727
ucuguaaagucacuuggga

SEQ ID NO: 1026079 - RNA, 19 nt, Artificial Sequence
  Description of Artificial Sequence: Synthetic oligonucleotide
  Antisense strand to SEQ ID NO: 1026078
ucccaagugacuuuacaga

SEQ ID NO: 1026080 - RNA, 19 nt, Artificial Sequence
  Description of Artificial Sequence: Synthetic oligonucleotide
  Sense strand starting at position 2525 of SEQ ID NO: 914727
uugggaggauuagagauaa

SEQ ID NO: 1026081 - RNA, 19 nt, Artificial Sequence
  Description of Artificial Sequence: Synthetic oligonucleotide
  Antisense strand to SEQ ID NO: 1026080
uuaucucuaauccucccaa

SEQ ID NO: 1026082 - RNA, 19 nt, Artificial Sequence
  Description of Artificial Sequence: Synthetic oligonucleotide
  Sense strand starting at position 2728 of SEQ ID NO: 914727
acggucucgcgcucugauu

SEQ ID NO: 1026083 - RNA, 19 nt, Artificial Sequence
  Description of Artificial Sequence: Synthetic oligonucleotide
  Antisense strand to SEQ ID NO: 1026082
aaucagagcgcgagaccgu

SEQ ID NO: 1026084 - RNA, 19 nt, Artificial Sequence
  Description of Artificial Sequence: Synthetic oligonucleotide
  Sense strand starting at position 2741 of SEQ ID NO: 914727
cugauuuccucaccguaug

SEQ ID NO: 1026085 - RNA, 19 nt, Artificial Sequence
  Description of Artificial Sequence: Synthetic oligonucleotide
  Antisense strand to SEQ ID NO: 1026084
cauacggugaggaaaucag

SEQ ID NO: 1026086 - RNA, 19 nt, Artificial Sequence
  Description of Artificial Sequence: Synthetic oligonucleotide
  Sense strand starting at position 2842 of SEQ ID NO: 914727
gggacacgguuucuaaaua

SEQ ID NO: 1026087 - RNA, 19 nt, Artificial Sequence
  Description of Artificial Sequence: Synthetic oligonucleotide
  Antisense strand to SEQ ID NO: 1026086
uauuuagaaaccguguccc

SEQ ID NO: 1026088 - RNA, 19 nt, Artificial Sequence
  Description of Artificial Sequence: Synthetic oligonucleotide
  Sense strand starting at position 2847 of SEQ ID NO: 914727
acgguuucuaaauaagguu

SEQ ID NO: 1026089 - RNA, 19 nt, Artificial Sequence
  Description of Artificial Sequence: Synthetic oligonucleotide
  Antisense strand to SEQ ID NO: 1026088
aaccuuauuuagaaaccgu

SEQ ID NO: 1026090 - RNA, 19 nt, Artificial Sequence
  Description of Artificial Sequence: Synthetic oligonucleotide
  Sense strand starting at position 3032 of SEQ ID NO: 914727
ucaugugacccagguuuga

SEQ ID NO: 1026091 - RNA, 19 nt, Artificial Sequence
  Description of Artificial Sequence: Synthetic oligonucleotide
  Antisense strand to SEQ ID NO: 1026090
ucaaaccugggucacauga

SEQ ID NO: 1026092 - RNA, 19 nt, Artificial Sequence
  Description of Artificial Sequence: Synthetic oligonucleotide
  Sense strand starting at position 3114 of SEQ ID NO: 914727
uuuccagucggccaguaaa

SEQ ID NO: 1026093 - RNA, 19 nt, Artificial Sequence
  Description of Artificial Sequence: Synthetic oligonucleotide
  Antisense strand to SEQ ID NO: 1026092
uuuacuggccgacuggaaa

SEQ ID NO: 1026094 - RNA, 19 nt, Artificial Sequence
  Description of Artificial Sequence: Synthetic oligonucleotide
  Sense strand starting at position 3142 of SEQ ID NO: 914727
gguggauuccuccaccguu

SEQ ID NO: 1026095 - RNA, 19 nt, Artificial Sequence
  Description of Artificial Sequence: Synthetic oligonucleotide
  Antisense strand to SEQ ID NO: 1026094
aacgguggaggaauccacc

SEQ ID NO: 1026096 - RNA, 19 nt, Artificial Sequence
  Description of Artificial Sequence: Synthetic oligonucleotide
  Sense strand starting at position 3257 of SEQ ID NO: 914727
guucuaagaguucagugag

SEQ ID NO: 1026097 - RNA, 19 nt, Artificial Sequence
  Description of Artificial Sequence: Synthetic oligonucleotide
  Antisense strand to SEQ ID NO: 1026096
cucacugaacucuuagaac

SEQ ID NO: 1026098 - RNA, 19 nt, Artificial Sequence
  Description of Artificial Sequence: Synthetic oligonucleotide
  Sense strand starting at position 3271 of SEQ ID NO: 914727
gugagauaauaccuguaaa

SEQ ID NO: 1026099 - RNA, 19 nt, Artificial Sequence
  Description of Artificial Sequence: Synthetic oligonucleotide
  Antisense strand to SEQ ID NO: 1026098
uuuacagguauuaucucac

SEQ ID NO: 1026100 - RNA, 19 nt, Artificial Sequence
  Description of Artificial Sequence: Synthetic oligonucleotide
  Sense strand starting at position 3289 of SEQ ID NO: 914727
aucauuuagcagugucuga

SEQ ID NO: 1026101 - RNA, 19 nt, Artificial Sequence
  Description of Artificial Sequence: Synthetic oligonucleotide
  Antisense strand to SEQ ID NO: 1026100
ucagacacugcuaaaugau

SEQ ID NO: 1026102 - RNA, 19 nt, Artificial Sequence
  Description of Artificial Sequence: Synthetic oligonucleotide
  Sense strand starting at position 3319 of SEQ ID NO: 914727
ugcugaagaacuuggugau

SEQ ID NO: 1026103 - RNA, 19 nt, Artificial Sequence
  Description of Artificial Sequence: Synthetic oligonucleotide
  Antisense strand to SEQ ID NO: 1026102
aucaccaaguucuucagca

SEQ ID NO: 1026104 - RNA, 19 nt, Artificial Sequence
  Description of Artificial Sequence: Synthetic oligonucleotide
  Sense strand starting at position 3320 of SEQ ID NO: 914727
gcugaagaacuuggugauu

SEQ ID NO: 1026105 - RNA, 19 nt, Artificial Sequence
  Description of Artificial Sequence: Synthetic oligonucleotide
  Antisense strand to SEQ ID NO: 1026104
aaucaccaaguucuucagc

SEQ ID NO: 1026106 - RNA, 19 nt, Artificial Sequence
  Description of Artificial Sequence: Synthetic oligonucleotide
  Sense strand starting at position 3605 of SEQ ID NO: 914727
ggaagaaugucugugccac

SEQ ID NO: 1026107 - RNA, 19 nt, Artificial Sequence
  Description of Artificial Sequence: Synthetic oligonucleotide
  Antisense strand to SEQ ID NO: 1026106
guggcacagacauucuucc

SEQ ID NO: 1026108 - RNA, 19 nt, Artificial Sequence
  Description of Artificial Sequence: Synthetic oligonucleotide
  Sense strand starting at position 3664 of SEQ ID NO: 914727
uuauauuggcaacgagacu

SEQ ID NO: 1026109 - RNA, 19 nt, Artificial Sequence
  Description of Artificial Sequence: Synthetic oligonucleotide
  Antisense strand to SEQ ID NO: 1026108
agucucguugccaauauaa

SEQ ID NO: 1026110 - RNA, 19 nt, Artificial Sequence
  Description of Artificial Sequence: Synthetic oligonucleotide
  Sense strand starting at position 3718 of SEQ ID NO: 914727
guauuuggcucugugccua

SEQ ID NO: 1026111 - RNA, 19 nt, Artificial Sequence
  Description of Artificial Sequence: Synthetic oligonucleotide
  Antisense strand to SEQ ID NO: 1026110
uaggcacagagccaaauac

SEQ ID NO: 1026112 - RNA, 19 nt, Artificial Sequence
  Description of Artificial Sequence: Synthetic oligonucleotide
  Sense strand starting at position 3740 of SEQ ID NO: 914727
cuguguuggacacggagaa

SEQ ID NO: 1026113 - RNA, 19 nt, Artificial Sequence
  Description of Artificial Sequence: Synthetic oligonucleotide
  Antisense strand to SEQ ID NO: 1026112
uucuccguguccaacacag

SEQ ID NO: 1026114 - RNA, 19 nt, Artificial Sequence
  Description of Artificial Sequence: Synthetic oligonucleotide
  Sense strand starting at position 3767 of SEQ ID NO: 914727
gucuccagucaucaucaua

SEQ ID NO: 1026115 - RNA, 19 nt, Artificial Sequence
  Description of Artificial Sequence: Synthetic oligonucleotide
  Antisense strand to SEQ ID NO: 1026114
uaugaugaugacuggagac

SEQ ID NO: 1026116 - RNA, 19 nt, Artificial Sequence
  Description of Artificial Sequence: Synthetic oligonucleotide
  Sense strand starting at position 3806 of SEQ ID NO: 914727
ccguuagcuccuuauagag

SEQ ID NO: 1026117 - RNA, 19 nt, Artificial Sequence
  Description of Artificial Sequence: Synthetic oligonucleotide
  Antisense strand to SEQ ID NO: 1026116
cucuauaaggagcuaacgg

SEQ ID NO: 1026118 - RNA, 19 nt, Artificial Sequence
  Description of Artificial Sequence: Synthetic oligonucleotide
  Sense strand starting at position 3943 of SEQ ID NO: 914727
gcuggaaaucaauguacuc

SEQ ID NO: 1026119 - RNA, 19 nt, Artificial Sequence
  Description of Artificial Sequence: Synthetic oligonucleotide
  Antisense strand to SEQ ID NO: 1026118
gaguacauugauuuccagc

SEQ ID NO: 1026120 - RNA, 19 nt, Artificial Sequence
  Description of Artificial Sequence: Synthetic oligonucleotide
  Sense strand starting at position 3955 of SEQ ID NO: 914727
uguacucagcaauaggauu

SEQ ID NO: 1026121 - RNA, 19 nt, Artificial Sequence
  Description of Artificial Sequence: Synthetic oligonucleotide
  Antisense strand to SEQ ID NO: 1026120
aauccuauugcugaguaca

SEQ ID NO: 1026122 - RNA, 19 nt, Artificial Sequence
  Description of Artificial Sequence: Synthetic oligonucleotide
  Sense strand starting at position 157 of SEQ ID NO: 914728
ccaggugugaaaugguaaa

SEQ ID NO: 1026123 - RNA, 19 nt, Artificial Sequence
  Description of Artificial Sequence: Synthetic oligonucleotide
  Antisense strand to SEQ ID NO: 1026122
uuuaccauuucacaccugg

SEQ ID NO: 1026124 - RNA, 19 nt, Artificial Sequence
  Description of Artificial Sequence: Synthetic oligonucleotide
  Sense strand starting at position 236 of SEQ ID NO: 914728
gaugucauucuggauguuu

SEQ ID NO: 1026125 - RNA, 19 nt, Artificial Sequence
  Description of Artificial Sequence: Synthetic oligonucleotide
  Antisense strand to SEQ ID NO: 1026124
aaacauccagaaugacauc

SEQ ID NO: 1026126 - RNA, 19 nt, Artificial Sequence
  Description of Artificial Sequence: Synthetic oligonucleotide
  Sense strand starting at position 349 of SEQ ID NO: 914728
cagggcuaucugggagauu

SEQ ID NO: 1026127 - RNA, 19 nt, Artificial Sequence
  Description of Artificial Sequence: Synthetic oligonucleotide
  Antisense strand to SEQ ID NO: 1026126
aaucucccagauagcccug

SEQ ID NO: 1026128 - RNA, 19 nt, Artificial Sequence
  Description of Artificial Sequence: Synthetic oligonucleotide
  Sense strand starting at position 352 of SEQ ID NO: 914728
ggcuaucugggagauuggu

SEQ ID NO: 1026129 - RNA, 19 nt, Artificial Sequence
  Description of Artificial Sequence: Synthetic oligonucleotide
  Antisense strand to SEQ ID NO: 1026128
accaaucucccagauagcc

SEQ ID NO: 1026130 - RNA, 19 nt, Artificial Sequence
  Description of Artificial Sequence: Synthetic oligonucleotide
  Sense strand starting at position 686 of SEQ ID NO: 914728
auaucugucucaucuggga

SEQ ID NO: 1026131 - RNA, 19 nt, Artificial Sequence
  Description of Artificial Sequence: Synthetic oligonucleotide
  Antisense strand to SEQ ID NO: 1026130
ucccagaugagacagauau

SEQ ID NO: 1026132 - RNA, 19 nt, Artificial Sequence
  Description of Artificial Sequence: Synthetic oligonucleotide
  Sense strand starting at position 718 of SEQ ID NO: 914728
uacacugcuuaugugaaga

SEQ ID NO: 1026133 - RNA, 19 nt, Artificial Sequence
  Description of Artificial Sequence: Synthetic oligonucleotide
  Antisense strand to SEQ ID NO: 1026132
ucuucacauaagcagugua

SEQ ID NO: 1026134 - RNA, 19 nt, Artificial Sequence
  Description of Artificial Sequence: Synthetic oligonucleotide
  Sense strand starting at position 916 of SEQ ID NO: 914728
aaggguguaucucucaaag

SEQ ID NO: 1026135 - RNA, 19 nt, Artificial Sequence
  Description of Artificial Sequence: Synthetic oligonucleotide
  Antisense strand to SEQ ID NO: 1026134
cuuugagagauacacccuu

SEQ ID NO: 1026136 - RNA, 19 nt, Artificial Sequence
  Description of Artificial Sequence: Synthetic oligonucleotide
  Sense strand starting at position 962 of SEQ ID NO: 914728
aagguaaaucuaggucuca

SEQ ID NO: 1026137 - RNA, 19 nt, Artificial Sequence
  Description of Artificial Sequence: Synthetic oligonucleotide
  Antisense strand to SEQ ID NO: 1026136
ugagaccuagauuuaccuu

SEQ ID NO: 1026138 - RNA, 19 nt, Artificial Sequence
  Description of Artificial Sequence: Synthetic oligonucleotide
  Sense strand starting at position 963 of SEQ ID NO: 914728
agguaaaucuaggucucaa

SEQ ID NO: 1026139 - RNA, 19 nt, Artificial Sequence
  Description of Artificial Sequence: Synthetic oligonucleotide
  Antisense strand to SEQ ID NO: 1026138
uugagaccuagauuuaccu

SEQ ID NO: 1026140 - RNA, 19 nt, Artificial Sequence
  Description of Artificial Sequence: Synthetic oligonucleotide
  Sense strand starting at position 1010 of SEQ ID NO: 914728
uccucaucacaauggugau

SEQ ID NO: 1026141 - RNA, 19 nt, Artificial Sequence
  Description of Artificial Sequence: Synthetic oligonucleotide
  Antisense strand to SEQ ID NO: 1026140
aucaccauugugaugagga

SEQ ID NO: 1026142 - RNA, 19 nt, Artificial Sequence
  Description of Artificial Sequence: Synthetic oligonucleotide
  Sense strand starting at position 1213 of SEQ ID NO: 914728
agaagcuccugauuauauc

SEQ ID NO: 1026143 - RNA, 19 nt, Artificial Sequence
  Description of Artificial Sequence: Synthetic oligonucleotide
  Antisense strand to SEQ ID NO: 1026142
gauauaaucaggagcuucu

SEQ ID NO: 1026144 - RNA, 19 nt, Artificial Sequence
  Description of Artificial Sequence: Synthetic oligonucleotide
  Sense strand starting at position 1265 of SEQ ID NO: 914728
uauucuugagucuaugguu

SEQ ID NO: 1026145 - RNA, 19 nt, Artificial Sequence
  Description of Artificial Sequence: Synthetic oligonucleotide
  Antisense strand to SEQ ID NO: 1026144
aaccauagacucaagaaua

SEQ ID NO: 1026146 - RNA, 19 nt, Artificial Sequence
  Description of Artificial Sequence: Synthetic oligonucleotide
  Sense strand starting at position 1359 of SEQ ID NO: 914728
ugccuauuaugugucauuu

SEQ ID NO: 1026147 - RNA, 19 nt, Artificial Sequence
  Description of Artificial Sequence: Synthetic oligonucleotide
  Antisense strand to SEQ ID NO: 1026146
aaaugacacauaauaggca

SEQ ID NO: 1026148 - RNA, 19 nt, Artificial Sequence
  Description of Artificial Sequence: Synthetic oligonucleotide
  Sense strand starting at position 1412 of SEQ ID NO: 914728
cuaggcauauugguaauau

SEQ ID NO: 1026149 - RNA, 19 nt, Artificial Sequence
  Description of Artificial Sequence: Synthetic oligonucleotide
  Antisense strand to SEQ ID NO: 1026148
auauuaccaauaugccuag

SEQ ID NO: 1026150 - RNA, 19 nt, Artificial Sequence
  Description of Artificial Sequence: Synthetic oligonucleotide
  Sense strand starting at position 1421 of SEQ ID NO: 914728
uugguaauauugguaaaug

SEQ ID NO: 1026151 - RNA, 19 nt, Artificial Sequence
  Description of Artificial Sequence: Synthetic oligonucleotide
  Antisense strand to SEQ ID NO: 1026150
cauuuaccaauauuaccaa

SEQ ID NO: 1026152 - RNA, 19 nt, Artificial Sequence
  Description of Artificial Sequence: Synthetic oligonucleotide
  Sense strand starting at position 1437 of SEQ ID NO: 914728
augguaaauaucggagaau

SEQ ID NO: 1026153 - RNA, 19 nt, Artificial Sequence
  Description of Artificial Sequence: Synthetic oligonucleotide
  Antisense strand to SEQ ID NO: 1026152
auucuccgauauuuaccau

SEQ ID NO: 1026154 - RNA, 19 nt, Artificial Sequence
  Description of Artificial Sequence: Synthetic oligonucleotide
  Sense strand starting at position 1462 of SEQ ID NO: 914728
gagauauauuuagggaaua

SEQ ID NO: 1026155 - RNA, 19 nt, Artificial Sequence
  Description of Artificial Sequence: Synthetic oligonucleotide
  Antisense strand to SEQ ID NO: 1026154
uauucccuaaauauaucuc

SEQ ID NO: 1026156 - RNA, 19 nt, Artificial Sequence
  Description of Artificial Sequence: Synthetic oligonucleotide
  Sense strand starting at position 1498 of SEQ ID NO: 914728
gcuggugugacaggagaua

SEQ ID NO: 1026157 - RNA, 19 nt, Artificial Sequence
  Description of Artificial Sequence: Synthetic oligonucleotide
  Antisense strand to SEQ ID NO: 1026156
uaucuccugucacaccagc

SEQ ID NO: 1026158 - RNA, 19 nt, Artificial Sequence
  Description of Artificial Sequence: Synthetic oligonucleotide
  Sense strand starting at position 1569 of SEQ ID NO: 914728
acuaguagacccugggauu

SEQ ID NO: 1026159 - RNA, 19 nt, Artificial Sequence
  Description of Artificial Sequence: Synthetic oligonucleotide
  Antisense strand to SEQ ID NO: 1026158
aaucccagggucuacuagu

SEQ ID NO: 1026160 - RNA, 19 nt, Artificial Sequence
  Description of Artificial Sequence: Synthetic oligonucleotide
  Sense strand starting at position 1570 of SEQ ID NO: 914728
cuaguagacccugggauua

SEQ ID NO: 1026161 - RNA, 19 nt, Artificial Sequence
  Description of Artificial Sequence: Synthetic oligonucleotide
  Antisense strand to SEQ ID NO: 1026160
uaaucccagggucuacuag

SEQ ID NO: 1026162 - RNA, 19 nt, Artificial Sequence
  Description of Artificial Sequence: Synthetic oligonucleotide
  Sense strand starting at position 1582 of SEQ ID NO: 914728
gggauuaaggcuuagguau

SEQ ID NO: 1026163 - RNA, 19 nt, Artificial Sequence
  Description of Artificial Sequence: Synthetic oligonucleotide
  Antisense strand to SEQ ID NO: 1026162
auaccuaagccuuaauccc

SEQ ID NO: 1026164 - RNA, 19 nt, Artificial Sequence
  Description of Artificial Sequence: Synthetic oligonucleotide
  Sense strand starting at position 1588 of SEQ ID NO: 914728
aaggcuuagguauaguuua

SEQ ID NO: 1026165 - RNA, 19 nt, Artificial Sequence
  Description of Artificial Sequence: Synthetic oligonucleotide
  Antisense strand to SEQ ID NO: 1026164
uaaacuauaccuaagccuu

SEQ ID NO: 1026166 - RNA, 19 nt, Artificial Sequence
  Description of Artificial Sequence: Synthetic oligonucleotide
  Sense strand starting at position 1731 of SEQ ID NO: 914728
ucacgaaucucaucaagua

SEQ ID NO: 1026167 - RNA, 19 nt, Artificial Sequence
  Description of Artificial Sequence: Synthetic oligonucleotide
  Antisense strand to SEQ ID NO: 1026166
uacuugaugagauucguga

SEQ ID NO: 1026168 - RNA, 19 nt, Artificial Sequence
  Description of Artificial Sequence: Synthetic oligonucleotide
  Sense strand starting at position 1798 of SEQ ID NO: 914728
uuuaaauggugacuccuaa

SEQ ID NO: 1026169 - RNA, 19 nt, Artificial Sequence
  Description of Artificial Sequence: Synthetic oligonucleotide
  Antisense strand to SEQ ID NO: 1026168
uuaggagucaccauuuaaa

SEQ ID NO: 1026170 - RNA, 19 nt, Artificial Sequence
  Description of Artificial Sequence: Synthetic oligonucleotide
  Sense strand starting at position 1935 of SEQ ID NO: 914728
cucgccuuugucucaguua

SEQ ID NO: 1026171 - RNA, 19 nt, Artificial Sequence
  Description of Artificial Sequence: Synthetic oligonucleotide
  Antisense strand to SEQ ID NO: 1026170
uaacugagacaaaggcgag

SEQ ID NO: 1026172 - RNA, 19 nt, Artificial Sequence
  Description of Artificial Sequence: Synthetic oligonucleotide
  Sense strand starting at position 2010 of SEQ ID NO: 914728
uuaucaucugaauggcuaa

SEQ ID NO: 1026173 - RNA, 19 nt, Artificial Sequence
  Description of Artificial Sequence: Synthetic oligonucleotide
  Antisense strand to SEQ ID NO: 1026172
uuagccauucagaugauaa

SEQ ID NO: 1026174 - RNA, 19 nt, Artificial Sequence
  Description of Artificial Sequence: Synthetic oligonucleotide
  Sense strand starting at position 2121 of SEQ ID NO: 914728
acaaacugugccuaaugaa

SEQ ID NO: 1026175 - RNA, 19 nt, Artificial Sequence
  Description of Artificial Sequence: Synthetic oligonucleotide
  Antisense strand to SEQ ID NO: 1026174
uucauuaggcacaguuugu

SEQ ID NO: 1026176 - RNA, 19 nt, Artificial Sequence
  Description of Artificial Sequence: Synthetic oligonucleotide
  Sense strand starting at position 2134 of SEQ ID NO: 914728
aaugaauucuggccagagc

SEQ ID NO: 1026177 - RNA, 19 nt, Artificial Sequence
  Description of Artificial Sequence: Synthetic oligonucleotide
  Antisense strand to SEQ ID NO: 1026176
gcucuggccagaauucauu

SEQ ID NO: 1026178 - RNA, 19 nt, Artificial Sequence
  Description of Artificial Sequence: Synthetic oligonucleotide
  Sense strand starting at position 2137 of SEQ ID NO: 914728
gaauucuggccagagccaa

SEQ ID NO: 1026179 - RNA, 19 nt, Artificial Sequence
  Description of Artificial Sequence: Synthetic oligonucleotide
  Antisense strand to SEQ ID NO: 1026178
uuggcucuggccagaauuc

SEQ ID NO: 1026180 - RNA, 19 nt, Artificial Sequence
  Description of Artificial Sequence: Synthetic oligonucleotide
  Sense strand starting at position 2184 of SEQ ID NO: 914728
ccuauugaugcacagcaga

SEQ ID NO: 1026181 - RNA, 19 nt, Artificial Sequence
  Description of Artificial Sequence: Synthetic oligonucleotide
  Antisense strand to SEQ ID NO: 1026180
ucugcugugcaucaauagg

SEQ ID NO: 1026182 - RNA, 19 nt, Artificial Sequence
  Description of Artificial Sequence: Synthetic oligonucleotide
  Sense strand starting at position 2187 of SEQ ID NO: 914728
auugaugcacagcagaaau

SEQ ID NO: 1026183 - RNA, 19 nt, Artificial Sequence
  Description of Artificial Sequence: Synthetic oligonucleotide
  Antisense strand to SEQ ID NO: 1026182
auuucugcugugcaucaau

SEQ ID NO: 1026184 - RNA, 19 nt, Artificial Sequence
  Description of Artificial Sequence: Synthetic oligonucleotide
  Sense strand starting at position 2239 of SEQ ID NO: 914728
aaauaaguauacucgcaga

SEQ ID NO: 1026185 - RNA, 19 nt, Artificial Sequence
  Description of Artificial Sequence: Synthetic oligonucleotide
  Antisense strand to SEQ ID NO: 1026184
ucugcgaguauacuuauuu

SEQ ID NO: 1026186 - RNA, 19 nt, Artificial Sequence
  Description of Artificial Sequence: Synthetic oligonucleotide
  Sense strand starting at position 2244 of SEQ ID NO: 914728
aguauacucgcagaaacaa

SEQ ID NO: 1026187 - RNA, 19 nt, Artificial Sequence
  Description of Artificial Sequence: Synthetic oligonucleotide
  Antisense strand to SEQ ID NO: 1026186
uuguuucugcgaguauacu

SEQ ID NO: 1026188 - RNA, 19 nt, Artificial Sequence
  Description of Artificial Sequence: Synthetic oligonucleotide
  Sense strand starting at position 2298 of SEQ ID NO: 914728
uugcuuacacucuagugaa

SEQ ID NO: 1026189 - RNA, 19 nt, Artificial Sequence
  Description of Artificial Sequence: Synthetic oligonucleotide
  Antisense strand to SEQ ID NO: 1026188
uucacuagaguguaagcaa

SEQ ID NO: 1026190 - RNA, 19 nt, Artificial Sequence
  Description of Artificial Sequence: Synthetic oligonucleotide
  Sense strand starting at position 2314 of SEQ ID NO: 914728
gaaugcuaucaacggaucu

SEQ ID NO: 1026191 - RNA, 19 nt, Artificial Sequence
  Description of Artificial Sequence: Synthetic oligonucleotide
  Antisense strand to SEQ ID NO: 1026190
agauccguugauagcauuc

SEQ ID NO: 1026192 - RNA, 19 nt, Artificial Sequence
  Description of Artificial Sequence: Synthetic oligonucleotide
  Sense strand starting at position 2914 of SEQ ID NO: 914728
uuagacauccuccauaguu

SEQ ID NO: 1026193 - RNA, 19 nt, Artificial Sequence
  Description of Artificial Sequence: Synthetic oligonucleotide
  Antisense strand to SEQ ID NO: 1026192
aacuauggaggaugucuaa

SEQ ID NO: 1026194 - RNA, 19 nt, Artificial Sequence
  Description of Artificial Sequence: Synthetic oligonucleotide
  Sense strand starting at position 3032 of SEQ ID NO: 914728
aggguaugauuaucccagu

SEQ ID NO: 1026195 - RNA, 19 nt, Artificial Sequence
  Description of Artificial Sequence: Synthetic oligonucleotide
  Antisense strand to SEQ ID NO: 1026194
acugggauaaucauacccu

SEQ ID NO: 1026196 - RNA, 19 nt, Artificial Sequence
  Description of Artificial Sequence: Synthetic oligonucleotide
  Sense strand starting at position 3156 of SEQ ID NO: 914728
guagguacccuugaguaac

SEQ ID NO: 1026197 - RNA, 19 nt, Artificial Sequence
  Description of Artificial Sequence: Synthetic oligonucleotide
  Antisense strand to SEQ ID NO: 1026196
guuacucaaggguaccuac

SEQ ID NO: 1026198 - RNA, 19 nt, Artificial Sequence
  Description of Artificial Sequence: Synthetic oligonucleotide
  Sense strand starting at position 3231 of SEQ ID NO: 914728
ggaaucaacuugucaauau

SEQ ID NO: 1026199 - RNA, 19 nt, Artificial Sequence
  Description of Artificial Sequence: Synthetic oligonucleotide
  Antisense strand to SEQ ID NO: 1026198
auauugacaaguugauucc

SEQ ID NO: 1026200 - RNA, 19 nt, Artificial Sequence
  Description of Artificial Sequence: Synthetic oligonucleotide
  Sense strand starting at position 3641 of SEQ ID NO: 914728
ugggauuauauugguaaau

SEQ ID NO: 1026201 - RNA, 19 nt, Artificial Sequence
  Description of Artificial Sequence: Synthetic oligonucleotide
  Antisense strand to SEQ ID NO: 1026200
auuuaccaauauaauccca

SEQ ID NO: 1026202 - RNA, 19 nt, Artificial Sequence
  Description of Artificial Sequence: Synthetic oligonucleotide
  Sense strand starting at position 11 of SEQ ID NO: 914729
cgauaagucaaauguagau

SEQ ID NO: 1026203 - RNA, 19 nt, Artificial Sequence
  Description of Artificial Sequence: Synthetic oligonucleotide
  Antisense strand to SEQ ID NO: 1026202
aucuacauuugacuuaucg

SEQ ID NO: 1026204 - RNA, 19 nt, Artificial Sequence
  Description of Artificial Sequence: Synthetic oligonucleotide
  Sense strand starting at position 71 of SEQ ID NO: 914729
caagguucuuuaguguaua

SEQ ID NO: 1026205 - RNA, 19 nt, Artificial Sequence
  Description of Artificial Sequence: Synthetic oligonucleotide
  Antisense strand to SEQ ID NO: 1026204
uauacacuaaagaaccuug

SEQ ID NO: 1026206 - RNA, 19 nt, Artificial Sequence
  Description of Artificial Sequence: Synthetic oligonucleotide
  Sense strand starting at position 198 of SEQ ID NO: 914729
agcucuucgggacaaaguu

SEQ ID NO: 1026207 - RNA, 19 nt, Artificial Sequence
  Description of Artificial Sequence: Synthetic oligonucleotide
  Antisense strand to SEQ ID NO: 1026206
aacuuugucccgaagagcu

SEQ ID NO: 1026208 - RNA, 19 nt, Artificial Sequence
  Description of Artificial Sequence: Synthetic oligonucleotide
  Sense strand starting at position 442 of SEQ ID NO: 914729
ugugcuaaauccuuagauu

SEQ ID NO: 1026209 - RNA, 19 nt, Artificial Sequence
  Description of Artificial Sequence: Synthetic oligonucleotide
  Antisense strand to SEQ ID NO: 1026208
aaucuaaggauuuagcaca

SEQ ID NO: 1026210 - RNA, 19 nt, Artificial Sequence
  Description of Artificial Sequence: Synthetic oligonucleotide
  Sense strand starting at position 553 of SEQ ID NO: 914729
gucacuuccucaguccaga

SEQ ID NO: 1026211 - RNA, 19 nt, Artificial Sequence
  Description of Artificial Sequence: Synthetic oligonucleotide
  Antisense strand to SEQ ID NO: 1026210
ucuggacugaggaagugac

SEQ ID NO: 1026212 - RNA, 19 nt, Artificial Sequence
  Description of Artificial Sequence: Synthetic oligonucleotide
  Sense strand starting at position 574 of SEQ ID NO: 914729
ccagaagucccuugauucu

SEQ ID NO: 1026213 - RNA, 19 nt, Artificial Sequence
  Description of Artificial Sequence: Synthetic oligonucleotide
  Antisense strand to SEQ ID NO: 1026212
agaaucaagggacuucugg

SEQ ID NO: 1026214 - RNA, 19 nt, Artificial Sequence
  Description of Artificial Sequence: Synthetic oligonucleotide
  Sense strand starting at position 577 of SEQ ID NO: 914729
gaagucccuugauucugau

SEQ ID NO: 1026215 - RNA, 19 nt, Artificial Sequence
  Description of Artificial Sequence: Synthetic oligonucleotide
  Antisense strand to SEQ ID NO: 1026214
aucagaaucaagggacuuc

SEQ ID NO: 1026216 - RNA, 19 nt, Artificial Sequence
  Description of Artificial Sequence: Synthetic oligonucleotide
  Sense strand starting at position 739 of SEQ ID NO: 914729
gggagugaucccggaguuc

SEQ ID NO: 1026217 - RNA, 19 nt, Artificial Sequence
  Description of Artificial Sequence: Synthetic oligonucleotide
  Antisense strand to SEQ ID NO: 1026216
gaacuccgggaucacuccc

SEQ ID NO: 1026218 - RNA, 19 nt, Artificial Sequence
  Description of Artificial Sequence: Synthetic oligonucleotide
  Sense strand starting at position 884 of SEQ ID NO: 914729
ggccaaaucucaguaacug

SEQ ID NO: 1026219 - RNA, 19 nt, Artificial Sequence
  Description of Artificial Sequence: Synthetic oligonucleotide
  Antisense strand to SEQ ID NO: 1026218
caguuacugagauuuggcc

SEQ ID NO: 1026220 - RNA, 19 nt, Artificial Sequence
  Description of Artificial Sequence: Synthetic oligonucleotide
  Sense strand starting at position 1058 of SEQ ID NO: 914729
cagcgaucucaguaaacac

SEQ ID NO: 1026221 - RNA, 19 nt, Artificial Sequence
  Description of Artificial Sequence: Synthetic oligonucleotide
  Antisense strand to SEQ ID NO: 1026220
guguuuacugagaucgcug

SEQ ID NO: 1026222 - RNA, 19 nt, Artificial Sequence
  Description of Artificial Sequence: Synthetic oligonucleotide
  Sense strand starting at position 2470 of SEQ ID NO: 914729
gcaagaagcuccuuaacuc

SEQ ID NO: 1026223 - RNA, 19 nt, Artificial Sequence
  Description of Artificial Sequence: Synthetic oligonucleotide
  Antisense strand to SEQ ID NO: 1026222
gaguuaaggagcuucuugc

SEQ ID NO: 1026224 - RNA, 19 nt, Artificial Sequence
  Description of Artificial Sequence: Synthetic oligonucleotide
  Sense strand starting at position 2597 of SEQ ID NO: 914729
agggcaagggcuuguacaa

SEQ ID NO: 1026225 - RNA, 19 nt, Artificial Sequence
  Description of Artificial Sequence: Synthetic oligonucleotide
  Antisense strand to SEQ ID NO: 1026224
uuguacaagcccuugcccu

SEQ ID NO: 1026226 - RNA, 19 nt, Artificial Sequence
  Description of Artificial Sequence: Synthetic oligonucleotide
  Sense strand starting at position 2716 of SEQ ID NO: 914729
ccucucauugccuggaaac

SEQ ID NO: 1026227 - RNA, 19 nt, Artificial Sequence
  Description of Artificial Sequence: Synthetic oligonucleotide
  Antisense strand to SEQ ID NO: 1026226
guuuccaggcaaugagagg

SEQ ID NO: 1026228 - RNA, 19 nt, Artificial Sequence
  Description of Artificial Sequence: Synthetic oligonucleotide
  Sense strand starting at position 2718 of SEQ ID NO: 914729
ucucauugccuggaaacca
